United States Patent Application Publication US 2021/0199660 A1 - sequence listing, part 59

SEQ ID NO: 848417 - DNA, 120 bp, Artificial Sequence
  ENSG00000235819_6 (sequence is synthesized)
aactcagagcaaaatctataactcaggtggcagagaggagaagcagctggacatcggagactatggctggacattggagagaagtggtttgacttcagagggacagcttgacagtgaaga

SEQ ID NO: 848418 - DNA, 120 bp, Artificial Sequence
  ENSG00000235819_7 (sequence is synthesized)
attcggccagagatagctggacttcaggggaagatgatctttccgcctcatccccctttcagctccccttcctgctgagagacactttaatcggcaataaaatcccccatgtttaccatc

SEQ ID NO: 848419 - DNA, 120 bp, Artificial Sequence
  ENSG00000235819_8 (sequence is synthesized)
actgtccatcttgccttcaggataatgtgaaatatggcctaatttttgaagtttttttcttagaaattttactgaatccaaaataaaacaagaagatcatgagtccagaattctcttttc

SEQ ID NO: 848420 - DNA, 120 bp, Artificial Sequence
  ENSG00000235819_9 (sequence is synthesized)
tgtccattaacatgatgatgacatgtgaaaatgtttatggatgaattttaaattaaaatgtcaagctataaaattttatatggagtaagatctcatcttggttggaagaaaaacacattc

SEQ ID NO: 848421 - DNA, 120 bp, Artificial Sequence
  ENSG00000248417_0 (sequence is synthesized)
attgcctggggtcacccaattaatttacaactgtagcaggcggacactgattttggctattgatatgaagcacactgatctcatgcaaagaactgtgcagctggtgccatgggagaagac

SEQ ID NO: 848422 - DNA, 120 bp, Artificial Sequence
  ENSG00000248417_1 (sequence is synthesized)
tagacaatgtttataattagcactattttccctttaattttaaataaagcatgttagttgtgagtgccatgccaacatattttctacagatgctataaacaatgcacaatcagaaatcca

SEQ ID NO: 848423 - DNA, 120 bp, Artificial Sequence
  ENSG00000248416_0 (sequence is synthesized)
cgcttgcagtcctgggcagacagcagcccccaccatcctcacagctgctggggaagggagcaaggcccagagaccccttgatccctggacgccccacacgcctcctccctctgctgactc

SEQ ID NO: 848424 - DNA, 120 bp, Artificial Sequence
  ENSG00000248416_1 (sequence is synthesized)
cactctgccctgtccccggaatgcgctgcggccatggagaccacaggccttctggggagccagccagcctgcggtgccgtggggcctgacgcgtcacacaccagacctgggtcacagggg

SEQ ID NO: 848425 - DNA, 120 bp, Artificial Sequence
  ENSG00000248416_2 (sequence is synthesized)
catccagccagcagcctccgctcctgcgtcttgagggtcttccaggaatctgccctacaaggccccctcacctggggctcagacacccccaaaacactccgcacgccagccacgccgctg

SEQ ID NO: 848426 - DNA, 120 bp, Artificial Sequence
  ENSG00000248416_3 (sequence is synthesized)
cctggggcagcctccagctcctgtcatttagctgcgggatgctgggaggagctgctgttctgagtcgcgcctgcagcacacagccgtctggataacacagtagcttctgctttttgtttt

SEQ ID NO: 848427 - DNA, 120 bp, Artificial Sequence
  ENSG00000233695_0 (sequence is synthesized)
ggctgtacctgggtgctgtgtccgcggggcgtctggagacgtcgatgtggtcatagcagggcctggaacggggaggtctggcctgaactagagaaatgaggggcgtatccgcttctccac

SEQ ID NO: 848428 - DNA, 120 bp, Artificial Sequence
  ENSG00000233695_1 (sequence is synthesized)
cctggcctcagatgaagaggctctgggggcaggagggagtcagacacgtgcagggcaggcggcctgtgcagggcccaaccctccggcaccagaacctgacctcctcagaggcccccacca

SEQ ID NO: 848429 - DNA, 120 bp, Artificial Sequence
  ENSG00000233695_2 (sequence is synthesized)
tggagggatgtctgggggatgctgtgcgctgccgctacgatgtttggttagagattaaagccatttcagaagtggacacctgcccatgtgatgcaaagggctgggaacccggtcttgact

SEQ ID NO: 848430 - DNA, 120 bp, Artificial Sequence
  ENSG00000233695_3 (sequence is synthesized)
ttgcctggaatgcctttcggaaagacctctgtccctgaggctgagggacagtgcctgctcctgccaggtgcccagctcttaagcggtccccagactcatgccacctgccccggggcctcc

SEQ ID NO: 848431 - DNA, 120 bp, Artificial Sequence
  ENSG00000233695_4 (sequence is synthesized)
cccaactcatttgtttatttccctgttgggaatgtattgatacctctaggatgcaaggacggaaccacacctgaggggtggacagtcagccggtgcccagcaaatatctgtggaatttcc

SEQ ID NO: 848432 - DNA, 120 bp, Artificial Sequence
  ENSG00000233695_5 (sequence is synthesized)
tccacacaacagggaaagcgatggagacagaaacctctgcaggcccccgagggcacccacttccctgaccccgtccacctccctgacccccgcccacctccctgatccccatcccgcaag

SEQ ID NO: 848433 - DNA, 120 bp, Artificial Sequence
  ENSG00000233695_6 (sequence is synthesized)
ctgggcctagggtatcggtggcctggctggtcatgccctgggcgccagcgcctgttcaggaggtgaagggtttatctcagcttggcccatgactgcgttgaaggacaggagggagcggct

SEQ ID NO: 848434 - DNA, 120 bp, Artificial Sequence
  ENSG00000233695_7 (sequence is synthesized)
ctgaagccggtgcgggcggccagggcctttccctgggtggtgacgagcgaggaccagagccctgtctgcccgagggaagggcgaggggacactccccgtggcgggggtgggatcccggta

SEQ ID NO: 848435 - DNA, 120 bp, Artificial Sequence
  ENSG00000233695_8 (sequence is synthesized)
gccggggctcagtgaccgctgcctgggccaccgcctgtggggacctgaccttcctggggaaacccatgggtcaaaggagccgagaaatccaagcaccaagtggccgctatggcaggacgg

SEQ ID NO: 848436 - DNA, 120 bp, Artificial Sequence
  ENSG00000233695_9 (sequence is synthesized)
gcgcgttcgcagtggagaagctgggtgtgtccgtgggaaaggaaagaaatggaagcagaggctcttcaggggcacctgggaacgcagcctacactcttcccaggcctcctccctccgtcc

SEQ ID NO: 848437 - DNA, 120 bp, Artificial Sequence
  ENSG00000233695_10 (sequence is synthesized)
actgtgccgcctgggtcctgggacagcctgagggccgcaggctcccatgcaaggcccgctgggggcctgcttgtctggggctgaatttggactttatggggctatggctttaatttcaca

SEQ ID NO: 848438 - DNA, 120 bp, Artificial Sequence
  ENSG00000233695_11 (sequence is synthesized)
atgaccgataaccagtgaactgaagccaggacagcaccgtgagcaccaagtcagagaattttcacgagggaaccaatgaacaggaacagagtgtgaggctgccccagctgcatcctccgg

SEQ ID NO: 848439 - DNA, 120 bp, Artificial Sequence
  ENSG00000233695_12 (sequence is synthesized)
gaggcgccttcccaagggagtgcaaggctgcctgctgtggccaggccaccaaagcaccttcttcaccgccaggcatcttttgaggcacgcgaacatcagaggccccagccacgtgctctg

SEQ ID NO: 848440 - DNA, 120 bp, Artificial Sequence
  ENSG00000233695_13 (sequence is synthesized)
gaggagaagctgagagccccaggccacaggcagggcagcctctgagggccggctcagggagagtggccggagcttctggcctggggcaggtggacccgttagaaactgcatgtgttgcct

SEQ ID NO: 848441 - DNA, 120 bp, Artificial Sequence
  ENSG00000233695_14 (sequence is synthesized)
ctggcaccagccacagcaagagattctcttcctatcacacagggaacaaactcaaggatcttgaccttgccctcctctccccagctggccgcacttggggacgctgatgccacaaaggaa

SEQ ID NO: 848442 - DNA, 120 bp, Artificial Sequence
  ENSG00000233695_15 (sequence is synthesized)
cgtgtaagaagtgccttttgcctcccaccgtgattctgaggcctccccaaccatgtgcaattgcacaggcccaggctgaagaggaaagacaagagccgccctgcccagaaacgtccacat

SEQ ID NO: 848443 - DNA, 120 bp, Artificial Sequence
  ENSG00000233695_16 (sequence is synthesized)
gtgggtactgcattcctaccggtgtgacagcttgaggcccccacgcccgtcacagtggcaggtgtagctccctggggagttcacgcagacctgctcacagcggccctgcagacactcgtc

SEQ ID NO: 848444 - DNA, 120 bp, Artificial Sequence
  ENSG00000233695_17 (sequence is synthesized)
cacatctgccagccagagggaagcggcggtgagccggggaggcctctacgctgtcccgccgtgggatcacaccgcgattgctcaaaccacacgcaaggtcctgccatcagaggagagctc

SEQ ID NO: 848445 - DNA, 120 bp, Artificial Sequence
  ENSG00000233695_18 (sequence is synthesized)
gaagccgctgtggcaggaacagtggaagctacccggcttgttgtggcagatctggaggcagcccccgttctcctggctgcattcgttgacatctgggaacaagcacaggcctgaagggga

SEQ ID NO: 848446 - DNA, 120 bp, Artificial Sequence
  ENSG00000233695_19 (sequence is synthesized)
gcccaagggtgcacagcccctggctacggaggaggctgcaggccaggagtgacctctgggtgccgaggacagacaaggccaggccagagctggccactccttagcaaagccctcccaggc

SEQ ID NO: 848447 - DNA, 120 bp, Artificial Sequence
  ENSG00000233695_20 (sequence is synthesized)
cacctgtggggtaggatttgccaaaggggacaggctggcctgctgggctctccactatgggtctccaccaggccctggagctattcttcctccagggtcttcactgacaccacaggtcta

SEQ ID NO: 848448 - DNA, 120 bp, Artificial Sequence
  ENSG00000233695_21 (sequence is synthesized)
cactgaaggacggtcagaggtgaaatctccccccggcctttcaatcagtgggtgccactgacaccacaggtctgcactcaaggacggtcagaggtgaaatttcccccccgcctttcaatc

SEQ ID NO: 848449 - DNA, 120 bp, Artificial Sequence
  ENSG00000233695_22 (sequence is synthesized)
agtgggtgccactgacaccacaggtctgcactcaaggacggtcagaggtgaaatttccccccccgcccttcaatcagtgggtgctgaggcatcacttggtgtttcctttccttccagccc

SEQ ID NO: 848450 - DNA, 120 bp, Artificial Sequence
  ENSG00000233695_23 (sequence is synthesized)
tgctcccagaaaggagactgcagctcctcccaattctcctggggctccaggatacctcagggctgcagcctccttggggctgtcggagagcagcctgaggatggccgtgccccggagtgg

SEQ ID NO: 848451 - DNA, 120 bp, Artificial Sequence
  ENSG00000233695_24 (sequence is synthesized)
gagtgaggagcggggatcagggcagggtcggagatggagggagaccccgcctttgtcttcagcctcacgtacctttgtcgcagagccggcccccccagccagctttacacaggcagaaga

SEQ ID NO: 848452 - DNA, 120 bp, Artificial Sequence
  ENSG00000233695_25 (sequence is synthesized)
agttgcccatgaggtcctggcaggcttgggtccccttcctatcgcaggggttgggcgtgcactggtcaggcaggtctgattggggacacaaagtggaaaatcatgttcagctgccccacc

SEQ ID NO: 848453 - DNA, 120 bp, Artificial Sequence
  ENSG00000233695_26 (sequence is synthesized)
cctgcgcgcccaacgcagctgagatcggggcggctgtggggtctcgggtccagcccggaggagctctgaggggcgcaggctgaggcagcccctgggcacccgagccctctgtgctggcct

SEQ ID NO: 848454 - DNA, 120 bp, Artificial Sequence
  ENSG00000233695_27 (sequence is synthesized)
agggctgacagaataggctggcgggccctggggccggctccaggaaaactcagatcaactgggagggagtgccagcaggcctggacgcaaggtgggaagggctgagggcaaaggagcagg

SEQ ID NO: 848455 - DNA, 120 bp, Artificial Sequence
  ENSG00000233695_28 (sequence is synthesized)
aactgcctggcgtgaggcctgggagctcagacctcccagggagtaggcacacagaacccccagctgacctgggggcttccaggcagactcggaacattctgccttccctggccagcccct

SEQ ID NO: 848456 - DNA, 120 bp, Artificial Sequence
  ENSG00000233695_29 (sequence is synthesized)
agcccatctctggtgaactctccctgctgggtgtggcggggaggaccccaggcccaggctgcactgccagaggggtcctccaggaagcccccctctttctgcttagctgccccctctcca

SEQ ID NO: 848457 - DNA, 120 bp, Artificial Sequence
  ENSG00000233695_30 (sequence is synthesized)
cgtgtcttgatggctttaggccaggtgtgttctgccctttctcagggtggtcacctgggctcagctcctgcagggccagaggtcaggggaacgggtgagggcctgagggtgggaacccgt

SEQ ID NO: 848458 - DNA, 120 bp, Artificial Sequence
  ENSG00000233695_31 (sequence is synthesized)
gccagtgcagctgcttcccaagcagtcccccatccgagaagctgctcacaaacacattcatacgaggagctgctcacaaacacgcttccaggacacggacccaaaccacgtcccagaggc

SEQ ID NO: 848459 - DNA, 120 bp, Artificial Sequence
  ENSG00000233695_32 (sequence is synthesized)
aggcagggaagcccccgacagtgcagttacgcaagcctgagccccgggaagttggcagaaagaacgacaattacacccggagctcaaagaatcctttcatggctgctggcagagcagaag

SEQ ID NO: 848460 - DNA, 120 bp, Artificial Sequence
  ENSG00000233695_33 (sequence is synthesized)
cagctcggggctgagcatggcagtgctcaggggcgcggtccacactcagctcagccccacatgaggactcagccacgctcagcttagccacacagggctccgtggggaaccctgggtagg

SEQ ID NO: 848461 - DNA, 120 bp, Artificial Sequence
  ENSG00000233695_34 (sequence is synthesized)
gcccccctgctggctgagagagggctccggtccattgattccacacaagttcaataaggaccagtccctgggaaaagtgcaggccgggccagcagggccctagggcactgggccagcatc

SEQ ID NO: 848462 - DNA, 120 bp, Artificial Sequence
  ENSG00000233695_35 (sequence is synthesized)
gtcctaaggggtcagccctggtgggggcacgtcgagtcttcagtgcatgggctctcactgccagcgtgtcgcttctgttcctgaggctcccaaggtgacgtttcccaccaggtctgtaga

SEQ ID NO: 848463 - DNA, 120 bp, Artificial Sequence
  ENSG00000233695_36 (sequence is synthesized)
atgtggcgtttccaccagagggtctgggctcggctgtcagtgcaggagccgcttccatccccacctggccggggtcaggggtgcccggtgccagggtgagcggcgggcgggtctgtggtt

SEQ ID NO: 848464 - DNA, 120 bp, Artificial Sequence
  ENSG00000233695_37 (sequence is synthesized)
cacaaagctgagttcctccagctcatccagggcttacagtcactgcctgtggccggcacagacacagcccctgtcctcctaggcgggtccaggcaccgcgctcaccagaggccctggcta

SEQ ID NO: 848465 - DNA, 120 bp, Artificial Sequence
  ENSG00000233695_38 (sequence is synthesized)
cgagtcccaggcttcttggggaagctgcccaaccacactggcttctttctgcgacgcttcgccgtatgcctcacagcgtttcctccgtatgcctcacagtttgctccgtacacccgcgtt

SEQ ID NO: 848466 - DNA, 120 bp, Artificial Sequence
  ENSG00000233695_39 (sequence is synthesized)
tcctccgtatgccccagtttcctccatatgcctcaatttcctccatacgccccacagtttcctccgtatgccccagtttcctccatacgccccggtttcctccatacaccccacagtttc

SEQ ID NO: 848467 - DNA, 120 bp, Artificial Sequence
  ENSG00000233695_40 (sequence is synthesized)
ctccatacgccccacagtttcctccatatgcccagtttcctccatacaccccacagtttcctccatatgcctcaatttcctccatacgccccccagtttcttccatacaccccacagttt

SEQ ID NO: 848468 - DNA, 120 bp, Artificial Sequence
  ENSG00000233695_41 (sequence is synthesized)
cctccatatgcccagtttcctccatacaccccacagtttcctccatatgcccagtttcctccatacgccccccagtttcctccatacgccccacagtttcctccatacgccccacagttt

SEQ ID NO: 848469 - DNA, 120 bp, Artificial Sequence
  ENSG00000233695_42 (sequence is synthesized)
cctccatacgccccacagtttcttccatacgccccacagtttcctccatatgcccagtttcctccatacaccccacagtttcctccatatgcctcaatttcctccatacgccccccagtt

SEQ ID NO: 848470 - DNA, 120 bp, Artificial Sequence
  ENSG00000233695_43 (sequence is synthesized)
tcttccatacaccccacagtttcctccatacgcctcaattttctctgtacgccccacagtttcctccatatgcctcagtttcctccatacgccccagtttcctccatacgcctcaatttc

SEQ ID NO: 848471 - DNA, 120 bp, Artificial Sequence
  ENSG00000233695_44 (sequence is synthesized)
agtttcctccatacacctcagtttcctccgtctgcctcacagtttcctctataagcctcagtttcctcagtacaccccacagtttcctccctacacctccgtttgcttgttttgcacaaa

SEQ ID NO: 848472 - DNA, 120 bp, Artificial Sequence
  ENSG00000233695_45 (sequence is synthesized)
tgactgacaacagaacacttgtgggtgtggacggagctcgcgtctcgaagtgtttctaagatgctattttcagcaggtcactataaacgctttctactctgaagcacacaggggctgggg

SEQ ID NO: 848473 - DNA, 120 bp, Artificial Sequence
  ENSG00000233695_46 (sequence is synthesized)
ctgcaaatagccagaagtgaactgagcaaaggaagcacgggacgcacaggaagaaaagtgctccaagggacggacaggacggtgccggggttaggaaagcgcaacactgttcagacacag

SEQ ID NO: 848474 - DNA, 120 bp, Artificial Sequence
  ENSG00000233695_47 (sequence is synthesized)
tctccgatatatgaatggcaagcccagttaaaaatatctaaagggcttttttaggtttttaagaatatttttaaggtttagttttattaaaaaataagcaagacaaccagaaaaaagact

SEQ ID NO: 848475 - DNA, 120 bp, Artificial Sequence
  ENSG00000233695_48 (sequence is synthesized)
gaggagggcataggagacccacccgcgtgcatgaggccgagtctaaagctgtggccacggcctgtggaaacccggcagaaaatctcccaaatacccagcatatgaggacggcagcaggtg

SEQ ID NO: 848476 - DNA, 120 bp, Artificial Sequence
  ENSG00000233695_49 (sequence is synthesized)
aggcactggggtgagacagactcaaatgtgtggtgttggggcaggaactgagcctgcagtctagatccccacctcatccatcacgtcaaaagaaattacgggcgggtcacagatgaaaac

SEQ ID NO: 848477 - DNA, 120 bp, Artificial Sequence
  ENSG00000233695_50 (sequence is synthesized)
acctaacagcaggtaactgttttgtaatcttggggagaagcctaaagcccaggaactaagagagtataacaagtgtgaatacagaatttaaaagaagagactggtttagcaatcactaag

SEQ ID NO: 848478 - DNA, 120 bp, Artificial Sequence
  ENSG00000233695_51 (sequence is synthesized)
ataaaacacgcgtgacaggatctgcttgtctcctctgagcacgcaggagcctctgccccaaatgcagacattgggccctacgtggcacctggctactgtgcatggttgcaggtcagggca

SEQ ID NO: 848479 - DNA, 120 bp, Artificial Sequence
  ENSG00000233695_52 (sequence is synthesized)
ggccgggccacagggcagggccaccctcccattcccatgtttacactgagcatttcctctgcctgtgtctcttgggctggggtctgtgatacaagtccgggaggccagagacgcccacgg

SEQ ID NO: 848480 - DNA, 120 bp, Artificial Sequence
  ENSG00000233695_53 (sequence is synthesized)
acagtgcgtggggcttggggagcgggactgagccacctctgactccttctgctgactgggatccagctccaaagccatgcctgggaagagactcctgcctctcccaggatgactccgtcc

SEQ ID NO: 848481 - DNA, 120 bp, Artificial Sequence
  ENSG00000233695_54 (sequence is synthesized)
cgccacgcctctgctctcagcgcccacagggactcaccaagctggactttcatctaaaactagacacacgtgacgccagcggaccacagacccagtgcaaggggagctgtgtgggttgtg

SEQ ID NO: 848482 - DNA, 120 bp, Artificial Sequence
  ENSG00000233695_55 (sequence is synthesized)
ctgaaggtatgttaaaattcatacaggacacccaaaacaatcaatcttattgcatgataattttaaaataataaaaaagacttgtggcaagctgaaaaaatttttgataactttactacc

SEQ ID NO: 848483 - DNA, 120 bp, Artificial Sequence
  ENSG00000233695_56 (sequence is synthesized)
aatggctaatgtgcaaactcctacaaattgagaaaaacaggcaaaaaatataaacaacagtttataggaaaagaaatacacagtttttaaacctatgaaggacagctttactcattagtt

SEQ ID NO: 848484 - DNA, 120 bp, Artificial Sequence
  ENSG00000233694_0 (sequence is synthesized)
atggacttcgtcagtgccggagtgtgaggccctttgtattttggagccattaccagaaagcagagcctccagtagacctttttcaaactttctgtgtggtttgcacgttcgtccactgta

SEQ ID NO: 848485 - DNA, 120 bp, Artificial Sequence
  ENSG00000233694_1 (sequence is synthesized)
ccgaggtagcatttcttctcattatgactcctggggctgtccgcctgcctccggttcccaaaaccctgtgggtgtggaagctgtgagatgcagaaactgaggcccgggaccacacacctg

SEQ ID NO: 848486 - DNA, 120 bp, Artificial Sequence
  ENSG00000233694_2 (sequence is synthesized)
acaccaagtggactaggattcaggccgttgaccatattctttcaacttcaggagcaacagcacctggaggacccaaatttgctgtcatcctccacgaggcctcagcagtctccaacatgg

SEQ ID NO: 848487 - DNA, 120 bp, Artificial Sequence
  ENSG00000233694_3 (sequence is synthesized)
aagggcactgagccagcctgggggtttccagggaccttcctgactgaacactggaaagaccctttcattccatcctgtcccccaggtgggaccccacgccctgaggtggaacagaggtga

SEQ ID NO: 848488 - DNA, 120 bp, Artificial Sequence
  ENSG00000233694_4 (sequence is synthesized)
agaggaaggggagcggctcctgtgcattttaatagaaatgaattcaagttctctcctgaaggactcagttccttgggcccaaacttctccagtctctcatgaaaggagatgaactgcttc

SEQ ID NO: 848489 - DNA, 120 bp, Artificial Sequence
  ENSG00000233694_5 (sequence is synthesized)
aaggctgaaggaggtggagctggggaggaagatgaagatctagaggtctgagagagcttcaactgagtagagagcagcctgggttccaaagtcctggccccagctctgtgtagccatgtg

SEQ ID NO: 848490 - DNA, 120 bp, Artificial Sequence
  ENSG00000233694_6 (sequence is synthesized)
actttagttcaggcccttgacttctctaagcttctgtgtgcacagctatcaaatgggagtaatagcagtattgacctcgtgggtggttatgaggctttactgagatggtacaatgtcaag

SEQ ID NO: 848491 - DNA, 120 bp, Artificial Sequence
  ENSG00000233694_7 (sequence is synthesized)
ggcttagcacattgcctggcacgtaacactcagtaaatgccaccctgactgcgtttaatttgggaagctagacccttacctacccaagggctgtgatggtagcaagcccacctgcagcca

SEQ ID NO: 848492 - DNA, 120 bp, Artificial Sequence
  ENSG00000233694_8 (sequence is synthesized)
tcctcagagggtaggtggagagtgaagccaagccccagagccacggactccagaatgaaggtatggactccgtgcctggacctgttacttgattagggtttctgaccccagcttcttccc

SEQ ID NO: 848493 - DNA, 120 bp, Artificial Sequence
  ENSG00000233694_9 (sequence is synthesized)
catttgccctgtcacaccatcccataatgtcctgttgcccccctcttgacccttcctcccaccccaattccatttatcacagtccacttgtggtgtcagggcagagacgcccaaggcact

SEQ ID NO: 848494 - DNA, 120 bp, Artificial Sequence
  ENSG00000233694_10 (sequence is synthesized)
gaactcatcttgccactgttggtcgccctctgtgcgttacaacaatgtgggacttggggattctaaaccaccaccctcaccaattctctcaatccccatgaccatctccatgcctccaag

SEQ ID NO: 848495 - DNA, 120 bp, Artificial Sequence
  ENSG00000233694_11 (sequence is synthesized)
tgcagagctctctggtcagcgcagcagtgggcctgccacccagacacacagaggtggctcagcaacagtcagaggccctcagacaacatcgggaacagaagtggctgtatgagcttctaa

SEQ ID NO: 848496 - DNA, 120 bp, Artificial Sequence
  ENSG00000233694_12 (sequence is synthesized)
aaagccccatctggaagctggagaagctgggcccatttcctaactcagaggaggccacagtccctggggcaggaactggcccctcctattcttcccttgccctccagagtggggttgcct

SEQ ID NO: 848497 - DNA, 120 bp, Artificial Sequence
  ENSG00000233694_13 (sequence is synthesized)
gggaccaggtcctcagaaactgtgatgggaggagggcacctttacaacagcaggtggagcacctgtaagtcctaagttcccttccccaaagaccaagaaagagtttggagaagactggag

SEQ ID NO: 848498 - DNA, 120 bp, Artificial Sequence
  ENSG00000233694_14 (sequence is synthesized)
ccagccttgccttctcctctcctgaaggaatggatacatgaatgaatgaatgcctctactttactcttttatttttagagttaaggtagagaaagaataaaatagctgtggatgtacaaa

SEQ ID NO: 848499 - DNA, 120 bp, Artificial Sequence
  ENSG00000264982_0 (sequence is synthesized)
gagagtcggtggaaggactgggtgagctcatcgcgggcgtagctgagcgaattgggcacgtggttgtggccagagcaccgacccttcttggggctcttgcattcttcattccagtcggtt

SEQ ID NO: 848500 - DNA, 120 bp, Artificial Sequence
  ENSG00000264982_1 (sequence is synthesized)
ttcacatcacggacagcccgtgaatactcatcgatgtcgaactgttcttggcagatacctagccagtgatggaccagggtttcgggccagctctctcccttcaccaggtgttctgggagg

SEQ ID NO: 848501 - DNA, 120 bp, Artificial Sequence
  ENSG00000264982_2 (sequence is synthesized)
ctgaacttggggacagtcaagtgcaaaggaaagtgcatggggaggatcttgttgttccgcagcacacagcaaaccaccaccgtcttggtctggatgttcacaaacttatagcggtgcccc

SEQ ID NO: 848502 - DNA, 120 bp, Artificial Sequence
  ENSG00000264982_3 (sequence is synthesized)
tcacattcacaggaagcctggttttctccacaatgttgcggatggtgtgttcgccctcttgcatctgaagttccaggggacttcgggtgctaaatctgcccttgcactggaatggaaggc

SEQ ID NO: 848503 - DNA, 120 bp, Artificial Sequence
  ENSG00000264982_4 (sequence is synthesized)
taatgctttcgttggtccggtgattcatacaaatgaggcacggcattttgccttttcccagcttgctgatggaattgagcttcccaatctttttgaagattgtgttgagtcgtgactttt

SEQ ID NO: 848504 - DNA, 120 bp, Artificial Sequence
  ENSG00000264982_5 (sequence is synthesized)
ccttgaatgtctttgcataaaggatttctgcctgccccattagaatctgataacaaaagccctgacttgtgtttattctgactcaaaaagtatgtggatggcagaaaacaagagaaataa

SEQ ID NO: 848505 - DNA, 120 bp, Artificial Sequence
  ENSG00000264985_0 (sequence is synthesized)
gtagagcaacaggcaccctcgcagacagctttgcgggactgtagcttggtacgccctctacgagagcaatttggcaatgctatcaaagctaaaaatgcacacatcctccaattcgccaac

SEQ ID NO: 848506 - DNA, 120 bp, Artificial Sequence
  ENSG00000264985_1 (sequence is synthesized)
tcttcaaggaattcaccctccacagactcacttgtgcatgtgtgaaatgacagtacttcagagccgctcagcttataacagcaaaagcttggaaatggcctgaatgcctatcaagagggc

SEQ ID NO: 848507 - DNA, 120 bp, Artificial Sequence
  ENSG00000264985_2 (sequence is synthesized)
actgcttaaagaaacgattgtccctccaaacaacagaattctgtgcagcagacggcgcctgagcgatctttgagaactactgatgcctggcccagctctggccccggtgctgcctgcatg

SEQ ID NO: 848508 - DNA, 120 bp, Artificial Sequence
  ENSG00000264985_3 (sequence is synthesized)
ccaagcgcttcattagccgggaaagaagactcttgccctccttcgtctaatcctcgccagtgaccttcaggaaccaggcaccttctgacgttgggagcctgggatggtgcaatcatcaat

SEQ ID NO: 848509 - DNA, 120 bp, Artificial Sequence
  ENSG00000264985_4 (sequence is synthesized)
tacgccgtggcctccgcagctgttcctgaatggatttcttgctcagagaagcgtgtttgaaaagcatctaatggaacggatcatcaatttgtttgaatacacatctaatctgattagggg

SEQ ID NO: 848510 - DNA, 120 bp, Artificial Sequence
  ENSG00000264985_5 (sequence is synthesized)
ggcactggccaccagggcagctagtgcaactgagccttgacatggccccagggaatcataagtggggtggcggggccagtctagggaaggagggctgtgtgccctgggcctgccaccgag

SEQ ID NO: 848511 - DNA, 120 bp, Artificial Sequence
  ENSG00000264985_6 (sequence is synthesized)
ccctccttgagctcagcccatggtacgtccagccaaaaaagtcacagagaaaagcagaacacatcacacagatgccaggagagctgggcccaagactcctgtttttctatagccctggca

SEQ ID NO: 848512 - DNA, 120 bp, Artificial Sequence
  ENSG00000264985_7 (sequence is synthesized)
ctgggcacagagcctgagacaaagaagatgcttgggaaatatgtggcaaatgaatgacagtaaggcccaacatggaagccaagggatgtttaataaagtcatctgtgggacaagactagg

SEQ ID NO: 848513 - DNA, 120 bp, Artificial Sequence
  ENSG00000264985_8 (sequence is synthesized)
tgatgcctgtattgggttgaatatgtctcccccaaattcatgtccttcccaaaacctcagaatgtgacctgatttggaaatcgagtctttggagatgtagtttgttaagatgaggtcacg

SEQ ID NO: 848514 - DNA, 120 bp, Artificial Sequence
  ENSG00000264985_9 (sequence is synthesized)
ctggagtaggatgggccttccgtgactggtgtcttggtaggaggagaagaaacacagggaaagagacacacaaggagaagacaagagccaagtaaagacagaggcagggactgaagcgac

SEQ ID NO: 848515 - DNA, 120 bp, Artificial Sequence
  ENSG00000264985_10 (sequence is synthesized)
gacttctggcctccagaactgtgagagaacagatttctgctgtttaaagccacccagcttatagtgctttgtcatggcagcccaggaaactcatgcaatgcctacaggaagctttgtccg

SEQ ID NO: 848516 - DNA, 120 bp, Artificial Sequence
  ENSG00000264985_11 (sequence is synthesized)
cccaggaaactcatgcaatgcctacaggaagctttgtccgtcattccacagaaggcagcatggcagagaaccagaaggaagtccgagccctgcctcgctggatgtagctggtccttccca

SEQ ID NO: 848517 - DNA, 120 bp, Artificial Sequence
  ENSG00000264985_12 (sequence is synthesized)
gacacatcacgtgcgccatgccactctcttccctggggagccctttcttaccttctttaccaggaaaatgttggttttcaatccatgttagttcctgtccagcaccccttcaaagctcaa

SEQ ID NO: 848518 - DNA, 120 bp, Artificial Sequence
  ENSG00000264985_13 (sequence is synthesized)
atgccatgccctctgtaactcttctccagatgtcctcctcagactcctgagatcgcctccctcccagcatgcttggtgattcccatgctacatcccccactgctgggcacactggggctc

SEQ ID NO: 848519 - DNA, 120 bp, Artificial Sequence
  ENSG00000264985_14 (sequence is synthesized)
cctcatcttcctagccccagagcctggcaacagcctggcctgcagaagagcccagatccatgagaaagtgggcaagcaaacttgctgtggaccagcgggtccctcccttcttgggagtgg

SEQ ID NO: 848520 - DNA, 120 bp, Artificial Sequence
  ENSG00000264985_15 (sequence is synthesized)
accagaatggagatcacaaagttcccttccagccctgacattataagagccgagtagccctctgggggatgaccttactgggccctgtaatgggaccacctgggttcaaacccagtggac

SEQ ID NO: 848521 - DNA, 120 bp, Artificial Sequence
  ENSG00000264985_16 (sequence is synthesized)
tctgccactcacaggctgtgtttccctgggcatcattctgtaactctgctgcacctctcctgaaaaatagggatagcagtgcctacctcgttggcctatggaaaggggtaagtgcttcaa

SEQ ID NO: 848522 - DNA, 120 bp, Artificial Sequence
  ENSG00000264985_17 (sequence is synthesized)
ccagtgcctggcacagagaaagagcccttggaaagaaggctgttattattcctcatcttggcttggtgcagcctctgcaagcccttctcatagccggggcctcctgtttgaaccacacag

SEQ ID NO: 848523 - DNA, 120 bp, Artificial Sequence
  ENSG00000264985_18 (sequence is synthesized)
gtaaacagggccaaagcacctccaaccttgcatggaaaaaagacggttctcatttccaataggtttattttgcagttaacagaggggaagggagctctttcttacatttcccttggaggg

SEQ ID NO: 848524 - DNA, 120 bp, Artificial Sequence
  ENSG00000264985_19 (sequence is synthesized)
ttcagagattaaacttataccatcgattagaatgttttggcctaacggtgctagtatcattttagtgtattcagattcatttgagctataaaagtggcgataataaaatgttcactaagt

SEQ ID NO: 848525 - DNA, 120 bp, Artificial Sequence
  ENSG00000264985_20 (sequence is synthesized)
ccctgttcctcctcttgcccacccttggagacgggccatcacctaagaggagggagagatggaagctgggggaagatgggagctaggggcagtggctctgacttaacaccagcattggtt

SEQ ID NO: 848526 - DNA, 120 bp, Artificial Sequence
  ENSG00000264985_21 (sequence is synthesized)
tcccaatattgaataaagagggctgagctggacagcaggtgtccttaggggcttgacctcaccacccccagacggggcctgtctgcccaatttcaggggcttctcctcaatttcctggct

SEQ ID NO: 848527 - DNA, 120 bp, Artificial Sequence
  ENSG00000264985_22 (sequence is synthesized)
tcagggcgaggctgctcagcccagggacaagaaggaaagatgggtatttgttaaaggcctactccacactgagcagcgcatgtttacccatttaatcctcccagcctccttaggggagtg

SEQ ID NO: 848528 - DNA, 120 bp, Artificial Sequence
  ENSG00000264985_23 (sequence is synthesized)
ctatgaggacttctcttttatttctctcatctgaagctcagatgagagaggtacccagtcacatgtgtgtcagtggcagagctgggttttgaacccatagccgcctgcctccatgcaagg

SEQ ID NO: 848529 - DNA, 120 bp, Artificial Sequence
  ENSG00000264985_24 (sequence is synthesized)
cctctgacctcccctctgtccaggctgcgtttggagcccaggaacagattccaaggctgggccccgcagggaggaaaaaacaaagcacgagtcgctctctgcacggaggctgagagatgg

SEQ ID NO: 848530 - DNA, 120 bp, Artificial Sequence
  ENSG00000264985_25 (sequence is synthesized)
agccaccgctgaggaagaacacacattcatcaggctggtgaccccggtgtaccagcgctttgtggcgtgtaacaaagactgccgagcagaaaattggagttcaatttgccgtccatcctg

SEQ ID NO: 848531 - DNA, 120 bp, Artificial Sequence
  ENSG00000264985_26 (sequence is synthesized)
cacgcagtgctcagcccattctagtccctggcaggcacctctgtgctttatcataaataataacaccacgcggctctatggccctttccgcagttacagtccccgagcaatttacaagcc

SEQ ID NO: 848532 - DNA, 120 bp, Artificial Sequence
  ENSG00000264985_27 (sequence is synthesized)
agattatacacagaagcctgcacatgcctgccggccagcacacaccacacacacgcggcctcctccccagtcactcctagggcccacggccatcctggtgtcacccatctggggctgcac

SEQ ID NO: 848533 - DNA, 120 bp, Artificial Sequence
  ENSG00000264985_28 (sequence is synthesized)
ccaatctggagggaagcaggccgttgtgcacccctggacactgggctctgctcctgccctggtcaccttctttatcccttttactggctctcatggttggcagagaacccacgaggtctg

SEQ ID NO: 848534 - DNA, 120 bp, Artificial Sequence
  ENSG00000264985_29 (sequence is synthesized)
gtggcccactgccccttgctggaccaaggtcaaggccacttcccctctctttctttccgttttagaaggagcttctggacctcctcccctccaatcagcagtggccctttgtctctacca

SEQ ID NO: 848535 - DNA, 120 bp, Artificial Sequence
  ENSG00000264985_30 (sequence is synthesized)
cagggagtcccgtctctcctcagaacttattgggagtagtgggggggtgcaaaagcagcaacagggacccacaagttcaaccgctcgcttcacagacgagacccctggggcccagagagg

SEQ ID NO: 848536 - DNA, 120 bp, Artificial Sequence
  ENSG00000264985_31 (sequence is synthesized)
tgcagcagcttccctgaggactctgcatcagctgctgagctgagaccaaagcccaggaccaccggcacccagtccactacacagcggagccccaaggagggaggtaaacaaaggtctagg

SEQ ID NO: 848537 - DNA, 120 bp, Artificial Sequence
  ENSG00000264985_32 (sequence is synthesized)
gcagactgggctgctccctctgagcatctagaaacttccccagaagcagaagcttcaggcagggcctggaggggctccagcagcagctccttccccctcttgccatcaaactaaataaga

SEQ ID NO: 848538 - DNA, 120 bp, Artificial Sequence
  ENSG00000264985_33 (sequence is synthesized)
ggtcaactattgtatgatgccatttatatgagatatccagagtaggtagatccatagagatggggctcagattggtgactggcaggtggttgggagagaggggaatggggagtgactgtg

SEQ ID NO: 848539 - DNA, 120 bp, Artificial Sequence
  ENSG00000264985_34 (sequence is synthesized)
agtgggtacaggcttccttctggggtgatgaaagtattctggaactcagtggtggttgtacatcattgtgaatgtactaagtgccactgaattgctcacttgaaaatgattttttttttt

SEQ ID NO: 848540 - DNA, 89 bp, Artificial Sequence
  ENSG00000264985_35 (sequence is synthesized)
gtgccactgaattgctcacttgaaaatgattttttttttttttttttttttgagaccgggtctcgctctgctgcccaggcgggagtgtg

SEQ ID NO: 848541 - DNA, 81 bp, Artificial Sequence
  ENSG00000264985_36 (sequence is synthesized)
accatgctacacgttgcccaggctgatctcgaactcttggactcaagcaatgtacccacctcggcctcccaaagtgctagg

SEQ ID NO: 848542 - DNA, 89 bp, Artificial Sequence
  ENSG00000264985_37 (sequence is synthesized)
acctcggcctcccaaagtgctaggattaaggcatgagtcagtcttaaaatggctaattttatgtcatgcaaatcttatccccatctggg

SEQ ID NO: 848543 - DNA, 120 bp, Artificial Sequence
  ENSG00000251506_0 (sequence is synthesized)
atacacttccagagaaaattcagactttgagctggagtttatccctgatctgaagattggcttcaagagttgttcatcaagaggagtgaatcacagtcactaaaggcaccttcctgtgac

SEQ ID NO: 848544 - DNA, 120 bp, Artificial Sequence
  ENSG00000251506_1 (sequence is synthesized)
ccaaaagaagggagttgtgcatctacttagaataagagaaaacggtttccagatggctaatgaatggttaggtttctccgtcacatggcaacaagtcttacttcctcaaatgctggttct

SEQ ID NO: 848545 - DNA, 120 bp, Artificial Sequence
  ENSG00000251506_2 (sequence is synthesized)
aaggactactgtgaaatcctactattgagattcatctagatccaattccatctcattattgtggagatacggtgcagagaacaatacatgaataaatacaactggattctgctctactga

SEQ ID NO: 848546 - DNA, 120 bp, Artificial Sequence
  ENSG00000251504_0 (sequence is synthesized)
ggagaaaaagaggaggaatggcaaaggctgattgactttgtcagctacttactttaaaaaacatttgagaaagccagaaagcagaggggaggaagctccaccgtcatgagaatgggaagc

SEQ ID NO: 848547 - DNA, 120 bp, Artificial Sequence
  ENSG00000251504_1 (sequence is synthesized)
ccgtcatgagaatgggaagcagaggcagcggcagcgtgcacagacatcctttgaaggtttgttataaacacagaaactgatgtctgggaaaaggctggagtgcaatggcgcgatctcggc

SEQ ID NO: 848548 - DNA, 120 bp, Artificial Sequence
  ENSG00000251504_2 (sequence is synthesized)
acaagcgtgagccactgtgcccagcccaagctgtacttttatttaagtataatttagttagatatgtgaactcactgaaaatgtatacacaattttctgtgtatgtataaaatttgatat

SEQ ID NO: 848549 - DNA, 120 bp, Artificial Sequence
  ENSG00000251504_3 (sequence is synthesized)
gtatgtataaaatttgatatttaaatgtatttatggcaagagtatctgtaacttttatgaacatatcaagtggacatgatcacaaaacatgcaatttattaccatagagcttcagaaata

SEQ ID NO: 848550 - DNA, 120 bp, Artificial Sequence
  ENSG00000251504_4 (sequence is synthesized)
ccccttccaaaaagtatgtataatgatatgatacttacaatggaggcaactatgatatttaactgtcagtaaactgaaagaaaaaaatgactcaaaaagtttgtaaagatgatacctttc

SEQ ID NO: 848551 - DNA, 120 bp, Artificial Sequence
  ENSG00000251504_5 (sequence is synthesized)
gatgtctgggaaaagggccagttgggttatccttcttgtttcattgtttgtcctgcttaaaattgagaatgaacagagactcactgatttcatcttctgaatttgaaaagaatgacacac

SEQ ID NO: 848552 - DNA, 120 bp, Artificial Sequence
  ENSG00000251504_6 (sequence is synthesized)
aatacaacactggaatttggggaggggcttggagagtttgtttttaaaagtcttgagcaataaatcatctaaccacaagagtaagaaaattagttttcaactttaatttctttggtcttt

SEQ ID NO: 848553 - DNA, 120 bp, Artificial Sequence
  ENSG00000251504_7 (sequence is synthesized)
cagttttaacaggcacacctttaacattcattttcgacccactgaagaggagatgagcttattggctggtgcaccttgacagcatgtaggtggaaaacaggacattcagtctttggtgca

SEQ ID NO: 848554 - DNA, 120 bp, Artificial Sequence
  ENSG00000251504_8 (sequence is synthesized)
cagaaagcagaggggaggaagctccaccgtcatgagaatgggaagcagaggcagcggcagcgtgcacagacatcctttgaaggtttgttataaacacagaaactgatgtctgggaaaaga

SEQ ID NO: 848555 - DNA, 120 bp, Artificial Sequence
  ENSG00000251504_9 (sequence is synthesized)
caacacagcggaacatatccaagggacaacagtttacctgcctcccagaaggatgctgagtagccatgtcaactctctcaaccaacaacagtcaatgtagctcaaagtgcagggtggatg

SEQ ID NO: 848556 - DNA, 120 bp, Artificial Sequence
  ENSG00000251504_10 (sequence is synthesized)
ccctgctggaataaagataacctggcctcatattaacatcaaatgtctagaattccaaaaacagaagatcacacaaactatgctaactccgagtggaatttcaagacattaatgtaagag

SEQ ID NO: 848557 - DNA, 120 bp, Artificial Sequence
  ENSG00000251504_11 (sequence is synthesized)
agggtgaccaaaccatgctggagtaaagataacctgtccagtattatcccaacggactgcttgacaaatcatgatttgccaaacttaattcagatggagtcttgctctgtcaccaggctg

SEQ ID NO: 848558 - DNA, 86 bp, Artificial Sequence
  ENSG00000287763_0 (sequence is synthesized)
ggagaggcgctggcgccggctctggcgcggagaggtgcaggcccaggctccactccccagctgtgaaaggggattccaagcgacag

SEQ ID NO: 848559 - DNA, 83 bp, Artificial Sequence
  ENSG00000287763_1 (sequence is synthesized)
tcaaagatgttctcttttaagattactttttaaaaagactcacacggtaccttcccacaagaagacatggagactatgtgacg

SEQ ID NO: 848560 - DNA, 120 bp, Artificial Sequence
  ENSG00000287763_2 (sequence is synthesized)
acggtaccttcccacaagaagacatggagactatgtgacgtagcctgtgggtccctggacaccgggactagaggacccttcccaagagcagaccgcaggcaagataccattcattggcct

SEQ ID NO: 848561 - DNA, 120 bp, Artificial Sequence
  ENSG00000287763_3 (sequence is synthesized)
cgctgcctgtgcccgcggattccgcacgtggccacacctcttctatacaaggcaaggtggcggtaggagctgcactcctttctctagtgttgccaagatttccatcactggaatgtgaag

SEQ ID NO: 848562 - DNA, 120 bp, Artificial Sequence
  ENSG00000287763_4 (sequence is synthesized)
cccttcacctctcagaatgccagagagaaggagtccctcctgtggtcctgcagtgtcaccccaaaagctgcccaggttgccagatgtgtctgagagaagtgaggccacctgactcattta

SEQ ID NO: 848563 - DNA, 120 bp, Artificial Sequence
  ENSG00000287763_5 (sequence is synthesized)
tcagatccacccctgctgagaatacacttctggtggagaggcactgctcctaagtgctgtcagcaatgaggacttcctgtctggagtagggtagtcccagtgaaactgactatcactaca

SEQ ID NO: 848564 - DNA, 120 bp, Artificial Sequence
  ENSG00000287763_6 (sequence is synthesized)
gggcccggctcgcctccgttcgtgtaccccagcacaccaggcacatcgcttactgctggttctttacatgccagccagattcagctgtggatgctgtaggcatttagtttagagatcttc

SEQ ID NO: 848565 - DNA, 120 bp, Artificial Sequence
  ENSG00000287763_7 (sequence is synthesized)
ctccaccctgggcagtaaaacagtgtctgaagttgacttaatggcctcccaagcctggtctcctacccgctgggcaaaagctgcaggatgggtcctgcctcggtcatgggaatgaatatg

SEQ ID NO: 848566 - DNA, 120 bp, Artificial Sequence
  ENSG00000287763_8 (sequence is synthesized)
aaaccgaaagagccagtccttcaagatggatccctagtggctaactgggcctaaatttaacattgagcctagtggtcatttattgactagacatcacagatgtactctgtgtcaacagaa

SEQ ID NO: 848567 - DNA, 120 bp, Artificial Sequence
  ENSG00000287763_9 (sequence is synthesized)
aacccatacctctgttcaactttgggactttcagaactcacctgaaccaaccaatcagaacttagcttcatcaagtaattagaactaagcaagtttgaatccttcatttgcataaatgga

SEQ ID NO: 848568 - DNA, 120 bp, Artificial Sequence
  ENSG00000287763_10 (sequence is synthesized)
cttgagtgggaacccggacaggaacttttgctgtcaaaactgaaacctccttttgctccctggaaggaaccttcattttagaccacaggtcacatctccccattttgcaaactgcttagt

SEQ ID NO: 848569 - DNA, 120 bp, Artificial Sequence
  ENSG00000232120_0 (sequence is synthesized)
agcgagatttacaataaagtagatgttggagctatgctgactgggttcaaatcctcataccatcactgcctagttgtataagcttgaacaaattacttgttattgctgtgcttcaatttc

SEQ ID NO: 848570 - DNA, 120 bp, Artificial Sequence
  ENSG00000232120_1 (sequence is synthesized)
ctcagctgtaaaatatggttttaaaatgaaaagcctttgagatcttttagaattaagtgaaaatttaagcagaacagaaggaacaccagatgggagtctctcaagaagtgtcctcaggga

SEQ ID NO: 848571 - DNA, 120 bp, Artificial Sequence
  ENSG00000232120_2 (sequence is synthesized)
taaattacccattgtaaatgaatacaaggatggcacatcatcttttctcatacatatattcagagagctggcagctatgttgcaggaagatgaaaggaacctcaagtgtgtcagctgtga

SEQ ID NO: 848572 - DNA, 120 bp, Artificial Sequence
  ENSG00000232120_3 (sequence is synthesized)
agcatgtactgtattcttctggtggaaattagcatggccactatatcacaaatggatattatcgcaaaagttaattgtattactagttctgtttaaagataaagaatcagacatgtgcaa

SEQ ID NO: 848573 - DNA, 120 bp, Artificial Sequence
  ENSG00000232121_0 (sequence is synthesized)
gagggagctggcaaagatggaatgcacgcgaccctggctcagcaaactgcaaacagcctggagtctgcctgtggggagcggtcgaccaatgacgcctgagtggctgctgcctgcgccaga

SEQ ID NO: 848574 - DNA, 120 bp, Artificial Sequence
  ENSG00000232121_1 (sequence is synthesized)
gctgcaggggaggctcggtgctgggaagaatgcacgttccagggccctctttcagcctctctcaagcctgaatttgggaagactgcggccagtaaaaatgctccataaaatgttccacat

SEQ ID NO: 848575 - DNA, 120 bp, Artificial Sequence
  ENSG00000232121_2 (sequence is synthesized)
ctctgtgaaatggctcgagaagcgattagcacgaccatccctcacatacttacatttttttgtggtgagaacatttaaagcccactctttccagttcttaagtatgcattaatagctgta

SEQ ID NO: 848576 - DNA, 120 bp, Artificial Sequence
  ENSG00000232121_3 (sequence is synthesized)
atcaccatgttgtacatcagagctccagaacttactcatcttagagctgaaactttgtgctctctggccggcgtctctgctgccccctccagcccctggtaaacaccctaccgctctgga

SEQ ID NO: 848577 - DNA, 120 bp, Artificial Sequence
  ENSG00000234854_0 (sequence is synthesized)
aatcctccacgatagtccacaggatgtactgggagaaactggaaggccacaggagaaacgtttgctcacgaaaacacaggcatttcatgtgcctggagcacgggatgaagaattccttag

SEQ ID NO: 848578 - DNA, 120 bp, Artificial Sequence
  ENSG00000234854_1 (sequence is synthesized)
ggaagtcaaagttaaccctccaggctagatctagggaaagacttgtcagctgtttcttcacttccatgaccttggaaaatccgctgtctccaccagacactgatccttggcacagccact

SEQ ID NO: 848579 - DNA, 120 bp, Artificial Sequence
  ENSG00000234854_2 (sequence is synthesized)
atttgatacacttaactctgctcaggattttagatctcaacccaggaaatgagctacagtctcaccccagtgcttgaaataggtgtgcaaacaattcacatattataaatacgttgactt

SEQ ID NO: 848580 - DNA, 120 bp, Artificial Sequence
  ENSG00000234855_0 (sequence is synthesized)
gggggcccacaaacctgggtctgtatgcccactcttcattagcagctccaggaccaagtgcggtcagttttctggaactcgtttccatatctccactgtgatgtaaggatgtgcatggat

SEQ ID NO: 848581 - DNA, 120 bp, Artificial Sequence
  ENSG00000234855_1 (sequence is synthesized)
cctaaatgtgagaagctggcaatcaccaggtccctggcaagtgctcagagtctgagctaccatcaaaatcaagggcacagggggaagctaactgcttctctgaatactctaagggaggca

SEQ ID NO: 848582 - DNA, 120 bp, Artificial Sequence
  ENSG00000234855_2 (sequence is synthesized)
cagcttccaagcaattcctgaggccctcccaccggctaaccagaaaggaacccaccattggtctccttagtaacgacttccaaggccccttgcacatctgaaaagcgcacagtgtgattt

SEQ ID NO: 848583 - DNA, 120 bp, Artificial Sequence
  ENSG00000234855_3 (sequence is synthesized)
ccagacccaagttagacagcgatttcttcaaagtgcaacgccctcaattaatgaaccctctgggaatgaagtaccttctaacaaaaacattgttcaaaataaagctggaaaaaaacctca

SEQ ID NO: 848584 - DNA, 120 bp, Artificial Sequence
  ENSG00000234855_4 (sequence is synthesized)
tgagtgttgttgcccagtcacaaccatgacaaggcgatgtggttacacggtagggtcagaggtaggcagtctccagccattcccagcaggtgaccttggccagttacttgaccttcaact

SEQ ID NO: 848585 - DNA, 120 bp, Artificial Sequence
  ENSG00000234855_5 (sequence is synthesized)
tggtttccttgtctgcaagatgaggatgatgacaggcaactcccacggcgggagtgcagactgcagaacagtcactcatgcagtaactacctgctgagcacccctgtgcatcaggtggcc

SEQ ID NO: 848586 - DNA, 120 bp, Artificial Sequence
  ENSG00000234855_6 (sequence is synthesized)
ttgttcctgcggcggggatacagcaaggaacacagccctgccccgtggagctcatattctgtggggtagcgggtggaggtgagtactacagagaagaatcaagcaggtgaggggtaaaag

SEQ ID NO: 848587 - DNA, 120 bp, Artificial Sequence
  ENSG00000234855_7 (sequence is synthesized)
cactgggggtgccgagtgggagttacctttttctaggtggcagggaaggcctttgatcaaagacctaaaggaagaagggagtgagccccatgggtgtctgggagaaggagtattctaggc

SEQ ID NO: 848588 - DNA, 120 bp, Artificial Sequence
  ENSG00000234855_8 (sequence is synthesized)
acagagaacagtcagtgccaaggtccagaagcaggaatatgcttagtgttcatggaaaagcaaggagtccagggtcgctggagtgagaaaggggaaaagtagtcaagggtagggactttg

SEQ ID NO: 848589 - DNA, 120 bp, Artificial Sequence
  ENSG00000234859_0 (sequence is synthesized)
ggttcttgttgctttggagaccacaggagaggcggtggtgatggcccatcgcttcagccctgtggcatccccacaggatccatgggcatcaagtaatttccctgtgctcctctgaagata

SEQ ID NO: 848590 - DNA, 120 bp, Artificial Sequence
  ENSG00000234859_1 (sequence is synthesized)
aaccgctgcctgcaccagcctagcagcttccagaagctgtggatgagaagcaatctcccaccaaaagccagagctcacctgcaaagcttcaatcccaagcagaaggaagcctccgttttt

SEQ ID NO: 848591 - DNA, 120 bp, Artificial Sequence
  ENSG00000234859_2 (sequence is synthesized)
tccccccagatgagcctgaattcacctccagaaagtctcaatgcatcacaccaagggtcacacacctgctcatggttcttcttgaggcaaagcagctcctccttcagggactccagctgg

SEQ ID NO: 848592 - DNA, 120 bp, Artificial Sequence
  ENSG00000234859_3 (sequence is synthesized)
gcctccaggtcacacttggcgagggtgaggttgtctagcaccctgcgcaggccacagatgtcagcctccaccagctgttgcagcgagcgctctctctcgtacctgtaacagggaaagtgc

SEQ ID NO: 848593 - DNA, 120 bp, Artificial Sequence
  ENSG00000234859_4 (sequence is synthesized)
aggagtgacagttagagggcaggaaggggcaccaggacatgactcccagctcgcagctgtaagtccactggcctgccctttgccatctaattgtgagttggcttatcctgtgtagtgtgc

SEQ ID NO: 848594 - DNA, 120 bp, Artificial Sequence
  ENSG00000234859_5 (sequence is synthesized)
tcaaagcccagaaagcaacaggatgttccccactcagtcaatactaagcacctgagatgaaccaaggggagcagctggtactgaggatactgtgatggacacacagccagcacctgcctt

SEQ ID NO: 848595 - DNA, 120 bp, Artificial Sequence
  ENSG00000234859_6 (sequence is synthesized)
tacacacaatggcccaaaagggaggtggcaaagtaaccaggcatttgcaacacagtgcaatcactgcaggcccctctctacaagccccatacccaaagggaccctggattccctattaga

SEQ ID NO: 848596 - DNA, 120 bp, Artificial Sequence
  ENSG00000234859_7 (sequence is synthesized)
gtaaaagccacattgccagcatgagaggaaggaaatggctttctttagctctagaagagtgagacttgcacagtgccccgaagaaagatgataaaacacaatgcccttccagcacccagg

SEQ ID NO: 848597 - DNA, 120 bp, Artificial Sequence
  ENSG00000234859_8 (sequence is synthesized)
gtagaccctcctcaggtggtgtcaaccctttgactttcacatgttttcatcttaggctatggagcatgatttctgctatgaattatcagcactcacaaattaatcaagctgcagcacaga

SEQ ID NO: 848598 - DNA, 120 bp, Artificial Sequence
  ENSG00000234859_9 (sequence is synthesized)
aacatatccttattaaggcaacagtttcacaggaaattgcttcaagaaaggaaaatttggtacaaaatttaaggccaagtcccagctctgccactcggtacccacatggcttctggcaag

SEQ ID NO: 848599 - DNA, 120 bp, Artificial Sequence
  ENSG00000234859_10 (sequence is synthesized)
tcacaccagcaccccaagcctcagggtccccacctgtggaggagattctatccctgcccgcctgcttcacaagttgcttaccaggtggatgatgcattctagcacatgttgtaaactgtt

SEQ ID NO: 848600 - DNA, 120 bp, Artificial Sequence
  ENSG00000234859_11 (sequence is synthesized)
aatgctaaaccactggagagcggatagtttttcaggatcttgagcttaatgccctttgttctcttctgctataactactgggttggggtctgggtcaatgacatccgatgccacatgaga

SEQ ID NO: 848601 - DNA, 120 bp, Artificial Sequence
  ENSG00000234859_12 (sequence is synthesized)
cagaagcagccaacttggcattgtcccatccccatccaaccccaactctcacttggctccttcccatccctgtccaaccccaactcacttggtcctgaagtcatctgcagccaatttggc

SEQ ID NO: 848602 - DNA, 120 bp, Artificial Sequence
  ENSG00000234859_13 (sequence is synthesized)
attgtctatttgcacaaccagcctattgttctccgatttggtgcacagaatctggggtaagaaagtaggctcagtaagtgacttactgatcccagagacacctatagcctcaggtgagag

SEQ ID NO: 848603 - DNA, 120 bp, Artificial Sequence
  ENSG00000234859_14 (sequence is synthesized)
gaagttttattggctgaagttgaacctacagcatccgcctggacaacacaaactcccaaacgtgcaagagatgcttttgtggtgtgggaaggaagatgtgcaagagacttcttggaaaag

SEQ ID NO: 848604 - DNA, 120 bp, Artificial Sequence
  ENSG00000234859_15 (sequence is synthesized)
gatgaagacatagagtcaaaggaaccaggagatggaagacagtagcaaactgaacatataacaaagacttgctttcattttgccagatatgatgcttagcccaatataaataagaagatc

SEQ ID NO: 848605 - DNA, 120 bp, Artificial Sequence
  ENSG00000234859_16 (sequence is synthesized)
tgcctgtaatccccgcactttgggagaccaaggcagatggatcacctgagacagctgcaaagatttcgaggtggaagagagctcactgagagaccggaaaaagacttcatggagtagggg

SEQ ID NO: 848606 - DNA, 120 bp, Artificial Sequence
  ENSG00000234859_17 (sequence is synthesized)
aagacttcatggagtaggggattttccaaatatgttttgaatgatattttttataaagggttggggaatgagcttctctcatagagaacaaaataaacacaatcaaacatttggaaaatg

SEQ ID NO: 848607 - DNA, 120 bp, Artificial Sequence
  ENSG00000234859_18 (sequence is synthesized)
tggatcacctgaggtggtgggccggatttggccgacaggcagtaagcagattcctgacccctgatctggtgcaccgcaaacctcaccttctgctggagctcctggatggtgcagaagtag

SEQ ID NO: 848608 - DNA, 120 bp, Artificial Sequence
  ENSG00000234859_19 (sequence is synthesized)
gactggtagtttcggcacacgctggactcgtggcacttgctcctctcatggagtttggtctccagttctgcattgtcccactccagctggcgcaccttctccagcacaactctagctacc

SEQ ID NO: 848609 - DNA, 120 bp, Artificial Sequence
  ENSG00000234859_20 (sequence is synthesized)
aaggagcttcaatgacaattcctccagctgatggatttggccaagagtcagagagtctagcaacaacctatgcattgacagtttatttttgtgatgactcaattttacttctgattgaaa

SEQ ID NO: 848610 - DNA, 120 bp, Artificial Sequence
  ENSG00000234859_21 (sequence is synthesized)
agcaaaatcctcttatcttctagatatgggagaaagtgacataggttctaaccaatctagactacagcccttctttttctttcaatgcttatattctctttcctcctatataatgaccat

SEQ ID NO: 848611 - DNA, 120 bp, Artificial Sequence
  ENSG00000234859_22 (sequence is synthesized)
ttctagcaacaggctaatttaaggtgtggagagaaatattcttctagtcaaaaactgtttttgaacacctacaatatagactgagtaatggggcgggcccttggaaatacagcaggagag

SEQ ID NO: 848612 - DNA, 120 bp, Artificial Sequence
  ENSG00000234859_23 (sequence is synthesized)
aagtcacactgaccctcctcatcctgacttacttgatcctaaagtcatcagcagccagcttcgcgttgtcaatttgtacaatcagcctggcattctcagccttgctgcacaggatctgag

SEQ ID NO: 848613 - DNA, 120 bp, Artificial Sequence
  ENSG00000234859_24 (sequence is synthesized)
gaaaacggaaagacggttcacacacaaagcaccatactctaagctcccactccatgtgtggtatttacgctcatgtccaagagaaaccaagaacccaaagctctctggaccttatgcaga

SEQ ID NO: 848614 - DNA, 120 bp, Artificial Sequence
  ENSG00000234859_25 (sequence is synthesized)
ttcctcctgcgaaggcttctgccttctcagacccagcatgcccaggcgatcccacacctcaccttctgctggagctcctcgattgtacggaagtaggactggtagtcggggcacacggtg

SEQ ID NO: 848615 - DNA, 120 bp, Artificial Sequence
  ENSG00000234859_26 (sequence is synthesized)
gactcgtggcacttgctcctctcgaggagtgtggtctccagctctgcattctcctgctccagctggcgcaccttctccaggtagttggccaggcggtcattcaggaacttcatggtctcc

SEQ ID NO: 848616 - DNA, 120 bp, Artificial Sequence
  ENSG00000234859_27 (sequence is synthesized)
ttctcatggccattcagggtgtttttgccgtaggccccacagattccgatgttgccgggaatgtgacaggtccctggcaagggacaagcagtgtgactggttgggggcagacagaggctg

SEQ ID NO: 848617 - DNA, 120 bp, Artificial Sequence
  ENSG00000234859_28 (sequence is synthesized)
gggcggcccaggggagtcgaccccacacggactctgttggcgtgtgccacgttggccaagaggcacatggaggcagcattggcctctgccacaggctggcacccaacatcgataggagag

SEQ ID NO: 848618 - DNA, 120 bp, Artificial Sequence
  ENSG00000234859_29 (sequence is synthesized)
acaaagacatttcttgctccaggagccatggtgcaacccagagggcatgaggaggtgctgtagaaggaggtcatggtgtagggctgaggctgcacaggagcttcagatcagctgggaagg

SEQ ID NO: 848619 - DNA, 120 bp, Artificial Sequence
  ENSG00000234859_30 (sequence is synthesized)
ctgagccactgagactgaagcctcctctcctcccaacccttttataccccatcctgggcgggtgttggctccagtgctttgacctcctgccttgattatctacctgttgtggtgccatca

SEQ ID NO: 848620 - DNA, 120 bp, Artificial Sequence
  ENSG00000234859_31 (sequence is synthesized)
tcctgttactcagctgctgagtttaccatgagaagttcctcagctcattaaagcaatgttgacaaatctgagatgcctcttggctcttccatatcaggttagctgttggtgggaagtcag

SEQ ID NO: 848621 - DNA, 120 bp, Artificial Sequence
  ENSG00000234859_32 (sequence is synthesized)
agactcactgtttctgctcaacaaacaccagcagttgattcaggccccaattgctctctctggactatggtctctgtggatgtggtcacaatgaaggctcaaatctttccgtcagtaatt

SEQ ID NO: 848622 - DNA, 120 bp, Artificial Sequence
  ENSG00000234859_33 (sequence is synthesized)
tgtgtagcaggagacacagagaaccaatgggacccactggatctttcgcctgtgcaagactgaatcagcctttcctttgaagagaaaatatcagttaataaaaccaatgcatctactgat

SEQ ID NO: 848623 - DNA, 120 bp, Artificial Sequence
  ENSG00000258234_0 (sequence is synthesized)
agagatggcgatgatccagggttggttaagtcagcaactcaataacctcatcaaaatccagaataataatccctatctatgttagggatctatacagcccattgaatgaccatgtggctt

SEQ ID NO: 848624 - DNA, 120 bp, Artificial Sequence
  ENSG00000258234_1 (sequence is synthesized)
gctttgacgactgggatgtaggcagaagtgataataagctagaatcctcaaggtcatctactagttgcaaaagagcagctggatcctagtagaaaagatccaaagtagaaaagtctgaaa

SEQ ID NO: 848625 - DNA, 120 bp, Artificial Sequence
  ENSG00000258234_2 (sequence is synthesized)
gggattatatatgcttcacttctgaagagggtcccaacatcagatgtcctacctgggctagctcatctgcaagctccatgagtcctctctcgcacctgctgcagtgattctgcaacaaac

SEQ ID NO: 848626 - DNA, 75 bp, Artificial Sequence
  ENSG00000258234_3 (sequence is synthesized)
agtcctctctcgcacctgctgcagtgattctgcaacaaacagatcattcccagtcagagcaatagaaggagaagg

SEQ ID NO: 848627 - DNA, 120 bp, Artificial Sequence
  ENSG00000258235_0 (sequence is synthesized)
gggacctcctggattcaagcaatactctcatctcagcctcctgaatagctgggaccatagcacaagccctgtaagaatgtgagagcgctcaaggatgttggctactgggaataaacattt

SEQ ID NO: 848628 - DNA, 120 bp, Artificial Sequence
  ENSG00000258235_1 (sequence is synthesized)
atctgcacatggctaatcaagagaagactgcattttcctatttttgtttatatcataccagtagaacattgtacattaaatctataatgatgataaactgcccattgggattttcttcat

SEQ ID NO: 848629 - DNA, 120 bp, Artificial Sequence
  ENSG00000258235_2 (sequence is synthesized)
tcttgtaatcacccttaggactcaaaaaaatcccgtgagtttgcacttttcaaattctgttgtgggaaatgctgcaattaggtgctattgaaccaatctttgaaaattaaaaatgctgta

SEQ ID NO: 848630 - DNA, 84 bp, Artificial Sequence
  ENSG00000267986_0 (sequence is synthesized)
ctcttgattgggactacaggtgtgagcaaaccacgcctgacttctgtgccttagtttcctcaactatcaaagggggcttataat

SEQ ID NO: 848631 - DNA, 120 bp, Artificial Sequence
  ENSG00000267986_1 (sequence is synthesized)
ggggcttataatagcaccgatgtcactaggctgttttgaggatttaagagagagagtgtaggggtatttttcagaacattgactattttgtgtgatcatgatgtctgttgatgactatgg

SEQ ID NO: 848632 - DNA, 120 bp, Artificial Sequence
  ENSG00000267986_2 (sequence is synthesized)
atggatggatatgagcttccatctagcggccagtgatttatggcaggaccaggggcgaattaaaagctacagatggattttttttttttttttggtcgcccaggctggagtgcagtggca

SEQ ID NO: 848633 - DNA, 120 bp, Artificial Sequence
  ENSG00000267984_0 (sequence is synthesized)
cagcttggccaggacccgagccacctgcaggggacccaagcgttctgcttctgctgggggcacctccacgtggatacctcggtctgcacccatggccagggcggtacgaatcgtctcctg

SEQ ID NO: 848634 - DNA, 120 bp, Artificial Sequence
  ENSG00000285533_0 (sequence is synthesized)
ggacgaagaggctggcgtgcccggtggctcggctagctcccgggtcccggccccgcctggaggatgcggctgtgggggaatgggagcggccggacctcccagcctgacagtgcatcaaga

SEQ ID NO: 848635 - DNA, 120 bp, Artificial Sequence
  ENSG00000285533_1 (sequence is synthesized)
gctttgcggagcctacagcccggatgggacgactgaggccctcccgctggcgagctggccgagggctcgtccctctccagctaaagcgccagcttacgatacagccaaactgccggctct

SEQ ID NO: 848636 - DNA, 120 bp, Artificial Sequence
  ENSG00000285533_2 (sequence is synthesized)
catcggctgtgggagcaggaggcccccaggggtaaatcccggagcctcgtctctgaagcctggcgcttgtgtctcagaagatggagttcctctcttgtggcccaggctggagtgcaatag

SEQ ID NO: 848637 - DNA, 120 bp, Artificial Sequence
  ENSG00000285533_3 (sequence is synthesized)
ggaccaaggacaaagaagttcccaacctcctcagaccctcgctgctgcccagatgtctgccatggggtggccatcatcgaatccactgagggcgcaaatagaacaaaaaggtgaagaaaa

SEQ ID NO: 848638 - DNA, 120 bp, Artificial Sequence
  ENSG00000285533_4 (sequence is synthesized)
ggtgaattctctcctttcttgagctgggacatccaacttctcagacatcagagctcctggaggccttcagactccgagacattacaccattggctcacctggtcctcaggtctttggact

SEQ ID NO: 848639 - DNA, 120 bp, Artificial Sequence
  ENSG00000285533_5 (sequence is synthesized)
tggaatgaattacaccattggctttccaggtcttccagcttgcagatggcagattgtgggacttttcagcctccataactttgtcatccaattcccataataaatcgcctcttatatctg

SEQ ID NO: 848640 - DNA, 120 bp, Artificial Sequence
  ENSG00000285533_6 (sequence is synthesized)
gagcctcgtctctgaagcctggcgcttgtgtctcagaaggtgcgggacccacagggacacttgaatcagcaggctcacgaccccccacccccctgcccccgcctgtgtttgccctggacc

SEQ ID NO: 848641 - DNA, 120 bp, Artificial Sequence
  ENSG00000285533_7 (sequence is synthesized)
tccagctagggctgaccactaattctgtcatgtgaccccacagtgcaggtagctcccccaagaccaagcccaaggcgcgtccgtgtggaggctggggctgacgcacccccaccccaggcc

SEQ ID NO: 848642 - DNA, 120 bp, Artificial Sequence
  ENSG00000285533_8 (sequence is synthesized)
tcatccccaaaggaggatgctccactgcagggggcggagtcttctccagatggagaaagacttttttattttctctgaattcgtcttaaattaggaaatcatgtgggaattggaaaagat

SEQ ID NO: 848643 - DNA, 120 bp, Artificial Sequence
  ENSG00000285533_9 (sequence is synthesized)
tggaaattctgacttgtttcccaggctctgaagaaacaggaagagaaaagtgaaaatagagttagcaccccgcccactcatttcagtttctccagtggctggccctgattagaaaagtgt

SEQ ID NO: 848644 - DNA, 120 bp, Artificial Sequence
  ENSG00000285533_10 (sequence is synthesized)
ttacttttggcagggggcgggggaggccgacttcaggtgacagaatggattaattaaaatctttggttaatgatatacaattatcattgaaccttgcatggatcctcttcttaaaattca

SEQ ID NO: 848645 - DNA, 120 bp, Artificial Sequence
  ENSG00000285533_11 (sequence is synthesized)
aaaattcatgtatatttataacttttaaattaatacgataaacacccatgtacccattgcaaaactcaaggggccaccaccatccagaattctgtattgtattgtattgtattgtattgt

SEQ ID NO: 848646 - DNA, 77 bp, Artificial Sequence
  ENSG00000285533_12 (sequence is synthesized)
ttgtattttttgtaaagaagtggtttaaccttgttgtccaggctagtcttgaactcctgagctcaactttcctcccc

SEQ ID NO: 848647 - DNA, 120 bp, Artificial Sequence
  ENSG00000285533_13 (sequence is synthesized)
caccacacctggcccagaattctgtattttaaagaaaaaaaaagttatatctgcatgcctacacaatatatcttttggttttccttagttttgaacttttttttttttttttttgagaca

SEQ ID NO: 848648 - DNA, 120 bp, Artificial Sequence
  ENSG00000285533_14 (sequence is synthesized)
acaggtgtgagccaccgcacccagccagttttgaacttttatgaagagggcatcatatgatttgttgtcctttgttacttgcttttttcactcaacctgttactatgattcatgtttcac

SEQ ID NO: 848649 - DNA, 120 bp, Artificial Sequence
  ENSG00000285533_15 (sequence is synthesized)
ttcatgtttcacagttaattcactttttcactgctgtatactattttgttgtgtaaatataccacagtttgtttattcatcctgaagataggcatttttatttttatttttttgagatgg

SEQ ID NO: 848650 - DNA, 120 bp, Artificial Sequence
  ENSG00000285533_16 (sequence is synthesized)
ctgccatggggtacttcttgaccacaccctccttctcttccctgcccttaacatagaaagagcctaagattgtactgacttaaaatggtactttagaacgctagtacaccgtcctctcag

SEQ ID NO: 848651 - DNA, 120 bp, Artificial Sequence
  ENSG00000285533_17 (sequence is synthesized)
tcttgctggctttcagaataaatcagtaaacctactttttctcccaccaacgcccctatcagttgggatcctcttacctcggcctcccaggtagctgggactataagcactcaccaccac

SEQ ID NO: 848652 - DNA, 120 bp, Artificial Sequence
  ENSG00000285533_18 (sequence is synthesized)
ctcaccaccacacacagctaattaaaaagaaaacaattttttgaggcagggtctcactctgtcgccatgctggaatgctgtggcatgactcgttgctcactgcagcctcaaactcctggg

SEQ ID NO: 848653 - DNA, 120 bp, Artificial Sequence
  ENSG00000285533_19 (sequence is synthesized)
caagtagctaggactaacagcgtgcaccaccacactcagctaatttcttttttttaatttttagtagacacaagatcttgctatgttgccaaggctggtctcgaacctctgagctcaggc

SEQ ID NO: 848654 - DNA, 120 bp, Artificial Sequence
  ENSG00000285533_20 (sequence is synthesized)
ccaaagtgttaggattacaggcatgaactaccaaacccggctgagttttttaaaatcttaatgaatgcatggatttaaatatattagctgtgttttaatcaagtatagttattgaaattc

SEQ ID NO: 848655 - DNA, 120 bp, Artificial Sequence
  ENSG00000285533_21 (sequence is synthesized)
aagtatagttattgaaattcaaattattcgtctttggttagggagaacttcttcaagttggttgttcttcagtccttttgacacaattccaatatatgagtcttggtggctcatacctgt

SEQ ID NO: 848656 - DNA, 120 bp, Artificial Sequence
  ENSG00000285533_22 (sequence is synthesized)
aatcccagcactttggaaggctgaatggggaagactgattgaggccaggagtttaagaccagcctggtcaacatggcaagatccctatgtctattaaaaaaataattttaaaaaagcaat

SEQ ID NO: 848657 - DNA, 90 bp, Artificial Sequence
  ENSG00000285533_23 (sequence is synthesized)
atccctatgtctattaaaaaaataattttaaaaaagcaattacagtagcctgtgatagcttctttgctgtttggtatgaaaagagagatg

SEQ ID NO: 848658 - DNA, 120 bp, Artificial Sequence
  ENSG00000224666_0 (sequence is synthesized)
cttgccttgctggagaaggggctcaaggcacaggacttgcctcggacttgccaaggaggcttgcaggaggctctttgtctactcctctgtcctcatccaacaaatggttgttccagaaaa

SEQ ID NO: 848659 - DNA, 120 bp, Artificial Sequence
  ENSG00000224666_1 (sequence is synthesized)
ctatttgaaaaaagggagacacagagaaaggtttttttttttttttaaaagtgatagaataatccaaagttaaaaattcaacacaatggaaaatattaattcaatccatgctgcaaacaa

SEQ ID NO: 848660 - DNA, 120 bp, Artificial Sequence
  ENSG00000224238_0 (sequence is synthesized)
gatacgcaaaaagctaccactatgtctccacgaagctgagtattttccttggagtagctttttatttggacatatggaatgaaacttacttaatattctgcagagatcttcctggtgttt

SEQ ID NO: 848661 - DNA, 120 bp, Artificial Sequence
  ENSG00000224238_1 (sequence is synthesized)
tggtgtttccaaaatgtctcaggtatgtctttatcagcatcatgaaaacagactaatacagtaagttgataccagtacagtggggcattgccgaaaagatacctgaaaatgtggaagtga

SEQ ID NO: 848662 - DNA, 82 bp, Artificial Sequence
  ENSG00000224238_2 (sequence is synthesized)
gaagaagataggaagataagggagtcaaaatgctgatagtgatatggacaataatgtacagactgaggtggtctcagatgga

SEQ ID NO: 848663 - DNA, 76 bp, Artificial Sequence
  ENSG00000224238_3 (sequence is synthesized)
gagacttgttgaatggctttgctcaaaatgctgatagtgatatggacaataatgtcctggagcaaaggtgacttgt

SEQ ID NO: 848664 - DNA, 85 bp, Artificial Sequence
  ENSG00000224238_4 (sequence is synthesized)
agcaaccaattttctggggagaaaagagaaaccaattttctggggagaaattcaagcccgctgcagaaatttgcataagtagcaa

SEQ ID NO: 848665 - DNA, 120 bp, Artificial Sequence
  ENSG00000224238_5 (sequence is synthesized)
gtggttttgtgggccaggctcagggtactggtgctgtgtgcagcctagggacttggcgcactgtgtcctagccactccagctgtggctgaaaggggccaagacagagctcgggcagtggc

SEQ ID NO: 848666 - DNA, 73 bp, Artificial Sequence
  ENSG00000224238_6 (sequence is synthesized)
aaatgtatggaaatgccttggatgcccagacaaaagtttgctgcaggagcgaggcccttatggagaacctctg

SEQ ID NO: 848667 - DNA, 120 bp, Artificial Sequence
  ENSG00000224238_7 (sequence is synthesized)
acaaaagtttgctgcaggagcgaggcccttatggagaacctctgctagggtagtgtggaaaggaaatgtggggttggagcccccacacagtgtacctactggggcactgcctagtggagc

SEQ ID NO: 848668 - DNA, 120 bp, Artificial Sequence
  ENSG00000224238_8 (sequence is synthesized)
tgtgagaagaggccaccatcctccagatcccagaatggtagacccaccgacagcttgcaccgtgagcctggaaaagccacagacacttaatgccggcctgtgaaagcagccaggagggag

SEQ ID NO: 848669 - DNA, 72 bp, Artificial Sequence
  ENSG00000224238_9 (sequence is synthesized)
taccctgcaaagccacaggagtggagctgctcaagaccatgggaatccacctcttgcatcagcgtgacctga

SEQ ID NO: 848670 - DNA, 77 bp, Artificial Sequence
  ENSG00000224238_10 (sequence is synthesized)
ggagctttaagatttgactgccccactgatcttggacttgtatgagccctgtaacccctttgtacctgtacctccat

SEQ ID NO: 848671 - DNA, 73 bp, Artificial Sequence
  ENSG00000224238_11 (sequence is synthesized)
tgtatctgtacttgccttgtctcagacgagactttggactgtggattttgggttaatgctgaaatgagttaag

SEQ ID NO: 848672 - DNA, 68 bp, Artificial Sequence
  ENSG00000224238_12 (sequence is synthesized)
catgggggccggtctttcccatgctattgatagtgaataagtctcaccagatctgattggtgtgtaag

SEQ ID NO: 848673 - DNA, 120 bp, Artificial Sequence
  ENSG00000224238_13 (sequence is synthesized)
ttgcttcttcctcatttttctcttgccgctggtgtgtaagaagtgcctttaacctcccgccgtgattctgaggcctccccatgtaaaactctaagtccaattaaaactctttttcttccc

SEQ ID NO: 848674 - DNA, 120 bp, Artificial Sequence
  ENSG00000224660_0 (sequence is synthesized)
cttggaaacaacctcagtgatcaatactgacagcacaaccacagagacctggtaatgcagcatgggggccctgagacctggcagaggtatggaatggcacaacagtcaggctacagaggc

SEQ ID NO: 848675 - DNA, 120 bp, Artificial Sequence
  ENSG00000224660_1 (sequence is synthesized)
agtgtggcatctgggacggggtgagaaggctgctactcacctcgttctacttcacattcaggggaggaggccccgctgcattcacttcgagggcccaacactgggaacatcatcccaaac

SEQ ID NO: 848676 - DNA, 120 bp, Artificial Sequence
  ENSG00000224660_2 (sequence is synthesized)
tctgacagggacacagggctgggcagatccaggctgccaggcctcacaaccgcagggaactggtcaggcatctcagacgggcttgttggtcctgaactaaagctggacacggactgggtt

SEQ ID NO: 848677 - DNA, 120 bp, Artificial Sequence
  ENSG00000224660_3 (sequence is synthesized)
tccgagtcatcttcagacacaaagttgctacagctgtcatcttcaaaggcctccgaggccactaagttgagagagaacaccagtcacatgggttctgtcacctcctcaaacaccacaagt

SEQ ID NO: 848678 - DNA, 120 bp, Artificial Sequence
  ENSG00000224660_4 (sequence is synthesized)
gcttgctgctggcaggcagctagacacagcatgggggactaaagagtctctacctctgtgagtgcctaatgaaggaatgtgacttcccaagcctgaatgaccagcctctaaagcagctgg

SEQ ID NO: 848679 - DNA, 120 bp, Artificial Sequence
  ENSG00000224660_5 (sequence is synthesized)
aagggaagcagctggcagcaggatcccatggatattaagcgcccttccaataaccttataaccctgccaagaaatcagtgtcaccagacaccacctaaaaatggaagattaattcagcca

SEQ ID NO: 848680 - DNA, 120 bp, Artificial Sequence
  ENSG00000224660_6 (sequence is synthesized)
caaattaggacctttactccacctcagtcccccaaatacatcctcatgtgcacaggaagaggttctagtcctctgtaacatatcccaaacaaagccagctggactcaggcttctttctta

SEQ ID NO: 848681 - DNA, 120 bp, Artificial Sequence
  ENSG00000224660_7 (sequence is synthesized)
gggcaatagaagcaagagctgctagaagaaacaggccagcatggaacatctgttgggacctttgttatctccaggtaacttctgatctcataaagaacacactcaaaggctacccacatc

SEQ ID NO: 848682 - DNA, 120 bp, Artificial Sequence
  ENSG00000224660_8 (sequence is synthesized)
accatttgctgcaaaagaacagaaatcctttacaatgctctgtagccacattatttggtagaccaaagtaacaaggcccagacacatgttattcccatggtttcaaagcctctttggcct

SEQ ID NO: 848683 - DNA, 120 bp, Artificial Sequence
  ENSG00000224660_9 (sequence is synthesized)
ttagcggttttccctcagcctgcccacaatcccactccttattagaactttcctactccatttttccccccctttctctttaaaaacagccttgtagcattccataaaggtttcttataa

SEQ ID NO: 848684 - DNA, 120 bp, Artificial Sequence
  ENSG00000224660_10 (sequence is synthesized)
atgataaatactgtaatgttggggacagaaaatgggctcagacctgaattgaatccctaactccactacttgctgtgtgaccttggtcaagttactttacctctgtaagcttcatgatcc

SEQ ID NO: 848685 - DNA, 120 bp, Artificial Sequence
  ENSG00000224660_11 (sequence is synthesized)
tctccatgcagggtttgagatgatgtatatattaaagtacctcatacatagtagttgttcaaatgatagtttccttttcctttaccttgaacctagtacttaaatatttgttgaaggaat

SEQ ID NO: 848686 - DNA, 120 bp, Artificial Sequence
  ENSG00000224660_12 (sequence is synthesized)
taactcctgaggaaggagcttgggaaagagccgacagggattattgcacaggacttctcagccttgaatgttcaaatgtatactttgactctcaaagaggagtgaaggtgtaacattttc

SEQ ID NO: 848687 - DNA, 120 bp, Artificial Sequence
  ENSG00000224660_13 (sequence is synthesized)
ccaatttatttgaccacagaatcctgactttgaggaacacttagtaccttcttaatgaacacagtgttccataaaacatgggaacccaccagaaatagccctcaggcctgcccaactctg

SEQ ID NO: 848688 - DNA, 120 bp, Artificial Sequence
  ENSG00000224660_14 (sequence is synthesized)
agacctttcactgatggccagagaaagtgaggaccttgggaaacaaatcacacagtctgatatctccccacatacccagtggagcccctgacttaccagaaatggcatcaggctcaggtt

SEQ ID NO: 848689 - DNA, 120 bp, Artificial Sequence
  ENSG00000224660_15 (sequence is synthesized)
gctgctgccctcagcaccaacaccgcatccccgaggccccatggcactggagcgccgccgctcgtggatctcatctgagatcatctccaggttcttcagggccatcttgtactcgccttt

SEQ ID NO: 848690 - DNA, 120 bp, Artificial Sequence
  ENSG00000224660_16 (sequence is synthesized)
tgccagggtcagtttggcctgcaggtcatccacagtctttttcagttgctgatcaagagaacaggagactaagtgaagactaccctgctagccttaagatgctttctgaatgacaggttc

SEQ ID NO: 848691 - DNA, 120 bp, Artificial Sequence
  ENSG00000224660_17 (sequence is synthesized)
aagtacattttctgcccatcattctacttcaaggaattttccaagacatgactgaagacctaattaccattgtaactgctattcattcaccagacaaaatcagccaccaccatccccaga

SEQ ID NO: 848692 - DNA, 120 bp, Artificial Sequence
  ENSG00000224660_18 (sequence is synthesized)
tcccatccaggtgacaacctctaatatccaaaaactctcactggtggaacaaaccccatcagggaagcaaaaatgggcatcagacacaccaaagtcccacagtctagacatctggttccc

SEQ ID NO: 848693 - DNA, 120 bp, Artificial Sequence
  ENSG00000224660_19 (sequence is synthesized)
agtacagtggttctcaaagttgagcttgcatcaaaatccccttgggtgttaagactcagctcactagactccaacctcagagtttctaattcagtcggtctagagtgggacctggtctat

SEQ ID NO: 848694 - DNA, 120 bp, Artificial Sequence
  ENSG00000224660_20 (sequence is synthesized)
caggtctccaggtgatgctgatgctgctggtcctaagagcatgctgtgagaaccactggcctagtacaacagagaaggtgactgaatggcagttacagaggttcagagaccactgaagac

SEQ ID NO: 848695 - DNA, 120 bp, Artificial Sequence
  ENSG00000224660_21 (sequence is synthesized)
ccaaccgagacaattttgaggtctgaaaactcagtaaagcctgtctctccactttccccttatagcaagtggcccatgtgatactctgctaccccagaaaagtgaagctttgagtgcaga

SEQ ID NO: 848696 - DNA, 120 bp, Artificial Sequence
  ENSG00000224660_22 (sequence is synthesized)
aaaatctcatcagtgacgaagcccaaagctacacatacctcgagctgcacatagtactttgccttgagttcaaaataaggcctgcagaagacaggaaggaaagccatcagagtaatataa

SEQ ID NO: 848697 - DNA, 120 bp, Artificial Sequence
  ENSG00000224660_23 (sequence is synthesized)
tacagtgaccacagtcaactccacaagatgaacaagaggcatcagctaccactggccaggtcgtccttccaatatttagtaaactcttaacaaggccgtgacatgtcagtgatgctccta

SEQ ID NO: 848698 - DNA, 120 bp, Artificial Sequence
  ENSG00000224660_24 (sequence is synthesized)
gctctggagactgacagacaccagatggaacgactgggctcacccagggctatattaacaggaggcccatctcaagacacggggaacccacacacacatatcttggggactctgcaactt

SEQ ID NO: 848699 - DNA, 120 bp, Artificial Sequence
  ENSG00000224660_25 (sequence is synthesized)
agctcatgttcctcctctgtgggaaggctgttcagagcctcacaggttatacccagcagtaagggtggcctggatctgctctcctaatgaagttggctccccagggatgaagagcagctg

SEQ ID NO: 848700 - DNA, 120 bp, Artificial Sequence
  ENSG00000224660_26 (sequence is synthesized)
aggctggagaaggggctgcttaaacctcctcctctactgaagtcaactggggaagagagagaagcaccactcctccctcacagcacagcaaggccaccactaggagggggtctcaggttg

SEQ ID NO: 848701 - DNA, 120 bp, Artificial Sequence
  ENSG00000224660_27 (sequence is synthesized)
gtcctcccaaaccttgtccaaagactggagttattagttggctgactcagccacataatgggcccaagaaatgccagcgtcctagcagttcccttggttctgggtcagctgaaagagctt

SEQ ID NO: 848702 - DNA, 120 bp, Artificial Sequence
  ENSG00000224660_28 (sequence is synthesized)
ggctcttttttaggaactttggtgcctgaacattaagagtagatcactgctttattcttgagctgttcaccctccatgaagctctcaagtcctgcatcctgaggatccagatggatgaca

SEQ ID NO: 848703 - DNA, 120 bp, Artificial Sequence
  ENSG00000224660_29 (sequence is synthesized)
aggacacaggactgccattgagaaatgaagatgaactgtgtcacagatgcagtggattactgactgcccttgtaatagtccattttgcatctgttggtaattcattgaggcactcttggt

SEQ ID NO: 848704 - DNA, 120 bp, Artificial Sequence
  ENSG00000224660_30 (sequence is synthesized)
tttctatgagtttgtattttttgaattcaagaattgtaacatcactgttagatccctccttatttaatgagagaaataaaatatttgacacgagaaaattttatatttgtatcccaatta

SEQ ID NO: 848705 - DNA, 120 bp, Artificial Sequence
  ENSG00000224660_31 (sequence is synthesized)
aggcatgagcccttgggcccagccggctgtttaatgttcttaaatagcacaagggacttctatgaactttcctagatgaaatatttattaactactaggtaaaacacttgtttgatactg

SEQ ID NO: 848706 - DNA, 120 bp, Artificial Sequence
  ENSG00000224660_32 (sequence is synthesized)
caaagggttatttctgaaacttaaacctcatgattggccaaccaagaactttttctccacagcatgctttaataatgaaatgcggattaagagtccaatattataaaacatttccacaaa

SEQ ID NO: 848707 - DNA, 120 bp, Artificial Sequence
  ENSG00000224660_33 (sequence is synthesized)
agaaagaatccatctgattctcaactctgaatgcacatttgaattccctcggggagcttttaaaagtctaatgccccagtgtaccccccccagttaattaattaaataattctctgggga

SEQ ID NO: 848708 - DNA, 120 bp, Artificial Sequence
  ENSG00000224660_34 (sequence is synthesized)
tgagaactgactgacagcaacacttaagcttcgagactgcagtgtgcagccgaggcccactcctccagcgtcaccacctcgtctttatctgccactgtgtctcctcattgcccacagctt

SEQ ID NO: 848709 - DNA, 120 bp, Artificial Sequence
  ENSG00000224660_35 (sequence is synthesized)
tagcaacagcaaaagtagaattcaaaccttggtaaacaaggcttaaattattactgttcatgaccttaattaattgaaaatgattactggtgaccacagcactccatgctcttccttatg

SEQ ID NO: 848710 - DNA, 120 bp, Artificial Sequence
  ENSG00000224660_36 (sequence is synthesized)
gaaaaagggttgcctagaagatttaggcaatactgggagttcttatttgaagtcacagaaaggagaaacttttctcaagccgtttttattacacttagtgtattaagacaagtacaaaat

SEQ ID NO: 848711 - DNA, 120 bp, Artificial Sequence
  ENSG00000224660_37 (sequence is synthesized)
aaccttgtaattaagatactgtatcagtcaaaaaagaagtcactattgtatgaagagatttacaaatgactaaaatatacaggctgtgacagaattaacagtttgaaagagggttgcttt

SEQ ID NO: 848712 - DNA, 120 bp, Artificial Sequence
  ENSG00000224660_38 (sequence is synthesized)
tttcttttagaaatgctaaattttcttaacaagacaaaaatacagtgctctaaatatgcattaccatgaaaacgttaaagaaaagcagtcttaacacttaactactattaacagcctttg

SEQ ID NO: 848713 - DNA, 120 bp, Artificial Sequence
  ENSG00000224660_39 (sequence is synthesized)
ccaacacatgcctgcctactccctttcctaactttaaagaactgtttcctctaaggaatactagtgcagcataacccttaaataatttcatttatttttaaagttacaacctacagagaa

SEQ ID NO: 848714 - DNA, 120 bp, Artificial Sequence
  ENSG00000224660_40 (sequence is synthesized)
attaacatcttgtcaatctaataacagtggcaaccattcttcacatgcacttctcttagaataaatccccttggctggcaggataaggcttatgctgtagaaccttctcccccacagcca

SEQ ID NO: 848715 - DNA, 120 bp, Artificial Sequence
  ENSG00000224660_41 (sequence is synthesized)
caaatccccttctataagtccctcctaccctcatccccccgcatccccactggcattcacctttcccaccccaaaaagtgcagctcatggtagccttctagaaaatggttttaatgggta

SEQ ID NO: 848716 - DNA, 120 bp, Artificial Sequence
  ENSG00000224660_42 (sequence is synthesized)
tcccagcatacacgcttttttaaaagccccctctgaacaccagaggtggtgaaaatgaattgtgttcttggatttttttttttttaagcctccactgggtcaaaaatatgtgctcttaat

SEQ ID NO: 848717 - DNA, 120 bp, Artificial Sequence
  ENSG00000224660_43 (sequence is synthesized)
acttgagtttttgctttgtgtgtgggttttctttctttttcatttagatatcgtgggataaagtggagaggacatctccattttcccatacaaactgagggtgagaagagaaagagaagc

SEQ ID NO: 848718 - DNA, 120 bp, Artificial Sequence
  ENSG00000224660_44 (sequence is synthesized)
aagctgttgcccccactttggcctggcttcccagccatcttcccagctctggttctttcataggaactagttattgcttccacaatgccgttatacggaatgttccacaaaggctgtgaa

SEQ ID NO: 848719 - DNA, 120 bp, Artificial Sequence
  ENSG00000224660_45 (sequence is synthesized)
cctagtcacagtctacccacaacaagaactctgctctgaaaaaccagcccaagagctcttacccagaagaacaatctttagccctcaaggtcactgaaacttcattagagcagtttagag

SEQ ID NO: 848720 - DNA, 120 bp, Artificial Sequence
  ENSG00000224660_46 (sequence is synthesized)
tagacgtgtaagatttggcatatattaaatgattattggcacaatgttctccagttccatgtataaatgttgatatgcacatcggccagggcccaggatgaatcagccaatctgcaccat

SEQ ID NO: 848721 - DNA, 120 bp, Artificial Sequence
  ENSG00000224660_47 (sequence is synthesized)
ttttatgtcagcaataattccatctcttccctttgagcactgtagggagagctgcttcatccggttctccaaggcctggccctcaggggaggtgctgctttggctcttactgctgccacc

SEQ ID NO: 848722 - DNA, 120 bp, Artificial Sequence
  ENSG00000224660_48 (sequence is synthesized)
actgccactgctactgctgaggccccggttgttgttggctttgtcacttgttttattctctgccccttctgccctgtctcctatagaaatacaaggattatcaaaagtgagtattgacaa

SEQ ID NO: 848723 - DNA, 120 bp, Artificial Sequence
  ENSG00000224660_49 (sequence is synthesized)
ttctgccctgtctcctatagaaatacaaagattatcaaaagtgagtattgacaattctaagtcacttgagctcaaaccagtcagctaactcagccctgtagaagtcccactgttacctac

SEQ ID NO: 848724 - DNA, 120 bp, Artificial Sequence
  ENSG00000224660_50 (sequence is synthesized)
cgtgcctatcagagaggttctcagtacataatcatttactgcttttattccttgtgatgttttatatattccttagctatagagatgaaatttgccatattcactttattgctgagaaac

SEQ ID NO: 848725 - DNA, 120 bp, Artificial Sequence
  ENSG00000224660_51 (sequence is synthesized)
gcatcggagggcacagggaagatgtcccagcaaaaggaacatgagcatccatgcaagggagtgtggctggagaggcagggtgggcatggaggtggcctggaagccactctgtggaatgca

SEQ ID NO: 848726 - DNA, 120 bp, Artificial Sequence
  ENSG00000224660_52 (sequence is synthesized)
tttcttgatgagcatgacagaaaccaagtcaaacttctatcagttttccagggggaggccctgggaaaagaggtctctatggtcagatgtcagtaagagccaccatttgctgagtgcttc

SEQ ID NO: 848727 - DNA, 120 bp, Artificial Sequence
  ENSG00000224660_53 (sequence is synthesized)
ttgggtgtcaggggttgattcatgtaagctgaaccaccaccctacacaacggatagtatacagtagatagcgtcatactccccattttacaggtgaagaaactgaaatacaaagttaggc

SEQ ID NO: 848728 - DNA, 120 bp, Artificial Sequence
  ENSG00000224660_54 (sequence is synthesized)
ccttgcccacatcatgccttagtaatgatgtaaaggtagctttgaatcaaatctgattacagctcttctttcctgcaggacttctcagccttgaatgttcaaatgtatactttgactctc

SEQ ID NO: 848729 - DNA, 120 bp, Artificial Sequence
  ENSG00000224661_0 (sequence is synthesized)
cccgagccgggagggaagcctggggaggacacctggggggcacggccctgaccacgctcagacccaagagggcggggaggggcgcagggcgcgtggggggcgcgggcgcacttactcgag

SEQ ID NO: 848730 - DNA, 120 bp, Artificial Sequence
  ENSG00000224661_1 (sequence is synthesized)
ctccttgaagcgctcgcggcccgccgccacgtacttgccgcccgcctgcagcgcgtccagccccagcacccggtgcccacgcgtgggcgtgaagaggcggcgcacgccgaacgggacgtc

SEQ ID NO: 848731 - DNA, 120 bp, Artificial Sequence
  ENSG00000224661_2 (sequence is synthesized)
cacctgctccgtgagctgctccagcagcgcctcgaaggttgaatttgaccggttcagccccagtgtcttccaggactcctggcccagagtggggaatttgagcttttccaccagaggagg

SEQ ID NO: 848732 - DNA, 120 bp, Artificial Sequence
  ENSG00000224661_3 (sequence is synthesized)
ctcattggggaatgattcaaagggagagggggtctttggaagaatcgttcctactctgggtaaagataggccagtccccttgagtgattctagacagtcagtaggctacatgttacggct

SEQ ID NO: 848733 - DNA, 120 bp, Artificial Sequence
  ENSG00000224661_4 (sequence is synthesized)
ggaagtccacaccgaaggtacagatattgatattatgagtattaatatcttataatgttcaaaaaaagtagttccgtagagaccaccagtcacagccatagccagtatgtaagctactaa

SEQ ID NO: 848734 - DNA, 120 bp, Artificial Sequence
  ENSG00000224661_5 (sequence is synthesized)
atgcctcatagcaacattaaatacagagatcaatttgtgagacgaccactttattaaatcaccaggtgttcaaaacatttgaaaagaagactatgactgggaaattactgctgtgtgtcc

SEQ ID NO: 848735 - DNA, 120 bp, Artificial Sequence
  ENSG00000285729_0 (sequence is synthesized)
gaggcctgtgtggcaaggaactgggagtagcctccagatgacagccagtaaggaactgagaccctcagtccaccaacccatgaggaacccatgcaatgaccacatgagtcaaactttgag

SEQ ID NO: 848736 - DNA, 120 bp, Artificial Sequence
  ENSG00000285729_1 (sequence is synthesized)
atgactgcagaccgagccagccccttgataagagctttgtgagaggatcagagccaaaggaccagatagaccggctattaaggaagaaagccatcttctataacatacaacacaatggaa

SEQ ID NO: 848737 - DNA, 120 bp, Artificial Sequence
  ENSG00000285729_2 (sequence is synthesized)
tctataacatacaacacaatggaactgtttaagaaattgggatgggtgcattgactcgtgcctgtaatcttactttgggaggccaatgcgggtggatcgcttgagcccagaagtttgaga

SEQ ID NO: 848738 - DNA, 72 bp, Artificial Sequence
  ENSG00000285729_3 (sequence is synthesized)
agcctgggcaacatggtgaaactctatctctacaaaaaataaaaaaaaattagtcaggtttggtagtggcat

SEQ ID NO: 848739 - DNA, 120 bp, Artificial Sequence
  ENSG00000285729_4 (sequence is synthesized)
agcgaaaccctatctccccactgcccctcgcaaaaaaaggaagaaatcttaatgaaacttgaactgaacttgggctagaagaaacccgaagtgtgaagcaggactaagaccaattgctct

SEQ ID NO: 848740 - DNA, 120 bp, Artificial Sequence
  ENSG00000285729_5 (sequence is synthesized)
tagtctcctaaaggccaaataagaagcaaaaagcttttatatgtatcaaaagaaattatctgtcttctgaggagacccttctttcatggcattcaaacttcggagtattaggcttttaaa

SEQ ID NO: 848741 - DNA, 120 bp, Artificial Sequence
  ENSG00000276259_0 (sequence is synthesized)
cagagcaacactccgtctcaaaaaaacaaaaaaaaaaccaaccaaacggattttcactgaacactgaaagcataaagaggaaaaaaaaaagatgaaagggaggagatccttttgaagcat

SEQ ID NO: 848742 - DNA, 120 bp, Artificial Sequence
  ENSG00000276259_1 (sequence is synthesized)
cgcttaccttgtgatctgttcttggatggcttccgtattggcctctgcaaaaaggtacagcatggtgcaactgaagtagtgagtgtggctatttgggtaccggagctgatttgcaattgc

SEQ ID NO: 848743 - DNA, 120 bp, Artificial Sequence
  ENSG00000276259_2 (sequence is synthesized)
attcaaaaagagatagcgacctagaaattaagaaaccttgacttaggacttagtctgaaaggccaacatgggaagacagttctaactggctagggtttgggtttctgacagaggctttca

SEQ ID NO: 848744 - DNA, 120 bp, Artificial Sequence
  ENSG00000276259_3 (sequence is synthesized)
aattaatctttggtttaaagcagtggttcttgggaccccaaagagttctcatttctgtgcgttttatttcagaattttccacattagaaattagattttaaaaatattcatttttaaaaa

SEQ ID NO: 848745 - DNA, 120 bp, Artificial Sequence
  ENSG00000276259_4 (sequence is synthesized)
cagacccactatgtgctaatgtaagaaacatgaactattttctggtgacactcatcactaagtctttctacattttgcagatctctaagtcttgcttaataaaagacagctggattctca

SEQ ID NO: 848746 - DNA, 120 bp, Artificial Sequence
  ENSG00000235038_0 (sequence is synthesized)
aggaaggatggcaaaggagccaaagatcaggcgagtccaggccaaggagtccgcacatctctcataggcagtaggggctcacccaccgaatgaagtggttggatctgcagtttaagaaga

SEQ ID NO: 848747 - DNA, 120 bp, Artificial Sequence
  ENSG00000235038_1 (sequence is synthesized)
aaaccaaaagccaactctttccaacaggcttctctgctggctctctaaggtgatgccaaccaaacatggaggttgccttaaagcattaacctgagtctgaagaatgaacacatggaaatg

SEQ ID NO: 848748 - DNA, 120 bp, Artificial Sequence
  ENSG00000235038_2 (sequence is synthesized)
aatcacacaaaaagaataattctgagattagcaatttacaactacctttgggcatgcctgctggccccagggaaggagagaggagaatccaagaaggtcctggaaagttaccagaaagga

SEQ ID NO: 848749 - DNA, 120 bp, Artificial Sequence
  ENSG00000235038_3 (sequence is synthesized)
tgagtttcgaggcagttgcatgtaaatgtggcttagccaatgggaaaggaagggatatgtgtcctggtacaggtatttgagaaatgtacagtccatctgttaaggtgtgctcaaccccca

SEQ ID NO: 848750 - DNA, 120 bp, Artificial Sequence
  ENSG00000235038_4 (sequence is synthesized)
accattgtccacacttcagtgacttaatcagtagagaccccaaattcatgtccagtgactttgacatcttcgagctgaaggactgatctctcattttttcaataacactttatgacttaa

SEQ ID NO: 848751 - DNA, 120 bp, Artificial Sequence
  ENSG00000235033_0 (sequence is synthesized)
cccaaaagaggaaagtaagacaagaatgagggtcatcatggggagaaggaagtcttggagagaaccctcacttgactttggcagcttctggaagatgttgcagctctgaaggcatgttta

SEQ ID NO: 848752 - DNA, 120 bp, Artificial Sequence
  ENSG00000235033_1 (sequence is synthesized)
gaatatcaggaaaatgcttctccaggatcatgatcagataactctccactctaagcctcctgcaaccctcagccctaccttccactttgggctttgcctcagccagccgctcctggaatt

SEQ ID NO: 848753 - DNA, 120 bp, Artificial Sequence
  ENSG00000235033_2 (sequence is synthesized)
tggtcaatcctgtagacaaggaggtcaatgtcactcttctctgggatgaacttgaggagctgcaaagagcaggcgcaagtcacacaagcaactggtttcccaaaggatccaaaaaactga

SEQ ID NO: 848754 - DNA, 120 bp, Artificial Sequence
  ENSG00000235033_3 (sequence is synthesized)
gagggaagagatttggggaagatgtcacttttcctcatctgactttgccttggagtcagatgggagaatgactcctggagaacacttagccttttccagctttccccaagaaaggctggc

SEQ ID NO: 848755 - DNA, 120 bp, Artificial Sequence
  ENSG00000235033_4 (sequence is synthesized)
ccagggaggcttctataaaccttctccctaactcttccagcctgatttctccttgacccaagaatcgcagcctcctgggggctgttgggaaggggcgtggctgcccgctgggttcagttc

SEQ ID NO: 848756 - DNA, 120 bp, Artificial Sequence
  ENSG00000235033_5 (sequence is synthesized)
aaagcttcaacctaaggcaaaaccccacctcaatccaggacagccctcaaaccttcttctccaaaaggtaccacctccgccttccctcattccctaacaggacttgggaatatatttaat

SEQ ID NO: 848757 - DNA, 120 bp, Artificial Sequence
  ENSG00000235033_6 (sequence is synthesized)
atgaatggggaataaggtagaaagtggaatggacaagtcctctctgtcaggcccagtacagagcagcagcccgggacagcagttaaaagttggagtggtcagagccccgagagtaactca

SEQ ID NO: 848758 - DNA, 120 bp, Artificial Sequence
  ENSG00000235033_7 (sequence is synthesized)
cctgctgagaaggattagttatcagctcctaggcagcagccacagccaacagagaattaaacatgcacaacattagccaagacatttggggacccagaaatagcatgacagacacaggga

SEQ ID NO: 848759 - DNA, 120 bp, Artificial Sequence
  ENSG00000235033_8 (sequence is synthesized)
tccctcagcatctacactgtccacttcatcccagtgagacccatggttgtagacaggcacccataagtggcactagacaggagctgcttctagcagacatgcactcacggagaagccaaa

SEQ ID NO: 848760 - DNA, 120 bp, Artificial Sequence
  ENSG00000235033_9 (sequence is synthesized)
cgaagcggagatcaggcagctcctcccatctgcctagtgcgaccaccactccccagttagggcagaccaaacccctgagttctcccaccccaggctttgctgcctgttcttccttttcct

SEQ ID NO: 848761 - DNA, 120 bp, Artificial Sequence
  ENSG00000235033_10 (sequence is synthesized)
ctgctgaaaacctgcagagagggtggaggacattcctccatcctgggatgagttcacctttctaaatagaggaggagtcacaaatgaactcgatctggaagctccagaaagttgtgttta

SEQ ID NO: 848762 - DNA, 120 bp, Artificial Sequence
  ENSG00000235033_11 (sequence is synthesized)
ctgaggcagagaaaagcaagtgcccttgaatttgctcactgcccctcatctgtcctttgatgtgcaaggggaactgaagaggcacagcacgcacctctgttctccctgacgccgatggag

SEQ ID NO: 848763 - DNA, 120 bp, Artificial Sequence
  ENSG00000235033_12 (sequence is synthesized)
tggaagctactgactcaaaactcgcatggggcacagagaagaccatgactcccaggacctcccctgccccacaaccaactgagagaagaggcaacaaggttaatacggcctccgggatct

SEQ ID NO: 848764 - DNA, 120 bp, Artificial Sequence
  ENSG00000235033_13 (sequence is synthesized)
ctccagtcctgctgctgggatttcagtcccagagactagacggcccactgagtgaggggaggcaggtgattggactgtgtgggctcagagaggtgagggggacaggacagggggtctttc

SEQ ID NO: 848765 - DNA, 120 bp, Artificial Sequence
  ENSG00000235033_14 (sequence is synthesized)
agtcttaactcttctcaactcaccaagctgggaggccccagacccagtttgtacaaaatccataaccttctttcctgactggccccatcccagcctcacctcagggccctggagcctgag

SEQ ID NO: 848766 - DNA, 120 bp, Artificial Sequence
  ENSG00000235033_15 (sequence is synthesized)
taggctgggccagagtcctgtcctgcagaaagactctcaaatgaggaggtggcctgcgatcaccaagcctggtatgcttgccacacactcctctgtcctcaaccccactcgtggagaatt

SEQ ID NO: 848767 - DNA, 120 bp, Artificial Sequence
  ENSG00000235033_16 (sequence is synthesized)
ggctcccaggagccagtgctcaaagagttcctttcagctccagcagccttagctgccagcctgacatgggcatggggttaaaaatgcctcctggaattaggagtagagaatccgatgctg

SEQ ID NO: 848768 - DNA, 120 bp, Artificial Sequence
  ENSG00000235033_17 (sequence is synthesized)
tgggcacccacatttaaattaaataagcaatcatctggccagagccctaggagcggctgcatgtgtcctcagtcatccacagatcagggctgggcagaaagtgagctagggcaacctctc

SEQ ID NO: 848769 - DNA, 120 bp, Artificial Sequence
  ENSG00000235033_18 (sequence is synthesized)
ttggcacccagggaaaccctcaagactgagatcccaggctaagtaaagaaaacaaggaagatggtagcccagccccaagagggagaagtccctctggggcgggccagagataaagcaatt

SEQ ID NO: 848770 - DNA, 120 bp, Artificial Sequence
  ENSG00000235033_19 (sequence is synthesized)
ccctgaggcttctaagctggtcattccccaaatggacttagagggaaggcccctagctgctagttaccaggcggattcctgggccccaactcatctcccgaatcacattccaggatgagg

SEQ ID NO: 848771 - DNA, 120 bp, Artificial Sequence
  ENSG00000235033_20 (sequence is synthesized)
tctgagaagcaacccttttggcagtccccacagatactcggcacagtttcagattcccacctcaggaacaccctgcgctctgccaccaactcaccccctactttctctgtgactggaaga

SEQ ID NO: 848772 - DNA, 120 bp, Artificial Sequence
  ENSG00000235033_21 (sequence is synthesized)
ccagactgctggcagccacctgcacatagagccttgagagcaatatccaaggcttccccgggccttcccaggcccaggcccaggcccagccccagcctcagcctcagcctcagccccctg

SEQ ID NO: 848773 - DNA, 120 bp, Artificial Sequence
  ENSG00000235033_22 (sequence is synthesized)
agtgacatggagcagcaccttctgccttccttgcaaggcaacatcccctgctcggtctcatagaggtgttgacagacaaaatgtggtggaaaagtggtttgagaagttattatgccttct

SEQ ID NO: 848774 - DNA, 120 bp, Artificial Sequence
  ENSG00000235033_23 (sequence is synthesized)
aagcctagtccctaaatcctgggccaaagacagcaagggtccacagtggtcaggccttgcgactctacctccgatgctccaggatggaagagagaaatggacaaaacaccatttcaatac

SEQ ID NO: 848775 - DNA, 120 bp, Artificial Sequence
  ENSG00000235033_24 (sequence is synthesized)
ttggtgtataaatatgaaccataatacaagcatatttccccctatggtctgtgcacctctacttcatacctacatcctcagcaagaataaaatcatcacctcataaagaataaaatcatt

SEQ ID NO: 848776 - DNA, 120 bp, Artificial Sequence
  ENSG00000235033_25 (sequence is synthesized)
cagtatacatgtgaggaaggaaggaaagaaggaagggaaggggaagatggaggaagggaaggaaggaaaggaaaggaaaggaaggcaggcaggcagaaagaaaaggagaagctgaggttt

SEQ ID NO: 848777 - DNA, 120 bp, Artificial Sequence
  ENSG00000235033_26 (sequence is synthesized)
ggattcaagggtatggtccaagaggccagagggtatagggtcttacctggtgcctctggtaggctgaaaacatcttttcaaaatcctctaggtccaggatccgaaatacctgcatgtcat

SEQ ID NO: 848778 - DNA, 120 bp, Artificial Sequence
  ENSG00000235033_27 (sequence is synthesized)
caatctcattccatacggtgccagggacacgctcctaaaattcagggtagggagaagatcccatggttggcccaactccatcatgaagatgctccatgcctccctaaccccacttatctc

SEQ ID NO: 848779 - DNA, 120 bp, Artificial Sequence
  ENSG00000235033_28 (sequence is synthesized)
ccaactgcacatactaagatgaccaggatttcagaccttcagaaggtagtcggttgctcccctcaacctccaactctcttgaatactctgctccagggtagaggccagagacaaccccct

SEQ ID NO: 848780 - DNA, 120 bp, Artificial Sequence
  ENSG00000235033_29 (sequence is synthesized)
tttcctcccttgtgcatggagccacatgtaaacatgttctagaaatcatggggggtgctggggggatgggtaggcagtaggaaagggggtccacttcactttttccaaaagcaaagtcag

SEQ ID NO: 848781 - DNA, 120 bp, Artificial Sequence
  ENSG00000235033_30 (sequence is synthesized)
aagctgcactcagggtacttcacacaggcccactccccctaaagggcaggttgcctggagtcacccctgtccttggcagccatcattggaagattaaagccatacatattttggatcctc

SEQ ID NO: 848782 - DNA, 120 bp, Artificial Sequence
  ENSG00000235033_31 (sequence is synthesized)
cttgataatccatcagagctgataggggcatttgggagtaaaagagatgtcttcaatgtagaccaaagggacagggcaaagggttcctgatccttctcctcctcctcatgcttaaaaaat

SEQ ID NO: 848783 - DNA, 120 bp, Artificial Sequence
  ENSG00000235033_32 (sequence is synthesized)
gcacagcatctccacgggaggacaggattatcggcaagccactaagagggcaatttcctgctgccttcattctcagaacacagaatcgctctcagtcttctgacagcgcctcagctccca

SEQ ID NO: 848784 - DNA, 120 bp, Artificial Sequence
  ENSG00000235033_33 (sequence is synthesized)
cacagctgtcccaatcagtcttgctgtctgggagagggagaagccacacacccccatagcccttccctatcccctccacatgcacccccattaggaaccctggggattcagaactctttc

SEQ ID NO: 848785 - DNA, 120 bp, Artificial Sequence
  ENSG00000235033_34 (sequence is synthesized)
caccatcaagtgggggaaactgaggcctgggggcttgtgagaagaaagggaggaggatgtctcagaggcggctggggcagcactaagaatagtatgggaggtggtgccctctgaccctgc

SEQ ID NO: 848786 - DNA, 120 bp, Artificial Sequence
  ENSG00000235033_35 (sequence is synthesized)
tcaggcaggaggcccccccgtacagaagctgtgctgttagcgcagatactgccctgtttgttctgcagccgcgggaaatgcttaggggctgagatcatgctgctccatggcctgagccaa

SEQ ID NO: 848787 - DNA, 120 bp, Artificial Sequence
  ENSG00000235033_36 (sequence is synthesized)
gcgaggccctccgtgggcttagagcaactcagctgccagacgctgaccaggctgggcaagggcctcgtgactgggcagtttcctgcctgcagagccccaaactgctgctcaaggcaggtt

SEQ ID NO: 848788 - DNA, 120 bp, Artificial Sequence
  ENSG00000235033_37 (sequence is synthesized)
cccgagagacagttccagatcaatgcctgcccctcccaggggacagcagagagggagaggcccgagactgccaccactccgttcctccaccccctttgtcccccaggcatccaactcaac

SEQ ID NO: 848789 - DNA, 120 bp, Artificial Sequence
  ENSG00000235033_38 (sequence is synthesized)
caccttcttttgcacatacttggaaagaaggatgatgcagttttgggccctccggccatcaatgaccgacagctctttgaccttgcgggaagccaggtagatgtcttcagtggagcccag

SEQ ID NO: 848790 - DNA, 120 bp, Artificial Sequence
  ENSG00000235033_39 (sequence is synthesized)
ctctttctgcaaccaacaagtcaagtggacagttgaggtgtgggttccctaatcctcctcttacccgccccgcaagagccacctcctaccaatccaggaatgctcctggtgtgaggggaa

SEQ ID NO: 848791 - DNA, 120 bp, Artificial Sequence
  ENSG00000235033_40 (sequence is synthesized)
gggggaagaaaaagacaggagagagaggagggtggataatagctaactttaagagacggtatctgggacttttccataggctccaatgggttggggaaggacaccgagaagccccccttc

SEQ ID NO: 848792 - DNA, 120 bp, Artificial Sequence
  ENSG00000235033_41 (sequence is synthesized)
ctattttttttatttttttagagattttttttagaaattatccactctgggcaatgagggaaggggctgtgccagtgggtcagggtatgactgatctctgtggctttgggcaatgtgaca

SEQ ID NO: 848793 - DNA, 120 bp, Artificial Sequence
  ENSG00000235033_42 (sequence is synthesized)
ccctcctcaggcttatgctgagaacctggttgcaaacccccctagggaacagttgctgactcctagggacttcaggcacagcccaagatgcccagggtagagagcatccacaagttcaga

SEQ ID NO: 848794 - DNA, 120 bp, Artificial Sequence
  ENSG00000235033_43 (sequence is synthesized)
ggtatggaaactgaagcagaactctctcctctgagtcccagcaggcagattctggagaaatcattgatcccgccccactccttctcttgggcccctggcgaggtagacaggaggctgtct

SEQ ID NO: 848795 - DNA, 120 bp, Artificial Sequence
  ENSG00000235033_44 (sequence is synthesized)
agtgtgctgttcttcctctgggaggtccctcttgcacaacttcaggggccgccttgcatggttatctttgtgaattgtgtcgtgcctaccctgtgtgtccttacaggaaaggctctcctt

SEQ ID NO: 848796 - DNA, 120 bp, Artificial Sequence
  ENSG00000235033_45 (sequence is synthesized)
tggcctggtgggtaagacagtagacctagaagccttctcctcattccaggagacattgacctccactgctgccaggggtctatttgattacctccctctgctacatttcttctttctctt

SEQ ID NO: 848797 - DNA, 120 bp, Artificial Sequence
  ENSG00000235033_46 (sequence is synthesized)
acaaggtccaggatccgaaatacctgcatgtcatcaatctcattccatacggtgccagggacacgctcctaaaattcaggcccacccccagcttccagcatctgccagaaggacttgagg

SEQ ID NO: 848798 - DNA, 120 bp, Artificial Sequence
  ENSG00000235033_47 (sequence is synthesized)
ctcttcgaggaggtataactgaggtctggagccagagagcggtaagtctgttcctaatattccctacatgttgacactcaccgcgtcgccctgatgtgcccaccttgcataattttcaaa

SEQ ID NO: 848799 - DNA, 120 bp, Artificial Sequence
  ENSG00000235033_48 (sequence is synthesized)
tttaattttcccaccactctggccaagagcccatcatctctagtctagactcctgggacttctgcccgctggagatatccttcacatgccagggaaagctttctcaaaagcatgtttcat

SEQ ID NO: 848800 - DNA, 120 bp, Artificial Sequence
  ENSG00000235033_49 (sequence is synthesized)
tatgtttcccccgtggtgcactgcctttggggtcaggcgggcctagctggctgacgctcccagccctgccatcctgtgggactgtgggaagatggagggatgagatttttctcccatgtc

SEQ ID NO: 848801 - DNA, 120 bp, Artificial Sequence
  ENSG00000235033_50 (sequence is synthesized)
acataaaaggaaactgagtctccatgattttttttacctcaccgagatgacgtgagaagtgagataacatacttcaaacatacatggtagggccactaataataatctatttattatatg

SEQ ID NO: 848802 - DNA, 120 bp, Artificial Sequence
  ENSG00000235033_51 (sequence is synthesized)
gagggagggtgaagtgctgcttagactggtgccaagatgagagtcgggtgcaggggtcaccacatctcccctcgtcactcacaggacattgagccctttggaagagggaacaccctgcat

SEQ ID NO: 848803 - DNA, 120 bp, Artificial Sequence
  ENSG00000235033_52 (sequence is synthesized)
agcactgagacccaacatgtgacctggggccagcagcatcacctaggaaattatgagaaatacagactctcagacccacaggatcagaagctgcattttaacaagactcatctttacaag

SEQ ID NO: 848804 - DNA, 120 bp, Artificial Sequence
  ENSG00000235033_53 (sequence is synthesized)
actccaggagcttagggtgcagtgacgaacagtgtttgctgacagcagccctcacccagacaagaaccgaggtctcacaccagccatcatcaagcccagagtagaccccaaaagaggaaa

SEQ ID NO: 848805 - DNA, 120 bp, Artificial Sequence
  ENSG00000235032_0 (sequence is synthesized)
gcacacagcttagcacaaagcaggcctcagatgcacgctggacaaatgtgctggtatcctctgcatccttatggccagcatgatccatccagaaacccagtggaactgagccgcgagctg

SEQ ID NO: 848806 - DNA, 120 bp, Artificial Sequence
  ENSG00000235032_1 (sequence is synthesized)
gggggcactgcagagcttctgacacggctctgggggaaatcccacacggatgggcagctgcctgcatctggcactgtggaggtgggcgggcagccatggaggatggggagactcatcttt

SEQ ID NO: 848807 - DNA, 120 bp, Artificial Sequence
  ENSG00000235032_2 (sequence is synthesized)
ctagacttctcctggggaccgcatttcctccagcctccaggtccagaccaaaatagaatgaggtaaattcagcccctttcctgaagcacactcaaggaataaacaagcaccacaaataca

SEQ ID NO: 848808 - DNA, 120 bp, Artificial Sequence
  ENSG00000235035_0 (sequence is synthesized)
gtctacagttgaggagacagaggctcaagcagggcaagtcctctacccaagggcacacagcccagagtggggaggatggagcctggtcagcctggtctggttaataaggtcttttcaggg

SEQ ID NO: 848809 - DNA, 120 bp, Artificial Sequence
  ENSG00000235035_1 (sequence is synthesized)
ccttgttgtctatacaactacagcaaggagcatggagaggtttagaagaacccttgccctccttcattcattctgccctgactcagccctgagctctgcaaagatgcatgctcagcacaa

SEQ ID NO: 848810 - DNA, 120 bp, Artificial Sequence
  ENSG00000235035_2 (sequence is synthesized)
atacatcttcacatcttagtccaaattctggaaagtctgaatgctcacaaccagtgtgttttgctgagaaaacgggctgatgacaagtcagcctactctgtccctgtacatgtgtggcct

SEQ ID NO: 848811 - DNA, 65 bp, Artificial Sequence
  ENSG00000280474_0 (sequence is synthesized)
gcccagtctggtctcaaactcctgagctcaggccgtctgcccaaatgttttccaggttcacgcca

SEQ ID NO: 848812 - DNA, 120 bp, Artificial Sequence
  ENSG00000269246_0 (sequence is synthesized)
gccgcttgctctctccgatgggaatggcgaggcgagatctagcctttagggtgggaagagaatgcacagaaagcgctaaggatcaaggaggctgtcaataaacgggagttgttgctgtga

SEQ ID NO: 848813 - DNA, 120 bp, Artificial Sequence
  ENSG00000269243_0 (sequence is synthesized)
acggggctagaattccaaggccccctctctctgataccaggttctccagggagacagatctgggcttctcagcagaggccgcagctgaaacgatgatgccaatggtttggattgacagca

SEQ ID NO: 848814 - DNA, 120 bp, Artificial Sequence
  ENSG00000269243_1 (sequence is synthesized)
aaaaaaaagaaagaaaaaaagaaaaggctggtgacacccccctggcgtggttgacctggtcccagtcgcagtccctatgggacagcagagctgtcaaaacagaacccaatgatgacggct

SEQ ID NO: 848815 - DNA, 120 bp, Artificial Sequence
  ENSG00000269243_2 (sequence is synthesized)
cccaatgatgacggctgaaaatcaagccagactgctgtgcggtcagcttgccgccgtggaatgccttgtgtcttggccatgtccagccaagggtacaacgtgcttgttcccgatcaccca

SEQ ID NO: 848816 - DNA, 120 bp, Artificial Sequence
  ENSG00000269243_3 (sequence is synthesized)
ggtttgccattggaagtcaaagacagaatcgcttcatggcactacagatgtggaaaaataaaaatctcagctagaaagaacgtccgatttggagatagcgggaggacacgaaggagtggg

SEQ ID NO: 848817 - DNA, 120 bp, Artificial Sequence
  ENSG00000269243_4 (sequence is synthesized)
tcggggtcacttgcagcacacacagcgtccccttgatgctcgatggggaccgcagacgggcctgcagacctaacccctggctgtggacaggagaggctgctccaggcttctttccttctc

SEQ ID NO: 848818 - DNA, 120 bp, Artificial Sequence
  ENSG00000269243_5 (sequence is synthesized)
aatgctttacacaggatttccttcatttgtgctttcctttggtttaacagttaaaaaagaagagtgagggggcaaaatggtttgtcacttgtccaaaactgagagaagaggtggaagtgg

SEQ ID NO: 848819 - DNA, 120 bp, Artificial Sequence
  ENSG00000269243_6 (sequence is synthesized)
gcgccaaatctcctgggtgatgcttcctggtcctggcgatcggttgccttgctcagggtttgggagctgttgctcctggaaccaccgctggccttctgggacctcgcttccgtggtaggg

SEQ ID NO: 848820 - DNA, 120 bp, Artificial Sequence
  ENSG00000269243_7 (sequence is synthesized)
gacgtgaaccagcctcctggtggagctttgtgttgcagtgaggccacaaagcaaaggcccagaggcagaggcctgacactggctgtggtcgacggtcacaccttgactccctctctctct

SEQ ID NO: 848821 - DNA, 120 bp, Artificial Sequence
  ENSG00000269243_8 (sequence is synthesized)
aaacggacatgcgtcccccagaggaaggaagggtgtggaggggaaaacgaaggtgccctgatggggagataacggggctagaattccaaggccccctctctctgataccaggttctccag

SEQ ID NO: 848822 - DNA, 120 bp, Artificial Sequence
  ENSG00000269243_9 (sequence is synthesized)
ggagacagatctgggcttctcagcagaggccgcagctgctcagacttggtctctggaacctactgcgccactccctgcctcacttcccatgaaccagaaggtggctcctgcccgctggcc

SEQ ID NO: 848823 - DNA, 120 bp, Artificial Sequence
  ENSG00000269243_10 (sequence is synthesized)
agaaacagagacctttcacaaagaccaggctctcctcctctccacggatgaagacagctttcccagctggggtgcagccctgcactggcaaatttggcagcacagccctctcagggtcac

SEQ ID NO: 848824 - DNA, 120 bp, Artificial Sequence
  ENSG00000269243_11 (sequence is synthesized)
tggggaggtgagcccagtgcaatgactcacaaatgatggggtggcctctcggcctggcctgggaggtccatgagtcctgggtggacagtgatatgcccttttgctgtggttttatagatg

SEQ ID NO: 848825 - DNA, 120 bp, Artificial Sequence
  ENSG00000269243_12 (sequence is synthesized)
ggaaaagttctctggctgtgcctcagacctgaagccccacatggttagttatagaaagctgcaggtgccggcagccaggaaggctttgggggtgaggtcagctctttggggagcagaaga

SEQ ID NO: 848826 - DNA, 120 bp, Artificial Sequence
  ENSG00000269243_13 (sequence is synthesized)
tgaagatgctggctttgggaggggaggaggggttggcctacttctcactgctctatggttcaaggtctgaacacaggtcgtttgtaccaggtcacaccctgctccgatatagctcaaagt

SEQ ID NO: 848827 - DNA, 120 bp, Artificial Sequence
  ENSG00000269243_14 (sequence is synthesized)
acaactgacgcctgctcaccacaccctccaactacaagggtcacacctgtgctagacccttccttctctagaaagcacccaacactcatggtgaccacaagcttggatatcctttctctt

SEQ ID NO: 848828 - DNA, 120 bp, Artificial Sequence
  ENSG00000269243_15 (sequence is synthesized)
ataaccatgacactggccagatccaacagcctagctggagggatgggctccgaggggctccggggtggggccaggccagtgtgtggtccctggggccggctgcttgcatctcagtccctg

SEQ ID NO: 848829 - DNA, 120 bp, Artificial Sequence
  ENSG00000269243_16 (sequence is synthesized)
ctcccaccatgtccctgactaggaggctgtgggcaagtggcctgtatgtgtctctgcaccttggccttctcatgagtaaaccagagggctctgggacaaggactgaagcagggacagtgg

SEQ ID NO: 848830 - DNA, 120 bp, Artificial Sequence
  ENSG00000269243_17 (sequence is synthesized)
gaggagccggagggcctcacctcctcaatgttgcgaatccagttccggatgttgtcgaaggacttctcgttggtgatgtcgtagaccagcatgatgccctgcgcggggagagaagacaca

SEQ ID NO: 848831 - DNA, 120 bp, Artificial Sequence
  ENSG00000269243_18 (sequence is synthesized)
ggtgcctgatcggctgcaggctctggaagggaggcctcagcggcaccagagaacagtggtggggagcccagcacccactgcacagccaggcccattagctgccgccctccccacctctgt

SEQ ID NO: 848832 - DNA, 120 bp, Artificial Sequence
  ENSG00000269243_19 (sequence is synthesized)
ggagccccggaagccagccccctcctctccatccctgtggcccttctttctgctgggttctggcaccagccttgtcctgccccccgggccgctgaggtgacccttctgcctcacaggcca

SEQ ID NO: 848833 - DNA, 120 bp, Artificial Sequence
  ENSG00000269243_20 (sequence is synthesized)
tcccctcacgctgaccctcccctgcaatcggcctcctcttcaccccttgctcaccccacgctctgcctgagccacctaccaggcacaactgagcccaggaagtcctgacccgacatccac

SEQ ID NO: 848834 - DNA, 120 bp, Artificial Sequence
  ENSG00000269243_21 (sequence is synthesized)
acaacttccagtgaccccaccacagagggaaccggctgtgtgaagatggagccgagagtgccaaggcccttccagttccctaacctagacgtgagcaactgggagacggctcgtgggtcc

SEQ ID NO: 848835 - DNA, 120 bp, Artificial Sequence
  ENSG00000269243_22 (sequence is synthesized)
tggaagagcttcggggcagccccgcctcagcctgggtccacagcctcgctactgctgtggacaagcgcaaacatgcccatgcgatgcaaggggaaactgaggcacagagacgtgaccttt

SEQ ID NO: 848836 - DNA, 120 bp, Artificial Sequence
  ENSG00000269243_23 (sequence is synthesized)
aagattcaagcacggggggcgggggggggctaactccaaaagcactgatgacacctatcctctcagcaatatccctgggcctttttcagccccagaacccacatgtgggggccaccctct

SEQ ID NO: 848837 - DNA, 120 bp, Artificial Sequence
  ENSG00000269243_24 (sequence is synthesized)
gacggtctgtgtggttctcgatgtccttgtggagtgcccacagcgggccagcctgcagtgccatcacaagtccccctttgttgccgggcatcctgggctccaaggcacgtggcctgctca

SEQ ID NO: 848838 - DNA, 120 bp, Artificial Sequence
  ENSG00000269243_25 (sequence is synthesized)
tggccaggcctggatttcttccttcctcctcgctacctgctccccaggcccagccctgcatctgtggcacctgagggcactgatgacttctgctgctggccaagttgtctggggccatcc

SEQ ID NO: 848839 - DNA, 120 bp, Artificial Sequence
  ENSG00000269243_26 (sequence is synthesized)
aagtttgcagaataaggacacgggccatgtggtaatggtgagacagatgtgggtgcaagagtgtgggacaaaaacgacacagatggggcaagaaagtcactgcaaccccaaatcctcctg

SEQ ID NO: 848840 - DNA, 120 bp, Artificial Sequence
  ENSG00000269243_27 (sequence is synthesized)
ggaattcagggacatgaataatggcctcacagtcagccgcaaccatggcgaagaacctcaaggctgcagtggcccatgatgtctgccatgccccatccacggtgggcacaccctgtgact

SEQ ID NO: 848841 - DNA, 120 bp, Artificial Sequence
  ENSG00000269243_28 (sequence is synthesized)
gtgacatggtcagggacagggggcgtggggccctttatccggggactggaccctctgaaagcccaggattcctgccttcaccactaagttggtgacatgtgcctaagactcaaattcctg

SEQ ID NO: 848842 - DNA, 120 bp, Artificial Sequence
  ENSG00000269243_29 (sequence is synthesized)
gattatacctatttcagggagctgaggggagaacctggacgttagtggggcagtgggtagagctctctcttagaatcaagcagaagcacctggaaaacactgagccagccatcctattcc

SEQ ID NO: 848843 - DNA, 120 bp, Artificial Sequence
  ENSG00000269243_30 (sequence is synthesized)
aggttttcctggaaacacccctcagggctccaagtgactattttccagggccccgtctgggcaaacctcaccatgggtctctaggcatccaatgcttcccaaacttgggattttgaggcc

SEQ ID NO: 848844 - DNA, 120 bp, Artificial Sequence
  ENSG00000269243_31 (sequence is synthesized)
caagggtctatgagcatgctgacagagatgaggacacagctgcaatggtggtgctgtcccatatgactgatactggctacacaaggctctagggcatcagaaacatagctgctttgaccc

SEQ ID NO: 848845 - DNA, 120 bp, Artificial Sequence
  ENSG00000266213_0 (sequence is synthesized)
catgagaaggcacattgagaagccagccgtctgtgaatcgggaagggagccctcaccagaacccagcccagctgtactctggactcgaactcccagcctccagaactctgagagacctgg

SEQ ID NO: 848846 - DNA, 120 bp, Artificial Sequence
  ENSG00000266213_1 (sequence is synthesized)
ctgttctcacccttggcccctgattcctgcagcgtgaatcaaatctaaagtcttctggttccatcctgttgtgtgggaaacacaacccccttcctctgtggcctccttttccctcctgct

SEQ ID NO: 848847 - DNA, 120 bp, Artificial Sequence
  ENSG00000266213_2 (sequence is synthesized)
ggagcaccgctgctaggcctgatctgcaaagctgcaaggttgtttccagcactttgggaacttaatatgtctacagctttcacaccaggctgcccctcttctcaaaagacatctgaacct

SEQ ID NO: 848848 - DNA, 120 bp, Artificial Sequence
  ENSG00000266213_3 (sequence is synthesized)
agcacaggttaattagatcattatttcaagagacaaaagctacaagaagtccccagcagcacacacacatttccagtgatgtcagactttaaaattgtttgtatttattccctaaagaaa

SEQ ID NO: 848849 - DNA, 120 bp, Artificial Sequence
  ENSG00000266213_4 (sequence is synthesized)
gaagtgctgccacagtgaaattattatttttaaaagtgctgcaaaaatattttacaaactttaccttcaactgtgatttctccctcttagcaattcataattatatattgccttctccaa

SEQ ID NO: 848850 - DNA, 120 bp, Artificial Sequence
  ENSG00000266213_5 (sequence is synthesized)
attcccaacctactgattccattcctaacagtgaatgaatccttctagttcctttcataattactttagcttttctccagaaaagctttttgttgttgttttacttcgtggaaacatatg

SEQ ID NO: 848851 - DNA, 120 bp, Artificial Sequence
  ENSG00000266213_6 (sequence is synthesized)
gctgatggtggggactttactgtttcctaatttgaaaaagaaagccatcaacttccactcacctatgaatggggtatttcctcgtcgatggtcacatcagaagaggggcccaagtgtgca

SEQ ID NO: 848852 - DNA, 120 bp, Artificial Sequence
  ENSG00000266213_7 (sequence is synthesized)
cccagcatgtactaaaagccgcaagtggagagctggggccatctgcagcagatggccccacacacagcgccaccatgaaaggccattggaaacaattaactccattcacgctaagcagaa

SEQ ID NO: 848853 - DNA, 120 bp, Artificial Sequence
  ENSG00000266213_8 (sequence is synthesized)
ataaacaatcacccattcaagtgagaattagttccactatctttctccaagtcatcaaaacaaagctctccgagttgggatacctcctaaagtaccttagcagcacggaaccacacaaac

SEQ ID NO: 848854 - DNA, 120 bp, Artificial Sequence
  ENSG00000266213_9 (sequence is synthesized)
atccccttgcttgccgatttctgtaacccaagccagagataactcgacatttgcattactaattgctctcttccagaacttgttgacgcttgggttggttttgaatagaccgctaagtgg

SEQ ID NO: 848855 - DNA, 120 bp, Artificial Sequence
  ENSG00000266213_10 (sequence is synthesized)
ctctccagacataagcagggcccatctcaccaactgcaaacaagctcgcctatctgtcatcaggcggctatttctttgctccaagaaatagacagaaagtcccctgaacactctagaggg

SEQ ID NO: 848856 - DNA, 120 bp, Artificial Sequence
  ENSG00000266213_11 (sequence is synthesized)
ccacacccgcctctctcctgcaggaagtccccagccctgggagcccacgcctctcccctcgtgccctcagtgggcgccttccctatccatcagttgcagggacaggtcttggtgctggcc

SEQ ID NO: 848857 - DNA, 120 bp, Artificial Sequence
  ENSG00000266213_12 (sequence is synthesized)
tgttctccataagcctcccctgctaatgcgatgctatgaccatgcggccactgcccgctttgtcctggtactccccaaaagactcgggtttgaactgcggaaacatttaggtgagggtgg

SEQ ID NO: 848858 - DNA, 120 bp, Artificial Sequence
  ENSG00000266213_13 (sequence is synthesized)
aagtgcaagtcggtggcataattaattaagtgattgcatttatgcggctcctctgcttttgagtccaatgcttagaaagtgaaaggatcttagctgtgtcatcactagcatcacaaatgg

SEQ ID NO: 848859 - DNA, 120 bp, Artificial Sequence
  ENSG00000266213_14 (sequence is synthesized)
agacaacggggcgtgtagggaaaggataactgagaagaagatacaacaagcaggagctgcacacggcagggccgcagccgaaagacgccccagcagcaactggcatcaagattcctcaga

SEQ ID NO: 848860 - DNA, 120 bp, Artificial Sequence
  ENSG00000266213_15 (sequence is synthesized)
ctccatgagtcttgctgccaggggatagggtcggggtgagaagaaacccctaaatcgagacctggctgccttttgctggccaaaccaacccccacacaaatgtccctaacttcatttgtt

SEQ ID NO: 848861 - DNA, 120 bp, Artificial Sequence
  ENSG00000266213_16 (sequence is synthesized)
ttctaggcctgtttcataatctgtgtttttctccggcttaatgcattcttccccgcctttgccagatatccagtagtgacacaataacagggacacaaaccagcattaaagggtaattac

SEQ ID NO: 848862 - DNA, 120 bp, Artificial Sequence
  ENSG00000266213_17 (sequence is synthesized)
ccacacggctcactccccgagcagggctgtggagacacgtctctcctctctgttcccttccccattcacctccctgcaaaggctttctctaaatcctgcctgtcctacaaatctcagatt

SEQ ID NO: 848863 - DNA, 120 bp, Artificial Sequence
  ENSG00000266213_18 (sequence is synthesized)
atggttagcatccttcaaaaagccttccgtggaggcgcagcccccatgctccgtgggtaaagagtctgggcatggtaccctggtggcatgtggctcctgtggtgcttggcaaggggcggc

SEQ ID NO: 848864 - DNA, 120 bp, Artificial Sequence
  ENSG00000266213_19 (sequence is synthesized)
ctggccagtgtttcatttgtcccttttgccgctgaaaccggaagctccttgagagtatgacccttggatttccatccccaagacctggtactccctgtgtttactggcactccatgcatg

SEQ ID NO: 848865 - DNA, 120 bp, Artificial Sequence
  ENSG00000266213_20 (sequence is synthesized)
cttgctgaacacatgaatcgctgacttccttctgctactcatttggaaccagaaaatctaccttatttttgtttccattttcttcatctcgaaggtgaggggacaatagccttcctccca

SEQ ID NO: 848866 - DNA, 120 bp, Artificial Sequence
  ENSG00000266213_21 (sequence is synthesized)
agactgtggaataaataagagacacatcgctccaaaacattttttttcgaatgtttccactataaaagaacagctatataaaatgacttgacaaatatgtaataaatgtacttgcaaatc

SEQ ID NO: 848867 - DNA, 120 bp, Artificial Sequence
  ENSG00000215231_0 (sequence is synthesized)
caggactggctcccaacaagaaccctggacacaaaggctcaggtgagcttcctagacaccaatactcaggtgagctgtatggaaactaacgctcaggtgagcttcctggactccaaggcc

SEQ ID NO: 848868 - DNA, 120 bp, Artificial Sequence
  ENSG00000215231_1 (sequence is synthesized)
caggtgggctttcctggactccaaggtgcaggtgagcttcctgggctccaaggccaggtgatgttcctggacacttaggctcaggaaaagcagttgaaataccattagttaacagattgc

SEQ ID NO: 848869 - DNA, 120 bp, Artificial Sequence
  ENSG00000215231_2 (sequence is synthesized)
ccaatgaagtcgatgacaactgtgataacaagttactcactatcacagcgtctccaagagatgaacagtggatgatgcttccaaagcacagatgtccctctcctcctcaaccttctctcc

SEQ ID NO: 848870 - DNA, 120 bp, Artificial Sequence
  ENSG00000215231_3 (sequence is synthesized)
ccagaaagatgtcaacactgtggagattgtgctatgaagatacctggtgtggcattgcaatagatgaaatattaagggcaattcaacaattttctgaacaaatacatggatttaacttga

SEQ ID NO: 848871 - DNA, 120 bp, Artificial Sequence
  ENSG00000215231_4 (sequence is synthesized)
gagctagaaggcctcattttagaattaaaatgaatggcaacccagacagataaagtcgagtcgtgatcatcccactgcggaggcagagccagtgctggccatcccccgaccaccccaaca

SEQ ID NO: 848872 - DNA, 120 bp, Artificial Sequence
  ENSG00000215231_5 (sequence is synthesized)
cactccaggtctcacacatttaatctctctctctgccaagggaattttttctttccatttattcttagaaacaactaagggagttttaagttaaatacatgctgccaaattgaatccaag

SEQ ID NO: 848873 - DNA, 120 bp, Artificial Sequence
  ENSG00000215231_6 (sequence is synthesized)
gaaactaaagtcaaatatattagcaaacacttaatgtcctctccattttgacatttctccctcaattcctatttctgagtaaaggctgttcagatgaataaaaacatattttcagaaatc

SEQ ID NO: 848874 - DNA, 120 bp, Artificial Sequence
  ENSG00000215231_7 (sequence is synthesized)
tgagctcataagacctataggtctgtgaagtcacagaccgtgcactgtcagcagtcagcaattctgctgggttgaattggcatgtttcaaactatgtatttttgttaaaaaaaaaaaaaa

SEQ ID NO: 848875 - DNA, 120 bp, Artificial Sequence
  ENSG00000215231_8 (sequence is synthesized)
agagcaacagaatactgtgctgaggccccaaaacagaaaggaaagctcaccaccagaatgtgccttttccttatcaaaaagaattgctgccccttacaggacaggaggactccaattgtg

SEQ ID NO: 848876 - DNA, 120 bp, Artificial Sequence
  ENSG00000215231_9 (sequence is synthesized)
accaagttggagcagccttgagccacaactcagacttattttcattctctgctcattggccattaggaacccgatccttatgacctgcagtgacctgctgctaccagaactgactcgctt

SEQ ID NO: 848877 - DNA, 120 bp, Artificial Sequence
  ENSG00000215231_10 (sequence is synthesized)
caaagtgacggatgaaacccatatggagatattcctggggtgggtaggccagttggaagacagagtgtttacacctgagagaggacttgaggattgctgttttagagaattgaagatcct

SEQ ID NO: 848878 - DNA, 120 bp, Artificial Sequence
  ENSG00000215231_11 (sequence is synthesized)
cactctggaggccaaggtgggtggacggcttgaactcagagtttgagaccaccgtgagcaacatgacaaaacgctatctctacaaacaatataaaaattagcctggtgtggtggtgcacg

SEQ ID NO: 848879 - DNA, 120 bp, Artificial Sequence
  ENSG00000215231_12 (sequence is synthesized)
cccagagtacagcgagtttcccgcctcccgttagagatccaacacatattttttttgaaagaagaaactgatggaagacaggaagcaaaaaggagaggaaggaaagggataggaaggagg

SEQ ID NO: 848880 - DNA, 120 bp, Artificial Sequence
  ENSG00000215231_13 (sequence is synthesized)
ggaaggaaagggaaaggaaggaaaagaaaggaaagtgaacttgaaatcctacaaggtctcaaagtcaaaaaacatgtaagtcaattatcacagaaaataaaagaactgctacaagggcaa

SEQ ID NO: 848881 - DNA, 90 bp, Artificial Sequence
  ENSG00000215231_14 (sequence is synthesized)
aggagacgctgtctcaacctgcagtgacctgctgctaccagaactgactcgcttcaaagtgacggatgaaacccatatggagatattcct

SEQ ID NO: 848882 - DNA, 120 bp, Artificial Sequence
  ENSG00000215231_15 (sequence is synthesized)
caacactgtggagattgtgctatgaagatacctgcacccagttccggatttcacaccaagcctttgctgaggatatgagagtaataaaaaggggagccctggttcttcctctcctttagt

SEQ ID NO: 848883 - DNA, 120 bp, Artificial Sequence
  ENSG00000215231_16 (sequence is synthesized)
gtctttcctggaagtggactgcgagaagagcttcttcagccaccttctgcctgcagacaacctccatgagtttgctttagaagaaggcttcaatttgaagaaagtcaaataaaacaaggt

SEQ ID NO: 848884 - DNA, 120 bp, Artificial Sequence
  ENSG00000215231_17 (sequence is synthesized)
cattgtgtttgcaattgatccttggagacagcgacatctgcgaagcttccaagccacggtggttccaccttcacaagtatccttcaaaggcatcctgcaaccaccccatccatccaagta

SEQ ID NO: 848885 - DNA, 120 bp, Artificial Sequence
  ENSG00000215231_18 (sequence is synthesized)
ctccgttgtaggattcaaaagcaaattgcagggtttgctgcctggcagagaagcatagacacaaagcatgagagagcaaaacctatgagttgaccatatcataaacacaaatagatatat

SEQ ID NO: 848886 - DNA, 120 bp, Artificial Sequence
  ENSG00000215231_19 (sequence is synthesized)
gcagaataccagctaaaaaataggcaataaacttaaacaataggactatgagtagacatagcaagtgctgggtagagatgacagttttgtgtcctgttagagctaagtcagaaatctggg

SEQ ID NO: 848887 - DNA, 120 bp, Artificial Sequence
  ENSG00000215231_20 (sequence is synthesized)
tcgaagtgaatgtgagggaggaaaaggccattacaatatttaagaagcagctccaatatttttaaaacgtgaaggaaaacttgcaagcaatctctagggctggagggagagaaatgcaaa

SEQ ID NO: 848888 - DNA, 120 bp, Artificial Sequence
  ENSG00000215231_21 (sequence is synthesized)
gccctctcagcctgctccaccattatcttttgcattccaataactgacatgctgctgaatgttatgactatttgtttattgttgactgttcttggcactgctcagtgtagccaaagattc

SEQ ID NO: 848889 - DNA, 120 bp, Artificial Sequence
  ENSG00000215231_22 (sequence is synthesized)
cttgcctacaagaaagtcttgctcagacaataaaccacggagaaagaaaattgtccttgagaataagggcatttcagagggaaaggaattccaccagaggcaaagaaacccccgtccacc

SEQ ID NO: 848890 - DNA, 120 bp, Artificial Sequence
  ENSG00000215231_23 (sequence is synthesized)
gcagaattcgagctcaatatctcctatgtctatctgtgaaagccatcatggaactcaagggcaggagggggtggtacacaatggtttgtattgtaatcccctgttttcagacacattttt

SEQ ID NO: 848891 - DNA, 120 bp, Artificial Sequence
  ENSG00000215231_24 (sequence is synthesized)
ctgaaagcataaactttgctggctaggactgtataaacctagcgggattttttactttttcttggaaggcatttgtctcccagcatcataaaacttaacagtctgctttcatagtaacag

SEQ ID NO: 848892 - DNA, 120 bp, Artificial Sequence
  ENSG00000215231_25 (sequence is synthesized)
caaactgatatcatctgcctacagttatgacaccctgaggaggaaacatcacttctttaatattcctgccaaaagaaaagaaaagcatgacctcataacctgaattcaatcaggaggaaa

SEQ ID NO: 848893 - DNA, 120 bp, Artificial Sequence
  ENSG00000215231_26 (sequence is synthesized)
catgcaacaaacccaaattgaggaacattctacaaagtaattgggctgaattcttaaagtcaaaatcataaaagatgaaagctgagtaaattttctggattaaaggagacaaactggaca

SEQ ID NO: 848894 - DNA, 120 bp, Artificial Sequence
  ENSG00000215231_27 (sequence is synthesized)
tggcaattaaatttaatgtcaaattctgaattggatcctggcatataaaaaagaaatgtagctacagaaaacatcattgggaaaattaataaaatttgaatatgaaatatggatgaaaaa

SEQ ID NO: 848895 - DNA, 120 bp, Artificial Sequence
  ENSG00000215231_28 (sequence is synthesized)
gccaaacacaatgggatgtagtcatttaagagtgctgtgaaggcagtgtatgtgtacacagaagcccaaaaggctaaaattgggtggagaaggagagaaagttgggtaaaaaatgaagtc

SEQ ID NO: 848896 - DNA, 120 bp, Artificial Sequence
  ENSG00000215231_29 (sequence is synthesized)
accacatgaccacggcaaagcggcagacatcactccatccttggtcccacattttaagagagaaatagcaataactgttccaattttatctcctgcatatttgttaagggataatctaca

SEQ ID NO: 848897 - DNA, 120 bp, Artificial Sequence
  ENSG00000215231_30 (sequence is synthesized)
aaacaggcacatcgacttggaggtcgtagatgaaagctaactgactatagagcactaaatttttaaattccaacccaaagacaaatagacttcatattttacattactctgatgtggaat

SEQ ID NO: 848898 - DNA, 120 bp, Artificial Sequence
  ENSG00000215231_31 (sequence is synthesized)
gagaaaagagctctagtgacatttcaatttatcatagctaatcatatgaacattattatataaatggggattctaaagcactaggttttaaaaagccttaaaggataattttaaaatacc

SEQ ID NO: 848899 - DNA, 120 bp, Artificial Sequence
  ENSG00000215231_32 (sequence is synthesized)
ctcaaaaatgtataaagccatgcacggaaatccttatgtctcccaatttcttgctgaagtgtcaaaaccaatgcaacatgaaaagaaattatcgaatttgtaaaatataaagagggtgta

SEQ ID NO: 848900 - DNA, 120 bp, Artificial Sequence
  ENSG00000215231_33 (sequence is synthesized)
gttatgtgcctgaaacgtggagcagctttggcagaagactgagcagtcacaacctactcgctattgggaagcctctgtagaaagaggggcagtgcctctcagcccccgaatttccagggc

SEQ ID NO: 848901 - DNA, 120 bp, Artificial Sequence
  ENSG00000215231_34 (sequence is synthesized)
ccatgagaaggtcttggatccaggtgtctgaggaccaaagatgagctgagtgagcagaaattcttcttggtcatgttcacccaggtttgggggagggtacactcaatgcatcaccaaagg

SEQ ID NO: 848902 - DNA, 120 bp, Artificial Sequence
  ENSG00000225044_0 (sequence is synthesized)
cgcctcggcctcccgaagtgctgggatgacaggcgggagccaccgcgcccggccggtactagtatcgtggataacagcaatcactacatcataaagctgacagagtggactgtgaaacca

SEQ ID NO: 848903 - DNA, 120 bp, Artificial Sequence
  ENSG00000225044_1 (sequence is synthesized)
cagtaggcggaaaccttgggctttatgtgaaaaagtcccactttaccaacctgaagagcatcttacctcgaaagcattcatcaggacagtggctcccaattgtgagttattattattttc

SEQ ID NO: 848904 - DNA, 120 bp, Artificial Sequence
  ENSG00000281706_0 (sequence is synthesized)
tgcaaacccttctgcccctttttgctacccctgaagcttactgttagtggtcgagtttttctggaagtgggcttccgcgatcgcggggaccaacgccctgagctcttgtgcccaaagggg

SEQ ID NO: 848905 - DNA, 120 bp, Artificial Sequence
  ENSG00000281706_1 (sequence is synthesized)
atcgccaggttttttgatgcggatcgaaagggactggccccggagcctacaacctgacgcaggtgggacttggggaaatgtcgagaaacctaggtctgggacttgagttggcttccaggg

SEQ ID NO: 848906 - DNA, 120 bp, Artificial Sequence
  ENSG00000281706_2 (sequence is synthesized)
cacacattcttgttcagaagaaacacattgcaaaaatcgggaggtgacgggcagatgaagtgtcggcgcttcgcctcgggactccagtgcaacctatggggcttttggaaatgaggaagt

SEQ ID NO: 848907 - DNA, 120 bp, Artificial Sequence
  ENSG00000281706_3 (sequence is synthesized)
tgacccaggagcagatggcgctcgtctgggcactccccaggagaaaaggtgcatcgggaagcagcctggcttgtggatggtggacaaggtggaggagagagaattccttggcagtagcat

SEQ ID NO: 848908 - DNA, 120 bp, Artificial Sequence
  ENSG00000281706_4 (sequence is synthesized)
tatgaacaaatgcagggctgagaaacagcatggtggccttgactaagtttatggcgacagcagataaggaaacagctgaatttatgtcacttgcccaatgtcacacaactagcaagactg

SEQ ID NO: 848909 - DNA, 120 bp, Artificial Sequence
  ENSG00000281706_5 (sequence is synthesized)
gggttcaagtgattctcctgcctccgccacgcgatgcctcttcatgggtggtggatgaagaaactgaacagggccatgatccttatctgtaatttcccggctaccacactgctttggtgg

SEQ ID NO: 848910 - DNA, 120 bp, Artificial Sequence
  ENSG00000281706_6 (sequence is synthesized)
cacactgctttggtggtcttccctcgtctcttcctgggtagaaacaactacctggagatcccaatgttcttgtcagtgcacttttcatggactgcagtggtaagacgatgtgttggatgc

SEQ ID NO: 848911 - DNA, 120 bp, Artificial Sequence
  ENSG00000281706_7 (sequence is synthesized)
ccaaacacaaaccaagtaagtcctggatttaaaaaggaagggctaaatgtcattactaacctgagcctcagtgctccctcccctcatttccctcacaactacttcttcctgctgacatcc

SEQ ID NO: 848912 - DNA, 120 bp, Artificial Sequence
  ENSG00000281706_8 (sequence is synthesized)
accaaactttactatgtgacctttagaactgggggactctgaaaccagagagagccctgaaaagaacttatacccctctctctctctctctttagcctacttcatactgggtggaatttt

SEQ ID NO: 848913 - DNA, 120 bp, Artificial Sequence
  ENSG00000281706_9 (sequence is synthesized)
tatgattagcgcccttctctcattctgcttgaactttttgttgctgaccttccctcagttattccctgagacccagaaacagtatattttctgtgcatccatctgcattgtcacaggtaa

SEQ ID NO: 848914 - DNA, 120 bp, Artificial Sequence
  ENSG00000281706_10 (sequence is synthesized)
agagaggcaggaataaattccgaatgtcttggccttggggtgagggtggaagaggcttaattagcctcttaaaaagttttcaggagagtacaagggaaaaggagaagctaggagaaaaaa

SEQ ID NO: 848915 - DNA, 120 bp, Artificial Sequence
  ENSG00000281706_11 (sequence is synthesized)
acacaaaccaagagccctctaccttcgcaattcccggtgctgtggagctgtcagagttttaacatctcaaccaagccacatggatactatttcctcagaaaagacaaaattgatccaagc

SEQ ID NO: 848916 - DNA, 120 bp, Artificial Sequence
  ENSG00000281706_12 (sequence is synthesized)
agaagagtgaactcaccgaagaggactctctacccataactggggatgcctcagccactcacacttactccaagattagtgtcactgattatggaaagaattgacttcttcccctggtct

SEQ ID NO: 848917 - DNA, 120 bp, Artificial Sequence
  ENSG00000281706_13 (sequence is synthesized)
tgctcatttttctagagcccaggacaataaatgtgttttacggcagagaaaagtgaagacgggtggaattgtgtgtgttgagagagaagcagataggcaatcttacgctttggctcctag

SEQ ID NO: 848918 - DNA, 120 bp, Artificial Sequence
  ENSG00000281706_14 (sequence is synthesized)
tggccccggagcctacaacctgacgcaggtggacaaggtggaggagagagaattccttggcagtagcattatgaacaaatgcagggctgagaaacagcatggtggccttgactaagttta

SEQ ID NO: 848919 - DNA, 120 bp, Artificial Sequence
  ENSG00000281706_15 (sequence is synthesized)
tggcgacagcagttggggtaacatgtgacctggatctgatcattgtgattcaagtcagcgtcatttagggttttcgggaaacattttttgaaagggagcaacttggctggaacactccat

SEQ ID NO: 848920 - DNA, 120 bp, Artificial Sequence
  ENSG00000281706_16 (sequence is synthesized)
caattctttgccctgtgcatttttgcccttctttctgcctctcaggaatgcagagagaattcctggaggaacagcagctatcatacatccgtgatgaaagccatgggacaaaggcaattg

SEQ ID NO: 848921 - DNA, 120 bp, Artificial Sequence
  ENSG00000281706_17 (sequence is synthesized)
agcaagaagacaggagctggggacattcttgacagtagtgccacctctggatgatttaccttgggacctcttattaaatgagataggacttcttcctgtttaatccactggagtggaatt

SEQ ID NO: 848922 - DNA, 120 bp, Artificial Sequence
  ENSG00000281706_18 (sequence is synthesized)
ttctgttacagtgaatgcagtcctaattgatgatattggctaatacatattagcacctgctatgtcccagtacagtttaagcattttatctactaatgttttaaattttctcagtgacct

SEQ ID NO: 848923 - DNA, 120 bp, Artificial Sequence
  ENSG00000281706_19 (sequence is synthesized)
tatgagataggccaaaggttctcagagtgtggttcctggaccagcaacatcagcatcacctggaaacttgttagaaatacaaattttagggcctggccctagacccactgaatcagaaac

SEQ ID NO: 848924 - DNA, 120 bp, Artificial Sequence
  ENSG00000281706_20 (sequence is synthesized)
tctaggggtgaggacctagcagtctgtttaaaaagccctccatgctattttgatgaatgccaaagttggacagctactgagatagggtattgttattatccccattttacagataaggaa

SEQ ID NO: 848925 - DNA, 120 bp, Artificial Sequence
  ENSG00000281706_21 (sequence is synthesized)
acagctgaatttatgtcacttgcccaatgtcacacaactagcaagactgactccttgaagctcatcacatgtaagaactgctttagagcagtggtcttcaaactttgaaagcatatcctg

SEQ ID NO: 848926 - DNA, 120 bp, Artificial Sequence
  ENSG00000281706_22 (sequence is synthesized)
ttgaaaaattatgtatccacttctacatttttaagttgacatctaaaaatttcacatcataagtttaaacagttgtaaaaaatgtgatttctggtatattgtgaattatgacattttaaa

SEQ ID NO: 848927 - DNA, 120 bp, Artificial Sequence
  ENSG00000281706_23 (sequence is synthesized)
atgtattccatcactcctctaaatgtattcagtggtttctaaataccatagtgatttaaatctatcatcaatttaaaaaaaaaaacaagcttttttttttaacattagatattttgcatc

SEQ ID NO: 848928 - DNA, 120 bp, Artificial Sequence
  ENSG00000281706_24 (sequence is synthesized)
tgcccaccttggtcttccaaagtactgggactacaggcatgagaaaccaagcccggccatctttctcttttttacttgaattcagtctttttattcttcttccattcctctctctctctc

SEQ ID NO: 848929 - DNA, 120 bp, Artificial Sequence
  ENSG00000281706_25 (sequence is synthesized)
ctcccaaagtgctgggatcacaggcatgaaccaccgctcctggcctctttctttcttttctgttcttttccatctgccctccccaaacatctccctccctacctccctccctccctactt

SEQ ID NO: 848930 - DNA, 120 bp, Artificial Sequence
  ENSG00000281706_26 (sequence is synthesized)
ccctactttccttgcttccttccttcctctctttctgtttctctatttttctttttttccttcttttttgagaccatctcactctgttgcccaggatggaatgcagtggcacaatcttag

SEQ ID NO: 848931 - DNA, 85 bp, Artificial Sequence
  ENSG00000281706_27 (sequence is synthesized)
gatgccaccacaccaagctaaagttttttttttatttttcatagagacaggggatctcattatgttgcccaaactggtcgtgaac

SEQ ID NO: 848932 - DNA, 120 bp, Artificial Sequence
  ENSG00000281706_28 (sequence is synthesized)
ctaaagttttttttttatttttcatagagacaggggatctcattatgttgcccaaactggtcgtgaactcctgggctcaagtgctctgcctgcctcggcctcccaaagtgtagggattac

SEQ ID NO: 848933 - DNA, 120 bp, Artificial Sequence
  ENSG00000281706_29 (sequence is synthesized)
taatattttcttattcgtatttccatggcagaatattcctcactgctagaatgagaccagaggtcaaaatcagctctatgtctgtttgtcattcttatggatatgagaaattgtgttcac

SEQ ID NO: 848934 - DNA, 120 bp, Artificial Sequence
  ENSG00000281706_30 (sequence is synthesized)
acaagtagataggaatgaaaggaattttgaaatagaaatgcagttctaatttttctaacttccatattacgtgccaaaaatcacataataatctatcataagattctctagtcctctctc

SEQ ID NO: 848935 - DNA, 120 bp, Artificial Sequence
  ENSG00000281706_31 (sequence is synthesized)
atctggtgatcttcttttccacgctttctttgcaaccccctcatgtggccaacatttagagtaatgttttccaacttctttttcttcagctcacagtaataaatacattttacatcttga

SEQ ID NO: 848936 - DNA, 120 bp, Artificial Sequence
  ENSG00000281706_32 (sequence is synthesized)
gcttctcctagcccaatgctgtccaatagaactttatcctgtatctgtgttgtccaacacagtaatcgctatgtacatgtggctattaaactcttgaggctgggcatggtggctcacgcc

SEQ ID NO: 848937 - DNA, 120 bp, Artificial Sequence
  ENSG00000281706_33 (sequence is synthesized)
cagcacttttggaggccgaggcaggcatatcccttgacctcaggagtttgagactagcctggacaaaatgatgaaaccctgtcttcacaaaaaatacaaaaaaaattatcaggcatggtg

SEQ ID NO: 848938 - DNA, 120 bp, Artificial Sequence
  ENSG00000099869_0 (sequence is synthesized)
ggcccgcgggctagaggcactttaccgcccggcgggagcgcctctcctccgcgtccctcgccccagccccctgcccgccccactttgggaccctccagccgctttccccacaaatgagat

SEQ ID NO: 848939 - DNA, 120 bp, Artificial Sequence
  ENSG00000099869_1 (sequence is synthesized)
ctttgcaatgagcaaacgaaagtggcgcggatttcggggcgcccagcaggagcgagcgcagccgccagccgcaagtccgcagccgtgtcccgcgccccacgccggcctccccggcggcag

SEQ ID NO: 848940 - DNA, 120 bp, Artificial Sequence
  ENSG00000099869_2 (sequence is synthesized)
ccggagacgagcgccagcaccggcgggacagcagcagatgcgggccgagagccggtcaggggcgcagaggcggaggggatcggcgcggcggggagctcaccgcgaagctggaggctgcgt

SEQ ID NO: 848941 - DNA, 120 bp, Artificial Sequence
  ENSG00000099869_3 (sequence is synthesized)
ccgcgggcgcaccaggagctcaggcagcgagcgatcgaacgctctgtggcaggcggtggacgctgctgaagctctggctctgagctcaccgctccgccgtccgtgggaccaagcccagca

SEQ ID NO: 848942 - DNA, 120 bp, Artificial Sequence
  ENSG00000099869_4 (sequence is synthesized)
ttttacaaacccagctcctttctccaagggtcctcagagcgcccctccgtcaccccctgcagggcgccgcagacgaggcgctgaccttgcgctcactcccctcgctggggaaggacacac

SEQ ID NO: 848943 - DNA, 120 bp, Artificial Sequence
  ENSG00000099869_5 (sequence is synthesized)
tcgctggcgtcagcccggccggcctgggaagtaggactaaggacccgaactgcaaccctccacaccagacagcacagaccaccccaaggctgctcaatctgcccaaagccaaaagagctc

SEQ ID NO: 848944 - DNA, 120 bp, Artificial Sequence
  ENSG00000099869_6 (sequence is synthesized)
ccctgccaggacctcggtgccgtggagactgcggggaacctgctctgcccacacctgctctggcccctagacggaagcacctggagccaaccacggaactccagatcccagctgtgtgac

SEQ ID NO: 848945 - DNA, 120 bp, Artificial Sequence
  ENSG00000099869_7 (sequence is synthesized)
tgaatccacgccagcctctctgagccaaagctgcttgcagaagggggagatcccagttcgaagactcccgcgcagagcctgtggccctctctgccaggcctcagggtgcctgagacactc

SEQ ID NO: 848946 - DNA, 120 bp, Artificial Sequence
  ENSG00000099869_8 (sequence is synthesized)
ctgaggctggggctggctgccagcctcagttctgggagcgctggggtcgcctgggccacaggccacagcagctcacctcaggactgggctctctggcctgctggggctcaggctgtgggg

SEQ ID NO: 848947 - DNA, 120 bp, Artificial Sequence
  ENSG00000099869_9 (sequence is synthesized)
caggctgggcagggggctgagctggcagcgattcagagccctggggctgggggctggaatccacctcctcccacacaagctcggtggtgactcttcggcccctggggaaaaacaaaaaga

SEQ ID NO: 848948 - DNA, 120 bp, Artificial Sequence
  ENSG00000099869_10 (sequence is synthesized)
tattgctgagatgacctcttttaaaagcaaagcccccctccccatacaccccaagcctgagccctgtcccatccccctccccgggttccttcaggtcaccttgtcaggatctgggcagcg

SEQ ID NO: 848949 - DNA, 120 bp, Artificial Sequence
  ENSG00000099869_11 (sequence is synthesized)
gcttccccctctagcccctcccctgcctagagctccctctttcaaagtataagggagggaagaagtggtgagaagtttgcctagaaagggcttcccggtgctgatggagaggccgagacc

SEQ ID NO: 848950 - DNA, 120 bp, Artificial Sequence
  ENSG00000099869_12 (sequence is synthesized)
cttctgttggacaggctgccctgttcctgggtgaggatgggcttctgcctggcactgggggtggagggtgcacacgaatggcccgccttgaggggtcatggcacggaatatgaaagcctc

SEQ ID NO: 848951 - DNA, 120 bp, Artificial Sequence
  ENSG00000099869_13 (sequence is synthesized)
ctccacctccaaacacccccaccttggaaggagataaggagggggccccagcaaaagccactggacacacagctctgcttgacgaggccagtgagggacggcgtggctgtgcttcctggg

SEQ ID NO: 848952 - DNA, 120 bp, Artificial Sequence
  ENSG00000099869_14 (sequence is synthesized)
gaaatgaaccccctccccacagacaccaccctgggtggatcgaggagtctgggtccagggtgcaacagagaaaaacttcatgcatgaatgagcattcccagggaaactgccttggcccca

SEQ ID NO: 848953 - DNA, 120 bp, Artificial Sequence
  ENSG00000099869_15 (sequence is synthesized)
gggcgcctctctgtgccagggaggctgggagagcagcaagggggaccaggtgcgccatcaggaggagagaagctaaacctaggggggacatggagggcggttgttgcctctcccggcatt

SEQ ID NO: 848954 - DNA, 120 bp, Artificial Sequence
  ENSG00000099869_16 (sequence is synthesized)
tctcctcagtctcctgtccaatttcttgctggtggtcaggaggcatagggaggcaggagggaaggaagctttacctgtaaaatggtgtatatatgtataaataaaatctctgcgccagaa

SEQ ID NO: 848955 - DNA, 120 bp, Artificial Sequence
  ENSG00000099869_17 (sequence is synthesized)
atgggtccaggttggggtgcttgggagagggccctgggagaggggttcagacggtgcacactccaaaggactgaggcggcgccactgtgttaccattttattgagtgtctaaggtaaaga

SEQ ID NO: 848956 - DNA, 120 bp, Artificial Sequence
  ENSG00000099869_18 (sequence is synthesized)
cacctttgaaagaacactcccggcttctatctgggatgggcaaatcagcctgaagagtcacctgctggatccctccctgcaggccctgtcgtggggcaggtacagggactccaatccatg

SEQ ID NO: 848957 - DNA, 120 bp, Artificial Sequence
  ENSG00000099869_19 (sequence is synthesized)
tgggtgctgcccccactacagagctccctctggctgaggcagaggccactggctgggcctttctagccacctttcacccctcttgcacacgggaagccccgcaggctcctgaccacaatg

SEQ ID NO: 848958 - DNA, 120 bp, Artificial Sequence
  ENSG00000099869_20 (sequence is synthesized)
ggatcctgacgccggagccccttaggccctttgctcagaaggcctctggttattacctcaattctgaacagccaggaggcctgagactgtcacccactttgataaatacagaccgacaga

SEQ ID NO: 848959 - DNA, 120 bp, Artificial Sequence
  ENSG00000099869_21 (sequence is synthesized)
aaggtcaggccattggtgcaagaccccatggccagcagcctggggcggggagaacccgggggtctcacagcccccagcagagcccagctttccttgggtttttaggttcttccccaatga

SEQ ID NO: 848960 - DNA, 120 bp, Artificial Sequence
  ENSG00000281708_0 (sequence is synthesized)
aggatgacagacagccaggcctgatttggccaaatcatcatgcaaatattattctgggctgacaggcccaagttgcagtcagcagaggcaacacgggcttataatttgccatttgtgaat

SEQ ID NO: 848961 - DNA, 120 bp, Artificial Sequence
  ENSG00000281708_1 (sequence is synthesized)
gtcctgaggactggagaatcagctaggaagcaaatcttccttctgctgcataagacagccaaaagcacctctgaggataggcatctcagggatttcagagcaggtaacgccttttggttg

SEQ ID NO: 848962 - DNA, 120 bp, Artificial Sequence
  ENSG00000281708_2 (sequence is synthesized)
ttttgaatatgctgacagaagaacaaaagctttcaggaaaacaaagcccaaccccttaatgaaacaggaaaggatatacagtttcaaatgcttgcttgctttccttgttttctgagaaga

SEQ ID NO: 848963 - DNA, 120 bp, Artificial Sequence
  ENSG00000281708_3 (sequence is synthesized)
aagatgccttgcctgttgaaggtggcagatgcaggttgctctgtgggcctcgggaaggttcactgcagctgtcacctgcccaacccacgtgtcctgaggcactgtgacatcttgacaggt

SEQ ID NO: 848964 - DNA, 120 bp, Artificial Sequence
  ENSG00000281708_4 (sequence is synthesized)
gtcctgactcttggccttgacatgtcctgtcacgcctgcctgtcagctgggactgggcttggggaagagcttgtgggcctggggcctggtagtacttgcttagttaaacatctgtggctg

SEQ ID NO: 848965 - DNA, 120 bp, Artificial Sequence
  ENSG00000281708_5 (sequence is synthesized)
ctatttccctgtcacaggctggcaagtcagaactactcagattcacttgcacagcaatggtccttcagtcttctgattatgtggctctgcaacagggagagggagatattcatgagcaag

SEQ ID NO: 848966 - DNA, 120 bp, Artificial Sequence
  ENSG00000281708_6 (sequence is synthesized)
tgtgcaaaatgcatttaatgcctgctaatggtgtacagccatccattgctttggtctgcccagtgtctgtctccctatcttttgataccaggggccaagtttctctggggaattcctttc

SEQ ID NO: 848967 - DNA, 120 bp, Artificial Sequence
  ENSG00000281708_7 (sequence is synthesized)
agtttttgcagttctgggacagttacccttcacccagcactatgtcaatatgggcacatgactcaagccagccaatcagagttcactttccctagacttggtcactcagagggagctatc

SEQ ID NO: 848968 - DNA, 120 bp, Artificial Sequence
  ENSG00000281708_8 (sequence is synthesized)
ccttaggccacagtgattggttcagaaatgggcacataatcaaactagaccaatgagtctcagttctgaaattttgagttaagattgcttggaaaaagaactgtttactctatggaaata

SEQ ID NO: 848969 - DNA, 120 bp, Artificial Sequence
  ENSG00000281708_9 (sequence is synthesized)
atttggggtaccgggagcgacagggccatagtgagaagagaaccctacctgaaaatgaagtcagaaggaaaaggaaagtagacaagaatgatggagagagaggcagagacagatccctga

SEQ ID NO: 848970 - DNA, 120 bp, Artificial Sequence
  ENSG00000281708_10 (sequence is synthesized)
agacatcatttaagatcccgaattcacctgtgcccaaagccagactagtcctgaatgatttagttacaagaactaataaatgcctttttccataagtcagtttgaggccagatgaataga

SEQ ID NO: 848971 - DNA, 120 bp, Artificial Sequence
  ENSG00000281708_11 (sequence is synthesized)
aattgcatcccttattgagtcctggctcaagtcaatttagcaagcatttgttaagatccacggtgggagctatacctcagagctccagggagcacaggaggtgtgctacaatcacagcca

SEQ ID NO: 848972 - DNA, 120 bp, Artificial Sequence
  ENSG00000281708_12 (sequence is synthesized)
ttgccagtattgttattattccatttattagacatttcagacactcctcagcactttacacacattatttcatttcaccctttgagcacatcctttaattaaaaattgttatctacactt

SEQ ID NO: 848973 - DNA, 120 bp, Artificial Sequence
  ENSG00000281708_13 (sequence is synthesized)
agcacatcctttaattaaaaattgttatctacactttacagggaaagaaacctagaccagagaagttaagaaatacatccaggggtgggtgcggtggcttacacctgtaatcccaacact

SEQ ID NO: 848974 - DNA, 81 bp, Artificial Sequence
  ENSG00000281708_14 (sequence is synthesized)
ggtgggaggattgcttgagcctaggagttgaaggccagcctgggaaacatggcaaaatcctctctctattttttgtagtcc

SEQ ID NO: 848975 - DNA, 82 bp, Artificial Sequence
  ENSG00000281708_15 (sequence is synthesized)
tgcttacctgagcccaggaagcagagattccagtgagttgagatcatgccactgcattccagcctaggcgacagagtgagac

SEQ ID NO: 848976 - DNA, 120 bp, Artificial Sequence
  ENSG00000281708_16 (sequence is synthesized)
taatatagtaataatagtgacagaggatgtgagttatcgtctacacactggcaggcaaaagaggttacttcctcccatctcaaggacttggaagtaagggaaataagactgtacacccaa

SEQ ID NO: 848977 - DNA, 120 bp, Artificial Sequence
  ENSG00000281708_17 (sequence is synthesized)
gaaagcaaaatggaatagatcggagtagagatctgccaagttgccttacagagccaggacagcttccagccagccaggctagatctagctgcctgaatgtattgacagcaaaaaaaaaaa

SEQ ID NO: 848978 - DNA, 120 bp, Artificial Sequence
  ENSG00000226530_0 (sequence is synthesized)
acgacttggccggatttatgttcatggctgaggatgccatgggccgagtaagaaggagaaccgccacccaaccacgcagccaagagcaacccagggatccctcctctgcttgctcccctc

SEQ ID NO: 848979 - DNA, 120 bp, Artificial Sequence
  ENSG00000226530_1 (sequence is synthesized)
ccccacccctgctgtaccttctgcgcagccatctcggtaacgggcgtcaggggcgctcggcggcctgctgtccaagctggggtcaggagcctggcggtagcaaagagcatcaccgaaagg

SEQ ID NO: 848980 - DNA, 120 bp, Artificial Sequence
  ENSG00000226530_2 (sequence is synthesized)
aagctggtaggctagcgaggccagccccaaagacccacagatacacgcgctgctccgaactcgcgggcccgcggcgtccactaatgagatgaacctgggcgcgcagcggctggacctcag

SEQ ID NO: 848981 - DNA, 120 bp, Artificial Sequence
  ENSG00000226530_3 (sequence is synthesized)
ctgctagggcgccgccaaggccctgctggacaccttctggtacctgggcctcgtgtattacacctgtggctgccgccgaggcgcggttcaatttgaagtctgagcccctacaggcccgtg

SEQ ID NO: 848982 - DNA, 120 bp, Artificial Sequence
  ENSG00000226530_4 (sequence is synthesized)
aatcctggattacaactgcagtttgtgcaagaagcagcagcacctgcacttccacttagcaacctccggcttcacgctcctccagggcgcagagagcatcaaagcattatcaccgaccca

SEQ ID NO: 848983 - DNA, 120 bp, Artificial Sequence
  ENSG00000226530_5 (sequence is synthesized)
acacacaccggcgctgcgtagtttctgcagcaggtgtggggtgaagagttgccacacagctgtctgacaccgggtgtacggcgtcacccctcacttcctggacaaggcaacattttccta

SEQ ID NO: 848984 - DNA, 120 bp, Artificial Sequence
  ENSG00000226530_6 (sequence is synthesized)
aaggtcaaaggagaaaaatcctatcatctgaggtgctgaacaaagaattcaataaattcaatcaatctgatgcactctgcagtcgttctaagttcttgtctactaaaatcctcgactact

SEQ ID NO: 848985 - DNA, 120 bp, Artificial Sequence
  ENSG00000226530_7 (sequence is synthesized)
acacatccacaatcgcttctgtgaaactcttgggaccaaatggttcagaatttgtctcccatacatacataatatctatgtcaaggcctgtagtaatactgtggaatctaatacaatgat

SEQ ID NO: 848986 - DNA, 120 bp, Artificial Sequence
  ENSG00000226530_8 (sequence is synthesized)
atttctgtagtgaaacatacaaatgttcactccaagatctaaagattacaaatagcatcatgtcagttcaaatcaggttttatggataaatgagtcaggaaaagtatgtttttcaaagca

SEQ ID NO: 848987 - DNA, 120 bp, Artificial Sequence
  ENSG00000226530_9 (sequence is synthesized)
ttttgaatgttagacttgtgcacaagggattgtgagtctgaatcatatttccgtcaactcttcttgcctttcatacaatttttttctttctgttatcttttttatcattgaaatacaaca

SEQ ID NO: 848988 - DNA, 120 bp, Artificial Sequence
  ENSG00000226530_10 (sequence is synthesized)
tttagatagaagattgtgcaaatcataagggacaacaagttgatgactttttacaaagtgaacacatgcatgtaacaaccagtaagaccaaaatatagaacattactggcaccccagaaa

SEQ ID NO: 848989 - DNA, 120 bp, Artificial Sequence
  ENSG00000226530_11 (sequence is synthesized)
cttatgttatacccctacctagtcattacccctgaaatttaagcactattctaacctatgttactatagaattgttttgccggctttttatactttatacaaatggaattataaattatg

SEQ ID NO: 848990 - DNA, 120 bp, Artificial Sequence
  ENSG00000226530_12 (sequence is synthesized)
tatatttttatgcctggtttcttttgctcaatatgaatgcttttaagatctgtacactttgttgcatgtagggatatttgcttgtttcgttcctgaacagtattccattgtattaatata

SEQ ID NO: 848991 - DNA, 120 bp, Artificial Sequence
  ENSG00000226530_13 (sequence is synthesized)
ccacaatttattcattcaactgttgatatatatttaggttgtttctagtttgtgactatttccaataatgccactgtgaacatccttatgtcttttgaaaaacaggtttatgtatctctg

SEQ ID NO: 848992 - DNA, 120 bp, Artificial Sequence
  ENSG00000226530_14 (sequence is synthesized)
ttggatatatacttgtgtggtaagcagaattctaaggtgatctccaatgactcttgtcttggtataatctcttcccattgggtgtaggtggaacctgtaaatatgatgagatcttacttt

SEQ ID NO: 848993 - DNA, 120 bp, Artificial Sequence
  ENSG00000226530_15 (sequence is synthesized)
tatgattatattacttcatatggcaaaaaggatcttgcagatataattaaggtcacaaatcagttgcccttaaagtaggtgaggcagacctaatcaggtgagcacttacaagggcccagg

SEQ ID NO: 848994 - DNA, 120 bp, Artificial Sequence
  ENSG00000226530_16 (sequence is synthesized)
tttttgctgagagattcgaagcatgagagagcatttggagggggccacgtgacaaggaactgcaggagtcctctaggtgatgagttgctgccccttgttgacagccagcaaaagaatgga

SEQ ID NO: 848995 - DNA, 120 bp, Artificial Sequence
  ENSG00000226530_17 (sequence is synthesized)
gggacctcagtactacagctacagggcactggactcagctggcaacatagatgagtctgcaagggcttcttccccagagatccagaaaggaacacaggaagtccaagagcatctcaccct

SEQ ID NO: 848996 - DNA, 120 bp, Artificial Sequence
  ENSG00000226530_18 (sequence is synthesized)
gtgagaccttgagcagggaaaccagtcacatggtgcacagacctctgacctacacaactgtgagctaataaatgagtgttggtgtaagctgctaagactgtagcaatgtgtttaacacca

SEQ ID NO: 848997 - DNA, 120 bp, Artificial Sequence
  ENSG00000226530_19 (sequence is synthesized)
acagaaaccactatagattttgatacctggatgtgaggtgtagtcactgtaaacaccttaaaatgtagatgtggctttggaactggatagtaagcaaaggctggaagaattttgagatgc

SEQ ID NO: 848998 - DNA, 120 bp, Artificial Sequence
  ENSG00000226530_20 (sequence is synthesized)
atgacagggaaagcctaaattcccttggacagactggtagtagacgtcagctggatatccaaactgctttggaactcctcttttctgccttctgttttctcctgtataaaatagaatgtt

SEQ ID NO: 848999 - DNA, 120 bp, Artificial Sequence
  ENSG00000226530_21 (sequence is synthesized)
tatagatgttatcctatgcccgtcccatcattgtatgtggtggtgttgggggaagatagcttgtcactttagtgctgatggtccacagttggagagggattttgccctaggagttttact

SEQ ID NO: 849000 - DNA, 120 bp, Artificial Sequence
  ENSG00000226530_22 (sequence is synthesized)
ggataggatcatacccaggaatctcatccgttcatgattcagatgatgaaattcagatgagcttttggaattgagctgatgccataatacaaagaaatttggagactgtgggatggattg

SEQ ID NO: 849001 - DNA, 120 bp, Artificial Sequence
  ENSG00000226530_23 (sequence is synthesized)
aatgtattttatacgtgggaaatactggatcactgagggccagagggcaggctgaggcaggcagaattctaagatgacctctaatgacctctggtcttatatgaacttctcttgagtata

SEQ ID NO: 849002 - DNA, 120 bp, Artificial Sequence
  ENSG00000226530_24 (sequence is synthesized)
agagcagcctgtgaatatgatgagataccactcctatgataatgttacacaatatggggaaagagattttgcagatgaattatgctcccagatcagtgaacctcgaaataaggaggttga

SEQ ID NO: 849003 - DNA, 120 bp, Artificial Sequence
  ENSG00000226530_25 (sequence is synthesized)
cctgtgtgggccagacctaagtaagtgagcccttaagatggcctgagcccttcctgggagactggaagtgtgcgaaggaatatgtagagctctatgtggcaaagaactgcatgaggcctc

SEQ ID NO: 849004 - DNA, 120 bp, Artificial Sequence
  ENSG00000226530_26 (sequence is synthesized)
taggagctaaaaattgaactgaattctgccaattacctgaatgagtttggaaatatattcctcctcagtctccagaaagaaacacagactcactgaccaatagaacaggctgacttcacc

SEQ ID NO: 849005 - DNA, 120 bp, Artificial Sequence
  ENSG00000226530_27 (sequence is synthesized)
ctgtgagacttgaacagagtacttgtaaacctatagaactgggagcttaaataaatggccattgtttaaagccattaaatttgtggtgatttgttactcagggatagaaaagtaacatag

SEQ ID NO: 849006 - DNA, 120 bp, Artificial Sequence
  ENSG00000226530_28 (sequence is synthesized)
atggaatttctgggttatagaaaatgcataaattcagctttaataggtactcccaaatagttttccaagggtactaatttacactcctaccggcagttagagtttcagttcctctatagc

SEQ ID NO: 849007 - DNA, 120 bp, Artificial Sequence
  ENSG00000226530_29 (sequence is synthesized)
ctcccctgctctttatattggtagtcattctagctattctggtagatgtttgctgatgtcttcttgtgattttaatttgcatatctctgatgacttattttgggaagtctttgttatttg

SEQ ID NO: 849008 - DNA, 120 bp, Artificial Sequence
  ENSG00000226530_30 (sequence is synthesized)
tcagtttaatatcctattttgtgaagtacctgttgaaatattgtgccagtgtttaactgcatttacttttattctttattttattctgtacataaaacattttctgaatgtgtgcgtgca

SEQ ID NO: 849009 - DNA, 120 bp, Artificial Sequence
  ENSG00000226530_31 (sequence is synthesized)
tgcgtgtttatttgtagttaatgttttcctttatcgttagtggtttttgtgttgtgttttagatataatttaccccaaggtcatcaagatatgattgtatcttattttctagaagcttta

SEQ ID NO: 849010 - DNA, 120 bp, Artificial Sequence
  ENSG00000226530_32 (sequence is synthesized)
tctttttgaattcattttgtgtatggcataagttaggagccaaagttatttttttctatatggctggatatccaatttgtccagttccacttacttaaatgattatctttctccctgagt

SEQ ID NO: 849011 - DNA, 120 bp, Artificial Sequence
  ENSG00000226530_33 (sequence is synthesized)
actgcattggtatctttgttgtaaataaggtgatcatatgtgtgtgtctgtttgtggactctcttcttgtcctattggtctatttatctatctttatctaaacatatatatctttattta

SEQ ID NO: 849012 - DNA, 120 bp, Artificial Sequence
  ENSG00000226530_34 (sequence is synthesized)
tctattcctgcgtaacaaaatgttactgtacacaaatcatactatcttaattatggcttttctgactgtgaaagttcttcaaattcttctagatggctttggctgttcttagatctttga

SEQ ID NO: 849013 - DNA, 120 bp, Artificial Sequence
  ENSG00000226530_35 (sequence is synthesized)
tagaatcagtttgctggtttacattttcaaattatctgttgagattttgatttgtattgcattgaatacatagactgtttggatgagaattttctctgatttaattttcataatattcta

SEQ ID NO: 849014 - DNA, 120 bp, Artificial Sequence
  ENSG00000226530_36 (sequence is synthesized)
atctacaaacatgacatatctctgattaacgtagggcttctttatttaagaaatgtcatgttgatttctggacaaaggtcttatgaatttttttattagatttgttcctagctatttgat

SEQ ID NO: 849015 - DNA, 120 bp, Artificial Sequence
  ENSG00000226530_37 (sequence is synthesized)
attttctgatgctataggaaatggcaattttaaaatttcctctttatactttttactgctaatatgtggaaatacaattccattgtgtaatattgaccttatgtccactgattacaccaa

SEQ ID NO: 849016 - DNA, 120 bp, Artificial Sequence
  ENSG00000226530_38 (sequence is synthesized)
attcatttattctaatatttgatatatattctttaatttttaagtgtaaaaaacatgttgtgtcttttattttttcaagagctgagaaacctttccccccaaaaccttaaaacacaagca

SEQ ID NO: 849017 - DNA, 120 bp, Artificial Sequence
  ENSG00000226530_39 (sequence is synthesized)
tccatatcttattgactgcaactgggaaatgactattcccaaaccagtcactggagtggtagtgagattactatgacctggttagtcaatcacactactatatatatatccgctacactg

SEQ ID NO: 849018 - DNA, 120 bp, Artificial Sequence
  ENSG00000226530_40 (sequence is synthesized)
tgttataaatcaaattttctttattttaaccacatacgtaaatatttagacattaattttattagaagtttgaacatctctgttggattgataattgtggaatattcctccatctaaatg

SEQ ID NO: 849019 - DNA, 82 bp, Artificial Sequence
  ENSG00000226530_41 (sequence is synthesized)
tgttggattgataattgtggaatattcctccatctaaatgagctgaaattacagatcttaaattttataaattcttagcaat

SEQ ID NO: 849020 - DNA, 120 bp, Artificial Sequence
  ENSG00000226530_42 (sequence is synthesized)
ggtgaaaccccatctttaccaaaaatacacaaatttagctgggcatggtcgcacacgcctgtaatcccaactactcgggtggctgaggcaggagagtcacttgagagggggaggctacag

SEQ ID NO: 849021 - DNA, 120 bp, Artificial Sequence
  ENSG00000226530_43 (sequence is synthesized)
ctgagatcacaccactgtactccagcctaggctacggagtgagacttggtctcattttaaaaaaaaaatcacacctgtaatctcagcactggcagaggcaggtgatcacttgaggtcagg

SEQ ID NO: 849022 - DNA, 120 bp, Artificial Sequence
  ENSG00000226530_44 (sequence is synthesized)
aaaatcacacctgtaatctcagcactggcagaggcaggtgatcacttgaggtcaggagttccagataagcctggccaacatagtgaaaccatgtctctactaaaattacaaaaattagct

SEQ ID NO: 849023 - DNA, 66 bp, Artificial Sequence
  ENSG00000226530_45 (sequence is synthesized)
catagaacgagactgtctcaaaaaacaaacaaacaataaattattaagcaatgagtagtatgctta

SEQ ID NO: 849024 - DNA, 120 bp, Artificial Sequence
  ENSG00000226530_46 (sequence is synthesized)
aaacaaacaataaattattaagcaatgagtagtatgcttaatatgtgaaaaatatttgtggcttattcaggaataatgaattttttaaatggcttagtttatttcaaaaatatactgttg

SEQ ID NO: 849025 - DNA, 120 bp, Artificial Sequence
  ENSG00000226530_47 (sequence is synthesized)
cagaatatttaatatgtacatatatcagacttttaaacatagttatcagtcactggtaaaattgcttgtgatttaaattatcttaaacttttctaaattatctaaattccatactgcaag

SEQ ID NO: 849026 - DNA, 120 bp, Artificial Sequence
  ENSG00000226530_48 (sequence is synthesized)
tctaaattccatactgcaaggtttgccaaacttcacacaactggcattttggaccagataattctgtgttgttggaggctctcctgtgcattgaaggggttgagcagcatccttgatggc

SEQ ID NO: 849027 - DNA, 120 bp, Artificial Sequence
  ENSG00000226530_49 (sequence is synthesized)
tatatactaaatgctggtagaactcctcctccccaattatggcactcttcagacattttaaaatttcccctgcagggcaaaattcccctagctgagaacaactgtactatggtgaacaaa

SEQ ID NO: 849028 - DNA, 120 bp, Artificial Sequence
  ENSG00000226530_50 (sequence is synthesized)
attttaataactaggtagatgtaaaaataaacagatgtaaatatagatcagtagatacagtacatcatggttttttttttaatctcgtagccattttcctatggcattaaaaatttttca

SEQ ID NO: 849029 - DNA, 120 bp, Artificial Sequence
  ENSG00000226530_51 (sequence is synthesized)
aaaacatcctgtaacatcctatataagtttattctctaggcatctagcattctactggaaattgggttgtttcagatttttaaaaataattgacactataataatcacctttgagcatat

SEQ ID NO: 849030 - DNA, 120 bp, Artificial Sequence
  ENSG00000226530_52 (sequence is synthesized)
aacactgtaaagatatgagtatattttttagaattaatgcctggagaggaattatgcatttcatataagactttttataggtatcatcatatcatcaaattttcatcttggaaggtgcta

SEQ ID NO: 849031 - DNA, 120 bp, Artificial Sequence
  ENSG00000226530_53 (sequence is synthesized)
tgaatttataattctatccagtagtatatatgagagcttgttttgttataatagcttaaaacctgtttaaacataattcttttcagaaatacagtagctatatttgcttagtacaagagt

SEQ ID NO: 849032 - DNA, 120 bp, Artificial Sequence
  ENSG00000226530_54 (sequence is synthesized)
gatatatgctcattgaaaccattcagaagatgaagtatgaaaagaacgaaaaaccacactttcagatttttttaatgagtacatagatacatatatacttttaaatggaacagaggcaaa

SEQ ID NO: 849033 - DNA, 120 bp, Artificial Sequence
  ENSG00000226530_55 (sequence is synthesized)
gagaaaggtgaggatattgaagacaacaatggagttaaaaagaggggcttctttaaagtttgagatcttggaggatagcaaaacaataagtagaagacatatatattcctttaaagagag

SEQ ID NO: 849034 - DNA, 120 bp, Artificial Sequence
  ENSG00000226530_56 (sequence is synthesized)
caagggtagatagcattttaattattactaagtcagggaccacgactaaggcccacggagattcaagaaaggaggaaaactctcagggaatagattgaaatgactcccaagtggaaaagt

SEQ ID NO: 849035 - DNA, 120 bp, Artificial Sequence
  ENSG00000226530_57 (sequence is synthesized)
ggatccataaaactggtgaaagttggcctacagaacaaagagaatagctataagtggggttcataccccaaaatttcaactatacagggaacagtggttaacatggtcataacagaatca

SEQ ID NO: 849036 - DNA, 120 bp, Artificial Sequence
  ENSG00000226530_58 (sequence is synthesized)
ctgattcccaccatcttcctgatcttttcaactgagcaagttttccctgtttcggtaagtggcaccatcatccataaaaatataggattcatcatttactgctgtccttccctcatgatc

SEQ ID NO: 849037 - DNA, 120 bp, Artificial Sequence
  ENSG00000226530_59 (sequence is synthesized)
tcacagccgttcaagtttccagcagaagtcccagacatcgaggaacacagacaatccatccccactatgtaccgtctgaattctagctctacaaaatccatgggaatgttaaaatggatg

SEQ ID NO: 849038 - DNA, 120 bp, Artificial Sequence
  ENSG00000226530_60 (sequence is synthesized)
ttgtttcatgacactaaattgtggaataatgatgagcagacatattctgttcatttttcttcttcacttatgtctatcctgtattttatcaatattttgttttccatattccattcttat

SEQ ID NO: 849039 - DNA, 120 bp, Artificial Sequence
  ENSG00000226530_61 (sequence is synthesized)
tgaattcctattctatccttcataaactgtattctatatttcattctaaatttcattctattccggtatttaaaaatctatactgtttatttcatagtccatttatttcaggccattgca

SEQ ID NO: 849040 - DNA, 120 bp, Artificial Sequence
  ENSG00000226530_62 (sequence is synthesized)
cattttgttccgttctatattccttccaattttgatttccttttattttctttaatattttatttcatactgtattgcactcattccttttctcatatatttttattttattccatatga

SEQ ID NO: 849041 - DNA, 120 bp, Artificial Sequence
  ENSG00000226530_63 (sequence is synthesized)
cattagatatttctttccattttctgttccattccattttccaattaaattccattaaatttccaatattccattccacatcctgttcaaacccgtattctactccccattttattccag

SEQ ID NO: 849042 - DNA, 120 bp, Artificial Sequence
  ENSG00000226530_64 (sequence is synthesized)
tttccattgcagtctccatttcatcccatcctgcataccatttcaaatccattttccatactatattatttaacactccaaataccattccattctatttttgtgttgcatttcagccca

SEQ ID NO: 849043 - DNA, 120 bp, Artificial Sequence
  ENSG00000226530_65 (sequence is synthesized)
attgttcaccaattccattaaatatccgattttattgtgctcaaaatgttataacagtgacattcaggagactagtttgccaatatttttaatcaaagaattacaaatgtggctgggcgc

SEQ ID NO: 849044 - DNA, 120 bp, Artificial Sequence
  ENSG00000226530_66 (sequence is synthesized)
ctcgagcctgggtgacagagccagaccccacctcaaaaataaataaataaattaattaagtaattaaaataattacaaatgttcatagacttgtaccaagaattttctcttctgggaatt

SEQ ID NO: 849045 - DNA, 120 bp, Artificial Sequence
  ENSG00000226530_67 (sequence is synthesized)
tatccacaatgacacatttaaggatatgaacaatttttaatgagaaggatgtgtctcacaatgatgtaaaatgttggaaacagcataaacggtggccaatatgggaatgtttgaaaatgt

SEQ ID NO: 849046 - DNA, 120 bp, Artificial Sequence
  ENSG00000226530_68 (sequence is synthesized)
aaacttcttttataaatggagtattttgtaatttaaagtggcctcgtagaaatttgtttactgacatagaaaatgtgctttctggaacccaaagcaggttacaatgcagtatctatggag

SEQ ID NO: 849047 - DNA, 120 bp, Artificial Sequence
  ENSG00000226530_69 (sequence is synthesized)
gagtactgccaatggactgctgaaccaaacgaagagcttttctgcaacattcatgttgcagaggagatgggaactgccactcagctgctgccactcagctactaaatctgaaatagttat

SEQ ID NO: 849048 - DNA, 120 bp, Artificial Sequence
  ENSG00000226530_70 (sequence is synthesized)
tcagcaatacaaaaatggtattgcggggttctggggcagcccctttggctcaaatgccagagctttctgctatacctactgagtttcagtagattttattgaataaaagtttctcaattc

SEQ ID NO: 849049 - DNA, 120 bp, Artificial Sequence
  ENSG00000226533_0 (sequence is synthesized)
ccccatccattaaaggcaagagagtgaaaagtgggagagaaagctcccaagttcaacagcagtgacctagggtcatgcagtgaggacttacaaagtccaagaagaaagcatttggagaag

SEQ ID NO: 849050 - DNA, 120 bp, Artificial Sequence
  ENSG00000226533_1 (sequence is synthesized)
tgctacacatgctcaactgaacttcctgtcaaattgttctcactcgtttgggcacaagtctgcttaagccatctctcattaacatttactcttgcccgaagccctctacgcccccaaccc

SEQ ID NO: 849051 - DNA, 120 bp, Artificial Sequence
  ENSG00000226533_2 (sequence is synthesized)
ctagaaatgtgcttcccaccaaagcatgccaggcactaactcgtccctactgaaaggggctgttaaaagctcatcttctttccagatggtagtgaggtgtgaggtgatcctttctctttc

SEQ ID NO: 849052 - DNA, 120 bp, Artificial Sequence
  ENSG00000226533_3 (sequence is synthesized)
ttttttttttttttttacttttagctacccctcaattctggtgttcagtaacaatgtattccacttaaaagagagaaatcatattaattattctaagatataaacacttaattttattca

SEQ ID NO: 849053 - DNA, 120 bp, Artificial Sequence
  ENSG00000283417_0 (sequence is synthesized)
atgggaaaggtctggtggtgactgtgatagaaggcttgtttgtctctgtggacaaggctggaatttaatggcctcggagggctcacccaatattacctggaagatgtcatttttcaccat

SEQ ID NO: 849054 - DNA, 120 bp, Artificial Sequence
  ENSG00000283417_1 (sequence is synthesized)
gaactttctactgagtcatctaaatttttgaattttggacatagcatcaaatttccaaaacaaaagaacaggtctaacaggtagtcacatacctccttctctacaacccccacactacag

SEQ ID NO: 849055 - DNA, 120 bp, Artificial Sequence
  ENSG00000283417_2 (sequence is synthesized)
tgtttgaaatgagatgtgcatcacccctgacccacaattcatccatactacatgctcacccattcaccaatggttcccaggccctctctgcagcatcaccacctccatcttcccaggcaa

SEQ ID NO: 849056 - DNA, 120 bp, Artificial Sequence
  ENSG00000283417_3 (sequence is synthesized)
tgactgatgaagaatgtgaggtcaggaagggcattttacaccctgaggggcctttgtaacacacaacacacccgatcagctgcagcccagcatttaggaagtagccccttgacctgttca

SEQ ID NO: 849057 - DNA, 120 bp, Artificial Sequence
  ENSG00000283417_4 (sequence is synthesized)
gcctgtccttgtgggaaagcctgaggccccactaccatgtgaatctaggtacaaatttagggcccaagaaaccatgccctctgtcatggaggagactataaagtcactcaggacactgca

SEQ ID NO: 849058 - DNA, 120 bp, Artificial Sequence
  ENSG00000283417_5 (sequence is synthesized)
cttttgtcctgcaaattggggctcctaggaggcagctcagtggaatgggtgagctagagctttgcaagttaattttgaatagaccattcactgtctctctcttagcctaattttcctcag

SEQ ID NO: 849059 - DNA, 120 bp, Artificial Sequence
  ENSG00000283417_6 (sequence is synthesized)
ccagaaagtcaggataaataacacctccaagaaaaggcagttagagtgtgtgctcttaagttttactgtctctgttttcaaaaaccacatgtaaaatgatgaagaaaatcatcgtcacca

SEQ ID NO: 849060 - DNA, 120 bp, Artificial Sequence
  ENSG00000283417_7 (sequence is synthesized)
tcatcgtctgaaatcctaccataccacctggagataatagccattaacattccggagactgaaccctcaagcatctttctgtgaacatgtatatcattgtgtttgggtagatcaaatgac

SEQ ID NO: 849061 - DNA, 120 bp, Artificial Sequence
  ENSG00000283417_8 (sequence is synthesized)
gaagtatattattagctgtttggcacggacttggtagatagaagcattcaatgaaagcagactgaccacgtccttcttttcaccatcaccaggttgagaaacaggcacatggtagaagct

SEQ ID NO: 849062 - DNA, 120 bp, Artificial Sequence
  ENSG00000283417_9 (sequence is synthesized)
acaataacccttgctttgcaacaatggctatggtctcagattggcttgagtttgattcttggctctgaaaaatgctgttgatagcctgcgctgaggaattcaccgtaaatgaagtacaca

SEQ ID NO: 849063 - DNA, 120 bp, Artificial Sequence
  ENSG00000283417_10 (sequence is synthesized)
cagcacttagtgaagaaaacaagtgcatggagatgaatttgccaaaggtctcagggctggaaaggagaggacctcaagtcaagctcttgagcctatgttctctgcaccatattttaagaa

SEQ ID NO: 849064 - DNA, 120 bp, Artificial Sequence
  ENSG00000283417_11 (sequence is synthesized)
gttcctcatggagcatctctgcctgaatgtgttacatgccagccactcggcccacggcacctagagagctcaaaactgaaactcagtctgaccacttcataagccactgtgattttcaaa

SEQ ID NO: 849065 - DNA, 120 bp, Artificial Sequence
  ENSG00000283417_12 (sequence is synthesized)
gacaggtattttcttttttctaaatgaaaaatagaaggcattacaaggcacccaagatatctacgaattcagaacaccagttgtgacagttttcaaattttggcttcaaaatattttctt

SEQ ID NO: 849066 - DNA, 120 bp, Artificial Sequence
  ENSG00000283417_13 (sequence is synthesized)
ctgactgacagcccataaatacccacttcttgggttgagtgtaattaatctctgtattttgaccgccactggtgcaaactcatcatcatctctcagcctggaagtcagccggttctccag

SEQ ID NO: 849067 - DNA, 120 bp, Artificial Sequence
  ENSG00000283417_14 (sequence is synthesized)
ctgctcctcacctcccccctccaccacccccaatgagaaatagctacatattctattgttcacaaagaaaaagagaagccgggagtggagggaatgggggactatcacccttgcctggtc

SEQ ID NO: 849068 - DNA, 120 bp, Artificial Sequence
  ENSG00000283417_15 (sequence is synthesized)
attgtccagagacatgttcccagcccttggaagtagcaggtggcactgaacagtggagaatggagttaagtgggacctgaaggccaagaccagctccaccactacccactgggttaccta

SEQ ID NO: 849069 - DNA, 120 bp, Artificial Sequence
  ENSG00000283417_16 (sequence is synthesized)
gttacctaggaccaattgcttagtggacctcaatactctcatttgtgtaatgggaataatagtagtgacagacaacatcctattaaacatgtaaataggccaggcgtggtggctcatgcc

SEQ ID NO: 849070 - DNA, 120 bp, Artificial Sequence
  ENSG00000283417_17 (sequence is synthesized)
actttgggaggccaagcaggtggatcacttgaacccagaaattcgagacaaacctgggcaacgtgacgagaccccgtctctacagaaaatacaaaaaaatgagccaggcatggtggtgca

SEQ ID NO: 849071 - DNA, 120 bp, Artificial Sequence
  ENSG00000283415_0 (sequence is synthesized)
ggttttccggcacagaccttggagggcagcgtggaaactgggtaactgcaagcaagctgaggtaagctgcacgttccgcatggacgccctcaagcgtgattcccaattccaagaccccgc

SEQ ID NO: 849072 - DNA, 120 bp, Artificial Sequence
  ENSG00000283415_1 (sequence is synthesized)
gtccccaccgcccgctgacgagaacgatacccgtgagcaccgctcctctccagtggcccgttcagtcactcacaagcgccagttctcagaggagccgcggaatcgctgtcttggacagtg

SEQ ID NO: 849073 - DNA, 120 bp, Artificial Sequence
  ENSG00000283415_2 (sequence is synthesized)
aagggagctggcgttggtaatcacgctgcaactaggaatccctgacctcgccgaaccctcaactcactgccggctccgagtttcataaattgccgcggaacaacctcgacgcactcttgc

SEQ ID NO: 849074 - DNA, 120 bp, Artificial Sequence
  ENSG00000283415_3 (sequence is synthesized)
gcacgcgcaccagctgtggaaggaaccccctaggagcccccgcgacccggatcggtgaggtagaccaggcctttgccagccccgtccctttctgcaggccccgtccctttctgcaggccc

SEQ ID NO: 849075 - DNA, 120 bp, Artificial Sequence
  ENSG00000283415_4 (sequence is synthesized)
cgcccacgccgcacacttggaactctggccctgtgaatggactcacgtggcaatggatgcagcaatattcagtttccagaatcagcagctccggcagcagtgtcctgtgctgatggtgtt

SEQ ID NO: 849076 - DNA, 87 bp, Artificial Sequence
  ENSG00000283415_5 (sequence is synthesized)
atcagcagctccggcagcagtgtcctgtgctgatggtgttggcagatatgcctgcttccttccagccatgtggaactagatggagtg

SEQ ID NO: 849077 - DNA, 120 bp, Artificial Sequence
  ENSG00000283415_6 (sequence is synthesized)
caggtgtgagccaccgcacccagcctaaaaatactgtttaaagaaactaaaaatgcatagtataaggggaaagaaaaaagttcagtatgactataattgaatgaataagtgaatgataaa

SEQ ID NO: 849078 - DNA, 120 bp, Artificial Sequence
  ENSG00000283415_7 (sequence is synthesized)
ttcagtatgactataattgaatgaataagtgaatgataaaaattgaagttggaaagataagctaaaacttgactataaggattcttgtatgacacactaaaaacattagttttattctga

SEQ ID NO: 849079 - DNA, 120 bp, Artificial Sequence
  ENSG00000283415_8 (sequence is synthesized)
tcatgagagtgaatcaagagtttttaagcatgagaatgacagatcatcatacgtgtgttcagaaaaaactccggggatgctaaagagtatgaattggaatgagttgtatgtgtaagtctg

SEQ ID NO: 849080 - DNA, 120 bp, Artificial Sequence
  ENSG00000283415_9 (sequence is synthesized)
cagcaggctgggagataggaagaccaattagtgtaaccgtgaaaccagaccaatctggttcaacttttatgtaacaaaggaatgagtcatttttcagttgccatagaccctaggttgcaa

SEQ ID NO: 849081 - DNA, 120 bp, Artificial Sequence
  ENSG00000283415_10 (sequence is synthesized)
gttaggtaatttgagcatgcccagatgaacgaagtacacaatcgtgagtggaacctaatggcttagtccaagaaacagggacggaattaacaagcagacaacacatgatccaatcagatt

SEQ ID NO: 849082 - DNA, 120 bp, Artificial Sequence
  ENSG00000283415_11 (sequence is synthesized)
gagccctgacatcatcccgtggcataatccagtcagatcacgcctcccagcattacctcattcacacctcattactctgtctatgaaacctgccccagtccccagctcagggagacagat

SEQ ID NO: 849083 - DNA, 120 bp, Artificial Sequence
  ENSG00000283415_12 (sequence is synthesized)
ttgagcatttccttctgtttccttgccagttgacttgcaataaagctgtttttctcaaaagctagtgacatggtactggcttctatgctctttgggcagtgagcccttgctcagtaacat

SEQ ID NO: 849084 - DNA, 120 bp, Artificial Sequence
  ENSG00000283415_13 (sequence is synthesized)
taggaggctccaatattaatcctggtgggagatataagatatgagtcaatgccgaagtttcatctctgcaggagtgatgtgttggaaccccgtgaatggacaggatgtctaggggacagt

SEQ ID NO: 849085 - DNA, 120 bp, Artificial Sequence
  ENSG00000283415_14 (sequence is synthesized)
atacagggaggagagaagagggccaatgaattaactccaaggacaaatacaattttaaaagacttggaaaataacacaaagaatctgtacttggacacatggaggaataccgagagaatc

SEQ ID NO: 849086 - DNA, 120 bp, Artificial Sequence
  ENSG00000283415_15 (sequence is synthesized)
tgtggttatagaaggcaagattataaaaagtttcaagagctaaattccatttacaaaagcatccaagagaacttaaagagcattcgatttcttcaagaatatctttagatcaatagctgt

SEQ ID NO: 849087 - DNA, 120 bp, Artificial Sequence
  ENSG00000283415_16 (sequence is synthesized)
tctgaaccttggatcacttgactctgttgtcacttcttcccaccaaagacctggtccctctggatgtccttctccagaatcatagtctcagagctggaagggaccctggagacatcagag

SEQ ID NO: 849088 - DNA, 120 bp, Artificial Sequence
  ENSG00000283415_17 (sequence is synthesized)
tacaagcctaagagtctctgctaagttctttctccctctaacacagctacgcctgggctgagctctgttatcactgacttctgtcttcagtctcctttacccctagagatgctgactaac

SEQ ID NO: 849089 - DNA, 120 bp, Artificial Sequence
  ENSG00000283415_18 (sequence is synthesized)
cactctattaatgagcagtcacaggctgtgacctcattaaaaagtagctaatgaggcactttgttgttcaggaagcagtctaccgaggttcccagtggcctatcttggggcgtggaggga

SEQ ID NO: 849090 - DNA, 120 bp, Artificial Sequence
  ENSG00000283415_19 (sequence is synthesized)
aagcttaggtgaatagaagggatcaggtctgggggagagggctaatgattgaggctgcagagccatagcttcaaataaactcatcttggcaagcagccacctttgaagctcaagtccctg

SEQ ID NO: 849091 - DNA, 120 bp, Artificial Sequence
  ENSG00000283415_20 (sequence is synthesized)
agatgtggttcagagtggcagcgatttccctctgagctgtcagctctgcctaatgcctgctctcttgacccattttgatggagagctttaacatttgaaatcaagaggtggttttgtgtt

SEQ ID NO: 849092 - DNA, 120 bp, Artificial Sequence
  ENSG00000283415_21 (sequence is synthesized)
gctgtgagtttgtgaattatgaacaattgtataagccttttgattggtctctatctcgcaggctgtgtcttcttgcaattcattctatatatagaagggccttgtatgctgaagactgtg

SEQ ID NO: 849093 - DNA, 120 bp, Artificial Sequence
  ENSG00000283415_22 (sequence is synthesized)
tgtgtgtgtgtgtgtgtgtatttgagacagggtcttggtctgtctcccaagctggagagtacatcatcttgcactccagatgcatcagtggcatcatcttggcttactgcagcctggacc

SEQ ID NO: 849094 - DNA, 120 bp, Artificial Sequence
  ENSG00000283415_23 (sequence is synthesized)
tcctcccacctcagcctcctgagtaactaggactataggcacgtgccatcacacccagttaatttttgtattgttttatagagacagggtttcatcatgtttcccaagctagtcttgaat

SEQ ID NO: 849095 - DNA, 120 bp, Artificial Sequence
  ENSG00000283415_24 (sequence is synthesized)
tttgtattgttttatagagacagggtttcatcatgtttcccaagctagtcttgaattctggagttcaagggatcctcctgcctcctgctcaatcccaaagtgctaggactacaggcatga

SEQ ID NO: 849096 - DNA, 120 bp, Artificial Sequence
  ENSG00000283415_25 (sequence is synthesized)
ccttcaatatttttttcctttctacccttccaccctcatctcccatgttatcaatttcatcattattactactcttatcaccatcaccttcatgggtatcatcataattaatatttgtat

SEQ ID NO: 849097 - DNA, 120 bp, Artificial Sequence
  ENSG00000283415_26 (sequence is synthesized)
agtgctcaaatgttcctcagtgtatttaaacctcacaacaatgccatcaaataggtgctgtggctaatcctcatttaatagaataacgctgaggcagatatgtcatgtagcttgacctat

SEQ ID NO: 849098 - DNA, 120 bp, Artificial Sequence
  ENSG00000283415_27 (sequence is synthesized)
gtcttatagctactcagagaaacaggattacatcccaggcgtttggttctagagtgtatgctcttacctatgatgttgtacatcatgaagatttaggcttctgtgctttttgcactcact

SEQ ID NO: 849099 - DNA, 120 bp, Artificial Sequence
  ENSG00000283415_28 (sequence is synthesized)
actggcttgtcatggaatgctcatctcacaggcaccctcaaatcatggctcccattccttcttacacttcttaatttgctacttctgatcatttgacactaggacctgggatcctaatgt

SEQ ID NO: 849100 - DNA, 120 bp, Artificial Sequence
  ENSG00000283415_29 (sequence is synthesized)
ccaaggaacatgtccatctccccactgaactgagacttcttgcacatcaagtatttagttgggttcagtaacttatagtggtattactgaatattttagtatatattatacttgtttaaa

SEQ ID NO: 849101 - DNA, 120 bp, Artificial Sequence
  ENSG00000283415_30 (sequence is synthesized)
tatacaatactatatcctctttgggaaactggaaactgctcttgccctttctattgctgtcatgtccctgctcatcctcccattttttcctatctcaataaacttctaccaaactggttg

SEQ ID NO: 849102 - DNA, 120 bp, Artificial Sequence
  ENSG00000283415_31 (sequence is synthesized)
cttatgccagaaatatgggtgtagtctttgacaccagtctaacactaaactatcagaagctctcacctagactactgccatagtgtcctacactaatctctttatactcttgccacttgc

SEQ ID NO: 849103 - DNA, 120 bp, Artificial Sequence
  ENSG00000283415_32 (sequence is synthesized)
aataaattatctacccagtagacatatttatctttaaaaataccactctttgctcaaaatgcttcataactgtccatttcattagactaagatctaaaatctataagatggtccaaaaaa

SEQ ID NO: 849104 - DNA, 120 bp, Artificial Sequence
  ENSG00000283415_33 (sequence is synthesized)
ttctcatttatctgacctcttttacctatacaactaattttacctgtttcattcttattcacaaaatttcaaataggtttttttctgttttggaatcaggataatattagcctcacagag

SEQ ID NO: 849105 - DNA, 120 bp, Artificial Sequence
  ENSG00000283415_34 (sequence is synthesized)
tgaattgggaagtgttctctctttaattttttggaacagtttataaaaaattggtgttaattcatcttaaaagtatgttagaattcactagtgaagccatctagccctgggcttttgttt

SEQ ID NO: 849106 - DNA, 120 bp, Artificial Sequence
  ENSG00000283415_35 (sequence is synthesized)
gtgggaggattttttattattaattctaccactttagttgttacaggtctattgagattttatttctttttagtcagtttggttttgtgtcttttaggaaatttgcattttatctaggtt

SEQ ID NO: 849107 - DNA, 120 bp, Artificial Sequence
  ENSG00000283415_36 (sequence is synthesized)
ctctagtttgttgacatgcagttgtccatagcatcccttataatccgtttcattttggtaaagttggttataatgtcccccgcccctttcatttctgattttagtaatttgaatcttttt

SEQ ID NO: 849108 - DNA, 120 bp, Artificial Sequence
  ENSG00000283415_37 (sequence is synthesized)
ttctttttggcttgatcattgtagctaatagttggtcaattttgtgagtgttttccaagaaccaacttttgattacattttctctattattttctattctatatttaattaatttttgct

SEQ ID NO: 849109 - DNA, 120 bp, Artificial Sequence
  ENSG00000283415_38 (sequence is synthesized)
gtgattttaaaaatcattatataaaaatgtttattagtttattccttctgctcactctgtgttcagtttgctgttctatttctaatttctgaagatggaatcttaggatatttatttgaa

SEQ ID NO: 849110 - DNA, 120 bp, Artificial Sequence
  ENSG00000283415_39 (sequence is synthesized)
atatttccttttaatttttaaaatgttggtgtaaaatgacctttcatagttgtatatattcctggggtacaaactgatgttataatttattacaatatagaataattaaatcgagtgaat

SEQ ID NO: 849111 - DNA, 120 bp, Artificial Sequence
  ENSG00000283413_0 (sequence is synthesized)
taggaatgttccagaagtaagagagatgactagggtttcaagaacaaggaccagcacctatgaaggctctgaggcacagaccactgtgacctgtggagaagtgcaaagtgaaaggcacgt

SEQ ID NO: 849112 - DNA, 120 bp, Artificial Sequence
  ENSG00000283413_1 (sequence is synthesized)
tttgattactaccgacattcacagtctggacacgggtgacaaatctaaaagatattgcccattcgtccaactgccgctgtcctgccagtatatcgtctgagattaccatcagctaaatat

SEQ ID NO: 849113 - DNA, 120 bp, Artificial Sequence
  ENSG00000283413_2 (sequence is synthesized)
tgcattgtctttggacaattttcctacattgtgactcctcactacattttcaatgcttttctagtcccagacaagctacagactgttaatttacacttgcttttgccttgcctgaggaaa

SEQ ID NO: 849114 - DNA, 120 bp, Artificial Sequence
  ENSG00000283413_3 (sequence is synthesized)
ttgaaaataaattttaatttcctagtcaagggctacgggtgctttgtgtggtttggaggaaaaaaaaatactgttagatggaattagggaatattaggagagtttctgaagttagtgaag

SEQ ID NO: 849115 - DNA, 120 bp, Artificial Sequence
  ENSG00000283413_4 (sequence is synthesized)
caatctgtcgatcacgcccagtaaccatattcataggcttcagatctgaattttgaattgcatcagaagctttcctctggcctcagagatgccattgagaccattctcatagttagtcac

SEQ ID NO: 849116 - DNA, 120 bp, Artificial Sequence
  ENSG00000283413_5 (sequence is synthesized)
cactcacactacacaaaatggaagaaaaaaacttcctttggggcaaatcaacaatctctggtaggaaaataaacaaggatgctttcagaataccagaagcccaagtctgagcatctggag

SEQ ID NO: 849117 - DNA, 120 bp, Artificial Sequence
  ENSG00000283413_6 (sequence is synthesized)
gcaaaggaagagtagagaagtctttgttggtgggaccactgcctgtaggaatttaagggaacttggatcttaggagttgctcagttaagtcctagagagagcctaagtgggactgatgag

SEQ ID NO: 849118 - DNA, 120 bp, Artificial Sequence
  ENSG00000283413_7 (sequence is synthesized)
aagcagaacaaattgctatttctgagaagaaaaaccaacacttttggatgttaacttttggatgtttgaattttttgttttagtttttattccttttgggaaaagctatttttatcgcaa

SEQ ID NO: 849119 - DNA, 120 bp, Artificial Sequence
  ENSG00000283413_8 (sequence is synthesized)
aaaaatatgtaaagctagcaacaaaatagttgaaagtatttattgtgtacctactgtgtgataatagcagctgggtttcaaacacaagtgaatatgaaataaatgagccctagatgcaca

SEQ ID NO: 849120 - DNA, 120 bp, Artificial Sequence
  ENSG00000264558_0 (sequence is synthesized)
tttaaataagtaactccattgtttttctcttttccaagatggccgatgttatggttttctacgaagtcagtgcttacttagctcactaacagcgctgctgttggcggctgcggctgctgc

SEQ ID NO: 849121 - DNA, 120 bp, Artificial Sequence
  ENSG00000264558_1 (sequence is synthesized)
tttcaagcctcactcactcatcctctcattcccaaacattcagcatccgtgcacactcctcacttccaggtttttcaaaagatgggagatttccagtgggggtcctcaggttatcatccc

SEQ ID NO: 849122 - DNA, 120 bp, Artificial Sequence
  ENSG00000228596_0 (sequence is synthesized)
ggggagctggcacaaacagagcccagcatgggcctgaggaggactctaccaactcttcagtggacccagccctgaagcacccctctggggcgatgctaaagttgaagttgggggcgggga

SEQ ID NO: 849123 - DNA, 120 bp, Artificial Sequence
  ENSG00000228596_1 (sequence is synthesized)
gtcttcagactttgccttccacttgagctcagaaggcccagttctccaggttcctggggtgattttggtccctgaggtgatcatcttggcttctgatgccaaaggcagaattgcaggagg

SEQ ID NO: 849124 - DNA, 120 bp, Artificial Sequence
  ENSG00000228596_2 (sequence is synthesized)
tgaggatgaagcaggagggaaaacagcggcagctgaagatgaaccctctgcccagggccagagcaaaatgaaatgtggggctcctcatccaaaaattaacaagaattgaatttcaagact

SEQ ID NO: 849125 - DNA, 120 bp, Artificial Sequence
  ENSG00000250467_0 (sequence is synthesized)
ttttcaaatgcaatcaaggcttcctatatacgggcggaaaggcggcttcctccgctgagaaagctgaaggtccttacctgcggcgtacggactgctctggtggtccctgagggtgcccag

SEQ ID NO: 849126 - DNA, 120 bp, Artificial Sequence
  ENSG00000250467_1 (sequence is synthesized)
gctgcaggatcccggcgtgagggaagggcagccggacgtggccccaaaagtggtccttatcgggttatactggaagccactggcctggctgcaggaactgaagtcagcataggctgaagc

SEQ ID NO: 849127 - DNA, 120 bp, Artificial Sequence
  ENSG00000250467_2 (sequence is synthesized)
caggctcgaggtgtccatcccagccatacaggactcgtaggcagaggaattgagggttctcacaaccaattgaaagagaataaaacattctcttgcttcataaccaaagtgctgctcaca

SEQ ID NO: 849128 - DNA, 120 bp, Artificial Sequence
  ENSG00000250467_3 (sequence is synthesized)
agaaattgaagacatggaagaaagatgaaaacgctggctactaaatacctatgtgtggttactgagtgtggtatacttggacaccgagctcccccacccatcagatgtcacaaagagtcc

SEQ ID NO: 849129 - DNA, 120 bp, Artificial Sequence
  ENSG00000250467_4 (sequence is synthesized)
tcttactcttggataatttcaaatcaaactgacctccccagatattgagaagcaaaataatcaacaacaacaaaacctgccttgtaaatatgatttacattgattatgtggggatgttct

SEQ ID NO: 849130 - DNA, 120 bp, Artificial Sequence
  ENSG00000250467_5 (sequence is synthesized)
gaagggagaagaaaggagctgtcaccaactcaaagcaacatgagagcaagaatcatgctaattttgccgtctgcctctcctatgttcttggtgccaagtctgtagttgaggttcatttac

SEQ ID NO: 849131 - DNA, 120 bp, Artificial Sequence
  ENSG00000250467_6 (sequence is synthesized)
ctgaatgagtgactaaagctttataacttgaacactttgaatacatagatctagcataaataagcctattaatggcaactttgacctgtcaagcaataaccaaatgatttgtgtgcctgc

SEQ ID NO: 849132 - DNA, 120 bp, Artificial Sequence
  ENSG00000267169_0 (sequence is synthesized)
ggaagtcgagcgccaccgcggtgttggcgagtgtgaagagagaggaggagcgtttgcggcctcagcgtctgtcaacagaaccctcttcacccgtggttaaaccctccctaaccctgagct

SEQ ID NO: 849133 - DNA, 120 bp, Artificial Sequence
  ENSG00000267169_1 (sequence is synthesized)
cgtgctcccctcccggtggacgcagacctgaccacagaagccctgcagcactcactgggggcttgagggagcccctgagtcccctccaccctcgccgccttctcctgggtacccaggaaa

SEQ ID NO: 849134 - DNA, 120 bp, Artificial Sequence
  ENSG00000267169_2 (sequence is synthesized)
cgtctccaagggaggctgtgacccaggaccccgcctcgacctcaccttcttctgtaaggcgcagtgaaagacgaagatgaagaccccctggaaggcgttgaaggtggtgaagagataggc

SEQ ID NO: 849135 - DNA, 120 bp, Artificial Sequence
  ENSG00000267169_3 (sequence is synthesized)
catgaccaccgactccttgttgatgaagaggaggccgaaagcccagcaataatcgtaattgacaagaggcattacaaggagctgcaacaaaagcaacgactaccaagtgtccagcactca

SEQ ID NO: 849136 - DNA, 120 bp, Artificial Sequence
  ENSG00000267169_4 (sequence is synthesized)
cgaggggccagcaactatgctacgcacctcactggccgtcttttgagaaccctgtctacagatgggaaaactgaggcacactgaagtgaggccacatggctggcgaaagcaggcaccatt

SEQ ID NO: 849137 - DNA, 120 bp, Artificial Sequence
  ENSG00000267169_5 (sequence is synthesized)
tcctttgcatctacagctcgggtgcacacaagcttgacatgcgttgtcgctactccttgtggcttcccagggaaggcttttgacccctctccaccccatcacagatgaataaacaggctc

SEQ ID NO: 849138 - DNA, 120 bp, Artificial Sequence
  ENSG00000267169_6 (sequence is synthesized)
agctggcttaaagggcattggtaatattactgagcacatcctgaaccaggcatgggtctgggcgctggggcggcgggtgaagacgaagcctctgcccttgggaagtttacactcggcact

SEQ ID NO: 849139 - DNA, 120 bp, Artificial Sequence
  ENSG00000267169_7 (sequence is synthesized)
caaaaccctgccaccaggagcgactttgtggccggccctgggccaagcgcttctcacatgtcatctcatggactcacacctccttccgtagtggcccagagaaattaaatcatttgctca

SEQ ID NO: 849140 - DNA, 120 bp, Artificial Sequence
  ENSG00000267169_8 (sequence is synthesized)
aggtttcagagccagaaaactcaagagcccagtcgagccttgaacctacacccatctgactgcccccctgtgctgagctcgctgcctcccaccccccttccccgctgtcccagccgcggg

SEQ ID NO: 849141 - DNA, 120 bp, Artificial Sequence
  ENSG00000267169_9 (sequence is synthesized)
agtcagccgtgtccccagtgctgtggggaggcttcaaggagcagatgggcatccccctcggtggtggctgaaggcctcaagcgctgaaaggaaaggacgaagagtaaaagaagaaaatta

SEQ ID NO: 849142 - DNA, 120 bp, Artificial Sequence
  ENSG00000267169_10 (sequence is synthesized)
cggaagcacagaagggatcctgtttccccagcatcgagtcacctgtgaggagaaatcaaaggctggcagggaaggttggggtgggaggggagaggagggagagttacagggcctcttagt

SEQ ID NO: 849143 - DNA, 120 bp, Artificial Sequence
  ENSG00000267169_11 (sequence is synthesized)
ccccaaacccggcccgccacactcagacaccctgatggccctgccttctccccactcttcccggaggccctaccaccaggttgactacatggaacccattgtgggaggagaagggaaggg

SEQ ID NO: 849144 - DNA, 120 bp, Artificial Sequence
  ENSG00000267169_12 (sequence is synthesized)
ggagggaggagagagggcaggaaaaaggtgatgtcaagggtggggtgctgaggaggagagaccttgtctttgtctgatccctttggccaggtgcaagatggccaggctcctggctcccca

SEQ ID NO: 849145 - DNA, 120 bp, Artificial Sequence
  ENSG00000267169_13 (sequence is synthesized)
aatcactttcttcaggctgcctggaggccaccctcagtccaacatggcggcatttcctttgcagacaggaagtgccacatggtaatggggagaccagtgaggagctatgaatctgttgaa

SEQ ID NO: 849146 - DNA, 120 bp, Artificial Sequence
  ENSG00000267169_14 (sequence is synthesized)
aatgccccccagcccttcaccctgaatctgccaccaggcctcagaggatggtatcccactctatgggtgtagagtccagcttccatgattgggaagaagtgtgtggggagtgagggtgct

SEQ ID NO: 849147 - DNA, 120 bp, Artificial Sequence
  ENSG00000267169_15 (sequence is synthesized)
gagagaacggtgttgagaggggcagtggggtaagtgagagggaagagaaggtagatgagaagggtcagaaaaggtcagaagagtcagaaaaggaagggatgtgagaaggcgagggaggca

SEQ ID NO: 849148 - DNA, 120 bp, Artificial Sequence
  ENSG00000267169_16 (sequence is synthesized)
gatgggggagaaaagcatagaggccaagggagaagagagagacgtaagtgtgccaggcagagcacgggaccatggcctggcagtgtggaaatgagtatagggtgcatgaagaagcagggt

SEQ ID NO: 849149 - DNA, 120 bp, Artificial Sequence
  ENSG00000267169_17 (sequence is synthesized)
gagtgggctggggtaaggagagctggagaaggtgtccccacaggaggggacagagtctgtgaggcgggggagcaggcactgagtgtggacactggtgtctgggattagagaatgtgtgtt

SEQ ID NO: 849150 - DNA, 120 bp, Artificial Sequence
  ENSG00000267169_18 (sequence is synthesized)
ggagagagcaggcccggctgtccccactgtgcccaggccccatgcatgtgtgcacatgtgtgatgggtcaaggtgtctcctcctcactcactcatgcgagaagggcccgcatccgcacaa

SEQ ID NO: 849151 - DNA, 120 bp, Artificial Sequence
  ENSG00000267169_19 (sequence is synthesized)
ggaacaagatgactcactgtaggggacacagtcgtactgcacctccaggtacttgtaggtcccaggacaggggtcaggaaaggcatccgagccggcgaccaccacgcactgggtgcggtt

SEQ ID NO: 849152 - DNA, 120 bp, Artificial Sequence
  ENSG00000267169_20 (sequence is synthesized)
gttacaccttcagaggagaaacagggcattgggaaagaaacacatagacggggtggcgggggtgggggtgcatgctccagggtcatggtgtcatagacacccccaaattgggaaggggca

SEQ ID NO: 849153 - DNA, 120 bp, Artificial Sequence
  ENSG00000267169_21 (sequence is synthesized)
acacccccaaattgggaaggggcagtggagctggaaaccaagtgatatagtttggatctgtgtccatacccaaatctcatgttgaattgtgatctccagtgttggaggtggggcctggtg

SEQ ID NO: 849154 - DNA, 82 bp, Artificial Sequence
  ENSG00000267169_22 (sequence is synthesized)
ctgtgttctcttttcctcctactccagccatgtacggcgtgcctgcttccccttcaccttctgctgtgattgtaagtttcct

SEQ ID NO: 849155 - DNA, 70 bp, Artificial Sequence
  ENSG00000267169_23 (sequence is synthesized)
tctcttttcctcctactccagccatgtacggcgtgcctgcttccccttcaactatgcttcctgtacagcc

SEQ ID NO: 849156 - DNA, 120 bp, Artificial Sequence
  ENSG00000267169_24 (sequence is synthesized)
ccgactccttgttgatgaagaggaggccgaaagcccaggtgaggcccagcaggaacagcagcgcgatggcccccagcgcccaggatctgggagtggggcgacaggggagtcaaagtaccc

SEQ ID NO: 849157 - DNA, 120 bp, Artificial Sequence
  ENSG00000267169_25 (sequence is synthesized)
gccggaggggacggcctcagcccaggcctcccctgcagcctacaacgggggcccttgggtgggcctgggcactgtctgcaaagccctgagcgggccgagtgggccttgggggcagtggcc

SEQ ID NO: 849158 - DNA, 120 bp, Artificial Sequence
  ENSG00000267169_26 (sequence is synthesized)
tgcccaggacacctccaccggagcctgggcctgagggaaaggtactgggtcaggggtcggggtattgtgaacatcagttattcctctgccaacttcattgtttctgctaaatttccagac

SEQ ID NO: 849159 - DNA, 120 bp, Artificial Sequence
  ENSG00000228592_0 (sequence is synthesized)
tggccacagactgaaggctgcactgaccattttcctacttttgaggttttgggacttggactgagccgctactggcttccttgctcttcaacttgcagacagcctgtagtgggacttcac

SEQ ID NO: 849160 - DNA, 120 bp, Artificial Sequence
  ENSG00000228592_1 (sequence is synthesized)
ttgcagacagcctgtagtgggacttcaccttgtgatcatgctgctgactaacttaatgaactgaacggattaaaatggtgcaagagaaaagggcatttttacacaaaaggaagcattttc

SEQ ID NO: 849161 - DNA, 120 bp, Artificial Sequence
  ENSG00000228592_2 (sequence is synthesized)
tgtgttccagttcagctgttccaatgacatttggtggtgttatcagtgtgaattatacaagcaagtttctttatccagactgacgcatcaaccatgatctagcatttgcaagatgtgtaa

SEQ ID NO: 849162 - DNA, 120 bp, Artificial Sequence
  ENSG00000228592_3 (sequence is synthesized)
ttactttgactttcaagaaaacatcttctgatctaaggaacttcccaagatatcaaagctggctggctcaggaatactctcacagtgatggcagaagagcaaatctggaagttcaaacac

SEQ ID NO: 849163 - DNA, 120 bp, Artificial Sequence
  ENSG00000228592_4 (sequence is synthesized)
tcaaatgtgttgttggatttctgcatgcatcacatgggctaacaactggtcaaagcaaatcacatggccaaactaaaaatcaaaggcctggaaggtagaccctacttttctattaagatg

SEQ ID NO: 849164 - DNA, 120 bp, Artificial Sequence
  ENSG00000228592_5 (sequence is synthesized)
aactgcctagtaacataggaaaaggtggtgaaaccatgaaagatgaaaaatacagggctgcaatgttatctacctcatttattttgatactctagacctaaggggagtagtggattaaca

SEQ ID NO: 849165 - DNA, 120 bp, Artificial Sequence
  ENSG00000228592_6 (sequence is synthesized)
cgggtactagtctctgggtgttgtgccatctgttgttggtttccttaacgatgacaaacttataagtatattctttcaactaaattcatttgagtataatgttttcaagacaatggattg

SEQ ID NO: 849166 - DNA, 120 bp, Artificial Sequence
  ENSG00000228592_7 (sequence is synthesized)
atatacagtagacatagcttatgtaaacaacctgtgtatcaatcctgttgacttaggcttttaccaatagttgttttctatcgaaccttcattaaagctccacatggttaataatccagg

SEQ ID NO: 849167 - DNA, 120 bp, Artificial Sequence
  ENSG00000228592_8 (sequence is synthesized)
gtctctttcatgtagcttcatctccgttgttttaagttctctaattttaggaagtccatggttttatattaagctgatatggttatgcttaaaaccagcatgggacctggagaatgacac

SEQ ID NO: 849168 - DNA, 120 bp, Artificial Sequence
  ENSG00000228592_9 (sequence is synthesized)
acaagatatccaaccaatgtagttttttatgtaatttctcttgtttgaatagatgtaccattcatacttctactactgtagagacgggttcacaggtaggtagtgactaggagacatcta

SEQ ID NO: 849169 - DNA, 120 bp, Artificial Sequence
  ENSG00000228592_10 (sequence is synthesized)
ctttgaaaactaataaaaatatttggctgtctaaaaaatatgcactacccaaatcagtgcagtatagggtaaataattttaaaaagaatgttagggagcaaattcttggtggtttcttac

SEQ ID NO: 849170 - DNA, 120 bp, Artificial Sequence
  ENSG00000228592_11 (sequence is synthesized)
tatagagtatctacttttgaagagcaaaaaataaacattctaactgaacagttaaaaataatgggcatacataaactcgggatttttctgcagtaaggaagcttaccgcttatgcaggtt

SEQ ID NO: 849171 - DNA, 120 bp, Artificial Sequence
  ENSG00000228592_12 (sequence is synthesized)
taactatccctcttcacattaccctgtgaaaactgggtctcagaaactggtgcagaaatgccagtactctagctatgctgattgttgataataaaaaactcttctttgtatctgattcag

SEQ ID NO: 849172 - DNA, 120 bp, Artificial Sequence
  ENSG00000228592_13 (sequence is synthesized)
gagtcttttatcttctactgtaattcatacaattttgaaaagatacctacttagatttctcgtagggtaaaaactttctaatctttcacagtccttaaacacagctatacattttctact

SEQ ID NO: 849173 - DNA, 120 bp, Artificial Sequence
  ENSG00000228592_14 (sequence is synthesized)
tgaattccttaaataaccacttactttgagcacaaaccatgatcaagacaatattatgcacattgtaatttattagaacttgctttccacgaattttaaaatgtcatgtaaaatatagat

SEQ ID NO: 849174 - DNA, 120 bp, Artificial Sequence
  ENSG00000228592_15 (sequence is synthesized)
atattgaaaagttttgttaaacacacatattctatgcaaatggagaaattgaaattttatgatgttatagcttatgtttaaagtcactcagtatctcagctttttcatctgtaaaatgac

SEQ ID NO: 849175 - DNA, 120 bp, Artificial Sequence
  ENSG00000228592_16 (sequence is synthesized)
attaatagtaataactattttgtagggtgttaattggtataaattttgaaagtacatagggtttgataaatgcagtgctaagtgaaggttttcagtgaggatacattttataactgttaa

SEQ ID NO: 849176 - DNA, 120 bp, Artificial Sequence
  ENSG00000228592_17 (sequence is synthesized)
gtgtatggacacaggcaggagtcaaattgcctagtagtccatctttaaagcatatactatgtttcttcttaaaaattatgatatttattttatttacatattatatctgtttttaacatc

SEQ ID NO: 849177 - DNA, 120 bp, Artificial Sequence
  ENSG00000228592_18 (sequence is synthesized)
catccttgaaattttatgttttatatatagttatgcacatattacattttgtttacatagctatataaagtcaagtaatgataagattaagacatctttatcctgaactatctaactgtt

SEQ ID NO: 849178 - DNA, 120 bp, Artificial Sequence
  ENSG00000228592_19 (sequence is synthesized)
acagacagacaaagtgctatattgaaggttacagaagaataaagaagttctgaatagaacagaagctttcataaggcaggggttataacgaccaacagagactccacaaaaccatttact

SEQ ID NO: 849179 - DNA, 120 bp, Artificial Sequence
  ENSG00000228592_20 (sequence is synthesized)
cacaagagaaaatatggcacggattggattagaagtggaaagactaatgcatttttgtccataaggattagaagaaaaatggttctctcagctctgcaagtgagcacaacaagcaatcca

SEQ ID NO: 849180 - DNA, 120 bp, Artificial Sequence
  ENSG00000228592_21 (sequence is synthesized)
aaagcattatttgtgtgaagcagtttgtagaatttgttccatttgtcactagaactagtgtttgaagctcagcaaaagttgagttatggttaagccccagggtcagtggccacgtgttca

SEQ ID NO: 849181 - DNA, 120 bp, Artificial Sequence
  ENSG00000228592_22 (sequence is synthesized)
gagtagtaccttaggtttaaagctgattcacaacctgaaaaacactcagtggtgttctctcccaaattatcaatcattaccttgtggtgttttaaaaagaggatagaagattgcttgacc

SEQ ID NO: 849182 - DNA, 120 bp, Artificial Sequence
  ENSG00000228592_23 (sequence is synthesized)
aggaagagcgcaaagaagataatctgtctgttccatgaaacgtgagctgggcagcagaggaccatttacaaaaccgttcacccacacattggcagattggtattgattgacagctgggag

SEQ ID NO: 849183 - DNA, 120 bp, Artificial Sequence
  ENSG00000228592_24 (sequence is synthesized)
ttaagctggtactgctctgaagtcgccatgacctctaacctagatggctacaatacctactacgacttctccttgcctccaggctgctgactaacttaatgaactgaacggattaaaatg

SEQ ID NO: 849184 - DNA, 120 bp, Artificial Sequence
  ENSG00000228592_25 (sequence is synthesized)
tcttcctgaggggcctggaggaagtcacatccacaagccagagctaaccctttttctgctgaccccaaatttttaaacaaagcttcttttccttaaccaattgcaaatcagaaaatcttc

SEQ ID NO: 849185 - DNA, 120 bp, Artificial Sequence
  ENSG00000228592_26 (sequence is synthesized)
aaatttgcctaagacctgtaagcttctgcttcaatatgtcacaccttttcttaggccaaaccaatgtataaactccgtgtattaatttagactgtaacttctgcactcctgaaaatttcc

SEQ ID NO: 849186 - DNA, 120 bp, Artificial Sequence
  ENSG00000228592_27 (sequence is synthesized)
cccggctttgaaaaccctttcttgtaagccagccgggagtctgggtcttaaacatgagctgcctgattgtccttgcttggtgccctgcaataaatgcctgattgttgtggtgcagtttgg

SEQ ID NO: 849187 - DNA, 120 bp, Artificial Sequence
  ENSG00000228592_28 (sequence is synthesized)
atgtcagtatttcgctttgctggaccacggaggccgacctatgtttggttcattcactaacataaggaagtggattctgctaaaacacagtgagcttagaactgaatgctgagactctct

SEQ ID NO: 849188 - DNA, 120 bp, Artificial Sequence
  ENSG00000228592_29 (sequence is synthesized)
gatgagatcatagctcggctgacatttttattttagcttggttgagactataagcagagaaccctgcccagaatccctactcaaggaaactgagataataaattttcattgttctaagcc

SEQ ID NO: 849189 - DNA, 120 bp, Artificial Sequence
  ENSG00000228592_30 (sequence is synthesized)
actgtttgtaatagttccttacacaacaacaataataataagagtaataaaaactaattcacttgctttcatggaacttacgattattaagtgagacacattatgaatatctgcccaaaa

SEQ ID NO: 849190 - DNA, 120 bp, Artificial Sequence
  ENSG00000228592_31 (sequence is synthesized)
actattaaacccacccagttttttcatacacatttctgttggatgaacatagaaattgacccttctgggctttaagcttgaaacttacgtttgttttatctgagttccttccccaggaaa

SEQ ID NO: 849191 - DNA, 120 bp, Artificial Sequence
  ENSG00000228592_32 (sequence is synthesized)
ggatcccaaaggcctctaaaaaagtatacaaaaacctgaaactaaccagattattgcattcagatgatgagatgccaggaccctcattcatcatgattgttccttatcctccctgcgttc

SEQ ID NO: 849192 - DNA, 120 bp, Artificial Sequence
  ENSG00000228592_33 (sequence is synthesized)
tcttccctgctatataaacccctaattgtattcagtcaggaagatgggttcgagactgatctctcatctcctcagctgcatcacctgattaaagccttcttttttggcaatgctcatcct

SEQ ID NO: 849193 - DNA, 120 bp, Artificial Sequence
  ENSG00000228592_34 (sequence is synthesized)
tggcaatgctcatcctctcagtcattggttttctgtgcagtgaacagcaggacctagactgaactcctggtattttggtaacaactgcaagaaggctcaaattgctgaaattcaaaggaa

SEQ ID NO: 849194 - DNA, 120 bp, Artificial Sequence
  ENSG00000228592_35 (sequence is synthesized)
gtcaacacattgtaagaagagccaagagggtacatggcagagcagaatttgacacattataagatgagccaggagggtatatggcagagccaagagggtacatggctagaggtgtcgtaa

SEQ ID NO: 849195 - DNA, 120 bp, Artificial Sequence
  ENSG00000228592_36 (sequence is synthesized)
gggagtctgctaggggagagtctggacaggaaggaaagggtcagataatgaaagatcatggcagtaattcatttctacattttgaaacttaataatctattttttataattttaaaagca

SEQ ID NO: 849196 - DNA, 120 bp, Artificial Sequence
  ENSG00000228592_37 (sequence is synthesized)
ttgaccatttttgagagagaatttctgtagcttgtttagtgttttcaaactctgttaatatacttatttttctaactaatcttcagttaattttgatgatgtattttatttttacacagc

SEQ ID NO: 849197 - DNA, 120 bp, Artificial Sequence
  ENSG00000228592_38 (sequence is synthesized)
cgactatttaattgttgtacccaactttacatataattgtacactgagctccaattatctgtatataattgggaatcaaagcctgtgagtgacactttgttttctgagtgatctttggaa

SEQ ID NO: 849198 - DNA, 120 bp, Artificial Sequence
  ENSG00000228592_39 (sequence is synthesized)
ttaattaacattgatactgtgtttctgattttctatgtattagcgttatgcttgggtcatcagagatttattcttattctactttgtggttatcttgtatttaacaactctatgtagcta

SEQ ID NO: 849199 - DNA, 120 bp, Artificial Sequence
  ENSG00000228592_40 (sequence is synthesized)
atccctaattgaatcaattgttatcatttcatcataataaaataatcatcagtaacaaggcgtgctggagctactggcgtgcattggcttacaaaagaccaccatggacattatttccca

SEQ ID NO: 849200 - DNA, 120 bp, Artificial Sequence
  ENSG00000228592_41 (sequence is synthesized)
actcccttatcagtggtgccatcttgagagtttgaaattgtcaacagtggaaatagttgtatcacaaaatcagcaaatattacaataataggttttgtttcctcagaaagacagttaaat

SEQ ID NO: 849201 - DNA, 120 bp, Artificial Sequence
  ENSG00000228592_42 (sequence is synthesized)
tttactagcataccagtgatgagacacaacctttctgtatgtcaatttataaaaatttcaacatgagactttctttaaatcctactggcttgtcttgactttctgtgactcataaaagaa

SEQ ID NO: 849202 - DNA, 120 bp, Artificial Sequence
  ENSG00000228592_43 (sequence is synthesized)
tcttgactttctgtgactcataaaagaaatttttgaaaaaaaaactttgttttgattgcgatttattcctatgtagttatttacatgtatatttttgtaattacaattaatgtaataaaa

SEQ ID NO: 849203 - DNA, 120 bp, Artificial Sequence
  ENSG00000228592_44 (sequence is synthesized)
ataatacataatgtgaattttcccccatgataactattaaacatgtttatttaatagttaaatatccatctttgagggcttttaaaatttatatttctttgttaactttgaagttgagac

SEQ ID NO: 849204 - DNA, 120 bp, Artificial Sequence
  ENSG00000228592_45 (sequence is synthesized)
tgcatgcaaaggctgctccatttcaggtaaatagtgcctcagtagctgtttgatttaccttaaaaaggaaaacaaaatgacacaccttccaacccatagactttctgaggtctttgaaat

SEQ ID NO: 849205 - DNA, 78 bp, Artificial Sequence
  ENSG00000228592_46 (sequence is synthesized)
atggttcctattatccccacgtgttatgggagggaccaggtgaaaataattaaataatcagagcagttttccccatcc

SEQ ID NO: 849206 - DNA, 120 bp, Artificial Sequence
  ENSG00000228592_47 (sequence is synthesized)
ggtgaaaataattaaataatcagagcagttttccccatcctgttctcatgatagtgagttagttctcatgagacctgatggctttataaggggcttcctgcttcactgggtactcattct

SEQ ID NO: 849207 - DNA, 89 bp, Artificial Sequence
  ENSG00000228592_48 (sequence is synthesized)
tctctctttccccatccaccataattgtaagtttcctgtggcttccctaaccatgtggaagtgtgagtcaattaaacttctacccttta

SEQ ID NO: 849208 - DNA, 120 bp, Artificial Sequence
  ENSG00000228592_49 (sequence is synthesized)
acgcgagagccaccgcgctcggccggagacatgttttttagcaggagaatttattaaaacgtatttggacataaacaaaatgaattacacttggaagagggacaaaagggcaacttgaga

SEQ ID NO: 849209 - DNA, 120 bp, Artificial Sequence
  ENSG00000228592_50 (sequence is synthesized)
tgagccagaattctaactgaggtagtcaggttccagagaagccgcatcacttctcactaaacgaaatgtcttttttgaaaattctaaattcactattgtgagtcaatgactatattaatt

SEQ ID NO: 849210 - DNA, 120 bp, Artificial Sequence
  ENSG00000228592_51 (sequence is synthesized)
attgggaaggtgctgatcaccagcttccagtattttctaactactgggagactgccattccctggcgctggctgtgacccattattatttagagagacagtttaacaaccgcctgaccat

SEQ ID NO: 849211 - DNA, 120 bp, Artificial Sequence
  ENSG00000228592_52 (sequence is synthesized)
cacctgatggttgcctgacatttatggtgggggagaggggttgggggagctctgctgccctgctcacatctgcctatcttcctactctaacaataacacctcttaacatctctcatctaa

SEQ ID NO: 849212 - DNA, 120 bp, Artificial Sequence
  ENSG00000228592_53 (sequence is synthesized)
attcgttatattaataattttatgtcaatatcctctttacaagtggtaatgtctctgttccttttgtccaagctgaaacaatgccttacaatatttctgacctttatgtatatccattta

SEQ ID NO: 849213 - DNA, 120 bp, Artificial Sequence
  ENSG00000228592_54 (sequence is synthesized)
tcattcactcgatttaataaaagcaaaacccacacatgccttcaagattgtacgaactccctgcaaccagtaactgttaggattctgagacttactgttttaagaaagtgaacctacaag

SEQ ID NO: 849214 - DNA, 120 bp, Artificial Sequence
  ENSG00000228592_55 (sequence is synthesized)
atacatctataagatacttagaggatctttggtttgtttttttctggtctgcaggtttttatgaggtggcttgctatgatgcattcgtaaatactcttttaaacctcctatggatttgat

SEQ ID NO: 849215 - DNA, 120 bp, Artificial Sequence
  ENSG00000228592_56 (sequence is synthesized)
cttaagcctgagagctgttcttaatttaagtataattttccctctggagagacttgaaatgagaaagtgtttttatttttttaatacaacaaatcctggctccattagttttaacttttc

SEQ ID NO: 849216 - DNA, 120 bp, Artificial Sequence
  ENSG00000228592_57 (sequence is synthesized)
ttagttgatctttctcctgtcacattttttttttacagtcagtcaaacattaggtattattttcagtaatcttcctgaaaatcctcttagctagatcaccacatttattttgtacatttc

SEQ ID NO: 849217 - DNA, 120 bp, Artificial Sequence
  ENSG00000228592_58 (sequence is synthesized)
tattttctatttatagctactacctacaaagtgtttcctttcctccagattccattttctttttttactttctgttaagccattactgataattttctcaagccttttaggcttctttta

SEQ ID NO: 849218 - DNA, 120 bp, Artificial Sequence
  ENSG00000228592_59 (sequence is synthesized)
atactaaccccaagggtcttccagcttctgcctttttcttttttccaaaaccaatgtctcttgtatcatgtttccccagctgcttggcactctcttacaaaagcagtactgcagtagtaa

SEQ ID NO: 849219 - DNA, 120 bp, Artificial Sequence
  ENSG00000267165_0 (sequence is synthesized)
aatgtaagcagtaagagagtattatgcaaaaatatcctaaggtaatttcagtataaattataggaccacatttattaataatatacgttatgagaacaatcatttgcagtctcactgtga

SEQ ID NO: 849220 - DNA, 120 bp, Artificial Sequence
  ENSG00000267165_1 (sequence is synthesized)
aggcaaaaaaaaaaaaaacaaaaaccaaaacccaaaggataaacagaaatagcacagtccaccgaatacactgcatggtgtttataactgtataaccaaactaagtaatctttcccctct

SEQ ID NO: 849221 - DNA, 120 bp, Artificial Sequence
  ENSG00000267165_2 (sequence is synthesized)
ttcaatctgatcattctgggcaggaaactgaatacagttttgaccagatcttcgagaaagattcatatacacgaaattaactagttctgttaaaaggctgctataaaaataccatcatta

SEQ ID NO: 849222 - DNA, 120 bp, Artificial Sequence
  ENSG00000267165_3 (sequence is synthesized)
cgagctatacagaactttagaatccagctaagagtgcagaaatactgaatttcttaatttatgtggagggggctgtaaacccaaaggtaagtccgctcccggccgccgctcctttgtttt

SEQ ID NO: 849223 - DNA, 120 bp, Artificial Sequence
  ENSG00000267160_0 (sequence is synthesized)
gaagtacaatgttttataggttgtaattcagaaatacaagtacataagaaccatctgttagaggatatgccactgaaagggacaaccgactaatttaaaaattatctattgggtgatatg

SEQ ID NO: 849224 - DNA, 120 bp, Artificial Sequence
  ENSG00000267160_1 (sequence is synthesized)
attaacaatatttcaaagaatttttttaagtgtttggttcttattaacggactggtatttcatttctgaccagtatcatgtaaaagcttccctaaaatttttattctggtttacacggat

SEQ ID NO: 849225 - DNA, 120 bp, Artificial Sequence
  ENSG00000267160_2 (sequence is synthesized)
tagcataaagatagagcaaaaatttcatctttgaaggagatctggttagatccatggatatctgaatggcattgatttataaaccaacattattacttgtgcgttaataatgaaatctaa

SEQ ID NO: 849226 - DNA, 120 bp, Artificial Sequence
  ENSG00000267160_3 (sequence is synthesized)
aacttagtataagttcttaaatgaaattcatttgactttctgatatgagtgactcttaaggttagaaacatatgaatttagaaaaatgaaaccaaatgttttcaacaaagtaatttattt

SEQ ID NO: 849227 - DNA, 120 bp, Artificial Sequence
  ENSG00000267160_4 (sequence is synthesized)
ttttcctgagactaaattcagtacagtatttgtttttataacatccaacatgtcttatgttaaacttaaccactttctatgcagtgactgtggtgagatgatctattttatttgactacc

SEQ ID NO: 849228 - DNA, 120 bp, Artificial Sequence
  ENSG00000267160_5 (sequence is synthesized)
ctcaatgtaattcatttgggtagttctaaggcatatcagtgatcaaaatgtttctccctacagttactcttgcattctcaatcagtttcttctgcacatcatctaaagaaaatttatgtg

SEQ ID NO: 849229 - DNA, 120 bp, Artificial Sequence
  ENSG00000267160_6 (sequence is synthesized)
gtatgattacactctttttttttttaataccagaatttctaaaactaagaaaaacactaacatttaaaacatcagtgtttctagtcaaggatatttcaattaaatttcatcagtacatta

SEQ ID NO: 849230 - DNA, 120 bp, Artificial Sequence
  ENSG00000267160_7 (sequence is synthesized)
tagtttaactcatgctagaaatgttaaaacccaagatcttctgagtcacataataccaacatttcatattaacgaataaattactcaagttctatacaaagatactaagtgatgagaaac

SEQ ID NO: 849231 - DNA, 120 bp, Artificial Sequence
  ENSG00000267160_8 (sequence is synthesized)
agaaaaagttaagctttcaatagttttaaaaaaatacagaagcaaactaatgaacacaactacgcaaaatataggctaaccaattgcaagctaaactagttagagattaacctttaaaaa

SEQ ID NO: 849232 - DNA, 120 bp, Artificial Sequence
  ENSG00000267160_9 (sequence is synthesized)
atacattttagaacttagaagcaaactaatgaacacaactacacaaaatatacactaaccaattgcaagctaaactagttagagattaacctttaaaaaaatacattttagaacttcgtg

SEQ ID NO: 849233 - DNA, 120 bp, Artificial Sequence
  ENSG00000267160_10 (sequence is synthesized)
atttcagttactgtgcatcaagtctaaaagatccagataaagggaatgttttgtgattcaatttaaataactttaaaattggaaacatttaacaattgataatataattaaaatttaaag

SEQ ID NO: 849234 - DNA, 120 bp, Artificial Sequence
  ENSG00000267160_11 (sequence is synthesized)
aatatacacaaatgatctgaataggttttatattcagtaacttgcatggtttttacactgacacttttatcattaatttaggagaatcagatgcatttccctccatatacctaggcatta

SEQ ID NO: 849235 - DNA, 120 bp, Artificial Sequence
  ENSG00000267160_12 (sequence is synthesized)
agattccaaatttataaatatggtagtatagtattttaaatattaagtttgtacatgaatattgggtttatccgtattttcctttgtttcccaggtattatccagttttgtaaggaaaac

SEQ ID NO: 849236 - DNA, 120 bp, Artificial Sequence
  ENSG00000267160_13 (sequence is synthesized)
actttgatatcacaatcaaaacttgtcttggttactaggctgtagccgtaattgggttacagtcacttagattcattatttggaattatacttaactaagacaaacctaaatgaaattta

SEQ ID NO: 849237 - DNA, 120 bp, Artificial Sequence
  ENSG00000267160_14 (sequence is synthesized)
tctcctagaagaatttcacatttgcatttacctgcatggcagaatgagtttaagcacattttagctgttaggaaatatttaatttacttaaacttgttatctgactactcagaactctga

SEQ ID NO: 849238 - DNA, 120 bp, Artificial Sequence
  ENSG00000267160_15 (sequence is synthesized)
gtagtcaactgtacctttgcgtttacttaaaactatatcggattcacttcaaatagaagatttttaaatagaagttagacttcattaaggtactggtattaactttaaatctgaaagaaa

SEQ ID NO: 849239 - DNA, 120 bp, Artificial Sequence
  ENSG00000267160_16 (sequence is synthesized)
acatactgaaagtttgacaagttcattaaaacatttttagcatgtcttggtatatttatcagctttttattcttctttctgctggcatttccttaatgtttgtttgtttcacctctctgg

SEQ ID NO: 849240 - DNA, 120 bp, Artificial Sequence
  ENSG00000267160_17 (sequence is synthesized)
ttcattggattgctactatttatgctttcatggactttatcttcacagtttactgtatcttgtaaaggctttaccacatcagctgtactggctgtttttggcaaggtcatctgcagtgca

SEQ ID NO: 849241 - DNA, 120 bp, Artificial Sequence
  ENSG00000267160_18 (sequence is synthesized)
caccacagggcagtgcgtgttttccgagtagccacacacatctctttaattgcagaagcaagggcaaaaacatctgtaaaataaacattcagggtcatttcatattaaatgccatttaaa

SEQ ID NO: 849242 - DNA, 120 bp, Artificial Sequence
  ENSG00000267160_19 (sequence is synthesized)
tatctgttaaatcttacaaaacccagtgcttttgctactaaatgatcaaatgttatttttgtaaaaaaaggatagttattgattgaaccaaagtcctgtcctttatcattaaaatattta

SEQ ID NO: 849243 - DNA, 120 bp, Artificial Sequence
  ENSG00000267160_20 (sequence is synthesized)
aaagtattgatactttatttctgacttgtacaatagtgactatagtttgagtagaacacagactgtcttgaaacagttataacagacaaaattaataaaatggaaatacttttggagtaa

SEQ ID NO: 849244 - DNA, 120 bp, Artificial Sequence
  ENSG00000266171_0 (sequence is synthesized)
ttgggtacagtgcaagatgcttgggtgatgggtgcactgaaatcaccactaaagaactagtttcccaaaaactattgaaaaaaaaagtggcagctaaattaggccctaaagaatggttag

SEQ ID NO: 849245 - DNA, 120 bp, Artificial Sequence
  ENSG00000266171_1 (sequence is synthesized)
aagtggcagctaaattaggccctaaagaatggttaggattttcacatgtaaagattacaggccgggcatggtgtctcacgcctgccattttagcactttgggaagccaaggcaggaggac

SEQ ID NO: 849246 - DNA, 120 bp, Artificial Sequence
  ENSG00000266171_2 (sequence is synthesized)
ggactgcttgagcccagaagttcgagaccagcttgggcaacatggcaaaacttcgtctctacaaaaaatacaaagaattagtcaggcgtggtagtgtgcacctgtagttccagctactca

SEQ ID NO: 849247 - DNA, 120 bp, Artificial Sequence
  ENSG00000266171_3 (sequence is synthesized)
aaggctgcagtgggctgaaatcacgccactatactctagcctgagcaacagagggagaccctatctcgaaaaacaacaacaacaacaaacattacagataggaaggcattccagatggag

SEQ ID NO: 849248 - DNA, 120 bp, Artificial Sequence
  ENSG00000266171_4 (sequence is synthesized)
gtaactgtacagaagtatggaggttgaaagaaagcactatgtctaaagcagggtttctcaatctcagcaccgctaccattttgggcctgataattctgttgtggggggaagggggggttt

SEQ ID NO: 849249 - DNA, 120 bp, Artificial Sequence
  ENSG00000266171_5 (sequence is synthesized)
gcctgcacatttctgtacactgtaggaggttcagcagtatacctggcctctacccactagatgtcaagcagtagcccccaggttgtaaccaccaaaaaagtctgtagacattgtcagatg

SEQ ID NO: 849250 - DNA, 120 bp, Artificial Sequence
  ENSG00000266171_6 (sequence is synthesized)
tcccctggtgagtggcggtacagggcaatatctcctctgactgagaacctctggcctttctaggaaagaaattaaaatatatttgttgtcatgtcaaaagaagtgtaaagaggctactac

SEQ ID NO: 849251 - DNA, 120 bp, Artificial Sequence
  ENSG00000266171_7 (sequence is synthesized)
agttctttcttggaggaaataactatcagaaagccacagcagtacatgattttatgaatgaaatcaatgtctctatgactcttctgagggaagctaaaacaattcttattctggaaaacc

SEQ ID NO: 849252 - DNA, 120 bp, Artificial Sequence
  ENSG00000266171_8 (sequence is synthesized)
ctgtatagtcaagagagttaagcaaaacacacaacacattacaagcttttatgtaaaagtaattttaccttgtcttgctgtgtattcattgtcttcaattaaccttgctaaaccaaagtc

SEQ ID NO: 849253 - DNA, 120 bp, Artificial Sequence
  ENSG00000266171_9 (sequence is synthesized)
tgctattttgcacacaagattttctcctacaagaatattagcagcccgaagatctcggtgaatatagttcattctttcaatatatgccataccatcagcaatcttggaaagagaaaaaca

SEQ ID NO: 849254 - DNA, 120 bp, Artificial Sequence
  ENSG00000266171_10 (sequence is synthesized)
aaaaacacaagacatacgatacaaagggaagcagagagaagacaattatggttaatatcaaattgtgtcactgaaaatcatattattttagaaggagatgatggtaacagggtatagtct

SEQ ID NO: 849255 - DNA, 120 bp, Artificial Sequence
  ENSG00000266171_11 (sequence is synthesized)
agaagataacaggaaaaccagaaaacataataaaaatgcaggctaaattcagatttcaaaaatctaacactggctgggtgcggtggcccacacctataatcccattaatttgggaggccg

SEQ ID NO: 849256 - DNA, 120 bp, Artificial Sequence
  ENSG00000263895_0 (sequence is synthesized)
ctggggtgtataccctagggtttgttgttgcctgccgagaaagaattaggacacggacatgtgggtgggttaaggagtggaaagcttaatagacagaagaaaggagagaggagagcagct

SEQ ID NO: 849257 - DNA, 120 bp, Artificial Sequence
  ENSG00000263895_1 (sequence is synthesized)
tctatctcagattcagaagacccagctgtccatgtgcatcatcggggaagcatcttgctctcagaataagcagctcaatccagctcccaaattctgaccgtggcttcagtgcctttgtgg

SEQ ID NO: 849258 - DNA, 120 bp, Artificial Sequence
  ENSG00000263893_0 (sequence is synthesized)
tgcaacccaagctgtccgtcatgtactgggccatctgacacactcataaaatcccattaccaactggaaatggtttatgtgggactagctcctaaccaggcacatcattgcttcaactga

SEQ ID NO: 849259 - DNA, 120 bp, Artificial Sequence
  ENSG00000263893_1 (sequence is synthesized)
ttcatgagcagaagagtctttgctggcaacacatgaactgtgatggattcaatcacttaggctttccattatcaatgcagacctggcccctgggtgcacagggttatcagtgaccacccc

SEQ ID NO: 849260 - DNA, 120 bp, Artificial Sequence
  ENSG00000263893_2 (sequence is synthesized)
tgaatgccgcaactgaccagactccagggacaccatggactacttagttgcagactgatgactttggacctcttccattatggaaagggcagtgatttcttttcactgaaacaggctcat

SEQ ID NO: 849261 - DNA, 120 bp, Artificial Sequence
  ENSG00000263893_3 (sequence is synthesized)
ctacaaaattgcttctgacaacggaattcactttacagtgaaagagggaaagcagtgggtgatacccttgtcaatggatcctgtcacccagaagcagtcatctgtattcagctgtgacat

SEQ ID NO: 849262 - DNA, 120 bp, Artificial Sequence
  ENSG00000263893_4 (sequence is synthesized)
gatttattgaagatttcatttcaggactgagagacgatcatacctaaggagattgaaatatcgtcctttaagatgcttgtttgttctgaactagggaacatcacgtggtgccgtttctcc

SEQ ID NO: 849263 - DNA, 120 bp, Artificial Sequence
  ENSG00000263893_5 (sequence is synthesized)
cacagccagactaaacaggtctggaggaaggggaagtaggcacggtgcaacttccatcttacttaatgactctcactctcttcaactttttttccaccaattagcgattttattcccagg

SEQ ID NO: 849264 - DNA, 120 bp, Artificial Sequence
  ENSG00000263893_6 (sequence is synthesized)
aaaggaaggttgcaccattgaggcagctgaccgttggggtggctccctttggaaaggggatataaagtgtttgtatgagtgatggttccattaaagcagacattttttaaaaaggtgaaa

SEQ ID NO: 849265 - DNA, 120 bp, Artificial Sequence
  ENSG00000234182_0 (sequence is synthesized)
catgtgccttagactagcttggccagagtgattgtaaaggcttccatgtttaaatttccatgcaagggggagacccacttattctcatgcagggaagagaactacgtatccccgtgcgta

SEQ ID NO: 849266 - DNA, 120 bp, Artificial Sequence
  ENSG00000234182_1 (sequence is synthesized)
attcccatgcaacaggaagtatctgtttgccaggcagaaagcgcctgtagctactggtctctttctgcagccctgccaaacacaagcagcaataaaccaatggccattggcttaaaaagc

SEQ ID NO: 849267 - DNA, 120 bp, Artificial Sequence
  ENSG00000234182_2 (sequence is synthesized)
tttgtattcaaattacaactctttggtgtttgtcacgtgcttccttgggagatgaaagtttgtgttcaaggctcactaacagggaacacaatctgttcagtttgtccaacaatattcacc

SEQ ID NO: 849268 - DNA, 120 bp, Artificial Sequence
  ENSG00000234182_3 (sequence is synthesized)
gttccattttgtgtcagcctcaagatacactgtaaacctctcagaaacctgcccagtttctccatcagtcctttgaattttctttcttagcccttcatgctgagcacagcttgaggtcag

SEQ ID NO: 849269 - DNA, 120 bp, Artificial Sequence
  ENSG00000234182_4 (sequence is synthesized)
ccttcccctggtggcctccgaagctcatgcaagtttgcaggaagagacattcagagtgaaatacggcctgaaaagccactccaagttgtattatttatgaaacacaacactcaacacaag

SEQ ID NO: 849270 - DNA, 120 bp, Artificial Sequence
  ENSG00000234182_5 (sequence is synthesized)
caacactcaacacaagaagaaacccaatacagcacatcattctgcctgctccgtggcttctgcttctcaagcgacttaaaatgattgtctcactttgtctcccaggctggagtgcagtgg

SEQ ID NO: 849271 - DNA, 120 bp, Artificial Sequence
  ENSG00000234182_6 (sequence is synthesized)
tcctgcctcagccccccgagtagctgagattacaggatcctctctctgggagccctcatctacctccagctgcaatcatcaccacaggagtgagagagagacttggacctgagctggacc

SEQ ID NO: 849272 - DNA, 120 bp, Artificial Sequence
  ENSG00000234182_7 (sequence is synthesized)
agtgagagagagacttggacctgagctggaccctccagccctccttcgctgaactaccttccaaccttatgttcctactgatgtttaccaggttattcaataaatattgtatgttctgtg

SEQ ID NO: 849273 - DNA, 120 bp, Artificial Sequence
  ENSG00000234182_8 (sequence is synthesized)
gcagtggccaccagtcattttcaaatacctgttttcccttcttccttaccaaaaacacccatggtttttagctggacacctggttgcccaaaataaacactgcatttgcagcctcccttg

SEQ ID NO: 849274 - DNA, 120 bp, Artificial Sequence
  ENSG00000277152_0 (sequence is synthesized)
ggaaacggccgtgggcattttggtgtatttttattcaactttgaaagacatattttatttttacacattttattttatacagtatagacatacatatgcatacacgcctcctctcatgac

SEQ ID NO: 849275 - DNA, 120 bp, Artificial Sequence
  ENSG00000277152_1 (sequence is synthesized)
attaaacttttgcacaacttcacaattgtaaatgatcacagaaaaatgcctcaaaatgaatgtatcatatcctagccccaccacttaacctctctgtgcctcagttttctcctctgtaaa

SEQ ID NO: 849276 - DNA, 120 bp, Artificial Sequence
  ENSG00000277152_2 (sequence is synthesized)
acggggataataatagtatctactttataagttgcttgtaagggttcaatgtgattatggtgtgaatgtgggaagcgctcagaaagtatcattttcattattattagaactattattcct

SEQ ID NO: 849277 - DNA, 120 bp, Artificial Sequence
  ENSG00000277152_3 (sequence is synthesized)
taattgcaaacatttaaattctaattttattctattgcaaatgacactgtaatgaatctctctgctcgggagggttgtgtgggaacctcagggagcttgcttcacccacccccgcccccc

SEQ ID NO: 849278 - DNA, 120 bp, Artificial Sequence
  ENSG00000277152_4 (sequence is synthesized)
aaattaagcacaacagggacagagagagcgaggtgtgctgggaggccccgtggctaaaagttaggagaccagatcttggcactggcagcctggggaaggagggcaaaggggtgggggtgc

SEQ ID NO: 849279 - DNA, 120 bp, Artificial Sequence
  ENSG00000277152_5 (sequence is synthesized)
agggaatggcatctgtgaaagctcagaagcttctagaagagcatgggaagttctgatgtggttgctgggatggcagttcttgtccctatttgacctatgggtaattgagggccaggaaag

SEQ ID NO: 849280 - DNA, 120 bp, Artificial Sequence
  ENSG00000277152_6 (sequence is synthesized)
gggtgacttgtctgatgacgtggatgggcaccaagtctgagcttcctggctctccacatgcctgaaaaacatctgtgtttgttgggagaaggagatgaagaagaggaggaggaggaagaa

SEQ ID NO: 849281 - DNA, 120 bp, Artificial Sequence
  ENSG00000277152_7 (sequence is synthesized)
tttggggctttcgaagcatgcatgcctgtgtgcccctgcccaatcaaggttcagctgtcctgcaaagcaacccagcgggtcctgtgagctggaggccagtttgccctgtttgtctccatg

SEQ ID NO: 849282 - DNA, 120 bp, Artificial Sequence
  ENSG00000277152_8 (sequence is synthesized)
ggtcttttccctgatgtctcccaaacagagaccgttgggctggcagctggcaggtctcctgagctccaccctcacctcccatcccttcaacccagtagccttgcagacaaaggctggaaa

SEQ ID NO: 849283 - DNA, 120 bp, Artificial Sequence
  ENSG00000277152_9 (sequence is synthesized)
gccaggtcccatttccagtcatcatccacagtgcataattaggcagtgcttgccttgtgtttatttaaagaaggagtgtgaacttggcatcagtgcttctgccaagagggaagagccccg

SEQ ID NO: 849284 - DNA, 120 bp, Artificial Sequence
  ENSG00000277152_10 (sequence is synthesized)
gaaggcccagagaaagctgggggcttgggcagcaggggtttgaggcctgagaggccaggccggcctgtggtatagacatcgacaagcaaagtttgaggactcctgaaagttctccaaaat

SEQ ID NO: 849285 - DNA, 120 bp, Artificial Sequence
  ENSG00000277152_11 (sequence is synthesized)
cttacctgctacctgtcaccattctcagtccgttattagaactgtagcttctcaacagctttctaagttccaaagaaaatgcaaattaatacttcttggggcgcctctatcctttatggt

SEQ ID NO: 849286 - DNA, 120 bp, Artificial Sequence
  ENSG00000277152_12 (sequence is synthesized)
ctgaatttgagaacattgcaatagcagcctcattgctgcactagtccaaacacttctgtgtaaccctcttccacatgcagtactgaggagttcttgctgcctactgtttacagagggtag

SEQ ID NO: 849287 - DNA, 120 bp, Artificial Sequence
  ENSG00000277152_13 (sequence is synthesized)
tccaagaaataagaaatgtcagtcccacatggtgaaaactctgcactctagggcttgggaattatctgctaataagacctgacatttctgaaggccattatgagttaaacctcaggctca

SEQ ID NO: 849288 - DNA, 120 bp, Artificial Sequence
  ENSG00000277152_14 (sequence is synthesized)
gaatgtataatggggagagattctagatacttctagaccactcttctcatggagtagaaaaaaatgtagagaaacctcagagaggggaagggacttacctacaccagttaacggtagagc

SEQ ID NO: 849289 - DNA, 120 bp, Artificial Sequence
  ENSG00000277152_15 (sequence is synthesized)
taggactagaacacaggtctcctgatttcagtctcaactctcaggcaccatgttgcttccctccattcaaagatcagtgagggggcagtcagcaccagctggagtgtggcagtgaagagc

SEQ ID NO: 849290 - DNA, 120 bp, Artificial Sequence
  ENSG00000277152_16 (sequence is synthesized)
tcacagtccctgcccaagaggagctcccagaggctgacaagggtatgggaacagggactcatctgaatcagagtgggtggagtttagacaggggtgggtctgaagaactgtggggaacag

SEQ ID NO: 849291 - DNA, 120 bp, Artificial Sequence
  ENSG00000277152_17 (sequence is synthesized)
ggtggtgagacagacatcagcaaatttcccaagggggttagcacaggaggttgaaggatgaatggggcttctttaccaggagacatagggaaaggtgttccgggaaaagggaagggcaaa

SEQ ID NO: 849292 - DNA, 120 bp, Artificial Sequence
  ENSG00000277152_18 (sequence is synthesized)
ctcatgggaaaaggaggctgatttctcctgttcccaggttacagtggattccctgcgggcttaaccaggatccctagcgctcagtgcagaccctcccacggcagggcccgaggctgtaat

SEQ ID NO: 849293 - DNA, 120 bp, Artificial Sequence
  ENSG00000277152_19 (sequence is synthesized)
ctgtaaccttattgtgacatatatagttacaaagagattggttggacaggatggattttaatcgaaaagagttagcctctactggtggaaatgcggacattgtggcaggtgatgagaaga

SEQ ID NO: 849294 - DNA, 120 bp, Artificial Sequence
  ENSG00000277152_20 (sequence is synthesized)
atcctttttggggtagcagtggtgaaaacgcttgcatgggtgcgctggcatgcgtgcagggacacctcttccttgttctcaattctgttgactttcaaattgcagtttaagagccatctt

SEQ ID NO: 849295 - DNA, 120 bp, Artificial Sequence
  ENSG00000277152_21 (sequence is synthesized)
cccatgtccaactgttaaggtggccactaccccctccctcttctggaccatgccatcccctgctctgagtctcagtttctccacatgtaaaatgaggcaggtggacttgcttgtcttaaa

SEQ ID NO: 849296 - DNA, 120 bp, Artificial Sequence
  ENSG00000277152_22 (sequence is synthesized)
ggccccttctgcctggggctggttctttagcccagtctctgcttctccctctgcggggatgtcagaggcgccctctcgtggtcaatattggccatgcatccttggacttggcgcaggttt

SEQ ID NO: 849297 - DNA, 120 bp, Artificial Sequence
  ENSG00000277152_23 (sequence is synthesized)
ttgcttggcctctgagggtgtgtgcttgtgtgtgcatgtgcgtgtgagcgtgcctgtgtactgggagtggttacacagcgggtgcgtgacaggctcatgacacatagaatgcagagcttc

SEQ ID NO: 849298 - DNA, 120 bp, Artificial Sequence
  ENSG00000277152_24 (sequence is synthesized)
gctaactctcagaccctgatgaaaacacagataaggaggtgggggtcatttaaaataagggcaaaacctgctaaaagcttcctggggcccttgcctgggacacctagagttccaaaatgc

SEQ ID NO: 849299 - DNA, 120 bp, Artificial Sequence
  ENSG00000277152_25 (sequence is synthesized)
cctaggccacccatcttgctaatatactttgagagcatcactcctctgctcagaatctcatcctgccacccctctgctgaacagagtaaacatcaaactcctggccctccagaatacctg

SEQ ID NO: 849300 - DNA, 120 bp, Artificial Sequence
  ENSG00000277152_26 (sequence is synthesized)
tggcctcacttctcactcttctttcctataccactccaggtgaaccactccatccttcccatcccctatcctcagcttatgctgggattttttttcccagagtgtcctaccctctccttt

SEQ ID NO: 849301 - DNA, 120 bp, Artificial Sequence
  ENSG00000277152_27 (sequence is synthesized)
agtcccccatagcacctttcaagatgtggctaaaatgccacctcctccaggaagactccctgaattttcccacttggatctgtgctctctttcctctgaacctcctggcaactttgtcta

SEQ ID NO: 849302 - DNA, 120 bp, Artificial Sequence
  ENSG00000277152_28 (sequence is synthesized)
aactgtctcctgggatgtagacagttttagagtttacccaggtaatttaggtcgaagatgtcctgttttgttccccctactcaaaaactggctccatgactgctttatatctgggtcctt

SEQ ID NO: 849303 - DNA, 120 bp, Artificial Sequence
  ENSG00000277152_29 (sequence is synthesized)
ctaaatactgagccttccccatggcatccaggcatccctctgcaaggccctgattcccactccttccctctgcctcctccttcagtaggggctgctgtcatgcaaggaggtctggcagtg

SEQ ID NO: 849304 - DNA, 120 bp, Artificial Sequence
  ENSG00000277152_30 (sequence is synthesized)
gaggaagaagacatgagccttgggccagactcttactggattcccaccccacctgccccgtcttcagcagacaagctggtacccagcacaaaggctccagctgctgagctgtgtgtggga

SEQ ID NO: 849305 - DNA, 120 bp, Artificial Sequence
  ENSG00000277152_31 (sequence is synthesized)
gcctggtctctgggtgcccagaatgaagggtcagacccaggtcactgcctgactctttctttcaaggaccgaagtaagaactacaggcctaacagtaacatccctggctatttgtagaag

SEQ ID NO: 849306 - DNA, 120 bp, Artificial Sequence
  ENSG00000277152_32 (sequence is synthesized)
tccgcttggtcggtccatgctctataacatgaatttctcatacaacccatttttagatggggaaacaagagctcagagaggctaggtaacttgttcaagatcacacagctctgagtgcaa

SEQ ID NO: 849307 - DNA, 120 bp, Artificial Sequence
  ENSG00000277152_33 (sequence is synthesized)
gtgttcaaacatagtccccactttccatccgtctccaaatcctgtgcagtttctggaatattctgctgtcactgtgccttgcacaaatccaggttttgataaattcctggataataaaag

SEQ ID NO: 849308 - DNA, 120 bp, Artificial Sequence
  ENSG00000277152_34 (sequence is synthesized)
gcagacatgagtcaacatataaccagctctttctctttgacttccatattgccccaggcccacacgcggacctctgcatgagggaagagtgacagaactgggtttgtctgagagggtgat

SEQ ID NO: 849309 - DNA, 120 bp, Artificial Sequence
  ENSG00000277152_35 (sequence is synthesized)
ggctcggggggccaaagggagaggtgaaccctgcatcccaggaggggtgaattctctgatgtgaatcatctgggtggtagggagtaatgggtcctgggcatggtggggactgtcacaccc

SEQ ID NO: 849310 - DNA, 120 bp, Artificial Sequence
  ENSG00000277152_36 (sequence is synthesized)
tgatgcgctgtcccagttaggttggaggaggctgggagggccatctgaccacaatgcaggtctgttgcggacctcaaggagcctgcagggagtgcagccacctcaggcacacaccttggt

SEQ ID NO: 849311 - DNA, 120 bp, Artificial Sequence
  ENSG00000277152_37 (sequence is synthesized)
gatagattttactgctcagctgctgaagccattggtcaatgatgctcctcacagtcagagatctgagaggggcattttcacagccaccacagaccttctgcctcccagggcctcctcact

SEQ ID NO: 849312 - DNA, 120 bp, Artificial Sequence
  ENSG00000277152_38 (sequence is synthesized)
ggcctggcctggaggactgccactggcacccacagttagagggaaggaagtttcaggcctctgtaacccaggagagaagtccactagtccagtccaggccaggtgtccagctctggtggg

SEQ ID NO: 849313 - DNA, 120 bp, Artificial Sequence
  ENSG00000277152_39 (sequence is synthesized)
tggaaccatttgcccagctgtcctttggctgagggttggggcctgacctctgaagtgaaggcacccacagagctggccattgaggcaaatgtccagaatcctggggcatgggcaccggca

SEQ ID NO: 849314 - DNA, 120 bp, Artificial Sequence
  ENSG00000277152_40 (sequence is synthesized)
ggggagatgaggtcatgtgagatgtaggtgccactctcttgcagaacccaccctcgcaccttggcacacagtggctccacgaggccaagagctggtctcttgtttatctgggtgtagggc

SEQ ID NO: 849315 - DNA, 120 bp, Artificial Sequence
  ENSG00000277152_41 (sequence is synthesized)
gtgcacactgcctggaactgacagtgtcagggacttctgctggccaggacagaccccatgcctactcaatggccatcagccctagggcagcaacatcaggatctgtcttccccattggtc

SEQ ID NO: 849316 - DNA, 120 bp, Artificial Sequence
  ENSG00000277152_42 (sequence is synthesized)
agggggcttgtggtaggttcaaaccactgatggcaagcagtccaggctctagtgttggtttggggtctggctctctcactaacctgagcaagtcccttacatccccagggctcagtttcc

SEQ ID NO: 849317 - DNA, 120 bp, Artificial Sequence
  ENSG00000277152_43 (sequence is synthesized)
ttatctgttgagtagagatcatcacactgatggcgaagaggccttgtggtatggagggtttgggttcaacttttttttttttgagctgatttgaatcccatttccctggttatttgctat

SEQ ID NO: 849318 - DNA, 120 bp, Artificial Sequence
  ENSG00000277152_44 (sequence is synthesized)
atggccttaggcaagttactcaatctcttgaagactcaatttcccatctacaaaatgggagtgaagaagaatctcttcttctttccaagaaatgtacatgtgaggattcaataagggaac

SEQ ID NO: 849319 - DNA, 120 bp, Artificial Sequence
  ENSG00000277152_45 (sequence is synthesized)
gctcaggcagctctgagcacagcatctggagcgtcactgcgatgtggcagcacgctctgcagcatgcaggacagacacactccttcctctctcctccttcacctcttccccagccccacc

SEQ ID NO: 849320 - DNA, 120 bp, Artificial Sequence
  ENSG00000277152_46 (sequence is synthesized)
cctcacatctccttggctaatgggtcaagcagtggtcagtgtctggccaacagtggagactcaaccatgcacagagagtgaaaatgcagtgcgcacctcctgtccaggtagccccaacct

SEQ ID NO: 849321 - DNA, 120 bp, Artificial Sequence
  ENSG00000277152_47 (sequence is synthesized)
cattcattcacttccagaatggcaggtgctgtgctgaatgcctgggaagatggccccaatgttcctccccaagggattgccagtcacatcagcacagcacgggatggatcctgctgtgcc

SEQ ID NO: 849322 - DNA, 120 bp, Artificial Sequence
  ENSG00000277152_48 (sequence is synthesized)
aacactctctgcaggcttgtggggaccctggctgagatgtctggacacctggatttcaatccggtctttgccatccactccctgtgtggccctcccccgcaaactaaataaaaatttcat

SEQ ID NO: 849323 - DNA, 120 bp, Artificial Sequence
  ENSG00000277152_49 (sequence is synthesized)
gagttggggaaggagactcaaggggaagtgagacgagaggacggaagtgagttgaagagcagggaggagcctggagcctggagcctgggcctccctgtgctgtgatgtgtgccagagtgg

SEQ ID NO: 849324 - DNA, 120 bp, Artificial Sequence
  ENSG00000277152_50 (sequence is synthesized)
aagcggaagtggaagcagaagcagaagtggtcctgccggtaggtgtgactggcctcacagagctgccaggatgcacctgagtgctcaagagggtttcccacagccccaggtggattggac

SEQ ID NO: 849325 - DNA, 120 bp, Artificial Sequence
  ENSG00000277152_51 (sequence is synthesized)
tcagaagcatgtttctgatgtgctcaagagtgtggcccagacaaggcacagaggacaggagtgtcagaggcattcaaacaagagcgactccatcctgaacgggggctgggtaaaatgacg

SEQ ID NO: 849326 - DNA, 120 bp, Artificial Sequence
  ENSG00000277152_52 (sequence is synthesized)
ctgaggcctgccaggttgcattcccaggaggttaggcattcttaagtcactggatgagataggagaggggcacaagatactggttacaaagaccctgctgataaaacaggttgcagtaaa

SEQ ID NO: 849327 - DNA, 120 bp, Artificial Sequence
  ENSG00000277152_53 (sequence is synthesized)
gaagctcgcccaaaccaaaatggcaatgaaagtaacctctggtcatcctcactgctcattacacgctaattataatgcattaggatgctgaaagacactcccaccagccccatgacagtt

SEQ ID NO: 849328 - DNA, 120 bp, Artificial Sequence
  ENSG00000277152_54 (sequence is synthesized)
tacaaacgccatagcaacatctggaagttactctatatgacttaaaaggaaaaggaactctcagttctgggaaattcccacccctttcctggaaaattcatgaataaaccactccttgtt

SEQ ID NO: 849329 - DNA, 120 bp, Artificial Sequence
  ENSG00000277152_55 (sequence is synthesized)
tagcatatgatcaagaaataaccataaaagtagccaaccagcagcccttcgtgctgctctgcctgtagagtagccgttgttttattcctttactttcttcataaacttgcttctgcttta

SEQ ID NO: 849330 - DNA, 120 bp, Artificial Sequence
  ENSG00000253282_0 (sequence is synthesized)
ttcttgccaaaatgaacctcagagacatacatctaaggaccttgcgtgcaccaaagagggcctaggaggacagcagctgtccctacttgctgcactgtggggaggcgcctgtgctcactg

SEQ ID NO: 849331 - DNA, 120 bp, Artificial Sequence
  ENSG00000253282_1 (sequence is synthesized)
ctctgctgttgaagagctcagtgaagcatatgatgtgactgtggatatccaactgctttagctgacatcttggaaggaaagcaggagagagacctgggccctgaccttccttcgtcacca

SEQ ID NO: 849332 - DNA, 120 bp, Artificial Sequence
  ENSG00000253282_2 (sequence is synthesized)
tcagcttgtgacatcttctcaggccagccctagccaactctgtgactgtttccacaggtgtcgatgttggcatcatgtctaacttctgctgcttcccaaggtcgccatgatcatctcatt

SEQ ID NO: 849333 - DNA, 120 bp, Artificial Sequence
  ENSG00000253282_3 (sequence is synthesized)
gtaaagtatttgtaaaaaggcatcatacaaaaacaaagttcattgttattcatccttttccttcccaaatacactagacttctttaaaacattaaagcaaagtgaggccaagctgtttac

SEQ ID NO: 849334 - DNA, 120 bp, Artificial Sequence
  ENSG00000253282_4 (sequence is synthesized)
agtgaggccaagctgtttacttgtttaacctaatatgaagggccactgcaaagcctgaggctcaaaggtaagattcacagccaggtgcagtgcctcccgcctgtaatcccagcactttgg

SEQ ID NO: 849335 - DNA, 120 bp, Artificial Sequence
  ENSG00000259627_0 (sequence is synthesized)
gaaaatgtcctacaatgtgcattttattccatatcattatacaatgtttacatatagttaaaactctcaagaaaacgtcctttaccagttgtatgtggtgtctaaatctttaacatgaag

SEQ ID NO: 849336 - DNA, 120 bp, Artificial Sequence
  ENSG00000259627_1 (sequence is synthesized)
gactgaaaagagtggaaatccacactgattgttatcctacagattgtcatgagctgcacgtgtgccaatcagaaaggaatggaagtctcggaagagcagcgtggcttacagacccttggc

SEQ ID NO: 849337 - DNA, 90 bp, Artificial Sequence
  ENSG00000259627_2 (sequence is synthesized)
aagctattttgcccaagcataggtacatttaatcatatttcaaacactataccagatatttagaagttaggaatatgagtatctgatagg

SEQ ID NO: 849338 - DNA, 120 bp, Artificial Sequence
  ENSG00000259627_3 (sequence is synthesized)
tcaggaaatagaaaacattttttgggggggctcctcattatttatcagttcaaacaagaggacctgctatttcaaggagcagtgctgaattgatataagtattctaccataaaagctgtt

SEQ ID NO: 849339 - DNA, 120 bp, Artificial Sequence
  ENSG00000259627_4 (sequence is synthesized)
ttgtgattaaagagaacgtaattattccagccatatagagaaacaagcaggcaaggccagcctttcagccaattccttgcatttgcatttctgcagaaagcaactgttttcaactctatt

SEQ ID NO: 849340 - DNA, 120 bp, Artificial Sequence
  ENSG00000253280_0 (sequence is synthesized)
gagcagaagctacggagatttcctatggaaaccctgccctcagggatgcatagcctgcctgactatcaaaatccagcacaagagtggtcgttatgttacaatcaatgagcctacatggac

SEQ ID NO: 849341 - DNA, 120 bp, Artificial Sequence
  ENSG00000253280_1 (sequence is synthesized)
atcactctcacccaaagccataaatttcgctgtaagcactgctttcactgtaccccacaaattttggtgattgattatgctgttgagtttgactatgtccttactgatgttctgtctgct

SEQ ID NO: 849342 - DNA, 120 bp, Artificial Sequence
  ENSG00000253280_2 (sequence is synthesized)
ggatctgtccatttatgattgaagaacgtcaaaatcttcaacttatttttgcagtgagatgccctccgccttagactttgcattatctaccactgcataataaagtactccaaaatataa

SEQ ID NO: 849343 - DNA, 120 bp, Artificial Sequence
  ENSG00000253286_0 (sequence is synthesized)
aacaaagggttgggacacaaagtcattctcagaagaaggaaagcctggaagatctttcaacagacttcctggtgctgggtctccttgttctctctttagtgtgaccgagaggccagatga

SEQ ID NO: 849344 - DNA, 120 bp, Artificial Sequence
  ENSG00000253286_1 (sequence is synthesized)
ccacgtatatgcctaagaggagaagctgccacctgttgctgtaaatctggtggagaagtgaagggccagaggaaggaagtgaattataatcgccatcattacaagttgctgagtgctggc

SEQ ID NO: 849345 - DNA, 120 bp, Artificial Sequence
  ENSG00000253286_2 (sequence is synthesized)
gaaaaatgatctaagaagatagcaccttggcagagatctggggatcctgatcatccgaaggccatctgctctatgctttcagctggtcttgaataagcagcctggacaccccgatgatgt

SEQ ID NO: 849346 - DNA, 120 bp, Artificial Sequence
  ENSG00000253286_3 (sequence is synthesized)
ttgggacccattcactcatgcatccattcattcatcctacaagcatgtgagcatcgtctgccaaacactgactgagcctgtgctgggagttcaaacagcatgaagcctctgtccttgccc

SEQ ID NO: 849347 - DNA, 120 bp, Artificial Sequence
  ENSG00000253286_4 (sequence is synthesized)
tgtttggaatcagccatacgtttccgtccactgggaaatggggttgacctgccttagccaggcctcacatgccatcctgatgaaacattattttaggggctggcagccctgaactggctt

SEQ ID NO: 849348 - DNA, 120 bp, Artificial Sequence
  ENSG00000253286_5 (sequence is synthesized)
ctgttctgctggccccataggctggctcagttccaggctcacctttcgctacccttgtggctgccacattgcccagctttgatttatcgtgtcttcagcagagctgtgggcctagagtga

SEQ ID NO: 849349 - DNA, 120 bp, Artificial Sequence
  ENSG00000253286_6 (sequence is synthesized)
cccctcttggaaaggggctgttgaacgtcctttactcttcttaaaatttccatttgaaacctgttttgctgcatgtcaccccctgcagccaatattgatgttaatcttgggctgcatatg

SEQ ID NO: 849350 - DNA, 120 bp, Artificial Sequence
  ENSG00000253286_7 (sequence is synthesized)
caatgtgacctcggatgaaattgaacaactgggtaattatctgtggacctatttctaatgaaataattggaataattggaataggattagtagaactgcagagagacctgttgctcctag

SEQ ID NO: 849351 - DNA, 120 bp, Artificial Sequence
  ENSG00000253286_8 (sequence is synthesized)
ctgggctcttaatgccaaacaaaagaagcaacgtgtcagtaattcagttggtggatgccttggagccattcaagatgcattttgctcattagccaaatctcttcctgccctcatcctccc

SEQ ID NO: 849352 - DNA, 120 bp, Artificial Sequence
  ENSG00000253286_9 (sequence is synthesized)
ccaacatttgtttcagatgtgattttcatgaagcatgtccctgtgtcttgtttgtctttggcaaacacaagtaactattataaatatagcattggatctccctgctctttggggaccctg

SEQ ID NO: 849353 - DNA, 120 bp, Artificial Sequence
  ENSG00000253286_10 (sequence is synthesized)
ccacgtatatgcctaagaggagaagctgccacctgttgctgtaaatctgacttttcacccaaatgaagaagacttttcctcgtcttatccctggcaaagactctaatgatgctgaaattc

SEQ ID NO: 849354 - DNA, 120 bp, Artificial Sequence
  ENSG00000253286_11 (sequence is synthesized)
atgacgaccgtcctccagaagcaaaaattttaaggctactccgactaggccagtagtgcaaatgtctgcattcccaactcttcctccaccctgctccatcaccagaaaatatcttcatat

SEQ ID NO: 849355 - DNA, 120 bp, Artificial Sequence
  ENSG00000253286_12 (sequence is synthesized)
ttttttcccctggggagaataaggggaaaaaaaggacaacacagatgacgtcaggatggctagcagattgttggtataacccggctgtctgcccccctctttcttcctgcaaactaaagt

SEQ ID NO: 849356 - DNA, 120 bp, Artificial Sequence
  ENSG00000253284_0 (sequence is synthesized)
tatgcctcaatatcatttatgctgaaaaacaacttaaaatgcatggcctgctcagagtggtttagaaatgtgatcatttagtcttcctcttatatagattttacacctcttgaaagtagg

SEQ ID NO: 849357 - DNA, 120 bp, Artificial Sequence
  ENSG00000253284_1 (sequence is synthesized)
aaagtaggaactgttacacataagtcaatgagtatttgttgatagtgtagtgttcacttaataatatacgtatttcttttttctatttaagaaagcctgggcgacagagcgagactccat

SEQ ID NO: 849358 - DNA, 120 bp, Artificial Sequence
  ENSG00000253284_2 (sequence is synthesized)
aaaaaaagaaaagaaaaaaaaactcagtggcttaaaacaataactatatattattgtgcatacttttcatgggtttgctgggcagtttctcccgtttgtttctttctctagtttctgtgg

SEQ ID NO: 849359 - DNA, 120 bp, Artificial Sequence
  ENSG00000253284_3 (sequence is synthesized)
ttctgtggggcctgctcttatctgagatcacctagtcaggtaagaggctttgctgatcttggcaggtctagcatggccttatccaggatgatgggaatgactcttcctctaataggttcc

SEQ ID NO: 849360 - DNA, 120 bp, Artificial Sequence
  ENSG00000253284_4 (sequence is synthesized)
ggcttcatctgctaggcccaggcttgctgtgattgatgaagacaggcatccacccgagtgagcagaagcacctaagggtctcttgaggcctagattcagaactgggacagtgtcactttt

SEQ ID NO: 849361 - DNA, 120 bp, Artificial Sequence
  ENSG00000253284_5 (sequence is synthesized)
actgctttctgttggctaaaggcagtcacaaggtcagttcagattcaaaaagtggagaaatggactccatctttggataggaggagttgcagactaacattgtacaaggttgtagataca

SEQ ID NO: 849362 - DNA, 120 bp, Artificial Sequence
  ENSG00000253284_6 (sequence is synthesized)
aggagaggtggaagatggaggcatttttgtaatccatgtaaggtacatgctgaaaaaattactgaacccagctaaagtttaggttcttcagtctgaaatatgggattacacttgatcctg

SEQ ID NO: 849363 - DNA, 120 bp, Artificial Sequence
  ENSG00000253284_7 (sequence is synthesized)
aacacactgctgatcatatatgtactccttagattatatagaaatctatgtggacatgtgtgggatgaccctctttattaaaactgttaattcctaactcctgtagaatagagttattat

SEQ ID NO: 849364 - DNA, 120 bp, Artificial Sequence
  ENSG00000253284_8 (sequence is synthesized)
gtttttttcttttgatgccctgtttagttggtttggtactttcactggggctgtgtcagtttaaggtccaaaatagatctgactgattctgttttgggggatggaggaaggtatcttagg

SEQ ID NO: 849365 - DNA, 120 bp, Artificial Sequence
  ENSG00000253284_9 (sequence is synthesized)
tctcagtgtgcttctgagaagtctttcaagtagatgacctcccctgttctgcccacacccaaaacccactgaccaagcacttgctgtcatgttaccctgttttgttttccctgtggcact

SEQ ID NO: 849366 - DNA, 120 bp, Artificial Sequence
  ENSG00000253284_10 (sequence is synthesized)
tatcactggttaaaattcttattcacttacgtgttttctttttctgccttgtgatatgagcctcacaagagtggggacctcctctgaccctctttgctgctaaattctcacagttaagaa

SEQ ID NO: 849367 - DNA, 120 bp, Artificial Sequence
  ENSG00000253284_11 (sequence is synthesized)
tagtgcctttctgttcttaggaaatgctcaataaatatctgttgaacatttgtaataaatattttgtaataaacaagtcagcagtttgttaaaatacagtgtgtttaaatgctatgtcac

SEQ ID NO: 849368 - DNA, 120 bp, Artificial Sequence
  ENSG00000253284_12 (sequence is synthesized)
tggtgcattgcagacacttgttgggtatttatggaatcttgagggagggccgtggtcagtaggagctcaaggagaatgaaagcttgaagccacaaagggtttttctagattaatccagtg

SEQ ID NO: 849369 - DNA, 120 bp, Artificial Sequence
  ENSG00000253284_13 (sequence is synthesized)
aaagacagatgagcaggagagttagggtatgatagatttgttgaaatgttgaactgttagacttcaggctgggaaggagggaagtagagcaaaaagtgatctgatagattgggatagaga

SEQ ID NO: 849370 - DNA, 120 bp, Artificial Sequence
  ENSG00000253284_14 (sequence is synthesized)
ttcttccaagaccagagaactcccacagggaagtagttaaacatgtatactgcaaggttggagatttggtgttgcagtgtgatcattgaagtcatgattttagatgtgccaggttatggg

SEQ ID NO: 849371 - DNA, 120 bp, Artificial Sequence
  ENSG00000253284_15 (sequence is synthesized)
tatgacaaggttctgggattaagagaatggatggctcaggtagttgaaggaccttgggggaatggggaataaatatctgttctttgagagaatgcagtaggacagctgatgggagaaagt

SEQ ID NO: 849372 - DNA, 120 bp, Artificial Sequence
  ENSG00000253284_16 (sequence is synthesized)
ccttaacagccaaggtactgaggtaatgctttgaaaagaggttgagggtatagaggagtttgctaattatggagcaccatttccataggtagttaaatttgtaagatagaaggtggactg

SEQ ID NO: 849373 - DNA, 120 bp, Artificial Sequence
  ENSG00000253284_17 (sequence is synthesized)
tagactaggtcagggatggaaaaaacaaagccttgtagggttaatgccaggtcagtagatggattgagagaggaattggagataaagttaatttgggcattgagaggtttgctgaattta

SEQ ID NO: 849374 - DNA, 120 bp, Artificial Sequence
  ENSG00000253284_18 (sequence is synthesized)
gtttcagtagactcctagagaaaggtgaccctgggacttacagaggccgtgactcatttggccaagagtggtggtcagcccaggaatttgtgggttctgcctgtgctccttaaagggtat

SEQ ID NO: 849375 - DNA, 120 bp, Artificial Sequence
  ENSG00000253284_19 (sequence is synthesized)
ttgggtaggtagattgtgaactcttaatagcttacatactaagcagatacatagtcattagcagcttccatattttcactatggtttttcagaatattttaagtatttttttattagaaa

SEQ ID NO: 849376 - DNA, 120 bp, Artificial Sequence
  ENSG00000253284_20 (sequence is synthesized)
tgacattttccaaatgtaaactctttagagatggaaaacattaatgatatatgcaaatactaaaggacagtgatttaatttaagtaatactgttgtcaagtgtaaaattcaaagatctaa

SEQ ID NO: 849377 - DNA, 120 bp, Artificial Sequence
  ENSG00000253284_21 (sequence is synthesized)
aaattcaaagatctaagcctggaacctggacttaaaaaaaaaattcaaggatcaagattttcaggttagcattttctattttttggtcatacttttttttttttttttttttgagacagg

SEQ ID NO: 849378 - DNA, 120 bp, Artificial Sequence
  ENSG00000253284_22 (sequence is synthesized)
gcgtgagccaccgcgcccggccacattttttttacattggtattagcagtagatattttaatgtaaatatttaatcttttttgctgttagtcattttgaaagttcaaactgtgtgatgaa

SEQ ID NO: 849379 - DNA, 120 bp, Artificial Sequence
  ENSG00000253284_23 (sequence is synthesized)
tgaaccagaccaaaacttcataatctttaaaccacaaagttgcctaataggcaacaaagtaagcaggacaacagtggaagattttacaaattctcagaaacacctggaaataatttagga

SEQ ID NO: 849380 - DNA, 120 bp, Artificial Sequence
  ENSG00000253284_24 (sequence is synthesized)
aaagcttttgactctaggctcatagatagagactgtacatgaagaataattaatagcaattactttcttgtctttagtctttcgtcagatttgtttctttgaaaagagcaaggcaggtta

SEQ ID NO: 849381 - DNA, 120 bp, Artificial Sequence
  ENSG00000253284_25 (sequence is synthesized)
aaataatctgtataatataaattgcccatgcaatgcaggtcagtttgttttatgcaggtagcagtagtacgaacttggggtccaatgatattttttatatactacttatatatgatggta

SEQ ID NO: 849382 - DNA, 120 bp, Artificial Sequence
  ENSG00000253284_26 (sequence is synthesized)
ataattaaaatctttgagtatgttttatttctttaattatgacaatttaattaaatgccaaatgaatataacatttgtcagacataagggaaaataagatgaataagcactgcacatgat

SEQ ID NO: 849383 - DNA, 120 bp, Artificial Sequence
  ENSG00000253284_27 (sequence is synthesized)
actcagcttaaaataagaacattttttttatgtcaaagagcttctctaggatctgtaaataggagtgtaattgaagttgtaaagtacatgcatttgattttgggaatttctttattataa

SEQ ID NO: 849384 - DNA, 120 bp, Artificial Sequence
  ENSG00000253284_28 (sequence is synthesized)
tcttttatccataatatgtgtggcaaatttactctcctacattgtagcttaccttcacattccaagagatcttttgacgaacagagttcttaattttaataaaattatgtcagtcttctg

SEQ ID NO: 849385 - DNA, 120 bp, Artificial Sequence
  ENSG00000253284_29 (sequence is synthesized)
ttttgtttttttttttgttgtttttaattcctttccagtactttaatctttttccattccagtccttacatttctttatattgctggctagtattgccagtacagtgatagaagcaacta

SEQ ID NO: 849386 - DNA, 120 bp, Artificial Sequence
  ENSG00000253284_30 (sequence is synthesized)
gtgatagaagcaactacagctctgatgtaaaaatgaaggattctaatttttaccactaagaatgatatctgatgaagatttttggaaggtatcatttccaggtgaaggaaattctctatt

SEQ ID NO: 849387 - DNA, 120 bp, Artificial Sequence
  ENSG00000253284_31 (sequence is synthesized)
tctactttagtaagaacttttattatgagtttaagtattgaattttatcaactatttgttctgcattcattaagattttttttcttttagtttgcttattcagtgaattccatgaattgc

SEQ ID NO: 849388 - DNA, 120 bp, Artificial Sequence
  ENSG00000253284_32 (sequence is synthesized)
attaatactcttgttaatgctaaaccattaatggtaaatcttacattgttgggatcaacccaacttggtcatgaagtactcttttttccaagttaataaagtttgtattttttagagcac

SEQ ID NO: 849389 - DNA, 120 bp, Artificial Sequence
  ENSG00000253284_33 (sequence is synthesized)
ttttaggttcatggcaaaatttagtagaaaatgtataaagttctctgttacgcgtacacacacacaaacctttaccccctcccccactgtggacatcttgcaccacagtgatacagttgt

SEQ ID NO: 849390 - DNA, 120 bp, Artificial Sequence
  ENSG00000253284_34 (sequence is synthesized)
tacaattgtacctacattgtcacatcattatcacccaaagttcatagtttaccttaggattcactcttggtgttgtgtgttcattgagttttgacaaatgtaaatgacatgtatccacca

SEQ ID NO: 849391 - DNA, 120 bp, Artificial Sequence
  ENSG00000253284_35 (sequence is synthesized)
tcacagtatcatacagaatagtttcacccccctaaaatcatctgtacattgttctgttgggtttgttgatacttcatttaagactttgatatttatgataacaaagtgaaattgccctgt

SEQ ID NO: 849392 - DNA, 120 bp, Artificial Sequence
  ENSG00000253284_36 (sequence is synthesized)
aattttcttctcttgtactgtcattgtctggctttgatagcaaggttggtctagcctcagaaaatgagttggaaggtgttccacttttttgtactctggaagagtttgtatgaggttaga

SEQ ID NO: 849393 - DNA, 120 bp, Artificial Sequence
  ENSG00000253284_37 (sequence is synthesized)
atcagtcatggagaaagggatattatagttttcaaatgttgcagtgacttcttgttttctctgtgtactctgtccttttattttgagtttatattatcagatgcatttaagtatagaatt

SEQ ID NO: 849394 - DNA, 120 bp, Artificial Sequence
  ENSG00000253284_38 (sequence is synthesized)
gttatgttctgttaagtgtagaatatgccatcagaatgaagccaacatttttatcatgaggggacctccacctccggtagtacttgtgcctttatctgttttgtctgattttgatatata

SEQ ID NO: 849395 - DNA, 120 bp, Artificial Sequence
  ENSG00000253284_39 (sequence is synthesized)
aactttcttttatttagcattacctactctaattttttttcacccttttaaaatatctgtttatccgtatatttgggtgtatctttttaaaatagtatataatgaatctttttccagttt

SEQ ID NO: 849396 - DNA, 120 bp, Artificial Sequence
  ENSG00000253284_40 (sequence is synthesized)
tataaacttttttttaacttatagtcaacttatgattgttggtatatttaggtttatttataccttattttgttctttcttctcttccttgttttcttgttggttatttaaaaggtatat

SEQ ID NO: 849397 - DNA, 120 bp, Artificial Sequence
  ENSG00000253284_41 (sequence is synthesized)
agttttaaaattgtgtacaaccaagatactcagcaatggataatcaattttcctctcaatctttgactttcaagaaactggaatagatttcagtatgtactacaaattgagtgagaaatt

SEQ ID NO: 849398 - DNA, 120 bp, Artificial Sequence
  ENSG00000253284_42 (sequence is synthesized)
attcgggaaaatgcccaataaaaggccttcataattttggaagaagtaattggaataaaggtgactcatctcttattagtgagaatggttaaatatgctaattaaatgcctttcactttt

SEQ ID NO: 849399 - DNA, 120 bp, Artificial Sequence
  ENSG00000259621_0 (sequence is synthesized)
ggcactgcccctgggcccgaggtgtgcaccagtaaaagcccttttacactcgaaggctgccaacaaaataacatgctgcagtaactgcctctgatgagaggagcttctgcttcagttgtt

SEQ ID NO: 849400 - DNA, 120 bp, Artificial Sequence
  ENSG00000259621_1 (sequence is synthesized)
gataaacctgtggattttggtatctgtgggaggtcccagaacaaatcccccatgggcatcaagggaaaactgtctatggtaccactatgatgtcttataggctatgtcaagcttgtgaaa

SEQ ID NO: 849401 - DNA, 120 bp, Artificial Sequence
  ENSG00000253288_0 (sequence is synthesized)
aaggcattgtcctctgcagacacccaggctgcagacttcaaggactggaagaagagctttgcgtcttctctcttctctatacagacacaatctgtagcagcaaatgtgttacagatggac

SEQ ID NO: 849402 - DNA, 120 bp, Artificial Sequence
  ENSG00000253288_1 (sequence is synthesized)
agaagctgggctattaggggcctacagtgcatcaggcatggatccatgttagaaaattgtcccaaggataaccaggacctgctggagcacagtgaaatttggtgccgtgactcggatcgg

SEQ ID NO: 849403 - DNA, 87 bp, Artificial Sequence
  ENSG00000253288_2 (sequence is synthesized)
cggatcgggggaccccccttgggagatcaatccatcacctacgacctcaggtcctcagaacgaccagcccaagaaacatctcaccaa

SEQ ID NO: 849404 - DNA, 120 bp, Artificial Sequence
  ENSG00000253288_3 (sequence is synthesized)
ctggttgcatgtagagatgaacccccagtggattcctgtgatgtcctttgcagcagtgtcaacagtgaagtcccagatgacacgactggcaaggatctgaggaacatggatgaagctgga

SEQ ID NO: 849405 - DNA, 72 bp, Artificial Sequence
  ENSG00000253288_4 (sequence is synthesized)
cagcaaactaacagaggaacagaaaagcaaacaccgtatgttctcactcattacacaccggggcctatcaga

SEQ ID NO: 849406 - DNA, 61 bp, Artificial Sequence
  ENSG00000253288_5 (sequence is synthesized)
aacacatggacacagggaggggaatattacacaccggggcctatcagagcgtgggaggcta

SEQ ID NO: 849407 - DNA, 120 bp, Artificial Sequence
  ENSG00000253288_6 (sequence is synthesized)
ctgcacatgtatcccagaacttaaagtatgatttaaaaatatatatagagagagagatatataaattgctgagagtggattttaagtgttctcaccacacaacaaaataagtatgtgaag

SEQ ID NO: 849408 - DNA, 120 bp, Artificial Sequence
  ENSG00000253288_7 (sequence is synthesized)
aaaatttttaaagggagaaaataagagagaattggcatcagggttgcaaaggaatgaataaatacatgggccatgaaaaactgatcaatataagggtttgagaggaaggtgaacagtttg

SEQ ID NO: 849409 - DNA, 120 bp, Artificial Sequence
  ENSG00000253288_8 (sequence is synthesized)
caaagttgtaactttgaaagatctcccttattaatttatttgctcgtttaaaagagtcagggtacaatggaatattcaacttaatctagaagaggtagagtggactgaaattaatttccc

SEQ ID NO: 849410 - DNA, 120 bp, Artificial Sequence
  ENSG00000253288_9 (sequence is synthesized)
tctaacatgcatttgttgctctaatcaactatctagagctacacaaaatacatacgattttctaaaattatttaaattcttgaaggtaaatgccatttcttctcttatagatgatagacc

SEQ ID NO: 849411 - DNA, 120 bp, Artificial Sequence
  ENSG00000253288_10 (sequence is synthesized)
ttcagactttcacatgactctttataaatagtccccatgctcaaaacgacaaacaccactctcttagatttcaacttagcaaggcatcccaaactaaacttcacatccaagggagaaggc

SEQ ID NO: 849412 - DNA, 120 bp, Artificial Sequence
  ENSG00000253288_11 (sequence is synthesized)
aaatgaaggagagtaatgaccagctatttgtttgagacaataggtacattcatcagattacctccaaacatcagccaagggattttagtttggaacaaagatagttggaatattaattat

SEQ ID NO: 849413 - DNA, 120 bp, Artificial Sequence
  ENSG00000253288_12 (sequence is synthesized)
tttcaaatggtggaagagctgccatagagaattagagaaaattttaaactagaagtttgcaaaaaatatattcaaataatagctttgtttttattctaaaatgtgaccttggctaagcca

SEQ ID NO: 849414 - DNA, 120 bp, Artificial Sequence
  ENSG00000253288_13 (sequence is synthesized)
cataatctctctgggtctctgtatgtgggagctactgataatacctgtatctctgtttcaggtgatgatcaaaatgcctattttgtgatttgtgaaatgaaatgtgctgtaggcatgtaa

SEQ ID NO: 849415 - DNA, 120 bp, Artificial Sequence
  ENSG00000253288_14 (sequence is synthesized)
ggtgatttttacaaataattattttcttgttgtttttgaagttccagagtacaggaaaggaaacaggaaaaacataactgaggaatagttgttaggtcggtgagacattgaaccttctaa

SEQ ID NO: 849416 - DNA, 75 bp, Artificial Sequence
  ENSG00000253288_15 (sequence is synthesized)
agagtacatttcttgaaacagggctacaattctttctgcctggtatcattaaaaaggaggtgacaatttggccta

SEQ ID NO: 849417 - DNA, 120 bp, Artificial Sequence
  ENSG00000253288_16 (sequence is synthesized)
ctgcctggtatcattaaaaaggaggtgacaatttggcctaagaaaattcacggaatccattttgaaagaaaattatgagtggaaaacacctgagttgaaaagtggggaagtttctcaatc

SEQ ID NO: 849418 - DNA, 120 bp, Artificial Sequence
  ENSG00000253288_17 (sequence is synthesized)
tgcttactccaaggaaattcttaaaggaattataaacacttaacctaataagttaatttttaattgtaaaatagaccatcttcaattttttgaagagccctcgtgtggaggaatgcgatc

SEQ ID NO: 849419 - DNA, 120 bp, Artificial Sequence
  ENSG00000253288_18 (sequence is synthesized)
tcatggaaacagtggcctaaagaaagttctcctattgctttttacttccctttgcttgaaaaaagataaacagcatagaaacctccaagaggctaccgagttctctttgaacttttttct

SEQ ID NO: 849420 - DNA, 120 bp, Artificial Sequence
  ENSG00000253288_19 (sequence is synthesized)
ctgcagctgcgcctggaactgctccctgctgcactttactacctctgtttataagagcaacagtccctctcctgaaaattggactgaattccaacaagtcggcaacttgcatgaagacaa

SEQ ID NO: 849421 - DNA, 120 bp, Artificial Sequence
  ENSG00000253288_20 (sequence is synthesized)
gtgctcagtggaaaaatctaggaagaaccccaggtcaacaaaatggaggtcaggacatgtggcagtaaaaaggtcatattccttatatgtgaatcatttggagtgttgagcaccagagag

SEQ ID NO: 849422 - DNA, 120 bp, Artificial Sequence
  ENSG00000253288_21 (sequence is synthesized)
taattcttagaaacttctgaagcatctcttgaatactgctgattggattagaaatctgctcaggtaaatgaatgtcagtcagtccagttctaggaagctggagagcgaagctaggggacg

SEQ ID NO: 849423 - DNA, 120 bp, Artificial Sequence
  ENSG00000253288_22 (sequence is synthesized)
atgctggagctccaaggattagatcagagaccacgaaccatgtgatctctggcttgtggatgagcaattggctcttcctctcatgaggcactgtggtaaagtagaccttgatctgaatcc

SEQ ID NO: 849424 - DNA, 120 bp, Artificial Sequence
  ENSG00000253288_23 (sequence is synthesized)
tggcttaacaaatggtgtgttgtgaaatatttgctaaataatctctatattaagctttatatattttattggtgaattgagggcaaatgaattggcttagcctgggtttctcagaaagca

SEQ ID NO: 849425 - DNA, 120 bp, Artificial Sequence
  ENSG00000253288_24 (sequence is synthesized)
gaacctcaaagaaaggctcaattatagcattatctatcttttgaaatcaggagtcagtacaggagccaagatgtaggggagaaaaagccaatgccaagatacaagtggagtcaagtcact

SEQ ID NO: 849426 - DNA, 120 bp, Artificial Sequence
  ENSG00000253288_25 (sequence is synthesized)
ggttccttgagcatatcaggacctccaattcaagaaaataaatggggaagcattgatgcattgattaacctatgattctgctcaggctgtggtatgatctgaagatttatgtttccccaa

SEQ ID NO: 849427 - DNA, 120 bp, Artificial Sequence
  ENSG00000253288_26 (sequence is synthesized)
agccatttatggagatcttaacccctaaggtgacggtatgaagaggtggggcctttggaatgcagttaagtcataagggttccaccttcctgaatgagatcagtgcccttgcaaaagagg

SEQ ID NO: 849428 - DNA, 120 bp, Artificial Sequence
  ENSG00000253288_27 (sequence is synthesized)
atctgaaactgtccactaactggcaagagcatttcaataaaaagcaaacacctcatcatattgaatcatagtgaatatataaaaagacactgtacacatttcttcagatatacatactgt

SEQ ID NO: 849429 - DNA, 120 bp, Artificial Sequence
  ENSG00000253288_28 (sequence is synthesized)
aatggatttcacactgggttttactcccattatgtgatgcataaaaaagtaaacaacaataaaacagttaaattaatgagcttggttggttttcaaaacatgttaggcccaatatgttag

SEQ ID NO: 849430 - DNA, 120 bp, Artificial Sequence
  ENSG00000253288_29 (sequence is synthesized)
agaattaatatagggattttaaaaatgtgttaaactcaacatgttcttactaataacaggggatttctgatatcaaggaccagttaatgtggttaatattttgtattagaaggaaaggga

SEQ ID NO: 849431 - DNA, 120 bp, Artificial Sequence
  ENSG00000253288_30 (sequence is synthesized)
agagatgtgctgggcaaaagaggaaaatatagattttttaaaaataaatagaaatctgagctaatattaataagggtaaaaaaggaaaaagtgataacatcatgtggaacattccagaag

SEQ ID NO: 849432 - DNA, 120 bp, Artificial Sequence
  ENSG00000253288_31 (sequence is synthesized)
ttatgtgcagggctcagtatgggggcaacacatcaatagcatatatatacaaggccaacctcttcctctccattcccagaaatctagtagtggggcactgtatgtgtacaggtaacatgt

SEQ ID NO: 849433 - DNA, 120 bp, Artificial Sequence
  ENSG00000253288_32 (sequence is synthesized)
taaatagataggctgtgctggatgctatggttgcagaatgtggttgaagaagaattgcgaagccaacaaagcaagggttggggcagagtttatgagttatatgaagtttgtgtggggact

SEQ ID NO: 849434 - DNA, 120 bp, Artificial Sequence
  ENSG00000253288_33 (sequence is synthesized)
gagaattctggattttagacatcctgtgtcctgcatggcaactcctccacccccaccagtcatgtcaggtggaggccactatagcagatatagtacgcctacattaagggaaggaggtag

SEQ ID NO: 849435 - DNA, 120 bp, Artificial Sequence
  ENSG00000253288_34 (sequence is synthesized)
ttctacgtaatgaaaactcactttccaagttgacccttcttaatcctctgctggaaaaccagtgtactgtgatacccaagggcatggttttatcctttggtgccactattcatcatatcc

SEQ ID NO: 849436 - DNA, 120 bp, Artificial Sequence
  ENSG00000253288_35 (sequence is synthesized)
tcattgcattggaaaaattaattgattactcttgacttcacttttctgtcaaattaaaattccattaccattcatttgaaaagatctgatgtggtttaagtgagattatatagtgtgtgg

SEQ ID NO: 849437 - DNA, 120 bp, Artificial Sequence
  ENSG00000253288_36 (sequence is synthesized)
atcattgctcagcatgtgataagcactcagacattttagctaaatgaaaacaacactaataccagtactactaaaactgagccctaaagtaatcacctgagttttatttaaacaaaaaca

SEQ ID NO: 849438 - DNA, 120 bp, Artificial Sequence
  ENSG00000253288_37 (sequence is synthesized)
taattttcttccatctttctgtaaaattgttcaacaagaaaatattaacattcatagatgatttcagagtttataggaacttttgcatacagctcacttatcagagcaactcagttggat

SEQ ID NO: 849439 - DNA, 120 bp, Artificial Sequence
  ENSG00000253288_38 (sequence is synthesized)
cctgttattaatttcctcactttagaaatgaagggactgagatcaagaaaaggaagtgacttgctcaaggatacatatacaacaagtaaccatgctaagaattctcatttgatgtgcgat

SEQ ID NO: 849440 - DNA, 120 bp, Artificial Sequence
  ENSG00000253288_39 (sequence is synthesized)
ttcccccaatcagtgactatagatatatatagatacatagatgtgtatatatatagatgatagatagatacgtagatggggatacagatactacacctgtgtataccatatctatgtatg

SEQ ID NO: 849441 - DNA, 120 bp, Artificial Sequence
  ENSG00000253288_40 (sequence is synthesized)
tttatatgctatttgtatgttccacttcggatatcttctcacattcagatatctagtgtccacatgtttttttccctggattcctctcgaaacataatcatatggcaaataaagtgagtt

SEQ ID NO: 849442 - DNA, 120 bp, Artificial Sequence
  ENSG00000253288_41 (sequence is synthesized)
ctgcaataaactttaagatttaatataatacattttcagggagggtgtgggcagaaaaattgtgtggctttaagttttcttagcaaataagtgacttccctcctaagatgcagctgcttt

SEQ ID NO: 849443 - DNA, 120 bp, Artificial Sequence
  ENSG00000253288_42 (sequence is synthesized)
tcttcattttttgtaactgttttatgtttcacgaaattgctctgtcctgattttaactgtgtcatattccagctctcagagggtagccaaaatttggaaacaaaatgttgttttgctaat

SEQ ID NO: 849444 - DNA, 120 bp, Artificial Sequence
  ENSG00000205293_0 (sequence is synthesized)
agatctgattggtttatccggagtttctgcctttgctacttcctcattttctcttgctgccaccaagttaaggaagtgcctttctcctcctgccatgattctgaggccgctccagccacg

SEQ ID NO: 849445 - DNA, 120 bp, Artificial Sequence
  ENSG00000205293_1 (sequence is synthesized)
tggaactaggaaagaaatccaagtaaatcaaaaggaacagaaactagaaatatacaggcatacttgtggctggagttattccactacttgtacattatgtggcttacctcaacatgtgga

SEQ ID NO: 849446 - DNA, 84 bp, Artificial Sequence
  ENSG00000205293_2 (sequence is synthesized)
cgtttgagatcaacatagcaaaatcccgtttctacagaaaaaaaaaaatttgctgcatgtggtggtacacatctgtgttcccag

SEQ ID NO: 849447 - DNA, 76 bp, Artificial Sequence
  ENSG00000205293_3 (sequence is synthesized)
tgagatcaacatagcaaaatcccgtttctacagaaaaaaaaaaatttgctgcatgtggtggtacacatctgtgtgg

SEQ ID NO: 849448 - DNA, 120 bp, Artificial Sequence
  ENSG00000205293_4 (sequence is synthesized)
ccagcctgggtgacagattgaaaccctgtctcaaaataaacaacaaagaaaacttcgtctcctgcaggaagctatcataatcctgactgcaagccacctatttgaaacttatttgagtta

SEQ ID NO: 849449 - DNA, 120 bp, Artificial Sequence
  ENSG00000205293_5 (sequence is synthesized)
gatcttacgttatatttatttgacctttttcatctgtccagttttcttcttgagtttattcagttacctaaagaaactgaaaattacttgtagatagaaatcacatttcataatttgctt

SEQ ID NO: 849450 - DNA, 120 bp, Artificial Sequence
  ENSG00000205293_6 (sequence is synthesized)
ataattcccctcaggccttctgcattttatgcatattgaacattacacaatttaatgaatggatcattggaaaatctctcattatgtacacgattatagatgcaatacattttcataagt

SEQ ID NO: 849451 - DNA, 120 bp, Artificial Sequence
  ENSG00000205293_7 (sequence is synthesized)
tatataattgttttatttatttttacaattaaggctgaagattgaggtctatatgcactaatctattcttgatgcaatggtttattaaaatgcccttttaaattatagtaagtttttgca

SEQ ID NO: 849452 - DNA, 120 bp, Artificial Sequence
  ENSG00000205293_8 (sequence is synthesized)
tcattaatacatttacttatacagagatagatagataggtgctggcatatacttacaagcttatgaataacacagttagttgcttcacattgactcatttcagaaatgtcactgtaagtc

SEQ ID NO: 849453 - DNA, 120 bp, Artificial Sequence
  ENSG00000205293_9 (sequence is synthesized)
acaaaatattttgtgaaatgattgtagtatactttcggctacaacactgagtctgttatacctgagaagaaattagactctgtggggggaaaaagacagaaaaatttccaaaatcaaatt

SEQ ID NO: 849454 - DNA, 120 bp, Artificial Sequence
  ENSG00000205293_10 (sequence is synthesized)
tttaacaccagggttgctgtgagccttaccccagggggtgccgtttgtggcatggtctgtggagttaaacagtgtaggctatgtggttttatatggcagccctgcagaaaccagagagta

SEQ ID NO: 849455 - DNA, 120 bp, Artificial Sequence
  ENSG00000205293_11 (sequence is synthesized)
tacaaaaaggtatcataaaattttgaactttagtgccactgctcagttaagtagtcttcaaactcttatggatatttagtcaatctgttgtaatccatgatgttagaatgtacaatggtc

SEQ ID NO: 849456 - DNA, 120 bp, Artificial Sequence
  ENSG00000205293_12 (sequence is synthesized)
atccatgatgttagaatgtacaatggtccttaccaatcattttatttggtagaaaagaaaaataagatatatcaatgagaagtaaattatatatttaaaatacatatacataacatagaa

SEQ ID NO: 849457 - DNA, 120 bp, Artificial Sequence
  ENSG00000205293_13 (sequence is synthesized)
gaaataaagcacaaaatatatgacaagcctctaaatattaagtacttttcatagtctaaatttctactactataccgtaactaagggaggaggccacccctcatattgtcttatgcccaa

SEQ ID NO: 849458 - DNA, 120 bp, Artificial Sequence
  ENSG00000205293_14 (sequence is synthesized)
tccaaagaaaaaaaaaagtgaaaactaaaaggcagaaatgacacccacaggaagacagcccggcgccacaccctgggcctagtagttaaagactgacccctgacctaatcggttatgtta

SEQ ID NO: 849459 - DNA, 120 bp, Artificial Sequence
  ENSG00000205293_15 (sequence is synthesized)
attgtatggaaaagcactgtgaatatccctgtcctgttccgttctaattaccagtgcaggtgcatgcagcccccagtcacataccctctgcttgctcaattgatcacgaccctctcacac

SEQ ID NO: 849460 - DNA, 90 bp, Artificial Sequence
  ENSG00000205293_16 (sequence is synthesized)
acgtcaggaattgctcactcagggaactcggtttttggagacatgagtctgctgatgctcctgactgaataaagccctttccttctacaa

SEQ ID NO: 849461 - DNA, 120 bp, Artificial Sequence
  ENSG00000205293_17 (sequence is synthesized)
gcaaaaataaacagttcagaacgccagtttggaaccagtatcaggaagcagttggattttctgatgcaaaggggatttttgcttctgcctgagaacagccgagattatgtcataagaaag

SEQ ID NO: 849462 - DNA, 120 bp, Artificial Sequence
  ENSG00000205293_18 (sequence is synthesized)
gggcagaagaagcatcaccaactctaaggaaccaaagtctctccagccaccaaaatgaatgcagctgccacttaggggaagtggacaaggacagaaccacccagagatgatggtgagaaa

SEQ ID NO: 849463 - DNA, 120 bp, Artificial Sequence
  ENSG00000205293_19 (sequence is synthesized)
acctagtcctttacagaaatgcagaacaactgatcagcctgttctccatcataccacccaggcgcttataaaaactttaagggtctgtctcttttcagtcctcctataacctacttccaa

SEQ ID NO: 849464 - DNA, 120 bp, Artificial Sequence
  ENSG00000205293_20 (sequence is synthesized)
ttacctttgctacctttaaaatgtgatagtaaaaactagacggttttgtctactgtttcaaaacttcttgttttcaatgtaagagaagggctatttctcagactttgaaattaacatttt

SEQ ID NO: 849465 - DNA, 120 bp, Artificial Sequence
  ENSG00000205293_21 (sequence is synthesized)
ttgccaaatatacctttccagtttcatattgacatttttaaaacaaaaggtctcaaaactctttcatatttagctatgatcaagtgaatgaggttggctgtcattaatcaaatatcactt

SEQ ID NO: 849466 - DNA, 120 bp, Artificial Sequence
  ENSG00000205293_22 (sequence is synthesized)
tccaaaggtgttttcctcagtggagtgtttaaccagaagttatatggccatcagcccacaatggtgtaggcattttaatatgaggttggacaagatatcttctaagatctcagctaggat

SEQ ID NO: 849467 - DNA, 120 bp, Artificial Sequence
  ENSG00000205293_23 (sequence is synthesized)
catttgatacccaagacctttcctgccagcatttcttcagcttctatttatattgtattttctattgtcagtatttatcatttttccctattcgtatcatctcacctctacaatacaatc

SEQ ID NO: 849468 - DNA, 120 bp, Artificial Sequence
  ENSG00000205293_24 (sequence is synthesized)
cattttcaagttctcttggctttactccaaaaatacaacctaaatgtgttaaatgttttttcatattcattactgccaacttggtgcaaacgactgacctctgcttccttggactattgt

SEQ ID NO: 849469 - DNA, 120 bp, Artificial Sequence
  ENSG00000205293_25 (sequence is synthesized)
ggagtttccagtctcccagctttacttcttatgcacctcatcacttcaccactccccattgtgatgcctgagctggagtgaccttacaggaacataaaggggattgtacaacttccatga

SEQ ID NO: 849470 - DNA, 120 bp, Artificial Sequence
  ENSG00000205293_26 (sequence is synthesized)
tttttcactcaggaataaaataaaatatcaaataaaatgtaaatgtcctacaatgggcttttctcttctccagcctcatctgccactactccctgttcactaaacttatattcgacttct

SEQ ID NO: 849471 - DNA, 120 bp, Artificial Sequence
  ENSG00000205293_27 (sequence is synthesized)
ttttttctcagacacacctacctcattcctgcttgagagccttcgcaatggctattccctctgcctgaattcactttcttctcatctttacatggctggttccttctacttcctaagatc

SEQ ID NO: 849472 - DNA, 120 bp, Artificial Sequence
  ENSG00000205293_28 (sequence is synthesized)
agcccttcctgaccacctgatcaaactaaactccacacctccattgtcatttgaaactttgcaatatacgttggctgaatgaatgagtgaattaatgaacaagagaatgagtgagtgagc

SEQ ID NO: 849473 - DNA, 120 bp, Artificial Sequence
  ENSG00000205293_29 (sequence is synthesized)
tctctttacaatatgtctattctttttgcattttcctctagtcttcttcctaattccaacttttttttaaaaacgacattacatataacttacgcttacagtctgttgagtacgtaactg

SEQ ID NO: 849474 - DNA, 120 bp, Artificial Sequence
  ENSG00000205293_30 (sequence is synthesized)
ttaaggcatcatcctgctttgtgaattccaaatctatttctatacaatcacacaaacattatcttcagcatataaatgttttagattctttaatctttgattagctgcgttgctgtgaat

SEQ ID NO: 849475 - DNA, 120 bp, Artificial Sequence
  ENSG00000205293_31 (sequence is synthesized)
gattgagtggctttgcctgtcatttgttgaaatatcaaagatacttcctactctttctgctatcgaagtagctttataaatacctgaaatttctcttttaaaaaaatgtattcttagatt

SEQ ID NO: 849476 - DNA, 120 bp, Artificial Sequence
  ENSG00000244558_0 (sequence is synthesized)
gcggccgctttccgcctcggactcgagcgcgtcgaagacagcagcgcccaccagcagatgcagagaacccaaagccctgcaggatggcaaagctgcaacatggaagtcacccggatcacc

SEQ ID NO: 849477 - DNA, 120 bp, Artificial Sequence
  ENSG00000244558_1 (sequence is synthesized)
acgtaaaggaaatctctccaaccaggaacaaacacctgccttgcaatattaggtccttcctagggcttggtgcatgtgcatatctccttccggaatcctggtcaatactaaggtgtctgc

SEQ ID NO: 849478 - DNA, 120 bp, Artificial Sequence
  ENSG00000244558_2 (sequence is synthesized)
ctcctgccccggtccacagccaggagccccggagccaacggccagcctggaagacttacagttctccctctgagggttgctgtggctttccatgttgtggtgactaagtccctgtgtttc

SEQ ID NO: 849479 - DNA, 120 bp, Artificial Sequence
  ENSG00000244558_3 (sequence is synthesized)
ctgaaaggaacagttttaagccacttctatctctgaggcaagaaggaagacgggagaaatgaggaggtgtgaggaagagagttggagggagacacgctggtcccagccatgtccatagca

SEQ ID NO: 849480 - DNA, 120 bp, Artificial Sequence
  ENSG00000244558_4 (sequence is synthesized)
gagcaaggagaccttgacaatgaggagtcagtaatacggacgtgatggtggagttctgcagccatcttggaccatgagggtaccctgaggatggacttcgtgtgcagaagagggcgaagg

SEQ ID NO: 849481 - DNA, 120 bp, Artificial Sequence
  ENSG00000244558_5 (sequence is synthesized)
aaggagaaataaaggaactcagatccctgatgacacccagagctgccaaatgcaccctacatgtagatttcattcatgtgattagaaacataataatgtgtgtgtgtgtgtgtgtgtgtg

SEQ ID NO: 849482 - DNA, 120 bp, Artificial Sequence
  ENSG00000244558_6 (sequence is synthesized)
cctattccatcatggatgagctcaaagtgtttgaaagttctgctttatcaagtgagccaaacttcctccctcaggaccatccactccagggcccagttattctactggaggagtgagggt

SEQ ID NO: 849483 - DNA, 120 bp, Artificial Sequence
  ENSG00000244558_7 (sequence is synthesized)
aaagccatcaccaggacaaccttggtgacaggctggactggcagccagcttttggggatgacttcagggaaccctgaatagccatgggagccaaatgtattactcctctgatgcctacaa

SEQ ID NO: 849484 - DNA, 120 bp, Artificial Sequence
  ENSG00000244558_8 (sequence is synthesized)
gtcaccatctataagaaacaggctcccaccagacactgagtctgctggagccttgatcttgaatttcccaacctccagaactgtggccaccagactttctctgcttgtatcctcccagga

SEQ ID NO: 849485 - DNA, 120 bp, Artificial Sequence
  ENSG00000244558_9 (sequence is synthesized)
tataatagtctggtgggcttctgttagggaggcttatacatggtggaaagaataaaggcttggactcagcctaggttcaagtactgcatcttgacctggcctgtaggcaagtcttttcac

SEQ ID NO: 849486 - DNA, 120 bp, Artificial Sequence
  ENSG00000244558_10 (sequence is synthesized)
cccatgcaggattgctagtatgttcaatgggataatatatctaaacacctcacacaatgcctggcacatagcaggtgttcaattaggtctgtattaaaatccaggctctgtctcttatta

SEQ ID NO: 849487 - DNA, 120 bp, Artificial Sequence
  ENSG00000229243_0 (sequence is synthesized)
agaggcaaggtcacaaaagggaatgcagcttctatctggttctcttgggatggttgttcttgaaacccagccaccatgctgtgaggaagtccagacaacctatggagaggcccctttcaa

SEQ ID NO: 849488 - DNA, 120 bp, Artificial Sequence
  ENSG00000229243_1 (sequence is synthesized)
ttttactgaaagttctctctcaaaccagaaaaagaaatgaagataaaacagataacaatgtaacttttacctgacaaaacaaccctccaaagaatcagcacaatttaaaagtttagaata

SEQ ID NO: 849489 - DNA, 120 bp, Artificial Sequence
  ENSG00000229243_2 (sequence is synthesized)
attctttttgtggaagctcttacaggttgaggttgtgctcaaaataaaagaaacagcctgaagattaacgtagaagaatgttttgaaggaagagagaaaaagaaggagaaataagaagag

SEQ ID NO: 849490 - DNA, 120 bp, Artificial Sequence
  ENSG00000229243_3 (sequence is synthesized)
gaggaagagacggaaggaaaagggggaaacaggaagaggagaacaaagaggcaagaggaaaaacaagaactattactactactactgtgtgagtgccagatatttagaactgctgcctac

SEQ ID NO: 849491 - DNA, 120 bp, Artificial Sequence
  ENSG00000229243_4 (sequence is synthesized)
cgagtgagagagatggtcttggaaagctgatgaaacaactccatgaattaattctgttttcattaaatccggtctgatctattgcctactccatcaggagacttcattaggctaactgga

SEQ ID NO: 849492 - DNA, 120 bp, Artificial Sequence
  ENSG00000229243_5 (sequence is synthesized)
aaaggacaaccaatatggtaacttagttagctctggttgtgctacagctagataaaaaggtttttctaggcccattgattctgagtgtaaggttttcaggttctcagatcgcaaggattt

SEQ ID NO: 849493 - DNA, 120 bp, Artificial Sequence
  ENSG00000229243_6 (sequence is synthesized)
agtgtgaaccaaaaagtctgcaacctgaagtatgagatttgaaggaaagagttgatcttctcctagagttcaaattgctttcattgactccgaatgttccaccaaaaaatgaatgcaaag

SEQ ID NO: 849494 - DNA, 120 bp, Artificial Sequence
  ENSG00000229243_7 (sequence is synthesized)
gaacctaagggcagatgagtattagaataagtccaccaaaagcaatgttctcaaagcaccagtgcttcaagctggcaacgcagcaaggtggctaagaaatgggttttgaactacacagac

SEQ ID NO: 849495 - DNA, 120 bp, Artificial Sequence
  ENSG00000229243_8 (sequence is synthesized)
ctggatgcaaatattgcctcttcaatcaacgagcaaaaaaaaagaaaaccttcagcaagtctctaatttcactaagctttagtttcttcattcattaaataaaaatcctagtcacaccta

SEQ ID NO: 849496 - DNA, 120 bp, Artificial Sequence
  ENSG00000229243_9 (sequence is synthesized)
aatcaacatcctgtgctggacattgtagatcatctcactcactctccattccactctcctcctatttgaagaggatagaatgctactaactgcactactgactcccttgcagctaagggt

SEQ ID NO: 849497 - DNA, 120 bp, Artificial Sequence
  ENSG00000229243_10 (sequence is synthesized)
ctggatgctaatgtggttccacctggcagtttctactagcaagcactatcatggaaacatgaggtttctctgtactgtgccagttttcaaattcctgagaatgaacttagtgggtgcagg

SEQ ID NO: 849498 - DNA, 120 bp, Artificial Sequence
  ENSG00000229243_11 (sequence is synthesized)
ggcattagtggcaatcgtggcatgttgactggcttgctaaatcatgaatcacagccttggatatccattttgtagcgacccaggtgttcagacacagtttcaataagagaatttaagcaa

SEQ ID NO: 849499 - DNA, 120 bp, Artificial Sequence
  ENSG00000229243_12 (sequence is synthesized)
tagatttttttttccttttggagtagattaatgcataatccttgctgcactgactcatttaggttatacctgtttttcactctggcttccccaaggtccacctgcatgttcataccaatc

SEQ ID NO: 849500 - DNA, 120 bp, Artificial Sequence
  ENSG00000229243_13 (sequence is synthesized)
attatctagacatgcatgcatttctagacaggctggaaatctccttttggatgtttcaggggcatctcaagcataatatgtccaacagaatattgatcttgccacagaacatgttctatg

SEQ ID NO: 849501 - DNA, 120 bp, Artificial Sequence
  ENSG00000229243_14 (sequence is synthesized)
catcttaccaattgcactttgtggtatgaacatcccatccacgtactcacatgggaaactcaggggccatgcttgggtgcttctcttccctacccctgcctctgtttcaactggcctaac

SEQ ID NO: 849502 - DNA, 120 bp, Artificial Sequence
  ENSG00000229243_15 (sequence is synthesized)
atcaagtcctattagctctgcctccaaaatgtaattcctattactccattcctctccaatacctccactgaaaacaccctcctctaaactaccatcttttaaactgttgtcagacatcag

SEQ ID NO: 849503 - DNA, 120 bp, Artificial Sequence
  ENSG00000229243_16 (sequence is synthesized)
caagagtaacctttataaatataaagcagattgatttcttcccctacttaaatggtcctattgcagttatagaaaaatcctaagtctttaacatgatcaagaagagcctacacaccaggt

SEQ ID NO: 849504 - DNA, 120 bp, Artificial Sequence
  ENSG00000229243_17 (sequence is synthesized)
ccttcccacctctccagctgtgtaccattccttctgactaattctgccccaccactctcccatccagctgtgcaaacacaccaaacaccttcccaatgcaaggccttttctcatgttatt

SEQ ID NO: 849505 - DNA, 120 bp, Artificial Sequence
  ENSG00000229243_18 (sequence is synthesized)
gaagacccaggattaaactgcctcttcagcccttcaaaagagttttacaaacatcctcttccttgaattaatccatatcctgcttaaaatacctagagttttttctcttttcttcactgg

SEQ ID NO: 849506 - DNA, 120 bp, Artificial Sequence
  ENSG00000229243_19 (sequence is synthesized)
agcctgactgatacaagtctgcctgttaaactctcttctaattcttatcataatatgtaattatatatttatttgtggggcaacttgtttccatctggatcactgctatgtccccagcac

SEQ ID NO: 849507 - DNA, 120 bp, Artificial Sequence
  ENSG00000229243_20 (sequence is synthesized)
ctaggatagtgtctgacatacaaaaaagagagtaatcaatatttggcaaaccaatgagagaatttagcactttcaactatgtgggtaattcatttgtcaactgatcatgaagataattag

SEQ ID NO: 849508 - DNA, 120 bp, Artificial Sequence
  ENSG00000229243_21 (sequence is synthesized)
attcacacttcagttacctcttatatctttaaataataacaaaatctcaaagtgtataaaaagaatgcaaatagagttattttttacagagtgccagatatttagaactgctgcctacag

SEQ ID NO: 849509 - DNA, 120 bp, Artificial Sequence
  ENSG00000229242_0 (sequence is synthesized)
acaccttcttagagacattgagattcctgacttggggttaccaatgccttgtggcctcagctgatagaatggacaaagtagaatgctcactctagaaatccatgggtggagtcgccagac

SEQ ID NO: 849510 - DNA, 120 bp, Artificial Sequence
  ENSG00000229242_1 (sequence is synthesized)
ctcatctggagttggtatctgggagagccaggagcgttattacgagctggtgtagaccagacaacctgaagactggttggagtggcagatgaaagcctgggaggcagcacgccatctgga

SEQ ID NO: 849511 - DNA, 120 bp, Artificial Sequence
  ENSG00000229242_2 (sequence is synthesized)
gctgtcgaaaaacacagatgaattagagcagagaaaactgtggagaacatatgctggatggaatcgaaatgctccatatactggaaaaactgttcctcaggatcaacaacaatgttaaac

SEQ ID NO: 849512 - DNA, 120 bp, Artificial Sequence
  ENSG00000229242_3 (sequence is synthesized)
ttcagtcttaaaagccggcccccaaacagcaagacaaatgaatatgcagcacattcccacctgtacttctgtttatctaattgaaaacatggagggaatttagtgaagcaaatattaaag

SEQ ID NO: 849513 - DNA, 120 bp, Artificial Sequence
  ENSG00000229242_4 (sequence is synthesized)
tacctttttcatttaactctttgttcaacagaccaaacaattgaacactgaagcagtccagatctcatattcttccccccgatatcatccattgctgccttaatcacaccactacatgtg

SEQ ID NO: 849514 - DNA, 120 bp, Artificial Sequence
  ENSG00000229242_5 (sequence is synthesized)
aacacaatggctttcttttcctttctttttttttttggaggaagggaagttagctaaaattgtatttttctggaatgataaataaacatgaatggctgaatacagtgtattccagcctta

SEQ ID NO: 849515 - DNA, 120 bp, Artificial Sequence
  ENSG00000229240_0 (sequence is synthesized)
acgccccttggatgcctgcagagaagctctggggcttcagtcaatgactcagggtagccaccgaacatgatgctcgggcagtgggtgccacctggactccactctcccctctctctggga

SEQ ID NO: 849516 - DNA, 120 bp, Artificial Sequence
  ENSG00000229240_1 (sequence is synthesized)
tcatagagtccaaggtgttctgtggcctctcggccaatcccagcagctcagcgtgcagaagaccgaggagccattggtcagtgtaggaggaattcaacacaacacgaaataatcaacaaa

SEQ ID NO: 849517 - DNA, 120 bp, Artificial Sequence
  ENSG00000229240_2 (sequence is synthesized)
ttcggggaatgttaatctgaccatcaccagttacaaatgatgtttcatgctaccttctattcctgccttcataaatcaagctctaaatctccaggaaaaaatgtgctcaggatggccaga

SEQ ID NO: 849518 - DNA, 120 bp, Artificial Sequence
  ENSG00000229240_3 (sequence is synthesized)
gaaatgtccttccaactgtgcatggaaaggtatgattttgtgcagcaggtgaaggactggttagagtaagtgtgtgctgagcttttgtgtttgaaagcgagcctgtgcacttctaacgat

SEQ ID NO: 849519 - DNA, 120 bp, Artificial Sequence
  ENSG00000229240_4 (sequence is synthesized)
tggaaggtttccttgccttctccgatcttacacacagcaaggacagcaaagccttccagacctgcctgtgacatgcactgcacattctaaagatgcctatgcaatggaaaacaccactgt

SEQ ID NO: 849520 - DNA, 120 bp, Artificial Sequence
  ENSG00000229240_5 (sequence is synthesized)
ctgctccagcacagctgccattcttccatcttatcgaccttaatgcaacaactcctcacaggcagagattttaaaatgtgttcttggcagaagagagactcaaagatgggacaaatgtgt

SEQ ID NO: 849521 - DNA, 120 bp, Artificial Sequence
  ENSG00000229240_6 (sequence is synthesized)
atttaaatgcctgttaaaatggaaacagacatagtatagtcagaggattgtggcagctaagaacatagtctctggagcaaatctgcatgggtggcaatgccaagcacatgaggtcctagt

SEQ ID NO: 849522 - DNA, 120 bp, Artificial Sequence
  ENSG00000229240_7 (sequence is synthesized)
tgtatgaacttaggaaaagaaaaagagaacatatatccccctaccttttgatttccaacagtctactgagaggccaagattatttgcagggaaagaaaaggggtcaaaatgttttgccag

SEQ ID NO: 849523 - DNA, 120 bp, Artificial Sequence
  ENSG00000229240_8 (sequence is synthesized)
taactcccaaatcatctacagccaaggagaaaagtgtttcaagacagaggtgctcaatggtatcaaatactgccaacagaccaagtaatacatgcattgaagtgtctactggatctagct

SEQ ID NO: 849524 - DNA, 120 bp, Artificial Sequence
  ENSG00000229240_9 (sequence is synthesized)
atatgaatttttaatttaggacacttaggccatactgaagcaaggtgacaaaatgaatagctacaatgtctcgtgaatcttgggtttccattcaccctggtattcaagagaaattcttgc

SEQ ID NO: 849525 - DNA, 120 bp, Artificial Sequence
  ENSG00000229240_10 (sequence is synthesized)
atcatggaagttgcagttggataggactttctcagctgaacactgtcatctgccagagcttcaggcaagaacccagaacagatgaaaccccagacatgacaaaataagccaaagaatacc

SEQ ID NO: 849526 - DNA, 120 bp, Artificial Sequence
  ENSG00000229240_11 (sequence is synthesized)
aggccaaggtgtgaaaggccagatgagaacaagcagcgtacacgattctgttgccaacagatctcccctaacagtgtcgtgcaccaaatttccacagtgaatgtcaggaaaaaatggcaa

SEQ ID NO: 849527 - DNA, 120 bp, Artificial Sequence
  ENSG00000229240_12 (sequence is synthesized)
ttgaggtgggtggtcaaaagagaagcacagtctatgatgaagtcaccccagagaagtcctttttccgttttctcctgagaaattaccagaagaaattaaaatccttttgagtattgcatt

SEQ ID NO: 849528 - DNA, 87 bp, Artificial Sequence
  ENSG00000229240_13 (sequence is synthesized)
tactcctgcagtaccagtttccaaaatgctttgtagcatcttctcaaaaaacaaatgggaagaagccaatcagaaataaggtagaaa

SEQ ID NO: 849529 - DNA, 120 bp, Artificial Sequence
  ENSG00000229240_14 (sequence is synthesized)
tgtctaatttagcagggaatgtcaccaggataagacaactgcaaaacccatttgggtgtgccaaatgacttcaaccgaacctccatgcaaacaacatacaagatgctttcttactaaatg

SEQ ID NO: 849530 - DNA, 120 bp, Artificial Sequence
  ENSG00000229240_15 (sequence is synthesized)
ctcaaacatcaagttctacatccagaactgcccctcaaccctcaccctctcgaactcagtaaaaaacaaccctctttctagctctgcatttccaatgaatgcctcttcctccagacatcc

SEQ ID NO: 849531 - DNA, 120 bp, Artificial Sequence
  ENSG00000229240_16 (sequence is synthesized)
ctagtttttgttcatgatactaggacattcctaaactggaaatgtgagaatcatgtggactgctcgctccctccttcattgcctgagtttaagcaaataatattgattagttttccccaa

SEQ ID NO: 849532 - DNA, 120 bp, Artificial Sequence
  ENSG00000229240_17 (sequence is synthesized)
cacattagcagctggatattcagctgtgaagctcaaggaagaagtcagggctggagatatatgaatgagaaccatctgcataaagatgatctttaaaatcatggagctggatgaaatctc

SEQ ID NO: 849533 - DNA, 120 bp, Artificial Sequence
  ENSG00000229240_18 (sequence is synthesized)
tctccactcctccccacaggggaatggagcaatgcccagggcgccctggggcacctcaacctgcagaggccagtcaagctggcaaggagtaacagaagactgatgaagaatggccagcaa

SEQ ID NO: 849534 - DNA, 120 bp, Artificial Sequence
  ENSG00000229240_19 (sequence is synthesized)
agagcagggcgctctgggcctagctcagaggacatgctcctgaggctagctatttttctgctactactctggctaagagagacatgtaagggctggatgtaaactcccagagggcacctc

SEQ ID NO: 849535 - DNA, 120 bp, Artificial Sequence
  ENSG00000229240_20 (sequence is synthesized)
attcctgccttcataaatcaaggtaattacttggcaatctggctatgccttgtaaggcaaaagagctgttcatttcttgtgtcaaatggtgaacagggagggagagtaaaatggtaaata

SEQ ID NO: 849536 - DNA, 120 bp, Artificial Sequence
  ENSG00000229240_21 (sequence is synthesized)
gaaacctggagggcttgatgtctctacaatgaagagagcacttcatggaggaggaagttgtccctaggttgaatgcagctgagggactaattaagatcacagctaaatggccactggatt

SEQ ID NO: 849537 - DNA, 120 bp, Artificial Sequence
  ENSG00000229240_22 (sequence is synthesized)
tacccagatggagaagaagaagaaaagcacctacctggcatggatgccattctttaagtacttacaatccattctccccttaccccgactcctacctttctccttgctgacagaacaggc

SEQ ID NO: 849538 - DNA, 120 bp, Artificial Sequence
  ENSG00000229240_23 (sequence is synthesized)
ctcccattacaaaggctgagaataccagaaacccaatgtcccctccctaagggatcaggcatggaaaagggattcctcccctaaaaaacagtcccatggaagaagatggacatggtcccc

SEQ ID NO: 849539 - DNA, 120 bp, Artificial Sequence
  ENSG00000229240_24 (sequence is synthesized)
acgtgacggctggagttgctgtgagcatgaggtgcgccttatcaacatgatgaagatggcagacggtgtaccagggtgctggctgtagtccgttttgtgctgttataacagaatcacaca

SEQ ID NO: 849540 - DNA, 120 bp, Artificial Sequence
  ENSG00000229240_25 (sequence is synthesized)
gactgagtaattgacaaagaacagagattcatttctcagagttctggaggctgggaatttcaagctcaaaacaccaacatccgtgtgagccttcttacggtgtcctcacatggcagacag

SEQ ID NO: 849541 - DNA, 120 bp, Artificial Sequence
  ENSG00000229240_26 (sequence is synthesized)
cagaagagcaagagaagacaaacattgggtcctcacatggcagaagagcgagaaaaggagtgaatctgcccccacaagccctttttacggtggcattgatccgctcatgacatcagagcc

SEQ ID NO: 849542 - DNA, 120 bp, Artificial Sequence
  ENSG00000229240_27 (sequence is synthesized)
ctcatgacctcaccacctcccattcattctcacctccccagagtcacattgaggagtaggtttccagcacatgaattgtgggggacacattcagaccatagaggctctgaattcaccctg

SEQ ID NO: 849543 - DNA, 120 bp, Artificial Sequence
  ENSG00000229240_28 (sequence is synthesized)
ggccttctctgacctcttgaaccataactacaaactcaacctgcatttttagcctgctgtaactaccgaggcttttcaatggattcaacctgagaaaaataataaagaaggacattgtaa

SEQ ID NO: 849544 - DNA, 120 bp, Artificial Sequence
  ENSG00000229240_29 (sequence is synthesized)
aatctttcagaaaatggcattgcgtactgaggacagtgagaaataggaggttatgtttcctatcaaagccctccatgtagaaaggtgagctctcagagatgatctgaattatctttgctt

SEQ ID NO: 849545 - DNA, 120 bp, Artificial Sequence
  ENSG00000229240_30 (sequence is synthesized)
ccaccgtttctgcctattgctacctgatctgtcacatccatgactgagaaatattgtcagctggagaggctgaagaaatctgaaaaaaggctgaaagctggaacaactgatggaattcta

SEQ ID NO: 849546 - DNA, 120 bp, Artificial Sequence
  ENSG00000229240_31 (sequence is synthesized)
cccaaaggctacttaaataaaacctgaataaatgaaagctctgtaggtaatttaaccctctggatggaatgacacaatttctacacccttaatgagtatcacgtgcattccagtggggag

SEQ ID NO: 849547 - DNA, 120 bp, Artificial Sequence
  ENSG00000229240_32 (sequence is synthesized)
agaaattccccaaattggtcctctttatgccttgtttccttcttgatgtgcaatttcatctttctggagctcatataaatctctcccagcctatattatcttcccattatgagccagagg

SEQ ID NO: 849548 - DNA, 120 bp, Artificial Sequence
  ENSG00000229240_33 (sequence is synthesized)
ccataatgacagccacctgttttaatgacagagccaggatggcatcattttcagcagagtgttgttaatctgggtaacctttcccttcaggaatgccatccccaccctctcgcagctacg

SEQ ID NO: 849549 - DNA, 120 bp, Artificial Sequence
  ENSG00000229240_34 (sequence is synthesized)
aggaggtgcctggagttttggagatgggatccacaggtctcttcacaccgaacgcctcttcccctcttgtgccagcttgatgctgacttcaatatgtttgggctgctgggcccatgggag

SEQ ID NO: 849550 - DNA, 68 bp, Artificial Sequence
  ENSG00000229240_35 (sequence is synthesized)
attgcaccactgcgctccagcctgggcaacagaccgaggctctggaaggtagaataaataaaagcatt

SEQ ID NO: 849551 - DNA, 120 bp, Artificial Sequence
  ENSG00000229240_36 (sequence is synthesized)
aaaaagaagaaagaaggtagaataaataaaagcattacattcattcattcatttttattgagatgtaattgaagcctaagcatcaaattcttaaagctccggatgagagacttggcaagt

SEQ ID NO: 849552 - DNA, 120 bp, Artificial Sequence
  ENSG00000229240_37 (sequence is synthesized)
gtcggttacttctttcaaagatgggactggtggctctgtagtcgtttgctcctcaaaggatggtctgaggaccagaatcatcagaaaccccgtgggagcttgtcagaaatacagaatttc

SEQ ID NO: 849553 - DNA, 120 bp, Artificial Sequence
  ENSG00000229240_38 (sequence is synthesized)
aggttttgccccagaccagctgaatcagaacatgcatttaaacacaatcctccggtcacttccatagccacctaaatttgaggagcaccattctacactgtgatatgccagcatcgacac

SEQ ID NO: 849554 - DNA, 120 bp, Artificial Sequence
  ENSG00000229240_39 (sequence is synthesized)
ttgtttcagcactttgcttttgcttgtttcagcaccagaacaaggttatggtggaaaacgctagaaatgaagattttgtccccagggatgggggatacaagttaccaaagtagtggcgag

SEQ ID NO: 849555 - DNA, 120 bp, Artificial Sequence
  ENSG00000229240_40 (sequence is synthesized)
gatctgtcacatccatgactgagaaatattgtcagctggagaggcatttatattgaaacctcattccatttgaacaagtggggtttcaccatgatttatttaaaacacatctaccgaaac

SEQ ID NO: 849556 - DNA, 120 bp, Artificial Sequence
  ENSG00000229240_41 (sequence is synthesized)
gcaacacccttcatcctaaaaaccagatcttgaaaaacatgattgtaacggggaaaacaactgctcagattgctaaattgtcctttgctacaagcaaaaataaaagcaaggagtcattta

SEQ ID NO: 849557 - DNA, 120 bp, Artificial Sequence
  ENSG00000229240_42 (sequence is synthesized)
tgaggcagacagaggtgaagaaacttgcacaaggtcaaagaacaaacgatacatattttaatatgatgagtctcctgggatcttttaaaacgaagttgttcatacattataataaatcca

SEQ ID NO: 849558 - DNA, 120 bp, Artificial Sequence
  ENSG00000229240_43 (sequence is synthesized)
atctgaaaaaaggctgaaagctggaacaactgatggaattctacgagactgtacaaacaaacaaacactagcaaaagaaataagctggacacaaggggaggattcatcatcaaatcatta

SEQ ID NO: 849559 - DNA, 120 bp, Artificial Sequence
  ENSG00000229240_44 (sequence is synthesized)
catgatttcatgttaatgtggggaagggaaatatttgtcaatggctatgtctcaaactgcccctggagaagtcgaaagaatacctgaagctacattagaagtacgattgagaaatcactg

SEQ ID NO: 849560 - DNA, 120 bp, Artificial Sequence
  ENSG00000229240_45 (sequence is synthesized)
atatattacttctcactcctttatcgccaggcagtacagtgattgcaaattgcagttagaatgggaatgtcggcatgttgtttattttcaacatgattcgacatgagaataacaaaaatt

SEQ ID NO: 849561 - DNA, 120 bp, Artificial Sequence
  ENSG00000229240_46 (sequence is synthesized)
ataaaagaacttaccttagaagtattattgtattaaatgaattaacatttgtgaggggcttagaatagtgcctgggagtcaccatgtgagtctttattaaataaaaaaaaaacactaaaa

SEQ ID NO: 849562 - DNA, 120 bp, Artificial Sequence
  ENSG00000229240_47 (sequence is synthesized)
aagagagcagcctctcccttgagtaataaaccagctacaaaagatcattcctggggaatatacgcgttgctgcttggtattcaaaatacagcgctacttaatagaattccgggtgccgac

SEQ ID NO: 849563 - DNA, 120 bp, Artificial Sequence
  ENSG00000229240_48 (sequence is synthesized)
ggtgatttctcagacatctgaatcattttcatctgtgtgattacagcacggagtgggtatcttctgacaacatagaggtggtctgcttcttagctgctctacaaaagtttggaagtcatt

SEQ ID NO: 849564 - DNA, 120 bp, Artificial Sequence
  ENSG00000229240_49 (sequence is synthesized)
cctcgttccattatttcaggattgacttcctcagcccaaacgtgggtagacacacaacaatctctctgcccacacatgatgggatgctcaggtcttcagggtggactttttccagagtga

SEQ ID NO: 849565 - DNA, 120 bp, Artificial Sequence
  ENSG00000229240_50 (sequence is synthesized)
aagcacaaagacaaacaattttagcggggagacacaaaccagaacactcggacagttttaaccctgaaaactggcacatgatggaaatgtttctttgggacgttatccaaagaatgaaga

SEQ ID NO: 849566 - DNA, 120 bp, Artificial Sequence
  ENSG00000229240_51 (sequence is synthesized)
cctacagtaatttaaatatttggatcacagtaaacagtttttttttggcaatattaatcttgatcctataagcaaagattttctttacataaaaaaagcaaccaaatgtgcttatctccg

SEQ ID NO: 849567 - DNA, 120 bp, Artificial Sequence
  ENSG00000229240_52 (sequence is synthesized)
ctgggctagagaagatgcagcatgagctcaggtgggaagcaaggtctgtgttgagatactgaatacaggaccaagaatacagaactggaggactatgggtgaagaaggtgcagaccaggc

SEQ ID NO: 849568 - DNA, 120 bp, Artificial Sequence
  ENSG00000229240_53 (sequence is synthesized)
tgtattatggaagtggtttccatccctctctccatccatgtgaacttgcccactttccagctgtatgatctgatgagcccaggtttctggcaaaatacagaggcccagcccctctggaat

SEQ ID NO: 849569 - DNA, 120 bp, Artificial Sequence
  ENSG00000229240_54 (sequence is synthesized)
gtttaaatttctgaattaagaaaagtgggcacccacacagtgtgtccaaacctacatccagctttctcattcccttgcatgatctgtacatatctaacaccccaagggcaattctttgtg

SEQ ID NO: 849570 - DNA, 120 bp, Artificial Sequence
  ENSG00000229240_55 (sequence is synthesized)
atttttctaccatgcttggacgttcttgcctcaagctcctatgggatcccacctctcctctgctggcttgctccaatacactcttcatgaagactttcctatggccccatactagaagca

SEQ ID NO: 849571 - DNA, 120 bp, Artificial Sequence
  ENSG00000229240_56 (sequence is synthesized)
ttttctctctcctcaaatgccatatttttcttctgtggtgaagatgtgtgtatgtgtcttcttacgctactcatgaccttgaaagcagaaagttgaaggtattcaggtgtctagcgggga

SEQ ID NO: 849572 - DNA, 120 bp, Artificial Sequence
  ENSG00000229240_57 (sequence is synthesized)
ttacacagtaggcactcatcccctcatacatttctttattctgtaaacttgaaagccaggcattgttctaggcactgaggacaccgaggcaataggacactgatttcctctttcatatgc

SEQ ID NO: 849573 - DNA, 120 bp, Artificial Sequence
  ENSG00000286168_0 (sequence is synthesized)
agaggccacaccatcctagcagtggagcaggaccagctgggacagggtccttctgtgacacctgctgcatcaccaggctgggtgaacggacacaattgccagaactcacagaatagaagt

SEQ ID NO: 849574 - DNA, 120 bp, Artificial Sequence
  ENSG00000286168_1 (sequence is synthesized)
atcagcaccgaaacctcacaggaaaaatggatatgaagctgtcaactcattttgaaaactgctggctcagatgacctcagcgataggaaacctctaaaagatcatgaatctaatcagaaa

SEQ ID NO: 849575 - DNA, 120 bp, Artificial Sequence
  ENSG00000286168_2 (sequence is synthesized)
ttcctgggggtgaggggcagagaagtgaggcaggcatcagaaaacaggagggtcgattaaaatctgtacattgacagtcaaccctcattatcctccctcaccgatgccagcaccccaccc

SEQ ID NO: 849576 - DNA, 120 bp, Artificial Sequence
  ENSG00000286168_3 (sequence is synthesized)
ctcgggtaaccagtgagtagaacaccaacaaccaacaagcaagcagctgccttccagagaggagaggagaaggttttctccagaggaaggaaaccatccagaccaaaggcatcacttact

SEQ ID NO: 849577 - DNA, 120 bp, Artificial Sequence
  ENSG00000286168_4 (sequence is synthesized)
aacatgcggaaaccccatcgactccccgaagcaaaacctctagacgagcctttcactaatgataacacactcattctccttcacgtgttactattaaatgtgaacagtgaagaatcacca

SEQ ID NO: 849578 - DNA, 120 bp, Artificial Sequence
  ENSG00000286168_5 (sequence is synthesized)
agctttgctattctagctttagttggaagaagaagcttccaagttaaagatggtagacgaaatactgacccagttgtgtcctttccctcctgagaaaccatggtggctatccacgatgga

SEQ ID NO: 849579 - DNA, 120 bp, Artificial Sequence
  ENSG00000254395_0 (sequence is synthesized)
atgaaacacctgtggttcttcctcctgctggtggcagctcccagatgggtcctgtcccaggtgcagctgcaggagtcgggcccaggactggtgaagccttcggagaccctgtccctcatc

SEQ ID NO: 849580 - DNA, 120 bp, Artificial Sequence
  ENSG00000254395_1 (sequence is synthesized)
ctctggtgactccatcagcagtggtaactggtgaatctgggtccgccagcccccagggaaggggctggagtggattggggaaatccatcatagtgggagcacctactacaacccgtccct

SEQ ID NO: 849581 - DNA, 120 bp, Artificial Sequence
  ENSG00000254395_2 (sequence is synthesized)
caagagtcgaatcaccatgtccgtagacacgtccaagaaccagttctacctgaagctgagctctgtgaccgccgcggacacggccgtgtattactgtgcgagatacacagtgaggggagg

SEQ ID NO: 849582 - DNA, 120 bp, Artificial Sequence
  ENSG00000286164_0 (sequence is synthesized)
agtaactgtcaaaagaaggaacgttcctgacctcggcccaagggtatcgctgtgctctggtttgtattagcttcagcaccgctgcaatctcactgaagttcctgtatccagcctcatgct

SEQ ID NO: 849583 - DNA, 120 bp, Artificial Sequence
  ENSG00000286164_1 (sequence is synthesized)
ttgctgtgcctgtaactgtcttctccccacagataacctgtcattgaagtacatgaagaaaatagtcaaatatgtgcccatgggttttcctgagtacttcctacagggtatgcagtccac

SEQ ID NO: 849584 - DNA, 120 bp, Artificial Sequence
  ENSG00000286164_2 (sequence is synthesized)
tctcttaggcaatgttacatcatctccttataactatgctacatgctctcagtattatttatatcatctttccttcccttccacccaacagtctcatttcaagagatttaacctaaaaag

SEQ ID NO: 849585 - DNA, 120 bp, Artificial Sequence
  ENSG00000286164_3 (sequence is synthesized)
atacaagaacaggtgcacatatatatatggacaaggttatgcatcacagcaatttttaaaacagcaacaaaaataatagcaatatggttaaatgtgtcaatcatgtattggcctataaaa

SEQ ID NO: 849586 - DNA, 120 bp, Artificial Sequence
  ENSG00000286164_4 (sequence is synthesized)
gtatgctatttcattagtctatagactaattgggctacagactaaccattaaatgctttccttcatgtggcactatactaagtgttaggaattcaattgtgaataagacaacagacatgg

SEQ ID NO: 849587 - DNA, 120 bp, Artificial Sequence
  ENSG00000286167_0 (sequence is synthesized)
aggccacacccgaggcctcccgggtctcatccacgcctctgggtccatcactaaacagaaggcacaatcccactaactcttactccatcgctgctcatgaaactcctgccagtaaggact

SEQ ID NO: 849588 - DNA, 120 bp, Artificial Sequence
  ENSG00000286167_1 (sequence is synthesized)
gggtcaagcacctgaaaaccagagctcgtccgtggcttcacttgttttggactaaggagctgaggagcgtgcaagactgtacttggagaatctgtttcttgctgccatttcgtcactgaa

SEQ ID NO: 849589 - DNA, 120 bp, Artificial Sequence
  ENSG00000286167_2 (sequence is synthesized)
cactattttttttctccttctttttttgtaagaaaaggagaacacataaaaccccaccagaacaaactccactcggccctgaaagtatttacaatcacggccctgaaagtactgaaagta

SEQ ID NO: 849590 - DNA, 120 bp, Artificial Sequence
  ENSG00000286167_3 (sequence is synthesized)
tttacaatcacgttacagttcattcactgctgcagaacctctctccagcgatcaaggtcgaagggagccgacgtcgccctctatcggctccctgctgcactagaaggtaatttaaacgaa

SEQ ID NO: 849591 - DNA, 120 bp, Artificial Sequence
  ENSG00000286167_4 (sequence is synthesized)
ggcttcttttctgtttgttgtttgtttgctcagtctatgttttgatttgctggtgagggaaggcagagagaggaagtggagcaggagcccagcgcgtttctatggccaccgcgaccacag

SEQ ID NO: 849592 - DNA, 120 bp, Artificial Sequence
  ENSG00000286167_5 (sequence is synthesized)
gcagagggggagccgtagcaggaaaggccaggccgcgctccgcactgcgggggccacgccaacctccatccgactcccacagaagcgcccacaaaaggcactttcatcacgtccagtgcc

SEQ ID NO: 849593 - DNA, 120 bp, Artificial Sequence
  ENSG00000286167_6 (sequence is synthesized)
cgctcctgggcccacggaatgcatttgttttagagtctctgcagaaacaatgtttccacatgccagccacgctccgcagacagaaagtttctttgtgttagtgcctggtgtgatgtgacc

SEQ ID NO: 849594 - DNA, 120 bp, Artificial Sequence
  ENSG00000286167_7 (sequence is synthesized)
tccactggtacagcatagcccgccgcaccccggggccacagcactcttccatcccgcagccgcatgaaccccagaaggagcttccactgcagatattgactgagaatcctccatgtgcca

SEQ ID NO: 849595 - DNA, 120 bp, Artificial Sequence
  ENSG00000286167_8 (sequence is synthesized)
agtactgttcaaaaacactgggaacccagcagggatgagccacaagtttccttgtctttacgaagctttcattctgagggagtggagagagacaagcaataaacaaccaatcaaaacaaa

SEQ ID NO: 849596 - DNA, 120 bp, Artificial Sequence
  ENSG00000254396_0 (sequence is synthesized)
caacaaaccccgaaaacagcaagtggatatggagaaattggatccctggtgcactgttggtgggaacacagaatggagcagctgctatggaaaacagtatggagattcctaaaaaattaa

SEQ ID NO: 849597 - DNA, 120 bp, Artificial Sequence
  ENSG00000254396_1 (sequence is synthesized)
aaatataattaccgtataatctcataaccccacttctgggtagatatccaaaagaattaaaagcaggatctcgaagacatctttgcatactcatgttctttgcagcattacttataacaa

SEQ ID NO: 849598 - DNA, 120 bp, Artificial Sequence
  ENSG00000254396_2 (sequence is synthesized)
cagccttagaaagaaagaagtcttgtcacatgctacaacttagatgaaccttgaggacattatacaaagtgaaataagctagtcataaaaaagacaaatattgcaggattctacttgtat

SEQ ID NO: 849599 - DNA, 120 bp, Artificial Sequence
  ENSG00000254396_3 (sequence is synthesized)
gagtgccaccacgctgggattttgtaattatgagcttcaaaagcagagacaacatcttctatttctgtgtctcttcctacggtgaataatatagtccttgccgtttcaatgttaacaaaa

SEQ ID NO: 849600 - DNA, 120 bp, Artificial Sequence
  ENSG00000286161_0 (sequence is synthesized)
agaactcccgcgagggtgcgggtcttcctccagcgctgggctacttggtcccgcccctcaagggttcactactattttccgcgttgctctcaatacctcgtggatctctgcttctctaag

SEQ ID NO: 849601 - DNA, 120 bp, Artificial Sequence
  ENSG00000286161_1 (sequence is synthesized)
tctgaaaccacactagaaacacagctgttttgtttggtgagcccctacatggatgtttccttccagttaaggggagccggattcggaccttggcgacaaacagacgccggggaaccctcc

SEQ ID NO: 849602 - DNA, 120 bp, Artificial Sequence
  ENSG00000286161_2 (sequence is synthesized)
aagaactgaggcagctgcacttccgcagacgtaagagacgaactcctggagctcaaggtcggctggggttgggttcctgtcccgcacgcgtggcccgcccgaaacccgctacatagtggc

SEQ ID NO: 849603 - DNA, 120 bp, Artificial Sequence
  ENSG00000286161_3 (sequence is synthesized)
gcgtcagccctggggaagcaaagcgcaaaattgttacggtgcccagacctgcgccgggaacctccggctgttccgctgggcgcggcgcctgtgcctcgcgcagccccgggacgggcaccg

SEQ ID NO: 849604 - DNA, 120 bp, Artificial Sequence
  ENSG00000286160_0 (sequence is synthesized)
gcagcagtaacccgcttggatccaggttgacagcacacgtcagaaacattgagaagaggaacagacccaagcatgaatgaggattcattttcatatctggatctccaagcacttcagtta

SEQ ID NO: 849605 - DNA, 120 bp, Artificial Sequence
  ENSG00000286160_1 (sequence is synthesized)
aaggtgaagagccgccttctcccaggtgttgcagtagatcaggagctgcactgtcagaagggatgggcaccacgcggagactgtccactccctgcagtgcacagcacgatgaagacttac

SEQ ID NO: 849606 - DNA, 120 bp, Artificial Sequence
  ENSG00000286160_2 (sequence is synthesized)
aaacctcgtgttgaaatttcatcgccaatgttggagcccatcttggtgaagacagcctgtctgtccacagggagaaccaggagaagcccaagtggtcttgactctgactcgctccaggcg

SEQ ID NO: 849607 - DNA, 120 bp, Artificial Sequence
  ENSG00000286160_3 (sequence is synthesized)
tctcctgttgatcaatgccacagtcctcctccaggaagaaaatgtgaagagttcaagcatcttttctggatcatccgaggaaaacagttcaagatttccaataatagtaaaaacatcaaa

SEQ ID NO: 849608 - DNA, 120 bp, Artificial Sequence
  ENSG00000286163_0 (sequence is synthesized)
gattcttactttatgaattggtgaattgttcttccctgctgtggacattagctgctgagatcttgggaggaactgaattcattttggagatccaagaatgctctcttggggtctggatcg

SEQ ID NO: 849609 - DNA, 120 bp, Artificial Sequence
  ENSG00000286163_1 (sequence is synthesized)
gtactcctttcctgcaacatatttctggcgacccagatgggactgtagtacagaaaccctgactcaatggctacctttggatacagggatacatgtgcaggtttgttacatgggaagatt

SEQ ID NO: 849610 - DNA, 120 bp, Artificial Sequence
  ENSG00000286163_2 (sequence is synthesized)
gcgtgatgctgaggtttggagtatggatcccaccacccgggtagtgagcataatatctggtcctccaggattctgtggacatctcttcctgtggaaagcttagagaaggaacattagtgg

SEQ ID NO: 849611 - DNA, 120 bp, Artificial Sequence
  ENSG00000286163_3 (sequence is synthesized)
ggtgctgtaagaaaactgcccatggctcctttcccagcataataagagagccccacctggaagactctaggttctcatcttcatgccccgatgtaaggagagtggtccgtaagtatatgc

SEQ ID NO: 849612 - DNA, 120 bp, Artificial Sequence
  ENSG00000286163_4 (sequence is synthesized)
ctaatttacatctagaactatcatcagctgagaaatgaactaacaagatggcatgtttaatgcatcgtatacagcatcttagttgtgcttcctctataaacagaatataaactttagtat

SEQ ID NO: 849613 - DNA, 120 bp, Artificial Sequence
  ENSG00000286163_5 (sequence is synthesized)
tacacttattgctcaggtggtagttacacaaataaaggtcacgcttggatcacaagtgatttcaagaagccagtagtttttttagttgtggaggaatagtttctataaagtaaatgatct

SEQ ID NO: 849614 - DNA, 120 bp, Artificial Sequence
  ENSG00000286163_6 (sequence is synthesized)
gatgggttttattagaaacacgtgtaatattatccaaacagcatgaactaggagtcaggagacataggttccaatcccatctttgtcatgtattagctattatatcttagacaatttata

SEQ ID NO: 849615 - DNA, 120 bp, Artificial Sequence
  ENSG00000286163_7 (sequence is synthesized)
gcctatctgggcctaattttttccatcaattaaaagtagataacattccttgccttgcctatcccctaggacagttatgagactcaaatgaaaaaaaaaaaaaaaccatacatgaaagag

SEQ ID NO: 849616 - DNA, 120 bp, Artificial Sequence
  ENSG00000286162_0 (sequence is synthesized)
ggggagggcccgcgcgcgcgctctggagactcctgcggtctccctagctgtttcttgaagctctgcataagcctcgcccgcggccgccgggttgcgtccgcacttctgcgcgctggcccc

SEQ ID NO: 849617 - DNA, 120 bp, Artificial Sequence
  ENSG00000286162_1 (sequence is synthesized)
tcccttgctcctctccctagcagtctccagggttttaccgggaggacctaggcaacggcctgagactccgagactctatgttgaagatgcctggactaacctactgaagatacgtggttt

SEQ ID NO: 849618 - DNA, 120 bp, Artificial Sequence
  ENSG00000286162_2 (sequence is synthesized)
aaatgcatgaatgatcccactgacaccacgtagagcacaaatgagttgcctccactgagcccagcccaaattgttatcctataaaatcataaaaacataaacagttgttttaagtcacta

SEQ ID NO: 849619 - DNA, 120 bp, Artificial Sequence
  ENSG00000286162_3 (sequence is synthesized)
agttttggatagtttgttatacaacaaaagctagctgaaacaaatgtattagctagagcagctgtgaatggcactatttgcttagttgattggctgaaatttggactcactggtaggtta

SEQ ID NO: 849620 - DNA, 120 bp, Artificial Sequence
  ENSG00000286162_4 (sequence is synthesized)
catttaatggtgttgagttgccagaatttctctggaataatgtataggaaggattctaatggcctaagccattagaatctctaaggagatagaaataaaggagtgatttattatatgtaa

SEQ ID NO: 849621 - DNA, 120 bp, Artificial Sequence
  ENSG00000286162_5 (sequence is synthesized)
gggctcggccggggagcgtgcggagtctgcacgccgcggccgtcggtccaacgcggggaggctcagggattttcggcagcagcgacttcatccaccccggaccgccggctggaggacgtg

SEQ ID NO: 849622 - DNA, 120 bp, Artificial Sequence
  ENSG00000286162_6 (sequence is synthesized)
cctgcagccggcgggtacctgcggccaattcggtggaacgaggacgcggactgcgaaggcaggtaccctcctctgaaatcaaaactctttaattaaagagacatgaaatgacaagatttt

SEQ ID NO: 849623 - DNA, 120 bp, Artificial Sequence
  ENSG00000286162_7 (sequence is synthesized)
aaaaaaatcccatgaggagaaggcattctaatttaggaagaactcccccttggaaaaaccatcagtgccggaagatttcctattgtgttgatccatggcaaaggagactgcagatacaca

SEQ ID NO: 849624 - DNA, 120 bp, Artificial Sequence
  ENSG00000286162_8 (sequence is synthesized)
agggatattatggagcccagacgacctgaataaaacccttccctactacaaggacagctgtcccttccctacacactccctacaggctgatgagagaccttttttggaagcagaaactta

SEQ ID NO: 849625 - DNA, 120 bp, Artificial Sequence
  ENSG00000286162_9 (sequence is synthesized)
tactttatgctgccttcttcctgactgccaggattatactcttcctttccatcccagatctagcaatgctgttgatgaggctaagtcatgatgatttctttaatatcttggaacacagta

SEQ ID NO: 849626 - DNA, 120 bp, Artificial Sequence
  ENSG00000286162_10 (sequence is synthesized)
gatgcctgatatttgcggatggactggagaaaaactgaaagtataaaccacaacatctcaagagatgtcatgaatggagaagcatatggtaaaatataatgaaaattaaatctactttac

SEQ ID NO: 849627 - DNA, 120 bp, Artificial Sequence
  ENSG00000286162_11 (sequence is synthesized)
aagtggtatcttcttgacaatagtggcattacctgagccagtatcagggaccagaaatacaacataaaactgatacatttctcttaatccccacatgattttgtttttgagtttatagtt

SEQ ID NO: 849628 - DNA, 120 bp, Artificial Sequence
  ENSG00000286162_12 (sequence is synthesized)
atcagtgatcattgattaataattgatcagtgatcagtgacaaatgtatactttttctacttgtattgttagccctcagattgatggtagttagcccaggaatggaaagaccaaggggag

SEQ ID NO: 849629 - DNA, 120 bp, Artificial Sequence
  ENSG00000286162_13 (sequence is synthesized)
gaggggcagatttcagcttactattagggagtaatttcaacaggatatggaagggatatccaaatggcagggaggccattgtgggatatgacagggacgccattgcaggaaatataagaa

SEQ ID NO: 849630 - DNA, 120 bp, Artificial Sequence
  ENSG00000286162_14 (sequence is synthesized)
cagaagatcctctgggggatttttgttctttgtgggagtttggattagctgctcctgcctgggatcctttcagctctcaattctgtgaaactcaacaatgaaagcagaggtgttttcctt

SEQ ID NO: 849631 - DNA, 120 bp, Artificial Sequence
  ENSG00000286162_15 (sequence is synthesized)
tacttagctagtgccaacacaaaactttgaactcaagtgacctgataacataactgtgggtcaataccgaggaactaacactcctagttccttttcaattccccaagacaacatcagtat

SEQ ID NO: 849632 - DNA, 120 bp, Artificial Sequence
  ENSG00000286162_16 (sequence is synthesized)
agattttcaagatgaatatatgcccagtaagtatggcttatcctgtactggaagaataggttctttcacacttaatgtgattattttttgtcttcatagggtgacttcaagtctttttta

SEQ ID NO: 849633 - DNA, 120 bp, Artificial Sequence
  ENSG00000286162_17 (sequence is synthesized)
atgtgaaccttacagtggggtttgttctgaatatatttatttgcatttgatatagagaggctcaaaaaaggaaaactgacggacctaataaaataaaaaaatagtagttgaataaaaaaa

SEQ ID NO: 849634 - DNA, 120 bp, Artificial Sequence
  ENSG00000286162_18 (sequence is synthesized)
tttctggagggacacacaaataatggttactctctctgcatgccatgggagatagtggtgaagggaggagggacacttttgcaattcatttgatctcttccacagtatctgaattatttg

SEQ ID NO: 849635 - DNA, 120 bp, Artificial Sequence
  ENSG00000286162_19 (sequence is synthesized)
caagtatacgtattccatttgtaataaaaaagtaaagactagaaattctttttggaaaactgtacatactgtagaacatggctctgtgttgtttgtctctggatttccagtgactatcaa

SEQ ID NO: 849636 - DNA, 120 bp, Artificial Sequence
  ENSG00000286162_20 (sequence is synthesized)
ataggtgctcaagaaattggataattatgtgaatgaattcatgaattgaatgaatgaatgaacagactatgctgttctgtttgaaaataagtatggacttacaagaatgaaaagtcttca

SEQ ID NO: 849637 - DNA, 120 bp, Artificial Sequence
  ENSG00000196295_0 (sequence is synthesized)
atagaaaacaattttgtcttgaaaaacaaggactctttttcccgtgtgggaccagttcctacttatgttttaccagccaattggactggaacctatacagttgtttatttagcccccgaa

SEQ ID NO: 849638 - DNA, 120 bp, Artificial Sequence
  ENSG00000196295_1 (sequence is synthesized)
attaatatagctcccaacaaccaatccttcattatacttttaactgcaaccaccagacacaaatgagccatccaactgataccactttcggtagagctaggaataacagcaggagtagga

SEQ ID NO: 849639 - DNA, 120 bp, Artificial Sequence
  ENSG00000196295_2 (sequence is synthesized)
atgagagttagcagccttgcagtttccctatcctattaccaatgcttgtccaaggattttatggaaagcttaggtgacattgcccaaaagtatcatcaccttacaaaatcagatagagtc

SEQ ID NO: 849640 - DNA, 120 bp, Artificial Sequence
  ENSG00000196295_3 (sequence is synthesized)
tttggcagtggtggctttgtaaaatagaaggggactggatctcctaaatgctgaagaaggtggcttatgtctttttcctagaggaagaatgctgtttttatgtcaaccaaacaggattag

SEQ ID NO: 849641 - DNA, 120 bp, Artificial Sequence
  ENSG00000196295_4 (sequence is synthesized)
taagggatgccacccaaaaactagccgattggtaccataagatatgacaacagctgtctgagtcatggggcgcctagtcaaaatgctaatttggggctcacatctccttcctctggccag

SEQ ID NO: 849642 - DNA, 120 bp, Artificial Sequence
  ENSG00000196295_5 (sequence is synthesized)
tccactattaattattatacttgccttggcttttggatcatgtttgttaaatcttttaaccagatttatttcttcttgcctagagaccattatgataatgcagcagggccaccagtcagt

SEQ ID NO: 849643 - DNA, 120 bp, Artificial Sequence
  ENSG00000196295_6 (sequence is synthesized)
taaccttgtctccactagacagagcaggttgcaggaatttagccaattcagaggtcttgttctccataatttggaattttccttcggatttgatcaagttggatagagttggtcaaaccc

SEQ ID NO: 849644 - DNA, 120 bp, Artificial Sequence
  ENSG00000196295_7 (sequence is synthesized)
aatgggaaaaagatgaaaacaacaagaaacagaaacaaacagcaacaacaacaacaacaaaaacagaccccacacctccagaccctgctgagggagggccacccatttctagtcccagct

SEQ ID NO: 849645 - DNA, 120 bp, Artificial Sequence
  ENSG00000196295_8 (sequence is synthesized)
cctactctaactatctgtgtgaccttaaacaaggcctttcccctctctggcctcagtatccgcctctgaataatggggctgggcctgccgaccttctggcccttttctgctctgtgagtt

SEQ ID NO: 849646 - DNA, 120 bp, Artificial Sequence
  ENSG00000196295_9 (sequence is synthesized)
tgtgaacttgtgatagggagacaggagtcctaggaaggaaatggaactggtgatagggagacaagagtcctaggaaggaaatggaacttgtgatagggagacaagagtcctaggaaatgg

SEQ ID NO: 849647 - DNA, 120 bp, Artificial Sequence
  ENSG00000196295_10 (sequence is synthesized)
aaggagagcacgtttcactctgtccagcagagggcagcagctacccacaaatcaacagctgagcaaggccagggctgtgtgggagctatgcacaggttctgcctccagaagccttcagtg

SEQ ID NO: 849648 - DNA, 120 bp, Artificial Sequence
  ENSG00000196295_11 (sequence is synthesized)
cctgcctctgagccagagggttccaagcagaagaggtcccgcccccggagagggacctcagagaggtcctccaagcccctctcagctcttacttacggcatcccagatgccctattcctc

SEQ ID NO: 849649 - DNA, 120 bp, Artificial Sequence
  ENSG00000196295_12 (sequence is synthesized)
ttctgcagagagaaggtggttcagccactaaatggtgctgggacctcgcagtttggtgggaaggaggaagcttactcaagcaaggaatatgagacaggcaaaaacccacgcataagccaa

SEQ ID NO: 849650 - DNA, 120 bp, Artificial Sequence
  ENSG00000196295_13 (sequence is synthesized)
acattcaccaccgcgtgacgcggcgccgggtcgccgccgcagattcgacacaaaacccggaaggaccccgccgaaggttttctccggttcgggagagagacggagtcccgctctgtcacg

SEQ ID NO: 849651 - DNA, 64 bp, Artificial Sequence
  ENSG00000196295_14 (sequence is synthesized)
tctccggttcgggagagagacggagtcccgctctgtcacgcaggctgccaggctggcgtattgc

SEQ ID NO: 849652 - DNA, 120 bp, Artificial Sequence
  ENSG00000196295_15 (sequence is synthesized)
atagtcaagaccctccaccagtaacatatattggcgagccagccaggagcttggaaccctcggtggacagtgcctaagcacagaggcaaccacaggtttctaacagggccactctctggt

SEQ ID NO: 849653 - DNA, 120 bp, Artificial Sequence
  ENSG00000196295_16 (sequence is synthesized)
gaaactgaaaggtttctgtgtgaaagtgcctgaccaccactgcccaattcagaccactacaggaaacactccatttattccacctgacttcccacttggctgcatcctcaaccattgaaa

SEQ ID NO: 849654 - DNA, 120 bp, Artificial Sequence
  ENSG00000196295_17 (sequence is synthesized)
tgaatttgaccctgataatctaaggaggaaacatttgatattcttttgcaataatacttggccccagtattgtttggaatctggagtttgctgttgaatgggaaagcaggatgacgttgc

SEQ ID NO: 849655 - DNA, 120 bp, Artificial Sequence
  ENSG00000196295_18 (sequence is synthesized)
gaccatttcattaagtttttaagtgcctggtaattgcttggttatgaccggtgtctgctccatggcagcctcttcctgggaccagatctgaacagtctggagagaggagctgtggtggca

SEQ ID NO: 849656 - DNA, 120 bp, Artificial Sequence
  ENSG00000196295_19 (sequence is synthesized)
gcagacagatctctgcttcaggggccaggtgtctagaagaaatgctgaggcagtgtcacgctggtgtctgtcctccttacagaatgcctgaacagttccattgactcaaagtgaagatca

SEQ ID NO: 849657 - DNA, 120 bp, Artificial Sequence
  ENSG00000196295_20 (sequence is synthesized)
ccacacaggcacctgatcatcacctggagagacacaaacaaatcctcttcctcatattaaagaatggaattcttgtgcatcagcaaagaccacagacaccaatgcatctgccctttaagt

SEQ ID NO: 849658 - DNA, 120 bp, Artificial Sequence
  ENSG00000196295_21 (sequence is synthesized)
ttaaaggaccaaagagtcctattggagaaaaaagaaaaagcatttttatccttaccttcccccgctctattccttttatatttgccctttgagccatagctaatttccataattcagaat

SEQ ID NO: 849659 - DNA, 120 bp, Artificial Sequence
  ENSG00000196295_22 (sequence is synthesized)
tttaaaaatgtttggttcacagccttcactggattacctattggagcaaacaaagtgtaaccatgtaaaacctgtgagcttgtattgatatctcatggctagagttccaagcgaatgggt

SEQ ID NO: 849660 - DNA, 120 bp, Artificial Sequence
  ENSG00000196295_23 (sequence is synthesized)
tgtattgatatctcatggctagagttccaagcgaatgggtctcatgagatctgatggttttgaaaatgggagttgccctgcacaagctctccttttgcctgctgccatccacataagatg

SEQ ID NO: 849661 - DNA, 120 bp, Artificial Sequence
  ENSG00000196295_24 (sequence is synthesized)
agatgaaaacaacaagaaacagaaacaaacagcaacaacaacaacaacaaaaacaatgcatttaattaaatgaagatgagctcatgctggagtagggtggactctgaacccagtgggaca

SEQ ID NO: 849662 - DNA, 120 bp, Artificial Sequence
  ENSG00000196295_25 (sequence is synthesized)
agcgtccttattaagaagagggaaatctggacacacacagagcagagaccgccgtgtgaagatggaggcagagatcggagagatgctgccacacgccacaaatgcctggggctcccagaa

SEQ ID NO: 849663 - DNA, 120 bp, Artificial Sequence
  ENSG00000196295_26 (sequence is synthesized)
actacacggagcctcccccagcggcttcagcaggagcatggctcggccaacactttgatcttggtcttccagcctccagaacgttttcctaaaattcccttttccactggtgtgtggtgc

SEQ ID NO: 849664 - DNA, 120 bp, Artificial Sequence
  ENSG00000196295_27 (sequence is synthesized)
aagatgaggcacattttccatggatggtgaacagagggaggagccttttgatcacaaccaggtcaccccacttctaagccactgtgcctccagccccacaagactaaggagagagagcgc

SEQ ID NO: 849665 - DNA, 120 bp, Artificial Sequence
  ENSG00000196295_28 (sequence is synthesized)
aggtcctaaactgtagcttgcaatgtgcctgtttccagaaaccaaggtgaaagtgcttttagacagtgttcccatgcaagagtcccttcccagcttttttctggaaatgcatgtttctct

SEQ ID NO: 849666 - DNA, 120 bp, Artificial Sequence
  ENSG00000196295_29 (sequence is synthesized)
gaactctgagtcccaagaaaaatcacttgagacaccaagaaaatgggggaagtgctaaaattgtgtgggaattcaagcttaacaataaacatcaagacatttttgataaaaatgaatcca

SEQ ID NO: 849667 - DNA, 120 bp, Artificial Sequence
  ENSG00000196295_30 (sequence is synthesized)
ctgacatcggggaggagcaagagaacagcacgctgacactgggtcagaggctaagaccgacatttctgggaaccactcccggaagggcacagaggagacgctttcagcctctcatcagcc

SEQ ID NO: 849668 - DNA, 120 bp, Artificial Sequence
  ENSG00000196295_31 (sequence is synthesized)
caatagccaagtgtaatcatcagtaaccctgtgttctatccacaggtaaaaaacaatcatcctcttcattatgggtttcaattttaaatgtaatacatttttagaaatgcctatttcctt

SEQ ID NO: 849669 - DNA, 120 bp, Artificial Sequence
  ENSG00000196295_32 (sequence is synthesized)
ttataatctctttatataatctaggttattctggctcttaggtcttcatttagctactgaaaagatttgatctcaaatcaatgatctaaccacccatgaccatctcccacctctctcccc

SEQ ID NO: 849670 - DNA, 120 bp, Artificial Sequence
  ENSG00000196295_33 (sequence is synthesized)
gtacaccccccagcatgaattctgggaactcaggtaaaatgctttctggaaacctgcctgtattagtctgttgtcaagctgctaataaacacatacccgaaactgggtagtttataaagg

SEQ ID NO: 849671 - DNA, 120 bp, Artificial Sequence
  ENSG00000196295_34 (sequence is synthesized)
gtactatttctaagctaatacaagtccatttcacatagataacacattacatttctacagaaatcattgtattaagcctactgaaatgcatcttgctgttttttgaactaaagacccatg

SEQ ID NO: 849672 - DNA, 120 bp, Artificial Sequence
  ENSG00000196295_35 (sequence is synthesized)
tataagtgatagttctttcatatcagtacatgaatctgaggagaccctaattttcagtggccacaggtccttaatctgctgtgcttttccctggcagtgctcaacagctgggagctgccc

SEQ ID NO: 849673 - DNA, 120 bp, Artificial Sequence
  ENSG00000196295_36 (sequence is synthesized)
catggaaagggactactggcctaatcccagactggggtttgactaaaaggttgcgccaggaggacaaaagggcaagagagtaagaccaccagcaagagaatgaccaaaatgatagacttg

SEQ ID NO: 849674 - DNA, 120 bp, Artificial Sequence
  ENSG00000196295_37 (sequence is synthesized)
ggccatattttgggctaattgtgccccccaaaatatatatgttgaagccctaacccccaatgtatcagtagttggagatggggccttttggggggtaattaggtttagatgaagttacaa

SEQ ID NO: 849675 - DNA, 120 bp, Artificial Sequence
  ENSG00000196295_38 (sequence is synthesized)
aatagagccctcatgctgggattagtgctcctataagacatcaggaagtttgctctctctttctgtcgtgtgaggatacagtgagaaggcagccatctgcaagctaggaagagggcccat

SEQ ID NO: 849676 - DNA, 120 bp, Artificial Sequence
  ENSG00000196295_39 (sequence is synthesized)
gccagaacctgaccatgctggcactctgattttggatttctagtctctagaactgtgaataagtacgtttctattgcgtaagccacccagtctatggtattttattatggcagcctgagc

SEQ ID NO: 849677 - DNA, 120 bp, Artificial Sequence
  ENSG00000196295_40 (sequence is synthesized)
tgactaatataggcttctagattggaaggggaaggaagtaaagagagagaattgatagggataaagaagaggcatcaagagacttggggtatctgctactgaagacatcagctctctatg

SEQ ID NO: 849678 - DNA, 120 bp, Artificial Sequence
  ENSG00000196295_41 (sequence is synthesized)
cggacaaactgcagcccttttatacatatggagtactttctgggccagtcctgtggcccctttcaaatgtatggtgttgaaacgtagtaagtttatgtttttaaggtctgcccctccctt

SEQ ID NO: 849679 - DNA, 120 bp, Artificial Sequence
  ENSG00000196295_42 (sequence is synthesized)
ctttggtgctgctgtcctaagaagggtcaggcctagtcagcatatggtgctctcctttggtgctatttggctccagtgtctttggagtctgaggaggtttggcctttaaaaatcaaactg

SEQ ID NO: 849680 - DNA, 86 bp, Artificial Sequence
  ENSG00000196295_43 (sequence is synthesized)
aaacctgtgagcttgtattgatatctcatggctagagttccaaggtaaaagctattggatcttcgtttgtgtgtgtgtatacatgt

SEQ ID NO: 849681 - DNA, 120 bp, Artificial Sequence
  ENSG00000196295_44 (sequence is synthesized)
gtttcgtctggaaagatgggacaacatgaagcagggagggggctccctggtgacagttccttgttcaaaatgccaagaacctggatgactcatagtcaagaccctccaccagtaacatat

SEQ ID NO: 849682 - DNA, 120 bp, Artificial Sequence
  ENSG00000196295_45 (sequence is synthesized)
ctaaacctgtgaacctgtagaagacctgaagtacctgtttaaaaggcagccaaaagataagtaaattcctatcaactttccttggtgtccttcttgtatatttactgtaagctggatata

SEQ ID NO: 849683 - DNA, 120 bp, Artificial Sequence
  ENSG00000196295_46 (sequence is synthesized)
caaaaacaagagaaggtggttcagccactaaatggtgctgggacctcgcagtttggtgggaaggaggaagcttactcaagcaaggaatatgagacaggcaaaaacccacgcataagccaa

SEQ ID NO: 849684 - DNA, 120 bp, Artificial Sequence
  ENSG00000196295_47 (sequence is synthesized)
tagtaaggagaaattaagaccagctggctgttagtcttaactctagccaagacaaaactccaattcagctacttacctagtaatgagtctcaggctgaagtctgctctctcccatcctag

SEQ ID NO: 849685 - DNA, 120 bp, Artificial Sequence
  ENSG00000196295_48 (sequence is synthesized)
aagcaggaaaaaactgaaactcatcttccctgctggaaacgagctcaaactccagaaaggagttacctgccttccatcatcatggacgcaggaaaatttgccttccttgttggaagcaag

SEQ ID NO: 849686 - DNA, 120 bp, Artificial Sequence
  ENSG00000196295_49 (sequence is synthesized)
taaaactccaaaaaaggagttgcacagcaaaataaacttcagatctcaacaaatttggggagatcagggattctctgggggtggggtggctcccaggcctcagccaattgtcctattggt

SEQ ID NO: 849687 - DNA, 120 bp, Artificial Sequence
  ENSG00000196295_50 (sequence is synthesized)
ttcagccataaagacagctcaggctgctaccacgcactgataggagatttgtcaaagatcgaggcatcttcactcagaatccctctgtgattaccaattgtgaacacaaaatatctgata

SEQ ID NO: 849688 - DNA, 78 bp, Artificial Sequence
  ENSG00000196295_51 (sequence is synthesized)
aagtttattttgccaaggttaaggacacatccatgacatagcctcaggaggttctgttgacgtgtgcaaggtggttat

SEQ ID NO: 849689 - DNA, 120 bp, Artificial Sequence
  ENSG00000196295_52 (sequence is synthesized)
tttagggagacatgagatatcaatcaatatatgttaagacatatatcaggtggtccaaaaaggtgggatgactggaaacagggagggggcttccaggtgataggtagataagagaaaaac

SEQ ID NO: 849690 - DNA, 120 bp, Artificial Sequence
  ENSG00000196295_53 (sequence is synthesized)
tacacaatttacaggactaatcacttaagccttagcctggctcagtgaaacaacagggcaaaggaagcaatcagctatgcatttgtctcacgtgagcagagggatgactttgagttctgt

SEQ ID NO: 849691 - DNA, 120 bp, Artificial Sequence
  ENSG00000196295_54 (sequence is synthesized)
tttgcgtgcagtttccagattgacttttccctttggcttagtgactttgaggtcccaagatttattttcctttaacatttacaaggagaagtgaagaaataagtaaattagagagctaga

SEQ ID NO: 849692 - DNA, 120 bp, Artificial Sequence
  ENSG00000196295_55 (sequence is synthesized)
aagtgaagaaataagtaaattagagagctagaaggatggaagtttacagttagagagagtgggatgttgaaggtaatactggttgcatatttcttatccaaaatgcttgggaccagaagt

SEQ ID NO: 849693 - DNA, 120 bp, Artificial Sequence
  ENSG00000196295_56 (sequence is synthesized)
atatttgcattatacaggttcagcacccctaatctgaaaacgtgaaatccaaaattctccaatgattgtttcctttgagcatcacaatggtgctcaaaaggttttggattttagagcatt

SEQ ID NO: 849694 - DNA, 120 bp, Artificial Sequence
  ENSG00000196295_57 (sequence is synthesized)
tcaaatttcagattttcagattagggataataaacctatatctcagaaacggtacatttctgaataatgacaaattgtcattatttgccatgagaattgtcattaatgtgggtggagatg

SEQ ID NO: 849695 - DNA, 120 bp, Artificial Sequence
  ENSG00000196295_58 (sequence is synthesized)
gggatgattgtaggtcaagagactgaagcaatagggtaggcttgggtgttagtacggcccttcatgggaatgtgttgatgtcatccagggtcacgggaggcttctgagtgggaaggaagc

SEQ ID NO: 849696 - DNA, 120 bp, Artificial Sequence
  ENSG00000196295_59 (sequence is synthesized)
tgagagcctatgattacggtcttcactgatgaaggcagacagtaggaggttggcagatggtgggcactgactagactggaagtgccaagaacttcagtggagcaaggttttacccaagac

SEQ ID NO: 849697 - DNA, 120 bp, Artificial Sequence
  ENSG00000196295_60 (sequence is synthesized)
acagaggttgtggtctagagcagcccagggatgaaggatcacccattggagaggactgtggggaaagcagagtcctgggagatgaaccaagcatcagttgaggctggaacagttaaaatg

SEQ ID NO: 849698 - DNA, 120 bp, Artificial Sequence
  ENSG00000196295_61 (sequence is synthesized)
tatacatcaaattctctccaaggacactgtacccttggctgaaaattccctccttagtctacttcccatcccaaattctacccatccacactgtggcatcctaggtctctctagcagctg

SEQ ID NO: 849699 - DNA, 120 bp, Artificial Sequence
  ENSG00000196295_62 (sequence is synthesized)
aacaggcaggcctctgtaacaactgtttcagcgctgactgagtggttaagttaaatattaaaagttgaaagagccagtaaccttatacaaaggctggaatagaacaaaagcccaccacaa

SEQ ID NO: 849700 - DNA, 120 bp, Artificial Sequence
  ENSG00000196295_63 (sequence is synthesized)
gtttttgcctaagtctttcctgtgccttgaaccatgacaagaggaggaaggaattcttaaccagacccatttaggattaagtaagtttttattggctgggtacggtggctcacacctata

SEQ ID NO: 849701 - DNA, 79 bp, Artificial Sequence
  ENSG00000196295_64 (sequence is synthesized)
aggtcaggagtttgagaccagcccaaaatgagccaagcatggtggcgggagcctgtagtcccaactactcaggaggctg

SEQ ID NO: 849702 - DNA, 79 bp, Artificial Sequence
  ENSG00000196295_65 (sequence is synthesized)
aaactctgtctctactaaaagtaccaaaatgagccaagcatggtggcgggagcctgtagtcccaaaagcggaggttgca

SEQ ID NO: 849703 - DNA, 120 bp, Artificial Sequence
  ENSG00000196295_66 (sequence is synthesized)
ctcttcctgtttttgcccgaatgatgaaggaggaagtttacatcttgctccctggggacaggcagagacagtgtgtgcacttccatcctacagggaccagatctgaacagtctggagaga

SEQ ID NO: 849704 - DNA, 120 bp, Artificial Sequence
  ENSG00000196295_67 (sequence is synthesized)
acaatcatggtggaaggcgaatgagaagcaaagtcacatcttgcatggcagcagggaagagagagtttgtgtaggggaacacccctttaaaaaaccatcagatcttgtgacactcattca

SEQ ID NO: 849705 - DNA, 120 bp, Artificial Sequence
  ENSG00000196295_68 (sequence is synthesized)
cgcccccatgattcaattacctcccatgacacaagggaagtataggagctacaattcacaatgagatctgggtggggacacagacaaaccatgtcaccgcctaaaaccaactcaatagtc

SEQ ID NO: 849706 - DNA, 120 bp, Artificial Sequence
  ENSG00000196295_69 (sequence is synthesized)
gtcaccgcctaaaaccaactcaatagtctaaggaatttgactggggagaatctggagaggatttaattaatttggcaaaaggattagcaattgaatctaagtgagaaaagagaattcttg

SEQ ID NO: 849707 - DNA, 120 bp, Artificial Sequence
  ENSG00000196295_70 (sequence is synthesized)
gaggaaaaaaagatgtttagttacactgagaaattaaaacctgaagtaattgcctttgagatttttttcaggaaatgagtattgattgcctactgtgtgtcaaattatgtgtttcatgtc

SEQ ID NO: 849708 - DNA, 120 bp, Artificial Sequence
  ENSG00000196295_71 (sequence is synthesized)
aaagactccaaagtagataagatataggcccagccttggggagctcattgagtcacagagaaagtttgaatgtttcagaggaatcatcaagaacaggggatcagcaatctattatatttt

SEQ ID NO: 849709 - DNA, 120 bp, Artificial Sequence
  ENSG00000196295_72 (sequence is synthesized)
aattgcgtcttttcatgattataaaagcaatgcatgcgtgctgaagagaatttggaaaaacaaagaagaaattaaaaatcgtctctgatcctgccaccagaaataaccactgttagcaat

SEQ ID NO: 849710 - DNA, 120 bp, Artificial Sequence
  ENSG00000196295_73 (sequence is synthesized)
tgtatcacttctgtaggtctacatggttatcataataagctctagtattgattacatgcatctcatgtaccagagattatgctagactctcatttaatctgtacattagccctatgaagt

SEQ ID NO: 849711 - DNA, 120 bp, Artificial Sequence
  ENSG00000196295_74 (sequence is synthesized)
agggaccatcattctcctcattttacagatgaggaaacagaggcttggagaggttactctgcctaaagtctcatagctagcgagtggcagagattggactcacccaagctttgtcttatt

SEQ ID NO: 849712 - DNA, 120 bp, Artificial Sequence
  ENSG00000196295_75 (sequence is synthesized)
ctcaagctctcaaccaacccggtggtgagaagagccagcagcaaagcctgtcatctttgtcttctttttttttctaacctcaaatcagggagaaaatgccctttgtcattagaagggcaa

SEQ ID NO: 849713 - DNA, 120 bp, Artificial Sequence
  ENSG00000196295_76 (sequence is synthesized)
ggcaattctgaagacagcccagttggcttgtctccgatttggctttcaggggcctgtctgatacctatggagagacgagggctgaacaagctgtactctcaaaacaaaacaaagcaaaac

SEQ ID NO: 849714 - DNA, 120 bp, Artificial Sequence
  ENSG00000196295_77 (sequence is synthesized)
aaaactttagtctctttagggactctctgatagtaatgcagagggagaaaggctttctttgtctcactgggaggaaggttccctacggaaattgaaggcagtgcctgttgacatagcgct

SEQ ID NO: 849715 - DNA, 120 bp, Artificial Sequence
  ENSG00000196295_78 (sequence is synthesized)
gccacctggtggaaataatggtgtaggacatcatgtccagcaccactagcgctgagacactccctgggaagagaaatgtttggagagaaatttgcaagaagttggaagtctcgcagtagc

SEQ ID NO: 849716 - DNA, 120 bp, Artificial Sequence
  ENSG00000196295_79 (sequence is synthesized)
aggtaggaacaagaattataactgctactgtgaccccctaaggctcctcacatcctcttaaggcttggagaaactcacactatgtatattttcctgtatttttgaaaaatgttttccttt

SEQ ID NO: 849717 - DNA, 120 bp, Artificial Sequence
  ENSG00000196295_80 (sequence is synthesized)
atgctttgttgtaatgaaattacctctgatggtcacataccttaaatatttagtatatatatgaatactaaatgtccattttcaggagttagtttacctgcatctaaaatcaggaatagg

SEQ ID NO: 849718 - DNA, 120 bp, Artificial Sequence
  ENSG00000196295_81 (sequence is synthesized)
tcacagagtaactgagcaaaaagtgctgttaggtttgtgcatttcaccctttgcctgggatgagaggacctcaatcatcttggtactaatgacaggaaaagtgccctcctatccatgtgt

SEQ ID NO: 849719 - DNA, 120 bp, Artificial Sequence
  ENSG00000196295_82 (sequence is synthesized)
atcggctacgtgactcaagtctccttatttccttttctagcataacaaggggttgttactgttgttttacatctgtgttaatgagataaataagtttaaaataaaaagatgtgtaccagg

SEQ ID NO: 849720 - DNA, 120 bp, Artificial Sequence
  ENSG00000196295_83 (sequence is synthesized)
gaaccaaatgacagcaatagccaagtgtaatcatcagtaaccctgtgttctatccacaggtcttcatttagctactgaaaagatttgatctcaaatcaatgatctaaccacccatgacca

SEQ ID NO: 849721 - DNA, 120 bp, Artificial Sequence
  ENSG00000196295_84 (sequence is synthesized)
tgttccagcaggagtgaagaggaacaggaaaacgagtggcagtagccctgaaacagccacttctggtggttgccactcacctgaggatgtgagtcttggcaggccaggcttctggggaca

SEQ ID NO: 849722 - DNA, 120 bp, Artificial Sequence
  ENSG00000196295_85 (sequence is synthesized)
aggccaggcttctggggacagggggcccaaggcacagtagacggtaatttttaagattatggatggactgttgggtactggttaagaattctgggtttggccaggcacagtggctcatgc

SEQ ID NO: 849723 - DNA, 120 bp, Artificial Sequence
  ENSG00000196295_86 (sequence is synthesized)
tatcttcagaattgtcagcatacatttttgtctgggttttatatttgtctttgctagaaatgttgaagtgtcagcatttggcatagaagattataaagctattaacccagccaaaacaaa

SEQ ID NO: 849724 - DNA, 120 bp, Artificial Sequence
  ENSG00000196295_87 (sequence is synthesized)
atggccttagtttatgtggcttctttgacaaatgagactaatttaatattgttagctaaatcttctgggttattggcaaaaacacctatgtatttaactgtgaggttcttatttaggtga

SEQ ID NO: 849725 - DNA, 120 bp, Artificial Sequence
  ENSG00000196295_88 (sequence is synthesized)
acacataatgttcattggctattaaaaatggttaacaaataaataactaactttaaatgatggtgtctaatatctcagttttcagaagtaatctagataaactgttaaaaatgaaagact

SEQ ID NO: 849726 - DNA, 120 bp, Artificial Sequence
  ENSG00000196295_89 (sequence is synthesized)
taagtacatgtaaatgggatgaatgattaggtaaattttgtgtaatttaaaatcttaaaagtatttttgatgcccattggatatctcagtcatttccaattaagaaagggttatgatagg

SEQ ID NO: 849727 - DNA, 120 bp, Artificial Sequence
  ENSG00000196295_90 (sequence is synthesized)
gaggaatatgtttccaaaaattgtggaattattctcatctataaaatgctaatatctgatagtttaggattttttgcttcctaaggtttcactaaaatttaaggttactaagatgatatg

SEQ ID NO: 849728 - DNA, 120 bp, Artificial Sequence
  ENSG00000196295_91 (sequence is synthesized)
gtttggctttgcatccccacccaaatctcttcttataactcccataattaccgtgtgttgtggggagggatccagtgggtgagagatgattgaattatgctgttctcatgatagcgaatg

SEQ ID NO: 849729 - DNA, 120 bp, Artificial Sequence
  ENSG00000196295_92 (sequence is synthesized)
tccaaatggattgaatcacttcttttaaagtgttttaattaatttttatctatagaacaaaataacaaataagtattttttttttataccataatggtcacccacagcctgtgtatacta

SEQ ID NO: 849730 - DNA, 120 bp, Artificial Sequence
  ENSG00000196295_93 (sequence is synthesized)
agaccatgcatactgataatcagctttattttacaaaagagtttcgctttacccctctggtaattaatggattctgggtatttattaaaaactttaacacaaagactgttaaataccacc

SEQ ID NO: 849731 - DNA, 120 bp, Artificial Sequence
  ENSG00000196295_94 (sequence is synthesized)
ccttagcttgggacgtgtgcaaagagtgacagagttttcactactgtgtgtctatccaggagccaccttgaaagctccacaagtattaatttggggattacaaagacacttttagcaagt

SEQ ID NO: 849732 - DNA, 120 bp, Artificial Sequence
  ENSG00000196295_95 (sequence is synthesized)
ctcctgcgggcatctgagatgtggtttctgctccacacttcctgggggagcagaggaactcctcagcctcctctcaaacttctctcaggttgtgctgttcactccctccccaggcttccg

SEQ ID NO: 849733 - DNA, 120 bp, Artificial Sequence
  ENSG00000196295_96 (sequence is synthesized)
gtccacacggacagctctgaccccgagaagattctttgtcttagacaaacatctgcctccctgtaacttcggttcaccgatacttgctctgcactccagggccatacagaacccctctgc

SEQ ID NO: 849734 - DNA, 120 bp, Artificial Sequence
  ENSG00000196295_97 (sequence is synthesized)
tccctctgcccttagccattggctcctaggagacactagcttgtccggccgtcgctttaaactgtctagttccaactccctcagaacttcctcagtgatgcagtttcctgacggtcatat

SEQ ID NO: 849735 - DNA, 120 bp, Artificial Sequence
  ENSG00000196295_98 (sequence is synthesized)
tttttttttttttttaacaaaaatgtttctctaagtgtctgaactactctcttcctaactttaaacacccaacagtaacctctgttgttactctttgactaaaataattattttagttaa

SEQ ID NO: 849736 - DNA, 120 bp, Artificial Sequence
  ENSG00000196295_99 (sequence is synthesized)
aaaaaaaaaagaagaaagaaagaaaccaggtaacactatacaaaaggaagcagtgtaagatctgagacgaaattttctcttttacactctttgagttccataaggagaaacagaggttgc

SEQ ID NO: 849737 - DNA, 120 bp, Artificial Sequence
  ENSG00000196295_100 (sequence is synthesized)
ttgctccccaaaagggagtctagtgccttctctgttttctttaaggaatcccagggtgttagaaactattttagattcctcatgcagcacagggtagcaagagaaagaagaggcagcaga

SEQ ID NO: 849738 - DNA, 120 bp, Artificial Sequence
  ENSG00000196295_101 (sequence is synthesized)
gcagcagaagtaaaatgaagaaaacagaatttggttgacggagaagaaaaaaacttttgctcaaaaagttgaaggagagaaataaaaaaggccttaactacacacacacacacacacaca

SEQ ID NO: 849739 - DNA, 120 bp, Artificial Sequence
  ENSG00000196295_102 (sequence is synthesized)
ccttggatgttagcttttatttaagcttttagccactaagctccttaaaaaaaataccttcaaatctcattactgtattttagctagtacaaactgctgatatttcaaaagtaatgcaaa

SEQ ID NO: 849740 - DNA, 120 bp, Artificial Sequence
  ENSG00000196295_103 (sequence is synthesized)
taccaaaccagaaagggcttgatttaggaaccaaacttaggcagtcatgatgaaaataaggacagaatcttagtttccaaactgcagtgctgggggacaaccattgctctttcagtttgg

SEQ ID NO: 849741 - DNA, 120 bp, Artificial Sequence
  ENSG00000196295_104 (sequence is synthesized)
agaaggtacttgcttctctttctcctgccaaagcatgaccttataattgtaagtttccggaggcctccccagccatgcggaactttttcctaaaattcccttttccactggtgtgtggtg

SEQ ID NO: 849742 - DNA, 120 bp, Artificial Sequence
  ENSG00000196295_105 (sequence is synthesized)
ggcctgagccactacacacagcccggagtttttaaaaaatactcaattaaaatgcttcatttaagtgtatgtctctaagaaaatttaataattgattaaatattgttgaatagactgaaa

SEQ ID NO: 849743 - DNA, 64 bp, Artificial Sequence
  ENSG00000196295_106 (sequence is synthesized)
aagctctgcctcccggattcctgcccggctaatttttgatatttttagtagagacagggtttca

SEQ ID NO: 849744 - DNA, 120 bp, Artificial Sequence
  ENSG00000196295_107 (sequence is synthesized)
ttttaatacgttttttaaagatgcatataaaatgcattaccctctggaagattccagtaacttactgaagcaagtttctcctctacatatacctatttctgccatgagtaactgttcatt

SEQ ID NO: 849745 - DNA, 120 bp, Artificial Sequence
  ENSG00000196295_108 (sequence is synthesized)
ttcagtgagtcatttgagtttctgttattcaggtatacagagttcctgttgtctttttagtcaacaaagtttaacaaagaccataataaagatggctttcagcagctctgttattgggaa

SEQ ID NO: 849746 - DNA, 120 bp, Artificial Sequence
  ENSG00000196295_109 (sequence is synthesized)
tcacctgatgcacattctaaccagagtcaagagggcagaagcatcgcctcctgcgttccaagctcaatatctcaattgtaatccccacatgtcaagggaggggcttggtgggaggtgatt

SEQ ID NO: 849747 - DNA, 83 bp, Artificial Sequence
  ENSG00000196295_110 (sequence is synthesized)
gtgaggggtcccctttgtgcaccctctctctttcctgcttccttgtgaagaaggtacttgcttctctttctcctgccaaagca

SEQ ID NO: 849748 - DNA, 120 bp, Artificial Sequence
  ENSG00000196295_111 (sequence is synthesized)
tgtgcaccctctctctttcctgcttccttgtgaagaaggtacttgcttctctttctcctgccaaagcatgaccttataattgtaagtttccggaggcctccccagccatgcggaactgtg

SEQ ID NO: 849749 - DNA, 120 bp, Artificial Sequence
  ENSG00000196295_112 (sequence is synthesized)
tctttatagcagtgtgaaaatggactaacacagatatttggcaggcatccagtagtcttcgataaacacaaccaccatctagtggccagaacagccttatcggaccccactgtctgcaat

SEQ ID NO: 849750 - DNA, 120 bp, Artificial Sequence
  ENSG00000196295_113 (sequence is synthesized)
actgtctgcaatgaaaagctgttcctttcctcatcctttacagggccaagcacccagcatcctgggacagtggccccgtgtgcccagctttgaggatgagctcatgcctggttgctctgg

SEQ ID NO: 849751 - DNA, 120 bp, Artificial Sequence
  ENSG00000196295_114 (sequence is synthesized)
gtggagagagggaagagttgaatcaacatccatatgtataaatctccttttgtgcatttagaatcacgtccttagaataaattgcgatcagtggcattactgaagcaaattgtatcaaaa

SEQ ID NO: 849752 - DNA, 120 bp, Artificial Sequence
  ENSG00000196295_115 (sequence is synthesized)
atgcaaaaaagacccatttttccaaattgttttctaacaaggaagtcatattgtttgctttttgatactgttctttagaaaacgatgcatgagagttttacatttcatatagtgtgttct

SEQ ID NO: 849753 - DNA, 120 bp, Artificial Sequence
  ENSG00000196295_116 (sequence is synthesized)
atttattttatactttgcaatttctgtaatttttaagcactgttcttcccatactagaggctctgctctaactattcaacttttgtttgtcctagttttcctaaaattcccttttccact

SEQ ID NO: 849754 - DNA, 120 bp, Artificial Sequence
  ENSG00000196295_117 (sequence is synthesized)
acgttatgagtgtgttcctggcatgactgcttctaacagtgagttttctggcaaatcaaataaatactaataagtctgtatgcacattatactttatacaaatcctatgagtgatgttcc

SEQ ID NO: 849755 - DNA, 120 bp, Artificial Sequence
  ENSG00000196295_118 (sequence is synthesized)
agaaataacaagttttgaaggcaaaataagtccttaaattggcaactttgacacataattccatgtagtagttaatcttgctagaagatcccaatgttgttattctaatacaatctgata

SEQ ID NO: 849756 - DNA, 84 bp, Artificial Sequence
  ENSG00000196295_119 (sequence is synthesized)
ggctcactgcagccttgacctcctggatcaaggtatcctcccacctctcagcctcccaagcagctgggactatgatggagatat

SEQ ID NO: 849757 - DNA, 120 bp, Artificial Sequence
  ENSG00000196295_120 (sequence is synthesized)
ggctggtcttgaacttctgggctcaagccttctgcctgccctggccttccaaagcattggaattacaggcctgagccactgtgctaggccagagccaacaggacttactgagaaattatc

SEQ ID NO: 849758 - DNA, 120 bp, Artificial Sequence
  ENSG00000196295_121 (sequence is synthesized)
aacaggacttactgagaaattatctgagagagaggggtcaaggaagactccccctgttcaaccaagcaacgaggtgaatggtgctgctgcttcctgagatggggaagactgtagaggaaa

SEQ ID NO: 849759 - DNA, 120 bp, Artificial Sequence
  ENSG00000196295_122 (sequence is synthesized)
caaaccaggaacgacaaatcagtaatttagctttgaatacattaggtttgagatggctagtctgtacccaaacagaccacactgtggcatctgggcagcaggatctgcagaatccagcag

SEQ ID NO: 849760 - DNA, 120 bp, Artificial Sequence
  ENSG00000196295_123 (sequence is synthesized)
gatggatgctgatgccaagctgagtagacagttgggtctgtgagtctaaagctcagggaagacctcagggtctgggatacaaatctggagatcatcaccctgtccatgaaagccaaggga

SEQ ID NO: 849761 - DNA, 120 bp, Artificial Sequence
  ENSG00000196295_124 (sequence is synthesized)
atgatggaagatactatgagaaaaagtgaagagaggaaagagaagaggtccatggaaggagacctgggagaatccaaccttcgattagatcaggaagaggagaagaatccagtaaaaaac

SEQ ID NO: 849762 - DNA, 120 bp, Artificial Sequence
  ENSG00000196295_125 (sequence is synthesized)
tctgagaagtctctgggaaggaagtcttccttccttcccctgtaccaggagaggtgctatcccagaaattagtaaagaaacagtttttgatggggagaacaggatcacctttgtcaactg

SEQ ID NO: 849763 - DNA, 120 bp, Artificial Sequence
  ENSG00000196295_126 (sequence is synthesized)
ctgctgcgagacttggaaaaataaggactgggaagagagcaatagaaactttgaaagccattggttatcttgataagagttgtttctgtgggggtggtgagaactggagcctgactggat

SEQ ID NO: 849764 - DNA, 120 bp, Artificial Sequence
  ENSG00000196295_127 (sequence is synthesized)
gggttcaagagagaatggggagttctagccaagaaggctgatgaggatgagtcaaattaaaaatgttttctttttatgagtcctctcatatttactgatacaactgatatattgggtctc

SEQ ID NO: 849765 - DNA, 120 bp, Artificial Sequence
  ENSG00000196295_128 (sequence is synthesized)
cattctgccacattactttatattgatcatgtattgtatctgctatgcaattgtattgcatgtatctgcatggcaattgtattgccatgcaatgtatttttttttactttaaaaattata

SEQ ID NO: 849766 - DNA, 120 bp, Artificial Sequence
  ENSG00000196295_129 (sequence is synthesized)
ggcgaagaagacgccagaggatgaagggaaagaaaggggtaaccgaagaggaggacagttccccggggaggagggaaggatgaccagaagaaggccctgggaggagagccggaggcttag

SEQ ID NO: 849767 - DNA, 120 bp, Artificial Sequence
  ENSG00000196295_130 (sequence is synthesized)
cggagagcgcaaaacaccggtacctgctggcgcactgctagcctcagaggtgccagcacctcctcagcccccgcgccgtccatgctgctccgggaggcggcggcgggcaaggagatcggg

SEQ ID NO: 849768 - DNA, 120 bp, Artificial Sequence
  ENSG00000196295_131 (sequence is synthesized)
gggcaggaggccgcgctgagggaccggcggagcaggagcgagggtcgggctaagagccggggcggcagcagcagcagcagagcggcgcgagcacctctaagcagcactggacgcggagag

SEQ ID NO: 849769 - DNA, 120 bp, Artificial Sequence
  ENSG00000196295_132 (sequence is synthesized)
tgtgttctatccacaggctggaatgcagtgccatcatcatagctactgcagccttgaactcctgggcagaagcaattttcccacctcagcctgccaagtagctaggactacaggtgtgtg

SEQ ID NO: 849770 - DNA, 120 bp, Artificial Sequence
  ENSG00000196295_133 (sequence is synthesized)
ttttttaaaattttttgtggagatgtgaactcactaagcttccgaggcttttcttgaactcctgacttcaagtaatcctcccaccttggcttgtcaaagtcctgggattacaggtgtgag

SEQ ID NO: 849771 - DNA, 65 bp, Artificial Sequence
  ENSG00000196295_134 (sequence is synthesized)
ccaccttggcttgtcaaagtcctgggattacaggtgtgagctcctgctcctggtcaagagtgcta

SEQ ID NO: 849772 - DNA, 120 bp, Artificial Sequence
  ENSG00000196295_135 (sequence is synthesized)
ggacaacatgaagcagggagggggctccctggtgacaggtacatttgcattcttttgagtttctaattagcctttcactgatacatacctatgacctgggtttccaggtcataggtacga

SEQ ID NO: 849773 - DNA, 120 bp, Artificial Sequence
  ENSG00000196295_136 (sequence is synthesized)
atacatacctatgacctgggtttccaggtcataggtacgactgcattcttttgagtttctaattaacctttcactgaatacataacttacaggaatagtcacttatgccttagtctggct

SEQ ID NO: 849774 - DNA, 120 bp, Artificial Sequence
  ENSG00000196295_137 (sequence is synthesized)
ttatctcacatgagcaaaaggatgactttgagttctgtctgtcttttgtctacagggaattttcttgtgggcaaattgtgagggaggtatgtagcttttttatctttgttgctatcttgt

SEQ ID NO: 849775 - DNA, 120 bp, Artificial Sequence
  ENSG00000196295_138 (sequence is synthesized)
agcttggcttttccctttggcttagtaattttggagtcctgagatttattttcctctcacatctccccgtttttctttttaaaatctttcagagacagcattttagaagaaaacaagtct

SEQ ID NO: 849776 - DNA, 120 bp, Artificial Sequence
  ENSG00000196295_139 (sequence is synthesized)
aaaatctttcagagacagcattttagaagaaaacaagtctctggtctcaggctttgtctgatctctcatggctaggatagtttattcctagatggataagtaccacgttatttggaaagc

SEQ ID NO: 849777 - DNA, 120 bp, Artificial Sequence
  ENSG00000196295_140 (sequence is synthesized)
tcatttttagtaggttatgaagtctcatgtcctttgaagagaaaatagggggaggaaggaagaaaaacaacaacaaacaaacaaaatgaagaagaatcctggaaaatcaatataggccgt

SEQ ID NO: 849778 - DNA, 120 bp, Artificial Sequence
  ENSG00000196295_141 (sequence is synthesized)
attactctgaagtccatgtcagtaggcaggtatgaaagtggtttatgtgtgtaaataggttgctattattttcttctgaagtttacattgtctagcttcagtctgtagggctttaagaaa

SEQ ID NO: 849779 - DNA, 120 bp, Artificial Sequence
  ENSG00000196295_142 (sequence is synthesized)
gactgcttaattttaagtgatttcaaatcaggaaaaatggggtggggggaagtaaacgaaagaagaaaaaaattgaaaacattattttggagacttgtagccaggaaaaatttttgaatt

SEQ ID NO: 849780 - DNA, 120 bp, Artificial Sequence
  ENSG00000196295_143 (sequence is synthesized)
caatctaaattgtagaaaataaaaaaaactgaaaaacattaggcaagactagaatctaataacaggtgtactatagtttatgttgaaatataattttcctctctccagtctcattttcac

SEQ ID NO: 849781 - DNA, 120 bp, Artificial Sequence
  ENSG00000196295_144 (sequence is synthesized)
taaagacaagtcataggacaaattcatttgcaaaataagttgtagtcttattatacttggctggagtatttgcataaagtcagaagaataattatttgctatataggctcctcttttttt

SEQ ID NO: 849782 - DNA, 120 bp, Artificial Sequence
  ENSG00000196295_145 (sequence is synthesized)
ttaattggctttgctagaactttattccactaagaatctcagatttaactttaatgcattaagcctggcctgtgcctgcaaatccttgcgttagttgagtgaattcctcacttcaaggtc

SEQ ID NO: 849783 - DNA, 120 bp, Artificial Sequence
  ENSG00000196295_146 (sequence is synthesized)
cctgtcagaaagtgacattctttactcactacaggtcaccctgttccgggactgtgcagacaaggtatgagaccaggtttctcaaggagtttttattggctctaaagtcaactttcattc

SEQ ID NO: 849784 - DNA, 120 bp, Artificial Sequence
  ENSG00000196295_147 (sequence is synthesized)
tggctctaaagtcaactttcattctttaaaggagtctgtttgtatctgaaagcatcctattccagtcaaaaccttggtaaaataaccagtgtctccaattgtgccctgttacaaaggaac

SEQ ID NO: 849785 - DNA, 85 bp, Artificial Sequence
  ENSG00000196295_148 (sequence is synthesized)
aataaccagtgtctccaattgtgccctgttacaaaggaacattcttgagaaagaatctttctcagaggaaagattcttattgcat

SEQ ID NO: 849786 - DNA, 120 bp, Artificial Sequence
  ENSG00000196295_149 (sequence is synthesized)
agaaatatgctccaaattttgtttacagaaatatactttactccattgttaaaagctataaatagctcaaaagaaaagttttcttggctctgaaaaacaaagggtcagcaatgttttagg

SEQ ID NO: 849787 - DNA, 120 bp, Artificial Sequence
  ENSG00000196295_150 (sequence is synthesized)
tctgaaaaacaaagggtcagcaatgttttaggcaaaaagtcataaaaggactatttcagttttctattagttcagtccatgcagttaacttcttttctgcttgatattcatgaacatttc

SEQ ID NO: 849788 - DNA, 120 bp, Artificial Sequence
  ENSG00000196295_151 (sequence is synthesized)
ctattctagtgtcacagtctccaaagttattagaagcctgcattcaagagcacctgtcagagtcccacagctgattataaaaccaccttttgaataggataaaagtaaaacaactgtgga

SEQ ID NO: 849789 - DNA, 120 bp, Artificial Sequence
  ENSG00000196295_152 (sequence is synthesized)
taacaaaagtcttagaacagtcataaagacacaattgacaaagatatttggttacttctgtggcatacaacaattttacataattataattaccacaattacataataataataattacc

SEQ ID NO: 849790 - DNA, 120 bp, Artificial Sequence
  ENSG00000196295_153 (sequence is synthesized)
actgataacatatgccaagtcatatcagaatcacaggaatttcatacaattctcaaacatataccaataacatatgtgcataaatataatccaaagaagattaaacattgttttatactt

SEQ ID NO: 849791 - DNA, 120 bp, Artificial Sequence
  ENSG00000196295_154 (sequence is synthesized)
gacaatacttcctgtatgattttattatatcaaataaaccaaatatgtctcttttggacttcaggggactaatatcaaaaaattaatgaggaccaaagttagaatttgattgtcgaaggt

SEQ ID NO: 849792 - DNA, 120 bp, Artificial Sequence
  ENSG00000196295_155 (sequence is synthesized)
ttgtcaaacataaaaagtttaaaacacttaatatcacaaagtaggatcacaggtcattgtaaagtcattcatttagacaaagcgataactcaaagattttttttaaggcgaaaaccttta

SEQ ID NO: 849793 - DNA, 120 bp, Artificial Sequence
  ENSG00000196295_156 (sequence is synthesized)
ttctttgagaggagacttcatttcccaaacaataagccttaataaagacaggatgaggccaattaaacttgttctccaaaattttataaacagcctataatattaaatagtttaatcatc

SEQ ID NO: 849794 - DNA, 120 bp, Artificial Sequence
  ENSG00000196295_157 (sequence is synthesized)
ttgaccataagatgtaatttccataagccttttttataaccttttattaaggagtgggttaacgctccaagaaaaccttgttaatctgactcagaggcccatatgctagtcttgcatcag

SEQ ID NO: 849795 - DNA, 120 bp, Artificial Sequence
  ENSG00000196295_158 (sequence is synthesized)
tgccttcgacattaatggttaatttatagagaaactaaacttattttatctctcaaaattgacccttacaatgtcacacacccatgtcttccatgatagttcctgggtcttgaggagttg

SEQ ID NO: 849796 - DNA, 120 bp, Artificial Sequence
  ENSG00000196295_159 (sequence is synthesized)
aatagttttaatttctggccctgtgtctcatgaacacagtttattttgattggtatcttctacagggtctgaagataaagctttaactgctgtcagtgtttaagatttagccggacttgg

SEQ ID NO: 849797 - DNA, 120 bp, Artificial Sequence
  ENSG00000196295_160 (sequence is synthesized)
catcctttttagacccaggagtctaaaccctgtaacttgatggcacaaggactttaaaagcacatacagaaagttacacagatgtaataaccttaatgaaaaatagtttttcttttaatc

SEQ ID NO: 849798 - DNA, 120 bp, Artificial Sequence
  ENSG00000196295_161 (sequence is synthesized)
tcagttttttctaagcagaccaaaacttagtaataatgacataggaattatttcaatataaagtgtaaaatctgtttgttaggccagttacccaaaagcaaaagcaaagagcttctgcac

SEQ ID NO: 849799 - DNA, 120 bp, Artificial Sequence
  ENSG00000196295_162 (sequence is synthesized)
gagcttctgcactgcgactgctgttccctgtggagaatccatttagattaactgcaagtcaaaactaattaaagagatacttgaattagttatgagaggtgaagccagctgggcttctgg

SEQ ID NO: 849800 - DNA, 82 bp, Artificial Sequence
  ENSG00000196295_163 (sequence is synthesized)
agtttgtaagcacaacaatcagcactcgtaaaaacacaccaatcagtgctctgcatctagctaaaggtttgtaaacacacca

SEQ ID NO: 849801 - DNA, 120 bp, Artificial Sequence
  ENSG00000196295_164 (sequence is synthesized)
ctccaaagcgaggtgttgttccaggctgacaagtgtccagcagggtggacttcagactccctgttaggaactgaattgtgtcccccaaaaagagaaagtcaccccagggtatgacctaat

SEQ ID NO: 849802 - DNA, 63 bp, Artificial Sequence
  ENSG00000196295_165 (sequence is synthesized)
atgttcactggcattttccactgttggcatctttactatagcctacagttgtttgtttgttta

SEQ ID NO: 849803 - DNA, 67 bp, Artificial Sequence
  ENSG00000196295_166 (sequence is synthesized)
ctcccaggttcaagcagttctcctgcctcggcctccctagaagctgggatggtttcatcatattggc

SEQ ID NO: 849804 - DNA, 120 bp, Artificial Sequence
  ENSG00000196295_167 (sequence is synthesized)
tcaggtgatcagcctgtctcggcctcccacacacagtgctggggttacaggtgtgagccacgattcctggctgcctacagttctttgtaaagcagacaaaatagtttcattttttaaaga

SEQ ID NO: 849805 - DNA, 120 bp, Artificial Sequence
  ENSG00000196295_168 (sequence is synthesized)
aatgaacatatatgaggcaacctgtacctaacttaggagttcagaaattccctggactgcctatacattttggtttctcattcctaattcccaaagattaaaatctgtcaggaatttgga

SEQ ID NO: 849806 - DNA, 120 bp, Artificial Sequence
  ENSG00000196295_169 (sequence is synthesized)
aacattgaatcacaggccaaaataggaccatgtctccattcattcattcattcaacaattatttattgagcgcatgctatttttcaggcactgtgccacatattgagaatagagtagtga

SEQ ID NO: 849807 - DNA, 120 bp, Artificial Sequence
  ENSG00000196295_170 (sequence is synthesized)
cactgtgccacatattgagaatagagtagtgagtaagacaaagtcatcactttagggagtttatattttagaggagagaaagacaaatgaaagtgtttaggctgggcatggtggctcaca

SEQ ID NO: 849808 - DNA, 120 bp, Artificial Sequence
  ENSG00000196295_171 (sequence is synthesized)
ggagttcaagaccagcctgggcaacaatcccatctctaacaaaaacataaaaaattaaccaggtgtggtagcacatgcctgtggtctcagcaacttgggaggctgaggtggaaggatctc

SEQ ID NO: 849809 - DNA, 74 bp, Artificial Sequence
  ENSG00000196295_172 (sequence is synthesized)
ggcagaggttgcagtgagctgaggttgtgacactggacttcaacctgagtgacagatcccatctcaaaaacaac

SEQ ID NO: 849810 - DNA, 120 bp, Artificial Sequence
  ENSG00000196295_173 (sequence is synthesized)
ccatctcaaaagaaaaaaaaaaaaaaaactcagaactatttaatacaatgtactggcaagcggtgatgagcactatggaaacgtgaagcaatgtttgagtgcagcgagtgaagcggtgct

SEQ ID NO: 849811 - DNA, 120 bp, Artificial Sequence
  ENSG00000196295_174 (sequence is synthesized)
gagtgcagcgagtgaagcggtgctgttttgtttgtgattgtcatgaggacccctcagaagagcagagagctgaatgcagtgagcatagaaccttactgaggcctgggcaaggctcttcca

SEQ ID NO: 849812 - DNA, 120 bp, Artificial Sequence
  ENSG00000196295_175 (sequence is synthesized)
gacagcaaactgccctgaggcaggactgtgtttggcgtgtcctggaaacaggaaagaagccagggcctctggaatgtggtgaaggagagggaaaagtagtaaatgaggctggagagagag

SEQ ID NO: 849813 - DNA, 120 bp, Artificial Sequence
  ENSG00000196295_176 (sequence is synthesized)
gcaggggccagaacatacagggctgtgtaagtcacattgagttctttagattttcctgtaagtgtggatgggaagcagttggagggttttgaggaggggtggtgtgatctgacccgcatt

SEQ ID NO: 849814 - DNA, 120 bp, Artificial Sequence
  ENSG00000196295_177 (sequence is synthesized)
ttagaatcatcccgttggctgaagtgtggaggaaaaaagcagggggcagaagtagaggtgaggggcagccagttaggaggctacaggagtagcccagaccagacaggagggtggctcggc

SEQ ID NO: 849815 - DNA, 120 bp, Artificial Sequence
  ENSG00000196295_178 (sequence is synthesized)
gtttgtaattttattccagtggttattttatatgtacactttttaaaatgctcttaattttttttttaagacagggtcttgctctttgcccaggctggagtataatggcatgatcctggc

SEQ ID NO: 849816 - DNA, 90 bp, Artificial Sequence
  ENSG00000196295_179 (sequence is synthesized)
atcatgtgccaccacaacaagctaatttttttgtattttttgtagaaatggtgtctccctgtgttgcccaggatggtctcagtcaggcga

SEQ ID NO: 849817 - DNA, 120 bp, Artificial Sequence
  ENSG00000196295_180 (sequence is synthesized)
gtgtctccctgtgttgcccaggatggtctcagtcaggcgatccagcgcacaagcaatcctctcacctcagcctcccttggctcttactcttattttcttgtttaagcttttactatctgg

SEQ ID NO: 849818 - DNA, 120 bp, Artificial Sequence
  ENSG00000196295_181 (sequence is synthesized)
tttataaatactgcagtattcttcatctcccatccattgctcatacaacaatctaggggcatattccgtttttctctatttcccttgtcccatttttgagttgcactatttccttatcat

SEQ ID NO: 849819 - DNA, 120 bp, Artificial Sequence
  ENSG00000196295_182 (sequence is synthesized)
ctcttatcagctgaagctcattctctagtataccgtcagaaaactttttattttttgcaaggggccagatagtaaatatgttcagttttgcaggcatgcaatctctgccacagctctacc

SEQ ID NO: 849820 - DNA, 120 bp, Artificial Sequence
  ENSG00000196295_183 (sequence is synthesized)
attgtagagtataagcagccatagacaatatgtaaacaaatgggtatggctgtcttccaataaaactttatttgcaaaaacaggtggtgggccagatttggcctataggctaaagccctg

SEQ ID NO: 849821 - DNA, 120 bp, Artificial Sequence
  ENSG00000196295_184 (sequence is synthesized)
tcttagagtagcagcagataaggagacagaaaaactgtacaggaggtgagagaaaactggcaggagagctagggggatattgacaaaagaggagccctttaaatcttccaggggtagaaa

SEQ ID NO: 849822 - DNA, 120 bp, Artificial Sequence
  ENSG00000196295_185 (sequence is synthesized)
aaatgaaattctttgatgttactcaatagtttacctgctcggaaggaggaaaagtgtctcttccatctcagagttggctcagcatccatcctgctggattctgcagatcctgctggccag

SEQ ID NO: 849823 - DNA, 120 bp, Artificial Sequence
  ENSG00000196295_186 (sequence is synthesized)
atgccacagtgtggtcagctgaaagtgatttgctcatcctgaaaacagcaggtatagaaagcgctctttcagcgccatggcaaccagatcgtgtttttctaaaaaaggatcagatcagcg

SEQ ID NO: 849824 - DNA, 120 bp, Artificial Sequence
  ENSG00000196295_187 (sequence is synthesized)
ggtgtgtccctccaggcattgatccattaatatgcactgagctcatttcagagccaggccctgggctgagtgcttggaatacaaagatgcaaaaggctaagtccttgtttttaaggagct

SEQ ID NO: 849825 - DNA, 120 bp, Artificial Sequence
  ENSG00000196295_188 (sequence is synthesized)
catagactggaggaggaggcagacatttacagtaaacagtgtaatcacacgtcatcaaaggaagggacacacaaagggctgggtggggagcatctcctcctctttgggagaaactgacct

SEQ ID NO: 849826 - DNA, 120 bp, Artificial Sequence
  ENSG00000196295_189 (sequence is synthesized)
ggagacctaaggttgagctgaattttggagaatcagtcagagttggtcaagaggacaaactgggatgggtcaaggaaaatggagaagcttgagagctgtggcagctccgtgaaatggcaa

SEQ ID NO: 849827 - DNA, 120 bp, Artificial Sequence
  ENSG00000196295_190 (sequence is synthesized)
gtatggccagaggatggcatctccagggtgccggagatggccatggagaggcaccgaggccaggccatgccgggcctctgctgcctctgctgtcaccaaggtcaaccacaacctagtgcc

SEQ ID NO: 849828 - DNA, 120 bp, Artificial Sequence
  ENSG00000196295_191 (sequence is synthesized)
caagccagtggcattttccagcctacttttactcatcccttcttttagaaaatgctgccttgacagtctgattttcatggtatcatgatccgctatctcctgatgtgtcctctgtacatc

SEQ ID NO: 849829 - DNA, 120 bp, Artificial Sequence
  ENSG00000196295_192 (sequence is synthesized)
cagctgctctttctcactctcttatttgtgctctcacttccttaaattttaaccttcttctcgtgctgcactttctccaggtatatgagaaacctctccatttttcactttcatctgtat

SEQ ID NO: 849830 - DNA, 120 bp, Artificial Sequence
  ENSG00000196295_193 (sequence is synthesized)
tgctctttgcctgttggcctcaatttctcccaccacaagatgagcccctaaacgtatctaagaatgtggcctcaagaaccccagtgtggcaatcccagtgaaaagccttttcccagtact

SEQ ID NO: 849831 - DNA, 120 bp, Artificial Sequence
  ENSG00000196295_194 (sequence is synthesized)
catctttccatcctggggaaggcatgggattgcttttggttggttgtgtacctaccctggcacacagcactattatcagagtgatgggccaatacaatatatggtgagggaaatgaggtt

SEQ ID NO: 849832 - DNA, 120 bp, Artificial Sequence
  ENSG00000196295_195 (sequence is synthesized)
ccatgattggccccatcagtcacaaggatggaaaggcagtttcctaagacagatgtatcaggcaggagagaggagctatacaatgtcaacagggaaagtgtaatataaataatcatgaac

SEQ ID NO: 849833 - DNA, 120 bp, Artificial Sequence
  ENSG00000196295_196 (sequence is synthesized)
taataatagagggttagccactaagggataaaaagaagtctaaaggttacagaaacaggtgaatggataaacaaaatgaaatgttattctgccataaaatggaatgaaattctgatacat

SEQ ID NO: 849834 - DNA, 120 bp, Artificial Sequence
  ENSG00000196295_197 (sequence is synthesized)
gctaccccatggataaaccttgaagacattatgcaaaatgaaataagccagactcaaaagggcaaatattatatggtgccacttatacaatgtaccatgaatagtcaatccataaagaca

SEQ ID NO: 849835 - DNA, 120 bp, Artificial Sequence
  ENSG00000196295_198 (sequence is synthesized)
ataaagacagaaagcggaatggaggttttcaggagctggaggaaggggagaatgggaagttattgtttaatgggtgatacggtttggctctgggtccccacccaaatctcatctcaaatt

SEQ ID NO: 849836 - DNA, 120 bp, Artificial Sequence
  ENSG00000196295_199 (sequence is synthesized)
gattggatcatggaggtgattcttgtgatagtgagtgagttctcatgagattcgatggtttaaaagtatgtggctcccttctgtctctctttttctctctctcctgccactttgtgaaga

SEQ ID NO: 849837 - DNA, 120 bp, Artificial Sequence
  ENSG00000196295_200 (sequence is synthesized)
actttgtgaagagatctgccttgcttaccttcaccttccaccatgagagtgtttcccaaggcttccccaggcacacagaattgtgaatcaatcaaacctcttttcttcataaattaccca

SEQ ID NO: 849838 - DNA, 120 bp, Artificial Sequence
  ENSG00000196295_201 (sequence is synthesized)
atctttatagcagcgtgagaacagactattacaatgggtatagagtttcaccttggactgatagaaaagttttggaaatagatagtggtgatggctgcaaaacattgtgaatgtatctaa

SEQ ID NO: 849839 - DNA, 120 bp, Artificial Sequence
  ENSG00000196295_202 (sequence is synthesized)
ttgtgaatgtatctaatgtcactgaattgtacacttaaaagtggttaaaatgataaatgttatgtatgttttaccacaaaaaaaaaaaaaatacaggccagcctggccaacatggtgaaa

SEQ ID NO: 849840 - DNA, 120 bp, Artificial Sequence
  ENSG00000196295_203 (sequence is synthesized)
ctgcaccccagcctgggcaatagagtgagattccatctcaaaaacaacaaacaaacaaacaaacaaagaaaaaacaggaatcgtggatataggggcaggcactaggtctagggctgaagc

SEQ ID NO: 849841 - DNA, 120 bp, Artificial Sequence
  ENSG00000196295_204 (sequence is synthesized)
agagaacccaaggaaggaaccaacttggaaaaaggtctccgcaggaatgagactcagatgccattggagatggtgtggctagagcccgcaggatggcagagaagtttgttgtagtgcttg

SEQ ID NO: 849842 - DNA, 120 bp, Artificial Sequence
  ENSG00000196295_205 (sequence is synthesized)
aggccgggctggcatgcaagaaacccatgcaccggtgggggcagcagggtgggggctgacaacactcactgagaagctgccctctgaggtgcaggcattcactaggacttcacccgtggt

SEQ ID NO: 849843 - DNA, 120 bp, Artificial Sequence
  ENSG00000196295_206 (sequence is synthesized)
atgttactgaaactccggggagccaactgctggagcatttatgagacacactatgccaccatccggggcttcagcagcgtttggtgaaaacctgcctgtggggttgctgttgaatttgct

SEQ ID NO: 849844 - DNA, 120 bp, Artificial Sequence
  ENSG00000196295_207 (sequence is synthesized)
ggagagctgactgaggtgctagcagaactcctcaggaaatcaccaggaggagcatccctgggtgccccatgcaccagtcaagagcaggagcaagaggaaaggaaggtagcctcttcttcc

SEQ ID NO: 849845 - DNA, 120 bp, Artificial Sequence
  ENSG00000196295_208 (sequence is synthesized)
tgcagtgtctctccagagccctccattgacagcacttaatatcgtgctagcaggcaaagaaatgtttacaggattcatctccagtatcacaaaggaggataacgaagagtggatttggaa

SEQ ID NO: 849846 - DNA, 120 bp, Artificial Sequence
  ENSG00000196295_209 (sequence is synthesized)
ttcagaggctctaaagtgataactgtcacagcccacccctttggctactcagtttccatatgcaccctcctacacatacctgaacttctatatgacaacgaacaaaatacagctatcctt

SEQ ID NO: 849847 - DNA, 120 bp, Artificial Sequence
  ENSG00000196295_210 (sequence is synthesized)
cttaccagggaaaatattcctaccctttctcccaaatgagaagatactcgtgccaacaacaattttatctatctctggctatattcattactcgaatttgatcacagtccctctaaatat

SEQ ID NO: 849848 - DNA, 120 bp, Artificial Sequence
  ENSG00000196295_211 (sequence is synthesized)
tctgttaccaaaagaccaaattgtaaagctaacctccaacaacttgtatataaactgataaagggaagaaggagagagagataaaatggatggcattttcccatcacccatctatcagtg

SEQ ID NO: 849849 - DNA, 120 bp, Artificial Sequence
  ENSG00000196295_212 (sequence is synthesized)
ggaaagaactctggggaagtgctcttgaggaagtatctttgggaagaatccctgattggccctacttgggtcatgtgtgttggaatctgtgaaagtcgggaattttgcccatcttacaag

SEQ ID NO: 849850 - DNA, 120 bp, Artificial Sequence
  ENSG00000196295_213 (sequence is synthesized)
ctagtaagcctgttatggtttcatggatgctggcagatgacatgagactggatcagagacaaaggactacactactcatggcagaacaagttgcacgaggtttgtgttagttagcattgg

SEQ ID NO: 849851 - DNA, 120 bp, Artificial Sequence
  ENSG00000196295_214 (sequence is synthesized)
ttttccttgtccccaagtcccacaggggtgatgtggaggggcccaggtggttactgtacacgcagtgtgtttgtactgcagctaaggaacactgagcttgggaacatacaatttaatagt

SEQ ID NO: 849852 - DNA, 120 bp, Artificial Sequence
  ENSG00000196295_215 (sequence is synthesized)
aagtggtgagcaagtctgccctttgtctggggcagggggatattgctttgtcaaggctgtctactgcaaacacaaccctgagaaatatcccaagcaaggaacagtcaggaccttgcattc

SEQ ID NO: 849853 - DNA, 120 bp, Artificial Sequence
  ENSG00000196295_216 (sequence is synthesized)
ttgtcatccccagcaagagcatgcagagacaatcagagcctgtggcaaattgcctgtcacaaaaatccaccacaaggcctgacagatccttggccaaattcacattttcccatgagtatg

SEQ ID NO: 849854 - DNA, 120 bp, Artificial Sequence
  ENSG00000196295_217 (sequence is synthesized)
ctacctcatcagctgctctgattagtctgaccaacagagggaccaaatctgtttaatttgattcctatcacatttaaaattaaggctgctattgacaggacttcaagcaatacagtgcag

SEQ ID NO: 849855 - DNA, 120 bp, Artificial Sequence
  ENSG00000196295_218 (sequence is synthesized)
caagtctgccatattgatctcacccatgtccccagggtcccgggctcaaccaactgtctaaaagttctgggggcaagggagaccagtcattcctatttcagatagctaggataaaatcta

SEQ ID NO: 849856 - DNA, 120 bp, Artificial Sequence
  ENSG00000196295_219 (sequence is synthesized)
atatcagtctagtattcattatgacccactcatgggagtttagattcactgatatcattgccagtgactacaggaggcaatgtagggagcaaagaccctcatccctgatggaaggacatt

SEQ ID NO: 849857 - DNA, 120 bp, Artificial Sequence
  ENSG00000196295_220 (sequence is synthesized)
catggcctctccctttcaaagagacaatccaaaggggagcaggtcactctagtttggaatttgttgttaaatttgatttgaatcatcattgcattggtttggttaggtaagatggttaaa

SEQ ID NO: 849858 - DNA, 120 bp, Artificial Sequence
  ENSG00000196295_221 (sequence is synthesized)
ttttacgtgtcaacttggctgggtcatgagactaagatatttggtcaaacattactctggatgtttctgtgagggtgtttttggatgagattaacatttaaatcattggactttgagtaa

SEQ ID NO: 849859 - DNA, 120 bp, Artificial Sequence
  ENSG00000196295_222 (sequence is synthesized)
agcagatgactctacctaatgtggatggtcctcaaccaatcaattggaggcctaaatagaacaaaagactgacctcttccaggcaagaaggaattctgccagcacatgaactttgcactt

SEQ ID NO: 849860 - DNA, 120 bp, Artificial Sequence
  ENSG00000196295_223 (sequence is synthesized)
gaactgaaacagtggctctcctgggtctccagcctgccagcccccaccctgcagattttggacttgccagcctccataatcatggcagcccattccttaaaataaatctcactctctctc

SEQ ID NO: 849861 - DNA, 120 bp, Artificial Sequence
  ENSG00000196295_224 (sequence is synthesized)
atatatatatatatatacacacacacacgcacacacatataatattatatatattttatatgcacacacaaaataacagatagatagatatcgtattagttctgtttttttggagaaccc

SEQ ID NO: 849862 - DNA, 120 bp, Artificial Sequence
  ENSG00000196295_225 (sequence is synthesized)
tctgtttttttggagaaccctgactagtcctagttgcctttcttttctttttccacttttcttctgagctcatgttccaccttctgatatcttaacatcatttccctgagctcactttat

SEQ ID NO: 849863 - DNA, 120 bp, Artificial Sequence
  ENSG00000196295_226 (sequence is synthesized)
ccttttccttcttaaaggcgaccatttcattaagtttttaagtgcctggtaattgcttggttatgaccggtgtctgctccatggcagcctcttcctggtgagtattccacatctgccatt

SEQ ID NO: 849864 - DNA, 120 bp, Artificial Sequence
  ENSG00000196295_227 (sequence is synthesized)
ttccacatctgccattggtttttcctatccctttcctacatttgcagagatcctgcatgtcttcctttttgatgactcatctttgaacaagtggaatttttttttttttttttttttgag

SEQ ID NO: 849865 - DNA, 120 bp, Artificial Sequence
  ENSG00000196295_228 (sequence is synthesized)
cgtgagccaccacacccggccaaacaagtggaatttttcctggaccagctctttgctggtcatgtgggaggagttggggctgtgttccaagtcagctggaatttttcttataacccagga

SEQ ID NO: 849866 - DNA, 120 bp, Artificial Sequence
  ENSG00000196295_229 (sequence is synthesized)
ttttacatgtgagcttgatcagcctttacttctcagcttaagcaggtctgggcatgtttggcaacctggcctgcataatgaagatttccataatttggtgttcatctatttattcagttt

SEQ ID NO: 849867 - DNA, 120 bp, Artificial Sequence
  ENSG00000196295_230 (sequence is synthesized)
gcagcagacagatctctgcttcaggggccaggtgtctaggtgagacgccacagcgcggcagagagaacagaggcttctctgcatgcctgccagggaattggcaccatgtcaacagaaatc

SEQ ID NO: 849868 - DNA, 120 bp, Artificial Sequence
  ENSG00000196295_231 (sequence is synthesized)
ttaggttacaggaacaggaaccagccctgactgacgtgtgcaagcccggagctttcctttctccttgcacttcccacatgttccccacataaccagcaaccacagagccaccccctgcca

SEQ ID NO: 849869 - DNA, 120 bp, Artificial Sequence
  ENSG00000196295_232 (sequence is synthesized)
cccaacaactccctcctgagctagaaacttgtaagactcagctaggagtctgaatggttggatatctaaagcaaagaataatctagtttgtaacatgggaccaaaggaagaactgaatat

SEQ ID NO: 849870 - DNA, 120 bp, Artificial Sequence
  ENSG00000196295_233 (sequence is synthesized)
ccacaatctgtgtaaaaagaggccactttggagatttctatgcctctcaggggctctatctcaggatggctcagctgtaattatctttggattcccatacagatccaacttccctggaaa

SEQ ID NO: 849871 - DNA, 120 bp, Artificial Sequence
  ENSG00000196295_234 (sequence is synthesized)
gagaaagtctcatgtttgttaataatatgaggaaagaattaaaatatatcagctgctatgggctaatgtcatttattttgacttttcttttgtagaagaaatgctgaggcagtgtcacgc

SEQ ID NO: 849872 - DNA, 74 bp, Artificial Sequence
  ENSG00000196295_235 (sequence is synthesized)
tggatctgatttaaatctaaagtcctaggggtttcaaggagcacagtttggaatctaccatcccgggacattca

SEQ ID NO: 849873 - DNA, 120 bp, Artificial Sequence
  ENSG00000196295_236 (sequence is synthesized)
actcacctgaggatgtgagtcttggcaggccaggcttctggggacagggggcccaaggcacagtagacggaagccagctgacttttcacttgaacactcaagcactctctggggaggtgc

SEQ ID NO: 849874 - DNA, 120 bp, Artificial Sequence
  ENSG00000227375_0 (sequence is synthesized)
gaggcgggtcgggggagggcaggggaacggaaggggtacccggggagcatcctaagggaacctcttcgcttaaaagggcggccgctgaagtggctctgagaacaaaggagttaacactcg

SEQ ID NO: 849875 - DNA, 120 bp, Artificial Sequence
  ENSG00000227375_1 (sequence is synthesized)
gactccacagcctgcgtccccgcccggtcagcatcgcaggtgttacccaaactctgacggtccctttaagaactcacccggagtcgcgccctccgaagctgagccgccctcggccagcgc

SEQ ID NO: 849876 - DNA, 120 bp, Artificial Sequence
  ENSG00000227375_2 (sequence is synthesized)
atctatgaaggtgtccaggtcctgccagactccgctgcatcttttgctttcactccagcagggtagcagcatgctgcctgtgccaaggcaatcactaaaaggaaaggatttaatgctgtc

SEQ ID NO: 849877 - DNA, 120 bp, Artificial Sequence
  ENSG00000227375_3 (sequence is synthesized)
aaaaaagcttatgccagcttaggctgcaggaagaggaacagtgtcaagtatgttgaaagtggacatattggtcagacctccatgagagcctagggggcattgcttagcagcacgctttta

SEQ ID NO: 849878 - DNA, 120 bp, Artificial Sequence
  ENSG00000227375_4 (sequence is synthesized)
aaaccagcatgtggaaagaagagagtaaccacagcaatcaggaaacaactgtacaatctagggccatttcattggaaaaacagaagtctccagggagctgcagtcatcaaacaggcttat

SEQ ID NO: 849879 - DNA, 120 bp, Artificial Sequence
  ENSG00000227375_5 (sequence is synthesized)
tctgtgtacccagtgggcaagtacagtcaatggatgaaaattcaaccaatggacaaacacaggaagtttttccttaacatgagttgtcagaaactgtccaaaattccaaagagctgcctc

SEQ ID NO: 849880 - DNA, 120 bp, Artificial Sequence
  ENSG00000227375_6 (sequence is synthesized)
aaggtagtggaaatttttttttttttttaatcaggaaggtgctgaatgaagccagcaaggattctgtgtcagagggtggtagatacccaggacataaggttgaaccacgtgacctctgag

SEQ ID NO: 849881 - DNA, 120 bp, Artificial Sequence
  ENSG00000227375_7 (sequence is synthesized)
accacagttctaagctgttgaaacctcagtccctgctgaatactgaaatggtattagcaccctttagtctacatcaagaattcgttctacccagttttggtggtaccaagactgatctct

SEQ ID NO: 849882 - DNA, 120 bp, Artificial Sequence
  ENSG00000227375_8 (sequence is synthesized)
ttctcatagataattcttaacagaataaaagctacaggttgaaaccaattccctttaaaatgtggacagttgaccatctccatgataggtagttaggcactgaattaatgctttttaatg

SEQ ID NO: 849883 - DNA, 120 bp, Artificial Sequence
  ENSG00000227375_9 (sequence is synthesized)
gaagagccaccctaagattcctggagtgtggtataatggagtactaaatcagcataggactaataactgcctcccgtgtaaactggtctatccggagagtggtatagcctctcatacagt

SEQ ID NO: 849884 - DNA, 120 bp, Artificial Sequence
  ENSG00000227375_10 (sequence is synthesized)
gttcaaaggcagatttaactcactgcaggtccacagcaaccgataagataaactcgttggttatggtctcccactttgcaaaggagagcacagaggaagaggaaactgagataacttggt

SEQ ID NO: 849885 - DNA, 120 bp, Artificial Sequence
  ENSG00000227375_11 (sequence is synthesized)
ttaggaccccacagctggctggagctgggctgaacattagttcattgtttcttcgattaatctatgctgctttttctctacttggctccttttctaaattaaacaaaacaaaacaaaaaa

SEQ ID NO: 849886 - DNA, 120 bp, Artificial Sequence
  ENSG00000227375_12 (sequence is synthesized)
gagccgccctcggccagcgctgcaggtttgtttcgtgcgcacctccgggcggaattaccggccggctgggaccccgctcccggtctgagccacccaggttatagaaggggaatctcggga

SEQ ID NO: 849887 - DNA, 120 bp, Artificial Sequence
  ENSG00000227375_13 (sequence is synthesized)
agctttccaagtcactgcccacgtcttcgaacttcctcggggtgacgaggacctccctattaggaggtccagagagaatttgcccaaagttaccccgagtgagtgacagaactggaaacc

SEQ ID NO: 849888 - DNA, 120 bp, Artificial Sequence
  ENSG00000227375_14 (sequence is synthesized)
cggagatcctgtctttcaaaaccggaaggctcttcccagtaaacctgacggcctctgactgaggccgtatccattggctaccaaagggaaggccgaggaacctcgtattgtaaccttaac

SEQ ID NO: 849889 - DNA, 120 bp, Artificial Sequence
  ENSG00000227375_15 (sequence is synthesized)
gactccacaggtggcccggggtggccctggaggagcccgcctttaccttgccctagcccaccggcgcgtcccgcagttccgaactaaacgcgccaggccgggaaggctcgggctgtctga

SEQ ID NO: 849890 - DNA, 120 bp, Artificial Sequence
  ENSG00000227375_16 (sequence is synthesized)
agagaggcgtgacctcgcctacaccagatccaaggcgcacataccgagacacccctcaacctcactcagcagtgccgtttccaactccgcggcagagacagcgcctggcgaccccggggc

SEQ ID NO: 849891 - DNA, 120 bp, Artificial Sequence
  ENSG00000227374_0 (sequence is synthesized)
cgccctctgcagccacacctggaccggcaggcatgcacgctgcaggcaggctgcctccgctgtttgggtcccatgaacgatggaagcctcccagtgagatcttcaggtctctcatcaggc

SEQ ID NO: 849892 - DNA, 120 bp, Artificial Sequence
  ENSG00000227374_1 (sequence is synthesized)
acaggctctgagggagggtcctggggccacatgactgcagccagcgagggccgagcccccagaatccaggtcagctcctggtggcaggggacctgcccgtcaaagccgtccaagggtttc

SEQ ID NO: 849893 - DNA, 120 bp, Artificial Sequence
  ENSG00000227374_2 (sequence is synthesized)
acaggcttgatagatgcccggaggttccctctgacagccgcagcagcagggctcaaaccggcggggccgtgtaccgctccaaggacaagctctgccgaggccgacatgaaaagccagcac

SEQ ID NO: 849894 - DNA, 120 bp, Artificial Sequence
  ENSG00000227374_3 (sequence is synthesized)
gcgggtcgcctagagccgctctgcctccaagctgcagcgccgttcgtgaaaatacagagggagagggaaggcacaaagaaatacaaaactattttccaaataaaaagaaatgtcgaaaca

SEQ ID NO: 849895 - DNA, 120 bp, Artificial Sequence
  ENSG00000227373_0 (sequence is synthesized)
aagattaactctgaatgtggagagattattttcttgctcgtaaacctggtttacatattttcattcttaatgctcagtaatcttaaggaaagtcacctgaaagaatactttttcaccaag

SEQ ID NO: 849896 - DNA, 120 bp, Artificial Sequence
  ENSG00000227373_1 (sequence is synthesized)
actcttctgcgcctgtttgaaggtgtctgtgtgcttgtgaagcgctcccttgttagttccttctgtgagactcgggggagactgaagagggaaatcacctgcggggaatgaacaggaaag

SEQ ID NO: 849897 - DNA, 120 bp, Artificial Sequence
  ENSG00000227373_2 (sequence is synthesized)
caataagaagatttggaaaagaggcactggctactggaggaagggagaaatcaccgagagagcgaaagatgtaacagtgactcatgcctataatcccagtactttggaaggtcaaggcac

SEQ ID NO: 849898 - DNA, 120 bp, Artificial Sequence
  ENSG00000227373_3 (sequence is synthesized)
ctgacagaaccagagctgttagagcagggacgcgcgaaaggcgggagtacgggcggcgctggagaacctccgcggcggaggggcctgggggtgggaccgcgcccgcgagcccgccctgac

SEQ ID NO: 849899 - DNA, 120 bp, Artificial Sequence
  ENSG00000227373_4 (sequence is synthesized)
aaggacaactatctgcaaaccaggaagacagacctcaccagaaatcaaccctgctggtggtaccttgatcttagacttccagcctccagaagtatgagaaaataaatatctgtaatttaa

SEQ ID NO: 849900 - DNA, 120 bp, Artificial Sequence
  ENSG00000227373_5 (sequence is synthesized)
ggaagggagaaatcaccgagagagcgaaagatgtaacagatgcagtgactcatgcctataatcccagtactttggaaggtcaaggcacaaggatccattgaggccaggagtccaagacca

SEQ ID NO: 849901 - DNA, 120 bp, Artificial Sequence
  ENSG00000227373_6 (sequence is synthesized)
gcacaaggatccattgaggccaggagtccaagaccagcctgcacaatgtagcaagactccttctctacaaaaaaataaataaaaattagccaggcatggtggtgcactcctgtagtccca

SEQ ID NO: 849902 - DNA, 120 bp, Artificial Sequence
  ENSG00000227373_7 (sequence is synthesized)
ccagaggtcaaggctgcagtgagccgtgatcatgcctctgcactccagcctggacgatagagcaagactttatctcaaaaaacaaaaatttaaaaagatatcaggtagctcatagaattg

SEQ ID NO: 849903 - DNA, 120 bp, Artificial Sequence
  ENSG00000227373_8 (sequence is synthesized)
ttgagagggctgtaaaaccaggcttgaacttaaacagcaacgataaaccacccacagaacggacatgatgaagaagttggcaaatgttaccaactgtcctggtttttttggtgactgtag

SEQ ID NO: 849904 - DNA, 120 bp, Artificial Sequence
  ENSG00000227373_9 (sequence is synthesized)
tttccaaggattcagatccttccatgccaaaatctgaaaaatgctgggcaaagtatgactgacaatgtggtaatcttacagctagcactagagacatcaagcactagacaacacaatttg

SEQ ID NO: 849905 - DNA, 120 bp, Artificial Sequence
  ENSG00000227373_10 (sequence is synthesized)
ccctttggccacttatacaatgggaactcacgcttgcagtaacctctattgccactaggagagagaaacacagaaggaggaagggagaagggagagagaggaaaaaaactgttgcttgtc

SEQ ID NO: 849906 - DNA, 120 bp, Artificial Sequence
  ENSG00000227373_11 (sequence is synthesized)
tccttagctgtgagtcaaaggtctaacacagatgtctggctgaaaagcctaggtcacatgcctgcaccccagagaaagtatgtgacatcttctgcttccattatgggaaacagcctttgc

SEQ ID NO: 849907 - DNA, 120 bp, Artificial Sequence
  ENSG00000227373_12 (sequence is synthesized)
ttgtcacgaagatttacatggtgagacatatcctaaatatagggaagctgttgaagtggcccaaataatgaccaatttctactaatttgtactaatatccaaattacttttaattatcta

SEQ ID NO: 849908 - DNA, 120 bp, Artificial Sequence
  ENSG00000227373_13 (sequence is synthesized)
atattacttagatacagtgaggcaaccattcgttggatatataatggtttctttgatttcaaaaatctttttttatgtaatatatgtctgaagaccatcaaaataaattcttaaagtcag

SEQ ID NO: 849909 - DNA, 120 bp, Artificial Sequence
  ENSG00000227373_14 (sequence is synthesized)
attaataggatgttacttataatattattgtaattatttgaccacataatagtttatgcccattatatactatgtaattgtatgatggaaataatgctgtactttgtttgtaaaagttta

SEQ ID NO: 849910 - DNA, 120 bp, Artificial Sequence
  ENSG00000227373_15 (sequence is synthesized)
attatcctgacctttgttcatcataaagaattgctccatttctattatttatcgaggaaaaaagtttctctctttttgtttttaatatgtcattaggagaagagtagttacacgtaggct

SEQ ID NO: 849911 - DNA, 120 bp, Artificial Sequence
  ENSG00000227373_16 (sequence is synthesized)
agagtgtttgccaagaagaaattgattttaatgggaaccttttatctaagacaaactttaagaagagcagtaatggacaatgtgttctgtgcaactcttcagccttcagtctcacattca

SEQ ID NO: 849912 - DNA, 120 bp, Artificial Sequence
  ENSG00000227373_17 (sequence is synthesized)
ttgtggtcaagtattttcagcaaagaataacaagtcagagtttgtgtatatttttcatagctgttcattctcttacagagtaaccttgaacaaacctcttaagatttgtgttttatcttc

SEQ ID NO: 849913 - DNA, 120 bp, Artificial Sequence
  ENSG00000227373_18 (sequence is synthesized)
atatactgaaatacaaaatgggaatgcctatatttaatcaaagatataatttttactgatagatagtaaagaacaaaacactggaacaagaattcctgtcctgcctttcacaatgtggtt

SEQ ID NO: 849914 - DNA, 120 bp, Artificial Sequence
  ENSG00000227373_19 (sequence is synthesized)
ttgaggccttggccatgtcacttaaattctcatatctgttttctcaatctataaatgatcataatacctgcactatctgtctcaaattgcatatgtgaaagcatcttaaaggtacaaaac

SEQ ID NO: 849915 - DNA, 120 bp, Artificial Sequence
  ENSG00000227373_20 (sequence is synthesized)
aataaatacaaagcattattattaaattattacaccttccagcatttaatgctaaaaatgccaaatgcgtcctttggttatatgtaggaaatatgtctcagaaaaatcaatttaaaatta

SEQ ID NO: 849916 - DNA, 120 bp, Artificial Sequence
  ENSG00000227373_21 (sequence is synthesized)
tagaagctaacaggtaagtcattttaagtgtgtggttatcttctgcatggcagatttttaaatggtaattattaatgaagttttcctatacttactgtttccaagactccattctttcca

SEQ ID NO: 849917 - DNA, 120 bp, Artificial Sequence
  ENSG00000227373_22 (sequence is synthesized)
aagttttctgagttatgcttatcatcccttaagtcttagggatgctcttctgagcttttggggtttgtttaattgatatgtcatagttgtacatattttaggagttcttgtgatattttg

SEQ ID NO: 849918 - DNA, 120 bp, Artificial Sequence
  ENSG00000227373_23 (sequence is synthesized)
atacatgtatataatgagtaatgataaaatcagagtaattgggatatccatcacttccaacatttgtctttgtgttgggaacattaaaattcttctcttctagttattttgacatatgca

SEQ ID NO: 849919 - DNA, 120 bp, Artificial Sequence
  ENSG00000227373_24 (sequence is synthesized)
gtgaattattattaactataatttccctacagtactatcagatactaagacttatttcttccatctagctatatttttgtacccattaaccaacctcccttccttccctccccagtctct

SEQ ID NO: 849920 - DNA, 120 bp, Artificial Sequence
  ENSG00000227373_25 (sequence is synthesized)
tactgagatttttttaaacctaagatatcaaaaataagcttccatacaggagacaacaattaacacagcaaatagaaagtagaattgttctatgtaaaataattacaccctcttagaggc

SEQ ID NO: 849921 - DNA, 120 bp, Artificial Sequence
  ENSG00000227373_26 (sequence is synthesized)
atagaatatgactctatttataagagggaacaaatgaagaggagaagaatgtgttgaaagagatttccttgacaaatacatcgtatctactttgtgaaattaccaagtgcctaaggacta

SEQ ID NO: 849922 - DNA, 120 bp, Artificial Sequence
  ENSG00000227373_27 (sequence is synthesized)
gtaaagtactcaaatagcccctataaagaggcttctttgtttctttgatctctggccctttaaatagtgtctggataatctcatattaactcctgagagctgtgaatttatagatttaaa

SEQ ID NO: 849923 - DNA, 120 bp, Artificial Sequence
  ENSG00000227373_28 (sequence is synthesized)
actactgatgcaggacagctatgcaattaatcgagacaccaaaaatacaagcaggcagacaagatgcttattctgccagctccacaatttggactcttcagtaggaaaaaatatctcaag

SEQ ID NO: 849924 - DNA, 120 bp, Artificial Sequence
  ENSG00000227373_29 (sequence is synthesized)
cctactcctttaaaaaagttctgtttctcaactttcactgtctaaacctaaatagaattcctttctatttttaatcccctttcaacaaagcgaaagctgaatttacacaccagtttttgt

SEQ ID NO: 849925 - DNA, 120 bp, Artificial Sequence
  ENSG00000227373_30 (sequence is synthesized)
cttttatccatcaacactttagttgaagacaaactacactgctcgttaatctcaagtgggataaacctttctgacttttttctcacacctactcagtgtgtatttttcacaaaagtttag

SEQ ID NO: 849926 - DNA, 120 bp, Artificial Sequence
  ENSG00000227373_31 (sequence is synthesized)
tttagggtaaataatctgaagaggtggtatgcctgattctccgggtgaccttggcaatctctcagattcttttcctagagaatgtaatatagttaatagatagagtaatccagttattaa

SEQ ID NO: 849927 - DNA, 120 bp, Artificial Sequence
  ENSG00000227373_32 (sequence is synthesized)
gttattaaagaactatatgtactgctgggtgcagtggttcatgcctataatcccagtactttggaaggccaaggcgggtggatcgcttgagcttaggagttcgagatcagcctgggcaac

SEQ ID NO: 849928 - DNA, 120 bp, Artificial Sequence
  ENSG00000227373_33 (sequence is synthesized)
acaaaaattagccaggcatggtggcgtactcctgtaatctcagctacttggtgggctgaggctggaggattgcttgaacctggtaagcagaggttgcagtgatccgagattgtgtcacca

SEQ ID NO: 849929 - DNA, 120 bp, Artificial Sequence
  ENSG00000227373_34 (sequence is synthesized)
agagtgagaccctgtctcgaaaaaaacaaaaacaactattatgtactataattgatttttaaaactatgttatctgtcttgtccaagataagtactccaaaaaaactgttgatttatctt

SEQ ID NO: 849930 - DNA, 120 bp, Artificial Sequence
  ENSG00000227373_35 (sequence is synthesized)
gttatctgtcttgtccaagataagtactccaaaaaaactgttgatttatcttcatccatttatgctactattacagataccacagactaggttatttatttatttatttatttatttttt

SEQ ID NO: 849931 - DNA, 75 bp, Artificial Sequence
  ENSG00000227373_36 (sequence is synthesized)
tattaagatcaaggcaatggcagatttgttgtctggtgagggtccagtctctacttccaagatggtgccttgttg

SEQ ID NO: 849932 - DNA, 120 bp, Artificial Sequence
  ENSG00000227373_37 (sequence is synthesized)
gtgagggtccagtctctacttccaagatggtgccttgttgctgcatcctctggaggggaggaacactgtgtcctcacatggtggaaagcagaagggcaaagggacaactgcctccatcaa

SEQ ID NO: 849933 - DNA, 120 bp, Artificial Sequence
  ENSG00000227373_38 (sequence is synthesized)
gcctttttacaagagcatccaatcacaggggagaagccctcatggcccaatcacttcttaaaggcaccacattgacaatacctgaattttggagggcatatattcaaaccactacattgt

SEQ ID NO: 849934 - DNA, 120 bp, Artificial Sequence
  ENSG00000227373_39 (sequence is synthesized)
tgatttcttgattgggaggtaatgttttgactcatagcaagggaaaaagcagatctcatttgtaaagtgaaatattccactcaggattgtttatacattaactgagactaaaaagcaatt

SEQ ID NO: 849935 - DNA, 120 bp, Artificial Sequence
  ENSG00000227373_40 (sequence is synthesized)
tgatttggttcttcttaagtcttatacacacaatatcctacatattaataaaaatacaatgcaaataatgccacattgtgtcctgaagtataagaaagaagtataagaaataatccctga

SEQ ID NO: 849936 - DNA, 120 bp, Artificial Sequence
  ENSG00000227373_41 (sequence is synthesized)
tctcaattttacagagtggtaatggcttataacttctgacacatttaaaaggattccattcaaaaaacaattaagtgtctttaccatgtacaaggcatggtaaacaaaataactatttcg

SEQ ID NO: 849937 - DNA, 120 bp, Artificial Sequence
  ENSG00000227373_42 (sequence is synthesized)
gtgtcctaagtaatgcctctgaaatattgtgattataaattaactttgtgtctttatttttaaaagtcaacaaattttatgagatatgttaaaataaagaacagctctcaattgttcttc

SEQ ID NO: 849938 - DNA, 120 bp, Artificial Sequence
  ENSG00000227373_43 (sequence is synthesized)
cacccatcatttccctgtgtccaaagacaactacatttacctctaaatgattctcttcatatgtacctccatactctagataacatgtttgtcttgctatgtcatattcttttagttgta

SEQ ID NO: 849939 - DNA, 120 bp, Artificial Sequence
  ENSG00000227373_44 (sequence is synthesized)
ggcattccctatggtctttcctctccacaccacaattaaacacagacatacaaagcagttatcattcttatcacaatatagtgatataattttggttagataaatatatagtgtttctat

SEQ ID NO: 849940 - DNA, 120 bp, Artificial Sequence
  ENSG00000227373_45 (sequence is synthesized)
tattatgactatatatgctttcagaatggagcaatatagtcaactataatcattttcctttcctagaaaatattttgctttccctacagctaataatttttgtgtgtgtttaacttccta

SEQ ID NO: 849941 - DNA, 120 bp, Artificial Sequence
  ENSG00000227373_46 (sequence is synthesized)
atttctaattcaatcaaactctcttacagttgtttaaattcacatattctatcaatttatttatttcatcttcctaaatatttctgtcccagggtttatgaagtgccttaaccttgactt

SEQ ID NO: 849942 - DNA, 120 bp, Artificial Sequence
  ENSG00000227373_47 (sequence is synthesized)
gtcacatagctgtcatcctagggtctcccttgataaacatcttggaaaatcctttcacttctctcctaggacagggctcctgttttgatgatgcacacctttggtaacttcctcagagag

SEQ ID NO: 849943 - DNA, 120 bp, Artificial Sequence
  ENSG00000227373_48 (sequence is synthesized)
agagtaatctggacaagtcataatgagcttatatgataaaccaaacctgtgttgcaatcgcccatttaagactaagaacacaataaaatatgtatatagggagcagaaaatttcctcagc

SEQ ID NO: 849944 - DNA, 78 bp, Artificial Sequence
  ENSG00000227373_49 (sequence is synthesized)
caataaaatatgtatatagggagcagaaaatttcctcagcagtagaagaggcaggcagagatctaaatgcctgtttta

SEQ ID NO: 849945 - DNA, 120 bp, Artificial Sequence
  ENSG00000227373_50 (sequence is synthesized)
ccgcctcagcctcccaaagtgctgggagggattaaaggcatgagccactgcgcctggccctaaatgtctcttgaggaagaatagctagcctactacttttatttcttttattttttatat

SEQ ID NO: 849946 - DNA, 120 bp, Artificial Sequence
  ENSG00000227373_51 (sequence is synthesized)
aggcatgagccaccatgcccagcctctactacttttagaatttgatacttaatgtaaaggacacctaccaaaaatggtttttcccatacattatggtaggtgtctgaaattcatctcacc

SEQ ID NO: 849947 - DNA, 120 bp, Artificial Sequence
  ENSG00000227373_52 (sequence is synthesized)
tgaaattcatctcaccataggagtccttttcttttatgtggggcagtgatcctctgtagtgtataacaaaatcaccttgggagtttataaaaatgcatatctctatgctcaacccccaag

SEQ ID NO: 849948 - DNA, 120 bp, Artificial Sequence
  ENSG00000227373_53 (sequence is synthesized)
aaattcagtacctctaagataggccccaggacttgtttcaactttttcttataaaaaatgtttaagcacataaaaagtagagagaagagtataatgagccttcatgagtcagtcattcag

SEQ ID NO: 849949 - DNA, 120 bp, Artificial Sequence
  ENSG00000227373_54 (sequence is synthesized)
cttgaacaattatcaatatgtggccaatctccttccccacccctcacatggatatcacccataaatacttcatcatataaagctctaaaagataagaattcttgaccaggcatggtggct

SEQ ID NO: 849950 - DNA, 62 bp, Artificial Sequence
  ENSG00000227373_55 (sequence is synthesized)
tggtggctcaggcctgtaatcccagcgttttgggagtagaccccatctctacaaaaaattta

SEQ ID NO: 849951 - DNA, 120 bp, Artificial Sequence
  ENSG00000227373_56 (sequence is synthesized)
tcaacagcaggagccgagcaaagtgctcggcggaggaagaggaagggcgagggagagaaatggtcgagtacagaagcctgcgtgtgggtaagaaaataccctaaccactcgcccaccgga

SEQ ID NO: 849952 - DNA, 120 bp, Artificial Sequence
  ENSG00000227373_57 (sequence is synthesized)
cgcagggcggctgggactgcgaatccagcagcagccacagcgtagcagcgggcggcagccgccgaggcagcaatgtcaggagggcacagctggaggaggcggccgccaaagccactaccc

SEQ ID NO: 849953 - DNA, 120 bp, Artificial Sequence
  ENSG00000227373_58 (sequence is synthesized)
ggaagggagaaatcaccgagagagcgaaagatgtaacagaaacaggctcttgttctgtcacccatacttggagtgcagtggtacaatgatagctcactgcagcctcaaactcctggtctc

SEQ ID NO: 849954 - DNA, 120 bp, Artificial Sequence; identical to SEQ ID NO: 821115
  ENSG00000182776_0 (sequence is synthesized)

SEQ ID NO: 849955 - DNA, 120 bp, Artificial Sequence; identical to SEQ ID NO: 821116
  ENSG00000182776_1 (sequence is synthesized)

SEQ ID NO: 849956 - DNA, 120 bp, Artificial Sequence; identical to SEQ ID NO: 821117
  ENSG00000182776_2 (sequence is synthesized)

SEQ ID NO: 849957 - DNA, 120 bp, Artificial Sequence; identical to SEQ ID NO: 821118
  ENSG00000182776_3 (sequence is synthesized)

SEQ ID NO: 849958 - DNA, 120 bp, Artificial Sequence; identical to SEQ ID NO: 821119
  ENSG00000182776_4 (sequence is synthesized)

SEQ ID NO: 849959 - DNA, 120 bp, Artificial Sequence; identical to SEQ ID NO: 821120
  ENSG00000182776_5 (sequence is synthesized)

SEQ ID NO: 849960 - DNA, 120 bp, Artificial Sequence; identical to SEQ ID NO: 821121
  ENSG00000182776_6 (sequence is synthesized)

SEQ ID NO: 849961 - DNA, 120 bp, Artificial Sequence; identical to SEQ ID NO: 821122
  ENSG00000182776_7 (sequence is synthesized)

SEQ ID NO: 849962 - DNA, 120 bp, Artificial Sequence; identical to SEQ ID NO: 821123
  ENSG00000182776_8 (sequence is synthesized)

SEQ ID NO: 849963 - DNA, 120 bp, Artificial Sequence; identical to SEQ ID NO: 821124
  ENSG00000182776_9 (sequence is synthesized)

SEQ ID NO: 849964 - DNA, 120 bp, Artificial Sequence; identical to SEQ ID NO: 821125
  ENSG00000182776_10 (sequence is synthesized)

SEQ ID NO: 849965 - DNA, 120 bp, Artificial Sequence; identical to SEQ ID NO: 821126
  ENSG00000182776_11 (sequence is synthesized)

SEQ ID NO: 849966 - DNA, 120 bp, Artificial Sequence; identical to SEQ ID NO: 821127
  ENSG00000182776_12 (sequence is synthesized)

SEQ ID NO: 849967 - DNA, 120 bp, Artificial Sequence; identical to SEQ ID NO: 821128
  ENSG00000182776_13 (sequence is synthesized)

SEQ ID NO: 849968 - DNA, 120 bp, Artificial Sequence; identical to SEQ ID NO: 821129
  ENSG00000182776_14 (sequence is synthesized)

SEQ ID NO: 849969 - DNA, 120 bp, Artificial Sequence; identical to SEQ ID NO: 821130
  ENSG00000182776_15 (sequence is synthesized)

SEQ ID NO: 849970 - DNA, 120 bp, Artificial Sequence; identical to SEQ ID NO: 821131
  ENSG00000182776_16 (sequence is synthesized)

SEQ ID NO: 849971 - DNA, 120 bp, Artificial Sequence; identical to SEQ ID NO: 821132
  ENSG00000182776_17 (sequence is synthesized)

SEQ ID NO: 849972 - DNA, 120 bp, Artificial Sequence; identical to SEQ ID NO: 821133
  ENSG00000182776_18 (sequence is synthesized)

SEQ ID NO: 849973 - DNA, 120 bp, Artificial Sequence
  ENSG00000287412_0 (sequence is synthesized)
agcacaagagaactacgcagagctggagggagtccatggactgtcccacggcacactagaatctatcacctctgtcccttctccatgctcccaactgcaaagggaggaagaggtggtgtc

SEQ ID NO: 849974 - DNA, 120 bp, Artificial Sequence
  ENSG00000287412_1 (sequence is synthesized)
cctgccaaactatccttacaaaaccctagcctccaacttttcaggaagattgatttgagtaataactccatttaccacgtggcacggctggcctcaatgattaaactctattgcaatgct

SEQ ID NO: 849975 - DNA, 120 bp, Artificial Sequence
  ENSG00000287413_0 (sequence is synthesized)
acagtgagcttaggggttgcctccccaatctgggactcggctcacttattgcagaccctgtctcccatgcctggtcctgaggacatctggagaagatccctcaccaaccaacaggtggct

SEQ ID NO: 849976 - DNA, 89 bp, Artificial Sequence
  ENSG00000287413_1 (sequence is synthesized)
ggacatctggagaagatccctcaccaaccaacaggtggcttcaggtggtggggtgctggatgcttcataccctcgatcactggactcca

SEQ ID NO: 849977 - DNA, 120 bp, Artificial Sequence
  ENSG00000287413_2 (sequence is synthesized)
tttgccaggggctctcgggcctttgccacagactgaaggctgcactgttagcttccctgcttttgagatttggggactcggactggcttctctgctcctcagcttgcagacggcctattg

SEQ ID NO: 849978 - DNA, 120 bp, Artificial Sequence
  ENSG00000287413_3 (sequence is synthesized)
tggaagttcaagatcagagtgccagcagatgcaggttctagtgaggatcttcttcctggttgcagacactgacttcctgtatcatcaaattatggaaagaaaaaaggtaggtcattggcc

SEQ ID NO: 849979 - DNA, 120 bp, Artificial Sequence
  ENSG00000287413_4 (sequence is synthesized)
tttccttataaggtcactaatccccttcatgagggctccacccttgtgacctaattacctcccaaagtcccacctccaagtaccatcacactggagattagatttcaacatgtgaatttt

SEQ ID NO: 849980 - DNA, 120 bp, Artificial Sequence
  ENSG00000287413_5 (sequence is synthesized)
gaggggaaaaaatattcaatctataacagggatcaaaattctgttctgaacctctcttccatgtgagattggaactagatacaagtgcttgttatttgtcaaatatttgtgatatcttca

SEQ ID NO: 849981 - DNA, 120 bp, Artificial Sequence
  ENSG00000287413_6 (sequence is synthesized)
actcatttcatatttagaaggacaatttttcaacaggtggaaatgaaatatttaaaagtgtgatttcataacatcctaagttaaacacaaagaaatgactgagattgccagagagcagga

SEQ ID NO: 849982 - DNA, 120 bp, Artificial Sequence
  ENSG00000287413_7 (sequence is synthesized)
gcaaatgttggttgtgggcacacatactcatttgtccattttacagaaacatgtattgttatcttcgtgtggatgtcacaaagtagaagtctgatagaatatcttttgccaagttgactt

SEQ ID NO: 849983 - DNA, 120 bp, Artificial Sequence
  ENSG00000287413_8 (sequence is synthesized)
tcctatagattgccagaaggctaattgtcctagaacagcgtcatgtgccatattgcattgttttggtcaatgacggacctcatatgcaacagtggttccctaagattataatggagctga

SEQ ID NO: 849984 - DNA, 120 bp, Artificial Sequence
  ENSG00000287413_9 (sequence is synthesized)
taatggagctgaacaattcctattacctagtgacattgtagcacaacacattactcacatgtttgtggttatgctggtataaacacgcctactgaggcccggcgcggtggctcacgcctg

SEQ ID NO: 849985 - DNA, 120 bp, Artificial Sequence
  ENSG00000287413_10 (sequence is synthesized)
aaacaaacaaacaaaaaaaccacacctactgagctgtcagtcatatagaatatagtaccaacaattatgtacattcagtacataatgattgataaggataacaaatgactatgttactgg

SEQ ID NO: 849986 - DNA, 120 bp, Artificial Sequence
  ENSG00000287413_11 (sequence is synthesized)
tttatgtattcattatactatactttttattgttattttagaatgtactcttactttaaaaaaagttaactataaaacagcttcaggcaagtcctttaggaggtattatagaagaaggca

SEQ ID NO: 849987 - DNA, 76 bp, Artificial Sequence
  ENSG00000287411_0 (sequence is synthesized)
gcggacccacggcacaccgaacgcactccaacagaacccgacgcagacacgcgctttcaaccggcggagacactgg

SEQ ID NO: 849988 - DNA, 120 bp, Artificial Sequence
  ENSG00000287411_1 (sequence is synthesized)
ttagagaaagaacaaatcagtgtgaaggagaattgtcagtaaaattacaagaaaagattgagatcataattgacctttgaggataataaaatttaaagaccaaaaggatggacttcacag

SEQ ID NO: 849989 - DNA, 120 bp, Artificial Sequence
  ENSG00000287411_2 (sequence is synthesized)
aaacatgaccttaggttgtttttgcagttgtagtaactggttatatgaccaacaaaatatgaagaatgggtacaaattctgatagtaatgatcagtcactttgcaaatataaagctacta

SEQ ID NO: 849990 - DNA, 120 bp, Artificial Sequence
  ENSG00000287411_3 (sequence is synthesized)
tttactactgtattgtacaggttcaataatctttgtgtacacattttatgtatttattgtcaggctgctatataattcagtatttataatagatactatgtatagcaatctatggttagt

SEQ ID NO: 849991 - DNA, 120 bp, Artificial Sequence
  ENSG00000287411_4 (sequence is synthesized)
tttggtcttaaccaggaaaaatcactcttttgagttttgctgtttttactagattatttttactggatgattgctcatattatttgattattattgcaatttgtctttctggaataggaa

SEQ ID NO: 849992 - DNA, 120 bp, Artificial Sequence
  ENSG00000287411_5 (sequence is synthesized)
gcaagaggcctgaattctggttcctattctatcaattgtgtgaattctggaaactcagtttacttttctgggcctcatggttttcatctgaatgatgaccaacttggataaaatggtctt

SEQ ID NO: 849993 - DNA, 120 bp, Artificial Sequence
  ENSG00000287411_6 (sequence is synthesized)
accttgctattcatgttcatctgatcagttgtttgcatgctgacttacattaccctgatgggcagtacctgtggctgtttctgctccctcacccagtccataggcttctggttgtaaaaa

SEQ ID NO: 849994 - DNA, 120 bp, Artificial Sequence
  ENSG00000287411_7 (sequence is synthesized)
gtgtgcatcttgagactgtggacagttagctccagaggtgacagtataatcacttcacgtagaagaggatagagagagactcatgccagtggtggtgagcaagtattagagatatgatgt

SEQ ID NO: 849995 - DNA, 120 bp, Artificial Sequence
  ENSG00000287411_8 (sequence is synthesized)
gtgcctctgtgagttttggggtctaagataaattatggcactaggaagatggtcctttgtgtcagaagaactggagttgttggtgcaaaaaagtatgatgtcagcatagcagttttattt

SEQ ID NO: 849996 - DNA, 120 bp, Artificial Sequence
  ENSG00000287411_9 (sequence is synthesized)
gtacctcagcaacttctaaaataatctctattaagtgttttcaggaactactttctactataggaaaatcattgaggtgagtatccatctggacacagagaaatataacactgttttctg

SEQ ID NO: 849997 - DNA, 120 bp, Artificial Sequence
  ENSG00000287411_10 (sequence is synthesized)
ctcaccctccacttcacatataaatacaacatgtgttaaaggactaaatttctagtgtcacagtttgtactttatagtttgaagtcaataagaaagctcatataccttcctaaaagtcac

SEQ ID NO: 849998 - DNA, 120 bp, Artificial Sequence
  ENSG00000287411_11 (sequence is synthesized)
ccttcctaaaagtcacttgttaatgtttgatattaatctaattttatcataaattaaaagtataaaactacaaatttcttaaagataaaatatccaaatggattcagtcaaattaagcat

SEQ ID NO: 849999 - DNA, 120 bp, Artificial Sequence
  ENSG00000287411_12 (sequence is synthesized)
agaataggttaccatgcaggaggtactgagtacttaaaaggatggggaatgcaatgaacataaaagctggtaccaaggggaggaggagacagcgatgaattaaaacattatcttaactaa

SEQ ID NO: 850000 - DNA, 120 bp, Artificial Sequence
  ENSG00000287416_0 (sequence is synthesized)
agggctcaccactctaagggggtgcacgtgagagggtcgtgatcgattcagcaagcaggagtcttccctaagatttttctctgcgagggaatcaaactgctctatgaagctctatgaaga

SEQ ID NO: 850001 - DNA, 120 bp, Artificial Sequence
  ENSG00000287416_1 (sequence is synthesized)
ggcttatatggaaagatacagagactttctgccagcaaccatgtggtcagcccacacagaagtggatgttccaggccaggtcaaaccttcattcactgcagccccagctgaactctcaac

SEQ ID NO: 850002 - DNA, 120 bp, Artificial Sequence
  ENSG00000287416_2 (sequence is synthesized)
tacaacctcatgagaattcctcagaagaatcacccagcaaagccgctcctgaattcctaactcacaggaattgcgagtaataaatgtttggtatttaatccactaagttagaagtaattt

SEQ ID NO: 850003 - DNA, 120 bp, Artificial Sequence
  ENSG00000287416_3 (sequence is synthesized)
aactaatacagattttaatggttttaataaaggattagattaaaattatattcaaaggttctaatgctaaaaaggactcttttgtttcctaagaatactttattaatatttttagctgtg

SEQ ID NO: 850004 - DNA, 120 bp, Artificial Sequence
  ENSG00000287416_4 (sequence is synthesized)
aatatttttagctgtggtgcactctatataaatggtcaatgaaaagagaattttcaggttggagaatctttcagtgagtcctcaaagcatatcataaagttggctggctagtcttttctc

SEQ ID NO: 850005 - DNA, 120 bp, Artificial Sequence
  ENSG00000287416_5 (sequence is synthesized)
acctaagactgtcttgctaattccgctgaattcccattctcttgccacctcccctcctccacaccaattcaactgtattccatcattttcagcctgccttgctccaatttctaatggaaa

SEQ ID NO: 850006 - DNA, 120 bp, Artificial Sequence
  ENSG00000287416_6 (sequence is synthesized)
tgcagttgactcttgaacaacatgggtttgagccacacgaatctgcttgtatgcagattttcttccatctctgccaccgctgaggcagcaagaccaacccttcatcttcctccttttcct

SEQ ID NO: 850007 - DNA, 120 bp, Artificial Sequence
  ENSG00000287416_7 (sequence is synthesized)
tcctcagcctactcaaagtaaagatgacaaggaagacctttatgatgatccatctccacataacgaatagtaaatatattttctcttccttgtgattttcttaataacattttcttttct

SEQ ID NO: 850008 - DNA, 120 bp, Artificial Sequence
  ENSG00000287416_8 (sequence is synthesized)
ctttattgtaagaatacagcatacaatacgtatataagatacgtgttaattggctgtttatgttattagtaaggcctctggtcaacagtaagctactagttgttaagttttgggggagta

SEQ ID NO: 850009 - DNA, 120 bp, Artificial Sequence
  ENSG00000287416_9 (sequence is synthesized)
aaagttatatgtgaaattttgactgcacagtaatcagttcctctaaccctcatattgttcaagggttcatggtattaccaaataatactacaaatatttttggatatctttaacaactca

SEQ ID NO: 850010 - DNA, 120 bp, Artificial Sequence
  ENSG00000287416_10 (sequence is synthesized)
aaaaataaagcatatattgtgaataaatatattatcatctctaacacaaaaacattatcatgaatgtgatttgatggaatcaaagacaggtgtggggagatgggaggaaggagtgggaat

SEQ ID NO: 850011 - DNA, 120 bp, Artificial Sequence
  ENSG00000287416_11 (sequence is synthesized)
cagtatgtgcttcttatagaaataaagctttaagacaaattccctagtccctatttggaaagggattgaatcccccaagccccttaaatgtagaaattccatatacgctattgctaacca

SEQ ID NO: 850012 - DNA, 120 bp, Artificial Sequence
  ENSG00000287416_12 (sequence is synthesized)
tggtcatacttgttagttaatattcctaaagtcagcccaagtatgagactatgtattataagttaataggatgagcatctgatagtaattaatattttgaccagcttaattactgagtca

SEQ ID NO: 850013 - DNA, 120 bp, Artificial Sequence
  ENSG00000287416_13 (sequence is synthesized)
ataatttaattgtctttgatcaattaaattaactagtgcaagagtcatcctccaagtttggcagtaaaggataacttagaataattaatgtccaactgtggcttatttccaaagacaatt

SEQ ID NO: 850014 - DNA, 120 bp, Artificial Sequence
  ENSG00000287416_14 (sequence is synthesized)
aatgatttgtagctccttacaaattttactgttgttatggattaattggtatctaactttgaattagacagaatcaaataaaatatattaattattcagccatgacataatttacagaac

SEQ ID NO: 850015 - DNA, 120 bp, Artificial Sequence
  ENSG00000287416_15 (sequence is synthesized)
ctagtcaccatcactgaatatttctttaattggtatatagaaaccagaatactgagccagctcaataactgctaagtttttaaaatacgtgtagtttctgttggcttcttaccaggattt

SEQ ID NO: 850016 - DNA, 120 bp, Artificial Sequence
  ENSG00000287416_16 (sequence is synthesized)
tcttccatgtacctacataattttcataggacttgaaagtttttgctttgattttaattactacctgcagtatcttctcattaatcagttttcaagcaattaattgtatcataagtggaa

SEQ ID NO: 850017 - DNA, 120 bp, Artificial Sequence
  ENSG00000287416_17 (sequence is synthesized)
agtattgaccgaattacttaaaggccatttccagaattagacatggcaattaatttcctggtgtctatgttaataagttgtcatagattgtttgacagacagtgattacaatctacatca

SEQ ID NO: 850018 - DNA, 120 bp, Artificial Sequence
  ENSG00000287416_18 (sequence is synthesized)
gccatgcaaatacacaaagcaggcttatcggcttgcctaataataaaggaaggctgggttttaaaaggagaaaggaggtaaaatctgagccaactacattgttggggaggcagtactatc

SEQ ID NO: 850019 - DNA, 120 bp, Artificial Sequence
  ENSG00000287416_19 (sequence is synthesized)
tcagtcacaaagatgtagcattgctagagattgtcaaagccttttccaggtcttgaaaaattcagtttagaatatgttcttggctgccctaaattcaaccaagcatgaccacatttctac

SEQ ID NO: 850020 - DNA, 120 bp, Artificial Sequence
  ENSG00000287416_20 (sequence is synthesized)
catgattgcaagatacatattattacatatggaaaaatgtttatgtcttaggaaattttttgactttgctatggaaaagatatctgaagtccatttttataaaaaatgttaatttatttc

SEQ ID NO: 850021 - DNA, 120 bp, Artificial Sequence
  ENSG00000287416_21 (sequence is synthesized)
taaattgtatccactaacataggcactcttgtataattcattaattttttcagccatttctctttttttgccaaaccaaggtatgtaatgtttgtttagttccttaaaagtggtttgtaa

SEQ ID NO: 850022 - DNA, 120 bp, Artificial Sequence
  ENSG00000287416_22 (sequence is synthesized)
ttatgattttaatgaacatattttcatgtatgaaatatttcaaacagattgtaaaatacagagtgtagtatgacaaacactaatgagtatctcaggtagatttaatagatgtatacattt

SEQ ID NO: 850023 - DNA, 120 bp, Artificial Sequence
  ENSG00000287416_23 (sequence is synthesized)
atctcaggtagatttaatagatgtatacatttttgttttcacttccaatctctttattaaaacaattatttctatgaatttttaaataccttttcacaaatataattatgtggcataata

SEQ ID NO: 850024 - DNA, 120 bp, Artificial Sequence
  ENSG00000287414_0 (sequence is synthesized)
acaggggcgggggcaaaaagccgcaaaaagccccgacggcgggtcaaagagccgcaaaaagccccagcgtcgggggcaaaaagccgcggctgccggggcaaaaagcagcggaggcaaaaa

SEQ ID NO: 850025 - DNA, 120 bp, Artificial Sequence
  ENSG00000287414_1 (sequence is synthesized)
cccgcggcggtggctgcaaaaagcagcggcggcaaaaagccggggcggcgggggcaaaatagtggaaatggggtagaaggccagcacagcttggcattcctggactgtgatgtggaagga

SEQ ID NO: 850026 - DNA, 120 bp, Artificial Sequence
  ENSG00000287414_2 (sequence is synthesized)
cacagcttggcattcctggactgtgatgtggaaggaaaagtgcagcgcaagacaaagatgatactttctggccgagcgtgagtacaacctatgggtgtggttggagagaacatgtgttcc

SEQ ID NO: 850027 - DNA, 66 bp, Artificial Sequence
  ENSG00000287414_3 (sequence is synthesized)
agaaaaataatactatacaaaatcaagagtagacagtcacccctagacttaaattaaggttttggc

SEQ ID NO: 850028 - DNA, 120 bp, Artificial Sequence
  ENSG00000287414_4 (sequence is synthesized)
tggcctcttccataaaattcagggaagcatgtcctccacaaaacagaatcaaaatataaatgaaagactggcttaagatgaaaggaaaccttataaatgaaaagaagccagatgagaggc

SEQ ID NO: 850029 - DNA, 120 bp, Artificial Sequence
  ENSG00000287414_5 (sequence is synthesized)
tgagaggcacttaactgagaatgaaaaaaaactgagtggacaaaataattatgagaagatgaatcttcaaatcagaaagagggaaaaaagctcatttgatactatgggaactcaaaagag

SEQ ID NO: 850030 - DNA, 120 bp, Artificial Sequence
  ENSG00000287414_6 (sequence is synthesized)
taaattaagagcatgagaaaatgtatacaattctgagtaataagaacagaaatcaaaagttagtattgtatgttttagtagagcaacactgaagacgaatgaaaacaagaaataatatta

SEQ ID NO: 850031 - DNA, 120 bp, Artificial Sequence
  ENSG00000287414_7 (sequence is synthesized)
attaaatatgaacatatggagaacagaacaatatttttaaaatttttagtttctaagtttacctgaaattttaattttggtttcttatgtaataccagagttattaggaagatattagct

SEQ ID NO: 850032 - DNA, 120 bp, Artificial Sequence
  ENSG00000287414_8 (sequence is synthesized)
ttttaattttggtttcttatgtaataccagagttattaggaagatattagctaataacactattttcagtggtattttaagtatttgtcctagaaaaatttctattttttaaaaatgtat

SEQ ID NO: 850033 - DNA, 77 bp, Artificial Sequence
  ENSG00000287414_9 (sequence is synthesized)
atagttaacagatattgacctataaattttctttcatataataatgctgtgagacaatctctgttctctaactgtaa

SEQ ID NO: 850034 - DNA, 80 bp, Artificial Sequence
  ENSG00000287414_10 (sequence is synthesized)
tatataatagatcatccaaaattcttattgttttatgtagtcagtatttacctctgtttttctacatgtttatccttcca

SEQ ID NO: 850035 - DNA, 78 bp, Artificial Sequence
  ENSG00000287414_11 (sequence is synthesized)
gtagtcagtatttacctctctgcacctttgatgtcatatacataaacaggaaataacacatggtggccgggatgtaga

SEQ ID NO: 850036 - DNA, 80 bp, Artificial Sequence
  ENSG00000287414_12 (sequence is synthesized)
gagagccacaggacttgtgaatacaatccacaggcaaggatgtggcgattccttttgcagtattggagggaatgccaaac

SEQ ID NO: 850037 - DNA, 87 bp, Artificial Sequence
  ENSG00000287414_13 (sequence is synthesized)
cttgaaaaaatatttgcacatccatgcttgcagcagcgttattggcaatagctaaaacgtagaagagcacaatatgatatatacaca

SEQ ID NO: 850038 - DNA, 78 bp, Artificial Sequence
  ENSG00000287414_14 (sequence is synthesized)
aaagtggacagaatcatagagatagtacaatgatggttgccagaagctgtggggaggaagaaatggggaagtattgtt

SEQ ID NO: 850039 - DNA, 120 bp, Artificial Sequence
  ENSG00000287415_0 (sequence is synthesized)
ggctctggtgtccgggcttactcctgttccttcatcgtcttagaaatagggacttggaggcaaacagtcccattacaatgacgaagactactctcaacatgatgcacccaaatgaatgca

SEQ ID NO: 850040 - DNA, 120 bp, Artificial Sequence
  ENSG00000287415_1 (sequence is synthesized)
tttaccagtttgatgtctgcctttcttcctggtttgttgcattccgtagaagcagatcctgataagatgatgaagtgcacatgtctcttgagaaaatgctctcaggagaaggggggaagg

SEQ ID NO: 850041 - DNA, 120 bp, Artificial Sequence
  ENSG00000287415_2 (sequence is synthesized)
taagccaggtgcagcagaggactgagcaaggttggggtctcagctggacacttcttggacctgttcccacgggagctctggagtatgaactgtaccacagaattgtctcacctagaggga

SEQ ID NO: 850042 - DNA, 120 bp, Artificial Sequence
  ENSG00000287415_3 (sequence is synthesized)
gaagcttactgctgttttcatggctctgcatgcccggggaaagaggaaggccacaggaaggtgacagctgaggcaggtctggctcctggaggatgggacacacaacgtgggaaccggcaa

SEQ ID NO: 850043 - DNA, 120 bp, Artificial Sequence
  ENSG00000287415_4 (sequence is synthesized)
gtcaccagagtcatctcagccaagatcaaccaatagtcaattaccaggaacgtgagagaattctgagaccaggactgctcagccacctctgcctaaaataccaacacacagaacagtaaa

SEQ ID NO: 850044 - DNA, 120 bp, Artificial Sequence
  ENSG00000287415_5 (sequence is synthesized)
gtgaatggatgtttattatcctaagccactatattttgagattgtacctcatgcagcactattatgaccataggtgactgatataaaaagtaaggaattatgaatcataagaaaaagatg

SEQ ID NO: 850045 - DNA, 120 bp, Artificial Sequence
  ENSG00000287415_6 (sequence is synthesized)
aaccaaggaaagaatcagctttgaagaggtggtaaactatgggagttgggtatgcttttctgcaatgatcttgtcttattttctttttttttaaaggaaggcctacctgaataattctgt

SEQ ID NO: 850046 - DNA, 120 bp, Artificial Sequence
  ENSG00000287415_7 (sequence is synthesized)
gcaggaagataaaagcaagattagagtgagacctattcagggaggtgtcattttgtgagcagttcatgaccatacccaataatcagggtctgtctacatatctgaattttaatccttaca

SEQ ID NO: 850047 - DNA, 120 bp, Artificial Sequence
  ENSG00000287415_8 (sequence is synthesized)
ggccttagatgaactaaaataattataagaagttgtgtcattgtagacttctattaataaacatatacctacatatatacatgtttatgcacaagaatcagcctgtataggcatatttac

SEQ ID NO: 850048 - DNA, 120 bp, Artificial Sequence
  ENSG00000287415_9 (sequence is synthesized)
ctaggcatattcattgcatagtgctctcatggttgtgacttgggtgggtgtagcaaagtgacaggccaggatctcaccacataggaagaactttggtctggccaagacagggccagctag

SEQ ID NO: 850049 - DNA, 120 bp, Artificial Sequence
  ENSG00000287415_10 (sequence is synthesized)
tggcctccctgccattagctctgtctgccacccaagacagaagaagccaacagtccaaagggacatagcagcttcattttggttctagttagtggtgccatagaagaggaacaggcagat

SEQ ID NO: 850050 - DNA, 120 bp, Artificial Sequence
  ENSG00000287415_11 (sequence is synthesized)
aggatctcatctaggccatgagacaagcaagagttctcaagaagggtagactcttagaaacaggaggccagtgagacatggatctaagaggcatagccaggtagaagcagccctagtcaa

SEQ ID NO: 850051 - DNA, 120 bp, Artificial Sequence
  ENSG00000287415_12 (sequence is synthesized)
tggctagaagtataatatcccaataaaagaggcattcttagaaagctgggcagcatctcaggaccacacatgattggggaaaaggggttggtgaggggcagacccagccagttaggcctg

SEQ ID NO: 850052 - DNA, 120 bp, Artificial Sequence
  ENSG00000287415_13 (sequence is synthesized)
taggtgctgggacagggtgggggatgcattgtacccacagaataaagccataagggtgaatagcaagagccacattgtggatcaccctggagcaggtgtcagagtgaagcctgacatatg

SEQ ID NO: 850053 - DNA, 120 bp, Artificial Sequence
  ENSG00000287415_14 (sequence is synthesized)
gaagctctaggaacacaatggtaaccaggggaatagaggaagaaagagaggtttcaaggcctcagtaaagctgagactcaggaacagcaggtgtgcacaagtgctaagtggtctggatta

SEQ ID NO: 850054 - DNA, 120 bp, Artificial Sequence
  ENSG00000287415_15 (sequence is synthesized)
attcacgagctgggtgccaatgcctggctcagcttctatgggctcctggaggatccttaagaggtgataaagttcaggtaaagacagtggactgggaccaggcagagcctgggatcctgg

SEQ ID NO: 850055 - DNA, 120 bp, Artificial Sequence
  ENSG00000287418_0 (sequence is synthesized)
gctgctgtgagaggtacccccttccttatgggactgtagatttatgggaaacagtgattattgctgcagttttatccccagcattaagggaagcttagtggttagcaaaggaagaacgtg

SEQ ID NO: 850056 - DNA, 120 bp, Artificial Sequence
  ENSG00000287418_1 (sequence is synthesized)
aattttggaggccagaaaaaaatgatcttaaatactagtttgacatttttcttgagtgaacattgtcacattattttacgtatggattataatagacccttgaaatatttaaggaacaat

SEQ ID NO: 850057 - DNA, 120 bp, Artificial Sequence
  ENSG00000287418_2 (sequence is synthesized)
cttgaggcatgggaatactcaaatgcaagaatactacccgaatatttctggagagctacaatagagaggctgaggagaaggaggaatagaagaggtcgatcttgctgtcttagggtggca

SEQ ID NO: 850058 - DNA, 120 bp, Artificial Sequence
  ENSG00000287418_3 (sequence is synthesized)
gaggcagaagaggagaagaggtggaaggggaagcaagagagtaaggcatacttggtgtaacttttactgaaaaaatccatgtgtaagtggacctacacagttcaaagctttgttgttcaa

SEQ ID NO: 850059 - DNA, 120 bp, Artificial Sequence
  ENSG00000287418_4 (sequence is synthesized)
agatcaactgtatattatagttcatgtgagaagtcagggtcagagcaagaaaggcaagaagttgtctgtaacaaatcatctgtatcccataattctttcacatacacacaaattaaatag

SEQ ID NO: 850060 - DNA, 120 bp, Artificial Sequence
  ENSG00000287418_5 (sequence is synthesized)
aacactttaaaaattacttctaatgcttctagtttaagatgtcagacaaggtacaagtcttcattttaacatctactaagaaaaaagtagagatgcacaaagagaagtaaactaattaca

SEQ ID NO: 850061 - DNA, 120 bp, Artificial Sequence
  ENSG00000287418_6 (sequence is synthesized)
tcgttttatagatgataagctacaaggagatataagtcaatctcttctgcaaaatcccagaaagtctctggcctgagtccatagcaagggaataagaactgaagttgaaatcaggggatt

SEQ ID NO: 850062 - DNA, 120 bp, Artificial Sequence
  ENSG00000287418_7 (sequence is synthesized)
tgtttgaagtctgtaatgaagctgctgcaaccagtaggtacctcagtccttcttccccaaaccaacatgcaggcaaaacatcaggtggctcttctctaaaactgaacaatatttgggaaa

SEQ ID NO: 850063 - DNA, 120 bp, Artificial Sequence
  ENSG00000287418_8 (sequence is synthesized)
agcaaagacttctagtcctagtcacctatggataaagcatagaaggcttttctgtgcttgcaggactgaatgcaaattttaataaatttacatggtaaaaaaaaccccaaaggtataatg

SEQ ID NO: 850064 - DNA, 120 bp, Artificial Sequence
  ENSG00000287418_9 (sequence is synthesized)
gataggaggaaaaatagaacatgtagaaggaagggtaaggatgccaatacactgataccattaatgcagtcattcattcattcacttgacaaatatttgctgagaatctactgggtgcag

SEQ ID NO: 850065 - DNA, 120 bp, Artificial Sequence
  ENSG00000287418_10 (sequence is synthesized)
atgttgttttaggtacttgagatacagagaaagggggaaaagacagacaaaacttcttacccttttgaagcttacattaaattatgcctttaataagtgagttgcaagagatactgcaag

SEQ ID NO: 850066 - DNA, 120 bp, Artificial Sequence
  ENSG00000287418_11 (sequence is synthesized)
gtgagttgcaagagatactgcaagagctgatgggataagaaatagaggtttaaatatattatttaaagatataaagataactgatagaattattaatactaataatatatattgaaaaga

SEQ ID NO: 850067 - DNA, 120 bp, Artificial Sequence
  ENSG00000287418_12 (sequence is synthesized)
tttcaagctctcatgtatgggattaattagatactatctaaagtggataaatcaaaacagagataaaatcatagtatctggaattagggaggtaaccactaaaactacaagcagaaacaa

SEQ ID NO: 850068 - DNA, 87 bp, Artificial Sequence
  ENSG00000287419_0 (sequence is synthesized)
cccaggctggagtgcagtggagatatctcagcttacaacctcagcctcccaagtagctgggatgcaccaccgcgcccagctaatttt

SEQ ID NO: 850069 - DNA, 85 bp, Artificial Sequence
  ENSG00000287419_1 (sequence is synthesized)
cccaagtagctgggggggtagagacggtatttcgccatgttgcccatctggtctccaactcctaggctcaagcgatcctcctgcc

SEQ ID NO: 850070 - DNA, 120 bp, Artificial Sequence
  ENSG00000287419_2 (sequence is synthesized)
caccacacccagctggttactttttttagtgcaaaaattgagtcatgctatataaacatcacttgttttttaccttttatatgtactacatcactttgaaaatgtgatgacattgaccct

SEQ ID NO: 850071 - DNA, 120 bp, Artificial Sequence
  ENSG00000287419_3 (sequence is synthesized)
tttccccagaaaaatgaacattctcactaaattctgtagataatttctcggcattcatgaactacatgaagccattcatgggcaaggactccaggctaagaaccctggtagcttttttca

SEQ ID NO: 850072 - DNA, 120 bp, Artificial Sequence
  ENSG00000287419_4 (sequence is synthesized)
aaattttcaaaaatttaactcctgggctccttccatcttatccccagcatctgaacacctctccgtgccaataactgtttccaacaccatattcttctaatggctgtgttatgttctgct

SEQ ID NO: 850073 - DNA, 120 bp, Artificial Sequence
  ENSG00000287419_5 (sequence is synthesized)
ttatggagtcctataactttcaataaaagtgatcaccatgttccatgaattacccctgcaattcatccttacggcagcccgtggaagtgttcccgttttacagataaagctcagcggcgt

SEQ ID NO: 850074 - DNA, 120 bp, Artificial Sequence
  ENSG00000287419_6 (sequence is synthesized)
tatgacagccgccatgtggcagatccaggattgaaaaaaaggtctgtccaactcctaatgccgcattcttcacttccagactctccttgtttattgaagcctttctgcgtgagtcaatct

SEQ ID NO: 850075 - DNA, 120 bp, Artificial Sequence
  ENSG00000287419_7 (sequence is synthesized)
ctccaaatatgcctggtgccactgtaagccgcaccatggaccgatcccttcctttgggccttctccctgaacctctccaagggagaatctgtgctgtctcttcaggaactgggttaagga

SEQ ID NO: 850076 - DNA, 120 bp, Artificial Sequence
  ENSG00000287419_8 (sequence is synthesized)
tgttgtctggcccccagaaagctctgggtgtgggcccttccccccaagcctcctgaagctctggagaagcctcctggggcctggctgattggggtttcctggaatcgtgttggcgaggag

SEQ ID NO: 850077 - DNA, 120 bp, Artificial Sequence
  ENSG00000287419_9 (sequence is synthesized)
gagggagccggccagaaaatggaagtggacgtatggacggaccaaggctctgcgatgctcagtactgagagaagcaccagcaccacttggtggcacacaaagatggagagaagaattccg

SEQ ID NO: 850078 - DNA, 120 bp, Artificial Sequence
  ENSG00000287419_10 (sequence is synthesized)
cccaggaaggtttcagggagggagggggctttgggactggccttgaagccagagtggggactgtgagggaggccactttttgcttagggaaaagcaagaatgttgccccactgccctcac

SEQ ID NO: 850079 - DNA, 120 bp, Artificial Sequence
  ENSG00000287419_11 (sequence is synthesized)
ctgcccacccctcaacaagactgtggctttctcaggagcagagactttgtcttccaccatgtggttaagtcctgggctaagtcaaagccttcacaaccattatacaggtgggaagcctga

SEQ ID NO: 850080 - DNA, 120 bp, Artificial Sequence
  ENSG00000287419_12 (sequence is synthesized)
ggctcaggcagaagtggtcaggttagagctcaaactcaagcgctgggactccagtgccttgaagtgtggggccctgaggataccagagcagcaccaaggcattcacttgagccctgagtg

SEQ ID NO: 850081 - DNA, 120 bp, Artificial Sequence
  ENSG00000287419_13 (sequence is synthesized)
aagaactgtcctccccagaatgggtggggacaaatgacagccactgaccccctactgtgcatcagctgctcctcaaagaaccccgagaaagcatttagccccacgttacagatgaagaaa

SEQ ID NO: 850082 - DNA, 120 bp, Artificial Sequence
  ENSG00000287419_14 (sequence is synthesized)
ctgaggccccacaactagtacagcgtgaggctaggatctgccggtctctgtagctcagggacatgaacgctgccctttctgcccccggctgcaggcacaccccttttacagagaaaatgc

SEQ ID NO: 850083 - DNA, 120 bp, Artificial Sequence
  ENSG00000287419_15 (sequence is synthesized)
aaagcacctgggctcccttcttcagtcgctgagacccagaactgcccagttccaggctcttaacatgtcattgtgagtgcagaaacacttttgttgaggtgaaaaacagaaagttcccaa

SEQ ID NO: 850084 - DNA, 120 bp, Artificial Sequence
  ENSG00000251410_0 (sequence is synthesized)
aagaacccaccaattccggacacataaccatgcctaggaaggaaaggagttgctgttttgtagaagcgattgggatttgggagattagctggatatgatcagcagggagagcacgtgtgt

SEQ ID NO: 850085 - DNA, 120 bp, Artificial Sequence
  ENSG00000251410_1 (sequence is synthesized)
ctggatatgatcagcagggagagcacgtgtgttttcatgagaattatgccaagcttccctttgtggctagagtgaagtatactggtataaagtgctctaaaaatacagaaactgagagaa

SEQ ID NO: 850086 - DNA, 120 bp, Artificial Sequence
  ENSG00000251410_2 (sequence is synthesized)
gaagaaatatgaaaaagaaatggagaaatgtgagagagaaaaccatttactgtgcgacattagacttcctcgtgatgaaggaggaggagaacattggatctgataggtgattcaagtcta

SEQ ID NO: 850087 - DNA, 120 bp, Artificial Sequence
  ENSG00000251410_3 (sequence is synthesized)
aaaattgactgaactaaaatttaaaagccaaaaaaggtgaaaggtgatggaatctgtctcaagtatgaagagttcctgtaacttcataaggatgaaagatttaacagagtacacttaaga

SEQ ID NO: 850088 - DNA, 120 bp, Artificial Sequence
  ENSG00000251410_4 (sequence is synthesized)
gcaacaagacaactgtaatcttttcacatttataccgcagtggactgagattcaacaatctgggtcatcctggattggtgcaatcgtactcaaactgtccatctttgcatggtgcctaca

SEQ ID NO: 850089 - DNA, 120 bp, Artificial Sequence
  ENSG00000251410_5 (sequence is synthesized)
tattgtgcagaaccatctggaaaccaagcttgagtttttcttcctcaaccaactgttcaacgtaaatgtgtggattgagaaagagaagccagtgcagcaggagtatatgaagtgtggatt

SEQ ID NO: 850090 - DNA, 120 bp, Artificial Sequence
  ENSG00000251410_6 (sequence is synthesized)
tgtgttacttcctcattcacttgtgccttcagggcatgcttaaagctgatctcatatatgctactttcaatttatggagcactgctgtgaacgcccaactttatgggttgaggagtcaga

SEQ ID NO: 850091 - DNA, 120 bp, Artificial Sequence
  ENSG00000251410_7 (sequence is synthesized)
caatacccagtttctgatgggcagttcaggtcacatattgacttgataacccatgataaagcatttggtctctacggagttctgataacaagacaaaggctatttttcaaaagaagagtg

SEQ ID NO: 850092 - DNA, 120 bp, Artificial Sequence
  ENSG00000251410_8 (sequence is synthesized)
gttaggcatagagtagaagataatattgcttagctcccaaattctaagcctttgccctgtgatccatctataactccctgtcaaagcctccataaagcatcctatttgcaacttacatct

SEQ ID NO: 850093 - DNA, 120 bp, Artificial Sequence
  ENSG00000251410_9 (sequence is synthesized)
caagcaacaacaggtctgttaactcacatggcccaaattgtggagcagcttgcatggcagcctgaatctattgacaagccttctttggttcttgggctcgtacactagaaaatcaatcaa

SEQ ID NO: 850094 - DNA, 120 bp, Artificial Sequence
  ENSG00000251410_10 (sequence is synthesized)
ggtctctgcagcctaggacatgacataggctggagagttgacataatgctaaagtagagcaagggagccaaatgctagtccttttaacagaaatgaaactgctttcgatgatctttatta

SEQ ID NO: 850095 - DNA, 120 bp, Artificial Sequence
  ENSG00000251410_11 (sequence is synthesized)
aggtatggagaaaaatgcagtgtccagcttaattgtcccagctattgaggatctgactccaatatatatatatttttgggggttacataattccattcataataccaccagaggcattga

SEQ ID NO: 850096 - DNA, 120 bp, Artificial Sequence
  ENSG00000251410_12 (sequence is synthesized)
acttgaatggaccagagaggacaggcaaacttcatgaacaagtagtgcagttctccataatactgagaatgctgcataattctgaattcctgatactgaattatagtttaaggagaccaa

SEQ ID NO: 850097 - DNA, 120 bp, Artificial Sequence
  ENSG00000251410_13 (sequence is synthesized)
ccaggcctttggtggaaagtagattacatcacatcatttctgtcttagaaaggccaacagttcattctcatagctgtaggcatatttaatatatgaacttacattttctacccaaacaac

SEQ ID NO: 850098 - DNA, 120 bp, Artificial Sequence
  ENSG00000251410_14 (sequence is synthesized)
ctcagctagccaattatctggaggtttacgctatacctgatacattggtataaactcccatatgacaagacatggctagtaaccaggaagaattttcacgtgaaggaggcacagcagtgg

SEQ ID NO: 850099 - DNA, 120 bp, Artificial Sequence
  ENSG00000251410_15 (sequence is synthesized)
tcccataaccatgggtatgggttccactggctatgtcacatactgtatcatgctaatgcacctagtctcatacacttttggaattgcctacaaaaggtacagctgaagtagtagcattga

SEQ ID NO: 850100 - DNA, 120 bp, Artificial Sequence
  ENSG00000251410_16 (sequence is synthesized)
gataacattttgtgaagaagaaattccacccttcaggatgcagtacatgcatcgaatcagagatctctctatggcattgtgtccataatgaaaagaatagataggtccaggaatgtaaga

SEQ ID NO: 850101 - DNA, 120 bp, Artificial Sequence
  ENSG00000251410_17 (sequence is synthesized)
ttacaaacaggagtggcccttctttcactgatatccaataacccctaggaattttgtgcttttggtccctccatgtttgggatcttcagaactgaagctatttatcccccaaataggtac

SEQ ID NO: 850102 - DNA, 120 bp, Artificial Sequence
  ENSG00000251410_18 (sequence is synthesized)
attcttgatgtggacatcataatagttccatttaactataaactgctgcttttgtcagagcattttattctgcagccatcagacaagaagtcaccatcctgactggggtaattgacccta

SEQ ID NO: 850103 - DNA, 120 bp, Artificial Sequence
  ENSG00000251410_19 (sequence is synthesized)
ctcagccagaggactttgggctgttttacacagtgaggacatgaagaaatacttgtggatgctagttgatttacttgagcccttttccatactttctggacatataaagcaacttgacct

SEQ ID NO: 850104 - DNA, 120 bp, Artificial Sequence
  ENSG00000251410_20 (sequence is synthesized)
gggaagaatggttgccaaagggccttactacctggaatataggtttcattcacactaccacataagacaccaaaacctgtggagatgatagctgaaggtgaggatttagatatacagaga

SEQ ID NO: 850105 - DNA, 120 bp, Artificial Sequence
  ENSG00000251410_21 (sequence is synthesized)
atgtagagtgtccaataagagataaagtacatgagtaacaggtgtgttcccaagagcaactgcaaggacgatggctacaattcaactcactaactttcctttgctaagttccctcttaga

SEQ ID NO: 850106 - DNA, 120 bp, Artificial Sequence
  ENSG00000251410_22 (sequence is synthesized)
gaaccatgaagtagctgcttccaagtatagatgaagaagtggacctaagtataacaagaggtgaactgtgatggccatgtaggtgtgctgctgtaatttccatcaagagaacggctagaa

SEQ ID NO: 850107 - DNA, 120 bp, Artificial Sequence
  ENSG00000251410_23 (sequence is synthesized)
gaacatagtggactgacagcttctatcagctcctgtccgtttggatctgctatcatgtttatgctaatacttgctcttctcactgtccatcaatgactgagaacagtagatggttcatgc

SEQ ID NO: 850108 - DNA, 89 bp, Artificial Sequence
  ENSG00000251410_24 (sequence is synthesized)
actcaagcccaggtccgtatctctacaaaaagtatgaaaattactctggtgtggtggtgcacacctgtagtaccagctactcaggagtc

SEQ ID NO: 850109 - DNA, 89 bp, Artificial Sequence
  ENSG00000251410_25 (sequence is synthesized)
tgtggtggtgcacacctgtagtaaaatggagcccaagaggttgaggctacagtgagccatggtcctgccattgcactcctgcctgggtg

SEQ ID NO: 850110 - DNA, 120 bp, Artificial Sequence
  ENSG00000251410_26 (sequence is synthesized)
atacagaagcatttaatgcaagagataagttaacagaccagctaagaaaatgaaattatgatttaaatatgctggtcatttccctgtcgttttacagcttcaaattcatcctttaattac

SEQ ID NO: 850111 - DNA, 120 bp, Artificial Sequence
  ENSG00000251410_27 (sequence is synthesized)
atttgccatcactctgtgatgctatggctgacactatacaaaccatagggtttttgtttgtttgtttcgttttaactagcggtaacctcattagatttaggcaatagaaggcagagagga

SEQ ID NO: 850112 - DNA, 120 bp, Artificial Sequence
  ENSG00000251410_28 (sequence is synthesized)
gactgaaaagaaggcaaaggcaagaagggatgttctcttgttttgtgctctgattccggcgaggttccctatgagaagcaacatttcagcccagcagcagccatttgctaaagcattgtc

SEQ ID NO: 850113 - DNA, 120 bp, Artificial Sequence
  ENSG00000251413_0 (sequence is synthesized)
agtgaactggcagtgaaggatttacactcaggtctcttgggccccaaaatctaagtactgcacacgactctgcagacctccatggagtgactctttctaaaaagctttatgccaacagac

SEQ ID NO: 850114 - DNA, 120 bp, Artificial Sequence
  ENSG00000251413_1 (sequence is synthesized)
accagaggaggaaggtggtcaccaggcatcactgtccaccttacatagagtctcgctctgttgcccaggctaaagtgcagtgatgcaatcttggctcatggcacctctgcctcccaagtt

SEQ ID NO: 850115 - DNA, 70 bp, Artificial Sequence
  ENSG00000251413_2 (sequence is synthesized)
gccctctcttttgatgatctcaacaatccttgccagatggtgttcgtatccccattttaaagaagagaaa

SEQ ID NO: 850116 - DNA, 120 bp, Artificial Sequence
  ENSG00000251413_3 (sequence is synthesized)
tgccagatggtgttcgtatccccattttaaagaagagaaaaaaagagacatggacagattaactgattcatcaagggtcaagccaagctcatcagtggccaagcaggcatgggaagccaa

SEQ ID NO: 850117 - DNA, 120 bp, Artificial Sequence
  ENSG00000251412_0 (sequence is synthesized)
atgactggtgttcttataagaagatataatttgggcacagacagagggaagatcctgtaaagacacaggaaggagagggtagccatctacaagcagagaggccttagaagaaatcaaccc

SEQ ID NO: 850118 - DNA, 120 bp, Artificial Sequence
  ENSG00000251412_1 (sequence is synthesized)
taccaacatccctatccaggacctttcagcctccagaactataacaatcaaaagtgtggtcatctgctgtagtccagggaatcccagccttgcttgcaatagatggaactacttctttgg

SEQ ID NO: 850119 - DNA, 120 bp, Artificial Sequence
  ENSG00000251412_2 (sequence is synthesized)
gcttgcctgctgatcgcttccaagggacttcagcagctctgtttcagctggctcaaaggagaccttgctcagggagactcaacgtctgctggtataaagaaatgaggcatgctggcacag

SEQ ID NO: 850120 - DNA, 120 bp, Artificial Sequence
  ENSG00000251412_3 (sequence is synthesized)
ttaggggctgagatgccaggcagatgccagcaccatgcttttgaacttcccagcctccagaacttttctagggaatagacatggacatcttcaaaaggccactgttctgtctgccacaga

SEQ ID NO: 850121 - DNA, 120 bp, Artificial Sequence
  ENSG00000251412_4 (sequence is synthesized)
ggacttcaaggccagaggccattactgatacatgaaagatcacttctatcaccagcaggaacagcaagtacccagaaacagggttcagatgagagatctgcatctgcaatgtcactgata

SEQ ID NO: 850122 - DNA, 120 bp, Artificial Sequence
  ENSG00000251412_5 (sequence is synthesized)
gctccaaggcaggatacttaaaacaagcatactgcagcggggggacatatgagtccacaaaacagcctagagcagcaggaaaatcacctccaacttacttctgccttccaaatgttaggt

SEQ ID NO: 850123 - DNA, 120 bp, Artificial Sequence
  ENSG00000251414_0 (sequence is synthesized)
ataaggtattcccaactctcagagagagacactggggctcagggtaaagttgtgtgcccaaggtcttgctagggcagaccacctgggactcacacccaggcctatttcagtggaccctta

SEQ ID NO: 850124 - DNA, 120 bp, Artificial Sequence
  ENSG00000251414_1 (sequence is synthesized)
ctgtgtactgcctgtcaggccctgagctaccatgtggctcaaagttcagagaaactgtagctacaggttaaacagccttacgtgaacttggcgggcctactttattcaggcaacagtcta

SEQ ID NO: 850125 - DNA, 120 bp, Artificial Sequence
  ENSG00000251414_2 (sequence is synthesized)
gggagagagtccctgaggtcgggaagcagaggctccaataatgcgaacctacgaaactagactgcacgaaggactgtgagagacacagtctatgttgcccaggctggagtgcagcggcac

SEQ ID NO: 850126 - DNA, 120 bp, Artificial Sequence
  ENSG00000251414_3 (sequence is synthesized)
gcccaggctggagtgcagcggcacgatcacggctcactgcaggctcaacctcctgggctcaagtgcctcagcctagcgagtagttgggattctaggcatgtgccaccatgtccagctaat

SEQ ID NO: 850127 - DNA, 120 bp, Artificial Sequence
  ENSG00000251417_0 (sequence is synthesized)
tggcaggcagccctgcaccggacacacagtggcattcaacttcctgcctgccagccccagtgtgtggttcccagcctgacaaccttggcaccccagcaccccagcaggaggggtttctgc

SEQ ID NO: 850128 - DNA, 120 bp, Artificial Sequence
  ENSG00000251417_1 (sequence is synthesized)
ttgtggtcccctggccaccagcctcggccagctggttgtggaccagccgtgacctggggcaacccagccaacctcaccgtccaatgggctgcagccacctctctccagtgaggtctgaga

SEQ ID NO: 850129 - DNA, 120 bp, Artificial Sequence
  ENSG00000251417_2 (sequence is synthesized)
cccagccttaacgaggctacccccttccagggtctctctgtgttactcaggctggagtgcagtggcgtgatttctgctcactgcagccttgacctcccagcaggctcaagcaatcctcct

SEQ ID NO: 850130 - DNA, 120 bp, Artificial Sequence
  ENSG00000251417_3 (sequence is synthesized)
caggcatgtgccaccacgcccagctaagatcttttttaaaatgcttaatccagaagtcattacaaacaaatactagatcttatttattctatctaactatatctctgtacccattaacca

SEQ ID NO: 850131 - DNA, 120 bp, Artificial Sequence
  ENSG00000251417_4 (sequence is synthesized)
ctaactatatctctgtacccattaaccattctgccttccctgcctccattacccttcccaatctctggtaaacatccttctactctctgtctccaggagttcaactgtttttcatttttg

SEQ ID NO: 850132 - DNA, 120 bp, Artificial Sequence
  ENSG00000251417_5 (sequence is synthesized)
gctcccacaaataagtgaaaacttttgaagcttgtctctgtgcccaccttatttcacttagcatcatgacctcgagttccattcatgttgtcacatatgacaggatctcattctttttta

SEQ ID NO: 850133 - DNA, 84 bp, Artificial Sequence
  ENSG00000251417_6 (sequence is synthesized)
cattatatgttggggtttttttctgtttttgttttgagatggagtctccacctgtcgcacaggctggagtgcagtggcatgatc

SEQ ID NO: 850134 - DNA, 82 bp, Artificial Sequence
  ENSG00000251417_7 (sequence is synthesized)
ggcgtgagccactgtgcccagccaatttttactatttttatatttccaaaagctttgaactaattttactacttatgtgcaa

SEQ ID NO: 850135 - DNA, 120 bp, Artificial Sequence
  ENSG00000251417_8 (sequence is synthesized)
ttacaggtgtgagccaccatgcctgggcttcaaattctttattttgaaacaatttcaaatgtacagagatgttaaaaggctagcgtttccaggaaagtctagaacgtcaggataacattt

SEQ ID NO: 850136 - DNA, 120 bp, Artificial Sequence
  ENSG00000251417_9 (sequence is synthesized)
agaacgtcaggataacatttacccagattcaccagttgttaatattttgccacatttgcattttctctttctgtgtgtatattatacatatatatgtgtgtgtatgtgtatatatatata

SEQ ID NO: 850137 - DNA, 120 bp, Artificial Sequence
  ENSG00000251416_0 (sequence is synthesized)
taggggagggttagtctcacacaagctgccttgttatagaggacattggaaaccactggattatatgaagaaattaaggactagaatcactggtgcaagatcacactggggaaaagtgac

SEQ ID NO: 850138 - DNA, 120 bp, Artificial Sequence
  ENSG00000251416_1 (sequence is synthesized)
actccagtctttctgcttctagagattgaactactaacatctgcattatataaaattaagtctctcaaggtagtttgtgaaacgtaacatacaaataagtgattaaaatttttggtgata

SEQ ID NO: 850139 - DNA, 120 bp, Artificial Sequence
  ENSG00000256824_0 (sequence is synthesized)
aggcaggtgcgggaggcatgtgggacctggggcccctgtcggggctgcccgcgactccaggccctcacagatgcctggcggctccgaggtcggagctgtgtgtgctgtgaggggtaccca

SEQ ID NO: 850140 - DNA, 120 bp, Artificial Sequence
  ENSG00000256824_1 (sequence is synthesized)
gagcaggccccagcctggagatacgctgggcagtggcctcccatgcgcgcacagcctgaggattagaactggtgaaactgggttctcctccggacgccgtgacctggggcaaggtgagga

SEQ ID NO: 850141 - DNA, 120 bp, Artificial Sequence
  ENSG00000256824_2 (sequence is synthesized)
cctccctacctccccagcaaggaaacctctacaaacaggagcagccaagcaggactgaggcccttgccccccaagcatcttctcaaagaagggcatgtgggggcctgacagctcagctgc

SEQ ID NO: 850142 - DNA, 120 bp, Artificial Sequence
  ENSG00000256824_3 (sequence is synthesized)
atgtgtcagcagctccagccccaccatgaacatctgaactcctcagcggggtaatggaccccctcctttcccccggagacacagcctgagtggcaggaatacagagcctttggagagtgg

SEQ ID NO: 850143 - DNA, 120 bp, Artificial Sequence
  ENSG00000256824_4 (sequence is synthesized)
ctccgggcccgccaccgtgctctgccgcgcgccgggggctcctctcccgggcccccctgggcgccctccggctctggttcccgcccgctccttggaataacccctgaggctccagccgtc

SEQ ID NO: 850144 - DNA, 120 bp, Artificial Sequence
  ENSG00000256824_5 (sequence is synthesized)
ataacccctgaggctccagccgtcaccgcaaagtttcccgaggagacccgcctccccggccgctgcgcaggtgaggaagcaggcagtgggcgagaagatggattcctttttggacagaca

SEQ ID NO: 850145 - DNA, 120 bp, Artificial Sequence
  ENSG00000256824_6 (sequence is synthesized)
gcaagaacactctctgcacccagcccattctgccaagtgacttaaaggaattaaaaaaaaaaaaagccttggtaaacaaaaagggggtaaaagccacgcagaggcccttcagaagaggtg

SEQ ID NO: 850146 - DNA, 120 bp, Artificial Sequence
  ENSG00000255429_0 (sequence is synthesized)
cttgaacttctcacagcatgcctgctggattcgaagagatggcattcaagtgcttaaaaatcaagaagaccctcaccaggtgccagcgtctagacattggattttccagcctccagaact

SEQ ID NO: 850147 - DNA, 120 bp, Artificial Sequence
  ENSG00000231253_0 (sequence is synthesized)
atccctgtgcacggtggggcaggaaggatgggggttgggggatggatcagggaaagctgaagtttttctttggaaacaggggaactagtagaatcctaggagaaaactgaggcttgggga

SEQ ID NO: 850148 - DNA, 120 bp, Artificial Sequence
  ENSG00000231253_1 (sequence is synthesized)
gaggaggtcacatttcaaaggtcacctggccagtaatttgaaggttctggattcaaacccaggaagtctcaacacagagccccatctctctaccatctaacaagccagatattgtcctct

SEQ ID NO: 850149 - DNA, 120 bp, Artificial Sequence
  ENSG00000231253_2 (sequence is synthesized)
gggatactgcagccacctcacaagaagcttgtgcgtgacactggtgcagcggtgggaatggccaggagcatcacagagaccactggataaagccaatcctgaagcttcctgctatgtggg

SEQ ID NO: 850150 - DNA, 120 bp, Artificial Sequence
  ENSG00000231253_3 (sequence is synthesized)
ccaacagatgtccttattgttccaacggtctgagagctctgactgcagcaggtcgatggcgactggcactcctaaccctccatccttaacagggcgttttgcaaaaggaggggagatttg

SEQ ID NO: 850151 - DNA, 120 bp, Artificial Sequence
  ENSG00000231253_4 (sequence is synthesized)
agagaaaaggccgtgtgagaacacagcatgaaagtgaccatctgtaagacataaagagaggcctcaggagaaaccaaacctactgacacctccatcgtggacttccagtctctagaactg

SEQ ID NO: 850152 - DNA, 120 bp, Artificial Sequence
  ENSG00000231253_5 (sequence is synthesized)
agcccaaggtataccagcatgaagaggatcacctgagttacctggagatattgagatatgcccacccctaccaccatgtgcctgctgtgtaaagctcaatgggccattaccaggaccatc

SEQ ID NO: 850153 - DNA, 120 bp, Artificial Sequence
  ENSG00000231253_6 (sequence is synthesized)
actggagtgtgttcttcattctcctgcaccaccctcgtgtataccactttggttctgacattgcactgtttcagaatgctgtcaaggtgggtctcatgaggaatggtatccaggtcaggg

SEQ ID NO: 850154 - DNA, 120 bp, Artificial Sequence
  ENSG00000231253_7 (sequence is synthesized)
acaaacaaggagaccaaggacagccatgagcaagtttcaggaagttccatcacacagctgagaaatgggatatgatgtggccacagtctaagctggacaaagcggagtctgaaaaaggaa

SEQ ID NO: 850155 - DNA, 120 bp, Artificial Sequence
  ENSG00000231253_8 (sequence is synthesized)
cttatctaactgtattctatgggtatttgctcagtggaaattcagaaggctggaactaacagcatgggccttttcctcaagtacctctgcacttaagaaaggatgctttctactgctctc

SEQ ID NO: 850156 - DNA, 120 bp, Artificial Sequence
  ENSG00000231253_9 (sequence is synthesized)
agcccaagtattccctctagtatcattcaatggtgaatagctcaccaaattggcaatggctaagtttgaacaaaatgaatatattagcaatgactgaaaccaataaagaccaacaactca

SEQ ID NO: 850157 - DNA, 120 bp, Artificial Sequence
  ENSG00000231253_10 (sequence is synthesized)
tgtgcacggtggggcaggaaggatgggggttgggggatggatcagggaaagctgaagtttttctttggaaacaggggaactagtagaatcctgagctctgactgcagcaggtcgatggcg

SEQ ID NO: 850158 - DNA, 120 bp, Artificial Sequence
  ENSG00000231253_11 (sequence is synthesized)
tacatgaatgatttctgtttctgttggagatgaaagtattactagtcacacagagaaagggctaggggctaaatgagctgcactgatggtaaatgctgatagaggcctatggaggggacc

SEQ ID NO: 850159 - DNA, 120 bp, Artificial Sequence
  ENSG00000231253_12 (sequence is synthesized)
ttgtggcccagggcagcaagaaatgctgcattggagagatggggtacatgcgagtgacaatgggaagagttggtagctggagagaactgggaaagccttcagaaacgtggggctaaaata

SEQ ID NO: 850160 - DNA, 120 bp, Artificial Sequence
  ENSG00000231253_13 (sequence is synthesized)
agcccagaagctgaggaagggctgagtcagaccctcagagtggagcaatcactgcacggctgctccttgtaagaaacatcccgttgcgcctgagttgtttattgccaggagctgtaagtg

SEQ ID NO: 850161 - DNA, 120 bp, Artificial Sequence
  ENSG00000231253_14 (sequence is synthesized)
aaaaatgagctctcttaagccaggctgggagcaggctcctcttcctggagatggcacgatgcttcacagcttggaaacgttctgtgccagtataaaaggggtggcatacatccctcggag

SEQ ID NO: 850162 - DNA, 120 bp, Artificial Sequence
  ENSG00000231253_15 (sequence is synthesized)
caggaaagcctgatgacaaaggggaaggagcctgggctggaagccaagtggcactaggatattgtcctctctctctggagaaagcatcagcaggagccagtttgatcctctgacattgct

SEQ ID NO: 850163 - DNA, 120 bp, Artificial Sequence
  ENSG00000231252_0 (sequence is synthesized)
gggcattcactgagttgcctttgtatgctgggaggaccaagccggaggttcccactatgagcccggagtctgtgcagccagatgacgcatgagctctattcaaaatacccaagatttgga

SEQ ID NO: 850164 - DNA, 90 bp, Artificial Sequence
  ENSG00000231252_1 (sequence is synthesized)
gatgacgcatgagctctattcaaaatacccaagatttggaagcaacctaagtgcatatcagcagacaaaatggagtactattcagctgta

SEQ ID NO: 850165 - DNA, 120 bp, Artificial Sequence
  ENSG00000231252_2 (sequence is synthesized)
aactggaggtcgttatgcctctgcctctgaatgtgaagggaaactggaccagctcagtgtcaagcctacagacatttccttgttcctggggactgagcagtttgaagtttccaaagatga

SEQ ID NO: 850166 - DNA, 120 bp, Artificial Sequence
  ENSG00000231252_3 (sequence is synthesized)
aaacatctactctgaagagacctgaatggacaagagatgttttcctcttccttaccataataaaagaggactgctcctgaccacaggatatgcctggtccaggaaatggccacatttccc

SEQ ID NO: 850167 - DNA, 120 bp, Artificial Sequence
  ENSG00000231252_4 (sequence is synthesized)
ccctcaggacctctacttggatgggctgccttggaaataaggaagctcaaactgaggcagaatcacagcgatttggaaaatggtccaatcagctatagtggaagagcagaatcattgaat

SEQ ID NO: 850168 - DNA, 120 bp, Artificial Sequence
  ENSG00000231252_5 (sequence is synthesized)
ataaaacatggagatgtcagcagcaggggctgtgagctgaacagcttcactgggaagaggatatgggtgagaaggtacagcaatgggtacctccattaacagttaccagagtcatgtttt

SEQ ID NO: 850169 - DNA, 120 bp, Artificial Sequence
  ENSG00000231252_6 (sequence is synthesized)
aagatgactttaaggccctcaagtgttccaggctctgtacgttcttgtgccacaactatgccacaacaaaacagtttttcccccatttctactttgtttttccagctgtagagtcaaagc

SEQ ID NO: 850170 - DNA, 120 bp, Artificial Sequence
  ENSG00000231252_7 (sequence is synthesized)
tttgtttttccagctgtagagtcaaagcctcaagaaggggaaagggacgaatggacaccaggtcatgtgccaggtagctgggaaatgaatacttctattttctattcttttttttttttt

SEQ ID NO: 850171 - DNA, 69 bp, Artificial Sequence
  ENSG00000231252_8 (sequence is synthesized)
agtagccgggattacaggtgcgcctatgttggccatactggtttcaaactcctgacctcgtgatccgcc

SEQ ID NO: 850172 - DNA, 120 bp, Artificial Sequence
  ENSG00000231252_9 (sequence is synthesized)
gtgtgagccaccgcacctggccaaatacttctattttcatctcttaggaaagcatatgatgtaaatcactgttcccatattcaaatttaaataatggcttacctttccggggatgtttgt

SEQ ID NO: 850173 - DNA, 120 bp, Artificial Sequence
  ENSG00000231252_10 (sequence is synthesized)
atttgaatgaagcagcaagtttttgccacactgtaatactttaactttacagatattttgactccttctgtttctgatttgctttcataaatgaataaaaatacattattttacatcaaa

SEQ ID NO: 850174 - DNA, 120 bp, Artificial Sequence
  ENSG00000231252_11 (sequence is synthesized)
acctccattaacaggtaagctggatcctccataggaataggcactagctggttttggatgaaggtgtcgtaagatcagatacacttttgggtgatcagcatgatctgggtatggacatgg

SEQ ID NO: 850175 - DNA, 120 bp, Artificial Sequence
  ENSG00000231252_12 (sequence is synthesized)
gaccagtagtgtctgttgctctggaggaagttacttaaactcaccaagactcagttttctctgtattaaaatgatgacacctacctcactatctggccattgggattaaatatgagaata

SEQ ID NO: 850176 - DNA, 120 bp, Artificial Sequence
  ENSG00000231252_13 (sequence is synthesized)
tgtgtgaaaatttatgtcatatggtaagcactcagatgtttcctggtggaacagcatggtgtggattaggaacatccaaactctgacatcaagctgaacttttgaaatagaggcctccct

SEQ ID NO: 850177 - DNA, 120 bp, Artificial Sequence
  ENSG00000231252_14 (sequence is synthesized)
gctcactagttgggcaaccttgaacaagctagttaaactgtctagagctcagttttgttatctggtgagattaatagcattgaatggtgtaaagcacattctcagtaaatgctcattatt

SEQ ID NO: 850178 - DNA, 120 bp, Artificial Sequence
  ENSG00000231252_15 (sequence is synthesized)
atgattatagttattaatgtttatttaactttgaaataataatgtgtaggagctcctcaggtagataatggaaataagaaatttcttaggtcatggaagcatggaggtatggaaaatttt

SEQ ID NO: 850179 - DNA, 120 bp, Artificial Sequence
  ENSG00000231252_16 (sequence is synthesized)
ggagaacaaagaggagtctggtgaagtagggtggggatactgggcagatgcaaagattgccaagggttatatcataaaggccgggataccagcctggcatcaactgccttagattgggaa

SEQ ID NO: 850180 - DNA, 120 bp, Artificial Sequence
  ENSG00000231252_17 (sequence is synthesized)
gatgcaaaactgtggtctggagtcagccctgcagaagcctgtttcctgactttccatcttcaatctcttttctatgcagttaccagagtcatgttttgaaatctcaaatctgagcatcta

SEQ ID NO: 850181 - DNA, 120 bp, Artificial Sequence
  ENSG00000231252_18 (sequence is synthesized)
gaaataagatggaaacatccatcttctctgtggtactaatttagagtgatcttgactgcctacaacattaaggaggtgaagttgtgcctcagactgccttcccccacttccaggattcct

SEQ ID NO: 850182 - DNA, 120 bp, Artificial Sequence
  ENSG00000231252_19 (sequence is synthesized)
ctatgttgataagggagaaagattttctgctcagatgtgtccacaattctggtgggcaggattacagttccttcaaggcaaaggactcagctcttcttgctgttccatcatgtcctcgca

SEQ ID NO: 850183 - DNA, 120 bp, Artificial Sequence
  ENSG00000231252_20 (sequence is synthesized)
gcacctgatctaaacagtatactggattggaaacccattcaatctgatgtctgctgaggaatggagaaagaccactggtgattcctccatcctcactcctgtgtccctccttgcattgca

SEQ ID NO: 850184 - DNA, 120 bp, Artificial Sequence
  ENSG00000231252_21 (sequence is synthesized)
agtgctttacaagtcttcccgatagaccatgagcatcctgagggctggtatcaaatttaactcatctcctatcctcagtgcctcgtacaagatgctggatgtaggaggagttcaaaataa

SEQ ID NO: 850185 - DNA, 120 bp, Artificial Sequence
  ENSG00000231252_22 (sequence is synthesized)
aaagtggaacaacaacctgcacccatctgacaacatacacatttgggaacaagaagatgagaaggagagtagaggcagcattgtatttctgactgcttgtttggttgctgggggagctta

SEQ ID NO: 850186 - DNA, 120 bp, Artificial Sequence
  ENSG00000231252_23 (sequence is synthesized)
tcagtatttcctcttcatgactgtctgaaaacatgcagctttgctgttagcaggatcggacttcacagggtgcctatgaagttgacctcaatggcctgacatgcattggtcttctatagg

SEQ ID NO: 850187 - DNA, 120 bp, Artificial Sequence
  ENSG00000231252_24 (sequence is synthesized)
ccactttttaattcaatcaccagataaagtggcttggacctcctatcctatctacagtgggcagtccagtgccctcttgaagacttaaggggattcatggcataggtgactatgatctcc

SEQ ID NO: 850188 - DNA, 120 bp, Artificial Sequence
  ENSG00000231252_25 (sequence is synthesized)
tatagtttcttgtataaattttggattcttgatcaaccagttcacacttaggcctcttgggacgtcccccctgcctctccccactctgtcctatttattgacaggagttttcttcattca

SEQ ID NO: 850189 - DNA, 120 bp, Artificial Sequence
  ENSG00000231252_26 (sequence is synthesized)
aagcatcactgatggaaggcagctatgtatatgtagtagactcttactaaaaatttaaggttgactacagggattatagcagagaacaggaaccaacctaaaatgtaaactaggttacta

SEQ ID NO: 850190 - DNA, 120 bp, Artificial Sequence
  ENSG00000231252_27 (sequence is synthesized)
gacgtctcaaaaactgccagcctctctacccacgggaagtcctcactcactgtatttacattcaggtcctacttacagacatgttttatcagatcacaactgcaaaattcctattacttt

SEQ ID NO: 850191 - DNA, 120 bp, Artificial Sequence
  ENSG00000231252_28 (sequence is synthesized)
gtgtgcagaactctttttttttttttaaagtcctacccatctagaacaatgtaggaggccttactatagacaaagtttccatttttgtaaatagtcaacagtctctgaattttattctaa

SEQ ID NO: 850192 - DNA, 120 bp, Artificial Sequence
  ENSG00000231252_29 (sequence is synthesized)
aaaaaagcaatctaactgtcatactaagagtgggaatctgattggataagtttgacatcaaatttttactatattactactacaattgctattaaaattactaatgttataaacataaaa

SEQ ID NO: 850193 - DNA, 120 bp, Artificial Sequence
  ENSG00000231252_30 (sequence is synthesized)
caattgggcagttttatgccatgttaacttagagcctatgagcacatgctctgatccctgatctgaagcagtttggggtgggcaacagagtggaactctggatgtcacagatatgtcact

SEQ ID NO: 850194 - DNA, 120 bp, Artificial Sequence
  ENSG00000231252_31 (sequence is synthesized)
cacattaatctacttggtgtgatttccttagaagggtctgtgtgtatggcatatattcaaattttcaatctgtgctccagttgggtatgcctggtctttaagaggatgaaaccaatatcc

SEQ ID NO: 850195 - DNA, 120 bp, Artificial Sequence
  ENSG00000231252_32 (sequence is synthesized)
aaaaggaccttcctcataatcaaaactacattttcaaaataattaagaagtgtttgggagctgtgagaagatcccagaaatcagggaaaatcctttttctcccatcttgttcctaaggaa

SEQ ID NO: 850196 - DNA, 120 bp, Artificial Sequence
  ENSG00000231255_0 (sequence is synthesized)
caatgtacccctacagtcctccaggaagtcgtaatttgatgggagacaaagaaacatagccaaggatacaattttaaggtcaccttgaatccttcctggaaaaaagcaggtcataaataa

SEQ ID NO: 850197 - DNA, 120 bp, Artificial Sequence
  ENSG00000231255_1 (sequence is synthesized)
aagatgaagaacttttaaattcctagaagcatcttagaaaagataacacaaaaactttatttaatgtaaaaataagagctgagagtcagttaaataaacattgttaacagttgaaatttt

SEQ ID NO: 850198 - DNA, 120 bp, Artificial Sequence
  ENSG00000285829_0 (sequence is synthesized)
gcgtcacgaggaagcctccagatggagcgcggccgccaaggcgcagtagcagggcgacgacgctccgagaggtccccatcgtcagacccctctggcttccatggcgcgtcttcaaacccg

SEQ ID NO: 850199 - DNA, 120 bp, Artificial Sequence
  ENSG00000285829_1 (sequence is synthesized)
gccgatcccggcgagtgtggcggccgcgcagcgcagtggcgaattcgatcttctgggtctccgggtggttcccactggggctctcgcgccgtctctctggagccaaaggcccccctcaca

SEQ ID NO: 850200 - DNA, 120 bp, Artificial Sequence
  ENSG00000285829_2 (sequence is synthesized)
ccctcacacggctttcgccagtgcatcgcttttcccagcggaagttcacagagacagggggattgagaagggacacatccagaatacactttgggccaggcacagtggctcacgcctgta

SEQ ID NO: 850201 - DNA, 88 bp, Artificial Sequence
  ENSG00000285829_3 (sequence is synthesized)
gcaggcagatcattgggggcgaaaacccgtctctacaaaacaacaacaataacaacaacaacaaaaattagctgggcatggtggcgtg

SEQ ID NO: 850202 - DNA, 120 bp, Artificial Sequence
  ENSG00000285829_4 (sequence is synthesized)
tgggaggctgaggtgggagggttgctggagcctgggagttcaaggttgcagtgagccaagatcacatcgctgcactccagcctgggcaacagaggcagacttggtctcaaaaaacaaaac

SEQ ID NO: 850203 - DNA, 120 bp, Artificial Sequence
  ENSG00000285829_5 (sequence is synthesized)
ggcaacagaggcagacttggtctcaaaaaacaaaacaaaacaaaagaacacactttgcagcctccctccattgagggggctgctttctgtccagtggaatgtgagtaaagtggcaaagcc

SEQ ID NO: 850204 - DNA, 120 bp, Artificial Sequence
  ENSG00000285829_6 (sequence is synthesized)
acttccaggtctggcctatgaaaatctacccttagctctccaatcttctcctctaggcattggccgactttttctgtaaaggaccagttggtaacggttttagacttcatgagccatgcc

SEQ ID NO: 850205 - DNA, 120 bp, Artificial Sequence
  ENSG00000285829_7 (sequence is synthesized)
actaaagcagggccacagctactcttctctctctcttatttgctacctgaattctgatattcagatcgcctttagaagccacatgttgaaagtggcacagcctcccgttgtctgagacac

SEQ ID NO: 850206 - DNA, 120 bp, Artificial Sequence
  ENSG00000285829_8 (sequence is synthesized)
tgtaagaaacccagacaagaaaaccagatggggtgcaaggaatcggcgatttccgtttcttacagcagaaatggaggtcccccaattccttgcccccatcctccttttatggagtaagaa

SEQ ID NO: 850207 - DNA, 120 bp, Artificial Sequence
  ENSG00000285829_9 (sequence is synthesized)
ataaacctgtattgtgtttagcaactgaaatttgggggtggggtatctcttccataagttagtgttactttaactaagatagaattagtactaggagcgggatattgccataatgaaaat

SEQ ID NO: 850208 - DNA, 120 bp, Artificial Sequence
  ENSG00000285829_10 (sequence is synthesized)
cgaaaatgtgtggcattggttttgtagttgggcaagatagtgagaaaacctttgtcagggtttggaaagatggagacccatgctaggcaacggcaaaacatttggtaaaatagttgcctg

SEQ ID NO: 850209 - DNA, 120 bp, Artificial Sequence
  ENSG00000285829_11 (sequence is synthesized)
agataaacaggtcagctgtcctctgaccctgtagctctaagggaagaagtcataaagtacaggcagcacttaacaaggtctcagaagaataagatgggaccagtgagcactggctgattt

SEQ ID NO: 850210 - DNA, 120 bp, Artificial Sequence
  ENSG00000285829_12 (sequence is synthesized)
gcaagcaaaactaagatgaaatagggactcccggaatttggggtattggttaggaacattgacggcttctagatgccaaacagaaggaaatcatagcttaaaggcctttgagcagcaaag

SEQ ID NO: 850211 - DNA, 120 bp, Artificial Sequence
  ENSG00000285829_13 (sequence is synthesized)
gcccatgaagcctcaacctcaggcaaggtcagagtcagggagtgtccttccccaggcctgagaacctcaagattgccatcagcacatcgagagagaatggccggagggcggacagcagaa

SEQ ID NO: 850212 - DNA, 120 bp, Artificial Sequence
  ENSG00000285829_14 (sequence is synthesized)
gaatcaggctggagaactgtgtctaactgtgaatttcgcacgtggttgctggcatccagaaatgactggaagcaagtagaggagccttttcagattttcagggaactgtatgtcaaataa

SEQ ID NO: 850213 - DNA, 120 bp, Artificial Sequence
  ENSG00000185203_0 (sequence is synthesized)
cggcagtcactttgcggccactatgaggactgagcttcctctccccaggacccgcatgggagagaccgcggcttcgagacacctggggacacctggggacacctggggcggcgtccgcgg

SEQ ID NO: 850214 - DNA, 120 bp, Artificial Sequence
  ENSG00000185203_1 (sequence is synthesized)
tgaggactgggagacgctgctgcatctccgggacaccacttggggccgaggccaaggacccacccaggaggggccatggcttcgagacacctgaggagacctggggccacgtccgcgatg

SEQ ID NO: 850215 - DNA, 120 bp, Artificial Sequence
  ENSG00000185203_2 (sequence is synthesized)
aggacatctctgggacacctggggctgcatctccgggacacctggggctgaccctggtacggggaaaggaggaggaacacagagatgccctcgtgaggtcggggaccagcaggcaccgca

SEQ ID NO: 850216 - DNA, 120 bp, Artificial Sequence
  ENSG00000185203_3 (sequence is synthesized)
gtctaaggccaatgaaacaggcgcccctagatgagtgctcggtgtttgttttgttttgttttcttttgagaaggagtttcgctcttgctccccaggctggagtgcgatgtcgcgatctcg

SEQ ID NO: 850217 - DNA, 120 bp, Artificial Sequence
  ENSG00000185203_4 (sequence is synthesized)
ccactgggcccggccagtgctttgtgttttaaggctcttttgttaacgcagtggaaacaacacaggaaatggaaaagcaggcacattatcattctcaggccactgcatttagcctgggcg

SEQ ID NO: 850218 - DNA, 120 bp, Artificial Sequence
  ENSG00000185203_5 (sequence is synthesized)
acagagcgagaccttgtctcaaaaaacaaaaacaaatgaaaacaaaaacaaaccattttgtgtgtctaatggaagtcacctcgtcaacaacagtcttttgttgagaaagtctgtttaatt

SEQ ID NO: 850219 - DNA, 120 bp, Artificial Sequence
  ENSG00000185203_6 (sequence is synthesized)
ggcagtgtatttgtaatggtacataaaatgacgtctgctttataagcattctcattcctatattagatgaaatgtattaactatatcaagctttgatattataccataaaattacttgaa

SEQ ID NO: 850220 - DNA, 61 bp, Artificial Sequence
  ENSG00000279987_0 (sequence is synthesized)
agttactctttgcagacccatcttttgacaatcattgtgcggtgtcggaaggtctgagcag

SEQ ID NO: 850221 - DNA, 79 bp, Artificial Sequence
  ENSG00000279987_1 (sequence is synthesized)
actgagaggcagctggcagggtgaagggcaaggggaggcaggccacagagatgacagcctttaagctgtcatactggga

SEQ ID NO: 850222 - DNA, 85 bp, Artificial Sequence
  ENSG00000279987_2 (sequence is synthesized)
gaaagacagtgaggggtctcttgggtctctggcacagggcatgatgaagaggtggcagtttttcaggaatctctctctctaggga

SEQ ID NO: 850223 - DNA, 64 bp, Artificial Sequence
  ENSG00000279987_3 (sequence is synthesized)
acagtgaggggtctcttgggtctctggcacagggcatgatgaagaggtggcagtttttcaggaa

SEQ ID NO: 850224 - DNA, 120 bp, Artificial Sequence
  ENSG00000279987_4 (sequence is synthesized)
gccgaacaggaaagcatgctccactgccccggagccatccaagttccccctccatattccgccactgctaagtgtccagcttattcctcctggcatgtagtaaacacttagagaacatta

SEQ ID NO: 850225 - DNA, 83 bp, Artificial Sequence
  ENSG00000279987_5 (sequence is synthesized)
actctgcaccagccctgcactcacagtcatccggctgtgttcccctctccaggaaggcactgcccacgcagtctgtctgatag

SEQ ID NO: 850226 - DNA, 64 bp, Artificial Sequence
  ENSG00000279987_6 (sequence is synthesized)
ctgcaccagccctgcactcacagtcatccggctgtgttcccctctccaggaaggcactgcccac

SEQ ID NO: 850227 - DNA, 120 bp, Artificial Sequence
  ENSG00000279987_7 (sequence is synthesized)
agaaaaggatcataagtttaaacttagaacagattatcactattttccctctggtcttctgtcagcaagatgtcaacagccctatctattgtaaatgcattaaccagcgtcttctctgat

SEQ ID NO: 850228 - DNA, 120 bp, Artificial Sequence
  ENSG00000255420_0 (sequence is synthesized)
gagaatctgtgaacactgtgaaacggttgttgttttacaccgtagataaccaggcaggcagaattcatctccgaggaactggttctttttccttgaaagctgattcatggccctttggtt

SEQ ID NO: 850229 - DNA, 120 bp, Artificial Sequence
  ENSG00000255420_1 (sequence is synthesized)
atggcaggaagggtcccagttcatctgcagagatgagctgctctgcacagaggagcgataggaattcaggagttgtcttcttgtagctaaatgatgagttgtaggggtaagattggaact

SEQ ID NO: 850230 - DNA, 120 bp, Artificial Sequence
  ENSG00000255420_2 (sequence is synthesized)
gggagaagagaggatacaggagaaaagcttgagtaaaaagaaggtgaaatggtagaaagctggactctaagaaggaaagtaactggtgagaaattctgacggatggccaaggaactcgag

SEQ ID NO: 850231 - DNA, 120 bp, Artificial Sequence
  ENSG00000255420_3 (sequence is synthesized)
gaatggagatgtctaatgttctattttaagttggttcctgctccttggtgctgctctattacctcgaaactttcagaaaaagtctgacagaagagacagaaactataaactataatttgg

SEQ ID NO: 850232 - DNA, 120 bp, Artificial Sequence
  ENSG00000255420_4 (sequence is synthesized)
tttcagttcaggtcactaaatgccatttctggcatccctgaacttgtgaatgaccaatgatcatatgatcatgtgagttactatcatctctaacctgtgtacaactgccacagcatgaat

SEQ ID NO: 850233 - DNA, 120 bp, Artificial Sequence
  ENSG00000255420_5 (sequence is synthesized)
tagtgaaaggatacagagtaaagtcagcaaagaagaaaggctttggagcaaagccaggagaaaccacaggcttccaagtgaaccctcccggtggagttgcatgaggactcacttcattct

SEQ ID NO: 850234 - DNA, 120 bp, Artificial Sequence
  ENSG00000255420_6 (sequence is synthesized)
tgccaattggaaaagctcacccaagccttgttgtccaaagctcttaatgaggagtcagtcatggagacatacaaagcctgtgtaactggcctcgctgccccaataactccctctccccca

SEQ ID NO: 850235 - DNA, 120 bp, Artificial Sequence
  ENSG00000255420_7 (sequence is synthesized)
cccccagagccaaactaagagttcatcttaagtcattttattaggataaacttattgggtcaaactgatatagcctctcccaaggccccagggatacaaaaacattcatcagtcagaata

SEQ ID NO: 850236 - DNA, 120 bp, Artificial Sequence
  ENSG00000255420_8 (sequence is synthesized)
ttccaagggcccccaaaactcaagcacctgcacctcttctccaaggactgccttcacacagctggaaccactttgctcacctttaaaaagagccataggtacctaggatctgcctccatg

SEQ ID NO: 850237 - DNA, 120 bp, Artificial Sequence
  ENSG00000255420_9 (sequence is synthesized)
ctgggatggcccttgcctaagcctgacaggtgcaggagtgaaagagcgaagcaaccttgccttgtgtgtagacaacgttgaggtgtagcttgtattccagggtttccctgtaggatagtg

SEQ ID NO: 850238 - DNA, 120 bp, Artificial Sequence
  ENSG00000255420_10 (sequence is synthesized)
ttaactctgacctctatgagactttgcctgaaatcactctcttgcttgacttcctttttttttcttgtcctcctacacccactcttttactggtctccctagcagcattcagtgatgtgc

SEQ ID NO: 850239 - DNA, 120 bp, Artificial Sequence
  ENSG00000255420_11 (sequence is synthesized)
tgacactggctagttccaaaagctgattgttagcaactcttcccaactccatattcagagatatcctgttggtagctttaaactggtcatggtggaagtactcactatagagtatttgtg

SEQ ID NO: 850240 - DNA, 120 bp, Artificial Sequence
  ENSG00000255420_12 (sequence is synthesized)
gaaattgttgaatgcttgatttatttatcaagcttatttattttctttccataaagccagttgttactcatttactatcacaccactgagcacttccttaataaatcacttgaatatgaa

SEQ ID NO: 850241 - DNA, 82 bp, Artificial Sequence
  ENSG00000255421_0 (sequence is synthesized)
atattgggattacaggtgtgagccacaggtcccagccaaaatggtctctcttaagaatgcttttcttaccatcttaaaaaag

SEQ ID NO: 850242 - DNA, 120 bp, Artificial Sequence
  ENSG00000255421_1 (sequence is synthesized)
caagaaaaggcattttctcgttgcctctgggccactgatatgaacattactgagcgatgacacaataaggggactacaggatgttcagtggtgtctgttctgtaggacgcaggtctggag

SEQ ID NO: 850243 - DNA, 120 bp, Artificial Sequence
  ENSG00000255422_0 (sequence is synthesized)
acagcgctggggagaatgaacgcctgagtactcatgtctttatgcactgtagtattatttccttacaacagactcctgaacctggaacggcagtgtcaaagggttcacaaaatgttagac

SEQ ID NO: 850244 - DNA, 120 bp, Artificial Sequence
  ENSG00000255422_1 (sequence is synthesized)
gctgaggacaactcccactccacgatgtgaagccacagagtttcgaggccccaggacctccagcgtcaatgttgtgggatgatgggtgacagagccaaagcatcgccatcttggacaagc

SEQ ID NO: 850245 - DNA, 120 bp, Artificial Sequence
  ENSG00000255422_2 (sequence is synthesized)
acggtcattctgaagttccccttgatcaaaaactgcctaaacccaaaggatatcagcctgatggctaagatgcctcctgattgacctagtacactgggttaaaagggaattaaaaacatt

SEQ ID NO: 850246 - DNA, 120 bp, Artificial Sequence
  ENSG00000255422_3 (sequence is synthesized)
agaaggtggaagtgatattatgccaggtccagacttaggccttaggaggcctggcagtttccattttcaccctcttgggatccagccactatgaaaccaagttcacctgctttattggag

SEQ ID NO: 850247 - DNA, 120 bp, Artificial Sequence
  ENSG00000255422_4 (sequence is synthesized)
gcctaaacccaaaggatatcagcctgatggctaaggtcagcatgaccataaaccataaataacatctctgaccaggaacattccaaacccctccatgagacatgccagccctgagataac

SEQ ID NO: 850248 - DNA, 120 bp, Artificial Sequence
  ENSG00000255422_5 (sequence is synthesized)
ctcccctccggccagaaagatgtcagacccaagataacctcccctccgaccagagacatcccaaccctgccataaacttctcccccacacagaaacattctgagcttgtaataagccccc

SEQ ID NO: 850249 - DNA, 120 bp, Artificial Sequence
  ENSG00000255422_6 (sequence is synthesized)
tcatcctaaaaccaatatatactcttagtccgtaagagaaagtgctcctgaacaaaattggccagaagcccctctccggcttattttctctaaaatacatctgtcgttaaattgagccac

SEQ ID NO: 850250 - DNA, 120 bp, Artificial Sequence
  ENSG00000255426_0 (sequence is synthesized)
tactgggcccagtcccaggactatccaagtgtgaagccaacaccttttcacatcaactccaagttccatgggctgactggactccactgggagttcttgatgtctctcgtgtggttgtgt

SEQ ID NO: 850251 - DNA, 120 bp, Artificial Sequence
  ENSG00000255426_1 (sequence is synthesized)
gagatagtggctgggactggactcatctgaaggcttgactgggctggatgcccaagatagcccacttttagacagaggtggctggcagttgatgctgactgtcagctggggactcagctg

SEQ ID NO: 850252 - DNA, 120 bp, Artificial Sequence
  ENSG00000255426_2 (sequence is synthesized)
agagtgttaactggagtccctagacgtggcttctccacatggcttgggcttctcatggaagggcacctggattctgagagagagcatcccaagagacacaagtggaaatgataaggcttc

SEQ ID NO: 850253 - DNA, 120 bp, Artificial Sequence
  ENSG00000255426_3 (sequence is synthesized)
actgagacatcacttttgctacattagaaggttagatgctgacattttatgatttcacaacttggatcctctgtcctctgatactgaatcagatagtagtttatggagctgagcagagag

SEQ ID NO: 850254 - DNA, 120 bp, Artificial Sequence
  ENSG00000255426_4 (sequence is synthesized)
ccagctggtcctgggcacagaggaggctgtgttccatgctgaagacaagaacatatggtggacgtaccatcctaactatctgggaagggagcttcgtggctacatgggagttatcatctg

SEQ ID NO: 850255 - DNA, 120 bp, Artificial Sequence
  ENSG00000255426_5 (sequence is synthesized)
ccagtgccggctgcatcctggctgtgcccacctctggactctgaatctctgcacctcagtacccccaaccccaacacgactgtgatgttaggcatatattaggcatgtgaagatgagaaa

SEQ ID NO: 850256 - DNA, 120 bp, Artificial Sequence
  ENSG00000255426_6 (sequence is synthesized)
gagaagatacagctcccatgtttatctccatgagaagataagccacagggagagagaaagactgttgtgcacgagagggagtgtcaaatgccaaatggatgtcagcagtcggggtgtgct

SEQ ID NO: 850257 - DNA, 120 bp, Artificial Sequence
  ENSG00000255428_0 (sequence is synthesized)
gctgctggcagacggcgtgaaggtgaacagacatggggttttatgatatgcaaaatcactcatgaacaactaaactggaaaccagggaggagagcataatgagcttcccttcttagctta

SEQ ID NO: 850258 - DNA, 120 bp, Artificial Sequence
  ENSG00000255428_1 (sequence is synthesized)
gatttctaggagaatcctcaggcataacaacaggaacacagccagtgcagctgccccacgtggatgatcagaggcgacgtcttactctccacaaagccaagtttggtcaagctcctcaca

SEQ ID NO: 850259 - DNA, 120 bp, Artificial Sequence
  ENSG00000255428_2 (sequence is synthesized)
gctgtttcccacagagaggaaatcccctaagttcccaggcagtgtaaactgaccgtgtgtttataaaatagacgccatgccccaagaacatgaaaacagtccagatgcatgaacctgcaa

SEQ ID NO: 850260 - DNA, 120 bp, Artificial Sequence
  ENSG00000255428_3 (sequence is synthesized)
tgcagcagtgattcaagacacttgggagtagggaggagagcgtgagtgagagaacgcttcaatgccgaagcagagtggctgttctctggagaacacccaaactgatctaaagccaaagtt

SEQ ID NO: 850261 - DNA, 120 bp, Artificial Sequence
  ENSG00000255428_4 (sequence is synthesized)
caaaaaataacaaacatgcaagccttttgaaaacaaattgtgcctagatatctttgcaagctgagtggtcagccctcagacagtgctatgagggagtgattgcagaccacccagcaccca

SEQ ID NO: 850262 - DNA, 120 bp, Artificial Sequence
  ENSG00000255428_5 (sequence is synthesized)
aggaattaggggcagttcatgctgtccctgtgtccaagggctccgagagctcagattaaaattctttctgcccagcttttgcaagatggaaccaaaagagcccacttgtgagaaggcagg

SEQ ID NO: 850263 - DNA, 120 bp, Artificial Sequence
  ENSG00000255428_6 (sequence is synthesized)
ggattgaggagggtcccctcctcccagtacggactgtgtggtgccttcagatgagctgttttgtttcacgctgagctgagctcacctaggcgatgaccttgtgacaagaataccaggctg

SEQ ID NO: 850264 - DNA, 120 bp, Artificial Sequence
  ENSG00000255428_7 (sequence is synthesized)
agtccagatcagcaaagaggggacaggaagaggaagaggaagagagaagcaagtgcagccatgcgaagctgtgactgacagaagccaagtcagaactgctggttaacataatttttaatc

SEQ ID NO: 850265 - DNA, 120 bp, Artificial Sequence
  ENSG00000255428_8 (sequence is synthesized)
cttcatcagggctggtaaaatgttgacaaaggagagtccttgtagtgaatctctcagtctattaagaaagctgtttcagacccagggacataaggcaggtgtattggagtcatcagactc

SEQ ID NO: 850266 - DNA, 120 bp, Artificial Sequence
  ENSG00000255428_9 (sequence is synthesized)
tctacaaaatattagtcatcagctctgcaaaaaccccgtgggctgcactggggcgtgagtccctcaaagtttaactaaacatggcaaactggatgtacacagacaaccttaatagcttct

SEQ ID NO: 850267 - DNA, 120 bp, Artificial Sequence
  ENSG00000255428_10 (sequence is synthesized)
ccagcgtggctcctgacctggaggataacaatgataatggaagtgctgttaaaagtaagaatgactatgagttattgagtttttcatctgctcaggcaccgtgctgggcctacacagtat

SEQ ID NO: 850268 - DNA, 120 bp, Artificial Sequence
  ENSG00000255428_11 (sequence is synthesized)
ctcattcagtcctactaaggaccattactgtccctttcctacctaggggaaaaggagattgagagaagtcaaaccgctttctcacggtgacagggtaggcggtggagccagaatacaaat

SEQ ID NO: 850269 - DNA, 120 bp, Artificial Sequence
  ENSG00000255428_12 (sequence is synthesized)
gcaggggctccagcctcaaagcccgtgctctctgctcacattggcccacccaggacagacgctgtcgggatgtcctgggggtttcacactgttaagaaataataacgagtgagagccaag

SEQ ID NO: 850270 - DNA, 120 bp, Artificial Sequence
  ENSG00000255428_13 (sequence is synthesized)
gtgtactctggatctacctgaagcacccaactcactcccttccatgatgtgactaacggcgtttcagatctgtttgtgctccgacctgacctcaggaagccaaagtcccctgaggtctgg

SEQ ID NO: 850271 - DNA, 120 bp, Artificial Sequence
  ENSG00000255428_14 (sequence is synthesized)
caaagtcccctgaggtctggggtgtgtatgcttggggacccgaaattagaggcacacctacctaggattgaatgtaacgatctaatcaagaaaagacaaggtctcactctgttgcccagg

SEQ ID NO: 850272 - DNA, 87 bp, Artificial Sequence
  ENSG00000255428_15 (sequence is synthesized)
ctagagcagtcttcttccctctccccagcctccccaaagacctgcaaattttgttttctgttaagtgctcatctcccccgacccccc

SEQ ID NO: 850273 - DNA, 120 bp, Artificial Sequence
  ENSG00000255428_16 (sequence is synthesized)
attttgttttctgttaagtgctcatctcccccgacccccctacagctggggaaggtgttggtatctccagcgacttcaggcttcaagtttccttctaggagggaagctgctttcgctgct

SEQ ID NO: 850274 - DNA, 120 bp, Artificial Sequence
  ENSG00000255428_17 (sequence is synthesized)
gctttcaagtgacccggatctcattaaacatactgatgtggggtgtgcttctgagaaggtgcctgagaaatgaacttggcttgcttgttgcctttgagggtctgtgggagagaatcataa

SEQ ID NO: 850275 - DNA, 120 bp, Artificial Sequence
  ENSG00000255428_18 (sequence is synthesized)
gcctgtccagatcttatcttctcaggaaggggcaggaaaacaacacagcaaaacagctgcccggacgagaacaccatctagtgtcttcacacaacacacccacatttggtggtttctgtt

SEQ ID NO: 850276 - DNA, 120 bp, Artificial Sequence
  ENSG00000255428_19 (sequence is synthesized)
tcccatgaagatgaaagaggaggggagaggcgtgtcagggattccctgagccctgataggagggttcaactgggcgaggaagggaccatcaggccaacccatgtaggtggacccactcag

SEQ ID NO: 850277 - DNA, 120 bp, Artificial Sequence
  ENSG00000255428_20 (sequence is synthesized)
ctctcaggactcatctcctccacctggaccgctctccctggtggggcattgagggactgagggctctggttttgttctctagaagaggtgatccatcattaaaaatctattaaacatgca

SEQ ID NO: 850278 - DNA, 120 bp, Artificial Sequence
  ENSG00000285825_0 (sequence is synthesized)
atcgtcatttcctcttcctgtccggctgagggggcggggacgtgtggatctcttgttctgagggaagccatgtacatcattagcagttctataaagaggatcacatggcaagaaactgaa

SEQ ID NO: 850279 - DNA, 120 bp, Artificial Sequence
  ENSG00000285825_1 (sequence is synthesized)
acattctgccagctgccctgtgaaagaacttggaagtagaccctccagccctaatcaagtcttcagagactgtactcagccaacaattgactgcaacctcataagagaccctgagccaga

SEQ ID NO: 850280 - DNA, 120 bp, Artificial Sequence
  ENSG00000285825_2 (sequence is synthesized)
ccgcccaacgagaaactgtgtgagataatgtttgttgtattaagatgctaaatttgagggtcatttgttatacaatgagagaagtaggaggtaagggactatgaaaagttggtagagtca

SEQ ID NO: 850281 - DNA, 120 bp, Artificial Sequence
  ENSG00000285825_3 (sequence is synthesized)
agaagttgtaggttcctgtggtggtctaaagtttgttagaacaggatactcaaaagaatgtgctaagataagaggtggtctgagagtaggctgcttggagctgagtgtatgcagaggttg

SEQ ID NO: 850282 - DNA, 120 bp, Artificial Sequence
  ENSG00000285825_4 (sequence is synthesized)
tggttattggtgctgtcaaagtctatggtatgaccaaaggagggaaagctaaggtgggttaaagaacaagatcactggagaagaggtcatagaaaccaaacaccagagcattgattggat

SEQ ID NO: 850283 - DNA, 120 bp, Artificial Sequence
  ENSG00000285825_5 (sequence is synthesized)
gatccatgaggatactgaaatcaccaaaaaatataacaagaatgatgttggagaaagccagaagcaacaatcttgaaaaggcttggaggttggtgggtaagtatagcttggaaacccaag

SEQ ID NO: 850284 - DNA, 120 bp, Artificial Sequence
  ENSG00000285825_6 (sequence is synthesized)
catggtatattctggtgacatgaggttcaaagttggaggtgaggttaagaaaaagggaggatgtggtttagcaaaagcactgagtaactgaatagcaagaaggaaacccatcccacctcc

SEQ ID NO: 850285 - DNA, 120 bp, Artificial Sequence
  ENSG00000285825_7 (sequence is synthesized)
acccagaggggcaaggaacagaaaacagctactattagactatggaaattatgttagacaaaaaacaaatgcaagcagttttcttattcgagttcaaaatgggctgcaaagcagcagaga

SEQ ID NO: 850286 - DNA, 84 bp, Artificial Sequence
  ENSG00000285825_8 (sequence is synthesized)
ttcttattcgagttcaaaatgggctgcaaagcagcagagacaacttgcaacatcaagagtgcatttggcccaggaactgctaat

SEQ ID NO: 850287 - DNA, 120 bp, Artificial Sequence
  ENSG00000285825_9 (sequence is synthesized)
gagctgagattgtgccactgcactccagtgacagaacaagactccgtctcaatttaaaaagaaagaaagaaagaaagaaagttttgcaaaggagctgagagccttgaagatgatgagcat

SEQ ID NO: 850288 - DNA, 120 bp, Artificial Sequence
  ENSG00000285825_10 (sequence is synthesized)
gagagccttgaagatgatgagcatagtgaccggccatgggaagttgacaatgaccaattgagagcaatcattgaagctgatcctcttatagctacatgagaagttgcctaagaactcaat

SEQ ID NO: 850289 - DNA, 120 bp, Artificial Sequence
  ENSG00000285825_11 (sequence is synthesized)
gttgaccattctatcgtcactcagcatttgaagcaaattggaaaggtaaaaaagctcgataagtggatgcctcatgagccaactgaaaataaaaaaaatatatcgttttgaagtgttgtc

SEQ ID NO: 850290 - DNA, 120 bp, Artificial Sequence
  ENSG00000285825_12 (sequence is synthesized)
ttctcttgttctacacaacaatgaaccatttctcgattggattgagatgtgctatgaaaagtagattttatacaacagctggcaatgaccagctcaatggttgggcccagaagaagctcc

SEQ ID NO: 850291 - DNA, 120 bp, Artificial Sequence
  ENSG00000285825_13 (sequence is synthesized)
acagcacttcccaaagcaccaaaaacaggtcatggtcaccgtttggtggtctgctgccagtctgatccactacggctttccgaatcccagtgaaaccattacatctgagaagtatgctta

SEQ ID NO: 850292 - DNA, 120 bp, Artificial Sequence
  ENSG00000285825_14 (sequence is synthesized)
gcaaatcaatgaggcactgaaaagtgcaacacctgcagctgacagtggtcaacagaaaggacccaattcttctccacagcaactacaatgcccgactgcatgtcgcacaaccaacccttc

SEQ ID NO: 850293 - DNA, 120 bp, Artificial Sequence
  ENSG00000285825_15 (sequence is synthesized)
tgcatgtcgcacaaccaacccttcaaaagttgaacaaattgatctatgaagttttgcctcatccaccatattcatctgacctgtggccaaccaactaccacttcttcaagcatctcaaca

SEQ ID NO: 850294 - DNA, 120 bp, Artificial Sequence
  ENSG00000285825_16 (sequence is synthesized)
acaaccagcaggatgcagaaaatactttttaagagtttggcgaatctggaagcacagcttcttacactacaggaataaacgaacttatttctcattggcaaaaaggtgttgattgtaatg

SEQ ID NO: 850295 - DNA, 120 bp, Artificial Sequence
  ENSG00000285825_17 (sequence is synthesized)
gaggcgcggtgggactgtcgttcctggaccaacgccgagacttcctaaatccctccggaaagggatgcgttgggcctgtgatctggcgactaggagggtcaggagtcccagtagagggaa

SEQ ID NO: 850296 - DNA, 120 bp, Artificial Sequence
  ENSG00000285825_18 (sequence is synthesized)
tcacgggaaaagaatgaaagagggaggcgagcctggcacggcttcctggagaaacaaactaagctaacaaatttttcggatcctttgtgcagctaattttacagtactgtttcatacatc

SEQ ID NO: 850297 - DNA, 120 bp, Artificial Sequence
  ENSG00000285825_19 (sequence is synthesized)
ttattatatttggacatcacggcctgttgagtggtctccctctctgctgcaagctctgctgtaatccagagacactcaattatctctgtaggataatttattcattcgattaacatacat

SEQ ID NO: 850298 - DNA, 120 bp, Artificial Sequence
  ENSG00000285825_20 (sequence is synthesized)
tactactaactttttataaaccagtactgttccaagcaccggagatacatagctatgaacgaaacaaatatccctgctcagggaattcacaatagagtgaggggaaataagcgaataaac

SEQ ID NO: 850299 - DNA, 120 bp, Artificial Sequence
  ENSG00000246308_0 (sequence is synthesized)
gcccttttgagtctgcgttggcgtggctgctgcttcttgctccagtccctttgttcactgagtccatatgccatgctccagttgtatcatccccttttccctcgacctcgttttctcacc

SEQ ID NO: 850300 - DNA, 120 bp, Artificial Sequence
  ENSG00000246308_1 (sequence is synthesized)
gggaatatgggaagaaaacgcacccttacctcccccgaaccctgttcaccataagaaataggattaagcttttcaaagccggcaagttgaactatttatacttaccagagacaaggcctt

SEQ ID NO: 850301 - DNA, 83 bp, Artificial Sequence
  ENSG00000246308_2 (sequence is synthesized)
gtgcagtggtgtgatcatagctcactacaaccttgaactcctgggctcaaagaatcctccgattaccatgcctgactactttt

SEQ ID NO: 850302 - DNA, 120 bp, Artificial Sequence
  ENSG00000246308_3 (sequence is synthesized)
acaggcacatattaccatgcctgactacttttaaaactttttttttcctaagagatagggtctagctatgttgcccaggttagtcttgaactcctcacctcagcctcccaaagtgctggg

SEQ ID NO: 850303 - DNA, 120 bp, Artificial Sequence
  ENSG00000246308_4 (sequence is synthesized)
atcccaccacacccagccccatatctgttttttaaactttttttccagtgatctttccttgactttatactttctctcttaatagagcacagagtgagcagaagtaaacaaaatagacac

SEQ ID NO: 850304 - DNA, 120 bp, Artificial Sequence
  ENSG00000246308_5 (sequence is synthesized)
tagaaaaacacagaaaagatcaatgaaactaagtggtggcttttataaaagctaaaaaaatcaataaacctttaactagactagcagagaaaaagagaagacgtgaataaaatcagaaat

SEQ ID NO: 850305 - DNA, 120 bp, Artificial Sequence
  ENSG00000246308_6 (sequence is synthesized)
gagaaaggagacattacaattgatacaacagaaatagaaaagatcatgaggctactctgaacaattataaccaacaaattggattaactagaagaaatggataatttccttgacacataa

SEQ ID NO: 850306 - DNA, 120 bp, Artificial Sequence
  ENSG00000246308_7 (sequence is synthesized)
aacctaccaaaattgaattatggagagaaagaaaatctgaattgaccaataacaggtaggagactgaatcagtagtaaaaagtctctcatcaaagaaaagcccaggaccacatggttgca

SEQ ID NO: 850307 - DNA, 120 bp, Artificial Sequence
  ENSG00000246308_8 (sequence is synthesized)
ctggtgaatgctaccaaacatttagagaatattccttgtttgaatatttttgattagtgattcaaactgcttactcattattggtctattcagattttctatttttcatggttcagtctt

SEQ ID NO: 850308 - DNA, 120 bp, Artificial Sequence
  ENSG00000246308_9 (sequence is synthesized)
cctaggttgtatgtgtctaggaacttaaccatttcttctaggttatccagtttgctggcatgtaattgttcatagtagtctcttaagatcctttgtgtttctgtggtacccattgtaatg

SEQ ID NO: 850309 - DNA, 120 bp, Artificial Sequence
  ENSG00000246308_10 (sequence is synthesized)
tctcctgtctttcttagcctagataatgctttgtcaattttcgttttttaaaaaaaatttagttcactgatcttttcttttgtttttctagtctctatttcacttgtgctctaatctgta

SEQ ID NO: 850310 - DNA, 120 bp, Artificial Sequence
  ENSG00000246308_11 (sequence is synthesized)
ttatttccttacctctgcaaacttagtttgttcttgtttatctagttccttcagatggaaagttatttatttaagatctttctttttcttaattaggtatttattgctgtcactttccct

SEQ ID NO: 850311 - DNA, 63 bp, Artificial Sequence
  ENSG00000246308_12 (sequence is synthesized)
tctttttcttaattaggtatttattgctgtcactttccctcttgaactccttttgctgcatct

SEQ ID NO: 850312 - DNA, 70 bp, Artificial Sequence
  ENSG00000246308_13 (sequence is synthesized)
tcctgacctcgagtgatgtgccagccacatcccataaatttcggtatgttgtgtttccattttcatttgt

SEQ ID NO: 850313 - DNA, 120 bp, Artificial Sequence
  ENSG00000246308_14 (sequence is synthesized)
cccataaatttcggtatgttgtgtttccattttcatttgtcttaagatatttctgatttcttctttgacccattggttgttcaggagtgttaattccacatacttgcaaattttccaagt

SEQ ID NO: 850314 - DNA, 120 bp, Artificial Sequence
  ENSG00000246308_15 (sequence is synthesized)
tttctcctgttaattatttccagtttcataccagtgtgtgaaacctttccttgatgtagtaatagatataaatacacacatatgtataggtttccatctatgattcctggctcataactc

SEQ ID NO: 850315 - DNA, 120 bp, Artificial Sequence
  ENSG00000246308_16 (sequence is synthesized)
ccagagtccttgttacagtcttttgttacaatgttggtatgttaggcctctctgactttctccagtgttcctttcacctgccccaaggcaggtctgtaatctgattgtgggtcataagac

SEQ ID NO: 850316 - DNA, 120 bp, Artificial Sequence
  ENSG00000246308_17 (sequence is synthesized)
caccattccagagagggtcccatcccataccctgggggaaggaatgctaacgtcacgaagcttctataaaaagccaggatgactggatttagagagcttctggatagctgaacacatgca

SEQ ID NO: 850317 - DNA, 120 bp, Artificial Sequence
  ENSG00000246308_18 (sequence is synthesized)
agttcctggagggcagctcgcccagggagggcatgggagttctgtgccccttcccccatacctcaccctgagcatctcttcatctgtatcctttgtaataaaataaattggtaaacatgt

SEQ ID NO: 850318 - DNA, 120 bp, Artificial Sequence
  ENSG00000285826_0 (sequence is synthesized)
agactccggttgatgagctgctggctgcctagaaccttacagatggcttatttcagggagagtgaatgcatagaactgtattctcataggcctgttggtaagagggcatattagacccta

SEQ ID NO: 850319 - DNA, 120 bp, Artificial Sequence
  ENSG00000285826_1 (sequence is synthesized)
agagggcatattagaccctaaagcttttggataaagagaaataaagatttgcttaataataaatcaagaatgtctcctcttagagatggagccccactctgttgcccagactggagtgca

SEQ ID NO: 850320 - DNA, 120 bp, Artificial Sequence
  ENSG00000285826_2 (sequence is synthesized)
agtgattctcctgcctcagccttccaactagctgggattgcagtgggaaatctgaaaacgtggaaacccaatcccatgagtcatctctgaaaggatcacatgtaaggtctgggaagatgg

SEQ ID NO: 850321 - DNA, 120 bp, Artificial Sequence
  ENSG00000285826_3 (sequence is synthesized)
ttcagggtttgtaaaagaagtaataagtcaaccaagagtgacctgctgttggagcaaaacagggacacactatagaatatggaagaagagggacgatgtctagccaaataaggaactgaa

SEQ ID NO: 850322 - DNA, 120 bp, Artificial Sequence
  ENSG00000285826_4 (sequence is synthesized)
ggttctgatgaaaccacttgtaactttcagcctggttgcctagctttgctacagaaagttgaggtccagtcactttgggtacagggtacagatgaagaaggagcacccccaggaggctac

SEQ ID NO: 850323 - DNA, 120 bp, Artificial Sequence
  ENSG00000285826_5 (sequence is synthesized)
agtgtgaaggcagttcattgctaatgctatgaatcttgaagcagtaggaagaatccacattctacttccccgttttcatatgcaggagtacagaatgaactattaatacacaaatggatt

SEQ ID NO: 850324 - DNA, 120 bp, Artificial Sequence
  ENSG00000276533_0 (sequence is synthesized)
gtttaactgtttaacctggttgccctccggttggtgagggtctggactgcagactagctgcgagggaggggctctctcttctcctgtcagttagactgaaaactacctggcagccaggcc

SEQ ID NO: 850325 - DNA, 120 bp, Artificial Sequence
  ENSG00000276533_1 (sequence is synthesized)
ctccggtcgggactggtggtggtgcagatatgatgacaggctttggtaactattgccaaagcctgtctctgtcccaatagatcaccagttcagcaaagtcaggcctgaagcgaagggagt

SEQ ID NO: 850326 - DNA, 120 bp, Artificial Sequence
  ENSG00000276533_2 (sequence is synthesized)
aggagccttcccagcctttccgctcctgctggccacctgggcccacatggcctcagggtcttctgccacagggtccttacccctacagcttaacagctgttctttccttctggatggatt

SEQ ID NO: 850327 - DNA, 120 bp, Artificial Sequence
  ENSG00000276533_3 (sequence is synthesized)
ctcacattttatggttggttgatcagtcagatgttggaattgggggtagagggattatagagttgtgtgtgctatttaagttttctgtaatcattgctaattaaatttgttgattctcca

SEQ ID NO: 850328 - DNA, 120 bp, Artificial Sequence
  ENSG00000253706_0 (sequence is synthesized)
ttcctgttcggccatcttggctcctccctcaggtatccttcagaaagcctgggcaataaaccgaaggctcctaaaaagagcaaagtgtctggtgagtcaagcagaatctcaaagctgaac

SEQ ID NO: 850329 - DNA, 120 bp, Artificial Sequence
  ENSG00000253706_1 (sequence is synthesized)
caaagtgtctggtgagtcaagcagaatctcaaagctgaactaaatttggtgaatctggactttgccagccctgaagaagaataagcatgaaggaactcttcaagtagctagtgcatttgt

SEQ ID NO: 850330 - DNA, 120 bp, Artificial Sequence
  ENSG00000253706_2 (sequence is synthesized)
gttgctgtcagcaaaatagccagttggagagctatgctgttctccactaaaagaattgtagaaccattgggctttaatagatttgaaagactgtataattgaatttataatcatctggct

SEQ ID NO: 850331 - DNA, 120 bp, Artificial Sequence
  ENSG00000253706_3 (sequence is synthesized)
tagaaaatatgcaaaatcacattcatagtgagcagatgagttatggtatccgtggacaattctgataggaaatattggttatatctggtgaaacccatgataaaccaaaggcacgttaag

SEQ ID NO: 850332 - DNA, 120 bp, Artificial Sequence
  ENSG00000253706_4 (sequence is synthesized)
ggcagatggttggagttggggtatgagtgttggtcatacggtggaggggaaaagagtaggatgttaggatcatgcagaaattatgtggttgccctacagaaatgataagccataaagttc

SEQ ID NO: 850333 - DNA, 120 bp, Artificial Sequence
  ENSG00000253706_5 (sequence is synthesized)
tactctggccagtgttttaagtcgatgctagaaaagaaaaacaatagtggcacaggggttggttatttgttttccacaggccaagaatatgtcaaaataaagcccaataggatgtatatt

SEQ ID NO: 850334 - DNA, 120 bp, Artificial Sequence
  ENSG00000253706_6 (sequence is synthesized)
cagtggtcaagtagactgagagatgttaacacacttattcatggcatcatttcagattttgcctatagtaggcattcaaaagatgtttgttaaattttataaataaacaaaagctatatc

SEQ ID NO: 850335 - DNA, 120 bp, Artificial Sequence
  ENSG00000253706_7 (sequence is synthesized)
agcatggcctttttctaatccaaaacctgggcacacagccaggataaacttaagctgtccaaaagccatgtgcgctctcgccagaatcatcaattctctccagtcatttcactatgaaga

SEQ ID NO: 850336 - DNA, 120 bp, Artificial Sequence
  ENSG00000253706_8 (sequence is synthesized)
aggcctggatgaacttaatgggaaagtcccattagctgccactcttggattgcatatctacgtatccttcagatttcatgtccctgatatatttgtgttcttgctagtcctgattttaaa

SEQ ID NO: 850337 - DNA, 120 bp, Artificial Sequence
  ENSG00000253706_9 (sequence is synthesized)
ttattgcttttccttttaatattgttctgatttatttttatatgttactcaatattctttaatgacagcaaataatgataaaaataatagctgccatggcctattgaggcttcctatgac

SEQ ID NO: 850338 - DNA, 120 bp, Artificial Sequence
  ENSG00000253706_10 (sequence is synthesized)
gagaaagtttccatagatttctattttactactaaaaatactgtggtttagtgagattatgcaattaactcaaattcacaaagataggaaatgcttcagctgggatgcaaacctctatct

SEQ ID NO: 850339 - DNA, 120 bp, Artificial Sequence
  ENSG00000253706_11 (sequence is synthesized)
aagagaaaaacccgatttcctcattgctatatataccattaatttggagcaaagcagaatcacttaaaaatccttttaagtgatgattaaataaatcatcaattgttaaacaatgattag

SEQ ID NO: 850340 - DNA, 120 bp, Artificial Sequence
  ENSG00000253706_12 (sequence is synthesized)
attcctaattattttcagtcatttgtttaccactaaatataacaatagtagtaataataataatgataacccatctgcctgtgttcttaagtgtcttatatattagttgtggaaataaga

SEQ ID NO: 850341 - DNA, 120 bp, Artificial Sequence
  ENSG00000253706_13 (sequence is synthesized)
catatatgatgaactgttaaaaactatagaagagaatttatacctaaatatgttcatgtattaagtagtacaagaaagtcatctggaaattttaaaatgaaaggaaatctgcaaatatta

SEQ ID NO: 850342 - DNA, 120 bp, Artificial Sequence
  ENSG00000253706_14 (sequence is synthesized)
agtcaactgggcatttcttttcaggaaatgaaaattaagctgaatctgaagggtgctaagaacaaaattgatggaggtgaagacagagacttctacataaaggaaatagttagaaattaa

SEQ ID NO: 850343 - DNA, 120 bp, Artificial Sequence
  ENSG00000253706_15 (sequence is synthesized)
gcacagagacaaaaataaaagacagtgttttgtaggggcagagtgattgggcatagccaagaaacaggatatattaagtagattgataataaggtttaaatgcttcaaaagttctaagct

SEQ ID NO: 850344 - DNA, 120 bp, Artificial Sequence
  ENSG00000253706_16 (sequence is synthesized)
tagatgcttggaaacaaaatttgaccaagaatttgggtaataaatttgaagaataaaatgagaagcttaatttgcatgtgttcagtttaaaatgatatccggttggaaataccaaattgt

SEQ ID NO: 850345 - DNA, 120 bp, Artificial Sequence
  ENSG00000253706_17 (sequence is synthesized)
agagctggagacattgtactgggaattgagtaatggtcaggatttattacactgggacagaagagaccaacacatagaatacactgaaggtcaggttctgtccagaaaccactcaacacc

SEQ ID NO: 850346 - DNA, 120 bp, Artificial Sequence
  ENSG00000253706_18 (sequence is synthesized)
agagcattaatgaatatgtgaataagtaagtgcatcttcttagctcaggcatggaaactgatttaaaatgtaagaagtctgtatggatgggagaaagaagtggaaatcaatttaagggaa

SEQ ID NO: 850347 - DNA, 120 bp, Artificial Sequence
  ENSG00000253706_19 (sequence is synthesized)
aaaaagcaaaatcagaatatacaatctctcttctgaggccctagtcatatgttgctaactatagaggagtcattagataaaagtgtgtacatttggaagcaaacaaagactgcatcccat

SEQ ID NO: 850348 - DNA, 120 bp, Artificial Sequence
  ENSG00000253706_20 (sequence is synthesized)
gagatttcagaagctatgattattataaagagcaatagactctcaaaaatactcttaaaatactatacataaaaatagctagtatttaaaggctcataaaattcttgaacaggtattagc

SEQ ID NO: 850349 - DNA, 120 bp, Artificial Sequence
  ENSG00000253706_21 (sequence is synthesized)
catttaagaagtgatggtagaaagagaaatgtataggtcagagaacagtccttggaaaatgaaaggagttaggaagtaaaagaaagaaaatcaagggaaataaatgaaagaatgacagag

SEQ ID NO: 850350 - DNA, 86 bp, Artificial Sequence
  ENSG00000253706_22 (sequence is synthesized)
ggagaccaaggcaggtggatcacctgagttcgggagttcgagacaagcctgaccaacgtggtaaaaccctagggcatatgcctcta

SEQ ID NO: 850351 - DNA, 120 bp, Artificial Sequence
  ENSG00000253706_23 (sequence is synthesized)
aacaacaacaacaacaacaacaaaaacactttcacacctgaatgactaaataattggaaataataagggttgagggggagaataaagctactgaaatatggaaagaagactaacactact

SEQ ID NO: 850352 - DNA, 120 bp, Artificial Sequence
  ENSG00000253706_24 (sequence is synthesized)
tttaaactgatgttctactaatgtagacccgtacatcatatcaccattacattgtttaagcattaaagtttgcactgtaagtggctctttaaacccttccctccatttcttttccctctc

SEQ ID NO: 850353 - DNA, 120 bp, Artificial Sequence
  ENSG00000253706_25 (sequence is synthesized)
taaaaaataagagaaggaagaaggaattgacttccaatgttttgctaaaaagattattcatgatgatccaagagcacatccacccctcacaatcaccatcaccacctagtcgggtcctct

SEQ ID NO: 850354 - DNA, 120 bp, Artificial Sequence
  ENSG00000253706_26 (sequence is synthesized)
attcctccaactagggccaagcatggaaatggccagggctggagtaagtgattctgtatttgtctaaacatgtgtctggtcattccacgaagaaaatgcaaataatttcaggaatcatca

SEQ ID NO: 850355 - DNA, 120 bp, Artificial Sequence
  ENSG00000253704_0 (sequence is synthesized)
gtcgttcctccgcgttacagagctacagcggtctccgggtggcgaagtgcggagacggggttttggagacggtggatggaggagggggagggaaagctgccaactttggataccaacccc

SEQ ID NO: 850356 - DNA, 120 bp, Artificial Sequence
  ENSG00000253704_1 (sequence is synthesized)
gtacacccaccgaaggggatgtcccactttttccagcgctgggagcaaaaagataacagtgagcgaggttgaaaacacctgacagtgaaaagagcaatttgaagaaaaacaaaatttatc

SEQ ID NO: 850357 - DNA, 120 bp, Artificial Sequence
  ENSG00000253704_2 (sequence is synthesized)
ttcaatgtgaaaagcaatttataaaaatccgaatacttgccaggagcaacttgacaaaaaagacaaaggtggtagaagaaatgtaaccagcccacaattccaatgttgataacagatgag

SEQ ID NO: 850358 - DNA, 120 bp, Artificial Sequence
  ENSG00000253704_3 (sequence is synthesized)
ctccctttcaaggtgactgacatttacacaagtacacagagcaagaagaaggtctgagtgaactgccaagcattttaacttctcctgagaccaagtacatcaacagttctcttggaaaag

SEQ ID NO: 850359 - DNA, 120 bp, Artificial Sequence
  ENSG00000253704_4 (sequence is synthesized)
aacaactgatttgggagtctagcagactgccagctgcaagacattcatccagcatcaggaacacaatgggccttcatttgcctgcctttctgagggcaccaatcaaaagtaacagctgcc

SEQ ID NO: 850360 - DNA, 120 bp, Artificial Sequence
  ENSG00000253704_5 (sequence is synthesized)
agacttgattataattttctatggccaagggtttgctgtgacacttccacatcattcttcaggagtctactcctatgtaaatcttctgcaggttgtgcagtggacttcacctagtctccc

SEQ ID NO: 850361 - DNA, 120 bp, Artificial Sequence
  ENSG00000253704_6 (sequence is synthesized)
atctccagctaatttggccaagaatagtcacctggcgcaaggtggggagggagctctcaattggccagcaacttctgacgtgtgacctgactgaacaatgagaggctcgagtgaaattac

SEQ ID NO: 850362 - DNA, 120 bp, Artificial Sequence
  ENSG00000253704_7 (sequence is synthesized)
cagctggtagtaggacagaggatatagatacatggaatggagctgagccaaattaatgacaaaggactagacaagaatgactgttgatgatcacctatgctgagatcacaaagctgcccc

SEQ ID NO: 850363 - DNA, 120 bp, Artificial Sequence
  ENSG00000253704_8 (sequence is synthesized)
gagtccagaagcaggttcactgagggaggctcaaccatgttaccaatcttgtttgagattaatgttccttgttgtaaacctcaagtctgtttcttgcaatcaaaccattctaaattgaaa

SEQ ID NO: 850364 - DNA, 120 bp, Artificial Sequence
  ENSG00000253704_9 (sequence is synthesized)
caactacttagaaagtgtttctatgggttcagtgggacatttcaaccaaatgaaatatgataatgatcttaaatgaactaacaatagtgttgcagaaataaaatacaaataccagaaaga

SEQ ID NO: 850365 - DNA, 120 bp, Artificial Sequence
  ENSG00000253704_10 (sequence is synthesized)
tatgtagtccagagattagctacagattcaagaaacacagactgtaaactattatatacagacatatctcaaaataagcatacccattagtgccagctgccctgaaagactgaatgaccc

SEQ ID NO: 850366 - DNA, 120 bp, Artificial Sequence
  ENSG00000253704_11 (sequence is synthesized)
cagctattttccaaatgttttttcagaaagccatgaacacacctttctgggatcctatctatttcaaagacaggcaaagctctgtggttcagttccaccacccagtaccaagcccacagt

SEQ ID NO: 850367 - DNA, 120 bp, Artificial Sequence
  ENSG00000253704_12 (sequence is synthesized)
atgcagaccatacgccttacacatggccttttctctttatgtaattgctgtaccatattcagcagatctagactgactcaaagcatgttccctcaagaagctccacagaaaaaaaggttt

SEQ ID NO: 850368 - DNA, 120 bp, Artificial Sequence
  ENSG00000253704_13 (sequence is synthesized)
ctgtgatcaaaaatcatttgggaaatgctgcaaaccctatctgcctcttagagcttaaccatgcatgtcggggcataatataaaccttttccagtctgggccacagagtgagaccccacc

SEQ ID NO: 850369 - DNA, 120 bp, Artificial Sequence
  ENSG00000253704_14 (sequence is synthesized)
tctaaaataataaatcaataaactcttgagaagtacacagaaaagaaacttctgtaactttttaggtcttaattacaagcaattgtagcttaatctaaacttgctcttcactttatttct

SEQ ID NO: 850370 - DNA, 120 bp, Artificial Sequence
  ENSG00000253704_15 (sequence is synthesized)
agacagggtctcattctgttgctcaggttggagtgcagaggcacaatcatagctcaccgtaaccttgaattcctagtctcaagtaatcctcccatctcagcctccctaataactaggact

SEQ ID NO: 850371 - DNA, 73 bp, Artificial Sequence
  ENSG00000253704_16 (sequence is synthesized)
aagtaatcctcccatctcagcctccctaataactaggactacaggcacataccaccacacaggggtctcatta

SEQ ID NO: 850372 - DNA, 120 bp, Artificial Sequence
  ENSG00000253704_17 (sequence is synthesized)
tacaggcatgagccactacacctggctggattattctttctttaaaaaaatttttttggccgggcgccgtgactgtaatcccggcactttgaggggccgaggcgggcgaatcacgaggtc

SEQ ID NO: 850373 - DNA, 120 bp, Artificial Sequence
  ENSG00000253704_18 (sequence is synthesized)
ataaataaataaaaacaaaaattttaagcataaatacaaaggttaggtagatttaaagatggccggtagcatgaagtgagctgtctaaaaagttgcttttacataagaactttatgttac

SEQ ID NO: 850374 - DNA, 120 bp, Artificial Sequence
  ENSG00000253704_19 (sequence is synthesized)
ttgatgagcaagtattaattgggctctctgtctcttcttctctctccctctttctctctctctctctctctggatccactttccctcctgcatcagggagtctactcctatgtaaatctt

SEQ ID NO: 850375 - DNA, 120 bp, Artificial Sequence
  ENSG00000253704_20 (sequence is synthesized)
agtatcccaggacagtgctctgtaaccagcccatagtagctactgctattttaccagctactgtatctttccttctttgatttccagcacctgacagtgaaaagagcaatttgaagaaaa

SEQ ID NO: 850376 - DNA, 88 bp, Artificial Sequence
  ENSG00000253703_0 (sequence is synthesized)
atggacaggacctagagctaatcttcctggtggcagcagctacaggtgtctgctcccaggtgcagctggggcagtctgaggctgaggt

SEQ ID NO: 850377 - DNA, 120 bp, Artificial Sequence
  ENSG00000253703_1 (sequence is synthesized)
ctatgcaaagaagttccagggcagagtcaccattaccagggacatgtccctgaggacagcctacatagagctgagcagcctgagatctgaggactcggctgtgtattactgggcaagata

SEQ ID NO: 850378 - DNA, 120 bp, Artificial Sequence
  ENSG00000253702_0 (sequence is synthesized)
tttttggatgcacaacagctgaagattgtgcctggattcccctttgcaagcattctggagtcacaacatcggcatagaaggtggccagccttcggcttttgcagtcgtttgtggagtctt

SEQ ID NO: 850379 - DNA, 120 bp, Artificial Sequence
  ENSG00000253702_1 (sequence is synthesized)
tatggaagagcagcgtggtcaagagaccacggctgcgtaaccccgtctgcagtatgtgaggccggagtgctgaccctggacctgcccagtcatgccttctcggtcagctgttcatctcat

SEQ ID NO: 850380 - DNA, 120 bp, Artificial Sequence
  ENSG00000253702_2 (sequence is synthesized)
agagaaggaggaggcgggcacaagcgggaccccacagccagcagcccccttcagactgctgggagatagccaatggtttgcagcaaccaagtgaaagcccagctaggacagaggcgacca

SEQ ID NO: 850381 - DNA, 120 bp, Artificial Sequence
  ENSG00000253702_3 (sequence is synthesized)
agaccctcgctgcagcctcaactgccctccttggcgaggtggctgctcccatgcctggggcaaatacttggactcaagagcaaggaatgtcctgaagacttgcacagggaaaagtattgg

SEQ ID NO: 850382 - DNA, 120 bp, Artificial Sequence
  ENSG00000253709_0 (sequence is synthesized)
gcctcagtgaaggtgtcctgcaaagctctggatacaccttcgccagctacgacattcactgtgtgtgacaggcccctggataagggtttgaatggatggtagggagctactctggcaatg

SEQ ID NO: 850383 - DNA, 120 bp, Artificial Sequence
  ENSG00000253709_1 (sequence is synthesized)
taacacaggctatgcacagaagtttcagggcagagtcaccatgaccagggacacgtccacgagcacagcctacatggagctgagcagtcagagatctgaggacatagatgtgtactactg

SEQ ID NO: 850384 - DNA, 85 bp, Artificial Sequence
  ENSG00000253708_0 (sequence is synthesized)
agagtctcactatgttgcccaggctgctcttaaattcctgccctcaagtcccaggcacgagtcactgagactggcatcttttgtt

SEQ ID NO: 850385 - DNA, 120 bp, Artificial Sequence
  ENSG00000253708_1 (sequence is synthesized)
cgagtcactgagactggcatcttttgttttattttaattatgttcttaaatagtgtacctgctgcctcatgaagacaattacattgtattttgggaaaatcagcagatagaactcttttt

SEQ ID NO: 850386 - DNA, 81 bp, Artificial Sequence
  ENSG00000253708_2 (sequence is synthesized)
accagctagggcctcccctatgtaagttatttcttaattcaagtgattcattcatcctgtgtgctagagaaggcttgattt

SEQ ID NO: 850387 - DNA, 120 bp, Artificial Sequence
  ENSG00000253708_3 (sequence is synthesized)
agtgattcattcatcctgtgtgctagagaaggcttgattttgagttgaagagagctactgaaaagtgaagaagtcattggtgtgtggaaaagaatagccttccttagtttatttgatttt

SEQ ID NO: 850388 - DNA, 120 bp, Artificial Sequence
  ENSG00000228126_0 (sequence is synthesized)
gcgcatctcctacggcctccaggacagaggaaccgggggaggcagggggaaaaggccggcccagcaattcccctaccccccggtcccacgtgtaccctcctggcctgggtcgccccagcc

SEQ ID NO: 850389 - DNA, 120 bp, Artificial Sequence
  ENSG00000228126_1 (sequence is synthesized)
cacggggagcgggcggagtcctggcccacgaagccttgtcacctggcgggcgaatccgcaagcggagacttgtctttaaagggctttgggccgggcgcggtggctcatgcctggaatccc

SEQ ID NO: 850390 - DNA, 120 bp, Artificial Sequence
  ENSG00000228126_2 (sequence is synthesized)
agaacatacaggaggaagaggagcaggtttcacagagggaagacatgagttcaattttggacttctcagtagtcggtgtcctcagtggtagcaacttcaaacggaaggtgtcaaaagtca

SEQ ID NO: 850391 - DNA, 120 bp, Artificial Sequence
  ENSG00000228126_3 (sequence is synthesized)
aattctggagagttgagtatgaatgggagatgaagaaaaggaggcagcacttgtagcctgctcttaatgtatttctgcactctacactagcagcctattacacaggacacttggatgtct

SEQ ID NO: 850392 - DNA, 120 bp, Artificial Sequence
  ENSG00000249405_0 (sequence is synthesized)
caatttgaacgacaatggacttcttatcaggagtcatgaagccacatggaagtagcaaacattttcaagtgctgaagaaggggaactcttaacccagaatccttggatatccactggaaa

SEQ ID NO: 850393 - DNA, 120 bp, Artificial Sequence
  ENSG00000249405_1 (sequence is synthesized)
caattcatgaaggacattctcagataaaggaaaactaagagagtttgtcaccagcaaactgaggaagctgaaatatagtggcatgtatagctgatcaggagccagtgaggaaaccccagg

SEQ ID NO: 850394 - DNA, 120 bp, Artificial Sequence
  ENSG00000249405_2 (sequence is synthesized)
gacaggtggctgaaaggatttaatagcacagaaattgtatacatcagggtccaggaggtgaaggagatctctttacatgaacagtctacagaaatcttgagtaaggctttggatttccac

SEQ ID NO: 850395 - DNA, 120 bp, Artificial Sequence
  ENSG00000249405_3 (sequence is synthesized)
aaagcaggtgatgctacagtctctgtgcttcacaaatccaagttatcattattggctaccactcctccatatgcacaggcaataagtcaggtattccttccagtaattggggctacaatg

SEQ ID NO: 850396 - DNA, 120 bp, Artificial Sequence
  ENSG00000249405_4 (sequence is synthesized)
taaacttagcaaagcttccagattaacacatttgtaaaaacaagacttcctaataacctgtcatctgctttcccaatttctctataattttagtctgtagatgacattcttgtggagttt

SEQ ID NO: 850397 - DNA, 120 bp, Artificial Sequence
  ENSG00000249405_5 (sequence is synthesized)
taggtgactgtcatattgcagccatctggcagcctgtttaagaagcacaactctgacattataagatgatgaatcagtggttaaaaacaaaacaaaaggtggttgatgtttattgtaata

SEQ ID NO: 850398 - DNA, 120 bp, Artificial Sequence
  ENSG00000230612_0 (sequence is synthesized)
gctccagaactcaattgcagaagaggggcaaagggggaaaaggcagcacgatttattatcttgtacatgccagggcaggcctttaattttgtcttcatgttctacacacaggacaaaaac

SEQ ID NO: 850399 - DNA, 61 bp, Artificial Sequence
  ENSG00000230612_1 (sequence is synthesized)
ctttaattttgtcttcatgttctacacacaggacaaaaacgtatgttatttagaaaggagt

SEQ ID NO: 850400 - DNA, 120 bp, Artificial Sequence
  ENSG00000230612_2 (sequence is synthesized)
gctccagaactcaattgcagaagaggggcaaagggggaaaaggcagcacgatttattatcttgtacatgccagggcaggcctttaattttgtcttcatgttctacacacagaaaagagaa

SEQ ID NO: 850401 - DNA, 120 bp, Artificial Sequence
  ENSG00000230612_3 (sequence is synthesized)
agactccatctcaaaaaaaagaaaagaaaagaaaacagaagatccagaaacaatgagccctctatttccatagataactaggaagagaatagcagccactcactttagacaggactgctc

SEQ ID NO: 850402 - DNA, 120 bp, Artificial Sequence
  ENSG00000230612_4 (sequence is synthesized)
cactttagacaggactgctcaccactgccaatttttctcctacgctggggacaaatgtcttaccatttatcatcacacttgcactgtcattttattaaaaatggaaaaaaagatacatct

SEQ ID NO: 850403 - DNA, 120 bp, Artificial Sequence
  ENSG00000230612_5 (sequence is synthesized)
gctccagaactcaattgcagaagaggggcaaagggggaaaaggcagcacgatttattatcttgtacatgccagggcaggcctttaattttgtcttcatgttctacacacagatttgcttc

SEQ ID NO: 850404 - DNA, 120 bp, Artificial Sequence
  ENSG00000230612_6 (sequence is synthesized)
atgatttctgcttaaaagacccacaacattaagcgtttctgggtgtgaaactacacaggcctctcttaaccacaaattgagatgccaagcacaaagaacctgctcattaatatcagggtg

SEQ ID NO: 850405 - DNA, 120 bp, Artificial Sequence
  ENSG00000230612_7 (sequence is synthesized)
aacctgctcattaatatcagggtggaagtaaccacaaagatagttgagaaaagcagcagaccactactacaggcattagaaaagagaagatccaggccaggcacggtggctcatgcctgt

SEQ ID NO: 850406 - DNA, 86 bp, Artificial Sequence
  ENSG00000230612_8 (sequence is synthesized)
ggccaacagggcaaaaccccatctctagtaaaaatactaaaattaactgggcatggtggcaggtgccagtaatcccagctactcag

SEQ ID NO: 850407 - DNA, 120 bp, Artificial Sequence
  ENSG00000230612_9 (sequence is synthesized)
aaaacaaaacaggctacctgctttaaaagaaatttctcgagaatcttcacaagatgataggatggacaatgtcttcagcagcatcccgacaacacaggcagtaacagacgcgtttgtaag

SEQ ID NO: 850408 - DNA, 120 bp, Artificial Sequence
  ENSG00000230612_10 (sequence is synthesized)
ggagtggctcagtggtatcgcttgatgaaactggacaccatagctccagaactcaattgcagaagaggggcaaagggggaaaaggcagcacgatttattatcttgtacatgccagggcag

SEQ ID NO: 850409 - DNA, 120 bp, Artificial Sequence
  ENSG00000230612_11 (sequence is synthesized)
tctacacacaggatggatttacctaaaatacaagtggcactgtataaacaaaattcactttggaaggctcagagtcatctctacaaaccaaaagaataaaaagtgaaactgaggcagagg

SEQ ID NO: 850410 - DNA, 120 bp, Artificial Sequence
  ENSG00000230612_12 (sequence is synthesized)
cctgtggttgccagtgggaaaagccattccacgggtaggaagacctcatagacatcgaagacaaatgaaaatctgataaacaattccaggggaaaacgttataaaggtagacactcaaca

SEQ ID NO: 850411 - DNA, 120 bp, Artificial Sequence
  ENSG00000230613_0 (sequence is synthesized)
cccgcggggcggcgcggggaggcggcccagacttgctggagccaggcgccggcccgggggcccccctgcccgcctggagaacccagtcttgcccgtgtttggggtgactcagcttccctg

SEQ ID NO: 850412 - DNA, 120 bp, Artificial Sequence
  ENSG00000230613_1 (sequence is synthesized)
agtcttgcccgtgtttggggtgactcagcttccctgcttgtgcaagaacagctgaactctgacctcctgaatggccgactcttgccttgctcctcagggaccccagacacgatcgtagga

SEQ ID NO: 850413 - DNA, 120 bp, Artificial Sequence
  ENSG00000230613_2 (sequence is synthesized)
tttatggaaagaagctgatattatttggagaatgaaaaaagaaagatgcacctagacaaaggcacatcaggccactgtgcagaagaacaagcatgctctagaagtgtatgtgctgctgtg

SEQ ID NO: 850414 - DNA, 120 bp, Artificial Sequence
  ENSG00000230613_3 (sequence is synthesized)
gaaacacctctaagaaataccgtagaaacccaatgtgcagaatgctccaagaatgccaccgtctgtgcaagaaaaagtatacacacatcagtgcacaggtgtctgaatgtctgtgtaaca

SEQ ID NO: 850415 - DNA, 120 bp, Artificial Sequence
  ENSG00000230615_0 (sequence is synthesized)
tgagagacagcagttggcaagacagtgagagacagcaagagatggcaagtgacagttattgttaagatgacaaatggagagatggcaagaaatagagaagcagtcagtgatggaggctgc

SEQ ID NO: 850416 - DNA, 120 bp, Artificial Sequence
  ENSG00000230615_1 (sequence is synthesized)
aagagttgtaacactaaccaaaggctctttttagaatcatcgttttccctggcaggtggtacagccaagcagacaggcaagtaagtggccatactgctactgcctcatgtaggatccggc

SEQ ID NO: 850417 - DNA, 120 bp, Artificial Sequence
  ENSG00000230615_2 (sequence is synthesized)
aggctggtgggttatcagtcctcacgtgggaccctcccaccatggcagctgagcacatccaagctgggggatcctgaagagaccttcacctgggtgccacgtggaagattggccagcacc

SEQ ID NO: 850418 - DNA, 120 bp, Artificial Sequence
  ENSG00000230615_3 (sequence is synthesized)
acctgtctacattcagatttagatgaaagccacaccatggaggcagccagaggcccatgggagatgtctggattcgcagaggaatagctccatgtgatgcaaaccttgactaatgggaac

SEQ ID NO: 850419 - DNA, 120 bp, Artificial Sequence
  ENSG00000230615_4 (sequence is synthesized)
aggaaaagggaggaaaccaggaagataaatctccctcccttctcattgctccttgcaacccttcccacttgaagcatgaccacatttaatgaacaacctgctgtgtctcttggaagcttg

SEQ ID NO: 850420 - DNA, 120 bp, Artificial Sequence
  ENSG00000230615_5 (sequence is synthesized)
ctgcaaggcagcaatcagcacaataacattgtattgtatcttcctctgcttcacttctcttcctccctcaccctcactgccctgagctggcacatcccaaagaaagcattaccacattaa

SEQ ID NO: 850421 - DNA, 120 bp, Artificial Sequence
  ENSG00000230615_6 (sequence is synthesized)
accctcagaacctagctttcctgcctgcccccagggctaatccagaggtgggggaggggctaaagacactgggctctgccaggggccttggatgagcttatcatggaacataagaaaaat

SEQ ID NO: 850422 - DNA, 120 bp, Artificial Sequence
  ENSG00000230615_7 (sequence is synthesized)
aagaacagatgagtcagaggtttctgcttaatgctcactcttcaattctttcccgagcaaaaccaagaatcttcttgggctaagccccaatttggggttcacctgccttgcagcaacatg

SEQ ID NO: 850423 - DNA, 120 bp, Artificial Sequence
  ENSG00000230615_8 (sequence is synthesized)
gcaccaaacatgcggcagaagagagaaaacgacagcatgagagacggagaaagaaatggccagttggcaaggtggtacagccaagcagacaggcaagtaagtggccatactgctactgcc

SEQ ID NO: 850424 - DNA, 120 bp, Artificial Sequence
  ENSG00000230615_9 (sequence is synthesized)
acaagatttgaactggattcgtgcctggggtgattcaggatgtccagttaagctgggaaatactgattccactgatccccttcattcactcagagcagaccgaagactgtgagacttcct

SEQ ID NO: 850425 - DNA, 120 bp, Artificial Sequence
  ENSG00000230615_10 (sequence is synthesized)
gcattacctgtcatcttcactcttggagacctcaatcctcagttccaggtaaagacaatccttgcacaaggcttccaactcgacccgcctactgacctggagaatgaaagtgtcctgcct

SEQ ID NO: 850426 - DNA, 120 bp, Artificial Sequence
  ENSG00000230615_11 (sequence is synthesized)
cggggcccctcagatcagcacccaaactgcacctggtcacctgtctacattcagatttagatgaaagccacaccatggaggcagccagaggcccatgggagatgtctggattcgcagagg

SEQ ID NO: 850427 - DNA, 120 bp, Artificial Sequence
  ENSG00000230615_12 (sequence is synthesized)
tcacccagtcttggtgtatgtagacgttttcttaatatttcttaatattctatttaggatgagcttatcatggaacataagaaaaataaaacagatgtcagcctgtgtatgaagaattca

SEQ ID NO: 850428 - DNA, 120 bp, Artificial Sequence
  ENSG00000230615_13 (sequence is synthesized)
aagaaatggccagttggcaaggtggtaatgagagacagcagttggcaagacagtgagagacagcaagagatggtggtacagccaagcagacaggcaagtaagtggccatactgctactgc

SEQ ID NO: 850429 - DNA, 120 bp, Artificial Sequence
  ENSG00000230615_14 (sequence is synthesized)
agcatagccaaaccctgtctgcacaaaaatgtaaaataaaattagccaggtatggtggaggatgagtcctagctacttaggaggctgaggtgtgtggatcacttgagccaggagttcaag

SEQ ID NO: 850430 - DNA, 120 bp, Artificial Sequence
  ENSG00000230615_15 (sequence is synthesized)
gctgcagtgagtcatgacaggacagagggagacctgtctactgtctgtccctatagaaaaagaaaaaatctcctggtgtcttttcctgaatttggcagacaggatggccagaggaaatgc

SEQ ID NO: 850431 - DNA, 120 bp, Artificial Sequence
  ENSG00000230615_16 (sequence is synthesized)
cctgaatttggcagacaggatggccagaggaaatgcatcaatgcagagggacagaaacagcagtgtggcctgggaaaggttttaaagttagctggccgggtgcagtggctcatgcctgta

SEQ ID NO: 850432 - DNA, 67 bp, Artificial Sequence
  ENSG00000230615_17 (sequence is synthesized)
caggagtcagagctgccacagacagcgagttacagcactttgcaggggacagctcatggacccagga

SEQ ID NO: 850433 - DNA, 120 bp, Artificial Sequence
  ENSG00000230615_18 (sequence is synthesized)
agttacagcactttgcaggggacagctcatggacccaggactggagcccagaatgacaagggttctggaaggtaacagggaaaatggcagtggggtgggcagcatgcctgcccctgagtc

SEQ ID NO: 850434 - DNA, 120 bp, Artificial Sequence
  ENSG00000230615_19 (sequence is synthesized)
attcccaggcctaggtgtgtgtctacaggatggactgtcaggggaggatagggtgcattgtaaggttgggggaggaggcaggacctcagggcaaactcctctgacctacaaggcccaggc

SEQ ID NO: 850435 - DNA, 120 bp, Artificial Sequence
  ENSG00000230615_20 (sequence is synthesized)
ggggcagaggtcagggatgctgttcactatcccgcaatgcactggaaactccccaagaagaaagaaccatctggcctaatgaactgtggactctgaagccaactacctagggtgaaatct

SEQ ID NO: 850436 - DNA, 120 bp, Artificial Sequence
  ENSG00000230615_21 (sequence is synthesized)
gtgtggcctgggaaaggtcaggctttgacacaaggaatttagagaagaaaaaaggtgtggtctgctgtttcattcagtccattatctgttgagcattcctttttttattcaaatagagca

SEQ ID NO: 850437 - DNA, 120 bp, Artificial Sequence
  ENSG00000230615_22 (sequence is synthesized)
gaagaaaggagcttgaaatggacagttatctctggtttatctggctgtagagtgcagagatgattctctttcaggatgggagagggggtggggaggaggagagaggtgggaatgtaatga

SEQ ID NO: 850438 - DNA, 120 bp, Artificial Sequence
  ENSG00000230615_23 (sequence is synthesized)
gaggaggagagaggtgggaatgtaatgatgatggtgatgggttgatgaatgtgagactggaggtttttttcatacaaagtctcgctcttgttccccaagctggagtgcaatggcatgatc

SEQ ID NO: 850439 - DNA, 120 bp, Artificial Sequence
  ENSG00000230615_24 (sequence is synthesized)
aaaccaaaacaaaaaaaaaacaaaaaccagtgggacagagtgcaaactgagaggcaaaacatttttgtttgttaagtgcaaatttttaatttgtacatgaaatatgttactgaatttgaa

SEQ ID NO: 850440 - DNA, 120 bp, Artificial Sequence
  ENSG00000230615_25 (sequence is synthesized)
tttaatttgtacatgaaatatgttactgaatttgaataaaaatttacctttgaaatgaaaacctattcctttatacttgttaatggttttaaaatgaaagatgaataaaggaaataaatg

SEQ ID NO: 850441 - DNA, 120 bp, Artificial Sequence
  ENSG00000230615_26 (sequence is synthesized)
ttatagcctaagtattattgcctaaattgtatcttatttagatgctttggttttattaaaatttgcttgttggttgctggatgaccatttacataagggagtatatcagattgtaaagaa

SEQ ID NO: 850442 - DNA, 120 bp, Artificial Sequence
  ENSG00000230615_27 (sequence is synthesized)
aggatcaaaatttaaacaggtagatgtgaaaatgattgaaataaatagttgtgcctttttcattttttggagccataatattaattttatgtatttattttatgatgtgagtatgcatac

SEQ ID NO: 850443 - DNA, 120 bp, Artificial Sequence
  ENSG00000230615_28 (sequence is synthesized)
acacatatgtgataagcctcttaccatgggctggcccagggagcagtcaatggatcatgaagatggaggtggtggctcatgcctgttaatccccacactatgagaggctgaggcaggagg

SEQ ID NO: 850444 - DNA, 120 bp, Artificial Sequence
  ENSG00000230615_29 (sequence is synthesized)
tgctcgagatctgcagtggctgccgggtgcggagcgccggccgggggtgggctctccagggctgctaggcccctgccctcacctgcggccgcccggccccgccctaggtgtgccgtcaat

SEQ ID NO: 850445 - DNA, 120 bp, Artificial Sequence
  ENSG00000230615_30 (sequence is synthesized)
tccatctctacaaaaaaatgcaaaaagaaatcagtggaccatgtatgtacacatctattttggattcatgcctgtaagatactgagcgtcgaccaggcgcagtggctcacaactgtaatc

SEQ ID NO: 850446 - DNA, 120 bp, Artificial Sequence
  ENSG00000230615_31 (sequence is synthesized)
gatctgctccttctcctgggtgcgcatggcctggatgttgagatccacctcctaagggggctcagcagactctggttgactgtgacagcagtgatgcctcccatgccgctggtcccacca

SEQ ID NO: 850447 - DNA, 120 bp, Artificial Sequence
  ENSG00000230615_32 (sequence is synthesized)
tagcctctgcccaggccagcccagaagctgctgctgcccagtagggagaagctctaagagctgatgcaggcactgggcccactcgtataggagcggcatagcagcatttttacaataatc

SEQ ID NO: 850448 - DNA, 120 bp, Artificial Sequence
  ENSG00000230615_33 (sequence is synthesized)
cagtaaccctgttgttcatcaatagcataattgagaaatatattgtgatatatttatacgatggaaactattcagcaatgggaatgactgaactacagcactatgaatcttatagattga

SEQ ID NO: 850449 - DNA, 120 bp, Artificial Sequence
  ENSG00000230615_34 (sequence is synthesized)
ctgtctgtccctatagaaaaagaaaaaaacaggatggccagaggaaatgcatcaatgcagagggacagaaacagcagtgtggcctgggaaagtgggacaggccaggcgcggtggctcatg

SEQ ID NO: 850450 - DNA, 120 bp, Artificial Sequence
  ENSG00000230615_35 (sequence is synthesized)
aaacaggttgacactctcgtcctggtaaccctcagggccctgcagatcacagtgtccagagaggaggggctgttgctcctagcaggatgagcttatcatggaacataagaaaaataaaac

SEQ ID NO: 850451 - DNA, 120 bp, Artificial Sequence
  ENSG00000230615_36 (sequence is synthesized)
aagtaggaaaagaacgcatagccagtaactctcccaacagaactggattcgtgcctggggtgattcaggatgtccagttaagctgggaaatactgattccactgatccccttcattcact

SEQ ID NO: 850452 - DNA, 120 bp, Artificial Sequence
  ENSG00000230615_37 (sequence is synthesized)
cataaatcaggaaactaatcctctgaggtgctggttgctaatgaagcgagaatcaggaagattaaatcacagatttcaaaatctcaggctggaatttaatcccagaccttgagtccagac

SEQ ID NO: 850453 - DNA, 120 bp, Artificial Sequence
  ENSG00000230615_38 (sequence is synthesized)
ttcatctcaaacagatggcatggttcgaaacatatcccgactgcagtagtcacttggaaatgagttcccagtagtccttgcagttcaaccaaatactacttctgggaatggggcatggaa

SEQ ID NO: 850454 - DNA, 120 bp, Artificial Sequence
  ENSG00000230615_39 (sequence is synthesized)
atgggacgtcggggtgcagcaaaggcttcctggaggtgaccccaagggagagtggcctatagtagacactcattaaatattggtaaaacaaatggagttagtagatgaagaaaaggggga

SEQ ID NO: 850455 - DNA, 120 bp, Artificial Sequence
  ENSG00000230615_40 (sequence is synthesized)
agagcattccaggcagagataatacagggccacctggcagggtcaagaagacttggggccccttggcatattaaagtgggcggtggtagcagtctgtccacatgcaggctagaaggggtg

SEQ ID NO: 850456 - DNA, 120 bp, Artificial Sequence
  ENSG00000230615_41 (sequence is synthesized)
catatctataaagagcttaacaataatagatccaactaaaagttggtctgccttttattattgctgtgtgccagtgatttttaaatactgttgaaatactcctctcctaaaaaatctttt

SEQ ID NO: 850457 - DNA, 120 bp, Artificial Sequence
  ENSG00000230615_42 (sequence is synthesized)
gttggtttaagttctaaataattgctgtagatactgaattttatttgtacatgtaaacttcacactaacacatttttattagcgatcctttaataaatattgcattctatgtggaagttc

SEQ ID NO: 850458 - DNA, 120 bp, Artificial Sequence
  ENSG00000230615_43 (sequence is synthesized)
tacccatctaaggttgttgggaatactgagccgatacttgtaaagtgttcaaaatgccagtgctgtttattggttcagagctggagaaaacaagagtagacccagatggagggacacatc

SEQ ID NO: 850459 - DNA, 120 bp, Artificial Sequence
  ENSG00000230615_44 (sequence is synthesized)
caggttttcctttctcatttcggcttctacttcagacaggctttttccattgccaaaggccacttcagtctgatgtcatgtcagtttaatggtatcagaggaaaagagagcagtgtttcc

SEQ ID NO: 850460 - DNA, 120 bp, Artificial Sequence
  ENSG00000230615_45 (sequence is synthesized)
cctggaggaaggacaggctgttttccacaggggcgggatgttcttaccagaaggacagaaggcagttgagtgaccaggatgacagatgctgccatgcaagggttgtgggtgcacctgggt

SEQ ID NO: 850461 - DNA, 120 bp, Artificial Sequence
  ENSG00000230615_46 (sequence is synthesized)
tggcaccgtgtctgatccgggaggattacaggatgagcttatcatggaacataagaaaaataaaacagatgtcagcctgtgtatgaagaattcatccacaagatttgctcactcttcaat

SEQ ID NO: 850462 - DNA, 120 bp, Artificial Sequence
  ENSG00000230615_47 (sequence is synthesized)
gatgtcagcctgtgtatgaagaattcatccacaagatttgagcagaccgaagactgtgagacttcctccccacagtgagctaaaaggacgcttttgtcagagtggggaaataaaagggct

SEQ ID NO: 850463 - DNA, 120 bp, Artificial Sequence
  ENSG00000230615_48 (sequence is synthesized)
gtaaagacaatccttgcacaaggcttccaactcgacccgcctactgacctggagaatgaaagtgtcctgcctcggggcccctcagatcaggaataccagataaatgacgttgtgcccttc

SEQ ID NO: 850464 - DNA, 120 bp, Artificial Sequence
  ENSG00000230615_49 (sequence is synthesized)
tcaatgatcacgtcaggagacacatggacgtcaaaggactcggacaccggactcggacaccggcttcccgttgcaggtctggatcttcttcacaaccacggccctggtggagctggtgcg

SEQ ID NO: 850465 - DNA, 120 bp, Artificial Sequence
  ENSG00000230615_50 (sequence is synthesized)
gctgaaggagctggcgcccatgccagagccaaagctggagcccagaccgtagctgaggccggggctcgtgaggcccccataggccgagctcagcgcacctgcatagctgctggtggtctt

SEQ ID NO: 850466 - DNA, 120 bp, Artificial Sequence
  ENSG00000230615_51 (sequence is synthesized)
cgtatggatactcctgttctgcatcccagactccagccggctctcctcgccctctagcagcttcctgtaggtggcgatctcgatctcgatgtccagggccagcttgacgttcatcagctc

SEQ ID NO: 850467 - DNA, 120 bp, Artificial Sequence
  ENSG00000230615_52 (sequence is synthesized)
tactcacgcagctgccgcgccatgtcctgcttggccggctggagggcggcctccagctcggacagcttggcgttggcacccttaactgccagctcctcaggctgctcggcatctgtgatg

SEQ ID NO: 850468 - DNA, 120 bp, Artificial Sequence
  ENSG00000230615_53 (sequence is synthesized)
gcggcctccagggaagccctctggcctttgaggcactcagtctcagcctggagcccactgatgttccagtttatctcggaggtctcagtctttgtatgctgcacgtcatcccagtgcctc

SEQ ID NO: 850469 - DNA, 120 bp, Artificial Sequence
  ENSG00000230615_54 (sequence is synthesized)
ccagccagcgcctgcagcttctcatacttgatctggtacatgctctcagcctcagcccgcctgcggttggcgatctcgtactgcgccttgacctcagcgatgatgctgtccgtgtccatg

SEQ ID NO: 850470 - DNA, 120 bp, Artificial Sequence
  ENSG00000230615_55 (sequence is synthesized)
gagcggctgttgtccatggacagcaccacagacgtggcggagatctgggactgcagctcccggatcttctcttcatacagccgcctgaggaagttgatctcgtcagtcagcccttccagg

SEQ ID NO: 850471 - DNA, 120 bp, Artificial Sequence
  ENSG00000230615_56 (sequence is synthesized)
ccagactccagctctaacttgttcatgtaagcttcatccacatccttcttgatgaggacaaattgattctccatctctgtacgcttattgatctcatcctcgtacttgttcttgaagtcc

SEQ ID NO: 850472 - DNA, 120 bp, Artificial Sequence
  ENSG00000230615_57 (sequence is synthesized)
tccaccagcccctgcgtgttgccaagctccgtctccagcttcagcttctcctggcccagagtctccagctgccgcctaaggttgttgatgtagctctggaacatgttgtccgtgttgctc

SEQ ID NO: 850473 - DNA, 120 bp, Artificial Sequence
  ENSG00000230615_58 (sequence is synthesized)
agtgaaactccgtctcaaaaaaaataaaataaataaaagatactgagcatcttttgatctatatgtctttatgccaatactacactgtactgattattttatattgtctaaaagaagcag

SEQ ID NO: 850474 - DNA, 120 bp, Artificial Sequence
  ENSG00000230615_59 (sequence is synthesized)
taacattattaactttattgtcttaacccttgaatatatgtctttgaaatattttgtgtgacaaaatgggaagtatgcttatctcaaggaaaagcacttacgcaattgaattgtgaactg

SEQ ID NO: 850475 - DNA, 120 bp, Artificial Sequence
  ENSG00000230615_60 (sequence is synthesized)
gtgagcctatcaattcaagggaaaaaaaattagtgtttgttgccagtgaaaaaattagcgtcttcaagtgaaaattaggatttgaaaaacttatatctacttacagtgagtttgaaagct

SEQ ID NO: 850476 - DNA, 120 bp, Artificial Sequence
  ENSG00000230615_61 (sequence is synthesized)
ttcaattctaatgagaccagtgatagcattaatgagtgtgctctttaaaaaatattgtataatgaaatgtgtcaacatttgggagatctgcataactcagtgaaccaatattttccaaat

SEQ ID NO: 850477 - DNA, 120 bp, Artificial Sequence
  ENSG00000230615_62 (sequence is synthesized)
gaccaatacatgatgttacaaaatcatgcatgagtaaaagagctattcaaagtgcaagacagaccagtggagtgtaacgttaacagagtatgaaacgttcacgtagtaactaacttttaa

SEQ ID NO: 850478 - DNA, 120 bp, Artificial Sequence
  ENSG00000230615_63 (sequence is synthesized)
gaaactaccacctcgagttttggtatggaagaaagaagaatttactgaaaaggctattaaaatacttctctctttcccaactacatactttatgaagctcagttttcatcacatatttta

SEQ ID NO: 850479 - DNA, 120 bp, Artificial Sequence
  ENSG00000230615_64 (sequence is synthesized)
accaaagcaacccattgcaacagattgaatgcagaagcagctgagaatctagctgtcttctacaagccagacagtaaagagatttgcaaaagtgtaaaacgatgccactgttctcactaa

SEQ ID NO: 850480 - DNA, 83 bp, Artificial Sequence
  ENSG00000230615_65 (sequence is synthesized)
gatttgcaaaagtgtaaaacgatgccactgttctcactaacatttttgttttagaaaatatacagctctctggctgggcgtag

SEQ ID NO: 850481 - DNA, 62 bp, Artificial Sequence
  ENSG00000230615_66 (sequence is synthesized)
gaaccgcacgtatgtgttgggggctgtgtagcttctcctaacttcaccatgcagaagtcaag

SEQ ID NO: 850482 - DNA, 120 bp, Artificial Sequence
  ENSG00000230615_67 (sequence is synthesized)
gctgtgtagcttctcctaacttcaccatgcagaagtcaaggaaacggttacagaggcaaaatgtgggagtagctaatggcaatggcccagagagatgaaaaaatgtgagaaaaccaaagc

SEQ ID NO: 850483 - DNA, 120 bp, Artificial Sequence
  ENSG00000230615_68 (sequence is synthesized)
gttttgcccacccccaccccaataacatcaggtaagctcaggaattaaagcctttggctaagaggtcagttaaaagtccctcatcatttggatacccttaaacacttccttgtccttgtc

SEQ ID NO: 850484 - DNA, 120 bp, Artificial Sequence
  ENSG00000230615_69 (sequence is synthesized)
gattgtttcccctctgactccattgtattgctccaccagtcgttttattttcagtcctaagatgtatgttttgttggcagtctttgttttcattttgattttctgttgactaaatttggg

SEQ ID NO: 850485 - DNA, 120 bp, Artificial Sequence
  ENSG00000230615_70 (sequence is synthesized)
gaatgatttaaggcaggacacttggccatgcaaggcctcctgttgtgttgttctgtgacctccaacttggcctgaggtttgctgttggccaaccccctggtgccctggggttttcagcat

SEQ ID NO: 850486 - DNA, 120 bp, Artificial Sequence
  ENSG00000230615_71 (sequence is synthesized)
ttggtgaggggacccttgttggctgaaactcaggtactccaggtttttcagcattggtattgctgaaaatgctctggggttttcggcattgacattccctctttcattgagtggatagag

SEQ ID NO: 850487 - DNA, 120 bp, Artificial Sequence
  ENSG00000230615_72 (sequence is synthesized)
gctttccccacaggaacagaaaaaggcattagaagtgtccaaattcttacttaaagagatcattgcaaggtttgggttacctagaagtctgctcagtgataacagaacctccttcacagc

SEQ ID NO: 850488 - DNA, 120 bp, Artificial Sequence
  ENSG00000230615_73 (sequence is synthesized)
taaagtgacccagcaggcttcctgagccttaggcattacctgtcatcttcactcttggagacctcaatcctcaggtaaggtagaaaaagctatttctcccctaggggaatcttggtcttg

SEQ ID NO: 850489 - DNA, 120 bp, Artificial Sequence
  ENSG00000230615_74 (sequence is synthesized)
cctttttctgctctgaagttagaagttattattttcctaatagccagttgcagacctcttcctgtgtgctgtcttacaactgcataactgtcttgcttaagccctcttggttgaagggga

SEQ ID NO: 850490 - DNA, 120 bp, Artificial Sequence
  ENSG00000230615_75 (sequence is synthesized)
ctgggagttcccaggcccctgatggacagccaccaacagcagtagaaaagtggccacctgaacgttgtttttggtgtctctcctactgggtaggttctctggcagtgagggcccctgagg

SEQ ID NO: 850491 - DNA, 120 bp, Artificial Sequence
  ENSG00000230615_76 (sequence is synthesized)
tctccccttgggcaatgctatttacccctgcccttcttcccttccactgtcaccatttgtttagtctctctctgcctaaccctcactctctgtggaatttaggccaacattctgtttccc

SEQ ID NO: 850492 - DNA, 120 bp, Artificial Sequence
  ENSG00000230615_77 (sequence is synthesized)
atttgcagcttataatccacttttataacaccttgctgtctatatttacaccttctttgtacaaagtgggaatttaaaagggaaaagtaactaggcatttgctaagcttaggtcactaaa

SEQ ID NO: 850493 - DNA, 120 bp, Artificial Sequence
  ENSG00000230615_78 (sequence is synthesized)
acccccatagagagccttactagacatggggcagcagagagcatcctgaaggacttgacgtgagggtgtcttttaggcaattggagtaaattcaaattagacaaattgaaaaagaaaaaa

SEQ ID NO: 850494 - DNA, 120 bp, Artificial Sequence
  ENSG00000230615_79 (sequence is synthesized)
gcagattcataaagaagtctaagagttttggggatgttggggactatcaaggttgacagtctctccatatagaaattcttccccagattcccaggagaaactttgaaataaattactcaa

SEQ ID NO: 850495 - DNA, 120 bp, Artificial Sequence
  ENSG00000230615_80 (sequence is synthesized)
cggtcaatggatcatgaagatggaggtggtggctcatgcctgttaatccccacactatgagaggctgaggcaggaggatcacttggggccagtagtttgagaccagcctgggcaacatgg

SEQ ID NO: 850496 - DNA, 120 bp, Artificial Sequence
  ENSG00000248656_0 (sequence is synthesized)
agctaatcgttgaaaatgggcattagggcttttatagcatggcaacatattgtcaggcaggaagggaaagaagtggaaaacacagcctggaaaaaaaatatgattcaggctgcccctgct

SEQ ID NO: 850497 - DNA, 120 bp, Artificial Sequence
  ENSG00000248656_1 (sequence is synthesized)
gaattttagagagcgtcaaaacttattggttaaagggatgcctttatgagtaaaacatgagaaatattcacttactaggtaagcaatttgtaaggactggaagtagaaattaagcaacca

SEQ ID NO: 850498 - DNA, 120 bp, Artificial Sequence
  ENSG00000248656_2 (sequence is synthesized)
agacaagaaggctgtcctatcagtttcaagaacaactaagaggatgttaaagcagagggagcccctgcatgacttaagaaaaccgaaggcaggcagaacagagacttttcagggtgcgaa

SEQ ID NO: 850499 - DNA, 120 bp, Artificial Sequence
  ENSG00000248656_3 (sequence is synthesized)
gttacgcatggtgccctctactggagtcactggtaaagagttttgatttcaaaaagaaattgacgtagaatttgttcttgttccattgtattggtgaagaaactgaagttcaaagtaatt

SEQ ID NO: 850500 - DNA, 120 bp, Artificial Sequence
  ENSG00000248656_4 (sequence is synthesized)
ggttgtgattctctcctaatccttcgtgtgactggagttatgtcgtgtgactctcataaacaatgggttttccttctttgtacgtaatagttggcagaagtggttacgtccttgccacaa

SEQ ID NO: 850501 - DNA, 120 bp, Artificial Sequence
  ENSG00000248656_5 (sequence is synthesized)
ggaaaaagtctcatgagatgattaatctaaaacttattttagaaatataaaggactttatgaattcaaggcagtatattaagaaaatatcccctcaaacaatgaaccaatgagactggca

SEQ ID NO: 850502 - DNA, 120 bp, Artificial Sequence
  ENSG00000248656_6 (sequence is synthesized)
aagatcttgattttcctgattttcatttagattcttaacatttgagtccattgatatattcgaagctctacccttctggaaaatatcataagatttgaaaaatatagctgcaaagagcaa

SEQ ID NO: 850503 - DNA, 120 bp, Artificial Sequence
  ENSG00000248656_7 (sequence is synthesized)
aagaagatttgcgtctcaatagaaaagatctacagattgaatattgcatagaaaacaatttattcaccttacaaagataaaaggatgaaaacgccctgagcagtaataaaacttcgccat

SEQ ID NO: 850504 - DNA, 120 bp, Artificial Sequence
  ENSG00000248656_8 (sequence is synthesized)
tttggggagggcctcaagaggctatcttatcaatcttggtcgttggaaaagtatctgtaatctcaaagaaaactttaaatactgtccaaggaaaatatccaaatacatcttaaaatgcca

SEQ ID NO: 850505 - DNA, 120 bp, Artificial Sequence
  ENSG00000248656_9 (sequence is synthesized)
aggcagtggtataatatgtaactggaaaagaaaacccctcctgttatattttcccttatacgttactagcacatgcagtgcacgttaagaacaatagtcttttgttctgttctgtttata

SEQ ID NO: 850506 - DNA, 120 bp, Artificial Sequence
  ENSG00000248656_10 (sequence is synthesized)
aaaagaagaaaaagcatccagaacaatgggtgagaagaaacaaaaacctgtcgcctaaatcaagggattggtattctccaaatcattgctaccgcattgagccattttctctgattcagg

SEQ ID NO: 850507 - DNA, 120 bp, Artificial Sequence
  ENSG00000248656_11 (sequence is synthesized)
ctttgcccatcctttcacatgggaaaaatccatttagaattagaatgttattgtttacagatttgttctacattattaacataacctaataaaatatcctaacaactagttaaaacataa

SEQ ID NO: 850508 - DNA, 120 bp, Artificial Sequence
  ENSG00000280136_0 (sequence is synthesized)
gtatttcaggacagccaggagggggcgcacatccgccgagaaactgtgagcaagagcgtctgtgctgaaccatggcgccaccagagggcgcgcgatcccgccgcaaccaacttcccgctg

SEQ ID NO: 850509 - DNA, 120 bp, Artificial Sequence
  ENSG00000280136_1 (sequence is synthesized)
ccgcaaccaacttcccgctgaggtgccagaagcagcgaggagcttcgacttcctcagggcagcacgggggtcgcgttaacttggtgttcttcattgatgatgattattccccaccttcta

SEQ ID NO: 850510 - DNA, 86 bp, Artificial Sequence
  ENSG00000280136_2 (sequence is synthesized)
gcttccgaggctctgcgggagaatccgtttcctggccgtagaggtggcctgcactctgcagcttgtgctgcccgtctcgaatgact

SEQ ID NO: 850511 - DNA, 83 bp, Artificial Sequence
  ENSG00000280136_3 (sequence is synthesized)
tcacctgctctgctcttacaaggatccgaagaaatggaatcatcgtatcgctgatctaacatgaacttatgaattcaacaggt

SEQ ID NO: 850512 - DNA, 120 bp, Artificial Sequence
  ENSG00000243849_0 (sequence is synthesized)
attctgaccctgagagcacctggcaggtatgtggaaaaaagaaatgtgcattaaaacagaccaggttacatcacaatttttaaaatttcactgtggaaaaagttacaaacgaatgtaaac

SEQ ID NO: 850513 - DNA, 120 bp, Artificial Sequence
  ENSG00000243849_1 (sequence is synthesized)
ttaccagaagtaagaaagatataatatttccaaaccagacacagaggaaaatacatctatttcctatcattaaatacttacaagaagtaaaagataaaaagaaagagccaatggatgtag

SEQ ID NO: 850514 - DNA, 120 bp, Artificial Sequence
  ENSG00000243849_2 (sequence is synthesized)
ccttttccatgagattgagaacactataagaaagcctacaaatgctatggttgcacatacagaaaaatccaagacctcagagacttcttcccatcactctttgatgtaactgatttctcc

SEQ ID NO: 850515 - DNA, 120 bp, Artificial Sequence
  ENSG00000243849_3 (sequence is synthesized)
ccatcagtatcctgatcatctggttccttcatttcctctgatccaggatgacccaccagtaggagggtgcaactaccaccagagacctctgacctctgcaagacagctaattataatcac

SEQ ID NO: 850516 - DNA, 120 bp, Artificial Sequence
  ENSG00000243849_4 (sequence is synthesized)
agattctctttctctaggtaaattgtcattgtggtgcactttggttttccagaggtccactaccaaagttcatcttttccccagatgcttcaccattaaaattaactttctgccatccta

SEQ ID NO: 850517 - DNA, 120 bp, Artificial Sequence
  ENSG00000243849_5 (sequence is synthesized)
atgttgccccattctgaccctgagagcacctggcaggtatgtggaaaaaagaaatgtgcattaaaacagagacactgataatcaagttatgggaagctctggggtggtagaagattgtta

SEQ ID NO: 850518 - DNA, 120 bp, Artificial Sequence
  ENSG00000243849_6 (sequence is synthesized)
cgcaaatgcatgagacaaagtggaagaaagagagagaaagacaagatcattccatcccggaaatagacgagggtatgatataatgaaaagagcatggagtttggagcaagacctaagatc

SEQ ID NO: 850519 - DNA, 120 bp, Artificial Sequence
  ENSG00000243849_7 (sequence is synthesized)
aagagtgatgttgatgcagctagtttggagaccttgctttgagaatcactgagatgaactgtctaccctacatataaatcaacctaaattttgtatagaaaaattcatggaatgtatggg

SEQ ID NO: 850520 - DNA, 120 bp, Artificial Sequence
  ENSG00000243849_8 (sequence is synthesized)
ttgccccattctgaccctgagagcacctggcaggtatgtggaaaaaagaaatgtgcattaaaacagagacaggaggaatgtacacagcctgcaatactctagcagtaagtactactactg

SEQ ID NO: 850521 - DNA, 120 bp, Artificial Sequence
  ENSG00000243849_9 (sequence is synthesized)
aggaagagccattatgcccacgtgcatcaggagtaaatgctgagttctggtcggtcatggcgcaacagtctccaaggggaactcccaattacttccaaaggaaagttgaactcccactaa

SEQ ID NO: 850522 - DNA, 120 bp, Artificial Sequence
  ENSG00000243849_10 (sequence is synthesized)
tctgtagtggagcagtttttataccttcttaaaacccagaagaatgagtatcagagtactctatgtgatcctcagaaataaaaaccacaagtctagggctgctaaagtaccctaccaaaa

SEQ ID NO: 850523 - DNA, 120 bp, Artificial Sequence
  ENSG00000240790_0 (sequence is synthesized)
gatttgcaaggatgggctaaatatggggcgggacttccggggcagccggagtaggtaatgtcgggaggtgtagtgggaaggaaaggacacgtcagcatctggccgcggggcgcggggggc

SEQ ID NO: 850524 - DNA, 120 bp, Artificial Sequence
  ENSG00000240790_1 (sequence is synthesized)
catgggagccccaggggcggagccagccgcgccctcccgcctgacctcgcccatgacgtccttccccgctggcctcaggggcgcacacttgtatacccacctaggtgggcgccgctgtac

SEQ ID NO: 850525 - DNA, 120 bp, Artificial Sequence
  ENSG00000240790_2 (sequence is synthesized)
gggagggtggagccacgcaggcagagtcctggaggaatctccgtacccgctccactcgacttccgacattttaccttggctaaaaaatcctgaagtcggtcctaaagtcagcaaactcag

SEQ ID NO: 850526 - DNA, 120 bp, Artificial Sequence
  ENSG00000240790_3 (sequence is synthesized)
agttaaagtttcagcaagtaacagcaaactagattaaccatggcataaacatacagaagtccccccttatctgaaagatcaagaagctggaggtatttgtttaaaagttcaaccatctca

SEQ ID NO: 850527 - DNA, 87 bp, Artificial Sequence
  ENSG00000240792_0 (sequence is synthesized)
tttgctatgaggagtgcctctttttctttgtttggaagagttccagaaggaatggtgccagctcctctttgtacctctactagaatt

SEQ ID NO: 850528 - DNA, 88 bp, Artificial Sequence
  ENSG00000240792_1 (sequence is synthesized)
tgaggagtgcctctttttctttgtttggaagagttccagaaggaatggtgccagctcctctttgtacctctactagaatttggctacc

SEQ ID NO: 850529 - DNA, 89 bp, Artificial Sequence
  ENSG00000240792_2 (sequence is synthesized)
gattacaggtgcacgtcaccacgcccagcacatttttgtgttggccaggctagtctagaactcctttagagctcttctccttaagggag

SEQ ID NO: 850530 - DNA, 120 bp, Artificial Sequence
  ENSG00000240792_3 (sequence is synthesized)
ctagtctagaactcctttagagctcttctccttaagggagaagatttattattctcgaggataataaatcgaggaggaagatttactatccttgaaggggtctgttttggaagctgccat

SEQ ID NO: 850531 - DNA, 120 bp, Artificial Sequence
  ENSG00000240792_4 (sequence is synthesized)
tcagcccctaaataaaaatataaaacctaaatataaaaggtgccatgccctcagcccctaaatataaatataaggatccaattttttggatccactataaggatccaaaggtcagttcta

SEQ ID NO: 850532 - DNA, 120 bp, Artificial Sequence
  ENSG00000240792_5 (sequence is synthesized)
gaactcgtgaggtctcctttttttggatccaatataaggatccaattattttcttctgcatgtaaatacccaatttttaaatgccatttatttaagagattgcccatttctcattgtgtg

SEQ ID NO: 850533 - DNA, 120 bp, Artificial Sequence
  ENSG00000240792_6 (sequence is synthesized)
ttcttgaaatttctgtcaaaaatcaattgactgtaaatgggcaggtttatgggctttctatcctgttccataagtcaacgtgtctgtttttatgctaacgccatgttgttttgatgcaat

SEQ ID NO: 850534 - DNA, 120 bp, Artificial Sequence
  ENSG00000240792_7 (sequence is synthesized)
tactttatactttgaagtcaagtagagtgatgctgccaattttattctttttgctaaggattattttggctacttggcatcttttgaggttcaatgtgaattaaaagtttgtgttctcca

SEQ ID NO: 850535 - DNA, 88 bp, Artificial Sequence
  ENSG00000240792_8 (sequence is synthesized)
gatcttttccacgatgcaggtttgttacagcaatatgaaattctggcttgctctctttctacttatctatagaaatattgctaaaacc

SEQ ID NO: 850536 - DNA, 120 bp, Artificial Sequence
  ENSG00000237341_0 (sequence is synthesized)
acccattgcagcaccttcacaaagccgaggggctccttgaccacccggaactgacccccagccaccagctgaggagagaaacagtggggaaggggtggggttgttggaggtacagggagg

SEQ ID NO: 850537 - DNA, 120 bp, Artificial Sequence
  ENSG00000237341_1 (sequence is synthesized)
tgagcggcaaggctgcccatcaatgaccccaggggatggagcatgtgacctcggggagagggtgagaaggagaaagtgacaccttggggatggtgtgagccccagggtccaaggactggt

SEQ ID NO: 850538 - DNA, 120 bp, Artificial Sequence
  ENSG00000237341_2 (sequence is synthesized)
cagctggtaaattggtagaaccaggatatgaacccaggaagtctggctccagcacctgttactcttagccactgtgctaacttatcagtacaccatcttttttttttcagcacaccatct

SEQ ID NO: 850539 - DNA, 120 bp, Artificial Sequence
  ENSG00000237341_3 (sequence is synthesized)
tgtatgtctgtgaaagatacctgataatactatttgcttccagagggtagggaaacttttcactttatacccctttgtaccttttgagactccatctcaaataaaataaaaaaataaaca

SEQ ID NO: 850540 - DNA, 120 bp, Artificial Sequence
  ENSG00000237343_0 (sequence is synthesized)
ggcccgcccggcaggacgactgagcaaggccttggaaaaccggagagattggagcgcagaatggggaggaattgaggggaaaatggagatagaacctgaaagagccccaaacgccagaac

SEQ ID NO: 850541 - DNA, 120 bp, Artificial Sequence
  ENSG00000237343_1 (sequence is synthesized)
tggaggagcaacatccgcatgaccctctgtgttcctttaggcaaaaggacttgcttccattgtttgttcaattgtttgtgtttgttaaataaataaaacgattttcatgtatctttgaaa

SEQ ID NO: 850542 - DNA, 120 bp, Artificial Sequence
  ENSG00000237342_0 (sequence is synthesized)
tctagggtctcacccacttgctcatcaatgtcacccagccctctcacttctcacccctgctagagacagcactggatcccttccacccacaactaatcagtcaccttgtccttttgattc

SEQ ID NO: 850543 - DNA, 120 bp, Artificial Sequence
  ENSG00000237342_1 (sequence is synthesized)
ttctcagaggtctctggcagacccagccacatcagcatccctgactctcagtaaactcagaacctgtgctgaagcggacagtgggttcaatccctctatgaagtgctcacaatggatgaa

SEQ ID NO: 850544 - DNA, 120 bp, Artificial Sequence
  ENSG00000237342_2 (sequence is synthesized)
cgatggctcctggtaaaactggtgaccctgggatttgtctccatatcttagcaatctgttctgtagttcatcaaagaaacgattattaagaaatgtttgaagagagggagacaggcttca

SEQ ID NO: 850545 - DNA, 120 bp, Artificial Sequence
  ENSG00000237346_0 (sequence is synthesized)
gtcagggctccactgtttggatcaatcagaactgaacaagtttaaatctgccatttgcatgaataagccagatcaagaaccacggcaagaactttccctatttaagccagaccctccctt

SEQ ID NO: 850546 - DNA, 120 bp, Artificial Sequence
  ENSG00000237346_1 (sequence is synthesized)
tgttccttggagtggtcacaaatagagccttccaaatgtgagggaggacaatggtaacatgaattgactgagtacatatcaagtcttacactgtatacttcacatgcactaactctccta

SEQ ID NO: 850547 - DNA, 120 bp, Artificial Sequence
  ENSG00000237346_2 (sequence is synthesized)
ctcttcacaacaagcatgcaaggtgggaaaatagaggctgagagaaattgagtaacttgcctcaagccatatattcggcaccgagatgtgatctgagccagagccaacaactgaggtcca

SEQ ID NO: 850548 - DNA, 120 bp, Artificial Sequence
  ENSG00000237346_3 (sequence is synthesized)
ttcccagagaggagcaagccttcctgccgtcacctctggtgtcatcctataggacattaaaaccaactcaagattgtgttgaaaactgttttccttttgaggatgctaataagaacaaga

SEQ ID NO: 850549 - DNA, 120 bp, Artificial Sequence
  ENSG00000237346_4 (sequence is synthesized)
tcatatcaacgggtatggatcatggcaggattttccttcagctgagtcttttaatgagccgtttcataatgagggctgaatctacacacagtatctacatgctagccaaggtttaaagac

SEQ ID NO: 850550 - DNA, 120 bp, Artificial Sequence
  ENSG00000237346_5 (sequence is synthesized)
ttttataatattttcctccattctcacccccttcgaagccctggctttaattcttttaaacagtaacattcattggctgttaagtaaaacaggagagaacacaataaatttatgatattt

SEQ ID NO: 850551 - DNA, 120 bp, Artificial Sequence
  ENSG00000272537_0 (sequence is synthesized)
tttatttctggaattttcccttcagtgaaaccaaggaaagcaatatcacagataaaggggatttccgaatatataaacaaaaagcatttactgaatacaagaataaactatttctgctcc

SEQ ID NO: 850552 - DNA, 120 bp, Artificial Sequence
  ENSG00000277728_0 (sequence is synthesized)
ctgatctcgaagaggtgcctgtgttttatgctgctgatttcacggcaagtaagtggttccctaattagcacagagcctatgctacaaaaggaaagaatggttaactgacttcttgaacag

SEQ ID NO: 850553 - DNA, 120 bp, Artificial Sequence
  ENSG00000277728_1 (sequence is synthesized)
aatctttcttcttttccacggagcagtttattccctttttcagcccatggtccctgctcacctgtgcagggagtcggatcttggatgtgacactgctgccagactctgcctcctcctgaa

SEQ ID NO: 850554 - DNA, 120 bp, Artificial Sequence
  ENSG00000277728_2 (sequence is synthesized)
tttctagctcatcccagctggtggctgtggccagaactgagccagcatcatctagaagtaatgactgggtgaatccatgaatcaaaacctggtaataaaaggcagatatccatacaagcc

SEQ ID NO: 850555 - DNA, 120 bp, Artificial Sequence
  ENSG00000274261_0 (sequence is synthesized)
ttgatgagtaagaagaaaagaaaagatcctctttcatggtgaccttggaagctgcatgaagacaggggtctcatctgccttggacatcactgaatcctatgcacggagcacaatgcctgg

SEQ ID NO: 850556 - DNA, 120 bp, Artificial Sequence
  ENSG00000274261_1 (sequence is synthesized)
ctctcatatctctttcccacctgctggccctgcctttccatttaaatccagagccaagcacacattccttactatatatttttttgtactgattaaaatgtttcataaacttttaccaca

SEQ ID NO: 850557 - DNA, 120 bp, Artificial Sequence
  ENSG00000274261_2 (sequence is synthesized)
gaagggaactaaattaatctaggatgacccatattgtgcagcagctaatgacccagttcacctctggttaattttctgcttctgggtgtcctgggaacgggtggtgtttactccagttgg

SEQ ID NO: 850558 - DNA, 120 bp, Artificial Sequence
  ENSG00000274261_3 (sequence is synthesized)
gacaaacctttattaatgagccagagtgttggctgctctgggcggagtgttttaatagaaatcggccaatgggccagggcgtgctgaagttgcagaatatgaatgaggcccttttctttg

SEQ ID NO: 850559 - DNA, 120 bp, Artificial Sequence
  ENSG00000274261_4 (sequence is synthesized)
ccctctctctcttccaccctgatttgcataactaagctttctgcctttttatctttttaatgtgtttgtttgttgattattgatctgtcccctatggagggacaaatcattcgcccacca

SEQ ID NO: 850560 - DNA, 120 bp, Artificial Sequence
  ENSG00000274261_5 (sequence is synthesized)
ggcagtgacctaaatttggcagaagccccagccatgtctgcagcaaactggagccagacagttatacttgtatttgtagggacaattccaggagaatttatatggcccaaggttgtaatg

SEQ ID NO: 850561 - DNA, 120 bp, Artificial Sequence
  ENSG00000274261_6 (sequence is synthesized)
tgagtaagaagaaaagaaaagatcctctttcatggatttgttgggtggaagaacatgcatatgttgaagctagaggcactggagtgatggattctgcctagggcaagacaggacttgatt

SEQ ID NO: 850562 - DNA, 120 bp, Artificial Sequence
  ENSG00000274261_7 (sequence is synthesized)
cttgctggaggagccatctgagtttgtgaagggcaaggagagtgcatgggccgagaaaggtgctcccaggagtgatccctaaggcagccaacagtaccccactgtgcagataagagaaag

SEQ ID NO: 850563 - DNA, 120 bp, Artificial Sequence
  ENSG00000274261_8 (sequence is synthesized)
aaaccgacgcaaaggaagtcttcctaaccaaattccatagtgtaaaaagcaatgatttggaaattggaaggcctggactctgacttggggtctggaattctctctccaggtgaccttgga

SEQ ID NO: 850564 - DNA, 120 bp, Artificial Sequence
  ENSG00000274261_9 (sequence is synthesized)
gagtaagaagaaaagaaaagatcctctttcatggtcgcagctcaagtgtcacctcctctgagaagcttttcacaaccgccctgtccaaaggagaacagaagctgcatgaagacaggggtc

SEQ ID NO: 850565 - DNA, 120 bp, Artificial Sequence
  ENSG00000274265_0 (sequence is synthesized)
acatctggaaatggaaagccgacctccccctcctcctccacctcctcctcctcctcctccttctcctcctctcacccaggatcacttccgaaaccacttggccttcagcccctgcctcgg

SEQ ID NO: 850566 - DNA, 120 bp, Artificial Sequence
  ENSG00000274265_1 (sequence is synthesized)
ccagaggtttcatttttaactgaatatttaccaaagctgaaagcgtgcgaggggggtggggtggaaatagcggctgcttcttttccaaggatttatttaatggggatgtgttcaaggcaa

SEQ ID NO: 850567 - DNA, 120 bp, Artificial Sequence
  ENSG00000274265_2 (sequence is synthesized)
gaccgaattcagaaggatatcgacgtcgtgatccagaagtccagagctgaggactgcctgtttgcagattagcaataaactccttaaaacccaaaggtttgggcttctgttcctttcact

SEQ ID NO: 850568 - DNA, 120 bp, Artificial Sequence
  ENSG00000274265_3 (sequence is synthesized)
tgcagtcagacatggagttagtggtagaagaaacagaaggggtaacctgcatggtgacagctactgaggggatggataggaaagcaggctgagtccctggggccagtggttaccaaagcc

SEQ ID NO: 850569 - DNA, 120 bp, Artificial Sequence
  ENSG00000274265_4 (sequence is synthesized)
aaggagagagcaaggggagcccagtgggcctggccatggactgctctggaattccgagtgtgaactttcagccaagaaggagcttctgtctagatgaatagcaaatgtgacactgataat

SEQ ID NO: 850570 - DNA, 120 bp, Artificial Sequence
  ENSG00000274265_5 (sequence is synthesized)
agtaatcgaatattcctccaagtacaggctccttcctctttctcctggacctttgcacatgctgcctggaaaactcacccacaacctactttccatcctctccttcggctcatccctgct

SEQ ID NO: 850571 - DNA, 120 bp, Artificial Sequence
  ENSG00000274265_6 (sequence is synthesized)
aaactatgttgttagtgtatattgtaatcacctatttatgtctgtttgactgtgagcctcttggagatgggaattctctcctatgcattgcggtttccccaggccctagcacactgtcta

SEQ ID NO: 850572 - DNA, 120 bp, Artificial Sequence
  ENSG00000274265_7 (sequence is synthesized)
gcccagtattccttctcagtaagtaggtgttgaatgacttacaaaatgaatgctaaaagacctggtagacaagaaggaatttcttagcctaaatgaccagatgtggagaagatactcaaa

SEQ ID NO: 850573 - DNA, 120 bp, Artificial Sequence
  ENSG00000274265_8 (sequence is synthesized)
cacttcagggtccccgatctggtgatgtcacttgcagtggaatttcatatgaatccagtgtgacagaagttgcctagtcaagttgtaagtcctcttctctgggtcacatgttcaaatact

SEQ ID NO: 850574 - DNA, 120 bp, Artificial Sequence
  ENSG00000274265_9 (sequence is synthesized)
tttaggagacagataatgcaatatttaagatacaggaagtgatgaagactgtggcacactggagagtttggactccaagagtaattaattcagttgaaaaaatcaacagcactctgttga

SEQ ID NO: 850575 - DNA, 120 bp, Artificial Sequence
  ENSG00000274265_10 (sequence is synthesized)
tcaagcaaactttctaggggccctaatccacctgggcctgcagtatgtaattccataactcatgggatgccatcaagagagacaatctacttgattgctaaagggcctttgttttctttg

SEQ ID NO: 850576 - DNA, 120 bp, Artificial Sequence
  ENSG00000274265_11 (sequence is synthesized)
gagttccccaggaaggagaaatgtatgtgtgtgcaggggtgaggaggggggagagtgaagaaacaatactatccccttaaaaaggtttgtcagttttcattatgaaagaagaccaaacgt

SEQ ID NO: 850577 - DNA, 120 bp, Artificial Sequence
  ENSG00000274265_12 (sequence is synthesized)
gcccactccagaaatcttggcatatgcagttattttgaagccattcagcgttcttcaagatgtcacaatgaaaagagtgatggttttttaaataaaaaattaacatgtttctcttggcaa

SEQ ID NO: 850578 - DNA, 120 bp, Artificial Sequence
  ENSG00000274265_13 (sequence is synthesized)
ccgaagcctgcaagcacgcctcctgggttccagcagcggcggcagagcgggatttcagatactcagactccacctttacttttacctatgttggcggccccagaaggagtgaaggcaatt

SEQ ID NO: 850579 - DNA, 120 bp, Artificial Sequence
  ENSG00000274265_14 (sequence is synthesized)
gtgaaggcaattttgaaggcatgactacgacctgctctggccacaagagctaagagttgccaggtgttgtggctcaaacactttgagatgccaatcccaacactttgagaggccaaggca

SEQ ID NO: 850580 - DNA, 87 bp, Artificial Sequence
  ENSG00000274265_15 (sequence is synthesized)
gattgcttgaggctaggagcttgaatacaaaaaataaaaaaacaggccaggcgcagtggcacttagggaggccaaggtgggtggatc

SEQ ID NO: 850581 - DNA, 120 bp, Artificial Sequence
  ENSG00000274265_16 (sequence is synthesized)
ggctcccgccgcccagccggtgatcgctctccggccgtccccggcaccctcggccccccacggcggttggtccgggcgggggaaggagaaagtgagactcggtgtcatcaccaatccgtc

SEQ ID NO: 850582 - DNA, 120 bp, Artificial Sequence
  ENSG00000274265_17 (sequence is synthesized)
tcattcagagtccacaggatggatgaacggatatgaaaatgaacaaacgtgtgacacaacactgcatgatttaccggcaatgactttctgatcaagcctgaagtgggttgtagcctcttt

SEQ ID NO: 850583 - DNA, 120 bp, Artificial Sequence
  ENSG00000274265_18 (sequence is synthesized)
atttactttttatttgacacatagcagagagagatttaaactatctcttattggccttttccctgcgtcttagcttggtttctgtcagtgtttcccagcatcgagaaataaggactaatc

SEQ ID NO: 850584 - DNA, 120 bp, Artificial Sequence
  ENSG00000274265_19 (sequence is synthesized)
tgtcatattagatctaaactctaaaagaaaaggactttgggccttatatctgccacccattctttcaatggaggtgacacccctcatttctatatttccagtcatctctcaatgaaaagg

SEQ ID NO: 850585 - DNA, 120 bp, Artificial Sequence
  ENSG00000274265_20 (sequence is synthesized)
aacatgcaggctggctggcctttggagagcaccccacacagttttgaggagctctgcagctctgcttgccctttctgcatcacagcagatccaaaaggtgaaaaaaaaaaaacaaaaaaa

SEQ ID NO: 850586 - DNA, 120 bp, Artificial Sequence
  ENSG00000274265_21 (sequence is synthesized)
gatttcagatactcagactccacctttacttttacctatgttggcggccccagaaggtatttatgggtgtagagttgcttcatttcctgttcacactcttgtgtttcctttgttcttagc

SEQ ID NO: 850587 - DNA, 120 bp, Artificial Sequence
  ENSG00000274265_22 (sequence is synthesized)
gtgttccgtgttcgggtattttggttgcttgtttgattactgtggcttttctttacctacaacccaagcctgacgtccctcggttttaaatagcagggggaggggaatcaatgtttgatt

SEQ ID NO: 850588 - DNA, 120 bp, Artificial Sequence
  ENSG00000274265_23 (sequence is synthesized)
tgatacaggcaagccggtgcaaaactggaatactggatatgaagtgaaatgtataaaagacataaaatgtcacaaaatagtttgatcacaagtgttgattttcctggtgagttggggctg

SEQ ID NO: 850589 - DNA, 120 bp, Artificial Sequence
  ENSG00000274265_24 (sequence is synthesized)
cgtgtttccatgttttctgaaggttcacataaacatgcagcctgccaattctctgtacatttttttttttcaatgagtggtatttcggttttcacgtttagttgtaagacagaaattgga

SEQ ID NO: 850590 - DNA, 120 bp, Artificial Sequence
  ENSG00000274265_25 (sequence is synthesized)
gacttatatgtagctggagtggatgacttctttcttttgggggaagaatgagagatgcacatttcgttagtaaattgtgaacaacttgaaacaaacccaaatccaattttgaatttaaga

SEQ ID NO: 850591 - DNA, 120 bp, Artificial Sequence
  ENSG00000274265_26 (sequence is synthesized)
agtagagttaaaatgaaaggtagccattcaaatactatgccttgctgccttcacttattaagttaggattttcttccttttagccctttagggatacagtagtttaaaagagcagtagcc

SEQ ID NO: 850592 - DNA, 120 bp, Artificial Sequence
  ENSG00000274265_27 (sequence is synthesized)
acatatgaaaggatcagatttagcttagagggaattccttagaccagccctgctgttaagacttgacattcaatattgtttgatcacattccaaaatatagcttagctaatggcaacatt

SEQ ID NO: 850593 - DNA, 120 bp, Artificial Sequence
  ENSG00000274265_28 (sequence is synthesized)
tgtaaacatataaattgcaaaagaagctttcttgtgtacatacatttttaaaagcttgaaattgatgtgaacttttaaaaacacgtaggatctgtattacattctacatctcaaaacaaa

SEQ ID NO: 850594 - DNA, 120 bp, Artificial Sequence
  ENSG00000274265_29 (sequence is synthesized)
ctaggaacttcatataaaatttaattccagtttcaactagttgtggagcatttgatccaaaataaaatgaaagtcctctctgaagttgtagaggagactcaagaatcagaacaacctgaa

SEQ ID NO: 850595 - DNA, 120 bp, Artificial Sequence
  ENSG00000274265_30 (sequence is synthesized)
ttgactacaatgcagtgtgaatatcgcacatgggaccatttgtcatactgtcagatggcaatacatagatggatagaattttgctgtttgatcaaagctgtgccatcggaaacttgtttt

SEQ ID NO: 850596 - DNA, 120 bp, Artificial Sequence
  ENSG00000270972_0 (sequence is synthesized)
ctgtcctctgggcagatggcagggttgtgtcttcctgtggagttccttcctttcgcctcagtgaccacggagacgcatgtcgaggtgtgacctcgcctgggcctctgcatgagggtgggg

SEQ ID NO: 850597 - DNA, 120 bp, Artificial Sequence
  ENSG00000270972_1 (sequence is synthesized)
agcagagtcctccttagtgggagtggagcgtgcacaggacgtaattacgtggggccatttgttacgcagcctaacacagcctgtcctggctgatgcagatggccattgcagcagtcatct

SEQ ID NO: 850598 - DNA, 120 bp, Artificial Sequence
  ENSG00000270972_2 (sequence is synthesized)
tctcaccctcactggagatcttagccttggcctcacaggtgctccagaccttttcctggcagaattttggtgacttcagaaatatgatgactgctgaacccacttctcccagcatttcta

SEQ ID NO: 850599 - DNA, 120 bp, Artificial Sequence
  ENSG00000270972_3 (sequence is synthesized)
tttgtggttgcctggtgtatttaaagtctgtgttgatgggtgcatatatttttaacgtttccctattgtgaaatttaataaatttacagcaaaatgtataaaatacgaaagtaaaaaact

SEQ ID NO: 850600 - DNA, 120 bp, Artificial Sequence
  ENSG00000249219_0 (sequence is synthesized)
acctgcttccaggagaacccaaacctgcaccaaggagttacctgccggcgcctcccacacccttcagcccctgcctcttcagtgccctgcaggaccctggcccaagcgcaccagccttct

SEQ ID NO: 850601 - DNA, 120 bp, Artificial Sequence
  ENSG00000249219_1 (sequence is synthesized)
atttccctaactgccagctacctgtccatccatccaccctccttgggcctcagttggggctggaacctgacacattcatctgcatatctggctctttcctcaatctggaatgttcttttg

SEQ ID NO: 850602 - DNA, 120 bp, Artificial Sequence
  ENSG00000249219_2 (sequence is synthesized)
ttctttcagccttatctcagacacctccaggaagccttctctgatgctttcctggctggacgacaagggaggagcaagccgaggagggccttgagtgtttgcacggagatgaagttcctg

SEQ ID NO: 850603 - DNA, 120 bp, Artificial Sequence
  ENSG00000249219_3 (sequence is synthesized)
cccacaggtcacagggggtggcaagacctatagttctgagacccctgaaggtgccaggcatggggcttgggagctgggcatatggtgattaaaaaaagaaaaacaacccagattgtccca

SEQ ID NO: 850604 - DNA, 120 bp, Artificial Sequence
  ENSG00000249216_0 (sequence is synthesized)
attgatgagttggtgctcgatctgagaaacagtggagagccgctctccacatttaaccatccccaaatggtgccagtcgtctaaagacatgcctgaacaagtgacagtgtttgacagacc

SEQ ID NO: 850605 - DNA, 120 bp, Artificial Sequence
  ENSG00000249216_1 (sequence is synthesized)
cacttcaggataaaaagaattggtccacattgtagcaataacttccaggaagaaacgagtgacagtgagacctcacagacaaagccctccagaatttccaagaggcatttttcagcacgg

SEQ ID NO: 850606 - DNA, 120 bp, Artificial Sequence
  ENSG00000249216_2 (sequence is synthesized)
aacgatgccaaaagacatcatgaagttgtgtctggagagcaaagcagtaagattggaccagattatctctacaatttcttccagtgcaaacactctgtgaatgaaggcacttgccttctc

SEQ ID NO: 850607 - DNA, 120 bp, Artificial Sequence
  ENSG00000236760_0 (sequence is synthesized)
gactgctctgatcactacgtgctgtgaagggcacggtgccagcctctgatctgggtccttgctgccatatgaagacacccacctaccctgctggagaggggctctggagggccagggaga

SEQ ID NO: 850608 - DNA, 120 bp, Artificial Sequence
  ENSG00000236760_1 (sequence is synthesized)
gccatcccgggccctccagcccccgttggccatcgcagcacacgccacctgcacaaagatccggcaggcaccgggagccggctggcaggtacctctgagcacactggattaattcccagg

SEQ ID NO: 850609 - DNA, 120 bp, Artificial Sequence
  ENSG00000236760_2 (sequence is synthesized)
gcggccgtcacagcagtgacgttggcactgaccacccacggaaaggacagaatttaaagaggctgagtttttcatctctctctgctgttttctctctggtttcccttttaccattttgac

SEQ ID NO: 850610 - DNA, 120 bp, Artificial Sequence
  ENSG00000236760_3 (sequence is synthesized)
gaaaagatagaaatgggccacagctcaggacctcaggatttcaggattcgccgtttgagctcagctatgtgagctcagggactctgccgaggacagtgggactctgagggcaaggggaca

SEQ ID NO: 850611 - DNA, 120 bp, Artificial Sequence
  ENSG00000236760_4 (sequence is synthesized)
ttgctaacgggtggaaagttgcacgtgccatgttgtgttgctgacaccaaaggcaaaagcccaggtcctggccccaggttaggcccacacatgcctgggctgtcccatctcggggactcc

SEQ ID NO: 850612 - DNA, 120 bp, Artificial Sequence
  ENSG00000236760_5 (sequence is synthesized)
ctggtcagagctgaaagtcttcgggctctgtctccctcgctggggagtgtgtccagccctgtcctctagcactgggcccctgtctccccagacacggcccccagggcggaggggaccaca

SEQ ID NO: 850613 - DNA, 120 bp, Artificial Sequence
  ENSG00000236760_6 (sequence is synthesized)
gacattctgaggtgaactctcctccgtgttggaaatatgaaaaataaaaagggaagggctgggggaagagacggggcattgtttacttcctcaaaattccatgttaacgagttcccgctg

SEQ ID NO: 850614 - DNA, 120 bp, Artificial Sequence
  ENSG00000232445_0 (sequence is synthesized)
agggaacgcccttgagtaactcgcgcacttggggcccgtttccacctaggactacaggctcaagatggcctggtagatgcagccggcacgcacctctcctctgacgggaaccgaaggagc

SEQ ID NO: 850615 - DNA, 120 bp, Artificial Sequence
  ENSG00000232445_1 (sequence is synthesized)
cggtaggttttcacacttgcagcagatccgctaagagaacgcgggattcagccgagaagccacggggagcccgaggagcggagcagaggcacccaggcagcctgcgcggagaaattggat

SEQ ID NO: 850616 - DNA, 120 bp, Artificial Sequence
  ENSG00000232445_2 (sequence is synthesized)
cggcggggacggcctgcagctcccgcgcgcggggaaagggaagaagtcctcccctacaaagcaaattcacaaacttggaagaagcaatttacacaggatgtgcagatctcaatggaagga

SEQ ID NO: 850617 - DNA, 120 bp, Artificial Sequence
  ENSG00000232445_3 (sequence is synthesized)
cacgggaaacgtgaaaaagcaaggaagtgggacgcctccaaaggaacccagtaattctccagcaacagatccccatccaaaagaaattcaagaaatgtcatatagagaattgtggaaact

SEQ ID NO: 850618 - DNA, 120 bp, Artificial Sequence
  ENSG00000232445_4 (sequence is synthesized)
gattttaaccaagattagagggattcaagagacttctgaaaaagaaagtaaggaaatgtcaacagcaattctggatatggttgaggtatttaccaaccagatacagagttttccagagca

SEQ ID NO: 850619 - DNA, 120 bp, Artificial Sequence
  ENSG00000232445_5 (sequence is synthesized)
catggcaaatgtggaactgaagaaatcactggatgaaatacaaagtatactcgaaagcttcaatgatagactagatcaagcagaaaaaaaactctcaaaacttaaaatctgaaggctttt

SEQ ID NO: 850620 - DNA, 120 bp, Artificial Sequence
  ENSG00000232445_6 (sequence is synthesized)
aaaaaaactctcaaaacttaaaatctgaaggcttttactcaattcaaatatttaatgggttgtactctggccattcaggtgaacaaaatctgctgggttaattttttttttttttttttt

SEQ ID NO: 850621 - DNA, 120 bp, Artificial Sequence
  ENSG00000232445_7 (sequence is synthesized)
ctggccttgggttgttatactggggtcttgaataatcattaaaggtgaaatgaaaataatttccttttgaggtggtcaattttgtgagatggattcttgttaggcagctgtcatggaaag

SEQ ID NO: 850622 - DNA, 120 bp, Artificial Sequence
  ENSG00000232445_8 (sequence is synthesized)
atgatttagttcagttgacattaataatacgcatggtaatcctaacaggtgaatgtggttcaaactaaattgccagggaattgtcatggtctagaaaagccactctctccagtagactgc

SEQ ID NO: 850623 - DNA, 120 bp, Artificial Sequence
  ENSG00000232445_9 (sequence is synthesized)
tcacacagctacatgtcagccctcctcactgtgaaagtgacagacaccctagcatttttattcatctcccttaggtgcctcaactttttctcccactctcagctgaaaagagctacatct

SEQ ID NO: 850624 - DNA, 120 bp, Artificial Sequence
  ENSG00000232445_10 (sequence is synthesized)
agagctacatctaccatttcatctacttagtgtattttcttattggctatgttaaaaaattacaaacataacaattatgaatgaaaaataactccatggctgggtgcagtggctcacacc

SEQ ID NO: 850625 - DNA, 120 bp, Artificial Sequence
  ENSG00000232445_11 (sequence is synthesized)
gcttgggaggctgagggaggagaatcagttgaacccggagggtggagattgcagtgagactctcaaaaaaacaaaacaacacaaaaaaatctcctaagatgattaaaacaaacttgcttc

SEQ ID NO: 850626 - DNA, 120 bp, Artificial Sequence
  ENSG00000232445_12 (sequence is synthesized)
caaacttgcttctacaataaaccgtaaactcaccgtatctagtgattctgtacattaaatcttttgaacatgtttaccaatttggtgttatgaaaaattttttagaggttgtgtatgggc

SEQ ID NO: 850627 - DNA, 71 bp, Artificial Sequence
  ENSG00000232445_13 (sequence is synthesized)
gggctgggcacaatgatcaaggacaggagttcgagatcagctggggcaacatggcaaaaccccatctctac

SEQ ID NO: 850628 - DNA, 120 bp, Artificial Sequence
  ENSG00000232445_14 (sequence is synthesized)
agtacaaaaattagccaggcgtgcactaattagtgggctggaccattactggtgtgtgtatctctagtctcaactactcagaggctgagctggcgagatcagtggagcccaggagattga

SEQ ID NO: 850629 - DNA, 120 bp, Artificial Sequence
  ENSG00000232445_15 (sequence is synthesized)
ggctgctgtgagctgtggtcatgccactgcactccagccgggatgacagagtgacaccgtgtctcaaaaaaacaaaaaacaaaaaattgtgtctgtactccactttccaactggatatag

SEQ ID NO: 850630 - DNA, 84 bp, Artificial Sequence
  ENSG00000232445_16 (sequence is synthesized)
atagtgtccatatcaaggtcatctaaataaatataatgttttggagagagttgatgttgccgaggctggagagcagtggcgcga

SEQ ID NO: 850631 - DNA, 120 bp, Artificial Sequence
  ENSG00000232445_17 (sequence is synthesized)
attacaggcgtaagccactgcacccggcctccaggctcaagcaattcttatgcctcagccacatgagtagctggtattacaggtgtgtgccaacatgcctggcgaatttttgtattttta

SEQ ID NO: 850632 - DNA, 85 bp, Artificial Sequence
  ENSG00000232445_18 (sequence is synthesized)
gcttccatcagttctcccatcccactgcaactggccaggcacttcaatttttttttttttgctctgtcaccaggctggagtgcag

SEQ ID NO: 850633 - DNA, 63 bp, Artificial Sequence
  ENSG00000232445_19 (sequence is synthesized)
ttttgcctcgcgggttcaggcaattctgcctcacccttctgagtagctgggactacaggcatg

SEQ ID NO: 850634 - DNA, 120 bp, Artificial Sequence
  ENSG00000232445_20 (sequence is synthesized)
gcgtgagccaccacgcccagccaggcacttcaaattttttgtctctgtgtgtctgcgaataactgagaaagtgccacagtattgatttgggggttacaaacatattttagtgagtaggca

SEQ ID NO: 850635 - DNA, 120 bp, Artificial Sequence
  ENSG00000232445_21 (sequence is synthesized)
agtaggcaaattctcaaatacaaaatctatgaataaggatcaagtatacgttcatttggcattttaagtaccccaggttccctcattatctgagggagggcagcatatgaaacttattta

SEQ ID NO: 850636 - DNA, 120 bp, Artificial Sequence
  ENSG00000232445_22 (sequence is synthesized)
gacttcttcttaaacatttaatgtaatttaatttatttgagacaggatgtctgttgcccaggctggagtatagtggcgcgatctcggctcagtgcaatctctgcctcccaggctcaagca

SEQ ID NO: 850637 - DNA, 120 bp, Artificial Sequence
  ENSG00000232445_23 (sequence is synthesized)
tcagtgcaatctctgcctcccaggctcaagcaattcttatgcctcagccacctgagtagctggtattacaggcgtgtgccaacacaccctgtgaatttttgtatttttagtagagatggg

SEQ ID NO: 850638 - DNA, 71 bp, Artificial Sequence
  ENSG00000232445_24 (sequence is synthesized)
tcactgcaacctctgtctcccgggctcaagcaccacacccagctgatttttctatttttagtagagatggg

SEQ ID NO: 850639 - DNA, 120 bp, Artificial Sequence
  ENSG00000232445_25 (sequence is synthesized)
caccacgccccgcctagaactcttatagagaatgaagaatgcgttttgattttcttttttgcatatccaagacattgcactcaagtttctgaatcggcctattaggttggtgcaaaagta

SEQ ID NO: 850640 - DNA, 120 bp, Artificial Sequence
  ENSG00000232445_26 (sequence is synthesized)
atagtggcttttgccattaaaaattaaaaatggcaaaaaccacgattagttttgcaccaacctaacatttaggaaaatggagagttccacgaaggtgggaatttctgtctttttcattta

SEQ ID NO: 850641 - DNA, 120 bp, Artificial Sequence
  ENSG00000232445_27 (sequence is synthesized)
tgctgtctatggtcagcagctagaacagcagtgcacacacagcaggtgctcagccagtcggtatttgttgggtgaatcaaggaatgaaaatcacattcaagccaatacacgtgattaaac

SEQ ID NO: 850642 - DNA, 82 bp, Artificial Sequence
  ENSG00000232445_28 (sequence is synthesized)
acatgaaggcggactacaagaagtcctcccctacaaagcaaattcacaaacttggaagaagcaatttacacaggatgtgcag

SEQ ID NO: 850643 - DNA, 120 bp, Artificial Sequence
  ENSG00000232444_0 (sequence is synthesized)
ctgccctcagggattccaggggcgccctgtaaagaccccagtccctgtaacatgttctggtgcctgacccactttttcagaaaggaatggcatttccagtctcactgcagcatgaagcta

SEQ ID NO: 850644 - DNA, 120 bp, Artificial Sequence
  ENSG00000232444_1 (sequence is synthesized)
acatttccctttggaaattggacacagtgaccccaattcgtgtgactgagagacgacatcacctacagagccctatgaaaagaagtcagcaaatactctgacctccgggtgctgggggag

SEQ ID NO: 850645 - DNA, 120 bp, Artificial Sequence
  ENSG00000232444_2 (sequence is synthesized)
aagacagcagacagagagaggaagatctgggcccagaattccttgttcgtgtccagaaaactataaacacagtgaattccttcaaacgtatctgcaaagcccgctgggtagtttatgtca

SEQ ID NO: 850646 - DNA, 120 bp, Artificial Sequence
  ENSG00000232444_3 (sequence is synthesized)
agcattttgcacgcaccaagactcctgatcaaagatgtatctaaacatgccctgtgggtgggcaattcctcaggagccagttcgggaggctgtttgtcacctgtcctctccctagtaagg

SEQ ID NO: 850647 - DNA, 120 bp, Artificial Sequence
  ENSG00000232444_4 (sequence is synthesized)
aaaggcccccctggaccagtcagaagacttgagttctggtctcttactgttgacctcagtgagcttggatgaatcccctctgcatttgtcttgattggttcttgattggttcagcccaag

SEQ ID NO: 850648 - DNA, 120 bp, Artificial Sequence
  ENSG00000232444_5 (sequence is synthesized)
ctctgcatttaaatcgcctgtgtcacttaccaccagagatctgatttaattggtttgtggtggggagcagagatgatagagctcagaaagcttcccaggtgattgtaatgtacatccggg

SEQ ID NO: 850649 - DNA, 120 bp, Artificial Sequence
  ENSG00000232442_0 (sequence is synthesized)
ggtcgggcgttgcctgccccgcgcgggcggccgggccgagggacgatggtcagtggacggacggcgccagggagcagtgcccacgcgcggcagggcggtaccttcaggcctccaggtgtc

SEQ ID NO: 850650 - DNA, 120 bp, Artificial Sequence
  ENSG00000232442_1 (sequence is synthesized)
gggcggtaccttcaggcctccaggtgtcatcgaacacccttgtgcttgctgtcacccgctgcctgtctgcaggatcccggattccgtatcaggggaccgaaattagtcggaaaataggaa

SEQ ID NO: 850651 - DNA, 120 bp, Artificial Sequence
  ENSG00000232442_2 (sequence is synthesized)
ttcggaggggctgtaattagagttgcacattcattcagttcccagtaaagtagaacgtgctccagccagtgaggaaaaggtgtttttaaaaattagattggccgagtgcggtggctcatg

SEQ ID NO: 850652 - DNA, 87 bp, Artificial Sequence
  ENSG00000232442_3 (sequence is synthesized)
tgtttttaaaaattagattggccgagtgcggtggctcatgccttttacctcaacactttgggagacaaaggtgggaggatcacctgt

SEQ ID NO: 850653 - DNA, 120 bp, Artificial Sequence
  ENSG00000232448_0 (sequence is synthesized)
agtaaacggcagcgaaggaagcggggtcaggactggagaggagagggggaggaagacagacgaccggagaggaacaaaaatggaagaacaagtaagaatggacagaggaataccatgtgc

SEQ ID NO: 850654 - DNA, 120 bp, Artificial Sequence
  ENSG00000232448_1 (sequence is synthesized)
tgactgacgaacgcctgggtttctgaaccaattgccatcaaggggattgggattaccataatttttgctgagactaagccccaccccagtaaccaaaggcttatgggtggaatgcaagct

SEQ ID NO: 850655 - DNA, 120 bp, Artificial Sequence
  ENSG00000232448_2 (sequence is synthesized)
attggaagtatttgaagatgtgaccaaggaagctatgagaattggaaatgaggcagttgtttagaaacgggctgatgtgcttgtggtaaggtggaaggaggaaggcagatgaggaaagga

SEQ ID NO: 850656 - DNA, 120 bp, Artificial Sequence
  ENSG00000232448_3 (sequence is synthesized)
atgtgcaactgaagcaattagctgttactatgtaacgaaccatcccaaaacgtagtgacataaaacaacaaccatttgttatttctcatgcgcttacatttctactaggaagttctgcaa

SEQ ID NO: 850657 - DNA, 120 bp, Artificial Sequence
  ENSG00000232448_4 (sequence is synthesized)
atctggattggtcttggctgatcttggcagggcttgttctggcatccactctcagctgctgaattagctctcagttcctggttcagggtggccttggcttggatgacttggctctgctcc

SEQ ID NO: 850658 - DNA, 120 bp, Artificial Sequence
  ENSG00000232448_5 (sequence is synthesized)
aaagagagaaagccaaaatgttcatgcccttttttgagccacttttttcaatgagttggctactgtctccctagctaaacacatctcagccaagcccagaaccagtatggaaggtcacta

SEQ ID NO: 850659 - DNA, 120 bp, Artificial Sequence
  ENSG00000232448_6 (sequence is synthesized)
accaaagctgtgggtaaatggaggcatggaaatctgtgacctttaatgcaatcatctacaataacaagccaatgaccatgaagctggacagagaaatagattcctgggaggaagaatagc

SEQ ID NO: 850660 - DNA, 120 bp, Artificial Sequence
  ENSG00000232448_7 (sequence is synthesized)
aaaatgtctggagtaagaggaagtagggtatttcagggaactcagcaaacagtgtgatgacaaaatgaaagcacagtcatgcaatcagcacctgggtaaatatttaggttggagtctgtg

SEQ ID NO: 850661 - DNA, 120 bp, Artificial Sequence
  ENSG00000232448_8 (sequence is synthesized)
ttgacccagtctgcaggtaaccctcagcctggcccagcatttcactgccctcctactacttacccagaaacaactctcctgtattgattaagcaggaaagaggaaactctcctggaagac

SEQ ID NO: 850662 - DNA, 120 bp, Artificial Sequence
  ENSG00000232448_9 (sequence is synthesized)
acaagggcagatccaagcaggagctaaggttttccagaatgtggtcttaggtctgtgaatggcttttggacagaggcacagctgaacattcccatggtttctgtgactttagaatcacta

SEQ ID NO: 850663 - DNA, 120 bp, Artificial Sequence
  ENSG00000232448_10 (sequence is synthesized)
ccacctcttgactatgcacctcttgactaatttctatttctcaaattatagaataaaaaatgctgattctaaggataaaaacacaacaaataatccaaaagtatataagatgaaaaataa

SEQ ID NO: 850664 - DNA, 120 bp, Artificial Sequence
  ENSG00000232448_11 (sequence is synthesized)
aggacaaatggtgcaatccatcactaccagtttaacatcatctctttcagattaactcagtctcatttgggcaaataattaatcactttttattcaaatgctctagaaggattgttatct

SEQ ID NO: 850665 - DNA, 120 bp, Artificial Sequence
  ENSG00000224467_0 (sequence is synthesized)
aaaaagcgtcagcagcggaagagaatcctatgtcaagtgtaaaggtcacttgtgagtctttgctggatttttttgccaaacgataaataaccggtttttttgtgcggacataagttttca

SEQ ID NO: 850666 - DNA, 120 bp, Artificial Sequence
  ENSG00000224467_1 (sequence is synthesized)
tctcctttggataaataccaagtagtatgattgctggatcataagtcttcacaatgggagatgcagaacagctggcaggaatcaatgtactctgtgtttctcatgggagaaagaaagaac

SEQ ID NO: 850667 - DNA, 120 bp, Artificial Sequence
  ENSG00000224467_2 (sequence is synthesized)
caggagaggtgattaagcaattagaatattttgaagtctaaaataactgtagtatcaggagaacaactgaacgagaaaataaattactgagagtaaagcagtctgtagattttgggaaga

SEQ ID NO: 850668 - DNA, 120 bp, Artificial Sequence
  ENSG00000224467_3 (sequence is synthesized)
ttcgtaggtgtgtgagaaacaagacattttggaatcttaatgtaatctgagaagtaaaatagacctgtattcctgtcattctctttctcattttcttcctcctcaccaaatcatgatgtt

SEQ ID NO: 850669 - DNA, 120 bp, Artificial Sequence
  ENSG00000170983_0 (sequence is synthesized)
agtgccagcaactgggcactgtcctcatggaaaccaagcacctcaaacccagttggccccagtgccaggaaccgagcactattgtcatgtagaccaagcacctcgaacccagccggcccc

SEQ ID NO: 850670 - DNA, 120 bp, Artificial Sequence
  ENSG00000170983_1 (sequence is synthesized)
agtgttaggaaccgggtactgtcgtcatcagcatcagggtcaacctctggaccctggcttcctcagcattaacaggaaaggttagaagccctgttaggtctcttccaactttgtctataa

SEQ ID NO: 850671 - DNA, 120 bp, Artificial Sequence
  ENSG00000170983_2 (sequence is synthesized)
ctctgaaaaagcaacgtggagtttctctggcacactctttgaggaaatagaattcgccaaaccaatgcaaatggagaaatatatttcacctgagtagggaagaaaaaccttgtaaaggct

SEQ ID NO: 850672 - DNA, 120 bp, Artificial Sequence
  ENSG00000170983_3 (sequence is synthesized)
tccaagaacctccagaaacctactggatgagcttaccactaatctcttttaaagcaattccctgacaacactctgttaatctctcctgagctccttagtaccccctgaaagtagcaggac

SEQ ID NO: 850673 - DNA, 120 bp, Artificial Sequence
  ENSG00000170983_4 (sequence is synthesized)
agccttactttccaaatcttcacctttgcaagagtctagtctgtgagtccaggctcacctgaagtctgagattttgggagctttggagaattctggataaaatcccttactggacttagc

SEQ ID NO: 850674 - DNA, 120 bp, Artificial Sequence
  ENSG00000170983_5 (sequence is synthesized)
gccattaatgactgcaggaagctgttccaggcctcaatacagaaagaacccttagaccctcagagctggagttttatctcctagggttatggtgaatacctagggcaggaccgggcactt

SEQ ID NO: 850675 - DNA, 120 bp, Artificial Sequence
  ENSG00000170983_6 (sequence is synthesized)
agaaagctctcatccaatgtcccctaactcttggagacaataatcaagacttagaggaactgactgggggaaacgtcaacactttcttggttctctcagaggccggtggagacgctgctc

SEQ ID NO: 850676 - DNA, 120 bp, Artificial Sequence
  ENSG00000170983_7 (sequence is synthesized)
cattctgcctggatcatttcccagggcagactttctgagctgaactgggttctcggtgattccaactcactccccacagacttacccggcactgagtgcaggcctggagggagacacttc

SEQ ID NO: 850677 - DNA, 120 bp, Artificial Sequence
  ENSG00000170983_8 (sequence is synthesized)
acttagatcctttcaccggatggcatgataatgctgtgggaaggtacagatgaggaaaccaaggctcatggaagttgcgtgaattgctccaggtcacaaggcttttgacctccagtccag

SEQ ID NO: 850678 - DNA, 120 bp, Artificial Sequence
  ENSG00000170983_9 (sequence is synthesized)
cgtccttcctgcgttcccccattggcaaggtttgccaacagggtgggcccagctgctcccagcacagctggccctggagagcactttgcagggacagagtcagccacgtgagaaaggact

SEQ ID NO: 850679 - DNA, 120 bp, Artificial Sequence
  ENSG00000170983_10 (sequence is synthesized)
tggcatactgtaggatttaagggttctaatcagggcttcccagcaaattctgttgggccaatgtggacctctcaagtatgaggttggaccatataaaactgcaattctgtagatcaaaaa

SEQ ID NO: 850680 - DNA, 120 bp, Artificial Sequence
  ENSG00000170983_11 (sequence is synthesized)
tcatttcccagggcagtatgagacaggccttcatcagaaaggccgggcctgtggatggaggcagggggctgatggaaatgacctctgtgcagctaaggatgctatgctttgtttcttgag

SEQ ID NO: 850681 - DNA, 120 bp, Artificial Sequence
  ENSG00000170983_12 (sequence is synthesized)
ctgaactgcaattgtgcccagccttcctgggacaagggtgggaactcaggagttactacaaccaccgccaccccaccctgggaaggccatttgtggtcttggacaagttccctcccacgt

SEQ ID NO: 850682 - DNA, 120 bp, Artificial Sequence
  ENSG00000170983_13 (sequence is synthesized)
ggctggacgagccctcaggcgacagctgcgttctgtcgaggaagccacccatgtggatgcctggagagagctggcatgtcacttgcagctgagtcccctgggtccgaggcggtgcctggc

SEQ ID NO: 850683 - DNA, 120 bp, Artificial Sequence
  ENSG00000170983_14 (sequence is synthesized)
acacgagcagactcagctctgatgccccaagttgcagagaccttgaggagtcatgttgttcatcgtcctccctcaggaataaatgtagcagacaatcagtgtctgtgctttttaaatccc

SEQ ID NO: 850684 - DNA, 120 bp, Artificial Sequence
  ENSG00000170983_15 (sequence is synthesized)
gtctctgcctgggctcaacctctgtgatttctggcaagttactgaaattctctgtgcctcaggtttcttttatgaaaattataacagttttatctcctagggttatggtgaatacctagg

SEQ ID NO: 850685 - DNA, 120 bp, Artificial Sequence
  ENSG00000170983_16 (sequence is synthesized)
tcagactcaccctggactaatgcccatgctcctgcctccaggcccatagaaggaggaggcaacccatctggatgtgtggaggaggttttgatctcctcttcttggtcagaactgctcata

SEQ ID NO: 850686 - DNA, 120 bp, Artificial Sequence
  ENSG00000170983_17 (sequence is synthesized)
agaatctccactgcaggatcgatatttgctgccatttcttttcctctgcacacacattctagagtaagcagcaaacagaggtgaccagagatgctaggatggcaacatgaggggtctgga

SEQ ID NO: 850687 - DNA, 120 bp, Artificial Sequence
  ENSG00000170983_18 (sequence is synthesized)
aagtctcccactgagcgatcagaagctgggtttcacatactcaccacggctagtctagcgagtttgcagaattcagaaacgggatgagaccctgaggtttgcctttcattagcctggctg

SEQ ID NO: 850688 - DNA, 120 bp, Artificial Sequence
  ENSG00000170983_19 (sequence is synthesized)
tccacttatgggacagtctctgcaggaaggaaggaaacaggggaggctcctacctgccccatcagctcactttttaaaacatgctcacctggcctcaccaagtgaggtgggaggagagcc

SEQ ID NO: 850689 - DNA, 120 bp, Artificial Sequence
  ENSG00000170983_20 (sequence is synthesized)
cgagatcggttcactttgtgcttcacatgtccttcacatgtcacctctctactccgtgaacttgcaagtctcacctgggtctctcactttccattccctgtctctcagatctactagcac

SEQ ID NO: 850690 - DNA, 120 bp, Artificial Sequence
  ENSG00000170983_21 (sequence is synthesized)
aaggctacagccacaaagcacttatatagttgggcccctttgctgacacgtgacatgcaattcagggatgcctcctcctccccctagaagtgatgagtgcctgcagctattgtaaatgtt

SEQ ID NO: 850691 - DNA, 120 bp, Artificial Sequence
  ENSG00000170983_22 (sequence is synthesized)
aaagtaaaattaatgttggttgtacacccatgttcatagcagcatgactcacaatagccaaatgtagaagcaatctgtattagtccgttctcaagctgctaataaagacatatctgagac

SEQ ID NO: 850692 - DNA, 120 bp, Artificial Sequence
  ENSG00000170983_23 (sequence is synthesized)
ggaagccacagcagactcagctctgatgccccaagttgcagagaccttgaggagtcatgttgttcatcgtcctccctcaggaataaatgtagcagacaatcagtgtctgtgctttttaaa

SEQ ID NO: 850693 - DNA, 120 bp, Artificial Sequence
  ENSG00000264044_0 (sequence is synthesized)
acttccccttggctcttccccctccctccaacctgagcccctcatcccatggaggaccctcccttcactccactcacttagaggctgttctcacgttgatatccaagtcacccttgaaca

SEQ ID NO: 850694 - DNA, 120 bp, Artificial Sequence
  ENSG00000264044_1 (sequence is synthesized)
caaactgaccaggtttccaatgaaaagacaggtggctccactcccagtgcatattttcagttgtgttgtatggatcctatgaccacccccgagaatttggtgagatatagtgaaagtcat

SEQ ID NO: 850695 - DNA, 120 bp, Artificial Sequence
  ENSG00000264044_2 (sequence is synthesized)
gacgccgacgggagcaaggctgaccactctgctcggtgcccacaagtcgacccattagccgccagtcacggatctcaaacagggggaaaagggctgcctggatcaagctcttgaacctgt

SEQ ID NO: 850696 - DNA, 120 bp, Artificial Sequence
  ENSG00000264044_3 (sequence is synthesized)
tctaccacatgctcaggaccatggaaggaggcatctgccagagctaccagttctagccctgctaagctccaagtaagcagtgcccggcgcatgggtgtgttgccatagagacgacgggaa

SEQ ID NO: 850697 - DNA, 120 bp, Artificial Sequence
  ENSG00000264044_4 (sequence is synthesized)
gactgagccgaaagagaggagccaaacacggttccggagggtctgcagcgcagggaaggggttccggtggaggatcatctcttccagctcaggtagcagctgcacctccacctccttgaa

SEQ ID NO: 850698 - DNA, 120 bp, Artificial Sequence
  ENSG00000264044_5 (sequence is synthesized)
cagctacaaaagctgtgagcttggctgtgctcacctccagggttaggtttagcagccgctttgggggtaatggctcaggggcacggccttctagctcagaagtagttcctgaagtctcta

SEQ ID NO: 850699 - DNA, 120 bp, Artificial Sequence
  ENSG00000264044_6 (sequence is synthesized)
gtgcaagggatggtacagtctcaggaaacacagtggctcttagtaggtctcggcactgtagagtggccaggacatgctggtacaggtacatgtgatctggggggctccaaagtaaggtca

SEQ ID NO: 850700 - DNA, 120 bp, Artificial Sequence
  ENSG00000264044_7 (sequence is synthesized)
gccctgcaccacactgaacctttagggagcagaagaaaaggatctgtcaattaccatgtcacaaaacagtagagatggcaaggattatgacacatgcacacctggctcaagaaccatctc

SEQ ID NO: 850701 - DNA, 120 bp, Artificial Sequence
  ENSG00000264044_8 (sequence is synthesized)
cacccagaagttgttcctgagtaatcacattaattactgccttgctttgttcctgttagcactaatgtgctgagctgacagttgatagtgtctgacatttaagagcacttatacttttta

SEQ ID NO: 850702 - DNA, 120 bp, Artificial Sequence
  ENSG00000264044_9 (sequence is synthesized)
agttctcttcaactggattctaaattgtctgaaaataggggccatgtgtcttaattctttggtatctaccatagtatactcagtatagacagcaggtactcaataaatcatctggcttca

SEQ ID NO: 850703 - DNA, 120 bp, Artificial Sequence
  ENSG00000224468_0 (sequence is synthesized)
gggtggagtgcagtggcacgataacagctcactatcacctcaaactcaagtgatgcacctgcttcagtctcccgggtagctaggactacaggcgtgtagcaccacacccagctaattttt

SEQ ID NO: 850704 - DNA, 120 bp, Artificial Sequence
  ENSG00000224468_1 (sequence is synthesized)
taaaaagaaactcctcagaccacagtgttctacttagggcaaggtccacagaaggcacctaatgaaaatgacccacactgagggactatgttttctggcagcagtgaacgacggcctctt

SEQ ID NO: 850705 - DNA, 120 bp, Artificial Sequence
  ENSG00000224468_2 (sequence is synthesized)
ctttgccactgaaagtgagcaagtaaccacaagttcgtgtatgtcattaccgtgattgctacacccaactggaaaaagaatattcctactgtgactccattaaagtcttttcaaagcaaa

SEQ ID NO: 850706 - DNA, 80 bp, Artificial Sequence
  ENSG00000270021_0 (sequence is synthesized)
cggccttgaccccgggcccgcgccctacccgttgacgccggccgctctgcgcccaggcaccagcccgcaccccggacgcg

SEQ ID NO: 850707 - DNA, 120 bp, Artificial Sequence
  ENSG00000270021_1 (sequence is synthesized)
ccgcaccccggacgcgaggtctgacccatgaccccggggacgcccagagcccagtccttgggaagggccaggcccctggagaggagcttcttcagggcgcgtcccagactctgcgtctcg

SEQ ID NO: 850708 - DNA, 120 bp, Artificial Sequence
  ENSG00000270021_2 (sequence is synthesized)
agtgaacgcctactgtgtgcctggctctgagcacgggactgtcgctgccacggcatctttaggaaccttcccactaacccagtgggaaggcacaatggctgttaccagcgatcgctcttc

SEQ ID NO: 850709 - DNA, 120 bp, Artificial Sequence
  ENSG00000270021_3 (sequence is synthesized)
cctccccagtcaatgccaactcccccctgccccgcctcagagaccccgctgtctttagatacaggccaccgccaagccctggtctgccccaagatcaattactgcgcacccggttcccct

SEQ ID NO: 850710 - DNA, 120 bp, Artificial Sequence
  ENSG00000270021_4 (sequence is synthesized)
ggggtccttcagttaatcctcctcaccccgaagtctggaacctgccttgcacatggaagcggttagctacttcgcttcagcaaaagttcactttcggacccaagttgggaattactaatg

SEQ ID NO: 850711 - DNA, 120 bp, Artificial Sequence
  ENSG00000270021_5 (sequence is synthesized)
tagacagtgattccttatcatcacacacgttttttaaaaactgcggacaggccgaaagaggaggagccgccacaaagcccgccacgtcttcctaaattggtttaccgcctgaaggcattg

SEQ ID NO: 850712 - DNA, 120 bp, Artificial Sequence
  ENSG00000270021_6 (sequence is synthesized)
gtgccccatcccgggtacttaaatgggggcctgccctctactcccctccctccaaagtgtggagccggaagccacttctccatccagctgtgaactaaatttggataataatacacatcc

SEQ ID NO: 850713 - DNA, 120 bp, Artificial Sequence
  ENSG00000270021_7 (sequence is synthesized)
ctcagggttgatgtgaagtttaaagtgccgctactggggattatggaggtaattagagacccccacccccaccccccagtcctcaggctgcgcgggaatcgcagcggcagtaacctccac

SEQ ID NO: 850714 - DNA, 120 bp, Artificial Sequence
  ENSG00000270021_8 (sequence is synthesized)
gtattttgtgtcatacatcgatttgggtgctggatatgaaacagccaagagaacaggcagaaatctctgccctcctgtagtttgcagtctcgtgggggaaagacagacaaacgggagaat

SEQ ID NO: 850715 - DNA, 120 bp, Artificial Sequence
  ENSG00000270021_9 (sequence is synthesized)
gtgtcagagggtctccatggggtggagaaaaataaggcggagaaggggaataggaagtgtgagataagagtgaggctcaaatacaagagaaggcctctatgagaaagtaacatttaaagc

SEQ ID NO: 850716 - DNA, 120 bp, Artificial Sequence
  ENSG00000270021_10 (sequence is synthesized)
ctgaagaaattgagggagcaagccgtgtggatgtctggggaagaactgcgccgagcatgaggaatagcaagtgcaaaggctggggtaggagtgtgtccaaaatagtcaagacagagcgag

SEQ ID NO: 850717 - DNA, 120 bp, Artificial Sequence
  ENSG00000270021_11 (sequence is synthesized)
tgtgaggttggagtagaatgggtgaaggggaaagtaacaggagatgaagctggaaaaatgatgatgcttatgatgcttctggtcccaaaacaaagcattatggttctatgaggatctccc

SEQ ID NO: 850718 - DNA, 120 bp, Artificial Sequence
  ENSG00000270021_12 (sequence is synthesized)
gaagaaaagatgtcaggaaaggtgcagagaccctcccccacacaccacattgttgttccatccttctctgtgcctttgggcaaggactctccgttctgtagggaccaccaggtggaatta

SEQ ID NO: 850719 - DNA, 120 bp, Artificial Sequence
  ENSG00000270021_13 (sequence is synthesized)
aagtctacactcctccaagagctgatcttggggcggccccacctccatgcccctctacagcgtgccattctcatagaacacactaggacctttgtcctctggagctgttcagtgcagcag

SEQ ID NO: 850720 - DNA, 120 bp, Artificial Sequence
  ENSG00000270021_14 (sequence is synthesized)
ctctgacctcatccttctccagaagcctccaccttctctcccctctctcctcctgcgctttgtgtgtcctgttcttccacttcggtgacctgtctcctcccctaatctggctcagagagg

SEQ ID NO: 850721 - DNA, 120 bp, Artificial Sequence
  ENSG00000270021_15 (sequence is synthesized)
ggtaccagctgctgctgctgctattgcttcttcttctgttaaaggttttttatttttttccaatgacaaagctatgctcattctgaaaacatgaaaaataaaaatgctcaaaaaataaaa

SEQ ID NO: 850722 - DNA, 120 bp, Artificial Sequence
  ENSG00000270020_0 (sequence is synthesized)
gtgtgggctggccagaagacagcagcagaagaatcgtcacgcccccttaactaaagcaccgctgggatttccacgggctcttttctccggcttgtcattgtgcacaggtgatttttttta

SEQ ID NO: 850723 - DNA, 120 bp, Artificial Sequence
  ENSG00000270020_1 (sequence is synthesized)
atttaatttttttttttagtattaaatcatttttggaacaataggataaaaaccttgtataacatttgtctactcctaaaagcaatttctagaatgcacagggcaaaggcttggtgttcc

SEQ ID NO: 850724 - DNA, 120 bp, Artificial Sequence
  ENSG00000270020_2 (sequence is synthesized)
acttacacaggcaaatgtgtctgttcttgagtctggctgcacaggttggatcagcacccaggttgccccgggggccggcccccggcacacactcccaactctgtaaggaggaaaaatcct

SEQ ID NO: 850725 - DNA, 120 bp, Artificial Sequence
  ENSG00000270020_3 (sequence is synthesized)
ctccccagttttgccagtgaaaagactgaggtcccaaaggaggaagtgactttccccctgcctggtcccacagccagttttggcagagctaagccagtaaaggtaacctccccaagccag

SEQ ID NO: 850726 - DNA, 120 bp, Artificial Sequence
  ENSG00000270020_4 (sequence is synthesized)
tgcccagctgcctctgccattcttattgctcacagggccacacatcccaggcatggcctgcccagccttgggagaaggattccgtgactgtggcaaaaggaaaaggcttcgctcagaagg

SEQ ID NO: 850727 - DNA, 120 bp, Artificial Sequence
  ENSG00000270020_5 (sequence is synthesized)
cctaagggacttagggccagggtcccagacctaggccagggtaaagccaagacttgggccccagtctctctgcccccagagctgtgcctgcctctttcattacttctttctcaaccagcc

SEQ ID NO: 850728 - DNA, 120 bp, Artificial Sequence
  ENSG00000270020_6 (sequence is synthesized)
agatgggcaagactggcgcctgtcctcccaacccactgcagcccctcagctctggcagaagctgccccctgcactcagaggaagtgtcctctgggcatttttgcccccggcccagctctc

SEQ ID NO: 850729 - DNA, 120 bp, Artificial Sequence
  ENSG00000270020_7 (sequence is synthesized)
agccagtgatcccgacatacctcaccccagatacccatgtagagaaggaaatggatggagacacaagacagcaaatcagaaaggccgagaacagcggtggaacagcatcaccgagaaatc

SEQ ID NO: 850730 - DNA, 120 bp, Artificial Sequence
  ENSG00000270020_8 (sequence is synthesized)
agaaaggctgagaacagcagcggaacagaatcactgagaaatcagaaaggccgagaacagctgtggaacagaatcaccgagaaatcagaaaggccgagaacagcggtggaacagaatcac

SEQ ID NO: 850731 - DNA, 120 bp, Artificial Sequence
  ENSG00000270020_9 (sequence is synthesized)
cgagaaatcagaaaggccgagaacagcggcggaacagaatcaccgagaaatcagaaaggccgagaacagcggtggaacagaattacgaagaaagggccagtgcagagaccaccacaaaga

SEQ ID NO: 850732 - DNA, 120 bp, Artificial Sequence
  ENSG00000270020_10 (sequence is synthesized)
gttacattttagcaaagtgatggtggagaggatgaaatgtcagatgagaacagcatttagaacaggaatcagtaaccaggtgtaggaatggtggtaaatttagggtaaacatatgggccc

SEQ ID NO: 850733 - DNA, 120 bp, Artificial Sequence
  ENSG00000270020_11 (sequence is synthesized)
ccctctggcacccaccacagacatcagtaatgatccctgtgctcttgctggctgatccgaagtaccttccgcagcatgttcagccccaagacctgctgatatggacaggagatgtgaagc

SEQ ID NO: 850734 - DNA, 120 bp, Artificial Sequence
  ENSG00000270020_12 (sequence is synthesized)
tttctgcctttttaccaaaggagcaaaaatgaggattccctcccctcccctcttcctgtcctcctgggaagggctgggcagtatcctctccctgtcccgcaggcccccaggaagcacctg

SEQ ID NO: 850735 - DNA, 120 bp, Artificial Sequence
  ENSG00000270020_13 (sequence is synthesized)
gcttgcagccgactcagtttccaaaattttaattgtcacatcccctcccccccagcaaaaataaccaatcgaggcttgctaagcccacttccctccatcccgttccctttatagatttat

SEQ ID NO: 850736 - DNA, 120 bp, Artificial Sequence
  ENSG00000270020_14 (sequence is synthesized)
gaggaaatattaactatatacatagatgcacacatttatatcatttcccgtagtccttgcagtcacttttgagaggcctcctatttcacagccgaggttactgaaatgcagaggagtcag

SEQ ID NO: 850737 - DNA, 120 bp, Artificial Sequence
  ENSG00000270020_15 (sequence is synthesized)
tttgcccaccgtgcccctgtgggcagggagtgaagccgcgattgcagcgacagctgaccacaggttgagccatcaatcccactgtaccttccttcgctggggattgtcccctacttgcca

SEQ ID NO: 850738 - DNA, 120 bp, Artificial Sequence
  ENSG00000270020_16 (sequence is synthesized)
cctgaggtaggaagaggcagacaaagccagaggtgtttcctggaagagaaaagcagtgccctgtggaacggtggggggcttctacccgatcacacggcgcacagtgcagaggcgcgttgg

SEQ ID NO: 850739 - DNA, 120 bp, Artificial Sequence
  ENSG00000270020_17 (sequence is synthesized)
ggcccagggctgttccgacagaagccagcaggagtccctatcttgcacgtactgaacccttcaactctgatccgcacatcaccaccccgtgacctgcggccagcccatcatgcgacagcc

SEQ ID NO: 850740 - DNA, 120 bp, Artificial Sequence
  ENSG00000270020_18 (sequence is synthesized)
ccacacaaccctggtcctgttgctggaaatagccccatatttgattgcatttgtagatggagaaactggggcatagagtattggcggcttgtttcctggtgcattgcagagccgcaggtt

SEQ ID NO: 850741 - DNA, 120 bp, Artificial Sequence
  ENSG00000270020_19 (sequence is synthesized)
ggggggatctgggcgcccctcttctgtccccctctcccggccacccaccgccccagcaagtccccatgactttgccaatgtcagtgatcatcccgtgtttttaccagagaccatctgggc

SEQ ID NO: 850742 - DNA, 120 bp, Artificial Sequence
  ENSG00000270020_20 (sequence is synthesized)
acttattcaagcaagcagagacgcttagggaacccacactcccattcccgcgaacacggcagcacttcttcatgtgaatggaaccttttctttttgatgtccataaatcgcagaggtcgg

SEQ ID NO: 850743 - DNA, 120 bp, Artificial Sequence
  ENSG00000270020_21 (sequence is synthesized)
aatggagctgacgtgtgaccatgcggtttgcgcgttttgcactctggatggtttggaagcaatgagctcaggccctgagtactgaattgtgagcaaattaaacatccctacccaccttgc

SEQ ID NO: 850744 - DNA, 120 bp, Artificial Sequence
  ENSG00000270020_22 (sequence is synthesized)
agggtgaattagctcacttaagccttagaagagtcccaggaagcgtgtactactgtttcccttttccagataagacagatgtggctcagaagggctctgtgactccctgcggtctcatag

SEQ ID NO: 850745 - DNA, 120 bp, Artificial Sequence
  ENSG00000270020_23 (sequence is synthesized)
cagagtcggccacagcgtcaagcccctccctgctgggcgggagaaggctgtcccccggagaaacaccacgtgctcatctcttgaccacaagcagggcctcaggggtcacgaagccaccgc

SEQ ID NO: 850746 - DNA, 120 bp, Artificial Sequence
  ENSG00000270020_24 (sequence is synthesized)
agcttgtcggaacagagagaccatttaatggtcgaagagtgccgtgctggagccaggcacaccagggtttgcaccgtgtcctggctgtgtggcctctaagtgcttgccctctctgtgcct

SEQ ID NO: 850747 - DNA, 120 bp, Artificial Sequence
  ENSG00000270020_25 (sequence is synthesized)
ggtttattcactgtaagcctttcacaggttattatttatttaagcctcacagcaatgctatgggagccctactcttaccatcatccccactgtaacgatggggaagccgaggtgagcaga

SEQ ID NO: 850748 - DNA, 120 bp, Artificial Sequence
  ENSG00000270020_26 (sequence is synthesized)
agagagacacctgtgcaggctcacgaagttgagaagagagggagtcgggactcgaacccaggccctgtgactcccgtgctctgacccgctacatcccttatctgctcctcctagaacggc

SEQ ID NO: 850749 - DNA, 120 bp, Artificial Sequence
  ENSG00000270020_27 (sequence is synthesized)
ggggtccctgagggtgcagggagatgtctcctgtggccaacggagcacagctgcctcactcaggaatggggttggaagtcatttttactttcttcgtttcacttttctaaagtttttttt

SEQ ID NO: 850750 - DNA, 120 bp, Artificial Sequence
  ENSG00000270020_28 (sequence is synthesized)
tttttatttggaataagccacgtcatttgtgtaattagaaaaacactgcattaactgacccccgaccaaataaaataaaataaaaagccagctacgccttgacaaaggtcaaagggtctg

SEQ ID NO: 850751 - DNA, 120 bp, Artificial Sequence
  ENSG00000270022_0 (sequence is synthesized)
atgccttaaacttatgagtaaggaaaataacgattcggggtgacgcccgaatcctcactgctaatgtgagacgaatttttgagcgggtaaaggtcgccctcaaggtgacccgcctacttt

SEQ ID NO: 850752 - DNA, 120 bp, Artificial Sequence
  ENSG00000270022_1 (sequence is synthesized)
gcgggatgcctgggagttgcgatctgcccgaccttattcacgcctaaaaagtagactgactgtggggtggtcgtgttttttgtttcttgttggtaggtggtgaatgcgtttttttcgttg

SEQ ID NO: 850753 - DNA, 120 bp, Artificial Sequence
  ENSG00000270022_2 (sequence is synthesized)
cttcatcaccgtccccagctgcgctttgagccggtctaaggttgcccacagtattgacgttgggacccacgaaactggcaatttccatgtgtgcggccttacccagttctcccaaacttc

SEQ ID NO: 850754 - DNA, 120 bp, Artificial Sequence
  ENSG00000270022_3 (sequence is synthesized)
tgcgtataaccgcttctctgtgcttcagaaagataagtccggccccggcctcacacagcagctcagttcgtgacagcgtttaatatgtaaaatggagcaaataatttatagggcgttggg

SEQ ID NO: 850755 - DNA, 120 bp, Artificial Sequence
  ENSG00000270022_4 (sequence is synthesized)
agagttaaagagactaattcatttacgtgttaaatacagggaatggcttttgcattgatataaccccagcctccagcatgcgccagacctgacgtaggtgttcggcacatattttgtcca

SEQ ID NO: 850756 - DNA, 120 bp, Artificial Sequence
  ENSG00000273284_0 (sequence is synthesized)
cacatttatgtgtttaacatagacacatttatgtgtttaacatagacacatttatgtgtttacaatacatatgcagactctatataaacacataaatgtgtgtaatattcatactgtcac

SEQ ID NO: 850757 - DNA, 120 bp, Artificial Sequence
  ENSG00000273284_1 (sequence is synthesized)
cttttcttactcttgcaaaggtgatgtaattcaagtttgacttccttgaaacaattctcgggatatgtctagttatattagaagtttagttgtgtcaaatattgttctaaaagagactaa

SEQ ID NO: 850758 - DNA, 120 bp, Artificial Sequence
  ENSG00000273284_2 (sequence is synthesized)
aagcataggtgagaaatattcctggatgtagtgggaagtttttttaatttttattttttaatgagaattactaaagcagcaaaacacagcacaatatagtagaaagcactgtagatttcc

SEQ ID NO: 850759 - DNA, 120 bp, Artificial Sequence
  ENSG00000273284_3 (sequence is synthesized)
aatttgcatatattactgcagagtggattttgctacagacccactgtgtgatcttaattaattcatttcccatctctgatccttagttttcacatctgtaaaacaagaataaatgtctcc

SEQ ID NO: 850760 - DNA, 120 bp, Artificial Sequence
  ENSG00000273284_4 (sequence is synthesized)
aaaactttagaacactatatagatttaaggtggttgctgttattttatacagctgcaaatcactgtaagggtcatatttattcaagctaataataagaactccagactttgtacataaaa

SEQ ID NO: 850761 - DNA, 120 bp, Artificial Sequence
  ENSG00000273284_5 (sequence is synthesized)
tgctgtgtgtttgagtttactggactgaaactcatttgtttaaaatttagtttgaaaaataataaagaccagaataacaaaaatcttgtgggccctacattctttttcttactttccaat

SEQ ID NO: 850762 - DNA, 120 bp, Artificial Sequence
  ENSG00000273284_6 (sequence is synthesized)
atggctttatccatttgtttcctcccagccaactaattgccattttataaaagtaatcttccctcacatttatgtaatccaattatagaacccattagaaattataaagtggaggccagg

SEQ ID NO: 850763 - DNA, 120 bp, Artificial Sequence
  ENSG00000273284_7 (sequence is synthesized)
cctgataacaataactgtaatcccaatactttaggaggccaaggtggaaagaccacttgaggccaggagttcaagaccaacaggatgtctacaaaaataaaaaataaatgtggtaaaaca

SEQ ID NO: 850764 - DNA, 120 bp, Artificial Sequence
  ENSG00000235236_0 (sequence is synthesized)
tgtgctccatgcccattgcacaggccagttcaattccctaccatctgccacccatgctcttctttgggactacaactctggccaaacgtgaatatggaaagcagaggcccagggccctct

SEQ ID NO: 850765 - DNA, 120 bp, Artificial Sequence
  ENSG00000235236_1 (sequence is synthesized)
tgcagtacagacattttgagggcacagaagaagaagaaaaccacaggagtcccatgaaggtgcagaggtctacacaggagttcaggatagacaccttgctggcaggacatggccacagac

SEQ ID NO: 850766 - DNA, 120 bp, Artificial Sequence
  ENSG00000235236_2 (sequence is synthesized)
atgcttactgccagatcgctctacccttctggggcaacaggactcgagccctgaggactctgcaaagctaggcccctgatggtctactatgcttagagaccattatgcatggggctcttt

SEQ ID NO: 850767 - DNA, 120 bp, Artificial Sequence
  ENSG00000235236_3 (sequence is synthesized)
gggcttctaaagggctccctgggagaaactgccttccaaatctgactactaagatgatactatgggaacagattgtgaggacagaaagaaaaaaataaataaaaattaaaaacgtagaaa

SEQ ID NO: 850768 - DNA, 120 bp, Artificial Sequence
  ENSG00000273287_0 (sequence is synthesized)
gggtgacctccagcgagtcactggagcctgcagaatctcatttgagaagttggataagatctctgcccccaccgcccaggccccaggggagctgtgcagactgactctcttctgaagagt

SEQ ID NO: 850769 - DNA, 120 bp, Artificial Sequence
  ENSG00000273287_1 (sequence is synthesized)
cccttggaaatgttttggcggtggcaagagaaagagctttgcttgttcttcagaaagacttgccggagtcagacactgaggactccagagcatctggaggaagcccaagggccacctccc

SEQ ID NO: 850770 - DNA, 120 bp, Artificial Sequence
  ENSG00000273287_2 (sequence is synthesized)
ctgagaagccttccttcgccagcctgaataaaatggacctctatacacacacctgtctcagtggtggcagtggcaggccatctggagcggctgctgctgtcacaccagctgcagcaggga

SEQ ID NO: 850771 - DNA, 120 bp, Artificial Sequence
  ENSG00000273287_3 (sequence is synthesized)
ggcacggctggggctgcatgttccatggaactggcaggagctggggacaggcaggagcctctcccattctgagtcggggtggcagctccctgcatgccgctgcagctgcccaagccacgg

SEQ ID NO: 850772 - DNA, 120 bp, Artificial Sequence
  ENSG00000273287_4 (sequence is synthesized)
ctgtggacccaggcatccctgtgctctcggagcctgggagcaggtgggaaccccaccctcccaggtgcagctgcagccgcccaaaccacagctgcagaccggggcctcccgctccacgga

SEQ ID NO: 850773 - DNA, 120 bp, Artificial Sequence
  ENSG00000273287_5 (sequence is synthesized)
ggcttggaaatgcctgctcccactgcctggcttctccttgctgtcggcacctgctctgatcttggggcaaaattggggccgagcctgggttttgtcacagcccagccaggtgtgcacaca

SEQ ID NO: 850774 - DNA, 120 bp, Artificial Sequence
  ENSG00000273287_6 (sequence is synthesized)
ctcagggcagtgctgacatgccagccccctgccgtctcagccctctccagattttgggcactgatgagcataggaatgaagctgaggaggaactgagggcagcttggcagtggcctgcag

SEQ ID NO: 850775 - DNA, 120 bp, Artificial Sequence
  ENSG00000273287_7 (sequence is synthesized)
acgccccttggtacctatagcctgggcgccatgaatggcagcaggaggcagacaggtttctgggcagaagggggtgagtccctggtgaggcccaccttcaggccagggaggccctgaagg

SEQ ID NO: 850776 - DNA, 120 bp, Artificial Sequence
  ENSG00000273287_8 (sequence is synthesized)
ctgggggccaggctgtcagtgccgtggactggagtgcgaacttgtgttgccttttctgggcctgcccatggccgcccatggaccagtcagcatgaacttccccctctctgaggctgacag

SEQ ID NO: 850777 - DNA, 120 bp, Artificial Sequence
  ENSG00000273287_9 (sequence is synthesized)
aagccccaggctcagccagagctgagcagacgtcggatgaccagctgtagtgaggaactgccctctccagggcctcctctgagctattgtcactcaataaagctcctcttcgtcttgctc

SEQ ID NO: 850778 - DNA, 120 bp, Artificial Sequence
  ENSG00000273289_0 (sequence is synthesized)
ttccccaggcagcatgtgaggctggggtggcactcgacacaggacagcaggcaaggacatgccgccctccaggctgagggtcttgggagcctcccctcccagcccctgctgtggcctccc

SEQ ID NO: 850779 - DNA, 120 bp, Artificial Sequence
  ENSG00000273289_1 (sequence is synthesized)
tttccttcttaattaatcatacgctgctgcccaatttaaatatggaaatgcccaggccgaggcgatgcaattattcatgagggccgggcggctgtccggggctctcgggctgtggggagt

SEQ ID NO: 850780 - DNA, 120 bp, Artificial Sequence
  ENSG00000273289_2 (sequence is synthesized)
accgtggcatcgcctccgttctgatgtgtgtgaaattatgtgcacaaaaggcgcctccttatctgggagtgtgaactaaataaataaataagggcttttgtttgtttgccggctcctgca

SEQ ID NO: 850781 - DNA, 120 bp, Artificial Sequence
  ENSG00000275613_0 (sequence is synthesized)
gccgcagggcggcctgcggggctgtggacgcgaggccagctcgtagggggctgggcggtcagcggggtcaagggacagccacgctgggacggaggacggggacaggggagcccctgcggc

SEQ ID NO: 850782 - DNA, 120 bp, Artificial Sequence
  ENSG00000275613_1 (sequence is synthesized)
gccacttcttcctctccgagtcctgtctgcccttgatggagccactggtggggttacttgctggcggtcggccactttcgcccctccctcgccagcccgccagctccctaaggttttgtg

SEQ ID NO: 850783 - DNA, 120 bp, Artificial Sequence
  ENSG00000275613_2 (sequence is synthesized)
ttttttgtcaccaccacacctcagtgttgagctaagtgaggacgtccccccagcaaatgtattggacggaaggaaacgctgtgcgggaggaggcggaggaaagtaggccacccggggctc

SEQ ID NO: 850784 - DNA, 120 bp, Artificial Sequence
  ENSG00000275613_3 (sequence is synthesized)
aagtgagaacaagcaccaagccctgtggatttcagaagaactccacctccacagagtcctcaaagatcttctcctgaactccgcactccccagccttgagaggagacacaggagctggag

SEQ ID NO: 850785 - DNA, 120 bp, Artificial Sequence
  ENSG00000275613_4 (sequence is synthesized)
gaagcagctttatccctcactttgtggttcagtccagcctgttttccaaggggtaaagggcagtggaaggataactaagaaaataataataacaaatgaaagcatctctgtggagcttcg

SEQ ID NO: 850786 - DNA, 120 bp, Artificial Sequence
  ENSG00000275613_5 (sequence is synthesized)
tgtcccaccctgtgctgttgggggcgtggagggtagtgtggggtggccagggcgggctcacgtcctcatccccctcctctttcccagaaccacacccaaaccctcttcaaccccctgtgt

SEQ ID NO: 850787 - DNA, 120 bp, Artificial Sequence
  ENSG00000275613_6 (sequence is synthesized)
gtgggctgtggcaggggtcaacctcttgtgttcaggtcccctaggggcccaccccactctactaggaaccaggggtcggatgctgtcaggggaagccgtgtggcttgaggagtcgagacc

SEQ ID NO: 850788 - DNA, 120 bp, Artificial Sequence
  ENSG00000275613_7 (sequence is synthesized)
ctttccaaatccacccctgtggaatcttgagcaaatccccacacccaacttagcttcagtgtggtggaggtgggcccagcgcctctcttgagggagtgctgctgtaggtaccttccagca

SEQ ID NO: 850789 - DNA, 120 bp, Artificial Sequence
  ENSG00000275613_8 (sequence is synthesized)
ggccaggctcctgagctgggatcaccatgaagctggcatctctcctggtagcacctattctggggccttgagctccgacactcttacgctggagttgaacttaagctgcagcgggagggc

SEQ ID NO: 850790 - DNA, 120 bp, Artificial Sequence
  ENSG00000275613_9 (sequence is synthesized)
tttaagctagacccgcagaatttgagctctaaggacttgcttaagattgggagagtaacttcttctgcaagggggccagcagaggggctctcgggttgaaggagggttatgctggcccaa

SEQ ID NO: 850791 - DNA, 120 bp, Artificial Sequence
  ENSG00000275613_10 (sequence is synthesized)
gcattgccatcatagccacagctgggctgtgcctcagagtctgcaggagcagggcccttggccttggctcccaggacagttgggagatggagggcagccccagtagctgccatcttcctg

SEQ ID NO: 850792 - DNA, 120 bp, Artificial Sequence
  ENSG00000275613_11 (sequence is synthesized)
cccacatgggcctgtgtaccattcaagaagaaagcttagctgtctccaaccccggcattcccacaagggaaagcttgagatctgctgagggagggtcctgggaagaggccttcttctgtt

SEQ ID NO: 850793 - DNA, 120 bp, Artificial Sequence
  ENSG00000275613_12 (sequence is synthesized)
ctcctgtacagcagaggtgttggcatgtgcacgtgtgtgtctgcatgtgtgtgcatctgtgaacatctgtctgtggctctcgttctgagcacctgtgtgtctccgcttctgccttgttct

SEQ ID NO: 850794 - DNA, 120 bp, Artificial Sequence
  ENSG00000275613_13 (sequence is synthesized)
gtcttggcacctctgggtgtctgtatgtctttttctaatcctggctctcttcttgtgcttctctgggcctcgtcttttcatctttgtgttttttgcttactgtattgtaatatccatttc

SEQ ID NO: 850795 - DNA, 120 bp, Artificial Sequence
  ENSG00000275613_14 (sequence is synthesized)
catgctggaattctcctaccagaccatgggctctgtgagggcaaagactgtcttttatcttcccatgtgtgcacatagtaggagcctagtacatttctgtggagtaaatgaatggagatc

SEQ ID NO: 850796 - DNA, 120 bp, Artificial Sequence
  ENSG00000275613_15 (sequence is synthesized)
tggctctgttaagaatcccttagtgtctgtgtctctggctgcctgactttctgggtctctgtgaccctcagaagctagttttgtggttctgtgtaggggtatacctggtttattcccatg

SEQ ID NO: 850797 - DNA, 120 bp, Artificial Sequence
  ENSG00000275613_16 (sequence is synthesized)
catatgtgtatttcttgtggtagtttttctctccttgtctatgtctgtttcaggtttgttgatctgcctgaatgtctctgcatgtggccccacatctctcctcatgcctgctggtctcag

SEQ ID NO: 850798 - DNA, 120 bp, Artificial Sequence
  ENSG00000275613_17 (sequence is synthesized)
agtataatggatgctgagtccaaagcaggtgtttcctgggcattcgtggcaggggaattggacttccaaatctgccccctctccacgtgggtgagcttctcccagactctccatcataag

SEQ ID NO: 850799 - DNA, 120 bp, Artificial Sequence
  ENSG00000275613_18 (sequence is synthesized)
aggctgtgagcacccgaaactgatcaccttctcagcctagaatgggagtgagctgtggtcctctccctctcttcctctcactgtgaccccaatcacagcacctgcccttctctaattggc

SEQ ID NO: 850800 - DNA, 120 bp, Artificial Sequence
  ENSG00000275612_0 (sequence is synthesized)
gagcatcctcggatttttggtatctgcaagggttctgaaaccaatcccccacagatattgagggatgagtgtacacccttgtgataaactgactagagagctcattgcaacttctttgcc

SEQ ID NO: 850801 - DNA, 120 bp, Artificial Sequence
  ENSG00000275612_1 (sequence is synthesized)
ttaaattaagtttagtaggaatttgagtttgttttcaagtgtatggtacagtggcaggtatctgagccctcagttaaagtttgacctatttaacccagcaactcttttatagttatggac

SEQ ID NO: 850802 - DNA, 120 bp, Artificial Sequence
  ENSG00000275612_2 (sequence is synthesized)
aaactatttccatctctagcctctgttcttatgtaaaatgaccccttcctctgtgaaacctccagttaattaccatttcatattagcccacttaataaagagaattaaatcattttaaaa

SEQ ID NO: 850803 - DNA, 120 bp, Artificial Sequence
  ENSG00000240707_0 (sequence is synthesized)
aatggtgtttccttcccgcctttcccacttctcaccagcgttaccttcccgccattcctacttctcctcaacgacgttaccttccctctgttcccacttctcactggcgttaccttcatg

SEQ ID NO: 850804 - DNA, 120 bp, Artificial Sequence
  ENSG00000240707_1 (sequence is synthesized)
ctgttcctacttctcctcatgccattaccttcctgccattcccacttctcctcacgcattaccttcctgctgttcccaattctctctggcgttaccttcctgctgttctgccgttcacgc

SEQ ID NO: 850805 - DNA, 120 bp, Artificial Sequence
  ENSG00000240707_2 (sequence is synthesized)
gtgtttatatgtgtttgcatgtgtttacatgtgtttgcatgtgcctgtgtctgcatatgcgcatttccctgaatcgacggaggttttccagctctggctgtgacaatgtggattactggt

SEQ ID NO: 850806 - DNA, 120 bp, Artificial Sequence
  ENSG00000240707_3 (sequence is synthesized)
agagatcagtgtttgaatccatagaccgagtcaagagggtctgccctccccagtgtgggcatcatgcaatctgccaaggacctgcatagaacacagacatggaggacaggaaaactctct

SEQ ID NO: 850807 - DNA, 120 bp, Artificial Sequence
  ENSG00000240707_4 (sequence is synthesized)
ctgctggaggtggaacatctctcttctcctgccttcaaacactggcctcggtgattcttgggccttcaaacttgaactgaattacaccgtgaccagctctccctgttctccagcctgcag

SEQ ID NO: 850808 - DNA, 120 bp, Artificial Sequence
  ENSG00000240707_5 (sequence is synthesized)
atggcagaccatgggacttctctgccttaataattatgtgtgccaattcctataatagattttctctctctccatcaataatcaatcatgtatccatccatccatccatccttccctgtc

SEQ ID NO: 850809 - DNA, 120 bp, Artificial Sequence
  ENSG00000240707_6 (sequence is synthesized)
tctctatctttctatctatcatctatctatgttatgtttatctagagaaccctgactaataaaattggttttgaatttcattctttaaagcagttaaattaaaatgaaacagaaaagaca

SEQ ID NO: 850810 - DNA, 120 bp, Artificial Sequence
  ENSG00000240707_7 (sequence is synthesized)
accttgttgcaaggacagagggcattccgtatccaggattcttgccttggtgcaccggaagaatcgaatcaaacctgggcttggagaatgactgcaatgttttattgcgtggagttttcc

SEQ ID NO: 850811 - DNA, 120 bp, Artificial Sequence
  ENSG00000240707_8 (sequence is synthesized)
tgaatcgacggaggggtcaggacgcctcctccccactagctgtgctgacctgggagcagcaggttcggccctcaccccaggtaggacgtgccccctccttgatatgcccacttcagcgaa

SEQ ID NO: 850812 - DNA, 120 bp, Artificial Sequence
  ENSG00000240707_9 (sequence is synthesized)
tcacgtgtggcctgagggctctgctcaagggccctagccaggaaacagcctgctgggaggccaaccaggtgcccccacacctgtggtggacattgactccctccaggcggtggctgaggg

SEQ ID NO: 850813 - DNA, 120 bp, Artificial Sequence
  ENSG00000240707_10 (sequence is synthesized)
cagccccagccaagtctgtgccagccgaggctgctggggacccttcctctcccccttccctgttctgttcttccttcccacccttcctcctccctccctccttttctttttttgggtttc

SEQ ID NO: 850814 - DNA, 120 bp, Artificial Sequence
  ENSG00000240707_11 (sequence is synthesized)
accttagactaagtaaacacactggcctgaattatgtaagcccctcttgcagcctgggcagatacatttaaaaataaaacttgtcaggtgttgttaccttccagcctcctcaaagctgag

SEQ ID NO: 850815 - DNA, 120 bp, Artificial Sequence
  ENSG00000240707_12 (sequence is synthesized)
ctctccaatctcaggactatttacagccacaccagcagcagtgctgactcggcaccacaggcgcggcctcttgtggggaaggagcagggaccctccaccgtgcttggtttctttccccac

SEQ ID NO: 850816 - DNA, 120 bp, Artificial Sequence
  ENSG00000240707_13 (sequence is synthesized)
cttcctctcggtggggctgggagtggggtgatttggaaacactcagagggtttagacatgaatgagtctggtcgaattccccactctggacagcgagtccaggcactgcctggcggtctg

SEQ ID NO: 850817 - DNA, 120 bp, Artificial Sequence
  ENSG00000240707_14 (sequence is synthesized)
gtcggggttcctggggggaggttcagagcagggtatggcaggagcaagacccgggtgtcttgtgtccccgaaaggagcaagaggaggcagcaggaaacccggacggcgctgagcggaggc

SEQ ID NO: 850818 - DNA, 120 bp, Artificial Sequence
  ENSG00000240707_15 (sequence is synthesized)
ctgggcgcacgtcctggaggaagaggcatcgttaccaggagtgcccgaggcacagtgcacagatgggctggtacagggtcctgggagcactgcgggaccgggcagggctctgctgagcct

SEQ ID NO: 850819 - DNA, 120 bp, Artificial Sequence
  ENSG00000240707_16 (sequence is synthesized)
caggagagggagggcgctggttcccgcatcctgtccccctcccctggtgatctgccaaggggagcagcccagggagggggagctgggagtcagggagcgctgtccttcatgagtacaaat

SEQ ID NO: 850820 - DNA, 120 bp, Artificial Sequence
  ENSG00000240707_17 (sequence is synthesized)
ccaaatcccaggccggctccccaggagcataggctgcaaggacagggcaccagctgtttatttgggtcaggactcaggggagggggaagatcaccccaggagcagagctgtccacccact

SEQ ID NO: 850821 - DNA, 120 bp, Artificial Sequence
  ENSG00000240707_18 (sequence is synthesized)
tggtccctggatcccccaggtcctggagggcctgacctcaaggaactgactctgcctgggctggtagggctctgacccctggcttccgtgcggccagagaccgccaaacacgagtgaggg

SEQ ID NO: 850822 - DNA, 120 bp, Artificial Sequence
  ENSG00000240707_19 (sequence is synthesized)
gcagtttaattgtctgctgtggtcttaaaaaccaggaggcccagagtcgcagcaatcggccgtgcttctttagaggcccctccctccgcctcccacagggcagccactccagcacccctt

SEQ ID NO: 850823 - DNA, 120 bp, Artificial Sequence
  ENSG00000240707_20 (sequence is synthesized)
tcaggttcttccccagcccaggccctgctccctggccctccctcttgctactggttcccgacactcacgttcctcccacgggaccacgactgagacagcacacgagggcccactgtgagt

SEQ ID NO: 850824 - DNA, 120 bp, Artificial Sequence
  ENSG00000240707_21 (sequence is synthesized)
atctggggcccgttttatgcacaaagagcccggcactcgccatcagatccatctcctacctgctctaagccacactgccctcctgccaggctggtagggtctctggggctgggctgggta

SEQ ID NO: 850825 - DNA, 120 bp, Artificial Sequence
  ENSG00000240707_22 (sequence is synthesized)
gacggggctgcgcagctggagacgtgcccacctccctgcctgtgaccccatccaggtgccctgactcaggcactggcgaccagtcctgaggttgctcagcacagcccctccctcaccgct

SEQ ID NO: 850826 - DNA, 120 bp, Artificial Sequence
  ENSG00000240707_23 (sequence is synthesized)
gcccccaagccatcgcttgccagaggctggcttgctgtcttcacggctctgggaagtcacttcggagaaactgacctctgagtgggaaagtgactcactcgccgaggttcaggacggact

SEQ ID NO: 850827 - DNA, 120 bp, Artificial Sequence
  ENSG00000240707_24 (sequence is synthesized)
cggcggcaagggcgtcttggagggaggtctcgagtgccagggttctcctctcatctcctcccatccagcaccgtgtactgaagttgcctgcctctttcctcatgtcagggacagccccgt

SEQ ID NO: 850828 - DNA, 120 bp, Artificial Sequence
  ENSG00000240707_25 (sequence is synthesized)
cccccagcacacaaggatgacagtatgtcctggtagccagcgaggcccagatcccacacctggccacacgcaccagcgtggcctccaggagagggtgtgaggtctcctccggctgtccac

SEQ ID NO: 850829 - DNA, 120 bp, Artificial Sequence
  ENSG00000240707_26 (sequence is synthesized)
gcccacttgggcctgagggcatggcctgcacccagctgggcaggctgggcaggggcagactggatgggaatgggagctgaggctgccctggaggggttggagctgtgcccactggggatg

SEQ ID NO: 850830 - DNA, 120 bp, Artificial Sequence
  ENSG00000240707_27 (sequence is synthesized)
gatggacacccctggatgacggacacccctggatgacggacacccctggtcagccagtggcccagctcatgcccctgtccggaggcccagcccagcccagcacacacaaagccaggcgtc

SEQ ID NO: 850831 - DNA, 120 bp, Artificial Sequence
  ENSG00000240707_28 (sequence is synthesized)
agggctcaggcacagagcacggccatggccagatgtacccgggcccctctggggagtgtgcaggggccgcccggggtgggctctgggtgccgggtcctgcctcggtgctgaggacatcag

SEQ ID NO: 850832 - DNA, 120 bp, Artificial Sequence
  ENSG00000240707_29 (sequence is synthesized)
cccaggtccccactgcccttgacccagggggctgacaccccccagtgcagaaagaatggcccaagggggttggcgggggtgctccatggagaaggggctatctgagcccctcaggcaccc

SEQ ID NO: 850833 - DNA, 120 bp, Artificial Sequence
  ENSG00000240707_30 (sequence is synthesized)
tctgccagccatgcctgccctgagcggctgccctgcagcacctggactgtccctttgggacgggcctcggtccctctccccaggggatttgctgtacagccccacagggacgcccaaggg

SEQ ID NO: 850834 - DNA, 120 bp, Artificial Sequence
  ENSG00000240707_31 (sequence is synthesized)
atcactatctttgtggctggaggaagaagacacgtgtggcagtggccatgtggtcttgttgggagtggccacctgccctcctggggtctccaggccagaggccaggccacaggccaacca

SEQ ID NO: 850835 - DNA, 120 bp, Artificial Sequence
  ENSG00000240707_32 (sequence is synthesized)
aggacagcctggccatccggccctagccgggctggacctcctgtgtggattctgaaatccaccggcttcccagggttgtcaacccctgggctctcgctcctgtggggatgggtatttccc

SEQ ID NO: 850836 - DNA, 120 bp, Artificial Sequence
  ENSG00000240707_33 (sequence is synthesized)
tctctggcgagacatttccaaattcagaggctgtggtttgatggctggggtcctgtggtgccgggctgtgccttccagaggcgccagcttcaggctgtgactggtgacgagaatctaggt

SEQ ID NO: 850837 - DNA, 120 bp, Artificial Sequence
  ENSG00000240707_34 (sequence is synthesized)
caacccacgccgctcacagcctccttccagcgtgtcattgtcccagcctcgtccacacacagctcccccaaaaccctgcagcgtcatttctgttctgactccaggtgggctctgccgctg

SEQ ID NO: 850838 - DNA, 120 bp, Artificial Sequence
  ENSG00000240707_35 (sequence is synthesized)
cctgtgagatgaggccagatcctcgccgcccgcacctgcctctccccaactcgccctgcgcgggacaggtggacgccgcccacacctacctctcccccactcaccctgcccgggagaggt

SEQ ID NO: 850839 - DNA, 120 bp, Artificial Sequence
  ENSG00000240707_36 (sequence is synthesized)
ggacgctgtctgcacctgcctctccccaacgcgccctgcccgggagaggtggatgccgcccgcacctgcctctcccccactctccctgcctgggagagatggacgccgcctgtgcctgcc

SEQ ID NO: 850840 - DNA, 120 bp, Artificial Sequence
  ENSG00000240707_37 (sequence is synthesized)
tctccccgacttgccctgcccaggagaggtggataccaagcatgttcttggcaacttgctgcccacacacggtgcggtccaggctgcagcgtcacagccctggagcctgctgggagtgca

SEQ ID NO: 850841 - DNA, 120 bp, Artificial Sequence
  ENSG00000240707_38 (sequence is synthesized)
cagcccaatagccaccccagcccctcttcgagggcagattcccatcagcctgagctgcctgcaggatgagtacaggggtccctccgcagggcagagccaggagctgtggaaatgctcttt

SEQ ID NO: 850842 - DNA, 120 bp, Artificial Sequence
  ENSG00000240707_39 (sequence is synthesized)
gcagaggccccacctagatgccccacgggggtgtcccctggctgagtccacagggagggttgaggctgcctcggccatgtctgcggcgcacgtccccggtgcacatccccggcgcaggct

SEQ ID NO: 850843 - DNA, 120 bp, Artificial Sequence
  ENSG00000240707_40 (sequence is synthesized)
gtgtctcctcgcagccccaactgacttcctttccttcctgtggtctgcacttccaccatccttaccccctccttatcctcagagacacctcctgacaccctcctccatgctctgccctgg

SEQ ID NO: 850844 - DNA, 120 bp, Artificial Sequence
  ENSG00000240707_41 (sequence is synthesized)
ttgggatgcctcttgggctgttccgggccccaggctagagccactgcctctgtttctctgggtgagtccttgccctgctgcaggaaacctccgcgtgctgtctaagaagtcgtgcaaact

SEQ ID NO: 850845 - DNA, 120 bp, Artificial Sequence
  ENSG00000240707_42 (sequence is synthesized)
ggccaggcctggaagggctgaggcatcctttctccctgatggatggtttgcgtgagtataaaattcaaggctggaagccagattcctgtggaatttggaaggcccggctccattgtcttc

SEQ ID NO: 850846 - DNA, 120 bp, Artificial Sequence
  ENSG00000240707_43 (sequence is synthesized)
cggctccagcgttgttgaggcgaagtctgacgtccatgcagactctgattcccgtgtggggacagccctggggtcctgccgtcctgggacatcgctccggcacccctacgctgcttcttg

SEQ ID NO: 850847 - DNA, 120 bp, Artificial Sequence
  ENSG00000240707_44 (sequence is synthesized)
aaacgtttctgtcgacttcccacctcccgggaatttgttgaatcttttttctgtgaatgccagttctgtcttcctcacggctggttaattcccttctgctccttaactgtcatcgcatgg

SEQ ID NO: 850848 - DNA, 120 bp, Artificial Sequence
  ENSG00000240707_45 (sequence is synthesized)
ggttaatgagaggaggagagaaaacgtctgtggtttcgttttccttcctggatttcgacaatgtggatgcgtccttgggggaaaggtgggctcgggatccaggcatagaccgtgcggggg

SEQ ID NO: 850849 - DNA, 120 bp, Artificial Sequence
  ENSG00000240707_46 (sequence is synthesized)
cctctccaggagccagtgtgggggagtccagcgcagcagggccagggccaggtggggcagagtgaagacaccagggcaccgcggggccagtgagtttgttgcctcagctgagacaaagtc

SEQ ID NO: 850850 - DNA, 120 bp, Artificial Sequence
  ENSG00000240707_47 (sequence is synthesized)
tcagcaaatcatcagtgttcctcttctgtgaggtctttccacgcaccaggccagggtgtcatcaccagacccctccggtgctgaaggatctccccggaaaatagatattaattgcttttc

SEQ ID NO: 850851 - DNA, 120 bp, Artificial Sequence
  ENSG00000234722_0 (sequence is synthesized)
gcgcgacttccctggccctccccctgcggaccagtgaacctcgcccgagggctcaataaagaagatttttgccctctttttctcacctctcagccttattgatccatggtgcccttccat

SEQ ID NO: 850852 - DNA, 120 bp, Artificial Sequence
  ENSG00000234722_1 (sequence is synthesized)
tgcctttcattggtgccgaaacccgggaggggacacctcctaagcccccccagaggctcagggggactcccctcctggtcggatcagtcctctccctcagtcaggtcaggcttctcctcc

SEQ ID NO: 850853 - DNA, 120 bp, Artificial Sequence
  ENSG00000234722_2 (sequence is synthesized)
acggccatctgtccatttcgtccggttacttgctgccaggtcgcagttgctgcagctactccagtccaattcggccgacgctagtgccataccagtccactgcatctacaactcctaaca

SEQ ID NO: 850854 - DNA, 120 bp, Artificial Sequence
  ENSG00000234722_3 (sequence is synthesized)
cattcgctgcgggcagtgatatccactaatcctggatgaggcagcggagggcccccaaacccctatccaggacttagtaaagctggcgttcaaagtttttaattcctgagaggaggcggc

SEQ ID NO: 850855 - DNA, 120 bp, Artificial Sequence
  ENSG00000234722_4 (sequence is synthesized)
tgaggtacaacgacaggcaagcctgaaacaaaaagttcagctccaaacccaagccctggcagctgccctgcaaccggcattccctaagagccgcggcaggagaggtagaggtacaatctc

SEQ ID NO: 850856 - DNA, 120 bp, Artificial Sequence
  ENSG00000234722_5 (sequence is synthesized)
ccgggccccgtctggcgtctgcttcaagtgaggcaactcaggacactgggccagccggtgccctagccaacagcaaccgtcctgcccgccttgcaactgtttcaagtgtggcaatccagg

SEQ ID NO: 850857 - DNA, 120 bp, Artificial Sequence
  ENSG00000234722_6 (sequence is synthesized)
tcattgggcaaaacagtgcccaaaccccaagccgccaacacacccgtgccctaactgccaacaaatggagcactggaggtcagactgccccagcctcggagcggccgctgtggctccaca

SEQ ID NO: 850858 - DNA, 120 bp, Artificial Sequence
  ENSG00000234722_7 (sequence is synthesized)
gaaggtgccctctagctcctccaactggatgacgactgaagaggcccaggctcgggaacccctctcacccttgccgagcccagggtaatgcttcaggtagcggatcaactgagatgcaaa

SEQ ID NO: 850859 - DNA, 120 bp, Artificial Sequence
  ENSG00000234722_8 (sequence is synthesized)
acccatgttcacatcatgagtgagtcttctaactcggacaatgcaatcaacaaattctaagaccaaattccggtggcactggctccaaagctcctgagtgtggaaggaggtgaacaggga

SEQ ID NO: 850860 - DNA, 120 bp, Artificial Sequence
  ENSG00000234722_9 (sequence is synthesized)
aaagcagagaggacaaaagtcacatcccctccccacagacccatactggggaagggtggaagatttagctgcgagtcaagttcagaattttgattaacatcttggcatgcacattcgaat

SEQ ID NO: 850861 - DNA, 120 bp, Artificial Sequence
  ENSG00000234722_10 (sequence is synthesized)
ttcagaatcaagactgttggccataaaaaatgactatagccttgtgtattacctgaactgagcagtaaaaaaaaagtcatggtccttctggggcttttattctgagacaggaaccctgaa

SEQ ID NO: 850862 - DNA, 120 bp, Artificial Sequence
  ENSG00000234722_11 (sequence is synthesized)
caggcaggagaaagggaatgttgacagagaaacaaagacagttggcgacacacgctgaccgccatgcggacgtccatcaaacccagcactggccctgggtacgtgcgcctttgctattac

SEQ ID NO: 850863 - DNA, 120 bp, Artificial Sequence
  ENSG00000234722_12 (sequence is synthesized)
cccaatacattttcttctgcagagcaagcaacagaacacatgcagaccttaataaataccactgggtaatgtgacaatggccaaactctcctcacgggggagagagtgtcccccagtttt

SEQ ID NO: 850864 - DNA, 120 bp, Artificial Sequence
  ENSG00000234722_13 (sequence is synthesized)
gctcccttttaatttccagggttcataagtagctctaaagctttgctctacaaggttgatacatacgatattaatgtttcccctaagcagtataacataaatatatttgctatcttgaca

SEQ ID NO: 850865 - DNA, 120 bp, Artificial Sequence
  ENSG00000234722_14 (sequence is synthesized)
ctgttccgatgctggaaaatgggatgtcatcaaagccctttgagaaaaggagggatgtgatcagatttgtaattttcaaagatttcctgaggtgctgtgaattttacagatcaactgaga

SEQ ID NO: 850866 - DNA, 120 bp, Artificial Sequence
  ENSG00000234722_15 (sequence is synthesized)
tgcaaaacccatgttcacatcatgagtgagtcttctaactcggacaatgcaatcaacaaattctaagaccaaattccggtggcactggctccaaaggccttcctccttctctcccctcta

SEQ ID NO: 850867 - DNA, 120 bp, Artificial Sequence
  ENSG00000234722_16 (sequence is synthesized)
gactactgacaagaatattgtgtaaatgatcaagaataacttgttatatatctagaccagatatatatgaaagagaaaattgacaaaggtggagcaagtatcccagctattaatgtgtaa

SEQ ID NO: 850868 - DNA, 120 bp, Artificial Sequence
  ENSG00000234722_17 (sequence is synthesized)
agacagctgaattagatatgaagttgcataaagagagtagccaaatcaaaatatataagttttaaaaggcaatatccaggacttcaaacatggaaagagttacacgagagaaaagaggat

SEQ ID NO: 850869 - DNA, 120 bp, Artificial Sequence
  ENSG00000234722_18 (sequence is synthesized)
tttgagagattgctgcttcatttgcatgctcagcaaaacctcacggagcactgacgttttgagtcatccctctaatcatctagcatccaacgctcctgagtgtggaaggaggtgaacagg

SEQ ID NO: 850870 - DNA, 120 bp, Artificial Sequence
  ENSG00000234722_19 (sequence is synthesized)
agagatggcatccaatcagatgggggtgtgaccctttactatcgtcctcaccacaggactcatggtctatcaaagagcaagacctcaccagctcaacacagccacctccatacacatctt

SEQ ID NO: 850871 - DNA, 120 bp, Artificial Sequence
  ENSG00000234722_20 (sequence is synthesized)
actgtcacttgtgatcagcaccaaaggaagtgtccacctgaaggactctcccttgaggactgtcaggatccacccaagaggtgctctttgtccacaccacgttccttttactgggaaaag

SEQ ID NO: 850872 - DNA, 120 bp, Artificial Sequence
  ENSG00000234722_21 (sequence is synthesized)
agaaaactgccgtgaaaggctcagctgtaccccctgctctgtttcatgccaggcaaggagccggctgtagacatgggaaagaaggatgccagctcctgagtgtggaaggaggtgaacagg

SEQ ID NO: 850873 - DNA, 120 bp, Artificial Sequence
  ENSG00000234722_22 (sequence is synthesized)
ggaccgctgccgccaagtgttttcgctggcacaagtccctgtggctagccttccccttgaagtctggccagcctctcttgccgttaatcctgtccggggcccccatcttagtctctctgc

SEQ ID NO: 850874 - DNA, 120 bp, Artificial Sequence
  ENSG00000234722_23 (sequence is synthesized)
cgccatctccttctgcactgccgccatcttactacctgcttcctcactgccgccatcttacttccttttttctctgctgccattttagttcttctgccaccattcggctgccattttaat

SEQ ID NO: 850875 - DNA, 120 bp, Artificial Sequence
  ENSG00000234722_24 (sequence is synthesized)
tcccattagttcccatttgttcttttaaccctgcccagctaactccttggcttccatcttacccgcattcttatttccacctgcctatagtgccataccagtccactgcatctacaactc

SEQ ID NO: 850876 - DNA, 120 bp, Artificial Sequence
  ENSG00000234722_25 (sequence is synthesized)
acaggtgacaaccacacttggcgttaactggaagctacacactccataccatccgcagtcttctggaaaagtggaatgcgccaacggccttgtcaaacaacacctaatcaaattggctct

SEQ ID NO: 850877 - DNA, 120 bp, Artificial Sequence
  ENSG00000234722_26 (sequence is synthesized)
tggaacaagagttcatcaccaaagggaaaatgctgtccaccccaccctctttgaaagaaaaggctcagcccatagttctccagatgaaagaaatgtacctaatcagctatttcctgttgc

SEQ ID NO: 850878 - DNA, 120 bp, Artificial Sequence
  ENSG00000234722_27 (sequence is synthesized)
ttgattggatgttaacaatggagatagacacacagctaattgtggtggcacagcaggaagcctaattcactttgctgtagaaatgcccacacagagaaagtgggagatggctgcacaaga

SEQ ID NO: 850879 - DNA, 120 bp, Artificial Sequence
  ENSG00000234722_28 (sequence is synthesized)
ggccccataggcaggcaaatgcttactgcagtttctttcccaaacatttccaaatagaccaaataaacatgaatttgctcactgtagtttatattccaaataaaaatgaatttctggcca

SEQ ID NO: 850880 - DNA, 120 bp, Artificial Sequence
  ENSG00000234722_29 (sequence is synthesized)
cagggaaaataaactaatcaagactactttaattttttaaatatgaaacctgcggaaaatcatgaaaaatagtaacacaattccaccattttctacgaaaaaatactgaaagggttatta

SEQ ID NO: 850881 - DNA, 120 bp, Artificial Sequence
  ENSG00000234722_30 (sequence is synthesized)
gcagagatgcacagggcagatgggtgggcacaagatctcaggctggaggaggaggacaagaggcacccactatgaatattctgtccaaccggacactgactttcacattatttgaccttt

SEQ ID NO: 850882 - DNA, 120 bp, Artificial Sequence
  ENSG00000234722_31 (sequence is synthesized)
gctggccccccaaaggcacactcgacttcaatatcctaaacgaccttaccaatttttgtcagaggcgaggcaaatagtcaaaaatcaaatttgttcaaaggttctgggacctccgctctc

SEQ ID NO: 850883 - DNA, 120 bp, Artificial Sequence
  ENSG00000234722_32 (sequence is synthesized)
aatgtcactctgtttgatgtgaaaactctcatctataacatttatagattgattaagtatactatcatgcatggtttgcaatgttgactggcctgtgcagtggcttgagcctgcatgcca

SEQ ID NO: 850884 - DNA, 120 bp, Artificial Sequence
  ENSG00000234722_33 (sequence is synthesized)
cagtggctctgactcctgagtgcatgggaggcctaaagacaactgcctcctcaggaaccccacagagcccgtggtttttattattgaaatagcattggtaaagtctgaccctgtggagag

SEQ ID NO: 850885 - DNA, 120 bp, Artificial Sequence
  ENSG00000234722_34 (sequence is synthesized)
agacaaacgtgtgtggatttggctatgcctggccttgtgctgctcacgacataacttacccaccattttcagcactttctttgttctactttgagttacaaatagagacacataaataaa

SEQ ID NO: 850886 - DNA, 120 bp, Artificial Sequence
  ENSG00000234722_35 (sequence is synthesized)
tccaatattcagcaaatatttgagtctacaacataccgtgccctgggagttataaagacatggccttcttttttggaagatctctaatctttgaggtcattggtagaagcaccccctaca

SEQ ID NO: 850887 - DNA, 120 bp, Artificial Sequence
  ENSG00000234722_36 (sequence is synthesized)
cctcctttttccttttgtccgttcctccctggccgagagtcatgcgcacacccagggagagtttccttcttcaagggaaggccagtccgggtcaccaggtgacccaagtttacttcccca

SEQ ID NO: 850888 - DNA, 120 bp, Artificial Sequence
  ENSG00000234722_37 (sequence is synthesized)
ggggaagtccaaatcggcactgacgactcagagacgtccatgtctgaagtagccgatccgaggctccaggagccgcgtggtctgagtgaccccagagggatgcttctgctgtccctcaga

SEQ ID NO: 850889 - DNA, 120 bp, Artificial Sequence
  ENSG00000234722_38 (sequence is synthesized)
ccgctgccataaggggaagaggatggggtccacccagtccaaaatcacgcaaaacacccccttagggtgccttctgcgcaacctcccaactttacaactcaatcaagatttaaaatgaaa

SEQ ID NO: 850890 - DNA, 120 bp, Artificial Sequence
  ENSG00000234722_39 (sequence is synthesized)
ggctacctactctgttttgccatcttttagcaggcccagccgcccctcctcaatctctgttataaggattgatggcactccctccacctaccgccagacgccttcactgccctgccgcct

SEQ ID NO: 850891 - DNA, 120 bp, Artificial Sequence
  ENSG00000234722_40 (sequence is synthesized)
agaccactatataactttcttgaacccataatctaccatccttccttctattccttactaaagcaaatacatcgagttatcttcttactttagtaaacactttctcaggttagattaaag

SEQ ID NO: 850892 - DNA, 120 bp, Artificial Sequence
  ENSG00000234722_41 (sequence is synthesized)
ctccctgtgaataacccacctcttggcacgtacctgccctacctcaccctgttaagggagctgctaagagaacacaccgaccacagccttccaaagcccggaccactcagcccagacagt

SEQ ID NO: 850893 - DNA, 120 bp, Artificial Sequence
  ENSG00000234722_42 (sequence is synthesized)
ccggccataataaccccaggagatcaggtactagtaaaagacctccaggcaagaggtctctccccccagtggaaaggcccctatacggtaattcttacaacaccgacggcagctaaactt

SEQ ID NO: 850894 - DNA, 120 bp, Artificial Sequence
  ENSG00000234722_43 (sequence is synthesized)
cggccgacgctagagacaaatgaagacactcgaccatctctaaatgctaccaaacacatagagtctactctgaatgcagatactgctctcataaaaattctgcaaaggaggaaggggttg

SEQ ID NO: 850895 - DNA, 120 bp, Artificial Sequence
  ENSG00000234722_44 (sequence is synthesized)
gctcccctaaggaattgctagaacaaggagacaaaaagacaaaaacaaacaataaaaacacaaacacacattgaggacataaacatcttgaacaacactataccttagctgacttcattg

SEQ ID NO: 850896 - DNA, 120 bp, Artificial Sequence
  ENSG00000234722_45 (sequence is synthesized)
acacatatagaacactccagcagtgtactaaacattcttttcacatgtaacgagaacatttataaaaggagactatattaaggggtgtttactgagtatcaatacctttataagcaggaa

SEQ ID NO: 850897 - DNA, 120 bp, Artificial Sequence
  ENSG00000234722_46 (sequence is synthesized)
tcagcaagctacagcccagtggccaaatccagcccaccacccactgctgtaataaagctttgctggagcacagccatgcatgttatttgtgcattatctatggctgcttttgtactacaa

SEQ ID NO: 850898 - DNA, 120 bp, Artificial Sequence
  ENSG00000234722_47 (sequence is synthesized)
tgacagagctaagtagtggctacaaagaatatgaatgggcccacaaagcctacactctctctaccttctggcactttacagaaaaagtttactgacagctgggcacagtggcccagacct

SEQ ID NO: 850899 - DNA, 120 bp, Artificial Sequence
  ENSG00000234722_48 (sequence is synthesized)
aagtttactgacagctgggcacagtggcccagacctgtaatcccagtactttgggaagctgaggagggaggatcacttcagaccaagagttcgagatcagcctgggcaacatggcaaaac

SEQ ID NO: 850900 - DNA, 120 bp, Artificial Sequence
  ENSG00000234722_49 (sequence is synthesized)
acacaaaaattagccaggcttagtggtgctcacctgtggtctcaactactcgggaggttgaggcacaagaatcacttgagcctgctaggcagaggttgcagtgagccatgattgtgccac

SEQ ID NO: 850901 - DNA, 120 bp, Artificial Sequence
  ENSG00000234722_50 (sequence is synthesized)
taaatcctgccagaaaaagttggcacaactcagtaactaatcaacaaataaaaattacaaatagtcattttatcatattaagaatatttatcccttgcaaagttatattatgtgggatcc

SEQ ID NO: 850902 - DNA, 120 bp, Artificial Sequence
  ENSG00000234722_51 (sequence is synthesized)
gaggggtggaataggaattgaggcaaaagggcccctttcctctgaacatgcacagttagcagggaaggtagacactaaatagatacacataataacatgtcgtgattgccatggtggtga

SEQ ID NO: 850903 - DNA, 120 bp, Artificial Sequence
  ENSG00000234722_52 (sequence is synthesized)
gtacaggctgctgagatgcccagagtaggagtcctgacacagacagtgggcccaggagacctccctggagagaagacatttatgctgagatttcagtaatgggtattagccattaggtgt

SEQ ID NO: 850904 - DNA, 87 bp, Artificial Sequence
  ENSG00000234722_53 (sequence is synthesized)
tatgctgagatttcagtaatgggtattagccattaggtgtaggcaaacaaaagtgtacaattctaggccaggtgcggtgcctcactt

SEQ ID NO: 850905 - DNA, 120 bp, Artificial Sequence
  ENSG00000234722_54 (sequence is synthesized)
gagtgagactccatctcaaaaaaaaatagtgtgcagttccaggcggaagatcaccatgtgtgaaagctcagagacaatgaatcttgcctaagaacagaagagaagtctgcgtggtcagaa

SEQ ID NO: 850906 - DNA, 120 bp, Artificial Sequence
  ENSG00000234722_55 (sequence is synthesized)
caggttaacataatgtcccccagtcacatgagggtacattacatacagcatcattggcataagtgactctgtcttaaaacatgaccccatcttatacttcaaaaggcatcatgccagcag

SEQ ID NO: 850907 - DNA, 120 bp, Artificial Sequence
  ENSG00000234722_56 (sequence is synthesized)
taactttaagcaaagtgaagcagttttgttatgatggtgagatgaacctcaacagagggaaagcagaaaaaaaaaaatggtggaaaaatgagaaggcaatgcagcaggcccaaaacaaca

SEQ ID NO: 850908 - DNA, 120 bp, Artificial Sequence
  ENSG00000234722_57 (sequence is synthesized)
gcattctagatcttgaagatacagtctctttctgtaatgaactcaaataaatgacgatgaaaatgtagtgtgaaagatttccagtttcacctccagcatgtgaagagcttggaagtcatc

SEQ ID NO: 850909 - DNA, 120 bp, Artificial Sequence
  ENSG00000234722_58 (sequence is synthesized)
aaaatcaatgactcttactgaacttattagagaagtgagatagtagggcaacctctccccagattctggagaaacatatagggagtcacagctgaaatctgttacctggagcagaagtta

SEQ ID NO: 850910 - DNA, 120 bp, Artificial Sequence
  ENSG00000234722_59 (sequence is synthesized)
aaactggcaaacacacttaaattcaacacttaaacattttgatgaatccattaatcaagctggatgctgagtatgacgagcataagaataataaacgtcttgaaaccacactattggagg

SEQ ID NO: 850911 - DNA, 120 bp, Artificial Sequence
  ENSG00000234722_60 (sequence is synthesized)
tggaatgcagccacacttccttgagctttacttctgagaactccaccaagttcacatgatgaagatctgggaaaaatgcacatatgactctggcagagagataaactatataatatgccc

SEQ ID NO: 850912 - DNA, 120 bp, Artificial Sequence
  ENSG00000234722_61 (sequence is synthesized)
agagtagtttccacaacacaagcctgctttctagaggaaaatattttgccagaaatttatccagcaggtagaagggatctctttccactccaacaccctctagtttcctttctcacctac

SEQ ID NO: 850913 - DNA, 120 bp, Artificial Sequence
  ENSG00000234722_62 (sequence is synthesized)
tagggaaaaagtacatgtaagtggaataccagaggaagaagagatatctgagcagaagaaatagttgaagtaataatgtcacagaactttccaaaattaatggaagacatcaaatcacag

SEQ ID NO: 850914 - DNA, 120 bp, Artificial Sequence
  ENSG00000234722_63 (sequence is synthesized)
ttcctgaagctcaaagatcacaaaccagaataaatgcaacaaacaaattaaactaaactaaaacaaaatgaaactaggtatataataatcaaaaattttaaatcaaggacagaaaatctt

SEQ ID NO: 850915 - DNA, 120 bp, Artificial Sequence
  ENSG00000234722_64 (sequence is synthesized)
ctgaaaagccagagagggataaaagatgttacctgtataggaacaaggataagaattacagcaaacttctcattagaaaccatgcaagaaagaagagagtgagtgaaattcttaaaggat

SEQ ID NO: 850916 - DNA, 120 bp, Artificial Sequence
  ENSG00000234722_65 (sequence is synthesized)
tgacagaaaacaacataaaaccagaattagaattctatatttggtgaaactatctttcaaacatgaagaagaaataaatgctttctcagatgaacaaaaacaggaaaaaaaaaaaaaaaa

SEQ ID NO: 850917 - DNA, 120 bp, Artificial Sequence
  ENSG00000234722_66 (sequence is synthesized)
ttgcctttgctacccatgacatacctataccatcatcattggtgaaattagcaaatgtcttcttcatggcaatgtaattcacaaaatttcacctctaataaggcatccttattacaccaa

SEQ ID NO: 850918 - DNA, 120 bp, Artificial Sequence
  ENSG00000234722_67 (sequence is synthesized)
aggaagtgcagcaagaggcttctgcccatgggacccactgatcttattccgtgtatctcaacaccgagaagcagatgtttgataaaaatgggatggactcttttattattaccatgagta

SEQ ID NO: 850919 - DNA, 120 bp, Artificial Sequence
  ENSG00000234722_68 (sequence is synthesized)
aactcctcaagatactgttgcttgcctttgggggtgagttggtcctagtgtcaagggagaaataattatgaagaagtggaatctgagcaatataaccttgatgataagagaaactctaga

SEQ ID NO: 850920 - DNA, 120 bp, Artificial Sequence
  ENSG00000234722_69 (sequence is synthesized)
aacaggggccaggaggactaggtctgaactcaggagagtcactgggtgacttgtaactcccttacccaatagctcaggtcaatggaaaactgcaacaacgcaatacaaatgggaacacca

SEQ ID NO: 850921 - DNA, 120 bp, Artificial Sequence
  ENSG00000234722_70 (sequence is synthesized)
aaaatgtggataatccgttaatgaaagtttgaaataacccctaggataagaacccaatccagctaagctgctgtaaaagcacaaagggaaaatgaaaagaatcctggaaactggccattg

SEQ ID NO: 850922 - DNA, 120 bp, Artificial Sequence
  ENSG00000234722_71 (sequence is synthesized)
taatgatcaactcgggcatcatgaccaactacggaatcagggatgtatgttgctctgctgtatgctagttcatcactcattttctccctagctaccccccactatccggagaagactgtt

SEQ ID NO: 850923 - DNA, 120 bp, Artificial Sequence
  ENSG00000234722_72 (sequence is synthesized)
gtggctaatatttgaagttttgggtactgacagcactccatacacaaggcagcttatgaggctttcttgtctcctgtgttgagaacacttttttttaatttgaacaaaagatggacaaga

SEQ ID NO: 850924 - DNA, 120 bp, Artificial Sequence
  ENSG00000234722_73 (sequence is synthesized)
gagatttttaggcgacaataggaatgaactgttctggacgctttcaaaataccatccaaatccatcctctggctttctttaatctgctttgtacccaaagaggctgaagttgatggactt

SEQ ID NO: 850925 - DNA, 120 bp, Artificial Sequence
  ENSG00000234722_74 (sequence is synthesized)
cctcatggctcacttgccagccatcttcttgttgatttagattcatgggaattgtcggcaggagattggcttgggggagagggtgaaatcaagtaactattctctggattcttccatgat

SEQ ID NO: 850926 - DNA, 120 bp, Artificial Sequence
  ENSG00000234722_75 (sequence is synthesized)
gggttgccaaaggttaaataagtttcccttccaatgtcatacctctttcccaccacaacagctactatctctgagttctggtcaactttcctcccctttagcccttcagtcctaaaagtg

SEQ ID NO: 850927 - DNA, 120 bp, Artificial Sequence
  ENSG00000234722_76 (sequence is synthesized)
gtaatgactcccaaccattggtaggttaggagtgcttcaactatcccttcttggtttcctgtaaccctgttgacacatttgtaagtagccccttcattaaactttccttaattaccccca

SEQ ID NO: 850928 - DNA, 120 bp, Artificial Sequence
  ENSG00000287358_0 (sequence is synthesized)
gaggggacggggccggggagggggcggtaaggagctcggaagaggggcgagacgggcccccggcgcctccggtcggtcagagagcggcggggcgcgtctgcagccctccaagccgcctcc

SEQ ID NO: 850929 - DNA, 80 bp, Artificial Sequence
  ENSG00000287358_1 (sequence is synthesized)
ctcctgcgcgccgggtccccgcgcccgctgctgctgctgctgcccgccgcctgcgtgcgctccaggagcgccgacatcct

SEQ ID NO: 850930 - DNA, 120 bp, Artificial Sequence
  ENSG00000287358_2 (sequence is synthesized)
cggccggtcgcggggtgccgggtgcccgccacccgcattccgacacagagggcctgcctggccgccgcgatcttcggcggctgctccgcgagcccgggcggtgaggtgcacctgttcttc

SEQ ID NO: 850931 - DNA, 120 bp, Artificial Sequence
  ENSG00000287358_3 (sequence is synthesized)
ctgctccgcgagcccgggcggtgaggtgcacctgttcttcagccggcccgcagccaaccctcggccagcactcttctggagagaccaatcccagcgcagcgcggagggctagcggcccgg

SEQ ID NO: 850932 - DNA, 120 bp, Artificial Sequence
  ENSG00000287358_4 (sequence is synthesized)
ctcgccttgctccagccgttcgctgctgcgcgccgctgccgccgccgccggagagtcaaactccagcgaacagcgccgctgtcgccgccgcgagccaggggctgggggcgcaccgggcgc

SEQ ID NO: 850933 - DNA, 120 bp, Artificial Sequence
  ENSG00000287358_5 (sequence is synthesized)
ccgcggcgggtgcggtctgacccgcctccgagggacccaacaagcaggcagaggatcggaaatcacgccccggcgccctgcccggttgagcgtgggggacggaagcgggagactgcgtcg

SEQ ID NO: 850934 - DNA, 120 bp, Artificial Sequence
  ENSG00000287358_6 (sequence is synthesized)
ggggtcccggggaacgcagaccccgggctgagggcgtctccagacgggctctggctgccaggctgggggagagccaaacgttacactgaagagactgcagagagcagaggatgcattgaa

SEQ ID NO: 850935 - DNA, 120 bp, Artificial Sequence
  ENSG00000287358_7 (sequence is synthesized)
acaggaagcccctggggtttggtgcctaccagagtactttgcacagacaaggttaataaattatttttgatggcagtaatgcggctgtcacctctttcagctataacattgagactttcc

SEQ ID NO: 850936 - DNA, 120 bp, Artificial Sequence
  ENSG00000287358_8 (sequence is synthesized)
ccataggaaagcttttgatttttagtttgatggaacatgccttaatctagtagtgctgaattatggttccaaaaattgtaagcaaaaaaaaaaaaaccagaatcctttgaatccaaattc

SEQ ID NO: 850937 - DNA, 120 bp, Artificial Sequence
  ENSG00000287358_9 (sequence is synthesized)
ctttagctttccaatgtaaagcactgccatcttaagtaaaaactgacccagtatctaccttctgtaggtgctaggaatctacttcccagctaggaatctacttgcccagcctttcttgtg

SEQ ID NO: 850938 - DNA, 120 bp, Artificial Sequence
  ENSG00000287358_10 (sequence is synthesized)
tagcaaataaaagctttcctgcaaacctctctggaattatagcaggtgctactgtcagctatttgagacagaaaattacttttcccaagcactcctagttcattgcccatccccaccact

SEQ ID NO: 850939 - DNA, 120 bp, Artificial Sequence
  ENSG00000287358_11 (sequence is synthesized)
gccagtattcctgtggtctctcccattttttctgcctggtagagtaaatccagtgtacagaaagggatgctataatgctgcagctgggcaaatgcaggcaaatgttccctttcctgaagc

SEQ ID NO: 850940 - DNA, 120 bp, Artificial Sequence
  ENSG00000287358_12 (sequence is synthesized)
cacagtctgacagcattcactccatgttctctcagtactccctaatgccttcttcatctgcctctccaaattccctctacttctcatttccacttggctttaacagcttattcatgtatc

SEQ ID NO: 850941 - DNA, 120 bp, Artificial Sequence
  ENSG00000287358_13 (sequence is synthesized)
cctgttgagctcattttgccccagatcccaagccaccgtactcagctacccattggttgttctcacagtgaacatcatcactagagagagagaaaaaaaaaatcaaaacgttgctttgat

SEQ ID NO: 850942 - DNA, 120 bp, Artificial Sequence
  ENSG00000287358_14 (sequence is synthesized)
ccctatccaagaatgtttggctggtgcaaccatcattaacttgcaattttattgtgaggctccctggtagcaggtggtaagcactggcactggaagtgagaatggggagggggctgtcca

SEQ ID NO: 850943 - DNA, 120 bp, Artificial Sequence
  ENSG00000287358_15 (sequence is synthesized)
cagttgtgtcgaggacaagtagtggaccctctcactgctaataagcagccagttagtcagtcccatggtagggaggagcctcgttctggtgactcagagctcactggagcagaacgctga

SEQ ID NO: 850944 - DNA, 120 bp, Artificial Sequence
  ENSG00000287358_16 (sequence is synthesized)
agaagcagcttcaggctcagactcttaatacagggattcaagttagagctctgccacttataagcaataaaatcactctgggccactgttttttcaactgtgtaatggaggtatgatgcc

SEQ ID NO: 850945 - DNA, 120 bp, Artificial Sequence
  ENSG00000287358_17 (sequence is synthesized)
cacattctacgtaattatatgaaattgtatagctaaatggactattcacctatggcaccatttaagcattatcctcagatatcttcctgtggagataattattctaacaaatgggtgtgg

SEQ ID NO: 850946 - DNA, 120 bp, Artificial Sequence
  ENSG00000287358_18 (sequence is synthesized)
catgcctcagcctcccctgagcttcccatctgcctgactataattacctgtggatatctcctatgtggtctactgacacactaaacttgggatttctaatcattgcctaaagtttgacac

SEQ ID NO: 850947 - DNA, 120 bp, Artificial Sequence
  ENSG00000287358_19 (sequence is synthesized)
aagtcagcatttctattgaaatgcagttttcccctcaatggcaccaatatccccaggctgagagtctcagtgccatctgactccttacccgccatttcccaagttcaattagttgtcaag

SEQ ID NO: 850948 - DNA, 120 bp, Artificial Sequence
  ENSG00000287358_20 (sequence is synthesized)
tcatttactttctacagtatgattgtccagggcttcctccattgcaaagtctttggtaaaggctcatctttgaaaccacaaggctgtaaatgacctcagtggccaaacacctctgatgtg

SEQ ID NO: 850949 - DNA, 120 bp, Artificial Sequence
  ENSG00000287358_21 (sequence is synthesized)
tcatctcatcacatgtcccaggtgttgggtttcttctggctctctggcaaagggcacttcctggggaagaccacccagcctgtcagtgtacataattagaaaagtctttttgttgagaca

SEQ ID NO: 850950 - DNA, 120 bp, Artificial Sequence
  ENSG00000287358_22 (sequence is synthesized)
aaagtcggccttcccatacattcactctttctccttagctcattctttatagaaaccttttacaaattatataccaggcacagaggatataacagagaacactgttaaggcccctacctt

SEQ ID NO: 850951 - DNA, 120 bp, Artificial Sequence
  ENSG00000287358_23 (sequence is synthesized)
catggagcttatattttagagagactgatcatgatcaaacacaatagataaattttatagtctatcagaaaatgaaaagtgcaggtttggaccaccaagaacctgcctagttagtgtaat

SEQ ID NO: 850952 - DNA, 120 bp, Artificial Sequence
  ENSG00000287358_24 (sequence is synthesized)
tacaaaggatatctccagtccaagatcctcaatctgtttccaatccccacaaggccatgagaacttgacactcctagcaatatgacaccagagtgctcttttattccctgtgggttccct

SEQ ID NO: 850953 - DNA, 120 bp, Artificial Sequence
  ENSG00000287358_25 (sequence is synthesized)
ggctagtgtactcacttttgaagccagtctggcctgcaaaatcctaatattcttcataatgtttactggaatcatgtagaggcaatgtggttcccgaacacatttcacagagtaaacatt

SEQ ID NO: 850954 - DNA, 120 bp, Artificial Sequence
  ENSG00000287358_26 (sequence is synthesized)
ttgcaaagcatgaataaggttaaccttccatatgactgcatatgtcctttttctcccttggtttagtccactactgtgattataatgatacacattttttagtaatcatggtggcctttt

SEQ ID NO: 850955 - DNA, 120 bp, Artificial Sequence
  ENSG00000287358_27 (sequence is synthesized)
taaaagaaaagttgattgctttcttcacaggtctcaataagtaagtttatttcttgtgagttcttgatgctgtatgtgtaggatcaacccaaaaatctactggaaaatccccacatggat

SEQ ID NO: 850956 - DNA, 120 bp, Artificial Sequence
  ENSG00000287358_28 (sequence is synthesized)
cacattattcataacagcttgactcccaagcatttctgcattacaacccaatatcataaataaaatgaataataaaatataaaaagtatacagagcaaaatctgaaagtggaaagtgaag

SEQ ID NO: 850957 - DNA, 120 bp, Artificial Sequence
  ENSG00000234721_0 (sequence is synthesized)
agactaacttgttaacttgcaaatggggcaaggtttcagaccccacacagttcttgacaatgtaatctaaatctgttttcctctaaaacctgtgcatttaagagatggaaatgatctttc

SEQ ID NO: 850958 - DNA, 120 bp, Artificial Sequence
  ENSG00000234721_1 (sequence is synthesized)
ttcgggtgctaatgctaccggcctgcgtgacccttcatttgtgaccattcctctttgagaccagaattttcaaaagactgattataatcacagtctcattctcaatatttgcaaaaggcc

SEQ ID NO: 850959 - DNA, 120 bp, Artificial Sequence
  ENSG00000234721_2 (sequence is synthesized)
tttcctaacacaattctttaaaaccagctaagttaccaggttactgagaggttaagaattgccaaaaaagacctgtgccttccctctgatattccctgggtttagttcttctctcctcct

SEQ ID NO: 850960 - DNA, 120 bp, Artificial Sequence
  ENSG00000234721_3 (sequence is synthesized)
tctgccaagagaccactgagaagtgcctccgaagagctaagggctgccccaggtggttatgtgggagcgtgagtgccagacagaggcctgttctgatgtcctgacatgctacaattatgc

SEQ ID NO: 850961 - DNA, 120 bp, Artificial Sequence
  ENSG00000234721_4 (sequence is synthesized)
catgaacttcctaaggaaagtgaccgaattccgcacttctcaaccctcgcggaggggcagggagatggatgaagaaataaagagagggtgaaatcattctgggaagtttccttgaaaggg

SEQ ID NO: 850962 - DNA, 120 bp, Artificial Sequence
  ENSG00000234721_5 (sequence is synthesized)
cccaaatctgcctctttctggggcccagcgaggaccctggaagacagagatcctagaaaaagcagagggaaaagaagaggaagagaacatggagaaaccgccagggaacagaactcttgg

SEQ ID NO: 850963 - DNA, 120 bp, Artificial Sequence
  ENSG00000234721_6 (sequence is synthesized)
tccaggaggcgcaaaccacaagtgcaattagtcaaaaaaaaaccctgaaattaaaaaatgattccaagctgaggaggggagtacataagttactgcagccccaagacatttatgaataat

SEQ ID NO: 850964 - DNA, 120 bp, Artificial Sequence
  ENSG00000234721_7 (sequence is synthesized)
acaaatgctgtgaggtgctgagcctgagcacagttaattaatatgtacaggagcagagatgcacttgaaaaacaatagtgctgtttccccctcgccagaagtaaaaatatttccagaaag

SEQ ID NO: 850965 - DNA, 120 bp, Artificial Sequence
  ENSG00000234721_8 (sequence is synthesized)
agggtaggggtggggtgggaatggagtggggagatctgactctgcagccatccctcaccactcctgcttggacatcgccaggctcagctagagaaggcagaaaaagttcctccaactcct

SEQ ID NO: 850966 - DNA, 120 bp, Artificial Sequence
  ENSG00000234721_9 (sequence is synthesized)
tccccaggcacctatgcaggctccacactcctgcctgaacagctatgattttaaaagccatcgagtcatgaagagaagtgtgccagtgtgtgctggactcagtttcccctgtgcaccatt

SEQ ID NO: 850967 - DNA, 120 bp, Artificial Sequence
  ENSG00000234721_10 (sequence is synthesized)
ttccccagtcagccctgcaccttccaagaactatgacccgaaggcacaccctagtcagctcaggccccacattcctgcaaaaataaggctccagggctccctcatcgcagcatgggttct

SEQ ID NO: 850968 - DNA, 120 bp, Artificial Sequence
  ENSG00000234721_11 (sequence is synthesized)
gcaggaagccccagtgccaagtggctttcaaaactagcctcagctagcaacgtggcggctatttcagcgaccgacaaaagcagctcccccagcctcccttggtgtttgtggtcccttttg

SEQ ID NO: 850969 - DNA, 120 bp, Artificial Sequence
  ENSG00000234721_12 (sequence is synthesized)
ttccagccaggcaccatgaggaaaatgcagcaaccgtttggaaacaaaggctcgggcaggctctctccagtctgaaaagcccactttcacttgagtttcaggttactgagaggttaagaa

SEQ ID NO: 850970 - DNA, 120 bp, Artificial Sequence
  ENSG00000234721_13 (sequence is synthesized)
aggcttgaggatctggagactaagcaactctcaagagaaagttctgctgggacccctcccttggtcttccctttctgccccctctgatgcccccttcatccatccctgcctgccttctgg

SEQ ID NO: 850971 - DNA, 120 bp, Artificial Sequence
  ENSG00000234721_14 (sequence is synthesized)
cttcaggtggctcaattacctgggtgatttgcatgtttatgagtgaaggggactgcacagtagcagaaagcaaatttgaaatcctgactttgggggccctggagcccctttgctgcacct

SEQ ID NO: 850972 - DNA, 120 bp, Artificial Sequence
  ENSG00000234721_15 (sequence is synthesized)
ttactttccctaccagaaaggaggaaggacagagtagctccccagcaagcagatcagcggatgtcacataaccacagggcagtcatcagggagcacgacccctccccagggccacgcagg

SEQ ID NO: 850973 - DNA, 120 bp, Artificial Sequence
  ENSG00000234721_16 (sequence is synthesized)
ccttagtttctccttctggatctgccagcaaaacaaaggtaactgcctaagaacagcttccaaagatggaagaagaaagtgagaaaatctatattattgatcgttcatacctaaggaaaa

SEQ ID NO: 850974 - DNA, 120 bp, Artificial Sequence
  ENSG00000234721_17 (sequence is synthesized)
gaggcaagaggattcccatagcccagctgggaggtgccagaaacttttaaaggtgctttataaagtatcctaaatctactctacaaccctaaaagtgaaatattttcactcaaagaagct

SEQ ID NO: 850975 - DNA, 120 bp, Artificial Sequence
  ENSG00000234721_18 (sequence is synthesized)
accgaattccgcacttctcaaccctcgcggaggggcagggagatggtaaccatgtcacaaccagttcctcccagaggattcaacatcactgctcatctcctcagaccaatcaagaggatt

SEQ ID NO: 850976 - DNA, 120 bp, Artificial Sequence
  ENSG00000234721_19 (sequence is synthesized)
ggtcattgggaagtcatcctgagctgtgaccactctctggaacccagaacttcctgcttcacatggactggatgaatgtctaggggcacagctgtttccagacacctggtttgtcttcag

SEQ ID NO: 850977 - DNA, 120 bp, Artificial Sequence
  ENSG00000234721_20 (sequence is synthesized)
aatctcaaatcttaaaggctttctggtccaaccatccaatgcatggtgaggccccttctggattgcccctgcctgcagcatcctggtgtgtgcctacatatttccagggacagccaggaa

SEQ ID NO: 850978 - DNA, 120 bp, Artificial Sequence
  ENSG00000234721_21 (sequence is synthesized)
gattccatgcaattatgtgttccctgttccaggggagcccacagcttgatcaggggacagactgtatcttccatcaactcaagaactaagactcaaattaaaaaaatgcaaggctggggg

SEQ ID NO: 850979 - DNA, 120 bp, Artificial Sequence
  ENSG00000287351_0 (sequence is synthesized)
gctcaacctatccatcccggcctcttcctaagaccaaggcgctgctgactcaaccctgcttccagaagcctagggttaacatctgctccttcctcctgtttgcattcagtgaaatcctct

SEQ ID NO: 850980 - DNA, 120 bp, Artificial Sequence
  ENSG00000287351_1 (sequence is synthesized)
cctctcccaggagtttccacataaaacctgcctctttgtttattaagaattgtttacagaactctcaagcagcaaaggcaaagtacagaagataaataagagcaagctggccggtgcgtg

SEQ ID NO: 850981 - DNA, 120 bp, Artificial Sequence
  ENSG00000287351_2 (sequence is synthesized)
cgactggatggacaacatctttacccacatgtctgcatcagctctgcgttgttcaccgacaaatcccgtgtctggaagagtcctggcaggctgcacgggctggagagagagcgagctgac

SEQ ID NO: 850982 - DNA, 120 bp, Artificial Sequence
  ENSG00000287351_3 (sequence is synthesized)
accaacaccaggcagagtccaccatgaaggcaagtggcagtgtcccaaggagagcccgctggccaggagggcaccgcaagcttggacacagcaggggcactggagatgggtccacgaacc

SEQ ID NO: 850983 - DNA, 120 bp, Artificial Sequence
  ENSG00000287351_4 (sequence is synthesized)
gcgtgcgcagcccaggaggctggcacaactggtgtctgcatgaagactaggaacagctggcttcttatctcacaccatacacaaacatcaatttaggatacattaaaggtggaaatgcag

SEQ ID NO: 850984 - DNA, 120 bp, Artificial Sequence
  ENSG00000287351_5 (sequence is synthesized)
cacatgacagacttgctgggaagagcagaaactaaatatgccttccatcagccatgaaaatgactaatgaaaatgtaaatgaccacgtggcccaatcctggtttccatgggaagaccagc

SEQ ID NO: 850985 - DNA, 120 bp, Artificial Sequence
  ENSG00000287351_6 (sequence is synthesized)
tggctcaccacccagctaagagttatggcctaaatcagaggtgatcggggtgatcagagttgcttacatcaacgtttcaaaacccagaaataagaaaattattgttcgaggtcaataacc

SEQ ID NO: 850986 - DNA, 120 bp, Artificial Sequence
  ENSG00000287351_7 (sequence is synthesized)
atgtttataacaacttccaacttaaaatggaagaggaatcccttggagaacacacatttccttatggaagtttcctcaaaatttctaataggaatttcaactaagttaaagtactaattt

SEQ ID NO: 850987 - DNA, 120 bp, Artificial Sequence
  ENSG00000287351_8 (sequence is synthesized)
aagtaggacaagacagaattctcttccttcccagacactattacaagccaaaccacgtttcacaggaacacgtcctgcctgctaaggtgtcccctaggacaaagctgcttgccagctgac

SEQ ID NO: 850988 - DNA, 120 bp, Artificial Sequence
  ENSG00000287351_9 (sequence is synthesized)
catcacttgtattgcatactttaaaaagtgtggctaacagaaaggaggcaagacagatgttatttaaataaaagcacaaagcatctgttcaagcacgaaaaaacatatgggaaaatacaa

SEQ ID NO: 850989 - DNA, 120 bp, Artificial Sequence
  ENSG00000287350_0 (sequence is synthesized)
gaaagcaggtggagaaggagtcctgcttgttctcagccttccttttttcctccagtctgggatgtagatgagatggttgaagctccagcagtcatggtggatcatgaggacactctgagg

SEQ ID NO: 850990 - DNA, 120 bp, Artificial Sequence
  ENSG00000287350_1 (sequence is synthesized)
atggaaacaatgtgcttggaggttgagtaagaaagacagaaggagcttggatccctgctgactgtagaactctccctcacagcctgaaagtacctccttccagccttttttcacatgaga

SEQ ID NO: 850991 - DNA, 120 bp, Artificial Sequence
  ENSG00000287350_2 (sequence is synthesized)
gaaatgaacctctaacttgtttaatctggattattctgggctttctgttgtgtgcagtggaacccaatcttcatcgagttccccttcccaagagttctgtcatttttcctgcattctttt

SEQ ID NO: 850992 - DNA, 120 bp, Artificial Sequence
  ENSG00000287350_3 (sequence is synthesized)
tagatttcatagcatttactctttccgatagatgtgaaaattctttgaaaagttaacatcttgaataatgaaagatagcctgtgcaacccacgcagaagtaggagctttaagcaaagttt

SEQ ID NO: 850993 - DNA, 120 bp, Artificial Sequence
  ENSG00000287350_4 (sequence is synthesized)
tgtagagaggactgcagaatttctctgtgtgtctcgctgggacctcagaatttttaccagaaaaggcaggaggggactgcctggtttaagcatctctccctaactgtggtttggaaaagt

SEQ ID NO: 850994 - DNA, 120 bp, Artificial Sequence
  ENSG00000287350_5 (sequence is synthesized)
ttttttaatttgagaatttaaacagtcaatacaaggattattccaacctggttgatccatgctctgaaatgagaactcccatagtttatcatctctaagatactaaaatgcacaatattt

SEQ ID NO: 850995 - DNA, 120 bp, Artificial Sequence
  ENSG00000287350_6 (sequence is synthesized)
taaatcaaggaaggaaaaattctgccagctataattgtaagatgcatcctgattccagaaatgttaaatgtgaagaggttgcttttttagatcaatgaagtatggtacatatagttaacc

SEQ ID NO: 850996 - DNA, 120 bp, Artificial Sequence
  ENSG00000287350_7 (sequence is synthesized)
agcatcattatccacaagcagccagagacatactacatagaattgtgctgttaactttctgttctgctcttgccaagaaataggtgagaactttctgtatcccaagcagattttgttcca

SEQ ID NO: 850997 - DNA, 120 bp, Artificial Sequence
  ENSG00000287350_8 (sequence is synthesized)
caaaaaggaaacggaggtctggagaaatgatgcaggttggtggcaaacccaagattcacctggaaaaaattccattctcctcaaaatgtggctatcaaggcctaagatgatcttggaagc

SEQ ID NO: 850998 - DNA, 120 bp, Artificial Sequence
  ENSG00000287350_9 (sequence is synthesized)
tgcaggctgaagatggcagggcctgagtccctgagctactgtgtggagtagagccccacctcctgctgaccaggaatataggcactggtggttacataagtaaggaatcaacttctgata

SEQ ID NO: 850999 - DNA, 120 bp, Artificial Sequence
  ENSG00000287350_10 (sequence is synthesized)
cgtacagtcgctgagatttgggggtttatgtgttacggctgctgatgttaccttaatttctattttgaaccctgtagtgggctgaattatgttcctgccaagaactatgtctaagtcctc

SEQ ID NO: 851000 - DNA, 120 bp, Artificial Sequence
  ENSG00000287350_11 (sequence is synthesized)
atccccagtacgcgagaatgtgactttattttaaaatagcattattgcagatgtattgaaattatggatctagacttgaaatcatcttggatttagggtgggccttgaatccaatgatga

SEQ ID NO: 851001 - DNA, 120 bp, Artificial Sequence
  ENSG00000287350_12 (sequence is synthesized)
gtgttcttagacagaaaaggaggagatgcggagagaaacagagaagagatgatgtgaagcctgaggcagagattggggcgatgcatctgcaagtcaaggttagcccccagcaggcaggag

SEQ ID NO: 851002 - DNA, 120 bp, Artificial Sequence
  ENSG00000287350_13 (sequence is synthesized)
tgaggcatggagcatatttaccctcagaacctccaagaggaaccaatttttccaacaccttgattttagtctcctggtctctggagctctaagaaaataaacttccgttgttttaagcca

SEQ ID NO: 851003 - DNA, 120 bp, Artificial Sequence
  ENSG00000287352_0 (sequence is synthesized)
aaatgcagaaatcaccgtcttctgcattggtaggctgagtagtctcaagatctgaagacagcagaaacctgggaaagttaatgatatacgttgttatactccaagtgtgagtctgaagac

SEQ ID NO: 851004 - DNA, 120 bp, Artificial Sequence
  ENSG00000287352_1 (sequence is synthesized)
aagggaagaccaacgtccaagcttgaagacagtcagatagaatcattctgcagcctggctaaggatgaagataactgataaactattatataccagtgagtatttctggcccctctgtag

SEQ ID NO: 851005 - DNA, 120 bp, Artificial Sequence
  ENSG00000287352_2 (sequence is synthesized)
cttgggttttttattgagaacaattactgttttatagtgcttggtatgatttggagcacaaaattaaatgcaacaattagagagtataatttttatagaagtgtcaaataaaagttgtgc

SEQ ID NO: 851006 - DNA, 120 bp, Artificial Sequence
  ENSG00000287352_3 (sequence is synthesized)
gttaaattcaacatccaaatgtttaatgtgaacgagtttcttgaataatatacacttcaacttgccttgaactatcagaagacaattgctctaaaccaattttattaatcaatcataaaa

SEQ ID NO: 851007 - DNA, 120 bp, Artificial Sequence
  ENSG00000287352_4 (sequence is synthesized)
taaaattcaactcacttatttttccaaaaatctaaatctcaatgcttttttaaacatatgttccagtcacattttaggaattcatttctaaaatgaattttaataagcaaagaaatacag

SEQ ID NO: 851008 - DNA, 120 bp, Artificial Sequence
  ENSG00000287352_5 (sequence is synthesized)
caagaaatgttgtgattagtactgcaaaaatatgtattttttaaatggtggcaggaaaaaattttattattctagatatttgtttttcatgtttcatattctattcatatgctgtggcta

SEQ ID NO: 851009 - DNA, 120 bp, Artificial Sequence
  ENSG00000287352_6 (sequence is synthesized)
tttttccaaagaatattgttttgcttttttaaaactaaaaatgccaggatgcatacagtagacgatcttatataacactttgctcttacattagtactttactttctacttccttaaatc

SEQ ID NO: 851010 - DNA, 120 bp, Artificial Sequence
  ENSG00000287352_7 (sequence is synthesized)
aatcaatttcaatcctttctcattataataaagcttccttgttcttcgtttagattttttcactttttaaaaaattttgttattattatactttaagttttagtgtacatgtaaaaaaaa

SEQ ID NO: 851011 - DNA, 120 bp, Artificial Sequence
  ENSG00000287355_0 (sequence is synthesized)
acttttagcactgttgttactctatgaggcacaagctttcaacatagtggccttttattttctgcgcttttggagtgtgagaacaccatagaggctacacgcaccacggcgtttctgtgg

SEQ ID NO: 851012 - DNA, 120 bp, Artificial Sequence
  ENSG00000287355_1 (sequence is synthesized)
gctgggaatcaaggcctggagaagggggtgggcagccgggaagtgacagtgcagggagggggagttggcagctgtcaaatgaatgcatttccctcttctattatcctgctatccgaatgc

SEQ ID NO: 851013 - DNA, 120 bp, Artificial Sequence
  ENSG00000287355_2 (sequence is synthesized)
tccatctattcatattcatggtttccatcactgtgcatagcaccaaggccagcttccttttcacatttcatcttcttgtctttcttggagtttcattttgatttactaaaaatcagtgga

SEQ ID NO: 851014 - DNA, 120 bp, Artificial Sequence
  ENSG00000287355_3 (sequence is synthesized)
ctgcttctaaacaaggatcagctaatagaaactggaggtagttggtagagaatctactgggaggaatttatttacatacaagaagttaaagccaaatgtatgtgatcaagaatggaaaac

SEQ ID NO: 851015 - DNA, 120 bp, Artificial Sequence
  ENSG00000287355_4 (sequence is synthesized)
caactcttctggaggaaaacataaatgtctgctggggaacatgtatttgctttgggaacccttgggaccaagaaaataaaatgcttaataacaacagcataatgaggctgtaggagtgct

SEQ ID NO: 851016 - DNA, 120 bp, Artificial Sequence
  ENSG00000287355_5 (sequence is synthesized)
gaaagcattaattaatgaacaattttaaagttcttcagaagcccagggagagtttagagtggatggattcctttactgacaaagactaatatgttggactgcttaggctgacttgattaa

SEQ ID NO: 851017 - DNA, 120 bp, Artificial Sequence
  ENSG00000287355_6 (sequence is synthesized)
ccacggttaaccacatccatattttttaatatttaggctgtagaactaaacttttacatgtacctggagaagtttagaagttgacattatactgtccttacatgtgacgtcccactttgc

SEQ ID NO: 851018 - DNA, 120 bp, Artificial Sequence
  ENSG00000287355_7 (sequence is synthesized)
aacaaaagagccataggaaggcaggccctgaactgaccaatcgaataacctgagagtctgatcagaagaatgcatgctatgtaaatagatcacgtttgggcaagtgcttcctattgctgt

SEQ ID NO: 851019 - DNA, 120 bp, Artificial Sequence
  ENSG00000287355_8 (sequence is synthesized)
ccattgaaacttaacactttcagtggtccttctgagtttaacaggtttctatctcctggcaataaaaccagactttgctatagtggtttacttggcaaacttaatctccacttgttcctg

SEQ ID NO: 851020 - DNA, 120 bp, Artificial Sequence
  ENSG00000287355_9 (sequence is synthesized)
cagtaggattaagcatgtaaacacagcatgagttaattgtaaaaatggacactgatgtgacaactcagttggaatacttgctgtattttgtcatacaagtaatgagagtttttttgctcg

SEQ ID NO: 851021 - DNA, 120 bp, Artificial Sequence
  ENSG00000287355_10 (sequence is synthesized)
tttttagtgatattgcttacagaacctttaaagtgattagcatagagagataacgcttctatgtgccttagaagagaatctatgctaattataacagtatgctgccagcatgattgtttt

SEQ ID NO: 851022 - DNA, 120 bp, Artificial Sequence
  ENSG00000287355_11 (sequence is synthesized)
gtaaatgatgttgtcctagtgatatgctgggaactgtacttactgttcctccaggataggagatgtcccttgagaaaagggagttctgggtctttcttttgtgtgttacagtaaagggaa

SEQ ID NO: 851023 - DNA, 120 bp, Artificial Sequence
  ENSG00000287354_0 (sequence is synthesized)
aaagagagaggcagggaagtgtcaggaactatgagcaccaagctcagcttgagcttcaggcaatgcttcgtgacagggagccagctatgatctgaagtctgagtaagggccggacaggga

SEQ ID NO: 851024 - DNA, 120 bp, Artificial Sequence
  ENSG00000287354_1 (sequence is synthesized)
aggcgtgagccccaatccagaagaggaacaggatgagtaaagaatttggaccaaaatagcatgtgcttgccacttcctacagcctctgagaaaagaaatattcagcaaggagtatcttga

SEQ ID NO: 851025 - DNA, 120 bp, Artificial Sequence
  ENSG00000287354_2 (sequence is synthesized)
tcctaaggacccatatcaatgtccttcctctgccggatattcaccaggacccatttcctccgtaaattctagggctccaaaccacccaccccacatgcaaggtgatgagaagtagagaga

SEQ ID NO: 851026 - DNA, 120 bp, Artificial Sequence
  ENSG00000287354_3 (sequence is synthesized)
tgagaagatgagaggtgctcagagcactggtagatgaatggatagtcagacagagggatggacagatttgtcaggatggcaaaagacggaatccttggagctcccagagtgtgtgtgtct

SEQ ID NO: 851027 - DNA, 120 bp, Artificial Sequence
  ENSG00000287354_4 (sequence is synthesized)
gtgccacgtggacttttctgtgaaggcagaattggcctgagcaacaacactcccgaccccagacctgttatgagagctgttgtggagagcactgagaaggggtcatctctgcaggactct

SEQ ID NO: 851028 - DNA, 120 bp, Artificial Sequence
  ENSG00000287354_5 (sequence is synthesized)
ggagcctctgcagggagtcaagcagctgggcttgacccagtgaagtgacaagagctgggaagtcagtgaagacaaggccgctttgtctggaagtagcaacgcatggctgggctgagcctg

SEQ ID NO: 851029 - DNA, 120 bp, Artificial Sequence
  ENSG00000287354_6 (sequence is synthesized)
cccttgatcatgaaatctgtggcagctccaaaacttgttggggcctgaccctgtgttcactttctcacgctgcctcaccattgttcctctgcagctaaaagtctttcaaatgtgtctgct

SEQ ID NO: 851030 - DNA, 120 bp, Artificial Sequence
  ENSG00000287354_7 (sequence is synthesized)
tatttttgccttggcaaataattctatatttccaatattatctaaaatgcttgaattttaactctaaaaggaaaaaaaaatcatctttttttctgctgtaagacatccgctagtgttaca

SEQ ID NO: 851031 - DNA, 120 bp, Artificial Sequence
  ENSG00000287354_8 (sequence is synthesized)
ttcgtaaagagtagatctgagacactcagaaaggctacctcctatttcatctcaaattccactttgtgacaaagcttcccagatttcctcatctctgaagtgggcacaatactacccaca

SEQ ID NO: 851032 - DNA, 120 bp, Artificial Sequence
  ENSG00000287354_9 (sequence is synthesized)
ttacattcttattaacaatcctaaaaagggcttatttaaataagaaacatctagaaatggatgccatggatgaaaattcaatttacatctaagttttcatggaagcatctggtgggtaga

SEQ ID NO: 851033 - DNA, 120 bp, Artificial Sequence
  ENSG00000287354_10 (sequence is synthesized)
atggctctgtacagagctgggagaaaggaacaggctaccctagcaaatcaaaatggaaattgagctacatttgttacaattcaagcaagatctgcaactttcaatagaaaaatattagta

SEQ ID NO: 851034 - DNA, 120 bp, Artificial Sequence
  ENSG00000287354_11 (sequence is synthesized)
caggcagtacccaacttggaaatgaactgtcttgcaaaagttcatttgcaagcagagtgttcagaacctggaatgcaaggtgtcttttatgtcccaagccagcccacaaaaggctgattg

SEQ ID NO: 851035 - DNA, 120 bp, Artificial Sequence
  ENSG00000287354_12 (sequence is synthesized)
aatctgtaatctatttggtatattacataaagtaaaaatagaaaacaaaacaaaacaaactgctctgataacattttaaaaacatataaaaatacttagaaaacaaatatacagccaata

SEQ ID NO: 851036 - DNA, 120 bp, Artificial Sequence
  ENSG00000287354_13 (sequence is synthesized)
attagccttgacccgaagcccccaccatgacctgggccctggaccccctacagtccaagtcatagctgaaatggggtcctgagaaactgaatggagaagaatgagaagaaccccagccta

SEQ ID NO: 851037 - DNA, 120 bp, Artificial Sequence
  ENSG00000287354_14 (sequence is synthesized)
aaagggacaggggttctggtgggagaaaaaagtagtcaggcatctctcaactggaagagaagggtctggtacctacccagaatatatactctagcacagaagtgctactggtcacatcta

SEQ ID NO: 851038 - DNA, 120 bp, Artificial Sequence
  ENSG00000287354_15 (sequence is synthesized)
gaaagacatgggtatgtgaaagaacagtggccactctgcctgctaccaaagtagacaaaatgagctgctgctgaagacaagcgagccagccacctggcaccgccctaccagagggacgag

SEQ ID NO: 851039 - DNA, 120 bp, Artificial Sequence
  ENSG00000287354_16 (sequence is synthesized)
ggatgtgaattcccagcatgctctgcagcagcatggacagccagggacactcagaggccagaaggaagatgttcctgcagctgccggcagttggtataggagcgtccaggggccgcatgt

SEQ ID NO: 851040 - DNA, 120 bp, Artificial Sequence
  ENSG00000287354_17 (sequence is synthesized)
gattctgatggatctggctaggtcaagtaggaagtttctgagctttacaaaagtgaaaactgtcctaactgataaggttagtcacatttctggtatcttcagaagagtacaggggacaag

SEQ ID NO: 851041 - DNA, 120 bp, Artificial Sequence
  ENSG00000287354_18 (sequence is synthesized)
aacatagagaccctgggaacgccttccccaacacagcacactcacacctttacggcaaaaagggtgcttcattccagattgctgctgaatctgatacctggatcgactccaaatacaaat

SEQ ID NO: 851042 - DNA, 120 bp, Artificial Sequence
  ENSG00000287354_19 (sequence is synthesized)
gtgatgtgaaatattgaaatcaggtttgaaaactgagatttattatgcatccactttgtaccttctttaatcctccaaataaagtgtcagtctccagctcaaattcctggtccagctcct

SEQ ID NO: 851043 - DNA, 120 bp, Artificial Sequence
  ENSG00000287357_0 (sequence is synthesized)
acccagaataaatgaaagagccactcagacaacccatttttgcctcttcccttagactttcaatttgactcctctccaatgaaaaaggatttaaagactgcttgtgggggtcacaggagt

SEQ ID NO: 851044 - DNA, 120 bp, Artificial Sequence
  ENSG00000287357_1 (sequence is synthesized)
tccaggggggctgttaggaagccagctctgcaaggttgatgcagggaacaagttggcacatgctgttttatgtcacggaagagtgacaaccaccaagaagcctttctatcgagccagtta

SEQ ID NO: 851045 - DNA, 120 bp, Artificial Sequence
  ENSG00000287357_2 (sequence is synthesized)
tcgacccgtaaggagtgatgagcacaggacacgccttacctgaagccagcatctcaacacccatgtgcagaagtccagttatcttcatccaggagacgagaagacgagttgaggctacaa

SEQ ID NO: 851046 - DNA, 120 bp, Artificial Sequence
  ENSG00000287357_3 (sequence is synthesized)
ggcatgtttcagcgggctcatctatgcagcacagcttgagcgtagtgcagatcttcagagcacacagctcaaaggaagaaggactccctcttccactcttccatgatagccacattcatg

SEQ ID NO: 851047 - DNA, 120 bp, Artificial Sequence
  ENSG00000287357_4 (sequence is synthesized)
cctgtatacggagacactgtttgttgctcattactgggagacatttcagcaccctgccttttccgctacgacaaagtctacacctgctggagtagaggacagagctgtccgagggctgca

SEQ ID NO: 851048 - DNA, 120 bp, Artificial Sequence
  ENSG00000287357_5 (sequence is synthesized)
tcttgctgtttctcctgtctcatctgctactactttttgccttacttaaaaaaaaaagtacctaatgaaacttagataaaaatatggaaaactatatgaagtatctatgtattcaccatg

SEQ ID NO: 851049 - DNA, 120 bp, Artificial Sequence
  ENSG00000287357_6 (sequence is synthesized)
aagacagaagagatattaagattttcatacacttgctgtaaatatacctaatttactgaaacggccacctgccatttcttcctttctcacttttcccaaagacattaatgttcttaaaga

SEQ ID NO: 851050 - DNA, 120 bp, Artificial Sequence
  ENSG00000287357_7 (sequence is synthesized)
acttttaatacataggtgtctatgcatgtctaaaatagaccatacaaaattatataatacaatgtttgattatttttatttatttttattttactttaagtaccgggatacatgtgcaga

SEQ ID NO: 851051 - DNA, 60 bp, Artificial Sequence
  ENSG00000287357_8 (sequence is synthesized)
cagcatgcattaggtgtttgtcctaatgccctcccttcccttgcccccgacccccgacag

SEQ ID NO: 851052 - DNA, 120 bp, Artificial Sequence
  ENSG00000287357_9 (sequence is synthesized)
atgaagctggaagccatcattctcaggaaactaacataggaacagaacaccaaacaccacatgttctcactcacaaatgagagttgaaaaatgagaacacatgattattttattttattt

SEQ ID NO: 851053 - DNA, 64 bp, Artificial Sequence
  ENSG00000287357_10 (sequence is synthesized)
tccctccccaacacatgattattttagaaatattttttcttacttggacttcagatgaaaagaa

SEQ ID NO: 851054 - DNA, 120 bp, Artificial Sequence
  ENSG00000287357_11 (sequence is synthesized)
ttcttacttggacttcagatgaaaagaattaggtaaataatatttcacaatttatagtgtactattggtatcagtttacacaaagtctctctctaatctcattttaatattttccctctt

SEQ ID NO: 851055 - DNA, 120 bp, Artificial Sequence
  ENSG00000287357_12 (sequence is synthesized)
ccccatccctacatgagcctccacttatatgcatgtaatatgaaatagagttttaaataggctagttagggaaatgtttttggaaaagaaatattcaagtaaagacttaaggtgagtata

SEQ ID NO: 851056 - DNA, 120 bp, Artificial Sequence
  ENSG00000287357_13 (sequence is synthesized)
tatggtacccttgaaataacttcatcttagaaaagagtccattttatatctcacagtgctttgccaacaagaatatgatgttttgcttaataaacaaatttaaaaaaagactgcatccaa

SEQ ID NO: 851057 - DNA, 120 bp, Artificial Sequence
  ENSG00000287357_14 (sequence is synthesized)
ccagataaggacaccaacaagcagacttttccactatcagtactcaccagaggactctgtgactgtaaaagagcaggcctccagcagctcgaaatggcccccttaactgataccatcttg

SEQ ID NO: 851058 - DNA, 120 bp, Artificial Sequence
  ENSG00000287357_15 (sequence is synthesized)
cagtcactcatgataagaacttggcgtctgccacagaaggctctgccccattaacaattcttccttgcaagacctgagaccatccgcccggcctagaccagaactccttttgtcttcttc

SEQ ID NO: 851059 - DNA, 120 bp, Artificial Sequence
  ENSG00000287357_16 (sequence is synthesized)
actccctctggactgattcattaaccctttctcctatctctttttcctcttgatgttaaatgttactttgtcgttgaatgtttaacctataacatttgtatattaagtatattattatgt

SEQ ID NO: 851060 - DNA, 120 bp, Artificial Sequence
  ENSG00000287357_17 (sequence is synthesized)
atggtttgcattattgactgacttgtggagtggcttgagcctgtgagcccaaggctgtgtctactaagtaaatgggaaggattaaagagaattgcctccttgggaactccattgtagctc

SEQ ID NO: 851061 - DNA, 80 bp, Artificial Sequence
  ENSG00000287356_0 (sequence is synthesized)
gcccccgaaccggcgggctacgtgcgggggtctcagaggctgcggctcctcccgtcggtgggcgcggccgcccccagagg

SEQ ID NO: 851062 - DNA, 80 bp, Artificial Sequence
  ENSG00000287356_1 (sequence is synthesized)
cgttcccccttcccccccgtacccctcttcccccgctcgtccccccttccccaccccaggccccgcggaggcggcgcgcg

SEQ ID NO: 851063 - DNA, 120 bp, Artificial Sequence
  ENSG00000287356_2 (sequence is synthesized)
gggcgggggcggcggtgcgacccccagcggtggaagcgggaactgcagctcggccgagctcggggttggggggtccctgccaaccctgccctcccggaaggtcccagcctggcgggttcg

SEQ ID NO: 851064 - DNA, 120 bp, Artificial Sequence
  ENSG00000287356_3 (sequence is synthesized)
ttcgggtgcttttctctctggggcgcggcctccctgttctgctcagttgggggtccgttcccgggaagaaccaccacaccccccatcccggcccgcaggccccagccgccaagtcgttgc

SEQ ID NO: 851065 - DNA, 120 bp, Artificial Sequence
  ENSG00000287356_4 (sequence is synthesized)
tggggaggtgggcgcaggccgccctctctccgtgagcccactcgccacaacccgcagggacctgggggactcggtggatccaaccacaggagaccatgagacacaggcggtctcgccgag

SEQ ID NO: 851066 - DNA, 120 bp, Artificial Sequence
  ENSG00000287356_5 (sequence is synthesized)
gcctgccgcttagagctgtctctcctcctcacgggccccctggctccctgcaggcctggcctcctatctccctcaggccatcagcccagggacccccagcccaggcaccccacccatgct

SEQ ID NO: 851067 - DNA, 120 bp, Artificial Sequence
  ENSG00000287356_6 (sequence is synthesized)
ctgagctgtgggcctgaaacccgccctcctagcagggagcctggctgcgccccaggccgcttctgcttggagctccgtggaaggaaatgccctcaggttcccaggcactgagcctcccct

SEQ ID NO: 851068 - DNA, 120 bp, Artificial Sequence
  ENSG00000287356_7 (sequence is synthesized)
cccgctaaccccatcaggggtatagcagccccgtggtgctcagcctgcctctctctgcctgggcaggaccgtggagcccatgcgtgtcctctctcctgtccccagatggaagccggcagg

SEQ ID NO: 851069 - DNA, 120 bp, Artificial Sequence
  ENSG00000287356_8 (sequence is synthesized)
aaggcggcgccacagactgaggaggccctgctggccctggagctgtgttcggagcccccacagcctggctcctggctctggttgccgtgggcgggaggtggaagtacaaggagaaggagt

SEQ ID NO: 851070 - DNA, 120 bp, Artificial Sequence
  ENSG00000287356_9 (sequence is synthesized)
gtccagcattttcacgagtgccaccgccagaggtcaagctgaggacaagagggcagccaggcaccaccctggccccaggcagactccccagggctcgctgaagggccggcagccctgggc

SEQ ID NO: 851071 - DNA, 120 bp, Artificial Sequence
  ENSG00000287356_10 (sequence is synthesized)
ctggcagctccccttgcaagccccagctgggggctctgtcatccgggaggccctgggcctgaccttcgccggctgcccctgggcctggaggcaggacacgaaggggctgatgggtctgtg

SEQ ID NO: 851072 - DNA, 120 bp, Artificial Sequence
  ENSG00000287356_11 (sequence is synthesized)
gtcagccccgagcgcactttgctgagctgtggtcttgctgagccagcccacaggcccagcgactcctggcttactcagcccaggcctgaggctcccagggaaggccaggccaggctgtgc

SEQ ID NO: 851073 - DNA, 120 bp, Artificial Sequence
  ENSG00000287356_12 (sequence is synthesized)
aggaacctgcctatggggctgggcacctggccctccaggaaggcctgcctgcgaggagctgctctgcacaggggtctcgaccctccgctaggcaccaggagcgaagagggagaggctttg

SEQ ID NO: 851074 - DNA, 120 bp, Artificial Sequence
  ENSG00000287356_13 (sequence is synthesized)
ggaaggagacacaggtcaggtccggaggagcccagcagagcccctgcccagcctgggaggaggcctcagcccagctcatgtcccgctgtgttggcagtcagacggtcacgtggcatggcc

SEQ ID NO: 851075 - DNA, 120 bp, Artificial Sequence
  ENSG00000287356_14 (sequence is synthesized)
accctggccccaaagccgagagcttacagaaaagtcagcctcgatggacggcaagatgcacctgtcagccacgaaggagccccccgaggtgcagatccccacatccgccgcacccgtgtg

SEQ ID NO: 851076 - DNA, 120 bp, Artificial Sequence
  ENSG00000287356_15 (sequence is synthesized)
gagaaaacagcgctggatttcctgtcgtgggttttgtgactttgaaagccgaggctgctgattgggaattaaatcccagaggacgccgctcaacacactggaaacccagcagctgctgct

SEQ ID NO: 851077 - DNA, 120 bp, Artificial Sequence
  ENSG00000287356_16 (sequence is synthesized)
atcctgaagtgaaaaacagctacagagcaatttgccaaatgtaaggggcaggcccaggtgagcgccgctcacacgcagcgatcagggtcagcgtgacgcggtggtatctgtccttcacgg

SEQ ID NO: 851078 - DNA, 120 bp, Artificial Sequence
  ENSG00000287356_17 (sequence is synthesized)
gggctcctctgtgggcccggcctggccgatgtctgcctggcctcctgggaggctggtgacccaggtcggagcaggcctggcaggccaggagcctcccctccgacgggcgtagccaacccc

SEQ ID NO: 851079 - DNA, 120 bp, Artificial Sequence
  ENSG00000287356_18 (sequence is synthesized)
aagggtaaggggcagtgtcagaaccgccaggcgctcacggggctcccagggaccagaggctggagccatggctgtgatgaagccgccctgggctctgggagcctcgaggatggccgcagc

SEQ ID NO: 851080 - DNA, 120 bp, Artificial Sequence
  ENSG00000287356_19 (sequence is synthesized)
tgggagacgcagccttgccactggctctgggcttctagaaggtgtgggagagtggctgcctgccttgctgtctggaatggatgcctgggtgtctggggaagcttcggggatgccagagcc

SEQ ID NO: 851081 - DNA, 120 bp, Artificial Sequence
  ENSG00000287356_20 (sequence is synthesized)
ccccacatgcactcggcctcccagtggcagagctcagacccagggggccttggggacactctgccctggcagaggaagggtcccctcgctgcagctccagtggcctccagcttgtcacct

SEQ ID NO: 851082 - DNA, 120 bp, Artificial Sequence
  ENSG00000287356_21 (sequence is synthesized)
ccaaggatgggggactcggcaccccgcgatccggcctggttcctccctgcaatgcccccccgcccgcccctctgcccccgggcagcaggccgccttcagtgcatccaccacgctgcgccc

SEQ ID NO: 851083 - DNA, 120 bp, Artificial Sequence
  ENSG00000287356_22 (sequence is synthesized)
gacctggccccaaccaggctttccctgagagctcctcagggccccccaccgtggagcatcccagcttctgggtggatcttcaccccatgtgcccaggggctgccccgggttcctgcactg

SEQ ID NO: 851084 - DNA, 120 bp, Artificial Sequence
  ENSG00000287356_23 (sequence is synthesized)
ctgtgaacgcagctcctctgtccacggcctccctccgccgagcaggagcagctccctgtgcaggtctggagagatgccccggccgcagctggcctgggagatgggtgtgttcccagggaa

SEQ ID NO: 851085 - DNA, 120 bp, Artificial Sequence
  ENSG00000287356_24 (sequence is synthesized)
gcgcgcctggacagtgggagggtgggtctggccgcaacgcaaggaggtcggtgctagttgtgggagggccggggacagcagcatgagggaaacatcagggggcatgggtctggtgtgggg

SEQ ID NO: 851086 - DNA, 120 bp, Artificial Sequence
  ENSG00000287356_25 (sequence is synthesized)
ctggggctgggccctggacgccccctccccagggctgcaaacggtggtcttctgagagggtgggctgcaaggacgggggtgggtcaagggagagcaaggagagcaagggcctgaggaggc

SEQ ID NO: 851087 - DNA, 120 bp, Artificial Sequence
  ENSG00000287356_26 (sequence is synthesized)
tggttccctgcccagcgctgggcgggcagagggtgagaccagccaagctgcacaggccccaggtgggcagggtgaagccaggggccagggcaggtgcggtggggccaggaggcagggtct

SEQ ID NO: 851088 - DNA, 120 bp, Artificial Sequence
  ENSG00000287356_27 (sequence is synthesized)
ctgcagtggccgccttctgtgctgaccgagtggctggctgcccatgggccatctcagtgccccctccccaacaaccttctggcccctctctggctgaggggccctccggaggcagctgta

SEQ ID NO: 851089 - DNA, 120 bp, Artificial Sequence
  ENSG00000287356_28 (sequence is synthesized)
aaatgtccccgaccatcctccctggtcaatgcggggtgggggcgtcaggcaggcaggacacctggtcagcagagctgattgcatgcttcctgcctcttgtcatgggagcccgtcctgcgg

SEQ ID NO: 851090 - DNA, 120 bp, Artificial Sequence
  ENSG00000287356_29 (sequence is synthesized)
gcaggattgcctggagtgggtagtgccaggcagaggccaggaggttggctggccgggcttcactgcagagctctgcggcagggagacagggaccctccttcccagccccagcctggcagg

SEQ ID NO: 851091 - DNA, 120 bp, Artificial Sequence
  ENSG00000287356_30 (sequence is synthesized)
ggaattccagcaccaaccgcggctgggcctgggaacagtgtgggtgggacagacgtgctggcctcgcagggtgcctgggtgactgctacaggcctggtcttgaggcactgagacgagcca

SEQ ID NO: 851092 - DNA, 120 bp, Artificial Sequence
  ENSG00000287356_31 (sequence is synthesized)
ccccatgtgtcccgcctgaccccacaggcttcccagggctctgcgcagatcgggggccacagcagtgagcagggacgtgggctccagtcccgctgcctcgcccatgagtgtgcgggtgca

SEQ ID NO: 851093 - DNA, 120 bp, Artificial Sequence
  ENSG00000287356_32 (sequence is synthesized)
tggggagggccttgctgctggcgtggggcccaaggagcagtgccctccatagccgccactgagcattttattcaagccagcaaccacggggctctggagaatcggggagcagagtcacgc

SEQ ID NO: 851094 - DNA, 120 bp, Artificial Sequence
  ENSG00000287356_33 (sequence is synthesized)
gggtgcagctgtgggcggcctgccagctgcttgaggcttcagggccttcttccaggacatggggtggctggccagccctcttcgctacgacccgcaggtgtttgaaggccgggggcagcc

SEQ ID NO: 851095 - DNA, 120 bp, Artificial Sequence
  ENSG00000287356_34 (sequence is synthesized)
tgcgccccaggaacggcggggtggtcacgtcgcggatcatgagcacgtactcccctgcaaggggcgggtgggctggtcctcagcaggctcctgtcccttcccctccctggcctcagccca

SEQ ID NO: 851096 - DNA, 120 bp, Artificial Sequence
  ENSG00000287356_35 (sequence is synthesized)
ctgcccactgtctcatgtgcccgctggcccctgtgcccccgaccctggtcatctctgcctgggttctgggattcttggcactgtaaccacaggactggccaccggaccggtcctgggggg

SEQ ID NO: 851097 - DNA, 120 bp, Artificial Sequence
  ENSG00000287356_36 (sequence is synthesized)
ctggacacacagtcagcataggtgaataaactaatttggggtaaaggaaaccacctctgacctcaggccacagcccagctatggcctccagctcggaggctggcaaggatggacacgacc

SEQ ID NO: 851098 - DNA, 120 bp, Artificial Sequence
  ENSG00000287356_37 (sequence is synthesized)
ctcgcatggtggccgctctcaagcccccactgctgacctggctacaggtccctgaaggattcttttgcaaatactttcctacttttttaggagaaaaataattcattccctccataaact

SEQ ID NO: 851099 - DNA, 120 bp, Artificial Sequence
  ENSG00000287356_38 (sequence is synthesized)
gtttttaaaaataacgaaccctctgaaggctggtgtgtctggtttgcttttgaagccccgccctggccccttccccacacccgcgctggggctctccgggtggggctggagggcggccct

SEQ ID NO: 851100 - DNA, 120 bp, Artificial Sequence
  ENSG00000287356_39 (sequence is synthesized)
gctgggggcactcggcagagaaggaaaagtacttttcctttcacagtctgtaaactgtctggagagcttcaaagttggagaaaccataaaaaagaaaataagaaataacaaaaagtgagg

SEQ ID NO: 851101 - DNA, 120 bp, Artificial Sequence
  ENSG00000287356_40 (sequence is synthesized)
ttgccatagaaaccatcctctcccctcccctgagcctgccggggctggcaccggagcgtggaaaaagcgcctcggctggcccgggctcacaccaggaatgcggccgcagctgaaatgggg

SEQ ID NO: 851102 - DNA, 120 bp, Artificial Sequence
  ENSG00000287356_41 (sequence is synthesized)
gcaggagtcggctcacaccgcaaggcagagcaacattccagacgccggcctggaaaacagcgctcccctcgcagagcggcggcctcctcggccaggccacgggctcggccgcctgtgcgt

SEQ ID NO: 851103 - DNA, 120 bp, Artificial Sequence
  ENSG00000287356_42 (sequence is synthesized)
tcccagggctggacaagagcaagcctcgggggccgggaggaatgtgcttggccccgagtcagctcctttagaaaaaaaaaaacacggttctggggggcctcgccagggggacacacgttc

SEQ ID NO: 851104 - DNA, 120 bp, Artificial Sequence
  ENSG00000287356_43 (sequence is synthesized)
tgcaacctggcgggtgtgggccacagcaccgggcaccggggacagcctccctggcgggcggaggaagagccccacatggcaacgccacagtgtttccaagcagcccggtttctaggtgtt

SEQ ID NO: 851105 - DNA, 120 bp, Artificial Sequence
  ENSG00000287356_44 (sequence is synthesized)
cccaggaatccagctataccagtggtggccaaggcgctggccggggggccgagagctcagtgggcagtggctgaggagcccggccacaggccccatctgaccccactcctgaggctggcg

SEQ ID NO: 851106 - DNA, 120 bp, Artificial Sequence
  ENSG00000287356_45 (sequence is synthesized)
tcccggcggatgggaagggtgggcggcaagggctctggctggtggccaccgtgcggcaggccgggcctcgacggccacgtgatctagccctgggccagctctcacttagggcctcggcca

SEQ ID NO: 851107 - DNA, 120 bp, Artificial Sequence
  ENSG00000287356_46 (sequence is synthesized)
tacgtacatggcttagccccaagtggcccctgaatcggatctcccttcgctcctcacccccagggctgtctccgccgagcacataaaccctggccgagcggctgcgcacaggtgccagcg

SEQ ID NO: 851108 - DNA, 120 bp, Artificial Sequence
  ENSG00000276462_0 (sequence is synthesized)
agcatcgcaggctgtgttcacccagcctgttaaatcgttatttatatcctgaaagggagaggatgatattactccccgtaatagacagatatgactccccatcgtagagcacgaggtgta

SEQ ID NO: 851109 - DNA, 120 bp, Artificial Sequence
  ENSG00000276462_1 (sequence is synthesized)
cacccgccctgtgattttcttcctcatattcagagaccgagaggttgatgtcactcccaatatcggaggaagtatacacccccgtgtgagatggtccttaataatattccacggcggagg

SEQ ID NO: 851110 - DNA, 120 bp, Artificial Sequence
  ENSG00000276462_2 (sequence is synthesized)
gggtgatatgactacatacatggcagaaagtggaaacctcccagggatattgttcccacgatcctggagggaagaagatgatgttactttcaatatgacagaaggtggatgaagtggtgg

SEQ ID NO: 851111 - DNA, 120 bp, Artificial Sequence
  ENSG00000276462_3 (sequence is synthesized)
atgaagtggtggactgcccctccacacctgtggacacgcccccactgatattccttctaattgcagcgtgggagaggaggatatgacacgcgatatcgcagggagtagaaacacccctgt

SEQ ID NO: 851112 - DNA, 78 bp, Artificial Sequence
  ENSG00000276462_4 (sequence is synthesized)
actcccaatacagacgggtgtacaccctctgtacaccgagggtgtacacctgtctgtgaaagagttcgtaaggctgtg

SEQ ID NO: 851113 - DNA, 81 bp, Artificial Sequence
  ENSG00000276462_5 (sequence is synthesized)
agatgatattactcacaatatggtaaagaggctgtgagtccacggaggatcctcagagccagcggtgactccccccagtgc

SEQ ID NO: 851114 - DNA, 120 bp, Artificial Sequence
  ENSG00000276462_6 (sequence is synthesized)
tcctaagagccagtgggggaagaggggctggctctgagaccccgcctcgcggggggtgcctccccgccctgtgatgggggtccgaagagccagaaggcttagaggggctggctctcagtc

SEQ ID NO: 851115 - DNA, 120 bp, Artificial Sequence
  ENSG00000276462_7 (sequence is synthesized)
cccgcctcgcggggggtgcctcctccccctgcgatgggggtcgtaagagccactgggggaataggggcttgctctcagtcaccgcctcgcggggggtgcctcctttcctttctacataga

SEQ ID NO: 851116 - DNA, 120 bp, Artificial Sequence
  ENSG00000276462_8 (sequence is synthesized)
ctgatctctctttcttttccctacagatggacacgcccccactgatattgtttttaatgcagcgtgggaggggaggatatgacacgcgatatcgcaggtagtagaaacacccctttgata

SEQ ID NO: 851117 - DNA, 120 bp, Artificial Sequence
  ENSG00000276462_9 (sequence is synthesized)
acccctttgatagtgttcttaatattcagggaggaagaagatgatgttactcccaatacagacggatgtacaccctctgtacaccgagggtgtacacccgtctgtgaaggagttcgtaat

SEQ ID NO: 851118 - DNA, 120 bp, Artificial Sequence
  ENSG00000276462_10 (sequence is synthesized)
aatatggtaaacaggctgtgagtccatcgcggatcctcagagccaggtggggaagaggggctggctgtcagtcccctcctcgcggggggtgcctcccccactgctatggggatcccaaga

SEQ ID NO: 851119 - DNA, 120 bp, Artificial Sequence
  ENSG00000276462_11 (sequence is synthesized)
ctcccccactgctatggggatcccaagagccagtgggggaagaggtgctggctctcagtctccgcctcgcgaggtgcctccccaccctgcgatcggggtccgaagagccaggggggaaga

SEQ ID NO: 851120 - DNA, 85 bp, Artificial Sequence
  ENSG00000276462_12 (sequence is synthesized)
cccaccctgcgatcggggtccgaagagccaggggggaagaggggctggctctcttcgtggatgattctttttccattctcaggca

SEQ ID NO: 851121 - DNA, 120 bp, Artificial Sequence
  ENSG00000276462_13 (sequence is synthesized)
tcccaaagtgctgggattgcaggtgcgagccaccgggtccagcctctcaggcgattttcatacctgcatactctggtcactactctgttaaacagtcaaggagggtaagtattatcttca

SEQ ID NO: 851122 - DNA, 120 bp, Artificial Sequence
  ENSG00000276462_14 (sequence is synthesized)
gatttccagagctctgtctctgtacagccctctcctcctcaatattctgccctatgaattctagccacattggccttcccaggctcacagttctgtcttctcaactcaggaagatctctg

SEQ ID NO: 851123 - DNA, 120 bp, Artificial Sequence
  ENSG00000276462_15 (sequence is synthesized)
agttccatctgcattctttcttcctgtgctgtggcctggaaagttttctaaggtgttagggaggtcaattgtggggctagcctcatttgtttctcatctcttgaggatcactgccctttg

SEQ ID NO: 851124 - DNA, 120 bp, Artificial Sequence
  ENSG00000276462_16 (sequence is synthesized)
atgcttgattccagtgattgattccctttgttgcttgagggccatagtttcatatattttgtccagtagttttgttgttttaggtcagaaagtaattttggtctctgttactctatcttg

SEQ ID NO: 851125 - DNA, 120 bp, Artificial Sequence
  ENSG00000276462_17 (sequence is synthesized)
gccagaagtgtaagacctaagcatttacacatcaaaatactgcacacataattttagtttaagctactttttaaaaaatctccttcattttccatttagcattctatttagggtattaca

SEQ ID NO: 851126 - DNA, 120 bp, Artificial Sequence
  ENSG00000276462_18 (sequence is synthesized)
ttggtttttttgaaattctgttattggcagtttctattgcctatcaatcccatttaaagatagtgcatagggtattctaaaatagctgttaagcaaagagaaaattgggcctgatagggt

SEQ ID NO: 851127 - DNA, 120 bp, Artificial Sequence
  ENSG00000276462_19 (sequence is synthesized)
gagaatcacagctctaatacctagagtgaccttataatgtattgtccaaaggagatatttttgacagtgaaagagggtgttgttagtaattatatcaggaccatggcctaaaccaggact

SEQ ID NO: 851128 - DNA, 120 bp, Artificial Sequence
  ENSG00000276462_20 (sequence is synthesized)
atcccaggaagcctgggacatatttgtaccccatctctatttaatgcctttatacaattctttacttaattctaccagcctttattgagcctgctttctttgtctagctgagtgccacgt

SEQ ID NO: 851129 - DNA, 120 bp, Artificial Sequence
  ENSG00000276462_21 (sequence is synthesized)
gctgacgtcactaagatcaatacagcaaactctgaaagatggacagagagacaggagatggtcctttataatgcagtgtgatctgtgctgcaatagagttttggaagctagaagttcaaa

SEQ ID NO: 851130 - DNA, 120 bp, Artificial Sequence
  ENSG00000276462_22 (sequence is synthesized)
acgaggtgttggcagcaccatgctctctctgaagatgctaggaagaatctgctccatgcctttccattcgcttctggggtttcctgcaagccctgacattccttggcttgtagatgcatc

SEQ ID NO: 851131 - DNA, 120 bp, Artificial Sequence
  ENSG00000276462_23 (sequence is synthesized)
accccagtttccgcccccatcatcacatggcctcctctctgtgtgtgcctctgcgttccctctattcttcttctaaggacaccgacaccagtcatagtggattaagtgtccactcctaac

SEQ ID NO: 851132 - DNA, 120 bp, Artificial Sequence
  ENSG00000276462_24 (sequence is synthesized)
caattacatctgcaacaaccctatttccaaataaagtcacattctaagattcctagggagaacatgaatttttgggggtgtgtggatactgttcaacctgggacatggagtaaataaatg

SEQ ID NO: 851133 - DNA, 120 bp, Artificial Sequence
  ENSG00000276462_25 (sequence is synthesized)
gcaaggaagattacagatgactttaagctaaagagggagatagggttaaatgtaggactttttttttccaggacgggagaggtttaaacatgttactacattgaataaatgaaataacca

SEQ ID NO: 851134 - DNA, 72 bp, Artificial Sequence
  ENSG00000276462_26 (sequence is synthesized)
tttcctttaagtcatgaaagacttgctgttgttggaatccccattccaaaagttcccggtccccgccccccc

SEQ ID NO: 851135 - DNA, 90 bp, Artificial Sequence
  ENSG00000276462_27 (sequence is synthesized)
cccagtctacaaaaccccacagctcctaggaattctctcaccacccttgtgcctttaggcttcggtagattgcaaatgacctgctttctt

SEQ ID NO: 851136 - DNA, 120 bp, Artificial Sequence
  ENSG00000276462_28 (sequence is synthesized)
aggaccaacaggacctttcaggaaagctatccctgcttacacagagaattgcccttgcctaacactgaagcctggcagagtaacatgaaataaccacagcaattctaaaattagaattag

SEQ ID NO: 851137 - DNA, 120 bp, Artificial Sequence
  ENSG00000276462_29 (sequence is synthesized)
catgcctagaataacaggtgctgttgtaggagcaagggatacaatgatgatcaaggcagatgcagccgttaccttcaggttgtggagtccggatacagactggaggcaggcagctgtaag

SEQ ID NO: 851138 - DNA, 120 bp, Artificial Sequence
  ENSG00000276462_30 (sequence is synthesized)
tactgttcttaatattcagggaggaagacgatgatattactcccaaaacagacggctgtacaccctctgcacaccgagggtctacccccatctgtgaaatagtttataatttccagaggg

SEQ ID NO: 851139 - DNA, 120 bp, Artificial Sequence
  ENSG00000287378_0 (sequence is synthesized)
cccctttacaccgcatgggcggacacttggccaccgccggggccttggggtgagcacacgctcaggaggatggacctaaagaaacgcttttgcaagccctgaaaacaacagtgatgaagt

SEQ ID NO: 851140 - DNA, 120 bp, Artificial Sequence
  ENSG00000287378_1 (sequence is synthesized)
agaactgcatgtaacaatatggatacatctgaaaaatacgctgttaaatgagcaaaacagattgcagacggatagtttcacaggttaagaagaagaaatgtactcaaagagctgtactta

SEQ ID NO: 851141 - DNA, 120 bp, Artificial Sequence
  ENSG00000287378_2 (sequence is synthesized)
aggaattaaaactgaggagccccaactgcacctggacctgatttagatgacaagattttggatattgagctcacactgcaatgggatgagactttgcaatccttggagggtccagaaaga

SEQ ID NO: 851142 - DNA, 120 bp, Artificial Sequence
  ENSG00000287378_3 (sequence is synthesized)
gcaaggaacaaacaagaagaaaatcaaggggaaagcaagaaaaaaacgaaagccaatggagtatgaagaagactacgtgcaaagattctttaatatattaatatggattactactgtcca

SEQ ID NO: 851143 - DNA, 120 bp, Artificial Sequence
  ENSG00000287378_4 (sequence is synthesized)
agtaaggaaatggagatgaggccatcctcgaacttatttgatccccaaacccctcactgcggaacacctgttaacagctcccagaacagcgacagaagaaagcctaaattttagctttaa

SEQ ID NO: 851144 - DNA, 120 bp, Artificial Sequence
  ENSG00000287378_5 (sequence is synthesized)
tttttgtgatcctgagcaaaccactttatgccacagttttcttaattgtggattgatgaagtcatactgctgtgatttatgattctctactggtttgggccaacttctgttaagaatgct

SEQ ID NO: 851145 - DNA, 120 bp, Artificial Sequence
  ENSG00000287378_6 (sequence is synthesized)
atataccctggatgtgtcaaaatttccagagtgaggtggaatgctgaagtacagaggaatagggtaacattaaaaaaaaataggttaatgtggcccacatgtgggtatgtgagttacata

SEQ ID NO: 851146 - DNA, 120 bp, Artificial Sequence
  ENSG00000287378_7 (sequence is synthesized)
atttccccgaacagaaatttcataagaaaaaagcctatgaggctacatctagacctactatccactcacccttgttatagagtgtaaccccaaggaagagaagtgttacaatggaaaaaa

SEQ ID NO: 851147 - DNA, 120 bp, Artificial Sequence
  ENSG00000287378_8 (sequence is synthesized)
aactacctattatactattaatacataatgtatcccgttaatgtaaattattcaaggtaggtataatgctcacctaccctgcttcagaatgcttaattttctcacccagcttctcaatgg

SEQ ID NO: 851148 - DNA, 120 bp, Artificial Sequence
  ENSG00000287378_9 (sequence is synthesized)
aaaaagccttttcttacagagtttttgggtatagcttaggacaaggtccttcattgcttcatccttaaagtttcctattgacaaactgggcttaaggaattagcctatcaactgactacc

SEQ ID NO: 851149 - DNA, 120 bp, Artificial Sequence
  ENSG00000287378_10 (sequence is synthesized)
aactatacgaaaagtattcacataatgatttgtgtttggattgatcttcgagaaccacaaccctaaagtcttacgtgatgggggtgagataacgctgagatgtaagtctaatggagtaaa

SEQ ID NO: 851150 - DNA, 120 bp, Artificial Sequence
  ENSG00000287378_11 (sequence is synthesized)
taaacaagacagagtaaaataagatttggtttatcaatactatactacaaatttgatagcatcataatttttaaaaacctttttttacccttttccttcatataaaaatagtacatattc

SEQ ID NO: 851151 - DNA, 120 bp, Artificial Sequence
  ENSG00000287378_12 (sequence is synthesized)
attgtggagatttttagaaaatgcagaaaagtaaaaaaaaaccaaaaaaatttggttccactataaaaagacagtcctactgtaaaagatatccagcattctaattttggtatttacttt

SEQ ID NO: 851152 - DNA, 120 bp, Artificial Sequence
  ENSG00000287378_13 (sequence is synthesized)
tgttctgtctctgtgtgtatatgaataagactatgtatatatccacatagctttacatgtctggaattatgtatcatatacaaatgttttatcctttaatattatattatgagtatttcc

SEQ ID NO: 851153 - DNA, 120 bp, Artificial Sequence
  ENSG00000287378_14 (sequence is synthesized)
ccatgtcattagtcttgaaaaacatttttagtggctttatagtaaaccatggtttgtctacaatatatttctttgttcttctatcattacttagattatttcaaaaatttggttttgcaa

SEQ ID NO: 851154 - DNA, 120 bp, Artificial Sequence
  ENSG00000287378_15 (sequence is synthesized)
aaacatcattatatgtaacatttatatatttctgtttagaatagatttctagaagaaaaattgcattgtaaaaaggtatacatgtttttaaaaggtcttaacttctaaactcttttccac

SEQ ID NO: 851155 - DNA, 120 bp, Artificial Sequence
  ENSG00000287378_16 (sequence is synthesized)
actcttttccacaagcttttgggtcaatttataagtcatcaacactgtataacactgtgtatgtttttatcacaccccagtaaacactgaatattacctttctaatattgtaaataggta

SEQ ID NO: 851156 - DNA, 120 bp, Artificial Sequence
  ENSG00000269489_0 (sequence is synthesized)
ctggtaaagctgtgaaaggagactaaggggctgtggtgggactaactccataggcatttccttgagattaaatgtgtttcttgagggatactttgtccacccaccactgccaaggagacc

SEQ ID NO: 851157 - DNA, 120 bp, Artificial Sequence
  ENSG00000269489_1 (sequence is synthesized)
ttagtctatacgccaggttgcaatgtctgaagctttgctgtccaatatggtagccattggccacatgtggctattgaatgcttgtaaaggtaggtggtacagctgaggaatggaatttta

SEQ ID NO: 851158 - DNA, 120 bp, Artificial Sequence
  ENSG00000269489_2 (sequence is synthesized)
aacttagatgtgtgaatccactttctcaacagtgacctgtatgaaatatagatttttctggtgaaaatttagtaactgaattgcgatgttgagatgtactgtaagtgtaaaatatacact

SEQ ID NO: 851159 - DNA, 80 bp, Artificial Sequence
  ENSG00000269489_3 (sequence is synthesized)
ttgcgatgttgagatgtactgtaagtgtaaaatatacactggattttaaagacctaatatgaaaaaatgttaaatatttt

SEQ ID NO: 851160 - DNA, 61 bp, Artificial Sequence
  ENSG00000279467_0 (sequence is synthesized)
tagagcgagactccgtcgcaaaaaaaataaaaaggatatagcagctgcccagctgcaggcc

SEQ ID NO: 851161 - DNA, 120 bp, Artificial Sequence
  ENSG00000279467_1 (sequence is synthesized)
aaaaaataaaaaggatatagcagctgcccagctgcaggccacagtccattccacagggagctgtgcatcccacaggacatgctgctgtcccactattttgatgagttcacacagaaagga

SEQ ID NO: 851162 - DNA, 120 bp, Artificial Sequence
  ENSG00000279467_2 (sequence is synthesized)
cctggagaagaggaagcagcaagtgcactagaagtcttggtaaggcacagtgtgacaaagagtagaagattaataacgagatagggggctgccactccaacgaagttcctgaggtctaga

SEQ ID NO: 851163 - DNA, 120 bp, Artificial Sequence
  ENSG00000279467_3 (sequence is synthesized)
ggactaagaggtggcagcgtattttctccaaagtgcatgacaaattgctgcaccttggtccccttcctctaagaaggagggacaaacctctgagagcttctttccattttggaggcagca

SEQ ID NO: 851164 - DNA, 120 bp, Artificial Sequence
  ENSG00000279467_4 (sequence is synthesized)
gaataccacatcaggtgtcgtgacctggcacatttatcaggtgacttgaaaacctggtagctttgagtggtgctaagcaagagaagtatattctctagtgggtcgaagccaaattcacat

SEQ ID NO: 851165 - DNA, 120 bp, Artificial Sequence
  ENSG00000279467_5 (sequence is synthesized)
cgcagagtactagcaactatacatgatcgtggccccaagccaagttcaaagagctctgccactcaaccctttagctttaggagagcctgtggtgctcaaagtggcagttaaaatacccta

SEQ ID NO: 851166 - DNA, 120 bp, Artificial Sequence
  ENSG00000279467_6 (sequence is synthesized)
aaaggggatcacaatgcaaaaccaaagctttttaagttgagctactctccttcagcaaattactatccatatacatatatatatatatattcagagatagggtctcactatgtcacctag

SEQ ID NO: 851167 - DNA, 86 bp, Artificial Sequence
  ENSG00000279467_7 (sequence is synthesized)
actctttagtagctgggaccataggtgtgtgccacgatgcccagctaattttttctattttttgtttttttgtagagatggggttc

SEQ ID NO: 851168 - DNA, 79 bp, Artificial Sequence
  ENSG00000279467_8 (sequence is synthesized)
tagtagctgggaccataggtgtgtgccacgatgcccagctaattttttctattttttgtttttttgtagagatggggtt

SEQ ID NO: 851169 - DNA, 120 bp, Artificial Sequence
  ENSG00000279467_9 (sequence is synthesized)
aagcatgagccaccatgcccagcctgctaacctcttaaggagaaagagctcctggccttgtcactaggccctagtggggaataaacaccaggctgcgggatgccacagggccatgtactc

SEQ ID NO: 851170 - DNA, 120 bp, Artificial Sequence
  ENSG00000279467_10 (sequence is synthesized)
atcataactgggtgctgtatgacaccctcctactaaggttgagtgtcccctgcagcactccatcactgaatagaagtggtataaaccaaacttgcccaatgtggaccccaaagtttccca

SEQ ID NO: 851171 - DNA, 120 bp, Artificial Sequence
  ENSG00000279467_11 (sequence is synthesized)
caaagtttcccatgaataggtcactcacatcagcttggacccaaaaggtaatgaaggacttaaacttatcctatagacagattttttagcatgggcttttttttttttgagacagagtct

SEQ ID NO: 851172 - DNA, 76 bp, Artificial Sequence
  ENSG00000279467_12 (sequence is synthesized)
ttacaggcgtgagccaccgttcctggtctagcatggacttcttttgcctcttttctaccaggctggagtgcagtgg

SEQ ID NO: 851173 - DNA, 82 bp, Artificial Sequence
  ENSG00000279467_13 (sequence is synthesized)
ctgacctcaggtgatccccccgcctcagtctaggcctgtccctttttcaaaagatttggttggacaaaaagtcttagatgaa

SEQ ID NO: 851174 - DNA, 120 bp, Artificial Sequence
  ENSG00000279467_14 (sequence is synthesized)
tttttcaaaagatttggttggacaaaaagtcttagatgaagcagaatttgaagactggtttcaaggaggtacggggaaacactaagtgggtgaatcttttaaaattagcccagaacctga

SEQ ID NO: 851175 - DNA, 75 bp, Artificial Sequence
  ENSG00000279467_15 (sequence is synthesized)
tcctagcccagaacgtgaaaatatacataaatatatttctgcttatcagaagccccctcccactacaaagaggct

SEQ ID NO: 851176 - DNA, 120 bp, Artificial Sequence
  ENSG00000279467_16 (sequence is synthesized)
tttctgcttatcagaagccccctcccactacaaagaggctcttcataagcagatggacaatatgaccctctatctgtagatggcattcaactgccttccttgaccatcccggtgcttact

SEQ ID NO: 851177 - DNA, 120 bp, Artificial Sequence
  ENSG00000279467_17 (sequence is synthesized)
cagttgggtgataaacaaagcaaatagggtagcaaggacagaaaatgcacatgggctgaacaataggggcttcctgtcaccaagatggttgtgttcccctacacaaccaaccctgagcac

SEQ ID NO: 851178 - DNA, 120 bp, Artificial Sequence
  ENSG00000279467_18 (sequence is synthesized)
ccaacaatggcaacacatttcagagctccagtcagctgctgaatggaagaactacatccccctgtcctggggaggggaacagacatttgctttaattacaataggcatacatgctaaact

SEQ ID NO: 851179 - DNA, 120 bp, Artificial Sequence
  ENSG00000279467_19 (sequence is synthesized)
tgaatttttaatttcttcctttcatgcttatgccaactgtaccaggtatcatgagatagccgcgcaatagttattacctccgtcttcttcgtgggaagagccccacttttgtttgcgact

SEQ ID NO: 851180 - DNA, 120 bp, Artificial Sequence
  ENSG00000279467_20 (sequence is synthesized)
gttcccctactccccacggtgcagatatgagcccagtggtctaatccagtcttgctgatccagtgctggtgctatggtttgaaggtttgtgtctcttccaaaattcaggttgaaatttaa

SEQ ID NO: 851181 - DNA, 120 bp, Artificial Sequence
  ENSG00000279467_21 (sequence is synthesized)
tttccaatgcaacggtatttagaggtgggcctttgggagattgattaggccatgagaactccaccttcattgatgggactagtgctttataaaagggctggagggaactaggcaggctct

SEQ ID NO: 851182 - DNA, 120 bp, Artificial Sequence
  ENSG00000279467_22 (sequence is synthesized)
ttttgccttttgcccttttgtctttcaccatatgaggacacagcattcgccctttctgccatgtgaggacacagggacaaggcaccatcttggaagcagaaagagtagccctcacggtac

SEQ ID NO: 851183 - DNA, 120 bp, Artificial Sequence
  ENSG00000279467_23 (sequence is synthesized)
actgcatctgctgggtgccttgatcttggacttcacagcctccagaactgtgagaaagtaaatttctgttctttatacattatccagtctcagttattttgttatggcaacaaaaataga

SEQ ID NO: 851184 - DNA, 120 bp, Artificial Sequence
  ENSG00000279467_24 (sequence is synthesized)
aacaaaaatagactaagattgctagtaagcgagctgttttgagacaggggctcactgtgtcatccaggctggagtacagtggcacaatcaaggctcactgcagcctcgatctcctgggct

SEQ ID NO: 851185 - DNA, 120 bp, Artificial Sequence
  ENSG00000279467_25 (sequence is synthesized)
actgcagcctcgatctcctgggctcaggtgatcttcctgccgcaacctcccgagtagctgagtctacaggcatgcaccaccataactggttaatttttttttttttgagatggagtcttg

SEQ ID NO: 851186 - DNA, 120 bp, Artificial Sequence
  ENSG00000279467_26 (sequence is synthesized)
cccattcctagctaattttttgtagagatggggtctcaccatattgcccagactgttctcaaactcctggacccatgcaatctgccccgctcagcctcccaaaatgctgggattatgtgg

SEQ ID NO: 851187 - DNA, 120 bp, Artificial Sequence
  ENSG00000279467_27 (sequence is synthesized)
gtgagccaccatgcctcaccaggcctggcttctaagaacttctttcatgctatgagctgccccactatccttccagctattacatttttgattctgttatcagagtcagtttgtattctt

SEQ ID NO: 851188 - DNA, 120 bp, Artificial Sequence
  ENSG00000279467_28 (sequence is synthesized)
tgaaatccaagaactgcattagatatgcaggaggagagtgaggcccaggaagaaaataacttgtttaaggtcagttagcacttgttggcagacatgaaattagaaaccaggagtcctccc

SEQ ID NO: 851189 - DNA, 120 bp, Artificial Sequence
  ENSG00000279467_29 (sequence is synthesized)
tctcttgtagcacaggactgtttgctctaccaaacccttgaagacgtgtcttgcaaggtgaaactccaggcagagtaagaggctggatgaggagctgatctgggcctggagcttgccggg

SEQ ID NO: 851190 - DNA, 120 bp, Artificial Sequence
  ENSG00000279467_30 (sequence is synthesized)
cctcttccttcttccacattcctcagcctgcaggctgcagcgctcctcattaaagggcattcagggggtatgcaggaagcacttaccttcccagcgtgatggccaagggacctgcaagca

SEQ ID NO: 851191 - DNA, 120 bp, Artificial Sequence
  ENSG00000279467_31 (sequence is synthesized)
gtgctccaaagaggcctcccaggggatacagagacacgatgagggaccacataagcaggactaggtgatcgggcagtggctctccagtacgcgcctgccatgtctcattggtgaattcct

SEQ ID NO: 851192 - DNA, 120 bp, Artificial Sequence
  ENSG00000279467_32 (sequence is synthesized)
gaatgtgctgtggacagaaatgccagtcagccttctggggatggtggcgtgggggtgctagatgaaacaagccttctccccaacagggctccatgcctctgcagaacaggcaatgacaac

SEQ ID NO: 851193 - DNA, 120 bp, Artificial Sequence
  ENSG00000279467_33 (sequence is synthesized)
aggcaccgtgtcttctgagctccccctggagcaggaaccaactcgcctgagcacctcccttgtgcagggcaccatgctggttctttcatgggcaatatctctcagagcctagcactggac

SEQ ID NO: 851194 - DNA, 120 bp, Artificial Sequence
  ENSG00000279467_34 (sequence is synthesized)
tcgctccatttgcccctctctgcgaaaacactatttctctctactcacacaatactcctgacagcaaatgtgtggatattttcccacatcaagcaattctctaactctccggacacaagc

SEQ ID NO: 851195 - DNA, 120 bp, Artificial Sequence
  ENSG00000279467_35 (sequence is synthesized)
tgggtgtactacaatgtaatcccattctgacactatccacctggagttagcatcaaatcccacaagtcaaagggctccattccacaagactgtcccctcttcagatgccaagtgcaactc

SEQ ID NO: 851196 - DNA, 120 bp, Artificial Sequence
  ENSG00000279467_36 (sequence is synthesized)
ctgcacttctgaccaactggccatcaattggggattcctaggatcctttctgtgggtttgataatttgcaacaatggctcacgaaactcaggaaggccctttacttacatttactggttt

SEQ ID NO: 851197 - DNA, 120 bp, Artificial Sequence
  ENSG00000279467_37 (sequence is synthesized)
gttatgaaggatacaactcatgaatagccagatgggaaagatgcactgggcctgatcctgggagagtaggttgctagaggcttccatgtcccctccaggagcaccaccttcccagcacct

SEQ ID NO: 851198 - DNA, 120 bp, Artificial Sequence
  ENSG00000279467_38 (sequence is synthesized)
caatgtgttcatgaacctggaagctcatcaaatcttgtcattcaagagtttttatagaccttaatcttcagctcctctccctttcctagagctccgtgagtggggctgaacattcggacc

SEQ ID NO: 851199 - DNA, 120 bp, Artificial Sequence
  ENSG00000279467_39 (sequence is synthesized)
ctctaatctcttggtctttttggtgaccagctccatcctgaggcaatctagtggccctaccctgtcatctcattaccataagcgcaggtatgatgaaatggggctcattgcaaataacaa

SEQ ID NO: 851200 - DNA, 68 bp, Artificial Sequence
  ENSG00000279467_40 (sequence is synthesized)
agcgcaggtatgatgaaatggggctcattgcaaataacaaaagatgctcctatcactcaagaaattcc

SEQ ID NO: 851201 - DNA, 120 bp, Artificial Sequence
  ENSG00000279467_41 (sequence is synthesized)
gagccaagattgcaccattgcactccagtgacaagagcaaaactacgtctgaaaaaaaaaaaattccaagagttttaggagctctgtgcctggaaccaaggacaaagatctattatattt

SEQ ID NO: 851202 - DNA, 120 bp, Artificial Sequence
  ENSG00000279467_42 (sequence is synthesized)
caaggacaaagatctattatatttcttattataccatacccgaggaatccactgcagtcccctcccaccctgcttttgccccagggagccacctgtgcagcccacatcagtaggctccct

SEQ ID NO: 851203 - DNA, 120 bp, Artificial Sequence
  ENSG00000279467_43 (sequence is synthesized)
tactgaccaacttggccaatggtgagcaccagcaggacatcaggaggcaggagagagaagtaggagtgtctgttccctggctccctccctgggaggttgcctcagcctggctgcgatcct

SEQ ID NO: 851204 - DNA, 120 bp, Artificial Sequence
  ENSG00000279467_44 (sequence is synthesized)
ctcaaggggacctatgtctctttccttccaatttcagtaatctctccatccactggtcatagctcagagcagcctccagctcctgggctcaagcgaccctcctgcctcagcctcctgagt

SEQ ID NO: 851205 - DNA, 62 bp, Artificial Sequence
  ENSG00000279467_45 (sequence is synthesized)
cctgcctcagcctcctgagtagctgaaactaacaggcacataccagcatgccaggcaattcc

SEQ ID NO: 851206 - DNA, 120 bp, Artificial Sequence
  ENSG00000279467_46 (sequence is synthesized)
gcttcagcctcccaaagcaccgggattacagacatgagcaaccatgcccagccttggtcactgtcaagactggggattaggctcagggagaggtgaaatgacttgctcacagcgttagcc

SEQ ID NO: 851207 - DNA, 120 bp, Artificial Sequence
  ENSG00000279467_47 (sequence is synthesized)
acaggtcagagttgtaccaggtagtttggactccccagactccaaacctcaggtgagtgaagggaagccacatggttaggaaagacatgaggaagacatggacacccttctcttggttag

SEQ ID NO: 851208 - DNA, 120 bp, Artificial Sequence
  ENSG00000279467_48 (sequence is synthesized)
agatgaaatgtcatttgcaggtctcctgacagaacagaacacaagggagagcagcgggttcaggtgctgggccagctctcccctgcccagctcagggcaatgactgtcagcctagtgccc

SEQ ID NO: 851209 - DNA, 120 bp, Artificial Sequence
  ENSG00000279467_49 (sequence is synthesized)
accagctgcctctcgggggaggaactgtccacaggagctgggaccagggccagcctcccctgacattgggtggaactcctcaagagtgaccattgacaaagattctcctcagagttttct

SEQ ID NO: 851210 - DNA, 77 bp, Artificial Sequence
  ENSG00000279467_50 (sequence is synthesized)
agatagtgtctccctctgttgtcgaactcctgggctcgagccatcctccaacctcagcctcacagatccctacaact

SEQ ID NO: 851211 - DNA, 120 bp, Artificial Sequence
  ENSG00000279467_51 (sequence is synthesized)
gagccatcctccaacctcagcctcacagatccctacaactacaggcccatgccattgtgccctgttgcattttttttacttttttgtagatactgggtctcactgtgttgcttaggctgg

SEQ ID NO: 851212 - DNA, 120 bp, Artificial Sequence
  ENSG00000279467_52 (sequence is synthesized)
tcaagcaatcctcccacctcggcctctcaaagtgttcggattagaagcatggaccactgcacccggccttctgagctctttttcaactaggtctcaacttttggacttctgtgttcatct

SEQ ID NO: 851213 - DNA, 120 bp, Artificial Sequence
  ENSG00000279467_53 (sequence is synthesized)
acttctgtgttcatctctgccttgttcaattttagcaagtatcgtgctaagttggtttagctagaatcctcatcctccacatctgatcactctcaaaatctaatcggcctccttatcctc

SEQ ID NO: 851214 - DNA, 120 bp, Artificial Sequence
  ENSG00000279467_54 (sequence is synthesized)
tgccatcctccatgatgtctagttaccctggcctgccctcaacaagaatcctgttaggacaatttaaccagaatcccccacaaatgcctgatgatcctcttagtcattgtgcacccgctg

SEQ ID NO: 851215 - DNA, 120 bp, Artificial Sequence
  ENSG00000279467_55 (sequence is synthesized)
accccactctgctccttggctatcagttctcacttgcccattgctgtatttgaagttgagtccaacctttctgcctcagggcaggaccccattgccacggtccctacaactagtgcttgc

SEQ ID NO: 851216 - DNA, 120 bp, Artificial Sequence
  ENSG00000279467_56 (sequence is synthesized)
gcaggaccccattgccacggtccctacaactagtgcttgccacctcttgaataaagtcttcattactgtgctttgacaagtgtcattgaatagttttttgtttttgtttttgagatggag

SEQ ID NO: 851217 - DNA, 120 bp, Artificial Sequence
  ENSG00000269487_0 (sequence is synthesized)
aaaacgtcagctcacccagctcatgggggctcccatccacagtgcaccgccgagggtctggagccccttccccatcctctcctgagcccaggaaatcaaactcattgatagcatcctcag

SEQ ID NO: 851218 - DNA, 120 bp, Artificial Sequence
  ENSG00000269487_1 (sequence is synthesized)
agtcgtcttcctcatcctcgtcttccatttcgggcaccagagccttggatgggagctggcacatggagaaagccagacaagtcagggggcctcttgtccagagactaagccacctccgtg

SEQ ID NO: 851219 - DNA, 120 bp, Artificial Sequence
  ENSG00000269487_2 (sequence is synthesized)
agtccatcagctctgtcccagacatcgagccatctcctaactggtccgcctgcctcctctgtgaccctcccacacctctccttctcagagtggatcagaggccctccctgcccaccccct

SEQ ID NO: 851220 - DNA, 120 bp, Artificial Sequence
  ENSG00000269487_3 (sequence is synthesized)
gcagaggagcacatattggccctcgtggtctccatcgtgcttagcatcacctacgtggcctcacttgttctgcttaactgacaattgctgatgagagtgaacaagccagagattcctgag

SEQ ID NO: 851221 - DNA, 66 bp, Artificial Sequence
  ENSG00000269486_0 (sequence is synthesized)
aacctactcgttaaaacactcgagaagtattactccaatgttatgatcacttacaaaattcgattt

SEQ ID NO: 851222 - DNA, 80 bp, Artificial Sequence
  ENSG00000269486_1 (sequence is synthesized)
atggatgatatactttgtgctgcccccactcgagaagtattactccaatgttatgatcacttacaaaattcgatttcttg

SEQ ID NO: 851223 - DNA, 85 bp, Artificial Sequence
  ENSG00000269486_2 (sequence is synthesized)
aaccatacataggaatcaattgaaaacattaaaggactttcaaaaattactaggggacattaattggatacgacctgctctaggc

SEQ ID NO: 851224 - DNA, 120 bp, Artificial Sequence
  ENSG00000269486_3 (sequence is synthesized)
ctattttctatccttagaggagatcctggtctcacaagccctcggtaattaacaagagaagctgaggcagagctgcggctaatcgaaaagcaagtccataaagctcaaataaatagatta

SEQ ID NO: 851225 - DNA, 87 bp, Artificial Sequence
  ENSG00000269486_4 (sequence is synthesized)
agagtgagatcttcggactctaactccttatttggatcaaattgctactatgataggaaatgggagaactcggattgttaaattaca

SEQ ID NO: 851226 - DNA, 82 bp, Artificial Sequence
  ENSG00000269486_5 (sequence is synthesized)
attaagctgactttgtgggtattctcgataaccattttcctaaacaaaactgttttaatttttgaaattaactaattggatt

SEQ ID NO: 851227 - DNA, 120 bp, Artificial Sequence
  ENSG00000269486_6 (sequence is synthesized)
tgccctatacttcagctcaaaaagtggagcctgtagctgtaattgaggtagtgactgcttttcatatgcctattaatgtgatttctgactcttcatacgtgattcattccacacaattaa

SEQ ID NO: 851228 - DNA, 120 bp, Artificial Sequence
  ENSG00000269486_7 (sequence is synthesized)
ctcttcatacgtgattcattccacacaattaactgaaaatgctcagttacaatttcctgcagatgaacaactgatgattttatttacccaactgcaaacagcagttaggagtagaatgca

SEQ ID NO: 851229 - DNA, 75 bp, Artificial Sequence
  ENSG00000269486_8 (sequence is synthesized)
gccccaggctacactagccgagctctagctacatttttctctatacggaatattaaacacattactggtatccca

SEQ ID NO: 851230 - DNA, 79 bp, Artificial Sequence
  ENSG00000269486_9 (sequence is synthesized)
gcagttgcaaaagcaaaaaaaaggggggaaaacaaggactacgggacaccccatatgcaactgaatctagcattgttaa

SEQ ID NO: 851231 - DNA, 77 bp, Artificial Sequence
  ENSG00000269486_10 (sequence is synthesized)
gggaggaaactgaggaccccccccacccccggttgcagccatgtcgagactgacgctgaggaagaccccaactgtca

SEQ ID NO: 851232 - DNA, 120 bp, Artificial Sequence
  ENSG00000269486_11 (sequence is synthesized)
cccacccccggttgcagccatgtcgagactgacgctgaggaagaccccaactgtcacgagcaacacctgtcaaacacagccacccacctggagacagatcaagaagctgtcacagatggt

SEQ ID NO: 851233 - DNA, 120 bp, Artificial Sequence
  ENSG00000269486_12 (sequence is synthesized)
aaagtgggacaaccagtcgcaatgagtaatttaatggtagctatgatagcgatgatcaccactgccatgagtattccttcaataagggctgacacagaggacaattatacttattgggca

SEQ ID NO: 851234 - DNA, 72 bp, Artificial Sequence
  ENSG00000269486_13 (sequence is synthesized)
gatgtaatcactctatgacacagttatacaagctttctgatctatttgtaaacaggattggacccagttagc

SEQ ID NO: 851235 - DNA, 120 bp, Artificial Sequence
  ENSG00000269486_14 (sequence is synthesized)
atgaacgtacttgtttaggaagattgctttgcagaacaggcagaggtgctgcacaacaattcctatggaatcattattaattggtcacctatggggatgtttagcttgaactgcacctct

SEQ ID NO: 851236 - DNA, 120 bp, Artificial Sequence
  ENSG00000269486_15 (sequence is synthesized)
tcacctatggggatgtttagcttgaactgcacctctcagtctgcatgccatggccacactgtgatcagctcatctgaacaaaatggtcagatgatagaaatggtaagaaatacagcaaga

SEQ ID NO: 851237 - DNA, 120 bp, Artificial Sequence
  ENSG00000269486_16 (sequence is synthesized)
tatctggaaccatggcagtatagtggcacctcagcctcaaatgatatggcctgctctaggagctaaacataagcatttgtggaaactgttaatagctcttaataaaatcaaaatttggga

SEQ ID NO: 851238 - DNA, 120 bp, Artificial Sequence
  ENSG00000269486_17 (sequence is synthesized)
gggaaagaataaaaaagcatctagaaggccactctacaaacttgtatttggatattgcaaaattgaaagaacaaatatttaaagtatcccaggcacacgtgaacttaatgccaggaactg

SEQ ID NO: 851239 - DNA, 88 bp, Artificial Sequence
  ENSG00000269486_18 (sequence is synthesized)
gtaacccattcaaatggataaaaacacttggagctctgtgttgtttgtctttgtatagtgtgcagatgcggatcctgactcctgtgag

SEQ ID NO: 851240 - DNA, 120 bp, Artificial Sequence
  ENSG00000269486_19 (sequence is synthesized)
tcctgactcctgtgagaagtagctcaccgtgacaaagctgcctttgcttttatcactttgcaaaacaaaaaaggggacatgttgggaacaggcccctgaatctggccataaactggcccc

SEQ ID NO: 851241 - DNA, 66 bp, Artificial Sequence
  ENSG00000269486_20 (sequence is synthesized)
ttactggaatgagggcaaggaacacctggctcacccaggatggaaaacggcttaaaggggttcctg

SEQ ID NO: 851242 - DNA, 64 bp, Artificial Sequence
  ENSG00000269486_21 (sequence is synthesized)
tgcagataactagccagagcccatccgtttattttggcacatccctttatttcccataagaaat

SEQ ID NO: 851243 - DNA, 120 bp, Artificial Sequence
  ENSG00000269481_0 (sequence is synthesized)
tggggggtaggggagtgagagagggaagccaggcaggggtgggaaggcccaaagatgactctaggatgaggctcgccagggtgctgtttaaggcagccacatggacaacattggggatgg

SEQ ID NO: 851244 - DNA, 120 bp, Artificial Sequence
  ENSG00000269481_1 (sequence is synthesized)
gggtgggaggagtggttaaatcatgaatggtatagatgaaggaggggattccatgcagcctttaggaaccgctggagtaggctgatctttggtgatatgaagctgcattcatggggtggc

SEQ ID NO: 851245 - DNA, 82 bp, Artificial Sequence
  ENSG00000269481_2 (sequence is synthesized)
ctttccatgagccctctaatcctatagaggttggacaactagcacccatgagccaaatctggctcaaggtctgttttctttt

SEQ ID NO: 851246 - DNA, 120 bp, Artificial Sequence
  ENSG00000269481_3 (sequence is synthesized)
gggaaatatctgcagtgggttaaggatactctgtgtgtcttacaaaacagagacacagatgctgcctaagaacgaggtcctcctggaaccggtgccagggaaggatctggaaggaaaaga

SEQ ID NO: 851247 - DNA, 120 bp, Artificial Sequence
  ENSG00000269481_4 (sequence is synthesized)
agaatacctgtgataggtgtgagagaggagtgccactcactgttcactgcagcagcaggcgacaggtgaattctgaattcttttttttttccttttgagacagagtcttgttctgtagcc

SEQ ID NO: 851248 - DNA, 120 bp, Artificial Sequence
  ENSG00000269482_0 (sequence is synthesized)
cagtaaggagtgtgagacacatcagtgtcctcagatacacatctgtctactcatctctgggagggtcaacaaggagctgctggccagggtcacctcctgggagggggctggggaactggg

SEQ ID NO: 851249 - DNA, 120 bp, Artificial Sequence
  ENSG00000272888_0 (sequence is synthesized)
aatttagtagagttctctgtatagtctctaatcttagaaaaatgttggaagggtaatttttaagtgtagtggtttgaagaacaaaccagaagcgcacaaacctttgtgtattttagaata

SEQ ID NO: 851250 - DNA, 120 bp, Artificial Sequence
  ENSG00000272888_1 (sequence is synthesized)
tatttgtcttcattctgcggagctcttgtgttgtaaaggtgcagaactacgtaaaaatagtgttgggcagacttacatagtacatctgaaatcagatactggtttattcgaccatatttc

SEQ ID NO: 851251 - DNA, 120 bp, Artificial Sequence
  ENSG00000272888_2 (sequence is synthesized)
taagggcatttttccagtaaaattgttttattttttgagtagccttcctatagtggtacatgttacatcagttgcgcatatcttgattttacagaatctgtcttaagtaccaattttggt

SEQ ID NO: 851252 - DNA, 120 bp, Artificial Sequence
  ENSG00000272888_3 (sequence is synthesized)
ttttcaaatcaatgtttctgaaatttttgaacactgaaagtggttttaaatgaatattctgaatctagttctttagaatcctctttgaattgtgaaatgcaaaataattgttagcagttt

SEQ ID NO: 851253 - DNA, 120 bp, Artificial Sequence
  ENSG00000272888_4 (sequence is synthesized)
aacctgaaagatctttttacatgataaatgggggaggagaaagactgaaatgaaaatgttgaagaccctgatttgaaattgagtgtaaaggtctagatactgtaagttttagagtagctt

SEQ ID NO: 851254 - DNA, 120 bp, Artificial Sequence
  ENSG00000272888_5 (sequence is synthesized)
tagagacaaagctagtatcccacttggtgagatcaagtaacttgtggtttaaaatttaaagtaaccagtggccattttaacttcactaatttctcttggaggagctaatttttaattgct

SEQ ID NO: 851255 - DNA, 120 bp, Artificial Sequence
  ENSG00000272888_6 (sequence is synthesized)
catgattgtaaaacatacttccggatggtaagggagatgttaagatgatttgtcttgaagaatggtaaactttttctttgtttattgcctgtcataaaaagagggaaagtaaaaaaaaaa

SEQ ID NO: 851256 - DNA, 120 bp, Artificial Sequence
  ENSG00000272888_7 (sequence is synthesized)
gatgaggaaaacaaagactgatagatactaagataagaaataactgcaaccataaatgtatacaggttatgtgtccatgagccatctcttcagtttgcccatagatttttgtctgtggaa

SEQ ID NO: 851257 - DNA, 120 bp, Artificial Sequence
  ENSG00000272888_8 (sequence is synthesized)
tattttcttgtttcatcacactgaatcgttggccaagaaatgcttgaaaatcaaaacattaatatcatctttcttcttttttttaaaggtgacttaagagattaaaattaatttggttgc

SEQ ID NO: 851258 - DNA, 120 bp, Artificial Sequence
  ENSG00000272888_9 (sequence is synthesized)
tgttggttctgaacaaataatgagttcttttatttgaggtatgccattttgaagactgagacgttggagttttatcctagaggataaaggaaatctttgggaaagtcagtattttatata

SEQ ID NO: 851259 - DNA, 120 bp, Artificial Sequence
  ENSG00000272888_10 (sequence is synthesized)
gcaaaaatatgaacctcaaactgaatcctctaaaggccccatacaatgaagtagacattggtggaaacatttacacccagtcagcttgaagagtttcaaatggaccctaccactgagaaa

SEQ ID NO: 851260 - DNA, 120 bp, Artificial Sequence
  ENSG00000272888_11 (sequence is synthesized)
tcaagatggcagtctactatggggaattgaggaaaaatggattaatacaagagtcctgtgataatatacaaccaagacagggttcttttaacatggattccatgcagtgaatgaagacat

SEQ ID NO: 851261 - DNA, 120 bp, Artificial Sequence
  ENSG00000272888_12 (sequence is synthesized)
aggtttcttacccaacacaaatggacagtggatttgactttctaaagactttttttgtggacattttgacatttggagaagaaagatggcacactaacccagataatagtttttatgcct

SEQ ID NO: 851262 - DNA, 120 bp, Artificial Sequence
  ENSG00000272888_13 (sequence is synthesized)
ggaattttttgcagtttgatttgtatgcgtatgacctcttgaaatgttaatttttaataaaatttgtaacacttaaaaatttctcagtttgggtttttttttttaagtggaagtttaatt

SEQ ID NO: 851263 - DNA, 80 bp, Artificial Sequence
  ENSG00000272888_14 (sequence is synthesized)
gcgcgcgtcggcgtcacagcccgcggcagaggcgcccagggcggccgggcccacgacgccgaaagcgccgctgcggttgc

SEQ ID NO: 851264 - DNA, 120 bp, Artificial Sequence
  ENSG00000272888_15 (sequence is synthesized)
acctctttccggtgaggtgggaactcatcttcatgatcgaatttaaaagaacaatggaaccctgactacgtttcaacaaaaataaaacttgtttttttccctcctattgggtgttggctt

SEQ ID NO: 851265 - DNA, 120 bp, Artificial Sequence
  ENSG00000272888_16 (sequence is synthesized)
accaccgagcaaaccatcagagaaggcacccagcgaagggctgtatctttcatctttggaaatggactgaagagatatttaatgtgtcaagagctctacttccgggagaccaatatttct

SEQ ID NO: 851266 - DNA, 120 bp, Artificial Sequence
  ENSG00000272888_17 (sequence is synthesized)
tttttattcagttatttcaaggagggctcccagtaaattttgcttggtaaggagattaatttcagagccatggactcccgtaggatatatcctggatgtttacgttgcaaaaacccgggg

SEQ ID NO: 851267 - DNA, 120 bp, Artificial Sequence
  ENSG00000272888_18 (sequence is synthesized)
cattgttatttatttcttctgtcagaaaagcaagacagcaataaactaccgcttaacttgtaaatcacagaagtgactaacctgaacgaaagtaatttgaggacaaaggaagagggatta

SEQ ID NO: 851268 - DNA, 120 bp, Artificial Sequence
  ENSG00000272888_19 (sequence is synthesized)
cttattctactgttaagaactgatctacaaagagatgatacgttttctgatcatgcttagcttctcaaataagttaattcttttttctggtcattcctggtgacttaagagattaaaatt

SEQ ID NO: 851269 - DNA, 120 bp, Artificial Sequence
  ENSG00000272888_20 (sequence is synthesized)
tattttagtaatactttggcctttgtagttgccgagtggtaaagtgtactgaatatgaataaagctggtaaattggaaatggtgtaatcgaaaacattttacttggtttatgaagattta

SEQ ID NO: 851270 - DNA, 120 bp, Artificial Sequence
  ENSG00000272888_21 (sequence is synthesized)
cgtttttcacaaagttgtgctcttagatggtcatttggtttaaatactgttttgtttgtgctttcatgaaacacctttcaaaacaactcaatgggtaataatagaatctgattttaatct

SEQ ID NO: 851271 - DNA, 120 bp, Artificial Sequence
  ENSG00000272888_22 (sequence is synthesized)
gccacaagattttaatgaacttgaaacaaactgcttgttgctcgaaaattcaggatgagtgatacacatatacttctgaattattttgtgttgattgaaatggtttcttaagctttttaa

SEQ ID NO: 851272 - DNA, 120 bp, Artificial Sequence
  ENSG00000272888_23 (sequence is synthesized)
tactataaatacatcttgctatagaatattcatctgaatatttaaattaatgtctcctattgtcttactattagaggaagaagtgttggatttatgggttagggtccttggagtattcac

SEQ ID NO: 851273 - DNA, 120 bp, Artificial Sequence
  ENSG00000272888_24 (sequence is synthesized)
aattttttaaatttgaaattatgtgtgtaatccattttatataactttgaagtaggattaatatcttgtatcgtctttattttgtacaattggggatttagaataaatgaattgcaccct

SEQ ID NO: 851274 - DNA, 120 bp, Artificial Sequence
  ENSG00000272888_25 (sequence is synthesized)
agctcctgccgccgccgcagccgctgccgccgcagcgaagaggccatgttgtgtggtgtgtggggcggggggaggaggaggagggagtaaagcctagagaggagacgggagagagacacc

SEQ ID NO: 851275 - DNA, 120 bp, Artificial Sequence
  ENSG00000272888_26 (sequence is synthesized)
caccacacacacggcacaagatggccggagaggcagcagcaccccgagctgtcaggcgttccgccgcggccgcgaggcccgccggccggcggggagctacgcccggacggccagcaggcc

SEQ ID NO: 851276 - DNA, 120 bp, Artificial Sequence
  ENSG00000272888_27 (sequence is synthesized)
agttcttgattctgttttcccattttacatgagaagaataaatagttcaggttaaattgttttgtgttaatcatactgtttgtgattcatgtcaaatactgcagcatacacatccatggt

SEQ ID NO: 851277 - DNA, 120 bp, Artificial Sequence
  ENSG00000272888_28 (sequence is synthesized)
taatacacgagcaccatttgttattgactgatgtgaggtggttggtctttgttaaattcaaaaatggaattttggatattgttcttgctacgaaatttatctttgtgtgtagagtatgga

SEQ ID NO: 851278 - DNA, 120 bp, Artificial Sequence
  ENSG00000272888_29 (sequence is synthesized)
attgaaacagtttggattatggattttacctagattggacattgttgattttgtttggtgtaaatctaaagtggatttcttcagtgagggagagacatggttctggcagattatgttgaa

SEQ ID NO: 851279 - DNA, 120 bp, Artificial Sequence
  ENSG00000272888_30 (sequence is synthesized)
taaggaaagttgattggatttttttgggtgtgtgaatatgcttgtctgaatggagtgcttggtaggatattgtttctggaattagtaatttgtttctgtggatctcatggttttgatatt

SEQ ID NO: 851280 - DNA, 120 bp, Artificial Sequence
  ENSG00000272888_31 (sequence is synthesized)
taggagaatttgctttgtgacattactttgataatttgcaatcacgtatgtcctattgttaataacattgttgaaatgggtgtatacttacttgatttgaaatataagggaagtgttggg

SEQ ID NO: 851281 - DNA, 120 bp, Artificial Sequence
  ENSG00000272888_32 (sequence is synthesized)
atatgtgttttctgttggatttggacgtggagtttcttgggttactgatttaaaggtgatcgtgtttggaccatactcttgaatttttgcctgaatcagtatgggaagtaaatatattgt

SEQ ID NO: 851282 - DNA, 120 bp, Artificial Sequence
  ENSG00000272888_33 (sequence is synthesized)
gattatgagaagtttctttggggggaggagtgtaatattttcaaggttatataatgggttaaagaattttgtgaaagaacaaagaaaaatggatattcttgaataaaaattggttgcatt

SEQ ID NO: 851283 - DNA, 120 bp, Artificial Sequence
  ENSG00000272888_34 (sequence is synthesized)
atataagataaatatagtggatcatgtagatatgatattaaagtactatattttataaggaaggtggattattgtatatttaccactgttttctgcttaagaaccaaggtgatacttata

SEQ ID NO: 851284 - DNA, 120 bp, Artificial Sequence
  ENSG00000272888_35 (sequence is synthesized)
taattgtttttaccctagcattttgggataattcttgagtcataaaaatctcctgatcaacttggtgattgaattggattgcattagttctgatagaaactgtttaaaaaattacctgac

SEQ ID NO: 851285 - DNA, 120 bp, Artificial Sequence
  ENSG00000272888_36 (sequence is synthesized)
attctatagaaatgaaaggagccatgctgtgtaatcacaaggctttcatgacatgacatttatagattatatgaaataggtaatttcaaatgtaaattttaagttttatttactattagt

SEQ ID NO: 851286 - DNA, 120 bp, Artificial Sequence
  ENSG00000272888_37 (sequence is synthesized)
catcgttttttgattatttaaaaatttgtactatggacaactaattaattttactttttatcctctgagatttgattgtggagcggcataagggggagaaagataagttgaggacgtctc

SEQ ID NO: 851287 - DNA, 120 bp, Artificial Sequence
  ENSG00000272888_38 (sequence is synthesized)
agccgattttgaaacggctgcagtgatacatgcgaaggtacttgctgcttattaaacctttatgacgttaaggttgtctttgaaaaatgcaagttggaggagtgcttctggtatttcaga

SEQ ID NO: 851288 - DNA, 120 bp, Artificial Sequence
  ENSG00000272888_39 (sequence is synthesized)
tttacccaacatctgcaattgaatagttaccaacatttaagtagaaaaataccattaaagtttgttaatgaaacaaactgtagactacttatcactgaaaggatgagaaaaccatcaaat

SEQ ID NO: 851289 - DNA, 120 bp, Artificial Sequence
  ENSG00000272888_40 (sequence is synthesized)
ttaaatctgcagtaaagtcatcaagattatgtttttacaaatctggtatatacagtcttaagcctttttttttttttttttttgattgtacaaatcacattttaggaatggtctggaatt

SEQ ID NO: 851290 - DNA, 120 bp, Artificial Sequence
  ENSG00000272888_41 (sequence is synthesized)
ttgcatttgctgatcgtaggattcttaacaacatttcaaaaactaaatagacactttcatatcttaggcatttaatagatttaaaatactcattttaattgttttcatgagttttcaaac

SEQ ID NO: 851291 - DNA, 120 bp, Artificial Sequence
  ENSG00000272888_42 (sequence is synthesized)
aggtccaaaaatgtgttgttttctaggaaatgagagttaatgcatctaaagagtcctctaatttaattgcttagtaattgcttttaaagcatgaaagatagagataattttcacgcgcag

SEQ ID NO: 851292 - DNA, 120 bp, Artificial Sequence
  ENSG00000272888_43 (sequence is synthesized)
taggtattgggcccccagcataccatgtatatcacactttaaaatcttaaagctagatacgtgaatttaaaagaatgtccactgatgtttttaaggaaatatgccttttttgtaagttaa

SEQ ID NO: 851293 - DNA, 120 bp, Artificial Sequence
  ENSG00000265799_0 (sequence is synthesized)
gaatgaggcaagacccttcgaggcgattggctcacctgaccttcacctcctcgtgcacgaccctgacagtagggtccccaagggctttggaactgcgggattgggacacgtgacttccct

SEQ ID NO: 851294 - DNA, 68 bp, Artificial Sequence
  ENSG00000265799_1 (sequence is synthesized)
agggctttggaactgcgggattgggacacgtgacttccctggtcattcaccttgaagtggacacgggc

SEQ ID NO: 851295 - DNA, 86 bp, Artificial Sequence
  ENSG00000265799_2 (sequence is synthesized)
gagggcatttcattgtgtccgaaactggtgagtgcttggtctcactgacttcaagaaggaagccgcggaccctcgcagtgagtgtt

SEQ ID NO: 851296 - DNA, 120 bp, Artificial Sequence
  ENSG00000265799_3 (sequence is synthesized)
cccaagggctttggaactgcgggattgggacacgtgacttccctggtcattcaccttgaagtggacacgggctggggtgagagaggggaaactgccccatcttctcatcttagaaccatg

SEQ ID NO: 851297 - DNA, 120 bp, Artificial Sequence
  ENSG00000265799_4 (sequence is synthesized)
cagctcataaaagcagtgtggacccaaaaagcgagcagtagcaagatttatcgcaaacagcaaaagaacaaagctgccatattgtggatggggacctgtgcccgttgccactgctggctc

SEQ ID NO: 851298 - DNA, 120 bp, Artificial Sequence
  ENSG00000272880_0 (sequence is synthesized)
ccgtaactgggtcctcgtggtgtgactgattcattttcagtctacccagactgtcctggttttaaaatggaaaatcctacaacctgggaatccccttagttcactgcaaaccaacaattg

SEQ ID NO: 851299 - DNA, 120 bp, Artificial Sequence
  ENSG00000272880_1 (sequence is synthesized)
gtcatctttgctctcctcacaaagagtaagatgcaaggccaaattttggcttgaatgctgttccaggttctccacagttggtgaaaaatcattgaatgagaaaatgtgcaggatgaaagg

SEQ ID NO: 851300 - DNA, 120 bp, Artificial Sequence
  ENSG00000272880_2 (sequence is synthesized)
gtaaatgtctgggttctattgcaaaaatctgattccatccatatgtcttaggtagggtcccaaattctgcaattttataagcaccttagatgactctgattatacatggtccaaggacct

SEQ ID NO: 851301 - DNA, 120 bp, Artificial Sequence
  ENSG00000272880_3 (sequence is synthesized)
atgtttggaaagcagggatttaattacagctcattttatggataagaagtctatgttgcctgaagccacacaatacgcaactgcaacctggtctaaaataaagcctcaaatatgcactcc

SEQ ID NO: 851302 - DNA, 120 bp, Artificial Sequence
  ENSG00000272885_0 (sequence is synthesized)
acttattcattactacaaattccccaccacgcagaaaagagaaactgatattttggcacatctctaaatcaccaatttatctaccaaaatttcttctaaaaatgcattcagttctctgca

SEQ ID NO: 851303 - DNA, 120 bp, Artificial Sequence
  ENSG00000272885_1 (sequence is synthesized)
gccctgaggttctgtttgaaaccactcccaaaatatacagatctgaaaaacttattacacgtgtcaagggaaaacgaaagaatttttaacaaatataccattagacattttttaagttta

SEQ ID NO: 851304 - DNA, 120 bp, Artificial Sequence
  ENSG00000272885_2 (sequence is synthesized)
catatttatgcctctttgagaatattctcctatctttcaaactctaccaataaaatgcattgtacagttaataaaatggaagttgaaataaataaacatttttttcaagatgacaaaccc

SEQ ID NO: 851305 - DNA, 120 bp, Artificial Sequence
  ENSG00000262075_0 (sequence is synthesized)
aatgcaggggagagggcctgggcctggccttgctgctggtcccctggggacttctgagggcccgcgggggtccctgggtcacagtgcagccacactggcctctgggctcctttcatccac

SEQ ID NO: 851306 - DNA, 120 bp, Artificial Sequence
  ENSG00000262075_1 (sequence is synthesized)
aggccgcctggtgagccccgcagcctcacccacgtggggaggggctgctgaggcctccttgcctttcttggtgggcgccctacgcctcgggggtcctaccctcctcttctgtgcagcccc

SEQ ID NO: 851307 - DNA, 120 bp, Artificial Sequence
  ENSG00000262075_2 (sequence is synthesized)
aacgtggctttgcccccttctccaaacttctgccttgggccatggggcgcaggccgtggggatgctgtctgcctgctttagagaaacctggggcaccgatgacaaatacaggctctgctt

SEQ ID NO: 851308 - DNA, 120 bp, Artificial Sequence
  ENSG00000262075_3 (sequence is synthesized)
ggcctgtgggacggttggtaagccccccacctctgagaccctgggtggccacattcccctcccaagctcccccggaatggggatgcagcctgccccttccttcctcctgggcactgtgca

SEQ ID NO: 851309 - DNA, 120 bp, Artificial Sequence
  ENSG00000262075_4 (sequence is synthesized)
ggcttagggaggatgcaggtggcacagtaggctgtgcccacccggggtcccgggaccccagcccctaccgcctcctcctcctcctctgaattcttggagccctgtgggcctatgtggtgt

SEQ ID NO: 851310 - DNA, 120 bp, Artificial Sequence
  ENSG00000262075_5 (sequence is synthesized)
gacgtggcttcccctccacccaccctcagctcccgatggcttggggggttctccgcagccagcgaggcccacagccggcctccccgggttctgtcctgcccccgacagcatcctgggcct

SEQ ID NO: 851311 - DNA, 120 bp, Artificial Sequence
  ENSG00000262075_6 (sequence is synthesized)
tccggtggtgtcaggagactccaggcccttgaaaggcagctgcgaccccgggtatgactcggagaagtccaggagcaggaaatgggctgcattccttcggggcccctccgtgcaccccag

SEQ ID NO: 851312 - DNA, 120 bp, Artificial Sequence
  ENSG00000262075_7 (sequence is synthesized)
cccctccctgggagagctgccctgaggtcaggaaagtgccgtcctggcaagaccctcagcagctgccgcccacaggacagtcagcgttttcaagcatgggaaggaaaataaacacgaggt

SEQ ID NO: 851313 - DNA, 120 bp, Artificial Sequence
  ENSG00000262075_8 (sequence is synthesized)
taaaaaggggtctgttggccccgggctggtttgtttttcctgtgtaagggaggcaacgggaatgagaaccatctgtgccctgagcgcagcgcaagctgcctgctgggcccacgtgccctc

SEQ ID NO: 851314 - DNA, 120 bp, Artificial Sequence
  ENSG00000262075_9 (sequence is synthesized)
ccccaaagaccacagaagccaggcagagccttgctcccttccagccggggccgtggctgctggccggcagggacagtggtgttggctggggcaccaccctcctttgccacagccctgggc

SEQ ID NO: 851315 - DNA, 120 bp, Artificial Sequence
  ENSG00000262075_10 (sequence is synthesized)
ctggctgcgggcagagaacaggccttcgattgaagctccaaccttccgggccacctcctttgggcttcgggcacctgagccagcatcccattgtaagggcaggggctgctgggggccctg

SEQ ID NO: 851316 - DNA, 120 bp, Artificial Sequence
  ENSG00000262075_11 (sequence is synthesized)
cctgtgccaggcctcagctcagccctctttccccaggcgctgctgccatcaggaggcccacagagggtccacaccaacactgtgagccccttgtgggtcccctgggttagtggtgggagg

SEQ ID NO: 851317 - DNA, 120 bp, Artificial Sequence
  ENSG00000262075_12 (sequence is synthesized)
ctggtgaagagaagtggggacaaaagacattgcacaaatggtggagggagggagagatttgcagcctcgtagctgtcattgctgggggagcttctcctggtctccttccttgatgcagag

SEQ ID NO: 851318 - DNA, 120 bp, Artificial Sequence
  ENSG00000262075_13 (sequence is synthesized)
agctgggagcttgtgtccctgggccgggagagccccaacattatatcagaacttgtggggaaacctgcacccccgagggctctggctttgttaggccgagctgggctatgaggctgtgtg

SEQ ID NO: 851319 - DNA, 120 bp, Artificial Sequence
  ENSG00000262075_14 (sequence is synthesized)
acctggcacaagttgctttccctctctgagcctcggttctgtcacctgagggctgcccgtcccgcaaggtgtggagggtcactgaggcgtggggtttctgcggtgcttgtccatgtgcct

SEQ ID NO: 851320 - DNA, 120 bp, Artificial Sequence
  ENSG00000262075_15 (sequence is synthesized)
ggcacacagtggggtttgtgcagtgcttgtccatgtgcctagtggctcacagtggggtttgtgcggtgcttgtccgtgtgcctggcacacggtggggtttgtgtggtgcgtgtccatgtg

SEQ ID NO: 851321 - DNA, 120 bp, Artificial Sequence
  ENSG00000262075_16 (sequence is synthesized)
cctggcacacagcgagagctgctggggtcatgttgctctcacactcgtgcctgcccctgctgggcccctgcagtgggtcctggctggattgggggtacatccccaccacactgcacagag

SEQ ID NO: 851322 - DNA, 120 bp, Artificial Sequence
  ENSG00000262075_17 (sequence is synthesized)
gggcgtctcctcctatccagggacctgattctcctgtcgagaaaacctatgaaggggacccagagatggagtgtgacaaggccaggtgacaggcctgacatgtggtgtccacatccagaa

SEQ ID NO: 851323 - DNA, 120 bp, Artificial Sequence
  ENSG00000262075_18 (sequence is synthesized)
gggagaccctggagggatgaccctccactgccaccccctcccatcaggctctggacaccctcgagcctcccaccatccaccttaccagatccccccaagagtccgggaagctcactcccc

SEQ ID NO: 851324 - DNA, 120 bp, Artificial Sequence
  ENSG00000262075_19 (sequence is synthesized)
caggggaccaggagcacagccccttccattcctaacgggcctgactcccaaaggggggtgaggaaagaaaaagccatttcacatcgacttattcttctggccccaggcagcagcacaggg

SEQ ID NO: 851325 - DNA, 120 bp, Artificial Sequence
  ENSG00000262075_20 (sequence is synthesized)
caaggggttggagtcagccccagcacacacagggccctgctcactggtggccattgtcagcgccacctccaccttcaggagcctgccacgtgcctgccctcggtcacttagccctccctg

SEQ ID NO: 851326 - DNA, 120 bp, Artificial Sequence
  ENSG00000262075_21 (sequence is synthesized)
gcacgcaccactttgtccacacaccctgtgtgtaagtggtgacagcggtgacagctcaggcgtcacctgatcgggccgactctaagccttagtccttccttgtcctgttgcgccggacaa

SEQ ID NO: 851327 - DNA, 120 bp, Artificial Sequence
  ENSG00000262075_22 (sequence is synthesized)
gcctctgggaggcgacggtgggacagccacagggttcttggctcagcccccaggagtggggagctggggctctggacggaggtgggcactcgaggctggtgtggcctcctgggtgagggc

SEQ ID NO: 851328 - DNA, 120 bp, Artificial Sequence
  ENSG00000262075_23 (sequence is synthesized)
caggctcgggagaggcagccaggcggccccaagccaccccaggaacaaagcaccagcacacacctccactggtttgctagggctgggagaagttggagtgtttctgtggtggctgtggca

SEQ ID NO: 851329 - DNA, 120 bp, Artificial Sequence
  ENSG00000262075_24 (sequence is synthesized)
gcccacggccccaagaccctggcttccttctgctcccaccttttcaggccccttccccaacaagcagctactgtaggacccagtgggggctagggcaccagcagctgccattacccatgc

SEQ ID NO: 851330 - DNA, 120 bp, Artificial Sequence
  ENSG00000262075_25 (sequence is synthesized)
tgggtcctgatggttcctgaccagcctcaaccgtggattccaagctggggaaggaagaagcaggccgggagtggggagggagacagtgaaggacacccaaacacacacacacacacacac

SEQ ID NO: 851331 - DNA, 120 bp, Artificial Sequence
  ENSG00000262075_26 (sequence is synthesized)
acacacacacacacacacacacagaaggaacagtttcagctttgtttcccagtaatctcacttaaaaagaacacttgggtttaccatgttcacataatctcgttgctctgagaatgaact

SEQ ID NO: 851332 - DNA, 120 bp, Artificial Sequence
  ENSG00000262075_27 (sequence is synthesized)
aacttattcttcctcccagcttggccatgtgttcctccccattgcccaagtcccctcatgacatcatctcccactgccatgtcctttccttggggacctccaagtccctggagtttgggg

SEQ ID NO: 851333 - DNA, 120 bp, Artificial Sequence
  ENSG00000262075_28 (sequence is synthesized)
actgcagggtgggtggaggggcccacaagctctgcagggagccagaaggaaacggtctgtcccaccccagggctgagcacctcgctgggagatgatacccacacctggaaatagctcaag

SEQ ID NO: 851334 - DNA, 120 bp, Artificial Sequence
  ENSG00000262075_29 (sequence is synthesized)
ggccgcgtgaggccgcacgacacccacgccagtatgagacacctggccatgcggcattcctggccgactgctggcagctgcagactttgtcagccaggtgatgtccccgggatctctggg

SEQ ID NO: 851335 - DNA, 120 bp, Artificial Sequence
  ENSG00000262075_30 (sequence is synthesized)
caggcagggcacacaggaggcagctcacgctcactcatcatggcgaggcaggtcgtgtggaacttccttggtcttcctcatctgcgccccacccagcctggcagatggtgatgctgtgag

SEQ ID NO: 851336 - DNA, 120 bp, Artificial Sequence
  ENSG00000262075_31 (sequence is synthesized)
tgccagggaaacacacacacgcacacacacacacatgcacacatgtacagacaggtgcacatgcctgggagagtctgtgctgctcagcttccgagggcagctccccaggtctccccccgg

SEQ ID NO: 851337 - DNA, 120 bp, Artificial Sequence
  ENSG00000262075_32 (sequence is synthesized)
gtctgcggtgggaggcgagtcttttaacatcagctcaaaccaaacaggatgaggagggcaaatcggccgtccccagtaaatcctagggagtccctccaaggcaaacagaaaatgcacccc

SEQ ID NO: 851338 - DNA, 120 bp, Artificial Sequence
  ENSG00000262075_33 (sequence is synthesized)
agctttcgcttttaggggtttgagttgcgagtttccagtctgcggagtgcgatggccgggtgtaagtctgaaaccctctgggggagagaagccgcacagtgcaggggtacacatcccaga

SEQ ID NO: 851339 - DNA, 120 bp, Artificial Sequence
  ENSG00000262075_34 (sequence is synthesized)
tccactccccagctgtgaggcccaggcgcattccgcgttccccgcccatctccacctccgagggttgcgggaggctgagcagttagaaccgtggctggcatacggagggcactcggtaaa

SEQ ID NO: 851340 - DNA, 120 bp, Artificial Sequence
  ENSG00000262075_35 (sequence is synthesized)
cgtggctgtgctgagctgtgggcctcgaaggagtctcgcggggctgctgtaccaatgaccttgcactgggtggcctaaaacaacatgtgtttcctcacagctcgggggaccagagctcag

SEQ ID NO: 851341 - DNA, 120 bp, Artificial Sequence
  ENSG00000262075_36 (sequence is synthesized)
aatctgggggtcacagaggagggtccatgctcatccaggtcagctctaggggctgcaggccacccctaatctaggatggtcttatgttgaggtccttaattacatccacaaagacccttt

SEQ ID NO: 851342 - DNA, 120 bp, Artificial Sequence
  ENSG00000262075_37 (sequence is synthesized)
ccccaaataagtccccacgcacagttcccagggacagcctctggggcagcatcaccacccactcagtcctccatgcacccccttgcgctatcacgtaacttggatcaggtccacgcgtgt

SEQ ID NO: 851343 - DNA, 120 bp, Artificial Sequence
  ENSG00000262075_38 (sequence is synthesized)
ggctttgcggctttcctttgtcacagcgtgtcacaactgttttcccgggtgtcactgctgtggtttgagtttgtgtgtccccagccttcatatgttggaacctgagacccaagaagatcg

SEQ ID NO: 851344 - DNA, 120 bp, Artificial Sequence
  ENSG00000262075_39 (sequence is synthesized)
ttataagacgtggggcctttggaaggtgattaagtcaccagggtccccattgaagcgcttgggaagccatcgaggccccctcccctttgtcctctcaccttccgccgggagaggacacag

SEQ ID NO: 851345 - DNA, 120 bp, Artificial Sequence
  ENSG00000262075_40 (sequence is synthesized)
caagaggcacccactgggaggcagagagcagcccccactcccactgaggctgctggcaccgagaccctggacttccagcctccagaagcgtgagaaataaatgtctattgtgtgtcaatg

SEQ ID NO: 851346 - DNA, 120 bp, Artificial Sequence
  ENSG00000234184_0 (sequence is synthesized)
attgccggagagtttctgcaatatgctactgcagtccatatgcttatcaattatgaggatttttggctttcggctctggaaaatatgagaaatatgggcaattactctctgaagaaagag

SEQ ID NO: 851347 - DNA, 120 bp, Artificial Sequence
  ENSG00000234184_1 (sequence is synthesized)
ctatacctctaaaggtgttgaataatttgaatgggaatttgaaggtccatggcttccaaaccagcaggagttaaggcttaattgcttggaaatacattttcatggctgataccagtaaca

SEQ ID NO: 851348 - DNA, 120 bp, Artificial Sequence
  ENSG00000234184_2 (sequence is synthesized)
gaaaaatgtctgtatgtcaagaggctctgtactaatcagttaaccataacatgtgccaccccataccttgggccaatgtaactgttaacagcttgaagctattaaaaatgtaccaatgga

SEQ ID NO: 851349 - DNA, 120 bp, Artificial Sequence
  ENSG00000234184_3 (sequence is synthesized)
ctcttcctgtgtggaacttggattcaagctgagggtgggaagcactcaagcttgatactctagccttgcagagattccctgcttagccctttttttctttttcacccaaaaaaatcctgc

SEQ ID NO: 851350 - DNA, 120 bp, Artificial Sequence
  ENSG00000234184_4 (sequence is synthesized)
tttactcacgctctgcaacgtctgtgagcctaaattttcgtggccgtgggatggacaggaaccctgcctgctttagctgaactaaggaaaagccgtgcaacacatccagtaggatctacc

SEQ ID NO: 851351 - DNA, 120 bp, Artificial Sequence
  ENSG00000234184_5 (sequence is synthesized)
tgagtgttagttttaaatagactattgacaaattacagatttttttcacgtattgaaattatattccagatgattttgagatttactggtataatattctcctcatgaggtaggatggaa

SEQ ID NO: 851352 - DNA, 120 bp, Artificial Sequence
  ENSG00000234184_6 (sequence is synthesized)
gggaagaaatagagaaaaaatgttctgctctgaaataaatgtggtgtttcctgacagcgtttgtcaagagatggggttccaccatgtagccccggctggtcttgagctcatgagctcaag

SEQ ID NO: 851353 - DNA, 120 bp, Artificial Sequence
  ENSG00000234185_0 (sequence is synthesized)
tgactcctggatttacataacagagcaagcaatcccaccctaagcccaaaaaattctacatttcttaatttctactattcagaaagatgtggaacctgcagatatggagggccaactgca

SEQ ID NO: 851354 - DNA, 120 bp, Artificial Sequence
  ENSG00000234185_1 (sequence is synthesized)
gctcgtgttgttcaagggtcaactgtatctgcaactcaaggttctgctaaagatcctaaggagcagacttccaaaggtcacgcctcctgttgaagaccagatatgacaagttggttgata

SEQ ID NO: 851355 - DNA, 120 bp, Artificial Sequence
  ENSG00000234185_2 (sequence is synthesized)
atcaaacagtttttcctctgctctcactcgacaacaatcaatacagaagacttctgtgaccagatgtgtggggttttctctctaccaataaacaagcaatcaattctgcagccaacacca

SEQ ID NO: 851356 - DNA, 80 bp, Artificial Sequence
  ENSG00000234183_0 (sequence is synthesized)
ataatggggccggcttggtggcgcgaacctgtagcctcacctactgtcaagactgagacatcatgatcgcaccactgcac

SEQ ID NO: 851357 - DNA, 120 bp, Artificial Sequence
  ENSG00000234183_1 (sequence is synthesized)
aataaaaaaaaaggttaaaatttggaggataactcccagctagaaaggaagaaaagctctaaagtggaatcgccttcccccggaagctgttgtaaaaattaaaggatgtatgtgagtgca

SEQ ID NO: 851358 - DNA, 120 bp, Artificial Sequence
  ENSG00000234183_2 (sequence is synthesized)
gtttggggaggttaaaatttggaggataactcccagctagaaaggaagaaaagctctaaagtggaatcgccttcccccggaagctgttgtaaaaattaaaggatgtatgtgagtgcacag

SEQ ID NO: 851359 - DNA, 120 bp, Artificial Sequence
  ENSG00000234181_0 (sequence is synthesized)
cctccgctgggacccaggcgtgcgaccggctctgcctcctccgcagttctgcctcaggacctttgcatttgccatctcctctgtcagcttcagttcccgatgccgaaatggatctccatc

SEQ ID NO: 851360 - DNA, 120 bp, Artificial Sequence
  ENSG00000234181_1 (sequence is synthesized)
cagcacctcccaccaccacaccccctggaaaaatttcccctcacttccttaatttcttccatagcacaactcatcagcatctgaaattctacacgtatttatggtttatcccctccgagt

SEQ ID NO: 851361 - DNA, 120 bp, Artificial Sequence
  ENSG00000234181_2 (sequence is synthesized)
agaatgtgagctcattgaggtcagggaattctgttttcttcatgatatcctcagcacctagcatatatttgaggttcacatactgaccaaacgaataaaggaatatgttaatttttaaaa

SEQ ID NO: 851362 - DNA, 120 bp, Artificial Sequence
  ENSG00000262079_0 (sequence is synthesized)
agagtatgctgaagttattgctgtcaggtgcgtttgccatatactcagggacctgggtcccttccttcttagtctccatcttctccaggagccagaaaaaaaggagagagagagcatcag

SEQ ID NO: 851363 - DNA, 120 bp, Artificial Sequence
  ENSG00000262079_1 (sequence is synthesized)
gtggcactgtttatgggcctttcatggaagtgacacctggggttacttctgcttatgttcctttggacagaattcagttgaatggtcatactagaggcattgtgccaggctttgcaggat

SEQ ID NO: 851364 - DNA, 120 bp, Artificial Sequence
  ENSG00000262079_2 (sequence is synthesized)
aaaaagaagttagagacagggactttggatccaagtcctccctgactcaaaacccagagaggcagaggatgcttgccacctttgactagtcctatctcctccaaagggtccttttgattt

SEQ ID NO: 851365 - DNA, 120 bp, Artificial Sequence
  ENSG00000262079_3 (sequence is synthesized)
attagcaagaagccatcttctgaccacaaagacaagatttcaaagttctcacccagttcctagctaaagatgtccaaagagacttctaagccaatgattttcaacaaggaaattgaagtt

SEQ ID NO: 851366 - DNA, 120 bp, Artificial Sequence
  ENSG00000262079_4 (sequence is synthesized)
gtatgctttgaagagaggggcttgattgggtggcatcttatgcttaagtgtgcatggaagagccatcctacatgcagcatgtgatgggcccccagggactgaggacttgtgtatgactgg

SEQ ID NO: 851367 - DNA, 120 bp, Artificial Sequence
  ENSG00000262079_5 (sequence is synthesized)
gagtctacgcagcttggcttcatatcagttcttgccatctcggatccaaatgctctccaggcatgaagtcatttcctccaagagatttgaagatgccccagaagaatcttaggctaaggt

SEQ ID NO: 851368 - DNA, 120 bp, Artificial Sequence
  ENSG00000262079_6 (sequence is synthesized)
agagatttgaagatgccccagaagaatcttaggctaaggtcactattcttaagctaaggtcactattcttattcctctgagaaaggtgaaaggtgggttgggtgcagtggctcacgcctg

SEQ ID NO: 851369 - DNA, 120 bp, Artificial Sequence
  ENSG00000262079_7 (sequence is synthesized)
ctccacctcaacaacaacaacaacaaaaaggtgaaaggtgtttgatggatgaaaatagagctgaaccctaacttgtaaccactcaattttaactagaggttgtcaccaagtaagagatgc

SEQ ID NO: 851370 - DNA, 120 bp, Artificial Sequence
  ENSG00000262079_8 (sequence is synthesized)
ccatcgaccttgtgcacaaagctggcgctagtctatgaactgttggtgaagtcacactatgaaacaacgtctctaccacccattcccataccatcagccatcctgctctggcatatgagc

SEQ ID NO: 851371 - DNA, 120 bp, Artificial Sequence
  ENSG00000262079_9 (sequence is synthesized)
aggggaattcttttccgtcctctctgaaggaacgaatagtctgaaatattgaattggaaaaatgctcaaggcatccattctactctcgtgggccccatgtagttatctgttgaaggcctc

SEQ ID NO: 851372 - DNA, 120 bp, Artificial Sequence
  ENSG00000262079_10 (sequence is synthesized)
ggatgtgccagagacaattcatttgttgtcattagttccccccacaaccctcagaagtgagtataccttcatgtcacagatgagattatgttcaaaacggtttagaagctgctcaaggtc

SEQ ID NO: 851373 - DNA, 120 bp, Artificial Sequence
  ENSG00000262079_11 (sequence is synthesized)
acatacccactaggtgacagatttgaatccagaattgtactcctcaacacagagcccccttctcactatgccggagatgctgagtttcttggcctgggctgcagccccacacagccggtt

SEQ ID NO: 851374 - DNA, 120 bp, Artificial Sequence
  ENSG00000262079_12 (sequence is synthesized)
ttgagctccccaggtgaatctactgggctccctgggctgagaaccactgctctacatcagccttcttacatgaatcaggggttttattccgccttgcatcacaggttcctttagggaagt

SEQ ID NO: 851375 - DNA, 120 bp, Artificial Sequence
  ENSG00000249553_0 (sequence is synthesized)
aactcactttctcttttgcatgttgatctgtgggaaggactaacagctgtagctataggttgcctgttatccactaccacctatagttgagaaacagaaaccagattttggggagtatta

SEQ ID NO: 851376 - DNA, 120 bp, Artificial Sequence
  ENSG00000249553_1 (sequence is synthesized)
actcagtaaaaggttgtaatgacgtaccaggatgcagtgcagtgggacaattgtgtaaactgccaccaccctaaccactgcttcccaaaggaccccatggatgttctcctctgagtccaa

SEQ ID NO: 851377 - DNA, 120 bp, Artificial Sequence
  ENSG00000249553_2 (sequence is synthesized)
gttacacaagcttgacaagcagaaagcatgtggcctctattttgcatttcatcttgctcataatagaaggtcttctttaacgggaaaagaaaatgtatggcaataaatctttaaaagtat

SEQ ID NO: 851378 - DNA, 120 bp, Artificial Sequence
  ENSG00000176868_0 (sequence is synthesized)
aaataaggagaattctttcatatggaaagagctagtacaatcacatatttgaaaggagaaacaataggtactgaaccggagggaaagggcgagggtgagtgtgccagcaccggcctggtg

SEQ ID NO: 851379 - DNA, 120 bp, Artificial Sequence
  ENSG00000176868_1 (sequence is synthesized)
aatccacgattcgatttcccatccaaggtaagtttcccaaaataccgtataaacaagctgcacattacacctctagccatcgtctgccctttcaaatatggtctacatggaaagacaaag

SEQ ID NO: 851380 - DNA, 120 bp, Artificial Sequence
  ENSG00000176868_2 (sequence is synthesized)
aggaaaggccaaaacataaacaaaaggaaacaaaaacaaaacacaaccctctcaggaaccaaacaaaacccccaaatccttttttactacacaaggcatgaggtcaaaagcttgagtaca

SEQ ID NO: 851381 - DNA, 120 bp, Artificial Sequence
  ENSG00000176868_3 (sequence is synthesized)
gtgtcccctttagatcacgggagaaaggcgtccacacagagccttagcaggaatttccactctgaggcttcagaacatgctgaagatggggctctgagggtgccactaccatcctggagg

SEQ ID NO: 851382 - DNA, 120 bp, Artificial Sequence
  ENSG00000176868_4 (sequence is synthesized)
ccaccaagtggggtggaaacagtgaagagcaggtctcacatgcccgaagaccaccagccaactacacattggtggccctggtggagcatggctgggcgacagcgtccatccccaacactg

SEQ ID NO: 851383 - DNA, 120 bp, Artificial Sequence
  ENSG00000176868_5 (sequence is synthesized)
tcagaagagagctggctttctggaagcctacgtttcccattcatcacagaacacgacagagtgcacacatcctggtatccttggtcttcaaaggccatttccagcagaccctctaaccca

SEQ ID NO: 851384 - DNA, 120 bp, Artificial Sequence
  ENSG00000176868_6 (sequence is synthesized)
ggcttgttctgcaggaagtgaaaagggacaaatgaagatttgaggggcagcctgcagctacttggcacaggggaaccaaatggcaagggagaaggctccaccagagctgccatgctgccg

SEQ ID NO: 851385 - DNA, 120 bp, Artificial Sequence
  ENSG00000176868_7 (sequence is synthesized)
tagcaggccagaccacagcatggctgtgcacctgtgtgtgctcagcttccagaagctgtcactgaccatcgcgaaggcagatccagaagataggagggtgacagcacggctggagagcac

SEQ ID NO: 851386 - DNA, 120 bp, Artificial Sequence
  ENSG00000176868_8 (sequence is synthesized)
tgatgtcaacgtttaacaaggttccccagtgtccctagaagtggctggaaggaccacagctttggaactgaactgattttcttgaatgtgaaataaagtcatcttttgttttccccctta

SEQ ID NO: 851387 - DNA, 120 bp, Artificial Sequence
  ENSG00000176868_9 (sequence is synthesized)
aggaacctagagccagagtgtctatgaattccaagtttgaaaacaatatgaatgtttaaaaaaaaacaaaaaacgctgtggggagaagccaacagttaagaaaaccaaaccaaatgcagc

SEQ ID NO: 851388 - DNA, 120 bp, Artificial Sequence
  ENSG00000176868_10 (sequence is synthesized)
tggcattgaagtccccagtgggtagatgggcatctgagatgtatacccacactctggacttcatcccactctagtggatggtggacaataccgcaaggccactggtggctgagcaacgag

SEQ ID NO: 851389 - DNA, 120 bp, Artificial Sequence
  ENSG00000176868_11 (sequence is synthesized)
ccccagtgaccaaggcagagctgccagcgtcaggagggcaactttaacaggcaaaagtgagtgggttctgaccccccaatccctacctcagcagcaggaaagggaagtgctggtctccac

SEQ ID NO: 851390 - DNA, 120 bp, Artificial Sequence
  ENSG00000176868_12 (sequence is synthesized)
ctgttcccactaaggccccgtggtatcctggcagaagcctctgcatgtatctgcgctctgaggatgggggtttgaaaacaaaataagaccctacgtcctactaccttgagcttggctcta

SEQ ID NO: 851391 - DNA, 120 bp, Artificial Sequence
  ENSG00000176868_13 (sequence is synthesized)
aaaccacgggaaaggaagagatatattgcaccttaaaacatctctgcactaagaactgcatttcattagaccaaggaggggttggggcgctgggaggcctgaggcctgccctcagccccc

SEQ ID NO: 851392 - DNA, 120 bp, Artificial Sequence
  ENSG00000176868_14 (sequence is synthesized)
caagtctcatttaaaacctgcatctcagcgaagagactgcagctcaggtcacacacaggtggtgactgcaccgaacttcacatgcaatttcctggcctttcctgcacagaattaattcag

SEQ ID NO: 851393 - DNA, 120 bp, Artificial Sequence
  ENSG00000176868_15 (sequence is synthesized)
acattatatataaatagagcagtgaaacatttacttctttttttttcacctagacctacaacatcaatacatataaataaattctagtgttttttgtttttttatttggggtgggggagg

SEQ ID NO: 851394 - DNA, 120 bp, Artificial Sequence
  ENSG00000176868_16 (sequence is synthesized)
agaaaggaaggaaataccaggtaagagaaaagggctggagaacaggtgacctttttgtttttattttttctcaaacagcaagtactgtgggtctgataccaggttcacctgaagggtaca

SEQ ID NO: 851395 - DNA, 120 bp, Artificial Sequence
  ENSG00000176868_17 (sequence is synthesized)
tcttaacagcatccagaaggctttcttttgacaaatcacacgcaccaccgcatcaggtgggaggggtctggccatgcggctcaagtgtccaggtggagatgaatgtgtggctcccgcagg

SEQ ID NO: 851396 - DNA, 120 bp, Artificial Sequence
  ENSG00000176868_18 (sequence is synthesized)
cctgaactcacccaggaatggcttggcaaggagggccggtggggacagagagggctcatcccaggccccacaagcagccgcttgcagtgggagaaggaaaagcagacaagaagctcaggt

SEQ ID NO: 851397 - DNA, 120 bp, Artificial Sequence
  ENSG00000176868_19 (sequence is synthesized)
agggaatgcctggaactgtcgggtgggcagcccctggggaagggactcaagcataaaggcttgggataaagagggaaaagaccaggtgagggcaggaggggagctgctgaaagatgcagg

SEQ ID NO: 851398 - DNA, 120 bp, Artificial Sequence
  ENSG00000176868_20 (sequence is synthesized)
tgaacagtaaagcacctttcagtaaaactgccctttcccaggcagctctggggtgggcgctgttggtaggaggccgttctcccgcttccttagaattgtgagagcagtaagaagttactt

SEQ ID NO: 851399 - DNA, 120 bp, Artificial Sequence
  ENSG00000176868_21 (sequence is synthesized)
cagcagttcctaagatgctccttccccatgttctacactagacacagagcttagagcccaagcctgagcgctgtcctgcacccgtgagacgctgaaggcagcctctggtggggggtgcat

SEQ ID NO: 851400 - DNA, 120 bp, Artificial Sequence
  ENSG00000253187_0 (sequence is synthesized)
ataaccgaggccttgtctgcagagtaacacaccaggcccaaacccaccgccctcggcagccgccccacgcgggcccttcctcggcagacttcccaacctctacttgagccgcagaggaaa

SEQ ID NO: 851401 - DNA, 120 bp, Artificial Sequence
  ENSG00000253187_1 (sequence is synthesized)
agaatctggcagagacggaagatgaaaaaaagaccaacggaagaaaagaaagcaggaaggagcaaaggaaagaagaaaaaaagaaagaagagataaaagaggaagggaagacagggaaaa

SEQ ID NO: 851402 - DNA, 120 bp, Artificial Sequence
  ENSG00000253187_2 (sequence is synthesized)
gaaggaagaaaagagaggcgactcctagcagcggccgagcttacagagagaaggccaaagtcaagcccgtttgccaacctgcatgtccatgcctgtaagcccttctcttggccaaggaag

SEQ ID NO: 851403 - DNA, 120 bp, Artificial Sequence
  ENSG00000253187_3 (sequence is synthesized)
gtgtgtgtgtgtgtgtgtgtgtgttccagccttacaagagaatggcaggaggtccctgggcaggcgcaggcctccagtgggaggctcaggatggaagcgggcgcccctgaccttgaatgg

SEQ ID NO: 851404 - DNA, 120 bp, Artificial Sequence
  ENSG00000253187_4 (sequence is synthesized)
ccctgaccttgaatggcccaaagcccagaattcctaccacgcccccggcgtccgcgaaggagcagccaacctaaccctacctgctgtgaccaggtggaggtgtgtggtggaaggggaaag

SEQ ID NO: 851405 - DNA, 120 bp, Artificial Sequence
  ENSG00000253187_5 (sequence is synthesized)
ccggccggctggcaaagcgctgcggagaaagacacgaggctcctgagcagggaaagccgaggttgccaccgcaggcctggcacgaccagggccgtgatgccccgcccggcccgacccccg

SEQ ID NO: 851406 - DNA, 120 bp, Artificial Sequence
  ENSG00000253187_6 (sequence is synthesized)
cgcgcagaggtacctggagacgatttcaactgaagtaatgaaggcagtgtcgtgctgtcgagagaaaggtggatcccaacaacaggaaactacctaaatcaccgaccagttctggtgctg

SEQ ID NO: 851407 - DNA, 120 bp, Artificial Sequence
  ENSG00000253187_7 (sequence is synthesized)
gccgccgccaaggagagaaccctgccatcgcgcctggcccggcccagcccagcccctaggcaacctgcgcccgccagtgcaacagagtgccccaggcggccgcaaatgcgtcaaggaagg

SEQ ID NO: 851408 - DNA, 120 bp, Artificial Sequence
  ENSG00000253187_8 (sequence is synthesized)
ggaagccacaggccccagtaagccaaagtcaagcccgtttgccaacctgcatgtccatgcctgtaagcccttctcttggccaaggaagaaaggaagaaagaaaaaagaaacccaggggcc

SEQ ID NO: 851409 - DNA, 120 bp, Artificial Sequence
  ENSG00000253187_9 (sequence is synthesized)
tgtatcccctgattaaacacagcacagcactccaggcagacatgcccggtggcggctcctttgcaccattgacctcaggccagacacctcagcgccaacaatgggacctcggccttccgg

SEQ ID NO: 851410 - DNA, 120 bp, Artificial Sequence
  ENSG00000253187_10 (sequence is synthesized)
ctaggtttgccccaggctgggcaggaaaccagctcggccgaagacaggggccatttcgagcagtgggaccccaagacagcaaacccagcccagtcaggacttgacacttaggacaatatc

SEQ ID NO: 851411 - DNA, 120 bp, Artificial Sequence
  ENSG00000253187_11 (sequence is synthesized)
tatctctatagaattttagcatgatatggctttttcccccagaaaacaacaaataaaccagcaccaagcaaacacaaagaaacaaaaagtcagaacaaaccagccctgcacagatgtaac

SEQ ID NO: 851412 - DNA, 120 bp, Artificial Sequence
  ENSG00000253187_12 (sequence is synthesized)
aaagaaagaagagataaaagaggaagggaagacagggaaaagaaggaagaaaagagaggcgactcctagcagcggccgagcttacagagagaagggtggaggtgtgtggtggaaggggaa

SEQ ID NO: 851413 - DNA, 120 bp, Artificial Sequence
  ENSG00000253187_13 (sequence is synthesized)
gaacagggctccagcacaggtgcgagttcctgggcagagcctgaagacagagggaggggaccagcgctcgggaagtgaaaaaaccgcgtcgcctggagattcatcaggaaaaattaaagt

SEQ ID NO: 851414 - DNA, 120 bp, Artificial Sequence
  ENSG00000263307_0 (sequence is synthesized)
tttcgctctccggggcagtggctgctgtcagaatcccttctttgaggaggcacctgctcttccgcttttctccagctttccatgagctgtggggagtagcttgggtgtcctctcactctt

SEQ ID NO: 851415 - DNA, 120 bp, Artificial Sequence
  ENSG00000263307_1 (sequence is synthesized)
actagatagaaatcaagaaagcgccttgaggcgagagaagagtcccgtcaggaggcccagtggggtcctccacactccacggtccccgcctccgggaaggccgcgcgtggcatgggcaga

SEQ ID NO: 851416 - DNA, 120 bp, Artificial Sequence
  ENSG00000263307_2 (sequence is synthesized)
ataaggcacgggagccacccggagccacccgacctgccacgttaagcagcatgagggaccgaaagatgagtctgggccagtctcttaggagcttctggtctcgcagagaggcgggagatt

SEQ ID NO: 851417 - DNA, 120 bp, Artificial Sequence
  ENSG00000263307_3 (sequence is synthesized)
actccgaaagcacagcggcaacagactataaattccccaagagaagtttccaagagcaaaagcagctgaagaactgtgaactagattcaggtgcttttcctttcacttacagcaaatgag

SEQ ID NO: 851418 - DNA, 120 bp, Artificial Sequence
  ENSG00000263300_0 (sequence is synthesized)
gacgagctcacactgactcctgctgactgccctgctctgctgccgccgctgctcttggcaaccagggagcagagaaatggctgaagacagaagggtgtactctggcctgttgagatggct

SEQ ID NO: 851419 - DNA, 120 bp, Artificial Sequence
  ENSG00000263300_1 (sequence is synthesized)
aacttatattcagggcaaggcctgtactctctgccactgcctgcttctttgggaaagccttctgtaatcctatcagagacaggggtctcaccgtgttgcccagactggtcttgaactcct

SEQ ID NO: 851420 - DNA, 71 bp, Artificial Sequence
  ENSG00000263300_2 (sequence is synthesized)
aaagaactctttcaaaaaaggaaacaaacagtaccttgcattggaagaacaaacatcatgaaaagccatca

SEQ ID NO: 851421 - DNA, 120 bp, Artificial Sequence
  ENSG00000263301_0 (sequence is synthesized)
gtctcagcagcctcggaagtcacagtcagcccctaggctccctcagggtagagcacctagtgggacctgtgctggctccaccagatccagcagcctatgtactcctcagtggatcccacc

SEQ ID NO: 851422 - DNA, 120 bp, Artificial Sequence
  ENSG00000263301_1 (sequence is synthesized)
aatttccaagacgtggtttaaatatcttcaggcacctttccactgtattttggggcacactcctgccaaatccactcttgtaatctacagggtgtgggactttagctttgggaatattcg

SEQ ID NO: 851423 - DNA, 120 bp, Artificial Sequence
  ENSG00000259424_0 (sequence is synthesized)
gcggtcccgacccgggaacacgccgcatgcactcgggatcagcggctactgcggaaacccacccgcacctgtctcgggtcctcccaggcacgagaggtttccccaaagcgagactcccct

SEQ ID NO: 851424 - DNA, 120 bp, Artificial Sequence
  ENSG00000259424_1 (sequence is synthesized)
ggacttttacaaacagtgattggaccatgtgtcgcccttaatgtggtccggtttcatgactcaggctaattgatgccagtaataaatttttttaagatagctaataaaagagttgtgaat

SEQ ID NO: 851425 - DNA, 120 bp, Artificial Sequence
  ENSG00000259426_0 (sequence is synthesized)
aggcgaccgacgctgaaagggccgcggagtcgcgtgtcagggctggagggagatcttgaggtcctcccagtgactgacctggctcattctccgaaagtggttgacaggccactacgagag

SEQ ID NO: 851426 - DNA, 120 bp, Artificial Sequence
  ENSG00000259426_1 (sequence is synthesized)
ctcttgagagaagctttgtgacatgaaattcatcaaatgaagcaagattcatttttaaagaataatacaaagctccagagtaatatgcttaatccaaatgtttaaatagaatttaaaacc

SEQ ID NO: 851427 - DNA, 120 bp, Artificial Sequence
  ENSG00000259426_2 (sequence is synthesized)
acattttaagtaaatttaaaattaatgaaatatcaatagtttgccttaacaaggacttgcttgaaccatattctccttttaaaatcacacacacagaatcagtgtacatttagagaaatt

SEQ ID NO: 851428 - DNA, 120 bp, Artificial Sequence
  ENSG00000259426_3 (sequence is synthesized)
tccccagctgaataacatttttgacatgaattcattcaaaagacaccaaccattatgaatattttaggccatgataagctgtaaccacctccggcttatggtggttaggatgttgcagct

SEQ ID NO: 851429 - DNA, 120 bp, Artificial Sequence
  ENSG00000259426_4 (sequence is synthesized)
aaattatgttgctgaggctgaagatgatgcacagaagtatggctccagctatctgagagaaagagaagggcttggaggtggccaggagccattccttcctcagagtcttgtccagaagta

SEQ ID NO: 851430 - DNA, 120 bp, Artificial Sequence
  ENSG00000259426_5 (sequence is synthesized)
tggcttccatctgcatgtgcgtggccaggatcacacacacgtgaaacagctggtgactgtgacctatggcaaacacaaaaggccgtcaagatcagcaatgaaaaggaatgagtactgata

SEQ ID NO: 851431 - DNA, 120 bp, Artificial Sequence
  ENSG00000259426_6 (sequence is synthesized)
catgctatggcattcatgctaaaaatgatgctaagtgaaagaaaccagacaggagaccacatattatataaaatctccagaatatgcaaatccataaagacagagagtagattagaggct

SEQ ID NO: 851432 - DNA, 120 bp, Artificial Sequence
  ENSG00000259426_7 (sequence is synthesized)
gcctcaagcagggggtgagaataggtattaacagtgcatgggtctgatggaggggatgaaaatgttctaaaactgatgtatggtgaatttactgaaaatatcattaaattgtatacttga

SEQ ID NO: 851433 - DNA, 120 bp, Artificial Sequence
  ENSG00000259426_8 (sequence is synthesized)
aaaacaacttatccaccagtctcatttttcagatgaaaaaattaggcaccaaagttcatctcttgagagccagcactgatcagctcagagtctcacttcagtgctgagggagaagctggc

SEQ ID NO: 851434 - DNA, 120 bp, Artificial Sequence
  ENSG00000259426_9 (sequence is synthesized)
tgaattttctgttggccactaaccaagtggacctctccctactgccagttagtcacagatatgaccaggactcttcctccccaatgccatgctggacccagctcacatggtgcccttcac

SEQ ID NO: 851435 - DNA, 120 bp, Artificial Sequence
  ENSG00000259426_10 (sequence is synthesized)
agaggctgggagcccagtagagggtagtgggagtgacagggacagggacgtgctgggtggttggtgagaaaacaaatccaatgcctagggtcgggggcagctttgggggacaaccctcag

SEQ ID NO: 851436 - DNA, 120 bp, Artificial Sequence
  ENSG00000259426_11 (sequence is synthesized)
accccaggagtaaggaggcgaccacatgtgttatgggctgaatgatgtccctgaaaaatacatgtgctgaagtcttaagccccagaatgagaccatatttgcagataggatctttagaga

SEQ ID NO: 851437 - DNA, 120 bp, Artificial Sequence
  ENSG00000259426_12 (sequence is synthesized)
gcagataggatctttagagaaataattaaataaaaatgaagtctctaagatgggcctaatccactatgactggtgtccttataaggaaaggagtttaggccaggcgcggtggttcacgcc

SEQ ID NO: 851438 - DNA, 120 bp, Artificial Sequence
  ENSG00000259426_13 (sequence is synthesized)
ctgggcaacacagtgagatcccatctctagaaaaataaaaaattcagtgtttcacccccaggacctatctcagaagaaatattcaataaatgtgtcctaggaatgaaccggcctggccac

SEQ ID NO: 851439 - DNA, 120 bp, Artificial Sequence
  ENSG00000259426_14 (sequence is synthesized)
ctaggaatgaaccggcctggccacctctactattgagcaggagcagagttaggaagattgagcaggagcagagagggattcccacctccagcagactctgttagttaaggactgagaatg

SEQ ID NO: 851440 - DNA, 120 bp, Artificial Sequence
  ENSG00000259426_15 (sequence is synthesized)
ttccaaatcttgttaatgatctgtcatgaactattttctaggaaatgtcccccagaggggtgtttttcagctctgtacccctaggcccaagaggatgggacagaggtgaataaaatgtta

SEQ ID NO: 851441 - DNA, 120 bp, Artificial Sequence
  ENSG00000259426_16 (sequence is synthesized)
ttaagaaacctgagtggtagcaaaagaaggcccagggccatttttcctgcaaccccaaaacttgctacacagccacctctacttcattaagcggggctggggaggtggacatggcagtca

SEQ ID NO: 851442 - DNA, 120 bp, Artificial Sequence
  ENSG00000259426_17 (sequence is synthesized)
ggatgctggtgactccgattccctggcctctccttttcctcctttttggaaatctgttctctaagcattttactagttacaaccccttctgacacaacaaaagaagaaaaggagataaaa

SEQ ID NO: 851443 - DNA, 120 bp, Artificial Sequence
  ENSG00000259426_18 (sequence is synthesized)
ctttaatcagatcaaacaaactgcatctggccacatcttttagtgagaggagatggaaaatcaggaacaaaatgggcttggggagaagcaagcttcctgccctggtggggacaatgactg

SEQ ID NO: 851444 - DNA, 120 bp, Artificial Sequence
  ENSG00000259426_19 (sequence is synthesized)
cggaggaggcacattctgcagggacccgcccctccttccctagacagagcggggaaagaactctgccagcaggtggaaacccccgtgactctgacaccttctctccaccagatcacttca

SEQ ID NO: 851445 - DNA, 86 bp, Artificial Sequence
  ENSG00000259426_20 (sequence is synthesized)
ccccgtgactctgacaccttctctccaccagatcacttcaaacttaagtgagctcaggttcatctggaggatgactcggcctctgt

SEQ ID NO: 851446 - DNA, 120 bp, Artificial Sequence
  ENSG00000259426_21 (sequence is synthesized)
gttttgttctgcggttcccattgcagtgctgtgaccccccagaagctcaggaaaacaactgacttcctggtgttgccaacaggcagagaggagatgcagccagtccttaccctgtagaag

SEQ ID NO: 851447 - DNA, 120 bp, Artificial Sequence
  ENSG00000259426_22 (sequence is synthesized)
atggggagggagtcccaggtgtacggataagcaaaggcgaggacacgaatcaccttacagagtctgggcttctggatttcaagaaacctaaatcagggaaggaaagtggggaggaaatgg

SEQ ID NO: 851448 - DNA, 120 bp, Artificial Sequence
  ENSG00000259426_23 (sequence is synthesized)
aatgaaaagagtctcagcaaattgcatacgcacatgcatgcacaccgagggcctggtcatcaacagaggacaagcatttttctacaagctcctgtggccagcagcttctccaccagcctc

SEQ ID NO: 851449 - DNA, 120 bp, Artificial Sequence
  ENSG00000259426_24 (sequence is synthesized)
gtccattcctcccaccccaatggaagtgacaaaacttcagatgcaaaaagatctccagggacaccatctcctgaccatgggaagcagtggtgtccagactaagccagaaaggaggcgctg

SEQ ID NO: 851450 - DNA, 120 bp, Artificial Sequence
  ENSG00000259426_25 (sequence is synthesized)
ggcagaaacccttcaagggccaagttatgtaactgccaaagaaccttttaaaactctagttgctacagggacagggaacgggtagggggaatcgggggatccactgccacagactcttgg

SEQ ID NO: 851451 - DNA, 120 bp, Artificial Sequence
  ENSG00000259426_26 (sequence is synthesized)
ggggcacactctgcagaggctgagatgcacccatctagttggagcccaggtattatcatgcaggagacctgggttcaagtaggtgtttgacccttggagagctttctggaatatttatac

SEQ ID NO: 851452 - DNA, 120 bp, Artificial Sequence
  ENSG00000259426_27 (sequence is synthesized)
aactggcctgtgtaagcggatgggctcggcctcaaggacagggtgctcggctgaaaaaaaagctagcggcgatcaccggtgccagggctctccagaaacggagcccatctaaccaatgcc

SEQ ID NO: 851453 - DNA, 120 bp, Artificial Sequence
  ENSG00000259426_28 (sequence is synthesized)
cagcacactcgctctgctccacacacgagaccacctccgacccgcactaagttggccaactgcactctggaggcggcggcagccagcgagggagaagggaaaggctgtcccgggaccccg

SEQ ID NO: 851454 - DNA, 120 bp, Artificial Sequence
  ENSG00000259426_29 (sequence is synthesized)
gggaaaggctgtcccgggaccccgaggaggactgccccgcccccgggaaccgggtgcggcgtaaaacaaccccggctccgggccgacccttcctggccccttggaggcccaggcggggcg

SEQ ID NO: 851455 - DNA, 120 bp, Artificial Sequence
  ENSG00000259426_30 (sequence is synthesized)
tccgcgcccaggctcccgcggagcggccacacgtggaggttcccactttggggtcgcggccgcagcagcaccgggcgggatgctgtccgcgctgcccgcgtacggccgcggcctgagtgg

SEQ ID NO: 851456 - DNA, 120 bp, Artificial Sequence
  ENSG00000259426_31 (sequence is synthesized)
agacgcctgcccccagccccgaggcctcggcccccgtccgccctctctccctgctcggcggcctcgtactcacgctgacttcatggcagcaggctccacgccgcccaaacgcgcatgcgg

SEQ ID NO: 851457 - DNA, 120 bp, Artificial Sequence
  ENSG00000259426_32 (sequence is synthesized)
gacggctggctggcgaagactgcgggacgttaggaccggcagcaagaactagaacttcgcggctaaggcgcggtgctctgcgaagccggcggcgacgctaagagcccaggtgagctcccg

SEQ ID NO: 851458 - DNA, 120 bp, Artificial Sequence
  ENSG00000259426_33 (sequence is synthesized)
cctggcgcatttcaaacgggccaatcagcgcccgtccgcagggagaggcaggacctccgcggaagtgacttcgctgccggaagtggcgcttgtctcctaggcgaccgacgctgaaagggc

SEQ ID NO: 851459 - DNA, 120 bp, Artificial Sequence
  ENSG00000259420_0 (sequence is synthesized)
agaaagaagcctttccgccttcctactctgtaaccctgcttttcgtttcctgtgtgtcctttcagagctccttttgctttcaaaagcaaatacaaatacgggcagcttctgaatggatgg

SEQ ID NO: 851460 - DNA, 120 bp, Artificial Sequence
  ENSG00000259420_1 (sequence is synthesized)
ccaagtgactctggagcttccgcgctgtgtgagggctgggctttctgtccctgttcaccctcgaacccaggcttcagccaccgcacgggagaagatggttcagaccacacctctaccctg

SEQ ID NO: 851461 - DNA, 120 bp, Artificial Sequence
  ENSG00000259420_2 (sequence is synthesized)
actcagcacacacagctgtaccgtcaggggctgcaaaccaacatctctcagggccttcctggaagctgcggctggactccccttgtactccaggggagcatccctggaggcccaggtcgg

SEQ ID NO: 851462 - DNA, 120 bp, Artificial Sequence
  ENSG00000259420_3 (sequence is synthesized)
agaacagggaggaagaatccagatgtggctcactgggctctgtggatctggcactggaacagctgtccaggctttggggcccccgacacccctgctgctctccctcaggccccagatctg

SEQ ID NO: 851463 - DNA, 120 bp, Artificial Sequence
  ENSG00000259420_4 (sequence is synthesized)
cttgggcccccagtgggcaaccgctcggtgctggcccaccacagggaaatattccggtggaggtaagctctgtcctgttctcagagagccctggccaggcctggtagataaattccaggc

SEQ ID NO: 851464 - DNA, 120 bp, Artificial Sequence
  ENSG00000259420_5 (sequence is synthesized)
caagccataggatttggacactggggctacaggaattcaagaaagaagaataaagaagcagccttgagtattagtgaatgtggcctgacattggcagatggctttagcacagccttcctg

SEQ ID NO: 851465 - DNA, 120 bp, Artificial Sequence
  ENSG00000259420_6 (sequence is synthesized)
gaggaaaaggaggagggagactgcactgaacgggtttctgaaacttgtgccctgacgccaagcataccaccacatcacttataggatgtgcaagtataaacaagggattttgccgctctg

SEQ ID NO: 851466 - DNA, 120 bp, Artificial Sequence
  ENSG00000259420_7 (sequence is synthesized)
ttccggtggagggggatctgagactgccttggccaatagaatgcagccaatgtggtgctatgcgtctgcctggcctcggccttgagagacctgggagcttccatttatgtcatcttggag

SEQ ID NO: 851467 - DNA, 120 bp, Artificial Sequence
  ENSG00000259420_8 (sequence is synthesized)
tgctgagttaccttaaagaagtctaaaactcagagagaccatgtggaaagagaggagccagcggccctgcagtccttccagcctcccagctgaggcaacagacatggtcagaagccatct

SEQ ID NO: 851468 - DNA, 120 bp, Artificial Sequence
  ENSG00000259420_9 (sequence is synthesized)
aggaccttcagcggcagtgaagtctccccagtcgatgccacacagaactgagatgagctgttctcaccaagctctgcccaagttccagagctaggaacaaataaacagttgttttaaacc

SEQ ID NO: 851469 - DNA, 120 bp, Artificial Sequence
  ENSG00000259422_0 (sequence is synthesized)
atcacagcagcggggagtctggaagggactgcagaaggcatggccagggctttggaatggtatgactgaccagcagagagacctcctcccctcccgggatcctctaggcacccctcccca

SEQ ID NO: 851470 - DNA, 120 bp, Artificial Sequence
  ENSG00000259422_1 (sequence is synthesized)
agtaggaatctgttaagcatgaggtgtgtccacaaccagaagagatcataggaatgagggaagcagtgaagcctgtttccctgtcaaagccagagggccagtgtgatccaggagggaagg

SEQ ID NO: 851471 - DNA, 120 bp, Artificial Sequence
  ENSG00000259422_2 (sequence is synthesized)
cactggaatgagcaacaagagacctgttttcgtcctggcctcataactgctgtgccacgttgggcccacctctccctttctctgagcctcagatgccccatctgccaaatcctggattgg

SEQ ID NO: 851472 - DNA, 120 bp, Artificial Sequence
  ENSG00000259422_3 (sequence is synthesized)
gccagctgccctccccagggacctttcatctgttatataaggtgattctggagcaccttgcatgtgggcctgtgacaagaaatgaactgccatgtagcacagaaggtgaaatgaatcaga

SEQ ID NO: 851473 - DNA, 120 bp, Artificial Sequence
  ENSG00000259422_4 (sequence is synthesized)
tattcatgcaagaaactggccaacaggctcacctgagagtctccacagggtcacgatgtcgctacctagagggaatctgtctttatttattggctctttcctgtgcagaatgcaagggag

SEQ ID NO: 851474 - DNA, 120 bp, Artificial Sequence
  ENSG00000259422_5 (sequence is synthesized)
tctccctccggctgagacccccgggaaggaggccacatgtggaggtgacttgaaccaggacggcaggaacctggggtccccggggggctccggacagaggtcatggtggaaaccctggga

SEQ ID NO: 851475 - DNA, 120 bp, Artificial Sequence
  ENSG00000259422_6 (sequence is synthesized)
ggtggggttgccgttaggattttctcctggccacgtggcgcatgtgtggctgagcctgggaccggacccttccctgcacaccgagctgcacttctacagagctctcagccttgctgcggg

SEQ ID NO: 851476 - DNA, 120 bp, Artificial Sequence
  ENSG00000259422_7 (sequence is synthesized)
atccagcagccaccccctcctgagtaccccaatccccctcctctgaactcctctgtcccactcacatgggagcagccacctcatcttacagaggaaggaactgagggcagaggggtggcc

SEQ ID NO: 851477 - DNA, 120 bp, Artificial Sequence
  ENSG00000259422_8 (sequence is synthesized)
caacttggccggagtccggcggggtgggagcagcagggctaggccttgaatgcaggtctctggattcccgacagggtgcccctggcccagctgccagtcccccttgcctctgctgagccc

SEQ ID NO: 851478 - DNA, 120 bp, Artificial Sequence
  ENSG00000259422_9 (sequence is synthesized)
tctttctggggccctgggcgtcccgcgtggcaatgggcataccatggtgcccagcaaccctcagcagacagaattagcgactggctttagagaccgaccatgtctccgagaagactctga

SEQ ID NO: 851479 - DNA, 120 bp, Artificial Sequence
  ENSG00000259422_10 (sequence is synthesized)
tgaactgagggggcgacttggcagactcaggttggggagctgaagagtcaccgtgctacagtggaaagaaccctggcctgggagtcagggttgagtccatgcctggctgggctatacatc

SEQ ID NO: 851480 - DNA, 120 bp, Artificial Sequence
  ENSG00000259422_11 (sequence is synthesized)
agtgaacctggagatgtgtccccttctctgggcttcaggttccccatgagtccaacaaggggctggaggaactccctgacctctggtgcccctgcagctctagcaacccatggctttagg

SEQ ID NO: 851481 - DNA, 120 bp, Artificial Sequence
  ENSG00000259422_12 (sequence is synthesized)
cactaccagtgtccccagcaagaccacggacagagccgaaagtggcagtgcattaccccttgctcctgacagatctgcgtcagcctctccagctgctcgtcttggatgaccttggccttc

SEQ ID NO: 851482 - DNA, 120 bp, Artificial Sequence
  ENSG00000259422_13 (sequence is synthesized)
tcgtactgctggataaccatctccatctccagcttcactggcaggacgtaggctggaagacagagacagccctgtaaagaattcagcagtggcagggcttggactagggaagggcgggcc

SEQ ID NO: 851483 - DNA, 120 bp, Artificial Sequence
  ENSG00000259422_14 (sequence is synthesized)
cagcattcaggcagcagcaggttcgaggccctgggccatttctgtggatctagaaggggaaatgtccaggtacccgagagcatccagaaagtacagagggccacagccttcgctcatggt

SEQ ID NO: 851484 - DNA, 120 bp, Artificial Sequence
  ENSG00000259422_15 (sequence is synthesized)
gtccagggtagctgttttcctgttttccatagtgctagaacccatacttttgggctgtgtgcacagctgcctggaataaagactattttccagcctcctttgcagctatgggtggccaca

SEQ ID NO: 851485 - DNA, 120 bp, Artificial Sequence
  ENSG00000259422_16 (sequence is synthesized)
agaccaccttctggaccataggatgctagtggaggtggcatgcagcagctgcaggagccttcttcacaaaggagctggggccagtgaggatggggcggccctggagcctgcacacactgg

SEQ ID NO: 851486 - DNA, 120 bp, Artificial Sequence
  ENSG00000259422_17 (sequence is synthesized)
cggaaaggaaaacggggcaaccacttagggaaacggtttgtccgtttttcagagtgttaaacagagagtgaccatatgacccagaaactccattcctaggtaccttaggggaaggaaaac

SEQ ID NO: 851487 - DNA, 120 bp, Artificial Sequence
  ENSG00000259422_18 (sequence is synthesized)
atgtgtctacacaaaactcgcacatgagcattcataacagcattattcctaacagtcaaaaagtagacataacccaaatgttcatcagccgatgaatgcgtgaataaactgtggtctagc

SEQ ID NO: 851488 - DNA, 120 bp, Artificial Sequence
  ENSG00000261816_0 (sequence is synthesized)
tgcagcctcaacctcctgggctcaagctatcctcctacttcagcctcctgagtaactgggactgcaggagccatgctcaccccgaacgcttccaccagctcaggctgcatggtttcaaca

SEQ ID NO: 851489 - DNA, 120 bp, Artificial Sequence
  ENSG00000261816_1 (sequence is synthesized)
atgtctgatgttcagggaatgaagaagtgaagaaagcaggaatgaatgaaggaaggaagcagccccagcaattggttcccaggcgagaagctggtggggttctgacttctatcccgattc

SEQ ID NO: 851490 - DNA, 120 bp, Artificial Sequence
  ENSG00000261816_2 (sequence is synthesized)
acacccttttctcctgccctcagggcggtccttctcctgctcttgttcattcatccccttcagccctttcgtattctcttctgtagccgaaccacaaaaaataaatacattagaaatgtt

SEQ ID NO: 851491 - DNA, 120 bp, Artificial Sequence
  ENSG00000261817_0 (sequence is synthesized)
cctgatcataagtcatgctagggcaaggactgccctcctgggaaatttgaagaccttctggccaatgaatgaggtgtaatttctcagaataattttactctctgatgaaaggagggaata

SEQ ID NO: 851492 - DNA, 120 bp, Artificial Sequence
  ENSG00000261817_1 (sequence is synthesized)
aggtaacgagatgttccctccctcccttctcacattggaccttgtgtgaggacgggacactggagctgctgtggccacctggaccaagagaatcaaggaggagctgacccaaaccctgat

SEQ ID NO: 851493 - DNA, 120 bp, Artificial Sequence
  ENSG00000261817_2 (sequence is synthesized)
cattgtccgcctctggagtccttgttacaagagaattataaactcctgttgttgagactttgagaccccatggcggagacggagggtccttccactgcagcacaaagtggggcacttgca

SEQ ID NO: 851494 - DNA, 120 bp, Artificial Sequence
  ENSG00000261817_3 (sequence is synthesized)
gtcacatcgcctgtgttcacggtggagcggatctactgcccttgtagggctgatgcattgcaaggggctgaacctcctgcactgtctcctcttggtgtaaataaacactgtgccacctga

SEQ ID NO: 851495 - DNA, 120 bp, Artificial Sequence
  ENSG00000261815_0 (sequence is synthesized)
agaaaaaacccagctggctaaaccggagccacaagctcattcttgaagctgagggagtgcgtccacccccatttgaatcatatggactgatggggagatccccaaagaaaacttaaagaa

SEQ ID NO: 851496 - DNA, 120 bp, Artificial Sequence
  ENSG00000261815_1 (sequence is synthesized)
ctattagcagaagaagagaaaaacgaaagtacgtcagctaaaatagcaaaggtacatttcagttgatgaacacgcccagcatttctgaaaagcattttgccaagtacctatacaactcct

SEQ ID NO: 851497 - DNA, 120 bp, Artificial Sequence
  ENSG00000261815_2 (sequence is synthesized)
atgcatctctgtaagcctcgctcaagaggccctcccccaaaaagcacccctatcatcacccttcaactttctccttgctctgaattccaatggcacacaatttggcagcctgtcttctct

SEQ ID NO: 851498 - DNA, 120 bp, Artificial Sequence
  ENSG00000261815_3 (sequence is synthesized)
ctcccagagaggtcttcagagatgaggaccatatatcaccctcctcttatactgtctgtccaaagcaatgtcagctggaacaaatcagaacacataatgtgcacctggaaaacaagcctc

SEQ ID NO: 851499 - DNA, 120 bp, Artificial Sequence
  ENSG00000261815_4 (sequence is synthesized)
tttctaaacagggaggtgaatttcaactcaaactgaggacaggctttccaatatgcagagcttcctagcaaatgtgagacaaggactggacctctctgattagggaggcaccagaggaga

SEQ ID NO: 851500 - DNA, 120 bp, Artificial Sequence
  ENSG00000261815_5 (sequence is synthesized)
aatttaaagttttgtcttaaaccttgtcctactgaaacagaggcagatttggagagtgctcttgggagatacacctgtagagacataaggaagattagattaaacagaaggaaaagctga

SEQ ID NO: 851501 - DNA, 120 bp, Artificial Sequence
  ENSG00000261815_6 (sequence is synthesized)
cccacaaggaagcttcagctgaggatgcagccaatcctaaaggcagttctggaaccaggatggctcttcagagttgttacaaattgagacaaggtgctggtattttgcatcagccagtaa

SEQ ID NO: 851502 - DNA, 120 bp, Artificial Sequence
  ENSG00000261815_7 (sequence is synthesized)
ttggctgtgagctctcctatgggcgggtaaggcagttccccactcccaagggcaacttccagggagggatgcagctgtgagcccatgcacctgacattcccagcaatggggaatggatat

SEQ ID NO: 851503 - DNA, 120 bp, Artificial Sequence
  ENSG00000261815_8 (sequence is synthesized)
gttgctcttgaggagtggatgtggatggagcatccagcagccattacctgttccatctaacctaagatattttgagatgcccacttgtttttgagacttaatgagaattatttggcattc

SEQ ID NO: 851504 - DNA, 120 bp, Artificial Sequence
  ENSG00000261815_9 (sequence is synthesized)
tctatctctgaactgctcatgccaaatcttagtacccgatataagtggagtctggttgcatgatcagttgctcagatcaaagtgggaaaaataagaaaataaatagaaatttggatttga

SEQ ID NO: 851505 - DNA, 120 bp, Artificial Sequence
  ENSG00000261810_0 (sequence is synthesized)
agctatccatgcagtccgggaggggagccagagagaagcaagcatgtgcgaccagcattaaaggggcagctgcagtcagtcctctctggagccctgtccttgttcttcccaacacagcct

SEQ ID NO: 851506 - DNA, 120 bp, Artificial Sequence
  ENSG00000261810_1 (sequence is synthesized)
tgtgcgtatgctgatgctgcatgaaatccctgcttcttcatcgttcgtcacaagagcccatgatgccttgtcagatgacacctctgatcccaggaggatccatgccgtggagacaaacaa

SEQ ID NO: 851507 - DNA, 120 bp, Artificial Sequence
  ENSG00000261810_2 (sequence is synthesized)
ttgccttgatgacctgtcatctcatagacacctccctggatggatggagcactggaatttgggctaccagagagttccgcctcggttagcagaagtaatttgcccgtgtccttatgcaac

SEQ ID NO: 851508 - DNA, 120 bp, Artificial Sequence
  ENSG00000261810_3 (sequence is synthesized)
atgctgacctggtcggtcatttaaatgaaagggcacggcagccatgcaaaactctatctccctaatgcttttcttcccattgctttcttcttcttgaaatataaaaacgaccctgttgta

SEQ ID NO: 851509 - DNA, 120 bp, Artificial Sequence
  ENSG00000261811_0 (sequence is synthesized)
aggagaaagtggtttgcagaaaagatgaggtgctggcctgaccacggtgcgtgccccttggtcaacaaacagaatctgaagaatccaggaaatcacaaaggattctaagaggtcacaaag

SEQ ID NO: 851510 - DNA, 120 bp, Artificial Sequence
  ENSG00000261811_1 (sequence is synthesized)
actgatgttatcaggccccaaagcttctacatgagtgtcaagagaaaaaataccttgatcactcaggtgccctctcctcagtttttctctgtccaggcttgaagaactataaccatttcc

SEQ ID NO: 851511 - DNA, 120 bp, Artificial Sequence
  ENSG00000261811_2 (sequence is synthesized)
ctccaggatctcttgagagactgccagagccagcagccccaaggatacttcgaacagtgggcactggtgcaattctataaaaagaaaccagaaaccatttagatgtgtgtcaggaagaag

SEQ ID NO: 851512 - DNA, 120 bp, Artificial Sequence
  ENSG00000261811_3 (sequence is synthesized)
cacttccagatgcttgaggaaagatgcaagatagcaaggtgggaatctgagaaacaaggagtttaaggattttgccataagtcacctagaagacgcagggtgaggaagggatttgaacct

SEQ ID NO: 851513 - DNA, 120 bp, Artificial Sequence
  ENSG00000261811_4 (sequence is synthesized)
gagcatactgactccagagccctcttagctgctccgtggagcaggggctttctgcaaagtagaggttctgatcatctactgttgcataataaaccaaaatttagtggtttaaaaaacgca

SEQ ID NO: 851514 - DNA, 120 bp, Artificial Sequence
  ENSG00000250706_0 (sequence is synthesized)
agtggcaggtcttgcccgaaggtgtatttcaggaagacgggggatgagctgaactatgccttctccagagcaggctagacatgtgggaagtaatctccaggctggatgaccattgaatca

SEQ ID NO: 851515 - DNA, 120 bp, Artificial Sequence
  ENSG00000250706_1 (sequence is synthesized)
cctgggagcatcttgaaaagaagagattcatgggcctcccgctggatccaccgaaccagaacctcctgagaaaaaaggaataaagcaagtccatgtcagctggagagaaaatattcctat

SEQ ID NO: 851516 - DNA, 120 bp, Artificial Sequence
  ENSG00000250706_2 (sequence is synthesized)
aaaacagtgaaaaaaagactaatggaaactgcaagaggctggaaggtgttaatacctatccttacccatcattatggtcacggccaatgctcccataacaaaagacagtttcaggtatgt

SEQ ID NO: 851517 - DNA, 120 bp, Artificial Sequence
  ENSG00000264825_0 (sequence is synthesized)
aagttcccttcttgcttttaaacagcttctcagctccttttgttttaccactagctttgcagagacttgttaggaatttacagcttgtgattgcttcacttttttggaaatggctctatg

SEQ ID NO: 851518 - DNA, 73 bp, Artificial Sequence
  ENSG00000264825_1 (sequence is synthesized)
gtgattgcttcacttttttggaaatggctctatggtttcaaacaacattaactttaaaaaattaacaatgctg

SEQ ID NO: 851519 - DNA, 63 bp, Artificial Sequence
  ENSG00000264825_2 (sequence is synthesized)
caggtggatcaccggaggctggtcttgaattccggacctcaggtgatccacttttcaagtata

SEQ ID NO: 851520 - DNA, 120 bp, Artificial Sequence
  ENSG00000250704_0 (sequence is synthesized)
tactctgttcaaggccaagagcattctccaagtaactgatatcttcaacagaaggtggttgatgagggccaaaagaagaggttctcaacatgtggagcagcatcacctagcaacttatta

SEQ ID NO: 851521 - DNA, 120 bp, Artificial Sequence
  ENSG00000250704_1 (sequence is synthesized)
ataattaaggattcacaggaaagtgcaaagaaatggacagagagattccatttgcccttcatccagcttcccctccatgttaacatcctgaatgagtatataaagcaatttcaaaaccaa

SEQ ID NO: 851522 - DNA, 120 bp, Artificial Sequence
  ENSG00000264829_0 (sequence is synthesized)
gggaaaccgtccagagcaaacgagaacagcagtgccacctcctgttaatttgctgcttaccgaagagacaagatcagaaacttgaagttagagacgaaaaaataatggaacacaggaaac

SEQ ID NO: 851523 - DNA, 120 bp, Artificial Sequence
  ENSG00000264829_1 (sequence is synthesized)
aggaccaagtctctctgcccaggtgggccagagttagttcttactcacgctcccaaacatgggactctgtgctcacaggtaaccccaaacatcagagcaataaaaaccagggcaattcca

SEQ ID NO: 851524 - DNA, 120 bp, Artificial Sequence
  ENSG00000250708_0 (sequence is synthesized)
agttggcaggatggcagcagcagacacacagggtggttaagaacaacaaacacaggtaacatctgctgaaggcttctacaagctgagcactaacaggcaaaccacttcaatagaacatgg

SEQ ID NO: 851525 - DNA, 120 bp, Artificial Sequence
  ENSG00000250708_1 (sequence is synthesized)
ctggcggccatatggacatatttgaatccaacaattaattcagcaaagaaagctgcttgtggcaagttttgaatgtgccattccaggtagtgctttgatgataaatgaggagaagattgc

SEQ ID NO: 851526 - DNA, 120 bp, Artificial Sequence
  ENSG00000250708_2 (sequence is synthesized)
aaactgaggcatagaacatttgggaatgaatctaagactacacatctagaatagcagagttacaggaatgcagatgtgattcctatggatgagggtaacctagaggctagaagaacaata

SEQ ID NO: 851527 - DNA, 120 bp, Artificial Sequence
  ENSG00000250708_3 (sequence is synthesized)
ggacagaagaagcctgggtccctgaacaaccttgtggagcatagacacctacgtggcctggactgccagctcacaatgggcctctctgtgagagaaggaaacttccctcttgtttaagca

SEQ ID NO: 851528 - DNA, 120 bp, Artificial Sequence
  ENSG00000250708_4 (sequence is synthesized)
actgtgcttttgagaatctcttggtctataccctaatgaataaggccatcataaatggatatcaaagtaaggaaatttgtgtaaatgatttaataaaacattacctcaggtatgaaataa

SEQ ID NO: 851529 - DNA, 120 bp, Artificial Sequence
  ENSG00000250708_5 (sequence is synthesized)
atgccaaattaatcacacttcttaaacacatctcttgaccggggtgttctcaccatgccctttctacaaacaaaaagaatattaaataaagttcgaacgaatcgagtgacgctgaacaat

SEQ ID NO: 851530 - DNA, 120 bp, Artificial Sequence
  ENSG00000250708_6 (sequence is synthesized)
aaacctattttgactgctaattgctaaataaagaatgaagatgtggagacctggagacaggtggcacctcgtgcttcctccgaagggagagcccatttcctaacagctggatcaaaggca

SEQ ID NO: 851531 - DNA, 120 bp, Artificial Sequence
  ENSG00000250708_7 (sequence is synthesized)
cctctccaagcatgccaaattaatcacacttcttaaacacatctcttgaccggggtgttctcaccatgccctttctacaaacaaaaagtcctacaagagttggagccatcctctcctcat

SEQ ID NO: 851532 - DNA, 120 bp, Artificial Sequence
  ENSG00000250708_8 (sequence is synthesized)
cttctactttctgccttcttctgggacacgctattgatcacgaagtatcttatccttgaaaaatctcctctcttcaactcgagtactactgcagaaagcagcaacttggcggccttttat

SEQ ID NO: 851533 - DNA, 120 bp, Artificial Sequence
  ENSG00000250708_9 (sequence is synthesized)
ggatgggtgttactgaaccccatagagatttctgaggtctttcttgagcaggtctggcagctgagccctcttcgtcaggagttctcaatggcccccaaggtgcctttgtttcctcaaggg

SEQ ID NO: 851534 - DNA, 120 bp, Artificial Sequence
  ENSG00000250708_10 (sequence is synthesized)
ataacacgatgcccagcacatagaaagcatacaataagtgtttgttggataactgtggacagttcagtcgaccagcaaattcctcttaggactctagatgcacggagagtggccagatta

SEQ ID NO: 851535 - DNA, 120 bp, Artificial Sequence
  ENSG00000250708_11 (sequence is synthesized)
atatgctcatgactttataagtaggcattctgcatgtatgtgcaaaacaaaatagaacttaggaggataaagcatcctgtaaaatgtgggacttaagactgtatcagggaaaggagaaga

SEQ ID NO: 851536 - DNA, 120 bp, Artificial Sequence
  ENSG00000250708_12 (sequence is synthesized)
aaagaaaaatataaaatctgatttttaaaattatgactactggagtgtgcagaggttttcaaatgacttgttggtgaattgtaaacctataaaatgtgtgaagccattttataaagaaaa

SEQ ID NO: 851537 - DNA, 120 bp, Artificial Sequence
  ENSG00000250708_13 (sequence is synthesized)
attaatcacacttcttaaacacatctcttgaccggggtgttctcaccatgccctttctacaaacaaaaagaaggcaatgtatcgcatcctgtattaccttcccctgacctcatagcttcc

SEQ ID NO: 851538 - DNA, 120 bp, Artificial Sequence
  ENSG00000250708_14 (sequence is synthesized)
gcatgccaaattaatcacacttcttaaacacatctcttgaccggggtgttctcaccatgccctttctacaaacaaaaattacaggaatgcagatgtgattcctatggatgagggtaacct

SEQ ID NO: 851539 - DNA, 120 bp, Artificial Sequence
  ENSG00000250708_15 (sequence is synthesized)
gacggggtttctccctgttggtgaagctggcctcaaactcgcgacctcaggtattcgatgagatcaggagcatgcccagctctccactgcgggcttcatgtaagaggagagccatgataa

SEQ ID NO: 851540 - DNA, 120 bp, Artificial Sequence
  ENSG00000250708_16 (sequence is synthesized)
tgtattgcattattcttgtacagtaatcaggctaaacgaagggagaaactttctcatgctgctgatgctgactgcttttggataactctttcatactgaactggactgctgcgttcttga

SEQ ID NO: 851541 - DNA, 120 bp, Artificial Sequence
  ENSG00000250708_17 (sequence is synthesized)
aaaaccaggaagaagaaaatcaccctctaaaactgaaatttccagagacttgcctcaacccattggctctctacatgctgccctcctattaggaaatagatttgttacttacattccccc

SEQ ID NO: 851542 - DNA, 120 bp, Artificial Sequence
  ENSG00000250708_18 (sequence is synthesized)
ctccactcaccctccactaccagacaaagctaaatgggctcaggggaaataagtaactgtgatgttcctcagagatctgttatgtaccaatgataaatggaaaatgaaaattactaacat

SEQ ID NO: 851543 - DNA, 120 bp, Artificial Sequence
  ENSG00000250708_19 (sequence is synthesized)
agttggcaggatggcagcagcagacacacagggtggttaagaacaacaaacacaggagtcctcatgaaactagcgtggacaacactagattgaccactggctaccaaccggcgtaggaat

SEQ ID NO: 851544 - DNA, 120 bp, Artificial Sequence
  ENSG00000250708_20 (sequence is synthesized)
tcaacctacatgaagactcagagtcaggacccaccctgcacccccaaactgttgcgctttcccagagcccctgccgtgccgtccttccctgactttctagttcccacccctgaccagctc

SEQ ID NO: 851545 - DNA, 120 bp, Artificial Sequence
  ENSG00000250708_21 (sequence is synthesized)
ttgggctctctgcactgagctctctgccctgcaactttagtacatgggatacaagcttcatcagctccctggcccttgttcagaacagctgctcgccgtgaagtggacatgcatgtgcta

SEQ ID NO: 851546 - DNA, 120 bp, Artificial Sequence
  ENSG00000250708_22 (sequence is synthesized)
gaacatctttccttgtactgaggaatgataaagcgctggatgatgcccatcctgcttactgtctctggggacaaattgggaacatacaaggtgccaatcccagatgaaatggcatgatgc

SEQ ID NO: 851547 - DNA, 120 bp, Artificial Sequence
  ENSG00000250708_23 (sequence is synthesized)
tagcgtctgtgtcttgggggctctgaatactccaggtctggttctgcccctgaggactgaggagatcaatatctccactcagaatgtcctagtagtaaaactagtagtaaagctctgggc

SEQ ID NO: 851548 - DNA, 120 bp, Artificial Sequence
  ENSG00000250708_24 (sequence is synthesized)
catccccactttctaatgggtaggcctggggtgctgcttaagaatctgcatttgtgagaagtgtccaggagatgttgatgccactggtggggaagaatactttgacagcgactgctacag

SEQ ID NO: 851549 - DNA, 120 bp, Artificial Sequence
  ENSG00000250708_25 (sequence is synthesized)
aatatagcatttctaataggattcaatgaaaatttccactttcctttgatacatttctaaaatcaatcttttcgaacctgtatcccaagaaaatgtggtgcatatacaccatgggatact

SEQ ID NO: 851550 - DNA, 120 bp, Artificial Sequence
  ENSG00000250708_26 (sequence is synthesized)
acatagtcataaaaaaaaaaaaaacaaaatgatgtcctctgcggcagcatggatgcagctggaggccattattctaagtgaatcaatatagaaacaagaaaccaaataccacatgttttc

SEQ ID NO: 851551 - DNA, 120 bp, Artificial Sequence
  ENSG00000250708_27 (sequence is synthesized)
acttataagtggaagccaaatactgggtatatatgggcctacagataggaacaataaacactgaggactccaaaaaagaagagggagatgggcaagggtggaaaaaccacctattgggta

SEQ ID NO: 851552 - DNA, 120 bp, Artificial Sequence
  ENSG00000250708_28 (sequence is synthesized)
cgatgttcactatttgggtgaggggctcaactgaagcccaaacctcagcatcatgcaatatgtccatgtaacaaacttgcacatgtaccccttgaatctaaaataaaatgaaaaaatccc

SEQ ID NO: 851553 - DNA, 120 bp, Artificial Sequence
  ENSG00000250708_29 (sequence is synthesized)
agtgtgatctcacccatcatgacctcaaggtccttctttgagggatcttgccaggaagttcagttggcaggatggcagcagcagacacacagggtggttaagaacaacaaacacagtatt

SEQ ID NO: 851554 - DNA, 120 bp, Artificial Sequence
  ENSG00000250708_30 (sequence is synthesized)
aggaagttcagttggcaggatggcagcagcagacacacagggtggttaagaacaacaaacacagattcctcttaggactctagatgcacggagagtggccagattaatacagactggcaa

SEQ ID NO: 851555 - DNA, 120 bp, Artificial Sequence
  ENSG00000250708_31 (sequence is synthesized)
aagaagaacttggcaaagtgatttgatcacacacttctcaccctcacatctcctgacagttcccctaatccctgccccacttccccgccatgggcttccatcaggaaactccttgatatc

SEQ ID NO: 851556 - DNA, 120 bp, Artificial Sequence
  ENSG00000225725_0 (sequence is synthesized)
catgcgcggtctgcctcccgcggcgggccgggtctccagggaggacctgagttttcttcacccattgtcagggaggcgccatcgccctggctttggggctggggcctccggggaggttcc

SEQ ID NO: 851557 - DNA, 120 bp, Artificial Sequence
  ENSG00000225725_1 (sequence is synthesized)
ggtaggggcgttggagaggccgctctttttgcaaggcccgagacggcgggccctgcgcaggccgccctattccgcgccctcagggcgtcagtatcagcctgaggctggatacccccgctg

SEQ ID NO: 851558 - DNA, 120 bp, Artificial Sequence
  ENSG00000225725_2 (sequence is synthesized)
cagtatcagcctgaggctggatacccccgctgggcccggatgcccccgctgggcccggagcatcctccggcgctgccctcccagagccccgcagaggctgaggtggcgcgggggcggccc

SEQ ID NO: 851559 - DNA, 120 bp, Artificial Sequence
  ENSG00000225725_3 (sequence is synthesized)
ggaggacccgggctgcggggctccggggcgtctggcctgggcgggactgagcccatccagggactgggactctgggattctggtgtaggtggatccggggcaggctcaggaccaagtccc

SEQ ID NO: 851560 - DNA, 120 bp, Artificial Sequence
  ENSG00000225725_4 (sequence is synthesized)
tctccttccaccaaggagcgcccagaggccggcgggagctccaggttcacctcctcctcctccaggaaatcccacttccagctagatgtctgcatgaactactgaaagctgctgagtgtc

SEQ ID NO: 851561 - DNA, 120 bp, Artificial Sequence
  ENSG00000225725_5 (sequence is synthesized)
taggcctactcctgcaactaccccagaacctggaatttatatgttcaacatggagccatcccagccatgacaacagagaatgtaccactctcacggggtaatatcgagttccagaaggca

SEQ ID NO: 851562 - DNA, 120 bp, Artificial Sequence
  ENSG00000225725_6 (sequence is synthesized)
aggattaacattcagaaaaataggaaaaacaacctgcagagttactatgaattattatattgtggctacttacaccaagatgaagataatttattagttcaggaagaacctgcattctga

SEQ ID NO: 851563 - DNA, 120 bp, Artificial Sequence
  ENSG00000225725_7 (sequence is synthesized)
aggcaaatggaagttccagctacagatgggcagacacatgccccctcaattcctgatggacctccttgtgcctcatggacctaaggggcctccctcaatgtttcaagatgccaccaaggc

SEQ ID NO: 851564 - DNA, 120 bp, Artificial Sequence
  ENSG00000225725_8 (sequence is synthesized)
agggatcagctagtgcattcctgagaacatccaggatgaattgaggctctggaaaaatgcaagagtttccacataatcccaaaaaaccctacaggtgaactggatgccacagaaagagga

SEQ ID NO: 851565 - DNA, 120 bp, Artificial Sequence
  ENSG00000225725_9 (sequence is synthesized)
gtggtctttgtcacaacaaaatcaacaaaattatttcgaagtcaattaggaaactcagaaatcactcttgctgccattaagaggaagaacagcagcctgtgaatggcatccctggccttc

SEQ ID NO: 851566 - DNA, 120 bp, Artificial Sequence
  ENSG00000225725_10 (sequence is synthesized)
ccgagactccacagatatttctatgtggcttcagacaccagaaatctctgtgattttcagaaaggcagggacagctcatgccagcccatccctctgcagaatgtgtcccagcagatcagt

SEQ ID NO: 851567 - DNA, 120 bp, Artificial Sequence
  ENSG00000225725_11 (sequence is synthesized)
tccagggacgacttgagaaggcatcctaagcctatgcagaaatgtagaaacacttccattatctaaacaacctatgtgaaggcctgaaagccaaagcaagatcctcttgttacaaagctg

SEQ ID NO: 851568 - DNA, 120 bp, Artificial Sequence
  ENSG00000225725_12 (sequence is synthesized)
tccaacaaaaagttttccaagtaatactggaggtccgtcagtcagtcttcctggtctggaaatgccagaaatgtcctccttggtccttctgagagtcaagatcttttcaaaatcacctca

SEQ ID NO: 851569 - DNA, 120 bp, Artificial Sequence
  ENSG00000225725_13 (sequence is synthesized)
ggagccacagaaccactccatcctacctgaaattgcaggatgactcttcttttgaccagagtctcaaaaatatattcgttgatagttttgattcctgggagccgccattgcttgcaaaag

SEQ ID NO: 851570 - DNA, 120 bp, Artificial Sequence
  ENSG00000225725_14 (sequence is synthesized)
atgtgccagagactagacattttctgtctcctcacttgtccggggaagactgaagttttactgaaacacagagatgggaatctgaccctctgagcagccgcaggatattctaagtcttcc

SEQ ID NO: 851571 - DNA, 120 bp, Artificial Sequence
  ENSG00000225725_15 (sequence is synthesized)
atgaactactgaaagctgctgagtgtcttgcagcaggtgagctgtggccagagctcaaggatgaaggggactccctcactctgtgactgtgaagaggaagcctgaggtgtagcaggccca

SEQ ID NO: 851572 - DNA, 84 bp, Artificial Sequence
  ENSG00000225725_16 (sequence is synthesized)
ctgtgactgtgaagaggaagcctgaggtgtagcaggcccaggtcccagaagtatggaaaaaatgagcatttcatcccaaagatg

SEQ ID NO: 851573 - DNA, 120 bp, Artificial Sequence
  ENSG00000225725_17 (sequence is synthesized)
ttgcattaatgttcatcagggatattggcctggattgagcaggccatttccaatccagcggaagaccttctagaagaggtgatgggtgggagagtgctggcatactatgtgaagctacta

SEQ ID NO: 851574 - DNA, 120 bp, Artificial Sequence
  ENSG00000225725_18 (sequence is synthesized)
tttggagttggacacgagtgcatgtgaccttgtgccacagcgggaatgtgagctggatgacaaatggagatttggacttgtgataattggcctctgtgtcattgtgtggaagactgactg

SEQ ID NO: 851575 - DNA, 120 bp, Artificial Sequence
  ENSG00000225725_19 (sequence is synthesized)
tgtggaagactgactggtccctttatttcctgtagcttgactaccacacaaatgaatccactcaaatgttggcaagtggagcagagtcccaggacagtctgcaatctctacaggtacaga

SEQ ID NO: 851576 - DNA, 120 bp, Artificial Sequence
  ENSG00000225725_20 (sequence is synthesized)
ggatcttcacacctggatttaggcctactcctgcaactaccccaggccagttatccaggcagtgactttcagtgcagctacagtcacctctggaaacctgcggagactttaaaaatttcc

SEQ ID NO: 851577 - DNA, 120 bp, Artificial Sequence
  ENSG00000225725_21 (sequence is synthesized)
agaaggtcaggaatttttggagacctttctcatggctacattgcctgcaaaggtgaatcaataagcttctgaactgacttagaaaatgttgcagagactcttgtgaacagatagaccctc

SEQ ID NO: 851578 - DNA, 120 bp, Artificial Sequence
  ENSG00000225725_22 (sequence is synthesized)
tcctgccactcagatagacgtatcagggtcacacacacctgatttaacaacatgtcattatctcaggcaccaatttgatcttctactatgttgcagacatctgttctgcaaacaccaaac

SEQ ID NO: 851579 - DNA, 120 bp, Artificial Sequence
  ENSG00000225725_23 (sequence is synthesized)
aaattgagacaatgaccttccgcaggacccaaaccacctcttactgaaggaaagaagatccagtgagatagtccacaaatggaatgtaaatccataaacactcttaagtaacagaataaa

SEQ ID NO: 851580 - DNA, 120 bp, Artificial Sequence
  ENSG00000260942_0 (sequence is synthesized)
ggggtctcgggtcacgtgacaggcggcccaatcgcactcgcgcgacggaaagcgccacggacgtcggaggcccagggggcggggctcccgagctccgctctttcgtggtcgggcggcgga

SEQ ID NO: 851581 - DNA, 120 bp, Artificial Sequence
  ENSG00000260942_1 (sequence is synthesized)
ccgcactgtattttttccttccgggggcggcggagcccagggctatcccggcctccgctcatacccggagggccggcaggcgttcagtcctccagccggtgaggctcgggccggggtgtc

SEQ ID NO: 851582 - DNA, 120 bp, Artificial Sequence
  ENSG00000260942_2 (sequence is synthesized)
gggaccgcctgaacacgcgggctctgggagcttcagggaccagggagccacctcggccgagttgcgtcgcagactacagctcccagcatgcgccgccgctcccagcatgcaccttcctcc

SEQ ID NO: 851583 - DNA, 120 bp, Artificial Sequence
  ENSG00000260942_3 (sequence is synthesized)
cgaaacgcgtctctgcttccggcgctctgctgcggaggccgtggccgcgggtagttgggaggaaccgagatttacgcttggtaaggcaagttgcgagctgtccggcgccggtcgagttcc

SEQ ID NO: 851584 - DNA, 120 bp, Artificial Sequence
  ENSG00000260942_4 (sequence is synthesized)
tgccgccgtcgtcgtcaggcaggggagaagggggcctcaacccctctagtgacagctgtttgctacctaatagggcttttcatcccaccgggccccagggccttcgttaggagcccagca

SEQ ID NO: 851585 - DNA, 120 bp, Artificial Sequence
  ENSG00000260942_5 (sequence is synthesized)
ggctcaacttcttgctgtggttctggaaaagggagtgaccacctggctcaacacctctctctgtgatgtgtttgggagttttgggaaatgagacggctccgagggaagagcttgagggag

SEQ ID NO: 851586 - DNA, 120 bp, Artificial Sequence
  ENSG00000260942_6 (sequence is synthesized)
cggcgtcgcactcgttcgaccttcccgggcctgggctttgtttctaggcattttaggttgaacgctctacatcttaactgggggcaggggaggtggccagagcatcccgctgagcgtttt

SEQ ID NO: 851587 - DNA, 120 bp, Artificial Sequence
  ENSG00000260942_7 (sequence is synthesized)
ccgattccccagatggccaggcacctggtcctggtggctggacagtgaccccgtggacgcacatttacagctatagccattcagtgccgcggggaggtgaggatagtgatcctgggacct

SEQ ID NO: 851588 - DNA, 120 bp, Artificial Sequence
  ENSG00000260942_8 (sequence is synthesized)
gctcgaggattcacccttgccccaagaacctgttccattcccaggaatgaaggcggtcaggcaggggaggagaagggggcctcaactcttctagtgacagcagtttgccacctaatagag

SEQ ID NO: 851589 - DNA, 120 bp, Artificial Sequence
  ENSG00000260942_9 (sequence is synthesized)
cttttcagattttgcctcctcaggccattttactcagcctcggactatcaaggatggtcacattgaagctgtttttctgcagtcaggagcgaaaagtcccggctgttgaaggagaaactg

SEQ ID NO: 851590 - DNA, 120 bp, Artificial Sequence
  ENSG00000260942_10 (sequence is synthesized)
aatctggttcaggagtcccaggttcctccctctgagaggccaggtggggcctgcgtgagtagcagttgttcaggtggcaggacactgctgttttcatcccacctggccccaggcccctga

SEQ ID NO: 851591 - DNA, 120 bp, Artificial Sequence
  ENSG00000260942_11 (sequence is synthesized)
ttaggggcccagagtgcttatgtacttgcctcggtctgagaaagggagtgactgcatagcccaacacctgtgggatgcctcactgcccagatgtttcatctccgggatgcttcattgccc

SEQ ID NO: 851592 - DNA, 120 bp, Artificial Sequence
  ENSG00000260942_12 (sequence is synthesized)
attcagcaccctctatggtgctgactcttccggaagatgtttctgattccttgctaggctggtggttgcaccatagctgagaggactcaagaagagcctggtctcagcttcacctaggag

SEQ ID NO: 851593 - DNA, 120 bp, Artificial Sequence
  ENSG00000260942_13 (sequence is synthesized)
tcccggaggagtaagaaacacgtatctttcctgttctgggcacatatgggtgggtagcagagctgaggctagctgaggatcccgactctcctttgggagcctttgttgtgccgctctccc

SEQ ID NO: 851594 - DNA, 120 bp, Artificial Sequence
  ENSG00000260942_14 (sequence is synthesized)
aggctgatcagatctggagagctaacagcttcctgtggccacatctgtgtccaaggctgggcccatgcctgtagccagattgccaggatctggaaggggccaagagacagctggtgctgg

SEQ ID NO: 851595 - DNA, 120 bp, Artificial Sequence
  ENSG00000260942_15 (sequence is synthesized)
gtaggcagcagccctgtgtcaacctgcccccactattaccccatgctgtgatttgcatgtggtctgcccctgcccaaaatggtattgaaatttgagcctcaatgaggcagtgttaggagg

SEQ ID NO: 851596 - DNA, 120 bp, Artificial Sequence
  ENSG00000260942_16 (sequence is synthesized)
cctcatggataggttagtgtcctttgtggaggggtgagttcccatgagagctggttagagagtcagccttcctgcggttgtctcttgcttcctctctcgccatatggccacgtaatctct

SEQ ID NO: 851597 - DNA, 120 bp, Artificial Sequence
  ENSG00000260942_17 (sequence is synthesized)
ttgtgcatgcctctccccttctacttgctgccttgagttgaagtagcatgaggccctcaccaggtgcagctgcccaatcttgaaatttccaccagaattttgagccaaataaacctgttt

SEQ ID NO: 851598 - DNA, 68 bp, Artificial Sequence
  ENSG00000260942_18 (sequence is synthesized)
tgaaatttccaccagaattttgagccaaataaacctgttttgcttttttaaaaaaataaattccccca

SEQ ID NO: 851599 - DNA, 73 bp, Artificial Sequence
  ENSG00000260942_19 (sequence is synthesized)
ccatctctactgaaaaaaaaaaagaccctcactcgggaggctgattgaggcaggagaatggtgtgaacccggg

SEQ ID NO: 851600 - DNA, 120 bp, Artificial Sequence
  ENSG00000260942_20 (sequence is synthesized)
aacctcaggtatagcagtgtgaaacagactaagacattccacatgccctgtggtcccatctgctaccccagggtgcaaagatgttccctcagccctgaagaatgacattccccccggctc

SEQ ID NO: 851601 - DNA, 120 bp, Artificial Sequence
  ENSG00000260942_21 (sequence is synthesized)
ctgggatatctggaggggttgtaagcagcttgggttggtgagataaggagtttggggggcagctgattcatgaccctggcctcctcaactgcaggctcttggtctgaagtactgtaatta

SEQ ID NO: 851602 - DNA, 120 bp, Artificial Sequence
  ENSG00000260942_22 (sequence is synthesized)
aagtatgagagcctcggggccctcacttcaaggagggaagagcatccccatgcctcagcgtttggggattgtagggagatgagagtccttcaggtgggactagttcccgccatgacccca

SEQ ID NO: 851603 - DNA, 120 bp, Artificial Sequence
  ENSG00000260942_23 (sequence is synthesized)
ctgctggccagtggcctgaaacgcatctgaccacttctcaggttcatgggtgttgaggaggagccctgtggaatcaaccctgtctgcctcctcttatcctgccactcctcttgctctgtc

SEQ ID NO: 851604 - DNA, 120 bp, Artificial Sequence
  ENSG00000260942_24 (sequence is synthesized)
tggatgactgcccttgtttttcaagggaatgttccctgtcttcctcagccaggattttttctgaacttgacatctccgtttgttcagggggcaatcattgggcacttcactgtgctggtc

SEQ ID NO: 851605 - DNA, 120 bp, Artificial Sequence
  ENSG00000260942_25 (sequence is synthesized)
cttgcattctcatggagatgcagagattaaaaattagtatcttgtccacatactgcccagagttagcaaggattgcttttctgtggatttgtctcaggtcgggcacagtgggggtagggt

SEQ ID NO: 851606 - DNA, 120 bp, Artificial Sequence
  ENSG00000260942_26 (sequence is synthesized)
ccttctcgaaccttttcctagcctaaaggttccagctgaatcttcccaggcagggctgaaacaggaaccattttaggctttgctgcaacccatggtcagttctccaagaaaagtgaagag

SEQ ID NO: 851607 - DNA, 120 bp, Artificial Sequence
  ENSG00000260942_27 (sequence is synthesized)
ggttccacctggggcagccctcaagggctcagagggccaaaacacacgtacaacatgttgagacactgagtttgtgcgatccccacacatctcagcagtgagtatttctgcctcatttta

SEQ ID NO: 851608 - DNA, 120 bp, Artificial Sequence
  ENSG00000260942_28 (sequence is synthesized)
ccgatgaggaacctgagcttcaaagggaagaggtgacagctcaggaccacacagctgtaggtaggaggcaggaaaatagggtctgagtgcagggaacataggctgattcacacttcagtt

SEQ ID NO: 851609 - DNA, 120 bp, Artificial Sequence
  ENSG00000260942_29 (sequence is synthesized)
atgataggaaataccttctccataggacataggccaagcaaatgactttgtaacttcatcctctccatctgcataacgtgtgccccaagtaaccaatggaatcacctagagggtgtttaa

SEQ ID NO: 851610 - DNA, 120 bp, Artificial Sequence
  ENSG00000260942_30 (sequence is synthesized)
actctcagaagttctgtaacaggctctccatctacataacgtgtgccccaagtaaccaatggaatcacctagagggtatttaaactctctgaagttctgtaacagggcttttgtgctcct

SEQ ID NO: 851611 - DNA, 69 bp, Artificial Sequence
  ENSG00000260942_31 (sequence is synthesized)
atgctcaggctcactttgctctctgtgtgtgttttgtccaattctttatttaagacgccaagaacctgg

SEQ ID NO: 851612 - DNA, 120 bp, Artificial Sequence
  ENSG00000227172_0 (sequence is synthesized)
ggcagtgttgatgtgtgcctgtgagttgtgagcgaggcagatttcctcgcgtggccggcacgaccttcacctttgcagaaggcaaccgggaccctcagttgattccagttcaaaagttgc

SEQ ID NO: 851613 - DNA, 120 bp, Artificial Sequence
  ENSG00000227172_1 (sequence is synthesized)
ttcaagatctaaagatgctttcctttcatcatctagaatgaatttgttcatttatcctgatgaaaggttaaagaagatattgccaagtgtgaacaataaccttcgatggaaatgatatca

SEQ ID NO: 851614 - DNA, 120 bp, Artificial Sequence
  ENSG00000227172_2 (sequence is synthesized)
tcaattcctgaaagtgcagaacaatctatttttaggaagggatgtgctccattgagctcctgattttgagaccacttttatttatttatttttaaacttaatttagtttgatatttaaaa

SEQ ID NO: 851615 - DNA, 120 bp, Artificial Sequence
  ENSG00000227170_0 (sequence is synthesized)
gaaaagaaaagtaaccaaaccagaatttgcactagggaagtttgaaagaagttgatccattttgagaagagagttacagaaaacaaataaggaacccattgacgtcctagtaggctgagc

SEQ ID NO: 851616 - DNA, 120 bp, Artificial Sequence
  ENSG00000227170_1 (sequence is synthesized)
aaaagcattaacttctgccagatatgaaattattgtctttctggtggagaaaaggagccacagagaggttctaggtaaaacatggacttttgtctcttttaatgtggattatctgctaga

SEQ ID NO: 851617 - DNA, 120 bp, Artificial Sequence
  ENSG00000227170_2 (sequence is synthesized)
ataaaatttagtagatgtctataaattttctacattactagaatgctgttcaatcagatattgttcaaaataaatcatactgctgctgagaaatatttttctcaggagacaacctaacca

SEQ ID NO: 851618 - DNA, 80 bp, Artificial Sequence
  ENSG00000227175_0 (sequence is synthesized)
cctctcggagaactccatggtgcggggaaggcggcggcgggggctgaggaggcggcggcagcggcggcagcggcagcggc

SEQ ID NO: 851619 - DNA, 120 bp, Artificial Sequence
  ENSG00000227175_1 (sequence is synthesized)
cacagagtaggacaactgccgaggaagggggacattgaggcagcttgcagaaacacacatggagaaacagaaccaaagagcagggtaaccagcaaaccaggcagtggaggcagggatggg

SEQ ID NO: 851620 - DNA, 120 bp, Artificial Sequence
  ENSG00000227175_2 (sequence is synthesized)
tacccatcccgagatcttgggtgataccaaaggcggcacatccggaaggctggttatacctagcgtggaggggagagggagaactgtttcttccgttcaataaagcaaacccttcaacaa

SEQ ID NO: 851621 - DNA, 87 bp, Artificial Sequence
  ENSG00000267555_0 (sequence is synthesized)
ctcgctctgttgcccaggtgtaccaggtgggaggatggcttgagcccgggagttcaagactgcagtgagctatgaccatgccactgc

SEQ ID NO: 851622 - DNA, 120 bp, Artificial Sequence
  ENSG00000267555_1 (sequence is synthesized)
gctttcccttcctacttattacagtaattgacaggaacaaaacaatcaagggtggacccagaggtgtacagtgagggcgtgggcatgtgtcctcctgggacgagggagatctgccagcag

SEQ ID NO: 851623 - DNA, 120 bp, Artificial Sequence
  ENSG00000267555_2 (sequence is synthesized)
ggtgagacactgtgacagaggtcttggagtcaggacaggtgaggacgccgtgcctgcctgcacctcacagaggccaagcggcccttctgttggtacttacttgagattttctgagcccat

SEQ ID NO: 851624 - DNA, 120 bp, Artificial Sequence
  ENSG00000267557_0 (sequence is synthesized)
acagataaaataagaatcagtatggaacacacctaccactaccatcagaactgggacttctgaagccagagaagacccttccatgattcatgactgaaaggtctgtgaacggccaaaaga

SEQ ID NO: 851625 - DNA, 120 bp, Artificial Sequence
  ENSG00000267557_1 (sequence is synthesized)
agattacagggagaagaaccaccatgcaccctccaccagtatcttgggcagatgggcaggagctctagggccgcttctcagtgttcctcagatggagaatcaacctcaggacaaatcaag

SEQ ID NO: 851626 - DNA, 120 bp, Artificial Sequence
  ENSG00000267557_2 (sequence is synthesized)
ggacaccaacctaatgctggcaaatgacagacaggaagagccccagcagggcagatgccacagaaaccttaactgggacacagaaacatcactaacaaagacccagcagctgtcttggtg

SEQ ID NO: 851627 - DNA, 120 bp, Artificial Sequence
  ENSG00000267557_3 (sequence is synthesized)
agggagacacagtctaacagtcacaaagaggcacaacggagaccctaacccccggccctctgcagacacctctgcctgccctcccagggaagctgccggccaagattatttcaggtcacc

SEQ ID NO: 851628 - DNA, 120 bp, Artificial Sequence
  ENSG00000267551_0 (sequence is synthesized)
aagcaagaagggacttgccccattgcacaggaggggaaaccgggactgatgatgaagcagttaggctgcagctgctggatgtgtctcctgatccctgagacccactcctcccatgcatcc

SEQ ID NO: 851629 - DNA, 120 bp, Artificial Sequence
  ENSG00000267551_1 (sequence is synthesized)
tcagagtccctcaaaccccacatccagagccagacaggatgaagcgactaagacacagagcactgaagcaatctgcccctcagaagtcccccagaggcgcgtgaaccctgagctgccccc

SEQ ID NO: 851630 - DNA, 120 bp, Artificial Sequence
  ENSG00000267551_2 (sequence is synthesized)
cagactctgggtttccccttcttttccccaaacagccctagctccccccaggcactcgcgttgctcagacctttgtgatggactctgagtgttgtgtgtgcatttctctgtgtttgttca

SEQ ID NO: 851631 - DNA, 120 bp, Artificial Sequence
  ENSG00000267551_3 (sequence is synthesized)
tgtacaagcgtgctcgtgtgtgtgtgtgtatagatgtacacatgtacatgggtgtgtctgggtgtgtgatttgtttgcatatttgtgtgtggggcacgcgcatgtatccttggctgcatt

SEQ ID NO: 851632 - DNA, 120 bp, Artificial Sequence
  ENSG00000267551_4 (sequence is synthesized)
tgtgggtgcgtgcataggtgtgcttgtgtgtgcatttgtatgtgtgcacacatgtgcgtgcatgtgcatggggggattgcatgcaggcatgtgtgtatccttgtgtgtttgtgtatgtgc

SEQ ID NO: 851633 - DNA, 120 bp, Artificial Sequence
  ENSG00000267551_5 (sequence is synthesized)
atgtgtgtgtgtgcatgtgggaatttgcatgcatgcttgtgtgtgtttgtgtatgtgcatgtgtgtgtgtgcatgtgggaatttgcatgcattcttgtgtgtgtttgtgagtgtgtacac

SEQ ID NO: 851634 - DNA, 120 bp, Artificial Sequence
  ENSG00000267551_6 (sequence is synthesized)
gtgcatgggcgtgtttgagtgtgtacatttgtgtgtgcacttatttgtgtgcatctgtgtgggggcatctgcatggatccttgtgtgcatttgtgtgtgtgcacacgtgtgcacgtgtgt

SEQ ID NO: 851635 - DNA, 120 bp, Artificial Sequence
  ENSG00000267551_7 (sequence is synthesized)
gcattcatttgtgtatgtgtgtgggtgtgtgcatgtgggcatgcgtgtgtatctttgtgagcatgtacgtgtgtgtccttgtgtgcatgtctgtgcgtgtgcatacatgtgcgtgtgtgc

SEQ ID NO: 851636 - DNA, 120 bp, Artificial Sequence
  ENSG00000267551_8 (sequence is synthesized)
atttatgcgtgtatacttgtgtgtgcacttgtatgtatgcacatatgtctggaggacatggccttgccccagggtctggggacccttccctgcctgccctgccctgccctgccctgccct

SEQ ID NO: 851637 - DNA, 120 bp, Artificial Sequence
  ENSG00000267551_9 (sequence is synthesized)
accctgccctgggcccctgcctgccctgggcccctgcctgccctggcggctcaccttgctctcgggcctgctgaatggaatctgcagccgctccatggcctcgatcatggcccgcatgga

SEQ ID NO: 851638 - DNA, 120 bp, Artificial Sequence
  ENSG00000267551_10 (sequence is synthesized)
cacgaagatgttctggtagaccaggggccggaagcccttgcgctcctcctccgagtagccggcgccgtggatgatccgcatctgcttgatgaagatgagacacagaggaccagagaggtt

SEQ ID NO: 851639 - DNA, 120 bp, Artificial Sequence
  ENSG00000267551_11 (sequence is synthesized)
tagtgacttaatttgggtcacacagcaagtggaaccccaggggagtaaacttggggtcgtgtgagtccttcaccaacaaaatgggacacggccagtcgagctggggaaataaatgataat

SEQ ID NO: 851640 - DNA, 120 bp, Artificial Sequence
  ENSG00000267551_12 (sequence is synthesized)
cctgttgccacccgcgacacagatttgatgactcagggatgggtcatcacccgaagcctgaagagctgcgtgagaaccccctctttgcaatccattgctgtcctgaagccacaaaggatt

SEQ ID NO: 851641 - DNA, 120 bp, Artificial Sequence
  ENSG00000267551_13 (sequence is synthesized)
ctgggacctctccattgccccccgacccccagacatcccccagctcctggatagaaatggtgggagtgatctgttttaggatacccccaaaggccatgcggcccagacgggaagttcctg

SEQ ID NO: 851642 - DNA, 120 bp, Artificial Sequence
  ENSG00000267551_14 (sequence is synthesized)
cttcctcctgggcacggaggaggacaggaggaagtggaaccggcagatgccaggaaggaactgggttaaccgtgccaagccccagtcatcacaaggcaactggagccagctatgtgcaca

SEQ ID NO: 851643 - DNA, 120 bp, Artificial Sequence
  ENSG00000267551_15 (sequence is synthesized)
gagtccagcaccaggccctcacaggaaacgcagctgctggggaagtggggagccaggccaggcagccgcaggggcaggaggctcggcctctcagtcccgctctggctcaaactagctgct

SEQ ID NO: 851644 - DNA, 120 bp, Artificial Sequence
  ENSG00000267551_16 (sequence is synthesized)
gacccccaatcaatcctgctgcctccttgggcctcattttccccatctggcactggggttctgtggtgtttctgtcccccaaggcaggcgaacagggcagtcaggagcatggactttgga

SEQ ID NO: 851645 - DNA, 120 bp, Artificial Sequence
  ENSG00000267551_17 (sequence is synthesized)
accagaattctaggtgcgagtctcagctgtgtgaccttgggcaagtcgctctgcctctctgagcctcagtttatcctttgggggaaactaggagtgcctgcctcaaagtgctaagaacag

SEQ ID NO: 851646 - DNA, 79 bp, Artificial Sequence
  ENSG00000267551_18 (sequence is synthesized)
ggggaaactaggagtgcctgcctcaaagtgctaagaacaggccgggcacaatggctcacatctctaatctcgtcacttt

SEQ ID NO: 851647 - DNA, 120 bp, Artificial Sequence
  ENSG00000267550_0 (sequence is synthesized)
ggggcgggggtggtggtggtgaggcttcaaggtgcggctatggggggctgcttgtcctctcctttcctgctgattctcccgcaatggtagcccaagcatccatgcaatttgtgagtcaga

SEQ ID NO: 851648 - DNA, 70 bp, Artificial Sequence
  ENSG00000267550_1 (sequence is synthesized)
ccctgaggtcaagaattccagaccaacctggccaacgtggcaaaaccccctctctactaaaaatacaaaa

SEQ ID NO: 851649 - DNA, 64 bp, Artificial Sequence
  ENSG00000267559_0 (sequence is synthesized)
ggcggacaaaggaagagatcctccttcaggcagggtagggaagaagggcactcggtgaccagag

SEQ ID NO: 851650 - DNA, 120 bp, Artificial Sequence
  ENSG00000267559_1 (sequence is synthesized)
ttcaggcagggtagggaagaagggcactcggtgaccagagaccttttccaggaccatgtctttgaagcaaatctcagctcttgtcttccggaagcgatggagacagaatccagaagcctg

SEQ ID NO: 851651 - DNA, 120 bp, Artificial Sequence
  ENSG00000267559_2 (sequence is synthesized)
agactctctcctttcctggctttgatgaagcaagctgccacactggagaggcctacatgataaggacctgaaggtggcctccagctagctccagccaacagttggcaaggaattgaggac

SEQ ID NO: 851652 - DNA, 120 bp, Artificial Sequence
  ENSG00000267559_3 (sequence is synthesized)
ctgagtccaatagaccttgaggaactgaatcctgcaacagctacacaagtgagcatggcagtgtatccttccccagtaaagccttcagatgagaccccagccccagctgacaccttgatt

SEQ ID NO: 851653 - DNA, 120 bp, Artificial Sequence
  ENSG00000267559_4 (sequence is synthesized)
gaagccttgtgagagaccctgaagcagagaaaccagctaggccttgcctggattcctgatccacaaactgcttttgtgatgccctataattacatgaactctactaaaaagagggatact

SEQ ID NO: 851654 - DNA, 120 bp, Artificial Sequence
  ENSG00000267559_5 (sequence is synthesized)
ggaaagaagaataatgttgagacacctttgcagaagaaaaaacaacttcctctcttcctctacttcactctggcaagttctccaacctgacaagccagtagggagtgccggaatgtcatg

SEQ ID NO: 851655 - DNA, 120 bp, Artificial Sequence
  ENSG00000267559_6 (sequence is synthesized)
gctgagaaaagagatgttaacaggctgtatgatgttggccacagagtgcccccctaaagaggcctcagaagaatgaagggagtgccggaatgtcatggctgagaaaagagatgttaacag

SEQ ID NO: 851656 - DNA, 120 bp, Artificial Sequence
  ENSG00000267559_7 (sequence is synthesized)
aatgaagggtaagaagctcctccatgaaatcagatggcacaaaattagaggaaaaagagtccttggcatgaggctgccaccaggagaattctgaagatgcagggcatgaatggtcaatgc

SEQ ID NO: 851657 - DNA, 120 bp, Artificial Sequence
  ENSG00000267559_8 (sequence is synthesized)
ctttcgttgttggggcagaggtggatgacccaccagagccacctagagataacatttccggaaaagtcttcaagacggtgagatttgatttagactgagtcacagtgcaatcttccggtg

SEQ ID NO: 851658 - DNA, 120 bp, Artificial Sequence
  ENSG00000267559_9 (sequence is synthesized)
gtaaagcagatggggttggtggtccatgatgacgagcacatgaatcagtgcgattcacggcctgggaaatatcttggcatagggtggagccaaatgaaaagatggtgttcagagacaaac

SEQ ID NO: 851659 - DNA, 120 bp, Artificial Sequence
  ENSG00000267559_10 (sequence is synthesized)
tggcctcaggttggaggctgggctccactctctcaatgtgatgtggtgggagaaggggaaagggaagctgttggggtggggaatggtctatggggaacttggaatccaagggagaaacag

SEQ ID NO: 851660 - DNA, 120 bp, Artificial Sequence
  ENSG00000267559_11 (sequence is synthesized)
gctgtggtggcagagggtccctcagtggtgagggtgaaaataagtcagctaaggtggtgatcaggtcaggtgagagaattaaggggggtggtggagagggcttaggccgagaggacaata

SEQ ID NO: 851661 - DNA, 120 bp, Artificial Sequence
  ENSG00000267559_12 (sequence is synthesized)
ttaggtcttctggagtggttgctgagggggtggaagccagagtgaacgatgactcagccccagaagctgaagaagccaaaggggacacagagggagcagcatctttcagggactcccaag

SEQ ID NO: 851662 - DNA, 120 bp, Artificial Sequence
  ENSG00000267559_13 (sequence is synthesized)
acagcagtcgctggatatcagcagttgctctgttacacacccgacagacagggtctgggcataacagtcgacgaaagagggtggtatcatgatgctggcccaggggactgcaggaaacag

SEQ ID NO: 851663 - DNA, 120 bp, Artificial Sequence
  ENSG00000267559_14 (sequence is synthesized)
gaggtccaaagctgcagccaggatcagaacaaggaaatgaggatctgttagcctggcaggggtggggccccctgaatcctgcttcacattaccccccatccatgagctcaccgtatgtga

SEQ ID NO: 851664 - DNA, 120 bp, Artificial Sequence
  ENSG00000267559_15 (sequence is synthesized)
ggtcatatgacctcactatagcctctcctcaaagcattcattcacatatccgttcctatggctacccactcccaaaactacagcaggctacaaggaatccctgaaatgaatagaacatgc

SEQ ID NO: 851665 - DNA, 72 bp, Artificial Sequence
  ENSG00000260945_0 (sequence is synthesized)
ctgaaaggaggggtccagggtgtgaggggctggattcaggcagggtctttcgctgtgttgccagggctagaa

SEQ ID NO: 851666 - DNA, 120 bp, Artificial Sequence
  ENSG00000260945_1 (sequence is synthesized)
agcaatcctcctgtctcagccttcagagtagccaggactacagaaatgtgtcctatgaacagctgattttttaaatttttgtagagatgggagtcttgctatgttttctaggctggtgtc

SEQ ID NO: 851667 - DNA, 120 bp, Artificial Sequence
  ENSG00000260945_2 (sequence is synthesized)
ttttcatatgaaggcaaagatgacccccaccgtctctgatcttttattggcttattaccaactaaagggaggagggtcttttctaattgttctaaggtctttctaagaaggattcccact

SEQ ID NO: 851668 - DNA, 120 bp, Artificial Sequence
  ENSG00000260945_3 (sequence is synthesized)
ggctgtgcctatccctggatcaatcattccagccagcaggagctaatgctaagtttcaccagaccaggggaccacctctggagcccaaggcatcttaggctcctcagaaagagtctgaat

SEQ ID NO: 851669 - DNA, 120 bp, Artificial Sequence
  ENSG00000242242_0 (sequence is synthesized)
actgctaaatttagacagctcactgcgcagccactagctaattatctgtttagatagcactttaacacgttgttgagactcagttaaatgttaaacaaccaaaattttaatatcactagc

SEQ ID NO: 851670 - DNA, 120 bp, Artificial Sequence
  ENSG00000242242_1 (sequence is synthesized)
caatttcattcttccaggttttccctgatggctccacatctccaagaaaacatcttcaactaaagatgtcaaagcacaagctcacttcccacggaaggtagcaattactattatctactt

SEQ ID NO: 851671 - DNA, 120 bp, Artificial Sequence
  ENSG00000242242_2 (sequence is synthesized)
tttcctgccagaaccaagttcttgccttccagtggacaccattgatctctcaagatgattctttaagttaaaaagagctgaaagcctgcaaactacattttgttaagtctttggtaaaca

SEQ ID NO: 851672 - DNA, 120 bp, Artificial Sequence
  ENSG00000242242_3 (sequence is synthesized)
catttcatattaatttctgttacaaggcagcagaaataggcacagtgcctccaacatatcaaaggaaagtaaaggctagtggaaggggataacagcttcctgacctccaggcacgaatca

SEQ ID NO: 851673 - DNA, 120 bp, Artificial Sequence
  ENSG00000242242_4 (sequence is synthesized)
caaagggcctcaaaaccacattaaaatttaagattgatctgctcttctgcttctgaatgtgagagcctatactggatctctgaagaaaataaagatgagatgaggttctgatcccttgga

SEQ ID NO: 851674 - DNA, 120 bp, Artificial Sequence
  ENSG00000242242_5 (sequence is synthesized)
aaagtcccattacgttgactaggacccacacttgtgaagaattatgaaaacacagagcattttgcaacaaattatgtaatcatgtaaatagtaaactaataataaacagtaaactgataa

SEQ ID NO: 851675 - DNA, 120 bp, Artificial Sequence
  ENSG00000242242_6 (sequence is synthesized)
agaaatgtgaaatctcttaggccaagaagaacaacctgaggactctctttctggaggtaattgaactcctttagtaaatccagaggagaaatctgagatcagtacatcttttgtatctat

SEQ ID NO: 851676 - DNA, 120 bp, Artificial Sequence
  ENSG00000242242_7 (sequence is synthesized)
gatagctaaggatacatcacttgaaagattcactgtactaactactttcttcagcatttgactcttggtccttgtgttgtgagctccttgttcctgcaaagctggctggggtcaccatag

SEQ ID NO: 851677 - DNA, 120 bp, Artificial Sequence
  ENSG00000242242_8 (sequence is synthesized)
tgggtcaaaaaaaaattcatcaatgaaaaagatagggaatctccaatctctatcccaagacatgttctcgatgacttgagcacatcacacatcagcagatgctcaggatacagaagagag

SEQ ID NO: 851678 - DNA, 120 bp, Artificial Sequence
  ENSG00000242242_9 (sequence is synthesized)
atttcatctacgggaaaaagaccctctgaaaagaagtgtgaaatcatcaaaagagccattggaggggacaccagagagtcgtgtggctgaggtttcacatgatcccgccatgcttccagt

SEQ ID NO: 851679 - DNA, 120 bp, Artificial Sequence
  ENSG00000242242_10 (sequence is synthesized)
ccagaggagaaagctagacccactcctcaaaaagtataggcatcataagaaggccacaaggacaaaaagaaggaggaaggagaaaatggaggcccagtgctcccctgttcctccaacacc

SEQ ID NO: 851680 - DNA, 120 bp, Artificial Sequence
  ENSG00000242242_11 (sequence is synthesized)
tagacaaaaagccaactctactcagtgcccaggaagatactcctgaccttctccatgaggacagattacagtatctgcaggaagagggttccggtgtgatgcatcaggaatgtcagatcc

SEQ ID NO: 851681 - DNA, 120 bp, Artificial Sequence
  ENSG00000242242_12 (sequence is synthesized)
agtcctgtgagctctcggtggctcagaagcccaggccctcttctcctgcagtgacatccttggcatcaccaccactctgctttggcagtttcctaagctgtgtctgccagaccttctcaa

SEQ ID NO: 851682 - DNA, 120 bp, Artificial Sequence
  ENSG00000242242_13 (sequence is synthesized)
gcagtttcctaagctgtgtctgccagaccttctcaaggtctaggaagcagaagcctcccagaagaaagggtaacaaccaggctgaggcaggagagagatgaacccggtacctcagatgga

SEQ ID NO: 851683 - DNA, 120 bp, Artificial Sequence
  ENSG00000242242_14 (sequence is synthesized)
ctattcggccatcttggctcctcccataggacacctttctaaagtcagtcatgctttgatacttttagttgtctaaaaagtggttgatttctcattttaaacagtattgagttttcttga

SEQ ID NO: 851684 - DNA, 120 bp, Artificial Sequence
  ENSG00000242242_15 (sequence is synthesized)
ttaaacagtattgagttttcttgagctaattgaccgtgataaatgggttttattacataaaatttcaaattatccaaactatatctatatttacatacatattttctccatttaatacaa

SEQ ID NO: 851685 - DNA, 120 bp, Artificial Sequence
  ENSG00000242242_16 (sequence is synthesized)
gaagcacactcccaggtaaggcatcatgtatgaaagtcctgagtcatcgagcctgttattaaaagctcaccagaatgcaggtattcgtgttggtattatactttattattgttattactt

SEQ ID NO: 851686 - DNA, 120 bp, Artificial Sequence
  ENSG00000242242_17 (sequence is synthesized)
atcataataagtgtttcaggttagtttttctatcatagaaaaactattagtgggagcctagttagccatatcttcagccccatctacaatactgattttcacataaaagttatttgctac

SEQ ID NO: 851687 - DNA, 120 bp, Artificial Sequence
  ENSG00000242242_18 (sequence is synthesized)
gtctagccgatacttgactgtgtgaaaccttcatctactccggaatcctgaggcacagactcagaggccctctgactcacgattagggttgtcagggtgatgcaacagcaagaccatagc

SEQ ID NO: 851688 - DNA, 120 bp, Artificial Sequence
  ENSG00000242242_19 (sequence is synthesized)
ctttggtgtcggaataccaagttttgaagctcagtttccccactcactaattttcagtgagcacatacataatttgaaatctgaaaatggacaataatgcctacctacttcaaaatttgg

SEQ ID NO: 851689 - DNA, 120 bp, Artificial Sequence
  ENSG00000242242_20 (sequence is synthesized)
tttgagaatcaagtgaaatattaatatatatgtaagcattttatgaacaaggaagcaagttataaatgcattatcttgttaatttagtcatttcactaggggtgggtccaatgtgggcct

SEQ ID NO: 851690 - DNA, 120 bp, Artificial Sequence
  ENSG00000242242_21 (sequence is synthesized)
ggctgaggcaggaggtgatgctgaggtcctgagacctggcccggcaaaaccagagttgagcctcagcaaaacgtgtagccacttgaaatcgatagagctttcctttgtgtttagttttat

SEQ ID NO: 851691 - DNA, 120 bp, Artificial Sequence
  ENSG00000242242_22 (sequence is synthesized)
agttctctctgtatgtcattgttcctcttagttgagtttttgcctgtcaaagagatagagagctgcttttatgctgagatcctcaagccaaaacccacagtaaacgcaaagtaaaacttt

SEQ ID NO: 851692 - DNA, 120 bp, Artificial Sequence
  ENSG00000242242_23 (sequence is synthesized)
aatcacgctcggccttctcctctcccgggcggcgctctccctgtggcggggacctgggacgagggggtggggtggggaggggaaggcaggagggggctgcccttccgttgcccatgctaa

SEQ ID NO: 851693 - DNA, 120 bp, Artificial Sequence
  ENSG00000242242_24 (sequence is synthesized)
aggttcctgtgtaggaagctggacgcagcctgctggactagtaatcttcctcctcgctggggcgcggggcactgaagggagggagagactttctcctccttcctgttccccgggacagct

SEQ ID NO: 851694 - DNA, 75 bp, Artificial Sequence
  ENSG00000263683_0 (sequence is synthesized)
atataaaggaaacctctttcctttataaactacccagtttcgggcatgcagagaagcctctgttctctctgccgc

SEQ ID NO: 851695 - DNA, 120 bp, Artificial Sequence
  ENSG00000263683_1 (sequence is synthesized)
cccctgaagcagagatctgtctgctgccaccacagctcctctctccagactgttcagatctggtccctgtaggatggaagtgcacacactgtctctgcctgtccccagggagcaagatgt

SEQ ID NO: 851696 - DNA, 120 bp, Artificial Sequence
  ENSG00000263683_2 (sequence is synthesized)
aaacttcctccttcatcattcgggcaaaaactgaataaatagatgaacaccaaattatggaaatcttcattatgcaggccaggttgccaaacatgcccagacctgcttaagctgagaagt

SEQ ID NO: 851697 - DNA, 120 bp, Artificial Sequence
  ENSG00000286576_0 (sequence is synthesized)
gcacccccacaaagaccagctacctgatttgcacaacccggtacaaaatgaagatgtgagggatcttgtaagaaaaggaagataaaaatgatatgaaagattaataaggaagaactgaaa

SEQ ID NO: 851698 - DNA, 120 bp, Artificial Sequence
  ENSG00000286576_1 (sequence is synthesized)
agaaaggaaactactctgtcccgtctttacctttccttttactgacatggtttggctctgtgtgcccacccaaatctcaccttgtttgtgataatccccatgcatcaaaggacaggacca

SEQ ID NO: 851699 - DNA, 86 bp, Artificial Sequence
  ENSG00000286576_2 (sequence is synthesized)
gttctcatgagatctgatggttctgtaaggggcttatcccttcacttggcactcattctctctcttgctaccctgtgatgaggtga

SEQ ID NO: 851700 - DNA, 120 bp, Artificial Sequence
  ENSG00000286576_3 (sequence is synthesized)
aaactacccagtctttggtatttcttgatagcagcataataagggactaatacattacatcatcacttttggagttaatggctggctgctacaagaattaatgaaagaagaaaagaataa

SEQ ID NO: 851701 - DNA, 120 bp, Artificial Sequence
  ENSG00000263688_0 (sequence is synthesized)
ggcccaagcaatccttccaccccagcctcctgaggagctgagaccacagttcttttatgcatggacaaccgtgctgatgatgcattcagtttaggagaattttccaattgaaaaagtgct

SEQ ID NO: 851702 - DNA, 120 bp, Artificial Sequence
  ENSG00000263688_1 (sequence is synthesized)
tcacccaaacctcatctaagtctcgtgaaggcaaaggctgtgaaaggcagtcacagagagaagacatattgtagttgtgctgcctgattcaactaaatagaaaaatattttgtaaagaca

SEQ ID NO: 851703 - DNA, 120 bp, Artificial Sequence
  ENSG00000279797_0 (sequence is synthesized)
acactttctgcaatgcctaccatctcaagttaaaaaaagtctcaaattttgccttaatgtaaaatggctctaataagatatataatatttttgtcatataaaatattgcatattgacagc

SEQ ID NO: 851704 - DNA, 120 bp, Artificial Sequence
  ENSG00000279797_1 (sequence is synthesized)
aatatcccagtggctgatttattgataatatctttgaccatttgaattttttttcctattatatataaggaaatacaaactaggtaacaggaagaaatgagaaaaggtagagagagacaa

SEQ ID NO: 851705 - DNA, 120 bp, Artificial Sequence
  ENSG00000279797_2 (sequence is synthesized)
tagtgaagactggtggacattggactacaaaagattactgcaggattcttctatgatgctgattacagctttatcttatcaagctttggcattgaagaccatgtgaattcatctccaacc

SEQ ID NO: 851706 - DNA, 120 bp, Artificial Sequence
  ENSG00000279797_3 (sequence is synthesized)
tctgaaattttaagctctatacggaaacactttttacttaatctgcatgacatcagagaaagagacttaccagcttttgaaaccaaaagaagagcatcccaggggaagtatgcatggaag

SEQ ID NO: 851707 - DNA, 120 bp, Artificial Sequence
  ENSG00000279797_4 (sequence is synthesized)
caccaagaggcatggagggaatcaaagccaaatggctgtaggtatcccatctccattggctgaatacttcgaggcttcagcctgctgtgaagaaacatttcattcattctacagtttgat

SEQ ID NO: 851708 - DNA, 120 bp, Artificial Sequence
  ENSG00000279797_5 (sequence is synthesized)
tcacttggttcttctttggcttctcactgcaatctatcttcagaaaaaagcgcagtgacaatgccgcatgaatatggaagtctttgtaacacattttcattatattttcatgcacattga

SEQ ID NO: 851709 - DNA, 120 bp, Artificial Sequence
  ENSG00000235749_0 (sequence is synthesized)
gtcctggacgccccttggcggtccgcactggcgggtgccctctcccgaggggaactgaggcggggcgcctgccaccattcgtgattttccgtgactcaccctctcaacagtgtcccgtca

SEQ ID NO: 851710 - DNA, 120 bp, Artificial Sequence
  ENSG00000235749_1 (sequence is synthesized)
gcccccgctttctggaattaagatgattttccatgggcattatagtcagaggaggttttctgtgagacatctgggaaaggtgactcaatgatcactcatattgttctatgatgttataca

SEQ ID NO: 851711 - DNA, 120 bp, Artificial Sequence
  ENSG00000235749_2 (sequence is synthesized)
tttaaccggaatactggtgaacagcttttatatcttggaattttttcccatttttgaatcagaaatttaggaccaagaatcttctgtcacagaacctattactttgaggagtgaacttat

SEQ ID NO: 851712 - DNA, 120 bp, Artificial Sequence
  ENSG00000235749_3 (sequence is synthesized)
attaacggtgctaaaccgtacatgaacgacttggtagatgaaaactttggaaaataggaacatttcatgtcatcacatgtatcctccagcattggggaaaattcaacagttgccttaagg

SEQ ID NO: 851713 - DNA, 120 bp, Artificial Sequence
  ENSG00000235749_4 (sequence is synthesized)
cgggagtttaattgaggacatttactaaaaagttacttattctgtttgaaattctcttctgataaacatcttcccgggataacgaacatctccaggatgtgagagccgagcgcgtgtccg

SEQ ID NO: 851714 - DNA, 120 bp, Artificial Sequence
  ENSG00000235749_5 (sequence is synthesized)
cggagtgcttgagcaacgcagaatggcttcggtgctgcgttccttagaccccgtgcggaccctgctgagccctcagcatctggtatagatgaaaggattcagcatcggagccaccattga

SEQ ID NO: 851715 - DNA, 120 bp, Artificial Sequence
  ENSG00000235749_6 (sequence is synthesized)
gggggatgaagggctgaaatagacggcgatggctgtgccgtaaaacaacaccaccactgacaggtggcagctgcaggtggaaacagctctctgcttgccctgagtagaggtgatcttcag

SEQ ID NO: 851716 - DNA, 120 bp, Artificial Sequence
  ENSG00000235749_7 (sequence is synthesized)
aacagtggagaagataagtccataagatacgaggatacagacaaggggcgtgagagccaatagacctcctactgcaaaaatgatcattacattgaaggagacgtcagagcaagagagctg

SEQ ID NO: 851717 - DNA, 120 bp, Artificial Sequence
  ENSG00000235749_8 (sequence is synthesized)
caggagaggattgagatcacagaagaaatgatggatgatattggaggcacagaaggacagctgtgctattaggacagtatgcaggagggcgtggaggtaagtaacaagccacagtccagc

SEQ ID NO: 851718 - DNA, 120 bp, Artificial Sequence
  ENSG00000235749_9 (sequence is synthesized)
cactagctggacacaaaggcacaggttcattctggcggtgtaatgtaaggggtggcaaatcgccacatatctatcatacgccatcacacacagaaggaggctgtccatattcacaaaaga

SEQ ID NO: 851719 - DNA, 120 bp, Artificial Sequence
  ENSG00000235749_10 (sequence is synthesized)
aacgaagaagaagagctgggtgaggcagcctgcaaaagagatagtcttggtgccagtcaagatattcactaccatttgggggactgtagtcgacgtaaagcagatgtcaacaaaggccaa

SEQ ID NO: 851720 - DNA, 120 bp, Artificial Sequence
  ENSG00000235749_11 (sequence is synthesized)
gttactaaggaagaagtacataggggaatggaggtgagagtcaaagccaatcgtcgcaatgatgagcatgttccccaaggtggtggctaaatacatacagagaaagagcacagacaggag

SEQ ID NO: 851721 - DNA, 120 bp, Artificial Sequence
  ENSG00000235749_12 (sequence is synthesized)
gtgctgctgctctgctgagctaggaagtcccagaaggacgaattccctgacaactgttagatttcttttttccatattcccaacaaatctagaaaaataagttattaaattgtaaaagcc

SEQ ID NO: 851722 - DNA, 120 bp, Artificial Sequence
  ENSG00000235749_13 (sequence is synthesized)
ctgctgagccctcagcatctattgtgaataattggtctactttgaagctcagaagagtcattgtgaataatatggacagagtaaaagagttatgacattagctgttagtgacattagctc

SEQ ID NO: 851723 - DNA, 120 bp, Artificial Sequence
  ENSG00000235749_14 (sequence is synthesized)
gaagcccacaatagtcatagaaagggggagacttcacaacaccatctccctggtatccactggactttgatgggtggcatccactagcggaattcagaaaaatgaaggtgtgaaatcggt

SEQ ID NO: 851724 - DNA, 120 bp, Artificial Sequence
  ENSG00000235749_15 (sequence is synthesized)
tatcgcctcttcagaagccttgtatgatgccatcctgggatacagctgaggtatagatgaaaggattcagcatcggagccaccattgaatacatgatggttgacagagtgtcgctctcag

SEQ ID NO: 851725 - DNA, 120 bp, Artificial Sequence
  ENSG00000235749_16 (sequence is synthesized)
aaaattttctcaactaggatttggaaaaagttagtccaccattgaaatgcttaacagcttcgtcaaaaaacttccatgcattacaactcaaaggattatacattaggtatgtcttcacta

SEQ ID NO: 851726 - DNA, 120 bp, Artificial Sequence
  ENSG00000235749_17 (sequence is synthesized)
atgaatacatacccttttctgagacctttgccacctatgacttttctctttcctgaatatccaatcacaaaagcatagatggacctatgcattgattcagatttctagtcaagagtgaaa

SEQ ID NO: 851727 - DNA, 120 bp, Artificial Sequence
  ENSG00000235749_18 (sequence is synthesized)
aagagaagaatgagatatagacaagtgtgtttctttcgacagagaataacagtatctcacgggggtgcttgggtgaatgaatgatacaaaaagatgggaaactgaagccacaattttaca

SEQ ID NO: 851728 - DNA, 120 bp, Artificial Sequence
  ENSG00000235749_19 (sequence is synthesized)
aacctatctattccatctccataaaacttgcagcttatcctgtctccctagtgctaaagagagatacagtgatataaacaaccacttttggagtaagacacattttggttcaaatcttca

SEQ ID NO: 851729 - DNA, 120 bp, Artificial Sequence
  ENSG00000235749_20 (sequence is synthesized)
tttgtaaattaattaatagttgcttgaccttgcacaaggtattatattttgtatgttttagtttttcatctataaaaatacaaatactacttatctcatttagttgctataaaaactata

SEQ ID NO: 851730 - DNA, 120 bp, Artificial Sequence
  ENSG00000235749_21 (sequence is synthesized)
atatttatataaaaaccttgaattgtgcatagacccagaggttatcctgaagcttctgatcatctaatgaattaatggctgggataatcaaatatgtgccaataaaaatgaaaaccaaaa

SEQ ID NO: 851731 - DNA, 120 bp, Artificial Sequence
  ENSG00000235749_22 (sequence is synthesized)
atcctgggatacagctgagtaagcctgcattcttaacatcgtataggacattctagcatagaagcctatggaatgaggccacctgttttcaaatccagcccccacccttgtgtgaccatg

SEQ ID NO: 851732 - DNA, 120 bp, Artificial Sequence
  ENSG00000235749_23 (sequence is synthesized)
ggctaattgcttaagctccccacagttccaatttctccatatagttggcatacaagggtttgttttgagcattgatgtaagttatatccagtaatatttgcaaacatcttagaatgtggc

SEQ ID NO: 851733 - DNA, 120 bp, Artificial Sequence
  ENSG00000235749_24 (sequence is synthesized)
tggtgtaggtaagtgctcttgatctcacattcccaaaagcacatttctcagaccatgagtcattcctgcctctgaccatcctgccaaaatgcatgccttctcaggtccccttattctgaa

SEQ ID NO: 851734 - DNA, 120 bp, Artificial Sequence
  ENSG00000235749_25 (sequence is synthesized)
gaaaataaaacaacaacttgttgttattgaaggactagagtgtgggaggatgatctgtatagacttcttgatatatcctcctacacataatccatggatctgacctcttagatacttaaa

SEQ ID NO: 851735 - DNA, 120 bp, Artificial Sequence
  ENSG00000235749_26 (sequence is synthesized)
aaaggtagacagtttacatcaaaattatttgtaagcctagaaatattttcagaggcttaccaaaatacaagctttaatttcatttcaattgagatttgagttcatttgtttatctgaatc

SEQ ID NO: 851736 - DNA, 120 bp, Artificial Sequence
  ENSG00000235749_27 (sequence is synthesized)
aatataatttaaaaaacatcttctaatatcttgccttggtctaagatggttaagagtttgccactgttttgacatgtacagttgggatcttcctttccatagtagtccaaggaagggaag

SEQ ID NO: 851737 - DNA, 120 bp, Artificial Sequence
  ENSG00000235749_28 (sequence is synthesized)
agagacaaataccacttccactccaagcctaggcatcaaagccagggtgaatcagcctatgggaagtctgctagtatttgaagggacaaagacattctttccccccgtataaacacttct

SEQ ID NO: 851738 - DNA, 120 bp, Artificial Sequence
  ENSG00000235749_29 (sequence is synthesized)
accctgctgagccctcagcatctgtgaagtgagtaacctatggtcagcattttgttgggtcttgttttaaaaactcactcagtcccggcgcggtggctcacgcttctaatcccagcactt

SEQ ID NO: 851739 - DNA, 120 bp, Artificial Sequence
  ENSG00000278946_0 (sequence is synthesized)
ttgggtttgggagcagaagttcatggaaaacaagggaagtgatttttaattataccttctgtaagtacctgatattgtgcttaaaacatagaaaattaatcaaacaattcaactaaatgg

SEQ ID NO: 851740 - DNA, 120 bp, Artificial Sequence
  ENSG00000278946_1 (sequence is synthesized)
gaagttgtaacttgcttgaattttctttgtcttttcatatacccttaggatttaggaggaaaaaaagaagatgcaacaaaattttagagtagaaagtgatttagaataaatatcactcta

SEQ ID NO: 851741 - DNA, 120 bp, Artificial Sequence
  ENSG00000278946_2 (sequence is synthesized)
gcttaaatattttgttctatagttttgatggtttatctccaatctaaaaatactgcaagggcatatgaaaaagttatcatatgtgtatgctaatattttatatatatattcaactattaa

SEQ ID NO: 851742 - DNA, 120 bp, Artificial Sequence
  ENSG00000232098_0 (sequence is synthesized)
attattctcgcttgctggggtcatggtgttttggcctctcctggcctggactctcaaaaactcatcatccttcataggtctgaaggcttctacattcccaccagcaggtggaccatatga

SEQ ID NO: 851743 - DNA, 120 bp, Artificial Sequence
  ENSG00000232098_1 (sequence is synthesized)
actcaaaactagttgtggcagagggaccctgaagagatctacccctggtgaatgcccccaggagtgggctgttctcacacctggtgcccagcctgtgccctcgcaggtcttggtgcctcc

SEQ ID NO: 851744 - DNA, 120 bp, Artificial Sequence
  ENSG00000232098_2 (sequence is synthesized)
actcagctcaattccagttttctggccatgccccgctgtgtccctttctctctccttagtgcctagctgtgcaatgtttgcctctccttaacatgtcctcagctgaccccatatcctcag

SEQ ID NO: 851745 - DNA, 120 bp, Artificial Sequence
  ENSG00000232098_3 (sequence is synthesized)
tccttgcaaccctgttcctcagtgacacctgtgtattctctccagtggagacacaggtgggacacccccaagctcatggtacatgcctgtcatcagtacccctggactgtcatggtgggt

SEQ ID NO: 851746 - DNA, 120 bp, Artificial Sequence
  ENSG00000232098_4 (sequence is synthesized)
cagtctgccctaggctggactgaccaacctgttcattcccccacaggattgccctttacagttcatgagttcccccaactggagtgcagacaagagcactgattgatggaccaggtagac

SEQ ID NO: 851747 - DNA, 120 bp, Artificial Sequence
  ENSG00000232098_5 (sequence is synthesized)
ttgaaaccaggaatagcacaaaagttatcaaagaggctcagccatggagattgcaagctggggatggaagtatccctggaattgagctgttctcacacctggtacctgagttatacccct

SEQ ID NO: 851748 - DNA, 120 bp, Artificial Sequence
  ENSG00000232098_6 (sequence is synthesized)
ggtgtctgggtaccaaggtcactagccttgccacttttctatgttcctgatcccctactaaacagtccaccttttcgcctacttcccctgactcctgtaccctgtcccctctttctgcct

SEQ ID NO: 851749 - DNA, 120 bp, Artificial Sequence
  ENSG00000232098_7 (sequence is synthesized)
ctctttctgcctagtttgaagacactggtcatcccataacatgtcctgggctaatacatatcctcaaatcgttcttgaaaatctgttcctcttccctcctccccctccccctcccccccc

SEQ ID NO: 851750 - DNA, 61 bp, Artificial Sequence
  ENSG00000232098_8 (sequence is synthesized)
gccgggattgcagacggagtctcgttcattcagtgctcaatggacccgccttggcctccca

SEQ ID NO: 851751 - DNA, 80 bp, Artificial Sequence
  ENSG00000232098_9 (sequence is synthesized)
cgtccgggagggaggtggggggatcagtcccccacccggccagccgccctgtccgggagatgaggggcgcctctgcccgg

SEQ ID NO: 851752 - DNA, 120 bp, Artificial Sequence
  ENSG00000232098_10 (sequence is synthesized)
ggctttggggcggtttgcggcagtgggatcattgggcggtgggcggtgtggaggagtctccgctggtccgcagaaacgaacgaaggcgcgagaatcgggaagttctgcctcagtgacctg

SEQ ID NO: 851753 - DNA, 120 bp, Artificial Sequence
  ENSG00000232098_11 (sequence is synthesized)
tacgcgtcctagccgcagtgaatgttgctgaaccccggtgacctcacagtggaggggcggccccatggggccatcggaccgcgccgcgcgggggcgttcgccagggcctccgcagaagcc

SEQ ID NO: 851754 - DNA, 120 bp, Artificial Sequence
  ENSG00000262890_0 (sequence is synthesized)
tatgaaaaccccacctgtataggagaatacattttttatggatttttctagacatgatatatccatgacttgccgagttttggattagcctttgtattcattttctatggctgcataaca

SEQ ID NO: 851755 - DNA, 120 bp, Artificial Sequence
  ENSG00000262890_1 (sequence is synthesized)
aattaccacaaaactaggagagcaaaacaacacaaatttattatctcacagtttccatgggttgagagcccagtgtgaactggattctcagctcagggttccacaaggctgaaatcaagg

SEQ ID NO: 851756 - DNA, 120 bp, Artificial Sequence
  ENSG00000262890_2 (sequence is synthesized)
tgctggccagctgcatcctcatcaggaggctcaactagggaaagatctgcttccaaggaccctcaatgtgttggcaaaattcattcctttgtggccatatgactaaactccttacaggag

SEQ ID NO: 851757 - DNA, 120 bp, Artificial Sequence
  ENSG00000262890_3 (sequence is synthesized)
aagtactcacttgattcggtcaggccgactcaagttaatctctctttttattaattcaatgtctgctgattagggaccttaattacatctgcaaaatctcttctgcgatattacataata

SEQ ID NO: 851758 - DNA, 120 bp, Artificial Sequence
  ENSG00000262890_4 (sequence is synthesized)
taatcatgtgagtgatgcatagcccatcatatttacaagtcttgttcacgctgaaagagggcataatacagggcatgaacacgaaggggtgggaatattggaggtcatcctagaattctg

SEQ ID NO: 851759 - DNA, 120 bp, Artificial Sequence
  ENSG00000262890_5 (sequence is synthesized)
cctacttttgccctttactcattgcgtccctgtttctgttgaggaaaatactccattttcaagactgttataaggcctatatatgcacttttcattcattaaagaaaagtatcaccatgc

SEQ ID NO: 851760 - DNA, 120 bp, Artificial Sequence
  ENSG00000261094_0 (sequence is synthesized)
ggactaaaggaagacatgaacaaagtcaggaaaacaatgtatgaataaaattagactatcattaaagagaaattataaaaaggagctgaggccaggtgtgatggctcatgccggtaatcc

SEQ ID NO: 851761 - DNA, 60 bp, Artificial Sequence
  ENSG00000261094_1 (sequence is synthesized)
ctagctgggtgtggtggcatgcctgtgttcccagctactcaggagggtaaggcaggagaa

SEQ ID NO: 851762 - DNA, 74 bp, Artificial Sequence
  ENSG00000261094_2 (sequence is synthesized)
ctctactaaaaatacaagaactagctgggtgtggtggcatgcctgtgttcccagctactcaggaggcacccaga

SEQ ID NO: 851763 - DNA, 120 bp, Artificial Sequence
  ENSG00000261094_3 (sequence is synthesized)
cttagaaaaaaaaggagctgaaatgaaattctagacctgaaagatacagtaactgaaatgaaaaatttacatagaggggttcaaaaacagatttgaatgagcagaagaaagaaccagcaa

SEQ ID NO: 851764 - DNA, 120 bp, Artificial Sequence
  ENSG00000261094_4 (sequence is synthesized)
atttgaatatatttctttgtaaaatacccgcggaaccctgttccttcgttttacctcctgcttccttagctcaagccttcctcatcttaggcagcctccaaactattctatcaacctccc

SEQ ID NO: 851765 - DNA, 120 bp, Artificial Sequence
  ENSG00000261094_5 (sequence is synthesized)
cttttccctgctctagttttactagagtgatctttaaaaaaaccccaaatctaatattgtcactgtcctttaaaatatccaagggcacccgtgtgtctatagagtgaacttcagtttcct

SEQ ID NO: 851766 - DNA, 120 bp, Artificial Sequence
  ENSG00000261094_6 (sequence is synthesized)
tattttagcattcaaggaccttcctattttggctccagcctactacattgctttatttcacaccagccccacattccattcatatactgtaaccacattttcttgggtacaaagtcactt

SEQ ID NO: 851767 - DNA, 120 bp, Artificial Sequence
  ENSG00000261094_7 (sequence is synthesized)
actgaaaaaaagttgagcatatttggaaaccaaaattcattttctgtgaatgggatatcaatatatagcattggtaggcattgaaacagactatagtctatttttaaaatggattagatg

SEQ ID NO: 851768 - DNA, 120 bp, Artificial Sequence
  ENSG00000261094_8 (sequence is synthesized)
tatatctattgtagatacaatgttatgtatctaacataatatctaacatgttagattcataacgttgtatgtaatataatgaaacatgaagtataacctgtcacttgtgaggtatactag

SEQ ID NO: 851769 - DNA, 120 bp, Artificial Sequence
  ENSG00000261094_9 (sequence is synthesized)
tctgatatgtttgacttgaatccactgagtcttcaaatataactttcttgttcaagaaatacaaggcttgcaggaacaagctcaatgacttcatgaggaagcaaccactcagataaaaac

SEQ ID NO: 851770 - DNA, 120 bp, Artificial Sequence
  ENSG00000261094_10 (sequence is synthesized)
attttgcacttcaagtggcctgatttctacagtgaacaagaatcttttaatttttttttaagtgccataattaaaaagtcaagggatgtaaccagatggaatgtatggtcctgaattgga

SEQ ID NO: 851771 - DNA, 120 bp, Artificial Sequence
  ENSG00000261094_11 (sequence is synthesized)
taatttgggtatactggttgtagaaaaatataatttggtcaacagaatatttgattgtagttaggtattatgtgagaggaaattttcctgtaacattactgagttaagaaagccaactgt

SEQ ID NO: 851772 - DNA, 120 bp, Artificial Sequence
  ENSG00000261094_12 (sequence is synthesized)
aaaaataactttagatggatagaaaatgtgaatgtgatctaggaattaggtgagaagaaaatgtactgaaataaggtagatatttttaattgaaaaaggagatgactaaagtgatctcat

SEQ ID NO: 851773 - DNA, 120 bp, Artificial Sequence
  ENSG00000261094_13 (sequence is synthesized)
tttgaaaaaaaaaatacacacacacagaaggatatactctaaagtattaacattggccctgggaatgccatggtttttttttgtttttcattaaaacatagagacacggtctcactatgt

SEQ ID NO: 851774 - DNA, 120 bp, Artificial Sequence
  ENSG00000261094_14 (sequence is synthesized)
tgcccaggagttcgagggtggagtgtgatatgatcgtctgtgaatagccacagcactgcatcctggacaagatagggtctctttaaaaataagacttaactagcactttaataatcattg

SEQ ID NO: 851775 - DNA, 120 bp, Artificial Sequence
  ENSG00000261094_15 (sequence is synthesized)
tttttgttcccaactgcattgtacattcattgaggacagggactttaaacttcattatattgctgttgctgtgtttcacctttgaatgatttttaaataaaaatctcatctttgagtcac

SEQ ID NO: 851776 - DNA, 120 bp, Artificial Sequence
  ENSG00000261094_16 (sequence is synthesized)
aggcatgagccaccacacctggccttttttattaaaaaaaattttttttaaatgcaatgttttctttttttgttgttgttttagcttgtgtctattctccaaagcatgttgtactgattg

SEQ ID NO: 851777 - DNA, 120 bp, Artificial Sequence
  ENSG00000261094_17 (sequence is synthesized)
tattctccaaagcatgttgtactgattgtgtagtacaattttatttaaaaatgtatgttaagatttacataaatatttggggtgtccatgaatcaagaaatacatgaaagtatgggcacc

SEQ ID NO: 851778 - DNA, 120 bp, Artificial Sequence
  ENSG00000261094_18 (sequence is synthesized)
aaaacgttaaaagtggttttgttgggagttcaggggattttactttctccctaatactttattctttgaatatcttgaaatggatattttgtaactgtataaggagaaaggaagcgaaac

SEQ ID NO: 851779 - DNA, 120 bp, Artificial Sequence
  ENSG00000261094_19 (sequence is synthesized)
tttctcactgttttttctctggttgatcgggatgcattatccaccagaaaacactgtagacgactcactcaccaggaaaagagcatatgccagttggaataaataaaggggaagagtaag

SEQ ID NO: 851780 - DNA, 120 bp, Artificial Sequence
  ENSG00000262899_0 (sequence is synthesized)
cccaattggtaccacgtttaacaaatgagatcctgtctggtcttgtacaaaagcaataaaaggatcttcttcctaaaagcactgaggacaagaaaaagaaaagtatgtatcaataagaaa

SEQ ID NO: 851781 - DNA, 120 bp, Artificial Sequence
  ENSG00000262899_1 (sequence is synthesized)
ctcacatgaacctcatcacttgcgacttatgagagaaagaagaacagaaaaggtgtcctgtcttcccttcaaaatcaactagcaggccctttgtttttctccttttctattattcagctg

SEQ ID NO: 851782 - DNA, 120 bp, Artificial Sequence
  ENSG00000262899_2 (sequence is synthesized)
aagcacagcacaaaacacacaaatgtcagtggacaactgtcttttttataaaaaagaaaacaatttaggaaagattggtgggtaagaaaattggcacccactggctgaaaggtattttgg

SEQ ID NO: 851783 - DNA, 120 bp, Artificial Sequence
  ENSG00000262899_3 (sequence is synthesized)
atttcaacagatcatcccagtctgtctctagtaaggggagtacaacttttatgacccttcatcctcttgtgaagatggaagccttcactttaaaaatattttaggccaggtgcagtggct

SEQ ID NO: 851784 - DNA, 120 bp, Artificial Sequence
  ENSG00000262899_4 (sequence is synthesized)
catgcctgcattcccagcacttttggagaccgaggtgggaggatcacttgagccaggagtttcagaccagcctgagcaacatagcgagaccccgtctctacaaaacacaaaatttgaaga

SEQ ID NO: 851785 - DNA, 120 bp, Artificial Sequence
  ENSG00000262899_5 (sequence is synthesized)
aaaaaaaaaaaaatagccaggatggtagagcacaccagtagttctagctcaggaggctgaggtgggagagtcgcctgagcccaggaattcaaggttgcagtgagccatgacctcatcact

SEQ ID NO: 851786 - DNA, 120 bp, Artificial Sequence
  ENSG00000260025_0 (sequence is synthesized)
attaattaagtgctttaaacggtcttggtaaatattccgcgggagctggggaggaccgttgggatggctgtagcttgagttgaattttaactgtcctcattctgggttttgtcgctctgc

SEQ ID NO: 851787 - DNA, 120 bp, Artificial Sequence
  ENSG00000260025_1 (sequence is synthesized)
tgccaaggtgctgtgttacgggagagagtgactggaaagtaacaaagctgaatctttctccctggagtaaggccgaagactggattactacacgcctagacgtgacactacacccataga

SEQ ID NO: 851788 - DNA, 120 bp, Artificial Sequence
  ENSG00000260025_2 (sequence is synthesized)
tctcatgcatcattaatgccatatgacattgccattttctttctcagttcacggacaaaagtggtgggttttcattgtcttcactgattgtcaatgcattaataaagaagatgtgtggta

SEQ ID NO: 851789 - DNA, 120 bp, Artificial Sequence
  ENSG00000260026_0 (sequence is synthesized)
atcagccaagggtgtctgcatcggacaacactcaactcgggattggcacccagccagtgccctacactatacaagatgccactgtagggacagggatgacctctagcaagcccgggtctg

SEQ ID NO: 851790 - DNA, 120 bp, Artificial Sequence
  ENSG00000260026_1 (sequence is synthesized)
cactctactgggatttgctgggctagattctcagaggagctcaacattgattgagttcctcgctccacgttaaatctttggaaaattaactaaagatctcctagtaagatgcttgtaact

SEQ ID NO: 851791 - DNA, 120 bp, Artificial Sequence
  ENSG00000260026_2 (sequence is synthesized)
tactacataaggtgaaatagtgactttacagtacaaaaactataacccaagtattaccaccagcagcgggctaaatcaacaccacaggccccgtgatcaatatatgtgatgaggacatta

SEQ ID NO: 851792 - DNA, 120 bp, Artificial Sequence
  ENSG00000260026_3 (sequence is synthesized)
tgttgttgccccaagtcttgacgtgaatctgaccacaaggacaattcggacaacctgaaatggtgacgcattctacaaaataaacatcaatgtcatgaaagacaaagactcaagattttc

SEQ ID NO: 851793 - DNA, 120 bp, Artificial Sequence
  ENSG00000260026_4 (sequence is synthesized)
tgcttaatggagactaaagagatgcgacaacagaatgccaggcatgatcttggatattcttttggctcaaacagtcttaggacaattgaaaaaacgtgaatgaggtctgtagctaataga

SEQ ID NO: 851794 - DNA, 120 bp, Artificial Sequence
  ENSG00000260026_5 (sequence is synthesized)
attgtgtcaatgccacatccttggttttgttaattgcattgtggttacagaagagaatccctttgttttcaggaaatgcacacagcagtatttaatagtaaaggcacatcttgtctgcaa

SEQ ID NO: 851795 - DNA, 120 bp, Artificial Sequence
  ENSG00000260026_6 (sequence is synthesized)
gaggcaagtctgaggtcatcagccaagggtgtctgcatcggacaacactcaactcgggattggcacccagccagtgccctacactatacaagatgccactgtagggacagggatgacctc

SEQ ID NO: 851796 - DNA, 120 bp, Artificial Sequence
  ENSG00000260026_7 (sequence is synthesized)
tagcaaggtgaccctcagtgggccagagggggcttctgaagagaatttctctagcttcttggtgtttcctgcctgctactttcaaacaagggtcccatttttaatgttttcccagtaata

SEQ ID NO: 851797 - DNA, 120 bp, Artificial Sequence
  ENSG00000260026_8 (sequence is synthesized)
ttattgcaaaggtaaaggaaattatatttttgctcttattgttgttcactctactcccatttagcaattaacattgaaagcgggctaaatcaacaccacaggccccgtgatcaatatatg

SEQ ID NO: 851798 - DNA, 120 bp, Artificial Sequence
  ENSG00000260021_0 (sequence is synthesized)
ggtgtggctgtcagctgggagggatccctccgcccatgtaaacatcataaagggcaaggggagcgtctgttgtgggcgggggagcggctgccttcccggagagtcctctcggtccctagg

SEQ ID NO: 851799 - DNA, 120 bp, Artificial Sequence
  ENSG00000260021_1 (sequence is synthesized)
ttcccctcaagacgccggcaaccgccccgtcccttaacgtcacaccgggtctgctgggagccaaacagctgcggcctgatctgggagcgatagaatctcatcacttagggtcactaccgg

SEQ ID NO: 851800 - DNA, 120 bp, Artificial Sequence
  ENSG00000260021_2 (sequence is synthesized)
agttaaataataatcataactcatgtaagtctagaatttgtctcaaagttatgcctacctggctcgtaggatgccaacgttaggagtgaaaatagtcaacgctctcccgagagagcacat

SEQ ID NO: 851801 - DNA, 120 bp, Artificial Sequence
  ENSG00000260021_3 (sequence is synthesized)
gacactacatgagcttcatcaagaccctcggaggcccagaatgcgcaccaaagagccatcgacgataattcttctacccaacttttatttagtattattaaatattcagtaaagttaaaa

SEQ ID NO: 851802 - DNA, 120 bp, Artificial Sequence
  ENSG00000260022_0 (sequence is synthesized)
taaccaaatggtcacattttactgcatgacaatatgacactattgatcactttgattgtagtttgattgacaaataatcaaattgtcacaaactgcctataaatgttaattagatcatgt

SEQ ID NO: 851803 - DNA, 120 bp, Artificial Sequence
  ENSG00000260022_1 (sequence is synthesized)
tggttagtagtgtttttcagctcttttacatccttccttattttctatctacctgctttatctattattgaaatctccaactttatggatttgtctatgtctgcttacagttctatccat

SEQ ID NO: 851804 - DNA, 120 bp, Artificial Sequence
  ENSG00000260022_2 (sequence is synthesized)
gagtcttctgacctcctgataaacactgtgaaatggcctctttactcctgatcatattctttgctctgaattctgctttgtctggtgtgaaggtggagggagaatgatcacagatggaaa

SEQ ID NO: 851805 - DNA, 120 bp, Artificial Sequence
  ENSG00000260022_3 (sequence is synthesized)
aaagagctccggaaatggtaagtatatggatacacaatgaggctgttcttccaattgaatgaaatgtctctgaaagataactggactgtttaatcaaactgtttggcaataatagcaaaa

SEQ ID NO: 851806 - DNA, 120 bp, Artificial Sequence
  ENSG00000261092_0 (sequence is synthesized)
tatgaaagagactgagcccctatgagtgagggtgatgtcaacacaacagcaggcacccttggtaaccaagtcagcttccatattgatcaggactcttttgattgcaagaaaccaaactcg

SEQ ID NO: 851807 - DNA, 120 bp, Artificial Sequence
  ENSG00000261092_1 (sequence is synthesized)
tggctacacttaagccatccctttatctggctttcattagagcctcggccgcgcctcttttgtgggagagacttgagggagccgaggcagtttcccagccgctgtgatgttgctaaagat

SEQ ID NO: 851808 - DNA, 120 bp, Artificial Sequence
  ENSG00000261092_2 (sequence is synthesized)
taaaaaggagctttgaagctgcaccagttctctctgtgccccctcggtacaggacctcagaaagacccaagccatctggcaaacctgacataaagacaaaataaagtgattgaaacagtc

SEQ ID NO: 851809 - DNA, 120 bp, Artificial Sequence
  ENSG00000260029_0 (sequence is synthesized)
ctctgcccagcccaagctctcccagcctctgcctcccatcccccaggaggaaagacagtgcccaggctgggccaggcagctggccctggtgcccatgagcagaggggaccctccctggag

SEQ ID NO: 851810 - DNA, 120 bp, Artificial Sequence
  ENSG00000260029_1 (sequence is synthesized)
aactcgaaaatgccagtgaacaaggcccaaacacctccatcctgagtccttctccagccttaaagcaaatcatcttttaatcctgaaacaccaaatatttaatttatgctctacctcaaa

SEQ ID NO: 851811 - DNA, 120 bp, Artificial Sequence
  ENSG00000260029_2 (sequence is synthesized)
tgtcaagcccacctcccatcacatagctttgaaaccacgtaaagaagcctaacactttccatatggcaaagacatggggccttttaattgtgccaactggtatcattcaagggtaattcc

SEQ ID NO: 851812 - DNA, 120 bp, Artificial Sequence
  ENSG00000260029_3 (sequence is synthesized)
cttggaatctggcactcgggcaacagctgggccagcctccaatctcatcacccaaccccacacgtccccatgggctccaagaccctgcaggcaacttggactcatctgggacatttccca

SEQ ID NO: 851813 - DNA, 120 bp, Artificial Sequence
  ENSG00000260029_4 (sequence is synthesized)
cgactggctcatctcgaagcaccccctctctgggagttttgtatgtagcaccctccaggcggatgccctggcacagggcttctctacaaatggcttctcctagaaagtgctccagaaagg

SEQ ID NO: 851814 - DNA, 120 bp, Artificial Sequence
  ENSG00000260029_5 (sequence is synthesized)
gagaaacacacagtccacaccagcgggctgtcaacactacaaggttatggggaggattaagataatgtaagcaaagtgcttgacacatataggcacttaataaatactagttatcattgc

SEQ ID NO: 851815 - DNA, 120 bp, Artificial Sequence
  ENSG00000260029_6 (sequence is synthesized)
aataacaataatactagttggatgagccactgtgtctccagccacttagttgacaggccacgtaaaggactagaggcagagactagccccaaaacaggcctggggttggtgggaggacct

SEQ ID NO: 851816 - DNA, 120 bp, Artificial Sequence
  ENSG00000260029_7 (sequence is synthesized)
ctgccagcccttggaaaccagcagactttggagcccatgccctcctacatcctgatgatatcatggaagaacctaccagctaccccttcggcaccagagggaatcagggaaatgaactag

SEQ ID NO: 851817 - DNA, 120 bp, Artificial Sequence
  ENSG00000260029_8 (sequence is synthesized)
cctgagggttgcccattgctgtcctgttcaatatcttagtgcttcccaaacttggggcattccattcccacattcacaattttgaccacttgtacttaatatttttctctgaatggactt

SEQ ID NO: 851818 - DNA, 120 bp, Artificial Sequence
  ENSG00000261090_0 (sequence is synthesized)
aggccaactagtatctagctctctaactgccttgggccatcaaaactcccaaatcaaatattgttgacctggcttgtgtcaagtgcccatcactgaattagtcactatggccaggagcag

SEQ ID NO: 851819 - DNA, 120 bp, Artificial Sequence
  ENSG00000261090_1 (sequence is synthesized)
atgggccctcactagacagaactggtctgtggccgcccatggtgcccggggtgagggcagctccacctgaacacagagagtggcaaaggcaaagtttcctgacatagacgttcctgttcc

SEQ ID NO: 851820 - DNA, 120 bp, Artificial Sequence
  ENSG00000261090_2 (sequence is synthesized)
atttgtcccgcaaacgtttaaacatcacacatacttggttaaggcacactacttctacgtggtggggaaaatggcacttggaaaattcagtttcaatggtcctttcagagctacagcatc

SEQ ID NO: 851821 - DNA, 120 bp, Artificial Sequence
  ENSG00000261090_3 (sequence is synthesized)
gggtacagaactcacacaccctaccctgggtgtgagtaagagcatgggccttgtaatcttggcttgtttggaaagaggaaggggaaattccagaagtgaaggtcataacagttttctgtc

SEQ ID NO: 851822 - DNA, 120 bp, Artificial Sequence
  ENSG00000261090_4 (sequence is synthesized)
agatggggtggtggctcaaagcagaggttatgagcctgagtatgtagctccatcacccagtgtgaacttgggcaagtccttaccttttcccctctgcatcctctccatccacttccctca

SEQ ID NO: 851823 - DNA, 87 bp, Artificial Sequence
  ENSG00000261090_5 (sequence is synthesized)
cacacacacacacacacacacatttttattttaagacaattgttgattcacatgcagttttaagaaatgctagagatcaaggcactt

SEQ ID NO: 851824 - DNA, 120 bp, Artificial Sequence
  ENSG00000261090_6 (sequence is synthesized)
atgaataaagctgctatgaacgttcatgtacaggctttcgtgtgaataactcagcatatcggaggcccccaattaagccttgtccttccaactgacacttcatacctctcccaccatcat

SEQ ID NO: 851825 - DNA, 120 bp, Artificial Sequence
  ENSG00000261090_7 (sequence is synthesized)
ctcccagtgcaccagggtcacttgctggggccaggataggaaatcccagatacaaactctcccttcaaggattttttttttaccccaccagagctctccactgctccaggagaagaaaca

SEQ ID NO: 851826 - DNA, 120 bp, Artificial Sequence
  ENSG00000261090_8 (sequence is synthesized)
aaggattgggtctgagagctgggtgagattacatttatctaagaagcttccaaatgaaaactagcatttgtacttattgcatttcacctccaaatttgattacatttctctcccgctgta

SEQ ID NO: 851827 - DNA, 120 bp, Artificial Sequence
  ENSG00000261090_9 (sequence is synthesized)
aatctgcctttccttctgccaagttattattaaatccaggacagaattggtggagtgatacgtaaaatttccatcttggctttgacattccaggaagttacaaaccaattacagctgctg

SEQ ID NO: 851828 - DNA, 120 bp, Artificial Sequence
  ENSG00000261090_10 (sequence is synthesized)
agcctcaggcctttatgaatcacagagcacagcaagggatggaggaggccagagtggggacgggagggagacagtgaggtgggaatcaaaggtcaattaaaataaaacagtcaattttaa

SEQ ID NO: 851829 - DNA, 62 bp, Artificial Sequence
  ENSG00000261090_11 (sequence is synthesized)
ttggcatgcacctgtaatcccagctactcaagtggctgaggcagaagaattgcttgaacatg

SEQ ID NO: 851830 - DNA, 83 bp, Artificial Sequence
  ENSG00000261090_12 (sequence is synthesized)
aaaaattagctgggagtgttggcatgcacctgtaatcccagctactcaagtggctgaggcagaagaattgcttgaacatggga

SEQ ID NO: 851831 - DNA, 120 bp, Artificial Sequence
  ENSG00000261090_13 (sequence is synthesized)
aaagaaagaaaaagtaataatagagatcacagagcactttactcaactttccccatagtaacatcttgcatacatgtagtacaatatcacaaccaggaaattgacattgataccatccac

SEQ ID NO: 851832 - DNA, 120 bp, Artificial Sequence
  ENSG00000261090_14 (sequence is synthesized)
caatcttagattttgccagctttacatgcactcatgtgagcttgtttgtgtgtttagttctatgtagtttcatcatgtgcacagatttgtgtggccaccgccacagtcaagatctaccac

SEQ ID NO: 851833 - DNA, 120 bp, Artificial Sequence
  ENSG00000261090_15 (sequence is synthesized)
caagaggtctgttgtgctgtccttttattgcaacatctacctgcctccctcccctactctctgatctgcagcgatcattaatctggtcttcatttataattttgtaatttcaagaatgct

SEQ ID NO: 851834 - DNA, 120 bp, Artificial Sequence
  ENSG00000261090_16 (sequence is synthesized)
atagaaatggaatcatacagtaggtaacctttcaggcctggctttttctttcactcagcataattcccttgagatccatccaaatggttgcatgtatcaatagcttgttcctttttattg

SEQ ID NO: 851835 - DNA, 120 bp, Artificial Sequence
  ENSG00000261090_17 (sequence is synthesized)
ctgactagtaattcatagtatggatgttccactgtttaactgtttgctttttgaaggacatttggattgtttccaattattggctgttatgaataaagctgctatgaacgttcatgtaca

SEQ ID NO: 851836 - DNA, 120 bp, Artificial Sequence
  ENSG00000197099_0 (sequence is synthesized)
tgcctggagtgaagattctgcccattggtcaagagacctccctctcagatgctggctctgcccctgcctttgggggtcgacccttgtactcgcaggaccttaggtgactctattctactt

SEQ ID NO: 851837 - DNA, 120 bp, Artificial Sequence
  ENSG00000197099_1 (sequence is synthesized)
ctctgatcatccaggaagccaacctgcctgaggacgagtcatactctgtcctcccaccccaggccagagagtggtatctgtctttccacaagttcttgatgcagatgagcaggtaaccat

SEQ ID NO: 851838 - DNA, 120 bp, Artificial Sequence
  ENSG00000197099_2 (sequence is synthesized)
ctggagcaaagcacccatctaatcaggaacttctactttcaactttacatgcgtgagaaatgaacttctatcatgttagaactttgatgtcttcaaagcaaggcgagtgagtggcactct

SEQ ID NO: 851839 - DNA, 120 bp, Artificial Sequence
  ENSG00000197099_3 (sequence is synthesized)
tcagacaagaaggaagatggcaggtgaaatcatcttcttctaatgagccctgtgctatgcttgctgatgtccttggtcacggagattttcagaaaagccatggccttaccagtgaaggtt

SEQ ID NO: 851840 - DNA, 120 bp, Artificial Sequence
  ENSG00000197099_4 (sequence is synthesized)
acacagaggccactggagtcaagtaattcattgctccttattacatttaggcacttctttatccatcatgcaggctattgggattaaaatgggtcctttcaacaatgagtcaatattgaa

SEQ ID NO: 851841 - DNA, 120 bp, Artificial Sequence
  ENSG00000197099_5 (sequence is synthesized)
ggtctttgactggctatcctgtggatgtggactcaggctagcctgcgcaaagtgaaagacaggcaattagattgaaaaatacctgtgattcaaagaagtcacaagtcacagagacaaact

SEQ ID NO: 851842 - DNA, 120 bp, Artificial Sequence
  ENSG00000197099_6 (sequence is synthesized)
tttcccagtgtgttcgagtcagagaacctttgcaaagaccaacaggctaaaagagaaaatacaatgtcatatggagaagctttgagaacactatgctaagtgaaagaagccagatacaaa

SEQ ID NO: 851843 - DNA, 120 bp, Artificial Sequence
  ENSG00000197099_7 (sequence is synthesized)
aaaagaaaggagggaaatgcattcattaagaagagaaacacattctcccagcggccatgggcttcccattaagaccttcacctgcgcatttatcctctgggaggcagcagttccctgcaa

SEQ ID NO: 851844 - DNA, 120 bp, Artificial Sequence
  ENSG00000197099_8 (sequence is synthesized)
aggaggaaaggacctcatgcgaagcatatggtaaatagttagtgactgctgcttaactcagtttatcctgaccaatacacagaacagcaccagccacaattaggttgctggcagaggtgg

SEQ ID NO: 851845 - DNA, 120 bp, Artificial Sequence
  ENSG00000197099_9 (sequence is synthesized)
ccccaggccagagagtggtatctgtctttccacaagtttcaatttcctcggactgtgattcctgggttaaacttagtagcagcctggagcagaggaaaaggatgggagaatgtgttgtta

SEQ ID NO: 851846 - DNA, 120 bp, Artificial Sequence
  ENSG00000197099_10 (sequence is synthesized)
tggacttggcatcataattaaaattccatttcctaacactctctagctaagtgcctttagggatctgaatgatgcagtgtcgcaatcccattttataaatgaggcaaccaaaactcgaac

SEQ ID NO: 851847 - DNA, 120 bp, Artificial Sequence
  ENSG00000197099_11 (sequence is synthesized)
acttctatcatgttagagaaatccttacacggcgcccttgagagctttcatactgcaagtcatccattttcctcccctcaaacctggcatcggagtttattgaaacaaagcaaaataaaa

SEQ ID NO: 851848 - DNA, 120 bp, Artificial Sequence
  ENSG00000197099_12 (sequence is synthesized)
aaccagacaacgtctgtgctattatgtggatgaagaaaaagagggaaccgggatctgaatgatgcagtgtcgcaatcccattttataaatgaggcaaccaaaactcgaacaggaccatat

SEQ ID NO: 851849 - DNA, 120 bp, Artificial Sequence
  ENSG00000197099_13 (sequence is synthesized)
ggctaaaagagaaaatacaatgtcatgacacagctagaatatgtttccaagcctccccaacacgtgtgactgtgtataattgagttctaaccacaggaagcttgatgcagatgagcaggt

SEQ ID NO: 851850 - DNA, 120 bp, Artificial Sequence
  ENSG00000197099_14 (sequence is synthesized)
ctgccatggaggaaagtgttgaaaaaaaagggaactatacagcataaagatgggttttcacagatcctgtcaaggctgggcgacgagctggaaactccatctcaaaacaataacaacaaa

SEQ ID NO: 851851 - DNA, 120 bp, Artificial Sequence
  ENSG00000197099_15 (sequence is synthesized)
agaaacaggcccgggcagcgtctgccggcagtgtcatcaagaagacagcatgtggctgtggcagaggcctatcaaggttctaattccagtcccacattttctgactgtaagatcctaagt

SEQ ID NO: 851852 - DNA, 120 bp, Artificial Sequence
  ENSG00000197099_16 (sequence is synthesized)
ttggattctaagtgacagatactattccatcaggataaagcacacctccctttgtccacacagcccctagaagcaggcagtacagagcacagcagctacttatccccaccttacagatga

SEQ ID NO: 851853 - DNA, 120 bp, Artificial Sequence
  ENSG00000197099_17 (sequence is synthesized)
gatgactgagaagggagaaccagcactgcaaaatcctagactcctgacttggagttcagtactctttgattctacttctctgatcatccaggaagccaacctgcctgaggacgagtcata

SEQ ID NO: 851854 - DNA, 120 bp, Artificial Sequence
  ENSG00000197099_18 (sequence is synthesized)
gttgcctgtgcttcaacaccattcttcattctgcctttcacaaaatgtaccacctaagtgataaggagctggccataaagacattctctgacctactctgtttgatagtaggtcctcaga

SEQ ID NO: 851855 - DNA, 120 bp, Artificial Sequence
  ENSG00000197099_19 (sequence is synthesized)
tccgcattccaaagggatcctgtcccatacttgggagcaagaaatgccacacagagaggccatgaagaactcaaacagagaggccttgctgggtccttctttcagtctatgactcttaga

SEQ ID NO: 851856 - DNA, 120 bp, Artificial Sequence
  ENSG00000197099_20 (sequence is synthesized)
ttacagccttttgtcccatcacacttctgcattctgcacagcctttgtgaattctaagtatgcaagtggccagtttctttggatatctgagtcttcatttatgaagactccagtgtcagg

SEQ ID NO: 851857 - DNA, 72 bp, Artificial Sequence
  ENSG00000197099_21 (sequence is synthesized)
agccactgcgcccggctggtatagatatttaaaaaataagaaagttagtttctgggtcacgggaaactcatg

SEQ ID NO: 851858 - DNA, 120 bp, Artificial Sequence
  ENSG00000197099_22 (sequence is synthesized)
tgcctggagtgaagattctgcccattggtcaagagacctccctctcagatgctggctctgcccctgcctttgggggtcgacccttgtactcgcaggaccttaggtgactctgtaagtata

SEQ ID NO: 851859 - DNA, 120 bp, Artificial Sequence
  ENSG00000197099_23 (sequence is synthesized)
gtaaaacgcagttaatatgatgttatcattcaatcatttttaaaaagtggagcaaccagttgacaaggtaagactttttcctgacatctgtggttgtttatttaaaagaacagacaatat

SEQ ID NO: 851860 - DNA, 120 bp, Artificial Sequence
  ENSG00000197099_24 (sequence is synthesized)
ccactgcactccagccaaggtgacagagcaagacctcttctcaaaaaagaaaaagcacccacaattccaactgaaagttaactacattctatattttgtcataatttgttttccatcact

SEQ ID NO: 851861 - DNA, 120 bp, Artificial Sequence
  ENSG00000197099_25 (sequence is synthesized)
ttttgtatttacatttattttacatatttaaataaatccgtatgtatagttttgtatcccactttttttgttttttacttaacattgtaaccgttttactatgtcactaaaaactaaaaa

SEQ ID NO: 851862 - DNA, 120 bp, Artificial Sequence
  ENSG00000197099_26 (sequence is synthesized)
tttttgatagctgtatcatattctactgtatggatatactgtaatttacttaaccattctgtaatgttgcataaactatttgtttacaatatttttctattaaaaaacaactgacattaa

SEQ ID NO: 851863 - DNA, 120 bp, Artificial Sequence
  ENSG00000197099_27 (sequence is synthesized)
accattcttcattctgcctttcacaaaatgtaccacctaagtgataaggtgaatatcatttcactgaaaacgttcaaatgatatgaatataagaagagtgtgaaaaatcacccatcctgc

SEQ ID NO: 851864 - DNA, 90 bp, Artificial Sequence
  ENSG00000197099_28 (sequence is synthesized)
atatgaatataagaagagtgtgaaaaatcacccatcctgcaccccagcttcttctcagattgcaaccttcacctctggggctcaagcgat

SEQ ID NO: 851865 - DNA, 120 bp, Artificial Sequence
  ENSG00000197099_29 (sequence is synthesized)
ggaggaagcatgattcacataacttctgtggcctcaggtttcccatctgcaaacgggataaaaatagtatctatctcagtatctcagctgatcacggtggctcatgcctgtaatcccagc

SEQ ID NO: 851866 - DNA, 120 bp, Artificial Sequence
  ENSG00000197099_30 (sequence is synthesized)
gctacaactaagaagaatacgcttcttgtcaagatggcacatatgcacaggctaccggctgtctcctccagtatcctggaaaaactacaagaaaacatggattccaggaaacagtaacta

SEQ ID NO: 851867 - DNA, 120 bp, Artificial Sequence
  ENSG00000197099_31 (sequence is synthesized)
atatatgagaaaatcccacagatagagggctgttttgaactgtttcccatgactgcagaaaacaaaagactccagacagcaaacaaaacaaaaaacaccccaagacaccaaacaaaacac

SEQ ID NO: 851868 - DNA, 120 bp, Artificial Sequence
  ENSG00000197099_32 (sequence is synthesized)
agttaaaaccagtgggccagggctcagcccatgatgctctgcagggaaaggtagttgctggtacctgtaagggaatatcagctcaaaggccaagacagctagatacctgagaaggtctat

SEQ ID NO: 851869 - DNA, 120 bp, Artificial Sequence
  ENSG00000197099_33 (sequence is synthesized)
catctgccccacaaaagacaacaaactgaataacacatatattttaagcaactgtactttgcttaaaaaaagattagacagaccaggaacttaaaacaagcatgataatacttaaggagg

SEQ ID NO: 851870 - DNA, 120 bp, Artificial Sequence
  ENSG00000197099_34 (sequence is synthesized)
agtggtggtagggcaaaataaaacttatatgaaactgtaatcactaatgtgtgaaaatggaagattcaggaagtgtttcatatctgaaatatgaacccaacgtggaatcaacatgcatcc

SEQ ID NO: 851871 - DNA, 120 bp, Artificial Sequence
  ENSG00000197099_35 (sequence is synthesized)
tcatcatatgtttaattgatttccagtaaattggctgcttccatcaaggctgccttgggtgactatgtccaagcaaccaaattgctctctttaaatgcaaaaattagtaaagatttatct

SEQ ID NO: 851872 - DNA, 120 bp, Artificial Sequence
  ENSG00000197099_36 (sequence is synthesized)
ctctaaagtaagtttgaaattcttgcaatattcagattgacttggcagctatctgatgggttacctctttgtgtccccctgacatccttaatgtagacacatatgcatactagaatgttg

SEQ ID NO: 851873 - DNA, 120 bp, Artificial Sequence
  ENSG00000197099_37 (sequence is synthesized)
attcattaatccacagagaaaactgtaactactaagaagactagatattcatgcttgagaatgagtggttctgtttttgatggcaaacctctgacatacaatacatggtggcctattcct

SEQ ID NO: 851874 - DNA, 80 bp, Artificial Sequence
  ENSG00000197099_38 (sequence is synthesized)
tggcaaacctctgacatacaatacatggtggcctattcctacaacattcagaataaagaataagggagctgggtgcattg

SEQ ID NO: 851875 - DNA, 120 bp, Artificial Sequence
  ENSG00000197099_39 (sequence is synthesized)
tcaatttcctcggactgtgattcctgggttaaacttagtagcagcctggagcagaggaaaaggatgaactcagggcactggttggattcctgctgccagacgctagttgccttgttccca

SEQ ID NO: 851876 - DNA, 120 bp, Artificial Sequence
  ENSG00000197099_40 (sequence is synthesized)
aaggttaaatggctctgctgggttatccaaacatatttacagctagaacattgcaacactggggttgttaacctgctcatttgcatttgaaaatcacgtggcagcacagtgcatatttcc

SEQ ID NO: 851877 - DNA, 76 bp, Artificial Sequence
  ENSG00000197099_41 (sequence is synthesized)
tttggtagagacagggtttcactatcacctcggcctcccaaagtgttacgattacaggtgtgagccactgcacctg

SEQ ID NO: 851878 - DNA, 120 bp, Artificial Sequence
  ENSG00000197099_42 (sequence is synthesized)
gtgagccactgcacctggctgagctctggagctatttctttctaaccaagatggacgcagaggtctagaaccagcctgctaaacactcctcttatctaccactcaacttcatcatatcca

SEQ ID NO: 851879 - DNA, 88 bp, Artificial Sequence
  ENSG00000197099_43 (sequence is synthesized)
cattggtcaagagacctccctctcagatgctggctctgcccctgcctttgggggtcgacccttgtactcgcaggaccttaggtgactc

SEQ ID NO: 851880 - DNA, 120 bp, Artificial Sequence
  ENSG00000197099_44 (sequence is synthesized)
ttatttatttatgtatttatttgagttttattgtccaacagctgttaaattcactagtaattcaagggctcaagttgtaatatctaataatctaacaggaataggaagaaaaacttaaaa

SEQ ID NO: 851881 - DNA, 120 bp, Artificial Sequence
  ENSG00000197099_45 (sequence is synthesized)
tgtttttaaatatgccttattgtcctgccaaatcttgaattggtgaaatactgagttagtactactatagaaattatgtggattaaattttgtaattagaaaaattatttggggttttta

SEQ ID NO: 851882 - DNA, 120 bp, Artificial Sequence
  ENSG00000197099_46 (sequence is synthesized)
ggacgtctggaatcaggtggctcacagtcattccagtatttcctggataggaccgaacagtccgattcttgcacatctaagactaagtaatatacagttgtattttcctgaggaatgcca

SEQ ID NO: 851883 - DNA, 120 bp, Artificial Sequence
  ENSG00000197099_47 (sequence is synthesized)
tgtgagtagcacatggaaacctagcgggtttttttttatgtattaaagctatatatttattacttaaacagaattcctgttcctctcactgtctttgcagatgctctacctttgcgtcat

SEQ ID NO: 851884 - DNA, 120 bp, Artificial Sequence
  ENSG00000197099_48 (sequence is synthesized)
ttgatctattgattccaatacatagcttcaatgagttatttccaaatctttttaagtggtcctgatttgtcttctgcccataaacttgaagaagctatcactaaacggcagtggtggttt

SEQ ID NO: 851885 - DNA, 120 bp, Artificial Sequence
  ENSG00000197099_49 (sequence is synthesized)
ggggcctgaacatctgcttggctgggtcagctgctatgacaatgcccgggcgatcgtgccctccagcgctgcctgcatgccgaggaggaagcgagtccccacgtgaataatcgggctccg

SEQ ID NO: 851886 - DNA, 120 bp, Artificial Sequence
  ENSG00000197099_50 (sequence is synthesized)
agacgggagaaagcttagtcctaaaagggaagtgaggaaagctgataagcaacctcatctaagctgcggaaagaccccaaagacaaggaactggcggcaccatgtgcctttggacatggg

SEQ ID NO: 851887 - DNA, 120 bp, Artificial Sequence
  ENSG00000197099_51 (sequence is synthesized)
tggacgctggttgaaaatctgttgaaaacgcagtggaacttcaggaatttcttcccctgccacaggctggagcgcaatggtgcgatcttggctcaccgcaatctctgcctcccgggttca

SEQ ID NO: 851888 - DNA, 120 bp, Artificial Sequence
  ENSG00000197099_52 (sequence is synthesized)
aaaggaaaaatttctgcatgtgcacacacagatcttggaagtttattcatctcagcagaggcagacaggagcatcaacagccttggggacagcagcagtggtgattctacttctctgatc

SEQ ID NO: 851889 - DNA, 120 bp, Artificial Sequence
  ENSG00000197099_53 (sequence is synthesized)
tgcctggagtgaagattctgcccattggtcaagagacctccctctcagatgctggctctgcccctgcctttgggggtcgacccttgtactcgcaggaccttaggtgactctcccctagaa

SEQ ID NO: 851890 - DNA, 120 bp, Artificial Sequence
  ENSG00000197099_54 (sequence is synthesized)
tttcctccatctgcctgcctgtctcagctggaaatctccatcatcagtcagtggactgatggatcatggcactaaaactcctcagtagaaggcagctgcattatctaagcgggggaacat

SEQ ID NO: 851891 - DNA, 120 bp, Artificial Sequence
  ENSG00000197099_55 (sequence is synthesized)
gttaaacaggtaccattataaaaggaatgacttcaggtaaaatagaacaatgaagaggctgtcgttttgaagtcaaatctgaatttctcacctggctctattactttcttactgtgtaat

SEQ ID NO: 851892 - DNA, 120 bp, Artificial Sequence
  ENSG00000197099_56 (sequence is synthesized)
aacatggttgtccatgcttcagtcatgcctgtccaagaagtcttcataaaaggcccaagaggacagggttcagggagttttggagacctgaacacatggaggctgacaggaaggctggag

SEQ ID NO: 851893 - DNA, 120 bp, Artificial Sequence
  ENSG00000197099_57 (sequence is synthesized)
tgggtggatcacctgagatcaagaattcgaaaacagcctggccaacgtggcaaaacccccatctgtacccaaaatacaaaaattagcctggcgttgcagcgggcgcctgtaatcccagct

SEQ ID NO: 851894 - DNA, 120 bp, Artificial Sequence
  ENSG00000197099_58 (sequence is synthesized)
actgaagagccaagaagaatctgaacagacaggacttgctgggtttagatcattccctttttgtccaatcacatttcaacatggttgtccatgcttcagtcatgcctgtccaagaagtct

SEQ ID NO: 851895 - DNA, 120 bp, Artificial Sequence
  ENSG00000197099_59 (sequence is synthesized)
tcataaaaggcccaagaggacagggttcagggagttttggagacctgaacacatggaggctgacaggaaggtgggaagatcatctgagcccggagaggtggaggctgctgtcagtcaaga

SEQ ID NO: 851896 - DNA, 120 bp, Artificial Sequence
  ENSG00000197099_60 (sequence is synthesized)
tgccttgagcccaggagtttgaaactagcctaggcaacatgacgaaaccctgcctctacaaaaaaatacaaaaaatgagttgggtgtggtattgcaggtgggaagatcatctgagcccgg

SEQ ID NO: 851897 - DNA, 120 bp, Artificial Sequence
  ENSG00000197099_61 (sequence is synthesized)
tgccttagcctcctgagtagctgggattgaagaaaactcgggaaatatcaaaaacttccaaaaaatataaagaatcagaaaaagcggccggatgcagtggcttacacctgtaataccagc

SEQ ID NO: 851898 - DNA, 120 bp, Artificial Sequence
  ENSG00000197099_62 (sequence is synthesized)
tccttgcccctcctcttcaaacgggatttcgtctctatggattacagtcttgatttttggttaaaatcagaagattgctctttagcttctactctctcctgaaagctcactaaagtacag

SEQ ID NO: 851899 - DNA, 120 bp, Artificial Sequence
  ENSG00000197099_63 (sequence is synthesized)
ccagcctggatgacagaaaaaccctgtctcaaaaaaaaaaaaaaaagtacttaaacactaaagaaaattggaaaagagacaacagcccacaaagttgcttaaattggaaagcaaatggga

SEQ ID NO: 851900 - DNA, 120 bp, Artificial Sequence
  ENSG00000197099_64 (sequence is synthesized)
gacggctgtctgctagaagaaattgctaagcattgagggagaatgtgttgttaaacctcagaaaaatcctggacttggcatcataattaaaattccatttcctaacactctctagctaag

SEQ ID NO: 851901 - DNA, 120 bp, Artificial Sequence
  ENSG00000197099_65 (sequence is synthesized)
tcttgtgccttagcctcctgagtagctgggattgaaggtgtgcaccactacaccctgctaattttggaatttttattaggttggtgcaaaagtaattgtgattttgccattactttggca

SEQ ID NO: 851902 - DNA, 75 bp, Artificial Sequence
  ENSG00000197099_66 (sequence is synthesized)
gccctcaacccccggtattttgtctagagacagggttttgccacattgtccaggctggtctcaaactcctggtct

SEQ ID NO: 851903 - DNA, 120 bp, Artificial Sequence
  ENSG00000197099_67 (sequence is synthesized)
aggctggtctcaaactcctggtctcaagctgcctggcccagggtgcttctaatatgaacacagctcaaaacttagttttgggacaaggtggtgctgtgataaactcagctggcaaactcc

SEQ ID NO: 851904 - DNA, 120 bp, Artificial Sequence
  ENSG00000197099_68 (sequence is synthesized)
ctcccagggagcagaaagcaaaggagatgctccttggctgaactccctcattccagaataagtaaaaggcaaaagatcctctggagttcttcaacgggaacttcgtgattttcctgcctt

SEQ ID NO: 851905 - DNA, 88 bp, Artificial Sequence
  ENSG00000197099_69 (sequence is synthesized)
gaattaactgttgaatctgttagactcactgaagtagatattgaaaggaaaatctactgaaagtgaactaagtatggccgggcacggc

SEQ ID NO: 851906 - DNA, 120 bp, Artificial Sequence
  ENSG00000197099_70 (sequence is synthesized)
ctgccttctaaaaatatatatcacctaagtgataagctgtgaccctgaggatgggtgaggaagggcattgcaccttttgcctctacagtggatatggtgttttgcattcatcaagcctaa

SEQ ID NO: 851907 - DNA, 120 bp, Artificial Sequence
  ENSG00000197099_71 (sequence is synthesized)
gtaagcttctacctttgatgatcacatatttggtagtgcgtgatggtggtgggtggtgggtggcggtggtggtgggtggtgaggggtggtagtggtggtgggtggtggtgggtggtggtg

SEQ ID NO: 851908 - DNA, 120 bp, Artificial Sequence
  ENSG00000197099_72 (sequence is synthesized)
ggtaggtggtgggtgatggtggtgggtggtgggtggtgggtggtggtgggtggtgggtgatggtggtgggtggtgggtggtggtggttgggtggtggtggtggatggtggtggtggtggg

SEQ ID NO: 851909 - DNA, 120 bp, Artificial Sequence
  ENSG00000197099_73 (sequence is synthesized)
tgatggtggtgggtggtgggtggcggtggtggtgggtggtgaggggtggtagtggtggtgggtggtggttggtggtggtggatggtggtggttggtggtggtgggtggtgggtggtgggt

SEQ ID NO: 851910 - DNA, 120 bp, Artificial Sequence
  ENSG00000197099_74 (sequence is synthesized)
gatggtggtgggtgatggtggcgagtggtggtgggtggtgggtgatggtggtgggtggtggtgggtgatgatggtgggtggtggtgggtggtgggtggtgggtgatggtggtgggtggtg

SEQ ID NO: 851911 - DNA, 120 bp, Artificial Sequence
  ENSG00000197099_75 (sequence is synthesized)
gtgggtggtgggtggtggtggatggtggtggtggtggtgggtggtggtggtggttgtggtggtggtggtgggtgatggtggtgggtggtgggtggtggtggtgggtgctggtggtggtat

SEQ ID NO: 851912 - DNA, 120 bp, Artificial Sequence
  ENSG00000197099_76 (sequence is synthesized)
gtgtgtgtgtgtgtgaggcctggactcctagtgatagtacaaatcccaagtgacttcaaggttaaacacaattcactcaccgtcttagtggcttcagttatgcggtacaatacaaactgg

SEQ ID NO: 851913 - DNA, 120 bp, Artificial Sequence
  ENSG00000197099_77 (sequence is synthesized)
actgtgaactacagtttccttgtaaaagaatgatgttcatgggggccttagagtggttgtgaggattaagttatatgccaaaagtaaattatctagcatagcaaatggctgtaataggtg

SEQ ID NO: 851914 - DNA, 69 bp, Artificial Sequence
  ENSG00000197099_78 (sequence is synthesized)
gctgtaataggtgttcgataaatgttttttttcttttgagactgaatttcattttgtcacccagctcaa

SEQ ID NO: 851915 - DNA, 120 bp, Artificial Sequence
  ENSG00000197099_79 (sequence is synthesized)
tggagacctcagttgcctgtgcctaggacaatgaggaatggtgtcaaagagggatttttacaacttcagctggtcccttggaggaaagtgttggacaggagggcatctgtatagcataaa

SEQ ID NO: 851916 - DNA, 120 bp, Artificial Sequence
  ENSG00000197099_80 (sequence is synthesized)
atatcagggatccaatcgtcatcactctgtatgggagctggtgatataggaggcatcatagttgcaatgagatcagagtcctgaaagtcagaaaaggactttgtcaaaggaaaaatttct

SEQ ID NO: 851917 - DNA, 120 bp, Artificial Sequence
  ENSG00000239219_0 (sequence is synthesized)
aatccgccggctggcgcccctggaatggggaggtcggccgcctggcggggccagcggtccttagcggtgccttctctcccctcttccctccgctcctgctgtgcgggaactggagaatcg

SEQ ID NO: 851918 - DNA, 120 bp, Artificial Sequence
  ENSG00000239219_1 (sequence is synthesized)
ttaggacgtggaggaagcagagaagtggatcagagaacaggagggctgggaagagtcctggtttctcaatcctgactgagcatctgaatcacctgagaagctactaaaatgcagattccc

SEQ ID NO: 851919 - DNA, 120 bp, Artificial Sequence
  ENSG00000239219_2 (sequence is synthesized)
cgaccccatccccttagagtcagagtctgtgcatttagggtgcggcctttctcagagggatcgactgagacctactgaaccctagaagtctttacctgaggcagttcctgcaatgtactg

SEQ ID NO: 851920 - DNA, 120 bp, Artificial Sequence
  ENSG00000239219_3 (sequence is synthesized)
tatatttcatgacattccatgtaaaagatgacaagaccgagaccgttgagtgacagagataagaactgacttatctaaggctccacaggtggtagatggcagagccgagacctgagccaa

SEQ ID NO: 851921 - DNA, 120 bp, Artificial Sequence
  ENSG00000239219_4 (sequence is synthesized)
ttatcttttctcctgcactgtgcggggtaatacagctcgtttaaaacaagctggagtctccattccgttttccgcgttgcttctcacaactcactgttagaatccagaagtaagagaacc

SEQ ID NO: 851922 - DNA, 120 bp, Artificial Sequence
  ENSG00000239219_5 (sequence is synthesized)
cggggaagcgtaaggaagatgaataggacaaagattctaagaaggtgggaaggaagaaggctgcagtctatttcaagtctggtgaatttcaatcactgtagcctttattgttattttaga

SEQ ID NO: 851923 - DNA, 120 bp, Artificial Sequence
  ENSG00000239219_6 (sequence is synthesized)
gccacctagaccaaaagagaaggagctcaaattgctggaggggatttagtggcaggaggacaaagtcagaagagaaatttttcacagtatatcttcttgagccatgtgaccatatgctct

SEQ ID NO: 851924 - DNA, 120 bp, Artificial Sequence
  ENSG00000239219_7 (sequence is synthesized)
gcagccacagtggctgaagatgagaggactcctgtgccagccaaggtggaagcagaaattactccccagtctccactgactacaggaacaggagggccacacacccatttggtggccata

SEQ ID NO: 851925 - DNA, 120 bp, Artificial Sequence
  ENSG00000239219_8 (sequence is synthesized)
acattgaaagctgggacagcaggactggtctggacctgaggcgtaaaagacaacacttgcagccagccctggtacttgcatagtggcaaaatgtcccaagctggaggaaatggataagaa

SEQ ID NO: 851926 - DNA, 120 bp, Artificial Sequence
  ENSG00000239219_9 (sequence is synthesized)
ttgggtacacatcacccgtactgggaataaacaaatgtgttctgattatttggaaaaagcagacattctaggggtagggagttctaaagccttggtgcacttgaatggataaacttccca

SEQ ID NO: 851927 - DNA, 120 bp, Artificial Sequence
  ENSG00000239219_10 (sequence is synthesized)
ggagcagagttttccaagcatggctccctgtggttcacctctaccaagcttaacctaccttctgcttaggcagagcgaagaggcacctcagcataactcagatcaaaatggaagcatctc

SEQ ID NO: 851928 - DNA, 120 bp, Artificial Sequence
  ENSG00000239219_11 (sequence is synthesized)
atttcttaaaagctgtcaaagaattggtgtgaggtttaaaaacgtctctgagcttgatggaaggaaggtaggcggtgatagttcatgctccctttcctccagacacttctcattttcctt

SEQ ID NO: 851929 - DNA, 120 bp, Artificial Sequence
  ENSG00000239219_12 (sequence is synthesized)
tcttaacctgctttgatattatgatttcttttgcttcatttgttaagttctcttacaacacttcttgttcacaagtgagtgaagagctgttctctgcttgtaacgttggaaatgggggag

SEQ ID NO: 851930 - DNA, 120 bp, Artificial Sequence
  ENSG00000239219_13 (sequence is synthesized)
tgtttcagaaatgacacaacaaagcattaagccatgaaacaagaaggggaacttcagacagaattacaacagtcatttgagaatctcactgagagctaataaaagccacacacacacaga

SEQ ID NO: 851931 - DNA, 120 bp, Artificial Sequence
  ENSG00000239219_14 (sequence is synthesized)
aaattgctggtgaaagaagactgcagctgagttctattatcaaagcaaagtgctgtactgtacttgaaataactctagcaaatactgtgcttcctgcacagaacctgttggattactcac

SEQ ID NO: 851932 - DNA, 120 bp, Artificial Sequence
  ENSG00000239219_15 (sequence is synthesized)
acaaatgtcaaagaacaggttgacattttagcaagttatcagcctggcccatataaaaaaagacatttctagtttttacactttgcagggttcagagagcagttgaatgttatttttagt

SEQ ID NO: 851933 - DNA, 120 bp, Artificial Sequence
  ENSG00000239219_16 (sequence is synthesized)
ctatgatccaaagcagctaatgacagagtctaccttagaagataaacaggcttctgatttataacacaaggctaatggtagatattgtgtgatgtgtccagttaaattaacgaaatagct

SEQ ID NO: 851934 - DNA, 120 bp, Artificial Sequence
  ENSG00000239219_17 (sequence is synthesized)
ttgcaacagtgtggagtaaagacttaggcttaaaacagagaatttgaggattgagataagtccagagaagcagcaggatggagtgcagatgcaagagaaaggctatgtcaatgccatatt

SEQ ID NO: 851935 - DNA, 120 bp, Artificial Sequence
  ENSG00000239219_18 (sequence is synthesized)
ataaatatagctcatagacagcatatcctagtgtgtgtctgaagaggcctgtgcccttgaggaaaggggagattatgaccttgtcccccagtgtcatttgcataaattcttagagacctt

SEQ ID NO: 851936 - DNA, 120 bp, Artificial Sequence
  ENSG00000239219_19 (sequence is synthesized)
ggggcagtgagtaggagactggttgagatgattactataggaaaattgaataacttaaagtatggatatcttactgttacaggaaatgcttaggaggtgaggtactctgaatttagaata

SEQ ID NO: 851937 - DNA, 120 bp, Artificial Sequence
  ENSG00000239219_20 (sequence is synthesized)
tgatggcctaagggattcggagtcaagaagcaggacatgggatgaagatacatccactgtcaagctggtcattacgacagggagaaatagccctccacagagtgagactagtgagacttg

SEQ ID NO: 851938 - DNA, 120 bp, Artificial Sequence
  ENSG00000239219_21 (sequence is synthesized)
caagaattgaatgatggtcccgttggacgaaactctttagggtgagtttgcttgtctgggaaagacagaactcagagccctaattgagatgaactgcaagatgggttcagcaggagaaag

SEQ ID NO: 851939 - DNA, 120 bp, Artificial Sequence
  ENSG00000239219_22 (sequence is synthesized)
tggctggaaagggggagggaccaggagccaaatgggtgactatctgccaggtggtctcctgagggcacgcatcttccctggtggtgtgactagaaagagggagtccaaagcacagtccct

SEQ ID NO: 851940 - DNA, 120 bp, Artificial Sequence
  ENSG00000239219_23 (sequence is synthesized)
tctcctccacttggcacacatcaacactttcctcttttcctgtgagccaaggtagaaggtctggtccagaatggacgatatgggtggaggggtgagtcagtattgtttttcatgttggtg

SEQ ID NO: 851941 - DNA, 120 bp, Artificial Sequence
  ENSG00000239219_24 (sequence is synthesized)
gttggactcagtttaaaagatggatgtcttagggtagtaggtagcatagttttcctagctttgttgtcacaggtgatagaagctggaccataagttagggtcacagctcccttgattctc

SEQ ID NO: 851942 - DNA, 120 bp, Artificial Sequence
  ENSG00000239219_25 (sequence is synthesized)
cttcttctttgttctccttcctctttcacaactctctctcctaggtacttttagtcaggctgcagatggaattctgggcgtttgctccagagagaattttcctaggtagcttttgcgtta

SEQ ID NO: 851943 - DNA, 120 bp, Artificial Sequence
  ENSG00000239219_26 (sequence is synthesized)
aacagacttcattatacattttgctttgcatggggcctctctctcctgacacagatacatgggccccttgtagcccacagcccccagtgtcacacattagtggcacaggcttggttttga

SEQ ID NO: 851944 - DNA, 120 bp, Artificial Sequence
  ENSG00000239219_27 (sequence is synthesized)
cattggttcaaggtacccagtgaagagcactttctgtaagaacagttcaatggcaggacccataatggttatgagcacggaggcctccagtgcaggagcatccgcagtggttgctgatcc

SEQ ID NO: 851945 - DNA, 120 bp, Artificial Sequence
  ENSG00000239219_28 (sequence is synthesized)
ccagaagggagacgtactctctttctttttgtgtttccaaaggcaaaggcatactcttaggaggcagacagaaagatgtacagttaagaagtggggtttttaggttctgttaacagctgg

SEQ ID NO: 851946 - DNA, 120 bp, Artificial Sequence
  ENSG00000239219_29 (sequence is synthesized)
tttattaccttttttggaactttctcaccctttctgcagtgaaataggctatttctctatgtaggagtacacctgtggggaaaaaaatgtgtggaaacctagctattccccaaaaaggag

SEQ ID NO: 851947 - DNA, 120 bp, Artificial Sequence
  ENSG00000239219_30 (sequence is synthesized)
cacaaaaagaaggacatctgagattgctgaatacttttcagatgacaaagaacttagaatgttgagaggggacttacagggaatgggctgataaaagacttgagtgtcatctagtattta

SEQ ID NO: 851948 - DNA, 84 bp, Artificial Sequence
  ENSG00000239219_31 (sequence is synthesized)
acctgcttataataaacgctctaatcaacaaatctactggatcataagctctgccaaggtagcgcctgtggtgttcccttttta

SEQ ID NO: 851949 - DNA, 120 bp, Artificial Sequence
  ENSG00000239219_32 (sequence is synthesized)
taagctctgccaaggtagcgcctgtggtgttccctttttatccttagcctgtagcaccaggcctggcacatagattcttggtaaatatctactgagtgaatgaattgttgaacagctcgt

SEQ ID NO: 851950 - DNA, 120 bp, Artificial Sequence
  ENSG00000239219_33 (sequence is synthesized)
aatgaagaactgattctgagaatctgtggaatacttcaaaagagaatgaatacaatgcatatattaaaagaggaggcagtctgcagccactgccacctccgccaccgccagctgtgcggg

SEQ ID NO: 851951 - DNA, 120 bp, Artificial Sequence
  ENSG00000239219_34 (sequence is synthesized)
tgagcatccccaggcagcacgttggaagttgttttcaaccatatccagcccttgccaaatacatcctgtttgtcacacatccaaagtgaggtccctccagctataaggtgggcaccatgg

SEQ ID NO: 851952 - DNA, 120 bp, Artificial Sequence
  ENSG00000239219_35 (sequence is synthesized)
cagagaagtttttgactgtctctactgcagggaccccttgcagaggaaaaagtatgtgcagaagggtgaccaccactgctgcctgaaatgctttgacaggttctgtgccaacacctgcgt

SEQ ID NO: 851953 - DNA, 120 bp, Artificial Sequence
  ENSG00000239219_36 (sequence is synthesized)
ggaatgctgcaagcccatccatgtggactccaaggaggtgcactataaaaactgctcctggcatgacccctgcttccactgtgccaagtgccttcaccccttgccaatgagacctttgtg

SEQ ID NO: 851954 - DNA, 120 bp, Artificial Sequence
  ENSG00000239219_37 (sequence is synthesized)
gccaaggacaacaagatcctgtgcaacaagtttgccactcaggaggactctcccaagtgtaaggggtgcttcaaggcctttgtggcaggagatcaaaaatggagtacaaggggaccatct

SEQ ID NO: 851955 - DNA, 120 bp, Artificial Sequence
  ENSG00000239219_38 (sequence is synthesized)
cgcttcacctgtagcaactgcaagcaagtcatggggactggaagcttcttctctaaagggaaggacttctactgtgtgacttgccatgagaccaagtttgctaagcattgtgtgaagtgc

SEQ ID NO: 851956 - DNA, 120 bp, Artificial Sequence
  ENSG00000239219_39 (sequence is synthesized)
aacaaggccatcgcatcttggggagtcacttactaggatgagccctggcatgccgagggctttgtatgtgttacctgctctaagaagctggctgtgcagcatttcaccactgtggaggac

SEQ ID NO: 851957 - DNA, 120 bp, Artificial Sequence
  ENSG00000239219_40 (sequence is synthesized)
cagtaatactgtgtggattgctacaagaactttgtggccaagaagtgtgctggatgcaagcaccccatcactgggtttggtaaaggctccagtgtggtggcctatgaaggacaatcctgg

SEQ ID NO: 851958 - DNA, 120 bp, Artificial Sequence
  ENSG00000239219_41 (sequence is synthesized)
cacgactgctgcttccactgcaaaaaatgctctgtgaatctggccaacaagcactttgttttccacgaggagcaagtatattgccctgactgtgccaaaaagttgtaaactgacaggggc

SEQ ID NO: 851959 - DNA, 120 bp, Artificial Sequence
  ENSG00000239219_42 (sequence is synthesized)
tcctgccctgtaaaatggaatttgaattttgctctttgtgtccttactctctgccctataccatcaatggggaagagtggtctttcccctctttaaaggtctcctgtcttttctcccgtt

SEQ ID NO: 851960 - DNA, 120 bp, Artificial Sequence
  ENSG00000239219_43 (sequence is synthesized)
ttacagtattactcaaataagggcacacagtgatcatattaggatttagcaaaaagcaaccctgcagcaaagtgaatttctgtccagctgcaactgaaaaacgaaaatttaagtagattg

SEQ ID NO: 851961 - DNA, 120 bp, Artificial Sequence
  ENSG00000239219_44 (sequence is synthesized)
actcttctgcatgtttctcacagagcagaaaagtgctagtcatttagccacttagtgatgtaagcaagaagcatatgagataaagcccccactgagatgcctcttgcggctcagctggga

SEQ ID NO: 851962 - DNA, 120 bp, Artificial Sequence
  ENSG00000239219_45 (sequence is synthesized)
cctaccgtgtagtcacgcgacatgcaagagttgtagtggctgcttcaactcgctgctcaccctcttctgtgagcaggaaaagaacttactgacgtgcatgatttaacttcctcatcaaaa

SEQ ID NO: 851963 - DNA, 120 bp, Artificial Sequence
  ENSG00000239219_46 (sequence is synthesized)
ctctgaccttccttctgttattttgtgctttcaaatgactaatatgcacttccagaaaattaacatttgaacttagctgtaattctaaactgacctttccccatactaatgtttgatttc

SEQ ID NO: 851964 - DNA, 120 bp, Artificial Sequence
  ENSG00000239219_47 (sequence is synthesized)
cccatgtggcatgttttctgagtgttcctaccttaaagcatggaacatgcaggtgatttgggaagtgtaggcagatctgagaaaacgagcctgtttcagaggaacattgtcacagcaaat

SEQ ID NO: 851965 - DNA, 120 bp, Artificial Sequence
  ENSG00000239219_48 (sequence is synthesized)
acttctggaaacttaacaaaaccaaccctgatgtcctttttattgtttttaattaggaatatttttgttttaattgatagcaaaatagtttataggtttggaaacatccatgaaaatatt

SEQ ID NO: 851966 - DNA, 120 bp, Artificial Sequence
  ENSG00000239219_49 (sequence is synthesized)
ggtgatccacccacctaggcctcccaaaatgttggcattacaggcgtgagccgccatgcctggcctgcatgaaaatattctagccctttcagatgttcctgtagtgttgaaattcatcct

SEQ ID NO: 851967 - DNA, 120 bp, Artificial Sequence
  ENSG00000239219_50 (sequence is synthesized)
gaaattcatcctatggaagtaactgcaaaactctatagggggagttgagcaggtgccaggactgtcatcaacatggatatgacagtacagagcagtggtgagttgaatcccttgtaacgc

SEQ ID NO: 851968 - DNA, 120 bp, Artificial Sequence
  ENSG00000239219_51 (sequence is synthesized)
agttgtctgctctttgtccatgtgttaatgagggctgcaaagtccctcctatagcgattcctaggaattttcctcaagaggaaatgcggatttccacctaccacttacctgaaatacagg

SEQ ID NO: 851969 - DNA, 120 bp, Artificial Sequence
  ENSG00000239219_52 (sequence is synthesized)
atcacctacttactgtattctacattattttatgatataatgagacaatatcaaaagtaaacatgtaatgactatgtgtactaacattcttgtaggagtggttagagaagctgatgtctc

SEQ ID NO: 851970 - DNA, 120 bp, Artificial Sequence
  ENSG00000239219_53 (sequence is synthesized)
atttctacattctgtcattagctgttatcgtctaatgtttcagtgtatccttatggaaataaagcagcatatgaatttaaaaaaagaggaggattagtccaggaactacagaatgattaa

SEQ ID NO: 851971 - DNA, 120 bp, Artificial Sequence
  ENSG00000239219_54 (sequence is synthesized)
cttacttttatactgtaaaaaagttagtatccccatgatgtttctccaaaatagtttgaaaataattagaagaattataaattatagtgtgtctctcctctcttaccaaggactaagggc

SEQ ID NO: 851972 - DNA, 120 bp, Artificial Sequence
  ENSG00000239219_55 (sequence is synthesized)
taaagtatcgacatacctcattttactgtgctttgcagatatggcatgttttacaaatggaaggtttgtgggaaccctgagttgagtaaatctattggcgttgttttcccaacagcatgt

SEQ ID NO: 851973 - DNA, 120 bp, Artificial Sequence
  ENSG00000239219_56 (sequence is synthesized)
gctcactttgttagctttttcttaagcaataagatgtttttaaattaaggtaagtacatttcaagagacataatactattgtacacttaaactatggtatagtgtaaacataactgttat

SEQ ID NO: 851974 - DNA, 120 bp, Artificial Sequence
  ENSG00000239219_57 (sequence is synthesized)
atgcactgggaaaccagaaaattcctttattgcagtggtctggaactgaatctcagatatctctgaggtatgcctgtatattaaaaagtggtaagatttttttttttacagtaaccaagt

SEQ ID NO: 851975 - DNA, 120 bp, Artificial Sequence
  ENSG00000239219_58 (sequence is synthesized)
gttttatgcttttgttttgtttgatgagaataacttctagcactatgaaacaaatagctatttaattcaacaatcagtttaataaactttttgtaatcccagctagcaaaataaagtcac

SEQ ID NO: 851976 - DNA, 120 bp, Artificial Sequence
  ENSG00000239219_59 (sequence is synthesized)
gtaatcccagctagcaaaataaagtcacctcttaggaaatgagccaaagaggaaggtaaactattttagaaacgtagtttaaaatgtatatgtagtgacagagcgagactctgtctcaaa

SEQ ID NO: 851977 - DNA, 120 bp, Artificial Sequence
  ENSG00000239219_60 (sequence is synthesized)
aaaagcatccatattttttcaaaatggcattcaatgatgttcaagtaaactatttcctttactcaggagatgagtttctcacacctgcacaatgacatcctgtggctattatcagacata

SEQ ID NO: 851978 - DNA, 120 bp, Artificial Sequence
  ENSG00000239219_61 (sequence is synthesized)
tcggagaccttggaccttgtgttgatttatgtagaggattccctttccagaggatatgctggataagtacagcaaattgactgcaacgctctataaaacagatctttcatatatctgtaa

SEQ ID NO: 851979 - DNA, 120 bp, Artificial Sequence
  ENSG00000239219_62 (sequence is synthesized)
ctgagacattctgttaaacatcaagttgaaaatgtgggattccacagggtgtgagcagagagcactccaccttgccagctcaaacctgctttgcagagataacttccccaccccttggat

SEQ ID NO: 851980 - DNA, 120 bp, Artificial Sequence
  ENSG00000239219_63 (sequence is synthesized)
gaaatctcaagtggatactatgacttttcacctccctctcagataaaaagcagtcctccagtcactttcagtcataacatagttgtatttcagaaataaaatacctagtcatgaataata

SEQ ID NO: 851981 - DNA, 120 bp, Artificial Sequence
  ENSG00000236244_0 (sequence is synthesized)
ccccacaatcccagtccaccctatctcagaacaatttcaaatgcaggggaggatcagagatgaagatgttactccaaaagtatacatgcaaagatgttctggaagtgctacttcttaact

SEQ ID NO: 851982 - DNA, 120 bp, Artificial Sequence
  ENSG00000236244_1 (sequence is synthesized)
gagtcctccatggagaagtctactgccgaagtccactgattttcactgccgtatgatattccatcgtgtggcacgtggaacaatcaggatcatatttcaacatgagatccccacgttgat

SEQ ID NO: 851983 - DNA, 120 bp, Artificial Sequence
  ENSG00000236244_2 (sequence is synthesized)
gtctcagtcttgggtagacatggtagggctggtaggaagtggtctaatgacttccattcctctgttggaacatttgggttgcttttgggtgttttgttattaaaaacactgctgctgcta

SEQ ID NO: 851984 - DNA, 120 bp, Artificial Sequence
  ENSG00000239213_0 (sequence is synthesized)
ggcggagagtagagagctagagggtgagaagcgctgggccggaccagaactgtcttagcttttccctctgcggctgctctggttggttactttgagcctgcctcctcagcgccgcaggag

SEQ ID NO: 851985 - DNA, 120 bp, Artificial Sequence
  ENSG00000239213_1 (sequence is synthesized)
agacttaacagcaaaaatgactgtgtcctgagttcagcccccactgctctgggagcttccccctggtttctgcacctgaagaatgtcatcccagccgaaggttcttaggagcggggagcg

SEQ ID NO: 851986 - DNA, 120 bp, Artificial Sequence
  ENSG00000239213_2 (sequence is synthesized)
acaaagaaaaacaaagaaaagcagacctgaaaattgggacctgggagaaatagacgagtgctctaaaccagtatcatggctccagttcctctgacaaggattcacatggggttgcaattc

SEQ ID NO: 851987 - DNA, 120 bp, Artificial Sequence
  ENSG00000239213_3 (sequence is synthesized)
tgactgtgctggtgatgctggttccaggtccctcaggaacccctcccccagtctggtctgcccttgaactctatactggccccagggtatcccaggattgtcagaaaggcctggccagga

SEQ ID NO: 851988 - DNA, 120 bp, Artificial Sequence
  ENSG00000239213_4 (sequence is synthesized)
ttcacctgggagagggatcagcatctctgcaaagttgttggattgaaagaactttcattttgagctacatcattgaagagctttaaatctgaaaataagaaagacgttgaaccctattac

SEQ ID NO: 851989 - DNA, 120 bp, Artificial Sequence
  ENSG00000239213_5 (sequence is synthesized)
tcacatctctttgtcatttgaagcagatcccgaaccactcaaaaggacaaaacaaggaaatagcaatgaaattggattcagtgaatggggtaagggtattaagtgtctgaaatataagag

SEQ ID NO: 851990 - DNA, 120 bp, Artificial Sequence
  ENSG00000239213_6 (sequence is synthesized)
agagataaaaaaattagtttttacctttttttctattttctaaatgttttggtggctagaataagatatactttgaactcaagagcaataaatgttaatatattaaaagtagctttatga

SEQ ID NO: 851991 - DNA, 120 bp, Artificial Sequence
  ENSG00000239213_7 (sequence is synthesized)
caaaatacttcaaagtaatcatctgaatatttatcagaaatattaagacaacttattaaatcctgtattaaaatgattgcttattactttttgtttatactagtcagaagtgattctctt

SEQ ID NO: 851992 - DNA, 120 bp, Artificial Sequence
  ENSG00000239213_8 (sequence is synthesized)
ccacattttagatttttcagagtaaaaaggatataattttagactttcaattgaatataaactggggtttttccacacgatttgtggacatggctgtctgatggtgactcttaggtattt

SEQ ID NO: 851993 - DNA, 80 bp, Artificial Sequence
  ENSG00000239213_9 (sequence is synthesized)
tttgtggacatggctgtctgatggtgactcttaggtatttatgctaaaaatgttattttggggatccttgggaatggact

SEQ ID NO: 851994 - DNA, 120 bp, Artificial Sequence
  ENSG00000239213_10 (sequence is synthesized)
ccaccatgtccggctggactctgatatttatattcacattattggccagtagggaactgatatctgactcaaaaattagtaggatatgaaatccttcattctatccatgagcttgttatt

SEQ ID NO: 851995 - DNA, 120 bp, Artificial Sequence
  ENSG00000239213_11 (sequence is synthesized)
cttgagaaaaaaatttactttgagagtctgaggaatgataagtttgttacattccggaatctagttttggtgttgtgtccatcctttagatagggtgcagctctgttttaccatagcaac

SEQ ID NO: 851996 - DNA, 120 bp, Artificial Sequence
  ENSG00000239213_12 (sequence is synthesized)
aactaacttttatttccatagccactgactgcactcctgaccctgccaaccatcttgcaaatacatcctcttgcttagaagaaccaggggaggggtggggcatggtggttcatgcctgca

SEQ ID NO: 851997 - DNA, 120 bp, Artificial Sequence
  ENSG00000239213_13 (sequence is synthesized)
gccctctaaaagtgtcctcgtgcttgggcagcttacattcttggcggcagtagtgttatgaagaggaccttcggagccagagacgagtgctctaaaccagtatcatggctccagttcctc

SEQ ID NO: 851998 - DNA, 120 bp, Artificial Sequence
  ENSG00000239213_14 (sequence is synthesized)
cggcacgaggcctgcgctccgccgccgccgcgtagctcttgggagagaggcggggcacgcgcggtgggcaggcggatccgcgcgggcaggaaacccactctggacccaatctgataggtt

SEQ ID NO: 851999 - DNA, 120 bp, Artificial Sequence
  ENSG00000239213_15 (sequence is synthesized)
gcgctccaggggctgacaaggaggccgcggggtcacgctccctggggcaacggcccgagggtctcgcggaatcccggtgcagaagtctggaccctccgagcagcctccgcgccccctccg

SEQ ID NO: 852000 - DNA, 120 bp, Artificial Sequence
  ENSG00000239213_16 (sequence is synthesized)
gctcggctccgagcctgcagacggcgcccccggggctaactcagcgcgagaagaggaagcgacgcagcgagtaacaggctgtatggacggacagcggactgaaggggggtgtgtgtgtgt

SEQ ID NO: 852001 - DNA, 120 bp, Artificial Sequence
  ENSG00000239213_17 (sequence is synthesized)
cactaaggcagaggtgtctacttcagcagtgcagagcaactcagctaagtagagggaatatgaaatagaaccagaagtctagcctgcttagctacaaatgtttccaccaaaaatagtgga

SEQ ID NO: 852002 - DNA, 120 bp, Artificial Sequence
  ENSG00000239213_18 (sequence is synthesized)
tacaaatgaattaaaagtatgcacagtttggtgtctgcttgaacaatgggcacatccagtgtggagagcttaaaatgactatttttatccaaaagaggaactatttcccaagctagatcc

SEQ ID NO: 852003 - DNA, 120 bp, Artificial Sequence
  ENSG00000239213_19 (sequence is synthesized)
cagaatatgaggcctgagaccacctcattcctatggctgagaaaagtaatacagaattatggaggctggcacgtcggcatgtccaaaatttgcagagtgggtagcaggctagtccagaga

SEQ ID NO: 852004 - DNA, 120 bp, Artificial Sequence
  ENSG00000239213_20 (sequence is synthesized)
agtgccaatattgcggtttaagtccaaagtctgttggctaaagaattccctcttgcttggaggaggtcagtcttttgtgctattcaggctttcaactgattggacgatgcccacccacat

SEQ ID NO: 852005 - DNA, 120 bp, Artificial Sequence
  ENSG00000239213_21 (sequence is synthesized)
gggagaaatgggaactcaaaccaaaaacaggaatcatccttgctaattagtgctgagtggatcagggactaaccagaatcaggcaacaagaaaatagacgagtgctctaaaccagtatca

SEQ ID NO: 852006 - DNA, 120 bp, Artificial Sequence
  ENSG00000239213_22 (sequence is synthesized)
aaggacaaaacaaggaaatagcaatgaaattggattcagtgaatgggatggacctcatgctgttctctaaaacatgaacagatttctgatcttctggaccaggaaatgaagtcagcacta

SEQ ID NO: 852007 - DNA, 120 bp, Artificial Sequence
  ENSG00000239213_23 (sequence is synthesized)
aaagagaagacaccatcatccagctcctagaatttcaatctaagaatctgtaataaaagcagtatttccctctacagaaatatagcaaagtaatatgtttacatcttaatgaaatgtact

SEQ ID NO: 852008 - DNA, 120 bp, Artificial Sequence
  ENSG00000239213_24 (sequence is synthesized)
cttgatatgataaaacacagtgtgatatttatagcactggtggtgctggctgtctggtccctgaacctcaccaattttggagaatccccttgctgtggttcttggcaggtagagcatttg

SEQ ID NO: 852009 - DNA, 120 bp, Artificial Sequence
  ENSG00000239213_25 (sequence is synthesized)
gcttgatgctcccaagtttcttatggaaggcacatctctggggctgacactctgtgtggataaatcttcatctcattagtccaagggccttttttccatgagcattttcacagaagctgt

SEQ ID NO: 852010 - DNA, 120 bp, Artificial Sequence
  ENSG00000239213_26 (sequence is synthesized)
ttcacaaatcaactccattggtgttgaagacctaataaagggctctctatcaagtaattacagcactgaggtttgaatttctgctccacaaccttctagttgtttaatttatgtcgggaa

SEQ ID NO: 852011 - DNA, 120 bp, Artificial Sequence
  ENSG00000239213_27 (sequence is synthesized)
ggtcgataagcaggcctgaatctgaggaagaattggggccaaggaggtggcctgtgaggtcaggagattggttacataaaagaagaatgagtaaatagttaaatatatcgaggataatgg

SEQ ID NO: 852012 - DNA, 120 bp, Artificial Sequence
  ENSG00000239213_28 (sequence is synthesized)
aagccagatttttttaccaagagagaaggaagttacaaatagaataagggtgaagactagaatgaaccctgtagtgttggagtagagctagagatattggagtaaattcatgagttttaa

SEQ ID NO: 852013 - DNA, 120 bp, Artificial Sequence
  ENSG00000239213_29 (sequence is synthesized)
tataaatggacagaaagatatataaatagatataggggtgtgtgtgtgggtgtgtgtgtgtgaatttcctagctctgtctgctaaaatggcctaaaaacagtaacactccagtagcaatg

SEQ ID NO: 852014 - DNA, 120 bp, Artificial Sequence
  ENSG00000239213_30 (sequence is synthesized)
accacacctagcatccagatcttggttctaaaaatccattctcaagtaaaaggaaccagagctcagtggagaaacagctgatgaaataactgcaatgattgtggcagaaaaaataccaga

SEQ ID NO: 852015 - DNA, 120 bp, Artificial Sequence
  ENSG00000239213_31 (sequence is synthesized)
agagcctgaaatgtcttgcaccccaaaaaagtactctcagaatgatacagagatgccaaaaggacacaggagctggcttgaagggtatcccaatggctggaactggagcattttcagcat

SEQ ID NO: 852016 - DNA, 120 bp, Artificial Sequence
  ENSG00000239213_32 (sequence is synthesized)
caaaaccaatagtgatagtaatggcttataatctattggataaaatagaaatccacaagtccacgctgatggaaataagccaataagaagggagaggaaaaaacttctgtacaatagaat

SEQ ID NO: 852017 - DNA, 120 bp, Artificial Sequence
  ENSG00000239213_33 (sequence is synthesized)
cccaactagtaaatggaaaacaaatattgtaattagaaaaactacaatttggcaatcatcctagtaacagtttatgcaagaatcataaaataagcaagtgaaactttgttaagaaaccag

SEQ ID NO: 852018 - DNA, 120 bp, Artificial Sequence
  ENSG00000239213_34 (sequence is synthesized)
atgtttacatagcctcaaagtgtcttcctacaaaatacttattaattcaaagggaaagagaataacttaacagtggagaaattatcaccttaagccatcaaagttaacatcaccaacaaa

SEQ ID NO: 852019 - DNA, 120 bp, Artificial Sequence
  ENSG00000239213_35 (sequence is synthesized)
aaaacaatattatgtgccttttaatatgatacatttggaagaatacaatttcacttctatcacattcctgccaaaaaaaaatgtatcacctgaatctaatcaagaagaaacatcagacaa

SEQ ID NO: 852020 - DNA, 120 bp, Artificial Sequence
  ENSG00000239213_36 (sequence is synthesized)
cagttctttataataaatcccctactggttctgtgtttcaaattaactcctaattctgatatacgttagaattctctccttgcttgttgtcttctgctaactctaataggccaccaaaat

SEQ ID NO: 852021 - DNA, 120 bp, Artificial Sequence
  ENSG00000239213_37 (sequence is synthesized)
tctcttggttgcaagcatccaaatgtaagttatctcaggtaaattctggagggcctcctcagtacacaaatcccttatgtgggagagccttacattttgggacttagagtccacagattt

SEQ ID NO: 852022 - DNA, 120 bp, Artificial Sequence
  ENSG00000239213_38 (sequence is synthesized)
acagatttttgctgtttggtcttcttgcctagtaggcagctctccttggcaggaactaacagtattcacgtggccccaggaaactaggaaattttatttatttatttatttattatttat

SEQ ID NO: 852023 - DNA, 120 bp, Artificial Sequence
  ENSG00000239213_39 (sequence is synthesized)
acaggtgtgagccaccatgcccagccggaaattttattttagagataagaaatttaagactcagaaattttgagttctggcttggccaccaactagagtaataattattgtctgtcttaa

SEQ ID NO: 852024 - DNA, 120 bp, Artificial Sequence
  ENSG00000239213_40 (sequence is synthesized)
gggatcttttgacataaccgtcttcacaatcggtttgtctttttaatgatttcatacttacagtgttttgatatctctcccaatgcaagaccactatgtagtttagccactgtaactttc

SEQ ID NO: 852025 - DNA, 120 bp, Artificial Sequence
  ENSG00000236240_0 (sequence is synthesized)
gactgaaatgtgcttatgcagcacatatataataaaaatgataaaaggctactctctttagaaggacagacaacattgaccacgatagtgcctcatgcaaaggagacattctacaaatgt

SEQ ID NO: 852026 - DNA, 120 bp, Artificial Sequence
  ENSG00000236240_1 (sequence is synthesized)
gttgggaatggaaagcagataaagatgtgatcgagatgaaagagaaaaatggcatttggaattctcccttcagagatcaaagttaacagtatggtgatacggcatccaaggaagacagaa

SEQ ID NO: 852027 - DNA, 120 bp, Artificial Sequence
  ENSG00000236240_2 (sequence is synthesized)
aacaaacaacggcatactcaccttcatctgttgggggaaaattattttttgtcattgctcacttcaacatgggcgcaatgagagataagagacactaagaaatgagtgtagaaatgaata

SEQ ID NO: 852028 - DNA, 120 bp, Artificial Sequence
  ENSG00000236240_3 (sequence is synthesized)
tttttgctcattctgctagaaaatataatacttagtagaaacagattcctgaattgctacactttaaacatgcaatcacattttactattatatgctatacacatactctaaatgttgta

SEQ ID NO: 852029 - DNA, 120 bp, Artificial Sequence
  ENSG00000236240_4 (sequence is synthesized)
agcttaatatttcagattgtataagagattttgaggcatgttattgtacatacaaataacataaatagggttaccatcctaatccaagggttacttagaaaagaaaccaatactattttt

SEQ ID NO: 852030 - DNA, 120 bp, Artificial Sequence
  ENSG00000182366_0 (sequence is synthesized)
tgccacgctttctccaggaaacaaggacagctgcacgggtgcccacacgagagtcggcgaccagcctcggcggtggggttcctgcaacgcgtgttcctgctggggttctcctttctgctg

SEQ ID NO: 852031 - DNA, 120 bp, Artificial Sequence
  ENSG00000182366_1 (sequence is synthesized)
ttccgagctacagtgcggatcatgctccccatacgtggagtccagggacagcacagcccggggactgcccagccagccaggaagtctggctttcagagaactgggaagaccatcttccac

SEQ ID NO: 852032 - DNA, 120 bp, Artificial Sequence
  ENSG00000182366_2 (sequence is synthesized)
tttatcccatctgggagactgtaaacatggattccactgtctcggacagtgagacgattcccagtcttttcctgttcctcctctagatgctgtcttggacgcagtgaagtctgccgatgg

SEQ ID NO: 852033 - DNA, 120 bp, Artificial Sequence
  ENSG00000182366_3 (sequence is synthesized)
ctgtttcagagccgttaggatggtgaagtgagacaatgtgaatggagtgttttgtgaggctcagtgctgcataaatgctagccattatctaatagcaagaattccttgaaatgtttcttt

SEQ ID NO: 852034 - DNA, 120 bp, Artificial Sequence
  ENSG00000182366_4 (sequence is synthesized)
ctctcaaatttatgaaaagattagaaaatagttctaaaaattaaaaatgcttctggtcggagcggcttacatgatggcagtgaaagtgtgcagcttcatgggtcccactgcgtgcacttg

SEQ ID NO: 852035 - DNA, 120 bp, Artificial Sequence
  ENSG00000182366_5 (sequence is synthesized)
gcatggagagaacgaaatgtggaggccagcgataccaagaacacccctgtgagccgcgctgggtgcagcccccacggccggcgggcagtgacaccgcagtttcctctcctgccggcatcc

SEQ ID NO: 852036 - DNA, 120 bp, Artificial Sequence
  ENSG00000182366_6 (sequence is synthesized)
acgcttcctgtgcccaggtgctggaagctcagtcttcatgtccccttctcagttatgtgtctgtagggctgggacagggaaggaagtcagtgaagctggttggatcttccaagggatgct

SEQ ID NO: 852037 - DNA, 120 bp, Artificial Sequence
  ENSG00000182366_7 (sequence is synthesized)
ctgtgtgcaaggctcggggacaaggatggctgggggagtcagactgtcagtgaagctgaggggcggatggagcctcaccacgcctgagtccctgttttccagctgcagatgctgaccctc

SEQ ID NO: 852038 - DNA, 120 bp, Artificial Sequence
  ENSG00000182366_8 (sequence is synthesized)
cagagctttgtttaccagcccctgtgactgcgatctggagtcagccaggcgttcctccttgtccggtagattttattaagtgctcaatgtgtgccaagccaaatgtccgtttgacttact

SEQ ID NO: 852039 - DNA, 120 bp, Artificial Sequence
  ENSG00000182366_9 (sequence is synthesized)
gcatgtccgagaagcgatgccgttgaaggaatttcctccccaagcctgaaggaattgaacaccaggaatgactggaaccctggagagagagaactggatttctggaggaaaatcactcgt

SEQ ID NO: 852040 - DNA, 120 bp, Artificial Sequence
  ENSG00000182366_10 (sequence is synthesized)
tttaaggaagcagcatcctggacccttgaggccctggaggaagcgggcagcacagctcggaggcgggtgtggctggaggacggccgtcgcacctgcgaaattctgtctgtggtacgtggt

SEQ ID NO: 852041 - DNA, 120 bp, Artificial Sequence
  ENSG00000182366_11 (sequence is synthesized)
tccttcctggctctgggaaccacctggatacttgcattcttcccttttcctttctattctctttcaagtcaccctccttgagacagccctccagtccaggccaaatctcagcctgccctt

SEQ ID NO: 852042 - DNA, 120 bp, Artificial Sequence
  ENSG00000182366_12 (sequence is synthesized)
ggtccgctgtggttgggcctgcacccaagccatgagcacacgcagcaattgtggcagcagaagcttcctctgggctcagactcaggctgatgctgcgtcaggacctgccgcggtctcggc

SEQ ID NO: 852043 - DNA, 120 bp, Artificial Sequence
  ENSG00000182366_13 (sequence is synthesized)
tgggcttcctgggactcggtggttgtgggctgattgtaaagcacggaatgactcttagaaactgggcgtcattctttgtggttttccaagcttggtctctgatgatactccaggtcttag

SEQ ID NO: 852044 - DNA, 120 bp, Artificial Sequence
  ENSG00000182366_14 (sequence is synthesized)
gagacatgctgaatatttattatgcttacattcaagcaacattaacccttaaggttgatgtagctccccgtctttttttcccagaaggaggagcactgaaggaacacttttccagtatgg

SEQ ID NO: 852045 - DNA, 120 bp, Artificial Sequence
  ENSG00000182366_15 (sequence is synthesized)
catgggctgctttaggctgtaaacacccagttttatccactttatgtgaagaaagccaacaaggggcatggagtgagttccgcaggttttagtggctgcggaggctggtgctcagtgggg

SEQ ID NO: 852046 - DNA, 120 bp, Artificial Sequence
  ENSG00000182366_16 (sequence is synthesized)
atgatggagggaaggcgcctccctctgcgggccccgaggtctgtgcgggaatcagctctgcagttgtgtccaggggcagccgtagaccacacacggcaggctcacagctctgttccatga

SEQ ID NO: 852047 - DNA, 120 bp, Artificial Sequence
  ENSG00000182366_17 (sequence is synthesized)
gaactttatacacaaaagcagacgggctggcttggcctctggatcataatctgctgacccctgggtaagaaattttaaatatttacttaattctgttcaacagaaggggtgatatactga

SEQ ID NO: 852048 - DNA, 120 bp, Artificial Sequence
  ENSG00000182366_18 (sequence is synthesized)
ggagtgaataatgggaaagacctggttcagctgtatcaggaaggactggtgtaaattcaacttattaactgaattcacagtattcgtgttttatgcctttaggggttaaaaatgggtcac

SEQ ID NO: 852049 - DNA, 120 bp, Artificial Sequence
  ENSG00000182366_19 (sequence is synthesized)
acacgagcagcatgcacttcactggcgtggcagggcacctcagtgtttacatgtgtggttcccatgcttaccagggctggaggcccgttagtagtgaagtgcatgtggagttctggatac

SEQ ID NO: 852050 - DNA, 120 bp, Artificial Sequence
  ENSG00000182366_20 (sequence is synthesized)
ttttcctggctttctctatttgtgtgagcttgtgcagttagaggtttgggctgaatttgggtagaaatgggtggctcacaggctgcaaaagttctgtggacactttttcccccagctgat

SEQ ID NO: 852051 - DNA, 120 bp, Artificial Sequence
  ENSG00000182366_21 (sequence is synthesized)
taatgttgtaaatattagaatattgttacataaaagtctggatttttactttctttcacattggaatagctgccaacattgggcctgcattcatctctctagggcaacgttggctgcagc

SEQ ID NO: 852052 - DNA, 120 bp, Artificial Sequence
  ENSG00000182366_22 (sequence is synthesized)
ggagatggctgctccccggtggggtgtgtgctcagcccgcagcccccgccctccggactccgttcgcctctgctctcagctttgcacctcgtcattgtcttctaattgtgcatccctgga

SEQ ID NO: 852053 - DNA, 120 bp, Artificial Sequence
  ENSG00000182366_23 (sequence is synthesized)
ctgcgtgacctacaaggctctcagcacaacaagactctatgattctgtctattggaacaaaaagccagtgaggcaagtgtatcatcctgttgatgaattcacagaattaactctgggagt

SEQ ID NO: 852054 - DNA, 120 bp, Artificial Sequence
  ENSG00000182366_24 (sequence is synthesized)
tggggacagtttgtattcttcttccagacactctctgtttctgctggatggaaaggttctgctacttgtcctgtggtcaggcccagctgatggaatggaatggaagtgactcagcccctt

SEQ ID NO: 852055 - DNA, 120 bp, Artificial Sequence
  ENSG00000182366_25 (sequence is synthesized)
actggcagaaactttaaaagccgcacaacattcctgcaccctcccctctgccatgagcctggcagtgctcaggatgggaaaattatttcacctgggcctgaggatacaggagctactccc

SEQ ID NO: 852056 - DNA, 120 bp, Artificial Sequence
  ENSG00000182366_26 (sequence is synthesized)
agcgtgcagtggaagagaagcatgggcaagtaattaaactttgtgttttcaagccacagaggttttttgaggttgtttgctaccatgctttgtccctacaaacacagtcatggagaaggc

SEQ ID NO: 852057 - DNA, 120 bp, Artificial Sequence
  ENSG00000182366_27 (sequence is synthesized)
cagtggcagagcctgagccgttcgtgcatctgttcaccagcatccagaataacaatagatttttgaaacattcctgagaaaattctgggagttgcataccggccagtcttattccctaaa

SEQ ID NO: 852058 - DNA, 120 bp, Artificial Sequence
  ENSG00000182366_28 (sequence is synthesized)
gttgttccttctaaagggtgggatgaccaaaaatttcagaaaagcaaaccaccgctgaaaggcaacgttatttctgttggcagaaggcggcctgagcaatctagattttccacggttcac

SEQ ID NO: 852059 - DNA, 120 bp, Artificial Sequence
  ENSG00000182366_29 (sequence is synthesized)
caactagtttttaaggaaatatggctgtgagaggaataaaacataattcctacctttaaggaactcagagaagtgaattaaaggaagtcacagatcaggcaaccaaccacacaaagtttc

SEQ ID NO: 852060 - DNA, 120 bp, Artificial Sequence
  ENSG00000182366_30 (sequence is synthesized)
taagagcaaactgttcaggtcggcaagtcactcttatccactgttttgccttctgaggtttcagttactctcagtcagtcatggtccaaaaacattaaatgaaaaattccagaaataaac

SEQ ID NO: 852061 - DNA, 120 bp, Artificial Sequence
  ENSG00000182366_31 (sequence is synthesized)
gagaagacgtgtggtgactgtagtcatcagtgtgccatgtgggcaacagatacggccttgctttgctcagccactgagatattggggttcaagagaccatggccaactggatgaatccag

SEQ ID NO: 852062 - DNA, 120 bp, Artificial Sequence
  ENSG00000182366_32 (sequence is synthesized)
gggatctgtgctctataaaccacctttggatggatccaagttcaattttgcaaagtaaaccaggtgatgtccttggaacttggtgactctctgggtgtaaagtcccagtcccatgtgggt

SEQ ID NO: 852063 - DNA, 120 bp, Artificial Sequence
  ENSG00000182366_33 (sequence is synthesized)
cccagcatcggtggtctggttgctgatgaagatcagactccaagtctaaattttctggagatctacacctcccaaaggaggctggtgagtcctggggtggcccttggataacttctgtgc

SEQ ID NO: 852064 - DNA, 120 bp, Artificial Sequence
  ENSG00000182366_34 (sequence is synthesized)
agtagcagctgctggaagaccgcaaagatcccacaggcttctgatcagaagagcaccgacttggttgtcagggaccctggacatgccctcctgcctgccctcactggggcctccgtagct

SEQ ID NO: 852065 - DNA, 120 bp, Artificial Sequence
  ENSG00000182366_35 (sequence is synthesized)
ctggggaaaactgcttcctatcatcactcagtgactggacagcgcactgggctcaggagaatgttacctcaatttaagctggaggaagtcacatggcagatgccagaggaccagcctggg

SEQ ID NO: 852066 - DNA, 120 bp, Artificial Sequence
  ENSG00000182366_36 (sequence is synthesized)
ggaaggaagggcgttgctttggcaggacacgtggggagatgggctgggaggggagatcccggaggtaaggaggggaggctttcctctccccacactgggaactcagtttctagccccagg

SEQ ID NO: 852067 - DNA, 120 bp, Artificial Sequence
  ENSG00000182366_37 (sequence is synthesized)
ttcctggttgtgtccggcatcccaggagcatgagtgggaagctgctgcatccacctgccgtgtgcagtcggggaccagctgcagagcgcactatgcatcctttagactctgcaggctcaa

SEQ ID NO: 852068 - DNA, 120 bp, Artificial Sequence
  ENSG00000182366_38 (sequence is synthesized)
gtgaaaacccagctctgccactgctctctggatgaccttgccacctccctctcctcctttgaaaagtgtgggaaatgctgcttttcatcaagtccaagtcaccatgtattgtggcttaaa

SEQ ID NO: 852069 - DNA, 120 bp, Artificial Sequence
  ENSG00000182366_39 (sequence is synthesized)
gttcttctttctacctttctaagattccaccatgttgcttgtttagttcaaccagtgctgatagggacacgtttgcacttgtctctcagtgaacattcgcaagagattttctaggcctcc

SEQ ID NO: 852070 - DNA, 120 bp, Artificial Sequence
  ENSG00000287845_0 (sequence is synthesized)
attccatatatgaaatgactatggttcaaaaggttaagatactgggaaagtttttgactggctctagtgtgtatctgaaattccagcatcaatcagctcaagtgaaaaacccattatatc

SEQ ID NO: 852071 - DNA, 120 bp, Artificial Sequence
  ENSG00000287845_1 (sequence is synthesized)
cccaaatctcatcttgtagctcccataatgcctgtgtgttgtgggagggacccagcgatagataactgaatcatgagggcaggtctttcctgtgctgttcttatgatagtgaataagtct

SEQ ID NO: 852072 - DNA, 120 bp, Artificial Sequence
  ENSG00000287845_2 (sequence is synthesized)
cacaagatctgatggttttaaaaatgggaatttccctgcacaacctctctctttgcctgctgccatccatttaagatgtgaacttgctcctcttgccttccaccgtgattgtgaggcctc

SEQ ID NO: 852073 - DNA, 120 bp, Artificial Sequence
  ENSG00000287845_3 (sequence is synthesized)
ttgtgaggcctccccagccacgtggaatgactacaaatgtgaaagctaagaggaaaacaattgacttctacaagagtacaagcaaaattgtttcgtatttggttaaagagctgttaggca

SEQ ID NO: 852074 - DNA, 120 bp, Artificial Sequence
  ENSG00000287845_4 (sequence is synthesized)
tcgtatttggttaaagagctgttaggcaaatcaccccaggaggatggaggatgagaattctgatccttagaagaggatgtcctgctcactcggttttactatattattacgcttttcaaa

SEQ ID NO: 852075 - DNA, 120 bp, Artificial Sequence
  ENSG00000287845_5 (sequence is synthesized)
tcaatgggtgtcagatctctcttcaaaatattttagagaatctcacatagttagaactgataaagatgttagaaatgattaaatctaattttcacatcttataaacaaataactgaatac

SEQ ID NO: 852076 - DNA, 120 bp, Artificial Sequence
  ENSG00000287845_6 (sequence is synthesized)
tgcgatgaataatgatctgtaatttggaaagtgtttctacatccataggaatcagactcagcctcatgcctggatggtgaaaagtcacatgaccagtaagccgccatccacagggctcct

SEQ ID NO: 852077 - DNA, 120 bp, Artificial Sequence
  ENSG00000287845_7 (sequence is synthesized)
atgaaataaaaagaacgaggtttataaaataaggaagaggagtctaagcatagagaagagaacaattgctgtcagattacaacacctcagagtccaaggagggggctaagaagaaaaaat

SEQ ID NO: 852078 - DNA, 120 bp, Artificial Sequence
  ENSG00000287845_8 (sequence is synthesized)
aacacctcagagtccaaggagggggctaagaagaaaaaatacagagaagaagccgccactgctgtttttatataggggtagaaggtatagaggtttttctattttatttatttttttttt

SEQ ID NO: 852079 - DNA, 120 bp, Artificial Sequence
  ENSG00000287845_9 (sequence is synthesized)
cggccatatgttattaaatgaaaatgccagcttaaaaacaaaagtgaggaaagccaagctgaggtacatcctgcaagttcaacaaaatttagaaacatttcatcatgtgcctcacataaa

SEQ ID NO: 852080 - DNA, 120 bp, Artificial Sequence
  ENSG00000287845_10 (sequence is synthesized)
ccaacagaacttttttttctgttacattgtatataaaatgaactttgtgtgttttcttttaaattcaggctgaaaaaatgtcactcatgtttttattagaatggtaaccttttgtaataa

SEQ ID NO: 852081 - DNA, 120 bp, Artificial Sequence
  ENSG00000287845_11 (sequence is synthesized)
aaataatgttcttcatactaatttatttagtgatctaaaagatgaataagtctttacatagtttgattctagtgaaacaaggacatttttggggtaggatgaatgtgaggagtcaaacat

SEQ ID NO: 852082 - DNA, 120 bp, Artificial Sequence
  ENSG00000287844_0 (sequence is synthesized)
aggataaaatgcaaggaacaccaacactgaggagacaggatcacaggaaccagaacccaagaaatgtgaatgttttgtgaagaagaaagtgttcagtatcaaatgctattgagaagataa

SEQ ID NO: 852083 - DNA, 120 bp, Artificial Sequence
  ENSG00000287844_1 (sequence is synthesized)
agactgaatagaatcaattggattttgtttcaggggaaaatatgttccgtggagtagagggggtggaaatcatcttgcaaagtgtgggagataaggaagtgtaaatgcatttttccataa

SEQ ID NO: 852084 - DNA, 120 bp, Artificial Sequence
  ENSG00000287844_2 (sequence is synthesized)
ttttgacagtctaatcaaaggcaatgagttctttgtgcagatttttcaactctgccacatagaaagcttcagttatgtataggtcatagcacatttaatttttaacattggtatgactta

SEQ ID NO: 852085 - DNA, 120 bp, Artificial Sequence
  ENSG00000287844_3 (sequence is synthesized)
ttcctatagcaggaagactgccttgaagaaacagaatctgctataagaatactatcaggaaagaatggtcaagtcaggtgaaaccgctgctattgtatgactgctgaaataatcgtgtac

SEQ ID NO: 852086 - DNA, 120 bp, Artificial Sequence
  ENSG00000287844_4 (sequence is synthesized)
ctggactatctgcggctgccttttccagcaccttcctgtggactgctccagggcactctctagaagtcagaatggactcctgctgattctctcgcatatttgtcttgaataaaagaatgg

SEQ ID NO: 852087 - DNA, 120 bp, Artificial Sequence
  ENSG00000287844_5 (sequence is synthesized)
tgtatgccagtggatttcaaagcttctcacaaaacatctccacatctgaagtctcaagagtttatgtcaagcatttgtattacttacaactaattaaatataccattcctgttttacaac

SEQ ID NO: 852088 - DNA, 120 bp, Artificial Sequence
  ENSG00000287844_6 (sequence is synthesized)
atgaacacatttgctgataatgttgtaacttgtattattattatttgtttgaaacaatacattaataattaatgactggtcagtaatataatactaatatcttgacctatttagaataga

SEQ ID NO: 852089 - DNA, 120 bp, Artificial Sequence
  ENSG00000287844_7 (sequence is synthesized)
cattaattatcacatgtatagaaaatagtgtgattttaaattttttttcacaaaaaataatttggaagcatgttaaagtgccttatttccatattatttatttacgtgatttggagaata

SEQ ID NO: 852090 - DNA, 120 bp, Artificial Sequence
  ENSG00000287844_8 (sequence is synthesized)
taaagaaaaggcaagagagttggcatttagaagttaattgtagtgatttgttgaggttatctaagggaaaatacctgatgaccccattattggatttgaatataaaaatgctggatgcat

SEQ ID NO: 852091 - DNA, 120 bp, Artificial Sequence
  ENSG00000287844_9 (sequence is synthesized)
tatatgtggcagcctgagatctattcttcttatcagagagatataaaattaccgagatttaactgaaggcagctgtcaaactctgtaaaagaactgatattcttcagaggagtgcaaatt

SEQ ID NO: 852092 - DNA, 120 bp, Artificial Sequence
  ENSG00000287844_10 (sequence is synthesized)
ctatgtcaaagacacaaaacagattcttattgcttaataatctcccacagttcaatagtgacagaaattggtttcctttttgccccctacccctactgtcttatttctacaattttctct

SEQ ID NO: 852093 - DNA, 120 bp, Artificial Sequence
  ENSG00000287844_11 (sequence is synthesized)
acagttaccagttttgggatgactgattctggtgtttactatatgatcacttgatcaatggagacctgcccatcctgcttctgactatcgtgatgtcatagtagagctgctttagatgaa

SEQ ID NO: 852094 - DNA, 120 bp, Artificial Sequence
  ENSG00000287844_12 (sequence is synthesized)
tccgaagtactcactcctttctccaatttcttcttatctggtttaagaaaacagtaacttatttttggcagagtctatcaaaaatgagaggaattgtctatagtataattttagtttgag

SEQ ID NO: 852095 - DNA, 120 bp, Artificial Sequence
  ENSG00000287844_13 (sequence is synthesized)
tacagagaataataaaaattattgctaaaataaaatctgatttatctaagtatcaactctatttaactttttctttaataacgtaactattttatgctgcataaagcagaatacaggttc

SEQ ID NO: 852096 - DNA, 120 bp, Artificial Sequence
  ENSG00000287844_14 (sequence is synthesized)
cagtgctcgtttggccacttagaacctcatcttctttatctataaaatggaaatacaaaaactgtgttgggtttaatagggaaaataaaataatgtacaggagaatatcatgtaataatg

SEQ ID NO: 852097 - DNA, 120 bp, Artificial Sequence
  ENSG00000231082_0 (sequence is synthesized)
ttccaggaagaagaaacaactggcatcagcaaagatctggagtcatgaaactacccccgaggatggctgggaaaagaagatccaggaactgctggtgtctgtactagttaccgccctgat

SEQ ID NO: 852098 - DNA, 120 bp, Artificial Sequence
  ENSG00000231082_1 (sequence is synthesized)
gaagccatagctctcaccaaacctccagcatttaaactttgctgtggagtctacgtgaccccaccacgaggtgaccctcacctttccctccatacctggggagacagacatggcagtggt

SEQ ID NO: 852099 - DNA, 120 bp, Artificial Sequence
  ENSG00000231082_2 (sequence is synthesized)
cactgaaccctgggatgacacgctacctcatcctttatgacaccctttgatatgttgcttttgatgcatttctttgtatcccatttggtttcatttttagcaataaactcattcttggta

SEQ ID NO: 852100 - DNA, 120 bp, Artificial Sequence
  ENSG00000229463_0 (sequence is synthesized)
cttgtgcacattatttaaaaatcagttcatgctgggcatggtggctcatgcatgtaatctcagcactttgggagagaaggttgcagtgaactgagatcgcgccactacacaccagcctgg

SEQ ID NO: 852101 - DNA, 90 bp, Artificial Sequence
  ENSG00000229463_1 (sequence is synthesized)
gtaaataaataaaataaatcatcagttcatgtggccatgttccctctccctttccttcacatattatttccaattgttcagtagagatac

SEQ ID NO: 852102 - DNA, 120 bp, Artificial Sequence
  ENSG00000229463_2 (sequence is synthesized)
gcctattatcaccttgtaaccactttcccttcaagagactatctctggcatcttacctaccttttcttcgaattttaggaactctgtactccaattctctatattccggctttgttccat

SEQ ID NO: 852103 - DNA, 120 bp, Artificial Sequence
  ENSG00000229463_3 (sequence is synthesized)
attcctcttcctgcttattagtctgccagctatcatttacaaaacaaccactttgtatcagacactaagaacataaagtaattccagtctctgccctcaagaagattacattacggtggc

SEQ ID NO: 852104 - DNA, 120 bp, Artificial Sequence
  ENSG00000261049_0 (sequence is synthesized)
caaaaacacaccgggaggtttctcagctcagcgaagacagaggcactaataacaagatgggcatcacatgcctatcaaccataatgctccacatggactcagcctgcccttgaaaaggaa

SEQ ID NO: 852105 - DNA, 120 bp, Artificial Sequence
  ENSG00000261049_1 (sequence is synthesized)
gccagttgtttcaatggcttttaaatttggcaagtactgctacactttcccgaagtgacagtgggccctcgcagcaaccctcctacctgtaccctcagaagtgatacttacatagcccag

SEQ ID NO: 852106 - DNA, 120 bp, Artificial Sequence
  ENSG00000238169_0 (sequence is synthesized)
gcatatctaacaactgaacgtagggaagttttctgccaatcagtggtcccctctgctcatcagcctttctgcagctgacacaggtgaattcatgaagaccgggaagggctcctaatattt

SEQ ID NO: 852107 - DNA, 120 bp, Artificial Sequence
  ENSG00000238169_1 (sequence is synthesized)
ccatctgaagcgggatctctgaaatttcatagacatgcggtcacgcacacatctttccaaggtctcagaagcacaacagctattcacagcttctctgagaacagacaaggggcttgcagg

SEQ ID NO: 852108 - DNA, 120 bp, Artificial Sequence
  ENSG00000238169_2 (sequence is synthesized)
tacatctggcacaggagggtcaaggtggccagcacgcacatggagatgcacagctaacactggggaaaaccagactggaataattctctgagccttctccttacaggcagcagtcaaagc

SEQ ID NO: 852109 - DNA, 120 bp, Artificial Sequence
  ENSG00000238169_3 (sequence is synthesized)
aatgggagtgaatgcaattgatgagaaaaaataatgaagaaccagagaggaggaaaggaaagggggtaaaggaatcatcttgtagaaaactcatagctaagggtcaagaaggagaaggtt

SEQ ID NO: 852110 - DNA, 120 bp, Artificial Sequence
  ENSG00000238169_4 (sequence is synthesized)
aagcaggggagtgatcaagaggttggttgatagctctgctctgtagacctttaatttgtttggaacttggtgccaccctgccatcgtagctggcttgctaatgttccaaataacctccag

SEQ ID NO: 852111 - DNA, 120 bp, Artificial Sequence
  ENSG00000238169_5 (sequence is synthesized)
cttgcttgtctctacttttctggacattatgatgcccaagtaacagaatactgttgctgagaaagatcttttacaaaatctctgttatacaattagagcttgttcattttaggtgttttt

SEQ ID NO: 852112 - DNA, 120 bp, Artificial Sequence
  ENSG00000238169_6 (sequence is synthesized)
atagcatttgtcttcctggctgaggatctcaaagacattcaacaatatttgaatcttaggctggaggacattttcgtattcttcagtcaggaatagcacacttcctttcatgaatagcag

SEQ ID NO: 852113 - DNA, 120 bp, Artificial Sequence
  ENSG00000238169_7 (sequence is synthesized)
cttttagggattatatcatgaggtacaaataaagaggccctcacctggtaaataatccatcatgtatgcattgtgtacagaacacaatgactcttgacctcagcctggcttcctgtgtag

SEQ ID NO: 852114 - DNA, 120 bp, Artificial Sequence
  ENSG00000238169_8 (sequence is synthesized)
aagagtatggtagaacctgagcagagagagggacggagagaaagaaccccagctcagatcatacgcatgattcagactgcaaagcaggactgcttcatggcatgtggcatcagttgcacc

SEQ ID NO: 852115 - DNA, 120 bp, Artificial Sequence
  ENSG00000238169_9 (sequence is synthesized)
aggcccatgctgggctaatgccccactggtgagttttgaaattcttaatactttttgaacaagaagccctgaatttttattttcactgggcactgcatatgatctagccagtcctgctgc

SEQ ID NO: 852116 - DNA, 120 bp, Artificial Sequence
  ENSG00000238169_10 (sequence is synthesized)
agagcttaacatatgtctgaataataacagaagaggtcaatggggtctctcttggaaataatgtttgaagtggctgtataggtcctgcaagctgggactgcaggatgtggtcccacgggc

SEQ ID NO: 852117 - DNA, 120 bp, Artificial Sequence
  ENSG00000238169_11 (sequence is synthesized)
ttccccgacgatggctaactgaggccagcctgggaggagcaagtgctctgcagaccgtggcgttgggagctttacctttgaggatagtgtctgggcaacagctgctcaccctgcatggcc

SEQ ID NO: 852118 - DNA, 120 bp, Artificial Sequence
  ENSG00000238169_12 (sequence is synthesized)
aaagaatttagctgcaaaaatctactttggaactccctaattaaactaatgaagtcagagcattttaatctgttcttggtgcagccctatgtctaatcccagaataaatagataattgtg

SEQ ID NO: 852119 - DNA, 120 bp, Artificial Sequence
  ENSG00000238169_13 (sequence is synthesized)
actgtctttgatgtccgagtgtggagaaactgaatagcacaggaagcaagcctggggccccacccctgtctggcccagaagcactgctctcctgagtctctgtccctatctggagccctg

SEQ ID NO: 852120 - DNA, 120 bp, Artificial Sequence
  ENSG00000238164_0 (sequence is synthesized)
aaatgggggctcaccagctgcccgtggacggagtgggaggaggcccccagtctccaggaggctccatgcctcaggctcagaccggcagctcgggaacccagctagcaggatgaactccag

SEQ ID NO: 852121 - DNA, 120 bp, Artificial Sequence
  ENSG00000238164_1 (sequence is synthesized)
cagaggaactcagcgccattgctgcggctgtgggccagaagagaaagagaaagagaaagagaatccgcctcggtgtgacaagctgtgcctcagaacccgagcagcaggagagtgggcagc

SEQ ID NO: 852122 - DNA, 120 bp, Artificial Sequence
  ENSG00000238164_2 (sequence is synthesized)
agggggtgtctggcagcagagaggggctcaggcctgctgggtggagcggcgctgggggacacaggtgggccctgcgggaggcaggagctgtccaggcaaagccgaggggaagggccggta

SEQ ID NO: 852123 - DNA, 120 bp, Artificial Sequence
  ENSG00000238164_3 (sequence is synthesized)
tgaaggaggcgcccgatgggaggggcgagttctccccctgcaccattccagtccactccgggtttcctgtagaagggggagccccccaaagtccatctgtgtttccccacctcactcaca

SEQ ID NO: 852124 - DNA, 120 bp, Artificial Sequence
  ENSG00000238164_4 (sequence is synthesized)
cactcagggaccctcggctgctccccggggcgctgactgacatttttgccgaataaaggggccctgtgggtttcctgttcccatctcagcttctgctgaacagggtaaacttcccttccg

SEQ ID NO: 852125 - DNA, 120 bp, Artificial Sequence
  ENSG00000238164_5 (sequence is synthesized)
aataaaaccaccagaatgcggtctggccaatttcagtcatagacccaccaggcctgtgtccctgcgtgagggggtgggaaaagcccagagtgcccctacccgtcccctgggaggggtgga

SEQ ID NO: 852126 - DNA, 120 bp, Artificial Sequence
  ENSG00000238164_6 (sequence is synthesized)
agggcagctcttgctccccctgcagagacgctgcgcggactgggaaggctgccagcctcgcccggtctccctgtggaccctgccctgaccccaccccagcttcctggctccctgcacccc

SEQ ID NO: 852127 - DNA, 120 bp, Artificial Sequence
  ENSG00000238164_7 (sequence is synthesized)
actgggcttccctgccccacagagcctggtggtagggagacctccggatggagacagcccacagtcccggagccccaaggcaggcaccagtgagtccctcgtgacggcctcgctccctgc

SEQ ID NO: 852128 - DNA, 120 bp, Artificial Sequence
  ENSG00000238164_8 (sequence is synthesized)
atcacatggaacctcgtgacccacgtgacgacgccagtgcccccgtggccccttcctgctgctggacgtgatgcagtcaatggaagcccaggtctgtcacgcaccgcctgtgcttgccca

SEQ ID NO: 852129 - DNA, 120 bp, Artificial Sequence
  ENSG00000238164_9 (sequence is synthesized)
gagcaggtcccagtcaccccctctggcaccgcctgctgcacaccaggaacccccacctccagcaagcccatctgccagacgcctggcccaggaccgccccctgcccctcgactgccccct

SEQ ID NO: 852130 - DNA, 120 bp, Artificial Sequence
  ENSG00000238164_10 (sequence is synthesized)
gcccctcctggtcctgacttcagccaggtgaccccctccagggtccagccctggcccctgggggactcagtggcatctggtggaaaggaccttggggattgcgcccaccctcacctgcag

SEQ ID NO: 852131 - DNA, 120 bp, Artificial Sequence
  ENSG00000238164_11 (sequence is synthesized)
gagagttggcagggtggccagccacaggaatctgtggcaggagcccggggacctgcaccccaactagaaagtgtgcagccctgcaggccggccctggagagggagcaggcaggggtgaag

SEQ ID NO: 852132 - DNA, 120 bp, Artificial Sequence
  ENSG00000238164_12 (sequence is synthesized)
ttaggccggctgtggtgtgcgacaccgtcctgtggggccaagcgtcccgagctccagaggcaggtgcactcctggccagcatccagggtggacgagcccagaccccaatactctgaggca

SEQ ID NO: 852133 - DNA, 120 bp, Artificial Sequence
  ENSG00000238164_13 (sequence is synthesized)
gggtgggggaccaggtggcacccagtggaggaaaagcccccaagagacacgcaggagcatggactcccaccccacagctggagcctgggagaggagccccatctgctgtttccctggtgc

SEQ ID NO: 852134 - DNA, 120 bp, Artificial Sequence
  ENSG00000238164_14 (sequence is synthesized)
ccacatgcagagccatgtgggtcttgcaaggaagaagaagggggccccttgcatcctccactcccgggggccccaggagggcatgggggctccagggtgcagggacagcacgttccctca

SEQ ID NO: 852135 - DNA, 120 bp, Artificial Sequence
  ENSG00000238164_15 (sequence is synthesized)
ccaactccccaagaacgcccaacctccaagagcagacacagcgcctacacctgccggtacggggctccaaccccactctctcagatacgtcctccagagtcgtctcatccaccccaccct

SEQ ID NO: 852136 - DNA, 120 bp, Artificial Sequence
  ENSG00000238164_16 (sequence is synthesized)
ggggaggagggaaactgaggcatggcaagagacaagactaacacagcgtgggctctcccggcaccagcaccgccaggccctgtgcaggaccccagggtcatcaggaaggaaatgaggcag

SEQ ID NO: 852137 - DNA, 120 bp, Artificial Sequence
  ENSG00000238164_17 (sequence is synthesized)
cccaaggaggcgggagacggggccctacccagcacccagccatctgcattgacacggctgcccgcaggatatcactgcccccatcccggggcccaccattaccagcagggagagggaggc

SEQ ID NO: 852138 - DNA, 120 bp, Artificial Sequence
  ENSG00000238164_18 (sequence is synthesized)
agagggaagctggggtccaccgctggtgagcggggaggggacgggacacagaaccggccgtggcccaccccgagacggaggcgcagacaccaggcccgttctgtgctctggaggctttgg

SEQ ID NO: 852139 - DNA, 120 bp, Artificial Sequence
  ENSG00000238164_19 (sequence is synthesized)
gcagctgtcaggctagtggacggtgtgcagagcagatggaggcgtgaggaggcggctccggggtcacctaggttcagcagggacagagctcagggggaaggcacctcccgtcctggttca

SEQ ID NO: 852140 - DNA, 120 bp, Artificial Sequence
  ENSG00000238164_20 (sequence is synthesized)
atacatggacccctgaccctgggaaagggactgagccaggggaggcctcaggtcactgcaccatgaagttgtggggagctgcgggggcctctgggctccgagctgggcaggcacagcgtg

SEQ ID NO: 852141 - DNA, 120 bp, Artificial Sequence
  ENSG00000238164_21 (sequence is synthesized)
gggaccacgtgccgaggggaagaagcgtgccagggtggacgtctcagtgcacacgcaggaacatgcaacggctgagccagcccagagaggcagcggagcgtgtgcggggcggccggcgga

SEQ ID NO: 852142 - DNA, 120 bp, Artificial Sequence
  ENSG00000238164_22 (sequence is synthesized)
ggagcagcaggatcccaggcgggagcgcacggccttttcggaggcaggttccaggacaatactaagcgtttacatcattgcactatttgatccaggaggtcccactgtggcgtttcatcg

SEQ ID NO: 852143 - DNA, 120 bp, Artificial Sequence
  ENSG00000238164_23 (sequence is synthesized)
ataaacgcacatgcgaggtggagggtggctggtgtggaatgtgcccggcagccttcatagcaaaggagaattctagaaccaaccgaagtgcccctctgaagggagctggtcccgtccgtt

SEQ ID NO: 852144 - DNA, 120 bp, Artificial Sequence
  ENSG00000238164_24 (sequence is synthesized)
ccagccgccgtggagtaacacagccagcagtttccctcctgccacgaaagctcgagactgaaactcaggatgaactgttttcagcccgggtcaccccagccctggggtggaggcccattg

SEQ ID NO: 852145 - DNA, 120 bp, Artificial Sequence
  ENSG00000238164_25 (sequence is synthesized)
aggatggccgagcaggggcgggcatccaggcaggtccagcagtcctggcgggctgaggagaaggaggtcagtgctcagggagacatccgcagagggacctggcaggcagagctccagaag

SEQ ID NO: 852146 - DNA, 120 bp, Artificial Sequence
  ENSG00000238164_26 (sequence is synthesized)
ggagggaactgcacagacagaaagctccagaaggctgcctgagggcctctgaggcctccggagtcaggcgccatggatgtggaaggtggactcttcagcatggatgggaccctagggggc

SEQ ID NO: 852147 - DNA, 120 bp, Artificial Sequence
  ENSG00000238164_27 (sequence is synthesized)
tgtggacccccggcccctgggactcacaggtgggagacaggtcctctgccacgctgctcaccatgcctgtgtgttatctccccatgaaaagtcacctaggccgagcatggtggctcacgc

SEQ ID NO: 852148 - DNA, 88 bp, Artificial Sequence
  ENSG00000238164_28 (sequence is synthesized)
tgcggatcatctgagatcaggagtttgagaccatcctgagtaacatggtgaaaccccgtctctaggaagaatacaaaaattaactggg

SEQ ID NO: 852149 - DNA, 120 bp, Artificial Sequence
  ENSG00000238164_29 (sequence is synthesized)
ggaggatcctgggctgttggcagccacccagcagggcccgtcctgggagtggggctggactcttcctgcaggaaaggctgggctggacctgctctgagaggcttcagaaccagccacacg

SEQ ID NO: 852150 - DNA, 120 bp, Artificial Sequence
  ENSG00000238164_30 (sequence is synthesized)
aagaccaaagtgaagagcaaggagctgaactccacgcagaacacagcgcagcgtcctttaaaggaaggccaaaaacaacccaacaaaaatgccaggtgatcaaagcggtcacagcacaat

SEQ ID NO: 852151 - DNA, 120 bp, Artificial Sequence
  ENSG00000238164_31 (sequence is synthesized)
gtccacatccaacgagaaattgctactacgtccagacgcagggaaaggtggccgtgggaacgtgagtcagcagcaacaggcccagaagggcagccacggtggacttgtcagacgtggacc

SEQ ID NO: 852152 - DNA, 120 bp, Artificial Sequence
  ENSG00000238164_32 (sequence is synthesized)
caaattcttttagagagaaacacacaccttccctaggacccagcaactccactcctaataaccaagtgaaatggaaggagttgtcctcagcaaaacgtgtgtgcggaagttcacagtcac

SEQ ID NO: 852153 - DNA, 120 bp, Artificial Sequence
  ENSG00000238164_33 (sequence is synthesized)
tttctcggtgataaccaagagctggaaaccactgcaacacccaccagcaggtgaacggattaacacactgggctagggccacacaatgagatgctccgtggcaacacaaaatgaaccgtg

SEQ ID NO: 852154 - DNA, 120 bp, Artificial Sequence
  ENSG00000238164_34 (sequence is synthesized)
gacacacactgcacggcggatgaatatgcagacatcaggccacgtgaagggagccaggccccgaggcgccacgctttgtgattcagggtggtccctctgcgcccaagacccggctgcctc

SEQ ID NO: 852155 - DNA, 120 bp, Artificial Sequence
  ENSG00000238164_35 (sequence is synthesized)
ctcctcttcctggctgcagggagtgcttgtgtctgaagaacgccaggctggtgtccccagagggcggctggaggggctcagaaaccattttcaccttctgtctcctccatgtctgcactg

SEQ ID NO: 852156 - DNA, 120 bp, Artificial Sequence
  ENSG00000238164_36 (sequence is synthesized)
tttgggaaagaaagcacgcagccaaagagcgcaaagaggctcagaggaggcccgggtgccctggagagacgctgcgtcctgacgacacagcatccctgtcccgcagcggagatttcccag

SEQ ID NO: 852157 - DNA, 120 bp, Artificial Sequence
  ENSG00000238164_37 (sequence is synthesized)
cactgcccccatcccggggcccaccattaccagcagggagagggaggcaggtgagcaccccgagccccacgcctcctgtcgcggggactccccagacccaatgctgtgccagtgcaggcc

SEQ ID NO: 852158 - DNA, 120 bp, Artificial Sequence
  ENSG00000238164_38 (sequence is synthesized)
aggcagggggctgaggccgaggcctggtcattgccatcctggtcacgatctggtgaaggatttgagtccagaagccaaacgtctacagtcgtgtggtgcggacactcaggatggactgcc

SEQ ID NO: 852159 - DNA, 120 bp, Artificial Sequence
  ENSG00000238164_39 (sequence is synthesized)
gcagagcagatggaggcgtgaggaggcggctccggggtcacctaggtgggcagccctcacaggggaggccgagggggagggcaggagggcggagcaggcggcggtgcaggaggcccgtgg

SEQ ID NO: 852160 - DNA, 120 bp, Artificial Sequence
  ENSG00000238164_40 (sequence is synthesized)
aacttggagggctctgtgtccagctctcatggcccagggcgggggcagctccaaggcctcgggcttggggacagaagggagaggacttgggggttgggggtggtcagagcattgtgggag

SEQ ID NO: 852161 - DNA, 120 bp, Artificial Sequence
  ENSG00000238164_41 (sequence is synthesized)
ggatctggggcagctggggcttcccagagggtgaggtgtctgctgggaattggggcagccccaggcgtccccaggcctccagcccagccccggttcctccacgctgcaggccagggtatc

SEQ ID NO: 852162 - DNA, 120 bp, Artificial Sequence
  ENSG00000238164_42 (sequence is synthesized)
aattgcctgctgggaaacctcagggtgcctctgtctcaagtgcctgcccctgacactcctggccctgggctccccccgcctccccgtctgtctgctttccccacctcctcccctcccctg

SEQ ID NO: 852163 - DNA, 120 bp, Artificial Sequence
  ENSG00000238164_43 (sequence is synthesized)
gccgtctttctgactcggggatggcgtcacctctcaccccaaatcaggaccctgggccccagctctgttccccacctcaccttccttgtgaccaactcctgacctcccgtgggcttgggg

SEQ ID NO: 852164 - DNA, 120 bp, Artificial Sequence
  ENSG00000238164_44 (sequence is synthesized)
tgtctgtggccggaacattcctcagaccctctcctccagccccactctgtcccaccacccaggcatcccccacctgggttccagccctccaaggggccccacgctctgtgtccatgatca

SEQ ID NO: 852165 - DNA, 120 bp, Artificial Sequence
  ENSG00000238164_45 (sequence is synthesized)
ggacactcacacgcacccagctcgcgcccttccttccagacattcgagctctggaagctcacagtcaccctagcttagtgcacagccacaggccaggcaccttcaacatccccaccttcc

SEQ ID NO: 852166 - DNA, 120 bp, Artificial Sequence
  ENSG00000238164_46 (sequence is synthesized)
aggtgaggaaaccgaggcaccgagagctgggggccaggccagggggtctccctggggggagcagaggagtgtcggacctcagaagaggctctgggggtctgagccgccaccgggcgctgc

SEQ ID NO: 852167 - DNA, 120 bp, Artificial Sequence
  ENSG00000238164_47 (sequence is synthesized)
cgtgaaccaccattgctggggttccagcatggggccccaggggacccatggctttcccagaaggaagctctgccattggacagccggtctcaggctgctgcacaggcccctccccgccct

SEQ ID NO: 852168 - DNA, 120 bp, Artificial Sequence
  ENSG00000238164_48 (sequence is synthesized)
cagccctggcctgcgggaatcaggaaagggtggggtccagctgcattgcgaatggactaaagccactgatttgcacacttgccaatggctgaaatggtcaataaaacgtcatgtaccttt

SEQ ID NO: 852169 - DNA, 120 bp, Artificial Sequence
  ENSG00000238160_0 (sequence is synthesized)
gatggacagctggcctcaagggaacactgcaaagtggctctaggaagaagccactgtccctccagaccataaaaatggctaccaagggcagagccagcagctttcgctgtaaagtttctc

SEQ ID NO: 852170 - DNA, 120 bp, Artificial Sequence
  ENSG00000238160_1 (sequence is synthesized)
gaaaggagaggtagaaactgagagttgaagaggctgaataatttctcaagcacactcccaactcgaccacccacaagcaaaaaggcagagctgggattcaaacacaggtatgactgtgtg

SEQ ID NO: 852171 - DNA, 120 bp, Artificial Sequence
  ENSG00000238160_2 (sequence is synthesized)
tggacatctcccctgtgctatgctccctgaaggaaaattctaagtggtgttgtttctgggagaaatctacctgtgtggtctttaaacctactctgacaggagcaagggccaccactctgt

SEQ ID NO: 852172 - DNA, 120 bp, Artificial Sequence
  ENSG00000238160_3 (sequence is synthesized)
ccacagaccacttcctctgctccccagcgccggatggatgcagatctgtgagtaaggagccagctgcaggcaagcagctcgagggcaggtgggcatgatgtctggctaccactcgcactg

SEQ ID NO: 852173 - DNA, 120 bp, Artificial Sequence
  ENSG00000238160_4 (sequence is synthesized)
gacgccacacacacagccagggtggcagaaggccccacctgccatgtgccagtgggacaccaccctcatggtctgcgtttccaggtttccaactaaggactgagcacactctcaacatgg

SEQ ID NO: 852174 - DNA, 120 bp, Artificial Sequence
  ENSG00000238160_5 (sequence is synthesized)
gatgttcagctcagcctggaaaggaggccgctggaagacctggatgcccgtcgtgggacaagagccagaagcactcacccagtgccaacacctgctgggccacaaacagtttctgcttgg

SEQ ID NO: 852175 - DNA, 120 bp, Artificial Sequence
  ENSG00000238160_6 (sequence is synthesized)
gatcccaacacaggcagcagagtcagcaaaaactctaagatatcaagaagtcaagcatttcttaacaacagcagcaaactcttacacagggctgtggttaccagacactgctctaaataa

SEQ ID NO: 852176 - DNA, 120 bp, Artificial Sequence
  ENSG00000238160_7 (sequence is synthesized)
cttacacttgtttacttatttcatcctcacaacaacgggtaaatattttaggtctctgccaatttgcctgattactgaattaggttgaatcattaaaatgaataacttgataatacccaa

SEQ ID NO: 852177 - DNA, 120 bp, Artificial Sequence
  ENSG00000261043_0 (sequence is synthesized)
accacactgtgtgcttctacacacccaggctgaacaccccatgggaggccctccactttagcaccttgacaagaagggtggggacactgggatcaggcccagccccctggccccaaaccc

SEQ ID NO: 852178 - DNA, 120 bp, Artificial Sequence
  ENSG00000261043_1 (sequence is synthesized)
tgcagccccagctggaggatgaggagatgctgggcttgggtgggggaatcaggggtgtaaaggggcctgctcactcctcagcttggctcaaggctcaaggcatcaaaggctcagcctgcc

SEQ ID NO: 852179 - DNA, 120 bp, Artificial Sequence
  ENSG00000261043_2 (sequence is synthesized)
cctcaggaaggagcctgggcccagccagacactcaccaggacaagggtgaatgtgacgagcaggaggcctagaatgaggagagccacagcatagccggggatggaggcatccagcaggct

SEQ ID NO: 852180 - DNA, 120 bp, Artificial Sequence
  ENSG00000261043_3 (sequence is synthesized)
ggaggcttcaaggctagcagtgcctagagcagaccaagaaggctatggccaggtggggccctgcctcccagacttctgagaaggcagaatctggcaccagaagttgctgcgggaccagag

SEQ ID NO: 852181 - DNA, 120 bp, Artificial Sequence
  ENSG00000261043_4 (sequence is synthesized)
agctggggctaggagcatcttggagggctccatgaggaggggaggcaggtttcagatcagggcatgtagaggcagcaagcccaagggaggaggcagatggacagagggagggggcctgca

SEQ ID NO: 852182 - DNA, 120 bp, Artificial Sequence
  ENSG00000261043_5 (sequence is synthesized)
gagggaaggaggtactgaccgaggtctgagatgaccgtgtctaccaagaggccctctgcctcccccagggtgtgcagacccacacgagagcctgggctgatgccgccctgaagaaggtgg

SEQ ID NO: 852183 - DNA, 120 bp, Artificial Sequence
  ENSG00000261043_6 (sequence is synthesized)
cacccactctgacggtcagtgggtccagcctggtgggaggatcatcccacttcagggggctgggcagcctggggggcctaagggaggtcatctcttccagcctcctgccttcaaccccag

SEQ ID NO: 852184 - DNA, 120 bp, Artificial Sequence
  ENSG00000261043_7 (sequence is synthesized)
aacccaggtctgagccctgggtcacccagggccaccctggacccaccggaattcctccaccaccactggtcaaagttctgcagagatctgaggacgagggtcagctggggggtcaggaga

SEQ ID NO: 852185 - DNA, 120 bp, Artificial Sequence
  ENSG00000261043_8 (sequence is synthesized)
ggatgaagagggtcacagctctaccaaagtcttgtccagtcatcccccatcttcccgaggcttcttccccgcccccccacttcatcccgccacttcacccatcttgtcggttgcccctga

SEQ ID NO: 852186 - DNA, 120 bp, Artificial Sequence
  ENSG00000261043_9 (sequence is synthesized)
agtgcccagaactcaaggctggttttgtcctccaaggccttggtgtagggctggcccaggatctgcagccaaacttcatacagcaccagctctgccttctcccctagagcgacaggggtg

SEQ ID NO: 852187 - DNA, 120 bp, Artificial Sequence
  ENSG00000261043_10 (sequence is synthesized)
gaggtggcatcggcctgcatcccctctcctggaagccctggagtgggacacacacccaagctctaatgctccatccaggggtcagctgctgttggtgtaaaggccaaatttcttgctgcc

SEQ ID NO: 852188 - DNA, 120 bp, Artificial Sequence
  ENSG00000261043_11 (sequence is synthesized)
tgcttttgtgtggcccacgcgctaagaatggcttttacatgtttaaatggttgaaaacatggaaagtagagtcgtatcttgtgacacatgagaattacgtgagatgcaaacttccatgtc

SEQ ID NO: 852189 - DNA, 120 bp, Artificial Sequence
  ENSG00000261043_12 (sequence is synthesized)
ggccacgcttatctgttgacatgttgctagggctgctttcttgctacaggggagggtttgagtaggtggtgacagagacccagtggcctgcagagccttaaagagttcccatccggccct

SEQ ID NO: 852190 - DNA, 120 bp, Artificial Sequence
  ENSG00000261043_13 (sequence is synthesized)
ttacagaaaacgcttgctaacccctgcactgatccacctaatggaatacactgcccactccgtgagttgatcctagtaggaaatgttgctgataatttaacagctgctgcttttatgttt

SEQ ID NO: 852191 - DNA, 120 bp, Artificial Sequence
  ENSG00000261043_14 (sequence is synthesized)
tattttgtccctgctctggtgggagacatgtaagaaaattcactccctgggaggaggtcatggtggggcttgtggccatcaacggtgaagcctctttaagaggatgcgtggggagctcta

SEQ ID NO: 852192 - DNA, 120 bp, Artificial Sequence
  ENSG00000261043_15 (sequence is synthesized)
ccatctgctgagagggttgtgaggggccctctgtgttgaggaatgaagagggaacgctgcctgtgtgctgggagctggctttctggggagcagaagagatggtggttcgggcctgcggag

SEQ ID NO: 852193 - DNA, 120 bp, Artificial Sequence
  ENSG00000261043_16 (sequence is synthesized)
gcagaggcccaaaccaatctggtctctggggctgccggcagggagagtagttgtgtaggagtgggtgcaggggcagagcctgaaggagggcacccctgactgcacccccaggaggctgtg

SEQ ID NO: 852194 - DNA, 120 bp, Artificial Sequence
  ENSG00000261043_17 (sequence is synthesized)
gtggtgggggtggggcagcactgtaggaggaccagcgccttctgtggctgaggggtccttggagagcagctccaggcaatgcgtagctggaggggactgatttgacccagcgctctccta

SEQ ID NO: 852195 - DNA, 120 bp, Artificial Sequence
  ENSG00000261043_18 (sequence is synthesized)
agccacaatgcccggcctaatgtactgtttatttaaaattctaaggatctttaataattttaataaggatctttaaataattttccatggatcatatttttattgcattttaaaataatt

SEQ ID NO: 852196 - DNA, 120 bp, Artificial Sequence
  ENSG00000261043_19 (sequence is synthesized)
tacaatttgctttcacacatattctccctcatctgatcctcacaactgccctgggaaggaggttggagacagagttggggcctgttaggagacaaatttacacaatgcataagaaagctc

SEQ ID NO: 852197 - DNA, 120 bp, Artificial Sequence
  ENSG00000261043_20 (sequence is synthesized)
actgtgagccggggtgaagaagggaggcttggagaatcatgaatgcagtatctatgtctatattcccagcccaaccacaaagcctgaaattcatttaggtatttaagaaatagctgctga

SEQ ID NO: 852198 - DNA, 120 bp, Artificial Sequence
  ENSG00000261043_21 (sequence is synthesized)
attattgcctaggggtgctcagctcaagaagcagggttgagactaacaatcaagcttcctgactcctagcccaatacttttccaaacacaccacctatttttctgtatcggatagaaagt

SEQ ID NO: 852199 - DNA, 120 bp, Artificial Sequence
  ENSG00000261043_22 (sequence is synthesized)
atagtgcttaagttgtacataatgttaactcactttcaatacaggccaatcatgattgactatcagtagcttttgtgacaaacttagtaaactaggaagttgaacctttcagagttcccc

SEQ ID NO: 852200 - DNA, 120 bp, Artificial Sequence
  ENSG00000261043_23 (sequence is synthesized)
ttctcatgtcatatgctatttctgttttgaaataaaaatccttccaaatgaaactttatccatcaaaatgacaagagaagtgaaaatagatacaagaagaaaataaaacattaatttcaa

SEQ ID NO: 852201 - DNA, 120 bp, Artificial Sequence
  ENSG00000229388_0 (sequence is synthesized)
ggagacactgtctctaaaaaaaaaaaaaaaaaattagcctcagcatggtggtgtgtacctgtagtcccagccactcaggagactgacaggcaggaggatctgcttgagcctaggagttcc

SEQ ID NO: 852202 - DNA, 120 bp, Artificial Sequence
  ENSG00000229388_1 (sequence is synthesized)
tgattgcaccactgcattccagcctggacaacagagcaacacactgtctcaggaaaaaagacagagagagagataacactggtggatgataggaagagcaattgacagcaccatctctgg

SEQ ID NO: 852203 - DNA, 120 bp, Artificial Sequence
  ENSG00000229388_2 (sequence is synthesized)
attccaacgccatgagacgccttctgtcgtgagcagttgacaagaaagacccagcacttactgcaaccggaaggagcggttcctccctcgctcgcgcagccgctcttccccgccactccc

SEQ ID NO: 852204 - DNA, 120 bp, Artificial Sequence
  ENSG00000229388_3 (sequence is synthesized)
tcggtgcccgccagcacattcccagcaagccctgagtatatttgcatatcaactcactacatttttttcttctaactaaaaaatcgaaaggacaaattccagattctccttgtgaagtct

SEQ ID NO: 852205 - DNA, 120 bp, Artificial Sequence
  ENSG00000229388_4 (sequence is synthesized)
tcctttcagttcagaagaaatggaattcgctcttcaacttcaggaagttgaaataaagagttgcttggattttgtgttcacctttaccaaaaaatggatttggtaacactgccaccctgc

SEQ ID NO: 852206 - DNA, 120 bp, Artificial Sequence
  ENSG00000229388_5 (sequence is synthesized)
tgcgcttttaactgcttgtggttgagtggcagcatgagcgagctctgcgtattccaacccggcgttaagaatccttcactagcttttcttcccgacgctgcttatttatctatcggtagc

SEQ ID NO: 852207 - DNA, 120 bp, Artificial Sequence
  ENSG00000229388_6 (sequence is synthesized)
atgacgggtaattgacgccctcggatggctttgaggtcgccatttttggttggtgcctttgtcttggtgtcaggactgggatatcatctgggacacattaccccacaggtatcctgttgg

SEQ ID NO: 852208 - DNA, 120 bp, Artificial Sequence
  ENSG00000251279_0 (sequence is synthesized)
aaaacggatcgaccaggctcgatctcccaaccagacccgcgtggcccctgcggctgcaacgggtagcacttgacggccgtccgcacttcctcctttgtctttcccttattccttacgttt

SEQ ID NO: 852209 - DNA, 120 bp, Artificial Sequence
  ENSG00000251279_1 (sequence is synthesized)
ctcccttgctcactcttccctccttaccctatcggggctgcagacccacggaggccacgttcactcctgcccgtcggccttggcaagcgcgggccccttgtcgcgcagagcggagggtcc

SEQ ID NO: 852210 - DNA, 120 bp, Artificial Sequence
  ENSG00000251279_2 (sequence is synthesized)
tgggagatcctgggttggcccagccacaccttgcgccgccgccgtttctgctggacaccaggagaaaaccacggcagctgcagccaccaacttcccctacatagccccacgggatcggat

SEQ ID NO: 852211 - DNA, 120 bp, Artificial Sequence
  ENSG00000251279_3 (sequence is synthesized)
cgagccgccagccgggcgtgacttctccatcatcttcctccacctgattcgtagagacctctggacatctgagcctaagcagggccactaaatgagagagaatcccatcactgaaaagca

SEQ ID NO: 852212 - DNA, 120 bp, Artificial Sequence
  ENSG00000251279_4 (sequence is synthesized)
acaatgaatatattaaggaccacaggagagatagaagaaatattgcaactgaagctgctagatggttatgattatctgaataggtgtgatcttgactttagcgaattaacagtcatgtag

SEQ ID NO: 852213 - DNA, 120 bp, Artificial Sequence
  ENSG00000251279_5 (sequence is synthesized)
gtgaaattatcttggactctccagacaagaccagccaccagctgaataccagtgggtgaccccagtcaatcacatggaacagaagaatcactcagctgagccctgccagaattcttgatc

SEQ ID NO: 852214 - DNA, 120 bp, Artificial Sequence
  ENSG00000251270_0 (sequence is synthesized)
gttctgggtcaatgagaatgagaaacccagtgttcgggagagaggaggcagctgaaatgagcctgcatctctacaaaggaaaatgcagcccaggtcctctgatgcagagaagttagtgtt

SEQ ID NO: 852215 - DNA, 120 bp, Artificial Sequence
  ENSG00000251270_1 (sequence is synthesized)
gtagggagctgaggactggacatccagaataaagctcatccaccaccgttagggatgtcagtacctgccaacgccactggggacagctggtccctcagtaagctgccagagatcggatcc

SEQ ID NO: 852216 - DNA, 120 bp, Artificial Sequence
  ENSG00000251270_2 (sequence is synthesized)
aaccacagaggcccaaacgcagttggatccaggaatctgatcattgttcttccatacctcaaccaactctagctatgatgtccgtaactacgtaaaaaaccagaactgcttttaaacccc

SEQ ID NO: 852217 - DNA, 120 bp, Artificial Sequence
  ENSG00000227940_0 (sequence is synthesized)
gagacccaaaggctataaaaaaggtagatgtctgcggagaagaggagtgcctgctccctctccctgttggcttcctcctccccaccttgtcctgccaatcagctgagagactgactccac

SEQ ID NO: 852218 - DNA, 120 bp, Artificial Sequence
  ENSG00000227940_1 (sequence is synthesized)
acagctttatctcacctcaaggaaatgctaacatacgccatcagccagcacaccattgacagagaagtgaggagcaagtggttcagcagttcagtaaatatggcggtcaacctgaaacac

SEQ ID NO: 852219 - DNA, 120 bp, Artificial Sequence
  ENSG00000227940_2 (sequence is synthesized)
gatgttctgcacattgccttcctgctccttctgcgaccacagggagaggaagcacggctgctgcaagagctgccaaaaggcagggagcaagagctaattccacaacaagagcaagctcac

SEQ ID NO: 852220 - DNA, 120 bp, Artificial Sequence
  ENSG00000227940_3 (sequence is synthesized)
agtcggtgatctcagtgtcagagtcccactctaccctcttgggatcctatgtatctgagctgctctatgtttaatcatcatcatgtcaccatcaaaaatatttattaaaccgctgcatac

SEQ ID NO: 852221 - DNA, 120 bp, Artificial Sequence
  ENSG00000227940_4 (sequence is synthesized)
tcgcaattggcaggcagaagaacccatggcactcccaagaaggcttggttcctgccactcgcctcccctgccacgcccctgtgggctgggcatatcagcaatagcatagattgtcatctt

SEQ ID NO: 852222 - DNA, 120 bp, Artificial Sequence
  ENSG00000227940_5 (sequence is synthesized)
gcaagtccccaaggcccctctttatgtgacatgcagaagtccagctgggcagtgaaaaatgcggtctgtcatctagatgtgttttcctatgtgttgtctgttttgtgaatgcatgcaact

SEQ ID NO: 852223 - DNA, 120 bp, Artificial Sequence
  ENSG00000227946_0 (sequence is synthesized)
tcctacatctggggactgctccagaaaccctgcctgatcctgcccctctcactgacagtctcctcgctgctccctacatcttcctctccgccggagctgtccagaagggggattttggac

SEQ ID NO: 852224 - DNA, 120 bp, Artificial Sequence
  ENSG00000227946_1 (sequence is synthesized)
ccaaaggaatcgggatgaaaggggatcagagtgagaggcgctggcaatggactaggaagctcggctgccgctgctactgctcccccctgggctccggcgagagcctttccctgtcaagca

SEQ ID NO: 852225 - DNA, 120 bp, Artificial Sequence
  ENSG00000227946_2 (sequence is synthesized)
agaggggtgaggatcatatttttattttggaaactaaaaagtgctcccagggtcggtgattattaaggggaaatccctgaatatactctccagccaagaaggcagggctgccggggctgt

SEQ ID NO: 852226 - DNA, 120 bp, Artificial Sequence
  ENSG00000227946_3 (sequence is synthesized)
ctacaggcactgcgaggacataacaccagagagctgctcctctgccctccgaaacgacaactttcctaccatcttggaggcagagcaaaggggggccagggggaaaagtgcacccgctcc

SEQ ID NO: 852227 - DNA, 120 bp, Artificial Sequence
  ENSG00000227946_4 (sequence is synthesized)
cgataaagtacaaatttttacttctcatctctggaaaaaagtccacaccggccgtctacacccgcgcctgggggagaaagcagggaagaaacggggggtgcatgagaaacgttttcattt

SEQ ID NO: 852228 - DNA, 120 bp, Artificial Sequence
  ENSG00000227946_5 (sequence is synthesized)
gctccagggggaaaaatgtttctgcatcttctgatggaaagaaatctttacaagacacaggttttccggtggttattgttttttattttctgtttttaatttttttcatgttagtgacag

SEQ ID NO: 852229 - DNA, 80 bp, Artificial Sequence
  ENSG00000227946_6 (sequence is synthesized)
cccgcgggcgccccggaggccctcaggcccccggcctccaccacccgggcgccggccccactcaccctttcattctccgc

SEQ ID NO: 852230 - DNA, 120 bp, Artificial Sequence
  ENSG00000227947_0 (sequence is synthesized)
atgagagctgacagcagcctctggatgtactcccgtgcatctggaaggggagagaatcacagacgatgtaatttcaacaaggacgatttcggtcttttgcaaagacccttctattagcag

SEQ ID NO: 852231 - DNA, 120 bp, Artificial Sequence
  ENSG00000227947_1 (sequence is synthesized)
gagcagcttggatgctcctcctcatggccagtctccagagaggcctactgctcaccagatgtgtggatgaacaaacctgaacagcctggaggctggtgatatctacccccacagcgcttc

SEQ ID NO: 852232 - DNA, 120 bp, Artificial Sequence
  ENSG00000227947_2 (sequence is synthesized)
ttccttggtcccccaagcaggctccataactccaagacttcacgcagccttttctgaacttggaagtcaagagaaaattcacagaactttggaaaatacattttcttttaaggaagaatt

SEQ ID NO: 852233 - DNA, 120 bp, Artificial Sequence
  ENSG00000227947_3 (sequence is synthesized)
ttttgttttcatttcaacagccctggctggtgatgaggggtgatgcgaggtgccctgttttccatcctaacacctatttccaggtgggggcagggagggctccaacctgaaatgttattt

SEQ ID NO: 852234 - DNA, 120 bp, Artificial Sequence
  ENSG00000227947_4 (sequence is synthesized)
caaaacctttccgggccttgcagctccatttccaggccacatgctgcaaagcacggcacgatttcccattacgtgctgttgccctttctcgtctgagcacctttcaaagtgggaagaccc

SEQ ID NO: 852235 - DNA, 120 bp, Artificial Sequence
  ENSG00000227947_5 (sequence is synthesized)
agcctgctgcaacaccctccctcctgtccccataaattaagtctcactgcctgatgtgaggcttaaataaatagccttgcccggcacccgatggccacactcctgatagatgggcttgcc

SEQ ID NO: 852236 - DNA, 120 bp, Artificial Sequence
  ENSG00000227947_6 (sequence is synthesized)
ctcctccttgcccctccacagagagaagatgaaactggtgttttgcaaatgcttcctgcctgctttctgccagccaaggcacattccaagaaggagcaggccagcaaagtcttgtcatct

SEQ ID NO: 852237 - DNA, 120 bp, Artificial Sequence
  ENSG00000227947_7 (sequence is synthesized)
gacggggtgaggacagagatggatgatgcgctctttgccagagaaggccacgttcagacactcccagatagccagctgccactttattaacagcaaagatccccatctgaacgaggctgg

SEQ ID NO: 852238 - DNA, 120 bp, Artificial Sequence
  ENSG00000227947_8 (sequence is synthesized)
gaaagaaaatatttatgcttgcctgtcaggaggaccttcatttttcttctggggagccagccagggtgctagtccagggatggaggagtgtgacgtgcctatggggttgccccaggccct

SEQ ID NO: 852239 - DNA, 120 bp, Artificial Sequence
  ENSG00000227947_9 (sequence is synthesized)
tctgcatcccagggttgatggagagtccagaatgttcccagggcagctctggatggggtcgggaggtttcagaagagctggatatagggagttcagggcctgagaaagcagaacacaccc

SEQ ID NO: 852240 - DNA, 120 bp, Artificial Sequence
  ENSG00000227947_10 (sequence is synthesized)
tggcacctgttaactgcaaacaagaggacctgggtgggggagtgggtgctacagttagaaatcagtggcaaataggccattaaatgatctcattattaattaaaaacacatagcagcatg

SEQ ID NO: 852241 - DNA, 120 bp, Artificial Sequence
  ENSG00000227947_11 (sequence is synthesized)
catctgataagaaactttgtactaaggataaaataattttgtattggcagaaaatatcaacactggagcagagcttatcatttaagctgggcatatattaaaatcagtttatattattac

SEQ ID NO: 852242 - DNA, 120 bp, Artificial Sequence
  ENSG00000251276_0 (sequence is synthesized)
gggaagtgacagcagcagacacatcatgctggcagggcacatttactgtcatattggaacggagagttgatgtcatattacaagctgagtaaacctagcagctccttctctgatatggtt

SEQ ID NO: 852243 - DNA, 120 bp, Artificial Sequence
  ENSG00000251276_1 (sequence is synthesized)
tcaggacagctcatttagataagtcatgaacctaaatggctaaattaaagcaagactgtgattaccaacacagctgggattaggcaagctgtggcacaagaattaagccacatgaagggg

SEQ ID NO: 852244 - DNA, 120 bp, Artificial Sequence
  ENSG00000251276_2 (sequence is synthesized)
aagagccacaggtcagaaggtccccagaaaatgtctaacaagagaagcaagttaaccggaaatcagccatgtgccttaaccagaagtcagctgtgacttttaggcctcttctggaagtgg

SEQ ID NO: 852245 - DNA, 120 bp, Artificial Sequence
  ENSG00000247363_0 (sequence is synthesized)
aggcgcaaaagtttgccaatgtgttcctggttgcgtttagcccagacgccctgcggccgctttgcctgaccaaagtctgtgggcgtggaacaggccctgggttctcctactgggaagaat

SEQ ID NO: 852246 - DNA, 120 bp, Artificial Sequence
  ENSG00000247363_1 (sequence is synthesized)
gaagttcaggtactccatgtgatatatggttccacaatcctcagcgtgttaactgaagccttgttgagtttaacaaagctgccattgaagatctggggaaagtgaagaagttgcaacaga

SEQ ID NO: 852247 - DNA, 120 bp, Artificial Sequence
  ENSG00000247363_2 (sequence is synthesized)
gttttgggctcacaccattgatacatttgatccttaaggcaagcccaccccgcctcactcccaccctcttctacttaattcaggatgtgaatagcacatgccttccatcttcagacaaac

SEQ ID NO: 852248 - DNA, 120 bp, Artificial Sequence
  ENSG00000247363_3 (sequence is synthesized)
actgaggcctggacaatgacctgcattaggtagatagaatctactgaaagctaaaagccttttcctgtgtcttagcagcacggaagccacgcctccttccccccaatgtttgtgcaaacc

SEQ ID NO: 852249 - DNA, 120 bp, Artificial Sequence
  ENSG00000247363_4 (sequence is synthesized)
ctagagaagaggagacagcccctatgatgtgtgaggttgaatttcctgccctcaacccatcaaatcaggcagaatgagggctcagtcagaactacaactacaaaagagaaaaattttaat

SEQ ID NO: 852250 - DNA, 120 bp, Artificial Sequence
  ENSG00000247363_5 (sequence is synthesized)
gtgacttttcttgtctgctcagatttttgggttaaggttcatgccagctacattctttgcataataaaatataaatagagtataaattgttctagttagagaaaacagcaaaacagtgct

SEQ ID NO: 852251 - DNA, 120 bp, Artificial Sequence
  ENSG00000247363_6 (sequence is synthesized)
ctcccaagggccctaataaatcactttacagaaacgtggatgtgtgttggatttacaggatttctatgccaagcagagaagtacgtgaaaacaggaaagcaaaatgcataagttgcaata

SEQ ID NO: 852252 - DNA, 120 bp, Artificial Sequence
  ENSG00000247363_7 (sequence is synthesized)
ttagtttttcagttgccccaagatcatttccattactgatgaggcttgaaatgtctgtgaagaagagtcattgcaattgatttatttgtctggcaaactttttgtcagcaaattcaccac

SEQ ID NO: 852253 - DNA, 120 bp, Artificial Sequence
  ENSG00000247363_8 (sequence is synthesized)
tacctcaaaaatctcactagctactctatgcttaagacattggaagcataagccacaatgaaaactaactcttagcattagaattctaagaagcagtaatgtatttatgattttatgtta

SEQ ID NO: 852254 - DNA, 120 bp, Artificial Sequence
  ENSG00000247363_9 (sequence is synthesized)
aaaatctcccagatgtcagcatttaaatcacaattcagtaatataagtaatttgaaattagaaagttttatacttcaccattctattttcctcttcaaattgaacacagtttgaaagaat

SEQ ID NO: 852255 - DNA, 120 bp, Artificial Sequence
  ENSG00000247363_10 (sequence is synthesized)
taagaaaagaagctataaaaaataaattgttcaaggattcttcctgtttctaaacaccacaagattatgatgatagagacatcatttgaagtggtagagagtactgtgaaatatctatat

SEQ ID NO: 852256 - DNA, 120 bp, Artificial Sequence
  ENSG00000247363_11 (sequence is synthesized)
gtgaatgtaatgaaaatgaaaaaataatctgatgaatttttaaaattaatcttgttagagtcatttttgagaaattgtatgcaagtgtattgattgaaaatgaccttctcattcaagaaa

SEQ ID NO: 852257 - DNA, 120 bp, Artificial Sequence
  ENSG00000247363_12 (sequence is synthesized)
aatttattgagcacttaccaagtgtcaacaggtgaatgtgaataaaatagatatggtccctgccttcttggagttgaataaaatagcaaacacttattgaatatttattatatgttgtgc

SEQ ID NO: 852258 - DNA, 120 bp, Artificial Sequence
  ENSG00000247363_13 (sequence is synthesized)
attataatattaaccaatgtttattgagttgttattatatgccaactatgccaatcctgtcctaagcaatttatgtatgttaactaatttaatcctcacaataaatctatgaggtaggta

SEQ ID NO: 852259 - DNA, 120 bp, Artificial Sequence
  ENSG00000247363_14 (sequence is synthesized)
atatatttcttgtgacagtgctgagctttttttttttacttcttgcttgcttttttttggacttgattttttaaattatgtttccttccttccttctttctttgttttttttttttttga

SEQ ID NO: 852260 - DNA, 85 bp, Artificial Sequence
  ENSG00000247363_15 (sequence is synthesized)
tttccttccttccttctttctttgttttttttttttttgagacaggatcttgtcctattgtcccggcttacgtgcagtggcacag

SEQ ID NO: 852261 - DNA, 120 bp, Artificial Sequence
  ENSG00000247363_16 (sequence is synthesized)
ttcaacgcctttagaacaatggcagtcacatagtaggtactcaatgtttggagtacgaataatgtactcttattattcaaagaccagctagaaagttaccttctttgaggggtcttcctg

SEQ ID NO: 852262 - DNA, 120 bp, Artificial Sequence
  ENSG00000247363_17 (sequence is synthesized)
atagttacagtgacaaggagacttaatcgcccccaaacacttaccactttacactgcttggttgtctccattacacaactaattccccgaggggaaggatcttgaataactgatctttgt

SEQ ID NO: 852263 - DNA, 120 bp, Artificial Sequence
  ENSG00000247363_18 (sequence is synthesized)
tgtaggcggctagcacagtacccagatcatagagggaactcagaatctgatgctggcacttgtaatcagaaagtctgggctgagatcccagtatcttcactgactggctttgtgatctca

SEQ ID NO: 852264 - DNA, 120 bp, Artificial Sequence
  ENSG00000247363_19 (sequence is synthesized)
ggctggtcacttagcatttcgaacgccgcgctacctaccccgcccaccccaggagcgaacagtgttgctgccccaaagcgccgaatagatcgcagaacgtagtgggaaagtaagggacta

SEQ ID NO: 852265 - DNA, 120 bp, Artificial Sequence
  ENSG00000247363_20 (sequence is synthesized)
ttatgatctgtaccccaccccgacgcacgccaagcggctttttccccatttgtggccaaatttcccggcatggggaaggagccttaggggaagcacccgggacctccttggcttcttctg

SEQ ID NO: 852266 - DNA, 120 bp, Artificial Sequence
  ENSG00000247363_21 (sequence is synthesized)
ggagtctagtttcacctatttcgtttcgccaacaggcgagacgggcaagacttcgggctcagctgccaccatcagtactgacctgtccatggctaaagccttttccacacacaaccaaag

SEQ ID NO: 852267 - DNA, 120 bp, Artificial Sequence
  ENSG00000241202_0 (sequence is synthesized)
gttccaaggatcctgggcaagaatattaggagcctgaggggtacccaaaggaaacccatctatgtgacccaacttgggctgattgaatgcaaaccagagcagaaagaagcagaaacacaa

SEQ ID NO: 852268 - DNA, 120 bp, Artificial Sequence
  ENSG00000241202_1 (sequence is synthesized)
aacggggcagagggagtttgacagagaggagaacaaatcgctgacaaagaaccttttacgtttcatcagcgttgttaggacgacaagcaggaatgtctcagataataactcccacttcaa

SEQ ID NO: 852269 - DNA, 120 bp, Artificial Sequence
  ENSG00000254157_0 (sequence is synthesized)
tgctcagctcctggggctgctaatgctttgggttcctggatccagtggagatattgtgatgacccagactccaccctccctgcccgtcaaccctggagagccggcctccatctcttgcag

SEQ ID NO: 852270 - DNA, 120 bp, Artificial Sequence
  ENSG00000254157_1 (sequence is synthesized)
agggtttccaatcatctttctggggtcccagacaggtttagtggcagtgggtcaggtagtgatttcacactgaaaatcagctgggtggaggctgaggatgttggggtttattactgcatg

SEQ ID NO: 852271 - DNA, 120 bp, Artificial Sequence
  ENSG00000260790_0 (sequence is synthesized)
ctggcagaggcgcgtcttacccctgtggtgggtgtcccgaggccggcgcgtctgtggacaggcaacgcaggccggagggcctaggactccggcctctgagaggcgggcggttgtccaggg

SEQ ID NO: 852272 - DNA, 120 bp, Artificial Sequence
  ENSG00000260790_1 (sequence is synthesized)
gagtccttcgtgccggcgggaagcgcaagggtgccggaagcctgaggtccgccgcccggccaccccttctcgcatcttgactctgagatttgctccgggtccggcggggagactcgaggt

SEQ ID NO: 852273 - DNA, 120 bp, Artificial Sequence
  ENSG00000260790_2 (sequence is synthesized)
ttgggttgagaaaacgcccactgagcggtagctcttgtctccttgacatctgagccctgggaattaaactcacgctacataaaacggtacccctagaccacaagttaagcatctggggac

SEQ ID NO: 852274 - DNA, 120 bp, Artificial Sequence
  ENSG00000260790_3 (sequence is synthesized)
gtgacattgcacctggaggggacaggctgcagctccagcacttagtagccagcgaggcagagcacgctgtcctccaccgacataacccagcaaatactgctcctaggtaaagctttaagc

SEQ ID NO: 852275 - DNA, 120 bp, Artificial Sequence
  ENSG00000260790_4 (sequence is synthesized)
accatcttgcagacaaagcacggaaactcttaagcaggatgacagacctgaaggtcaatgttctcaaccttgacgtaaagagtctcaccatgtggcccaggctggagtgcagtgacacca

SEQ ID NO: 852276 - DNA, 120 bp, Artificial Sequence
  ENSG00000260790_5 (sequence is synthesized)
aaacggtgggcaccagacccccttgagaatctggggcggtgagggatgcccgaagctgtccacttggagggcgaaaattgtaagcagtgttgcaacgatttttaaaaggtacccctagac

SEQ ID NO: 852277 - DNA, 120 bp, Artificial Sequence
  ENSG00000260790_6 (sequence is synthesized)
cgtaaaggtaaaggtgcagctgatggaagacaacagggccaatatctaactaactttgagcaacgaaacaaaaaaaaatcgaggtttaagtatacaattgaaagattatctctagaacat

SEQ ID NO: 852278 - DNA, 120 bp, Artificial Sequence
  ENSG00000260790_7 (sequence is synthesized)
gaggtaataaactgttagaaattcagagagagggaagaggtggagaggagtgttaaatcctgatctattttagaagtgagtcgacagataataccttacattgataatccaatgaatagt

SEQ ID NO: 852279 - DNA, 120 bp, Artificial Sequence
  ENSG00000260790_8 (sequence is synthesized)
accttacattgataatccaatgaatagtttccacaaatatggagagagctgccagaactaaaaatgggaagcaattaagagttttccgaggctggacacggtggctcacgcctgtaatcc

SEQ ID NO: 852280 - DNA, 73 bp, Artificial Sequence
  ENSG00000260790_9 (sequence is synthesized)
ctgcgtctcaaaaaccaaacaaaaaaaaaaagttttcctaagaggaggagtgatttgaggctggggactttgg

SEQ ID NO: 852281 - DNA, 120 bp, Artificial Sequence
  ENSG00000260790_10 (sequence is synthesized)
tttcctaagaggaggagtgatttgaggctggggactttggctttttgttataaacccttctgtgatcttgcttttttagttacttgcacattaaaaataagggaaattgtagggaaggaa

SEQ ID NO: 852282 - DNA, 120 bp, Artificial Sequence
  ENSG00000266401_0 (sequence is synthesized)
aaggccaatgttttggccctactggtgaaaatatgtagacctaacatctatctccctgctccagtttcaagagaaaagaccttattcagagaaatatttagaagactcttgtggaattct

SEQ ID NO: 852283 - DNA, 120 bp, Artificial Sequence
  ENSG00000266401_1 (sequence is synthesized)
tgctgtgagtggtttttccttccctgccattggtgcgactgtttcccccttccgtcaaattgctgtctagatgtttctctctgaccccaattttctcggagtttgggattatcaatctaa

SEQ ID NO: 852284 - DNA, 120 bp, Artificial Sequence
  ENSG00000266401_2 (sequence is synthesized)
aatcagaggcagggaggaacttggattgtccttcagtaaaattccactttgatgcgcaaagcgaacttgaatttctgcttggcctaccacaggcctgcaacatgcactttctcctcgagg

SEQ ID NO: 852285 - DNA, 120 bp, Artificial Sequence
  ENSG00000266401_3 (sequence is synthesized)
gaactgccactcactgacacggacaacagtaaaggaacttggtcttcactatgcctcatagtggtgggtcacactgcccaggaggaacccgcaatgagaccggcaaatgccttaaccatc

SEQ ID NO: 852286 - DNA, 120 bp, Artificial Sequence
  ENSG00000266401_4 (sequence is synthesized)
tgggcaaacatgtctgctctgttgggataaaggacgctctagaccaggctctgctgaaagatccagggcaaaggttcctgacaagactatgtccagcctcaaataaggccacagaagagc

SEQ ID NO: 852287 - DNA, 120 bp, Artificial Sequence
  ENSG00000266401_5 (sequence is synthesized)
ccaggctcgctgacgagcaccggctccgaggcagtcacatcaggagacagaaacagacatgttggtgctgccctctcaggtcagtgcaaatgccacttgaggagggctgagagctttgca

SEQ ID NO: 852288 - DNA, 120 bp, Artificial Sequence
  ENSG00000266401_6 (sequence is synthesized)
gcataaaatgaccagaacaaggagaaacacagatgcaatggcaatagctggcaattcgcacatggcgtcaaacaccactgccacagaagctttttagctacaagccacgctatgcaacct

SEQ ID NO: 852289 - DNA, 120 bp, Artificial Sequence
  ENSG00000266401_7 (sequence is synthesized)
ttaagcaaaacattattgattttgtggttgtaaaaacataccttcaactgcagaactcagttttatgacaccttgaataaaaacaaaaagtggcagttatataatggacccaaatcgcct

SEQ ID NO: 852290 - DNA, 120 bp, Artificial Sequence
  ENSG00000266401_8 (sequence is synthesized)
tttccaggcttctcataacacacgcatgcttcagatttggatttttctttttctgctggcattgcaagaacgtaactaaacaaatatcaacttcaaaaataaaataatttttagtcttaa

SEQ ID NO: 852291 - DNA, 120 bp, Artificial Sequence
  ENSG00000266401_9 (sequence is synthesized)
atttttcctcattgcaaaataatcaaagcattgatgagtgtttctgtttaaattcaaaggacattccacctttaaccttagcattcatgagacacaaaatgggtttttctttttgctgat

SEQ ID NO: 852292 - DNA, 120 bp, Artificial Sequence
  ENSG00000266401_10 (sequence is synthesized)
ttaaaaagctgctatgaagctgcacagtgcggaagagggcacccctgctccagaaaagaagaaacaaaactgcctgccatagacacttggtagggagtggcaaatggaatcttggtttgt

SEQ ID NO: 852293 - DNA, 120 bp, Artificial Sequence
  ENSG00000266401_11 (sequence is synthesized)
ttttctcttaggactttgacaattatttttccttgaaaagaataagagaatctacctaaaatattaatactagtttcagagctctaggataatatagagcagagtctcttttttttaaaa

SEQ ID NO: 852294 - DNA, 120 bp, Artificial Sequence
  ENSG00000266401_12 (sequence is synthesized)
aaggaaagcggtttcatttctgacagtggatttcttccactgatgtgcacactctttgacatgaaaagctgcacgaagctgccttgaattcattctgcagatggaaagttgcaagtacgg

SEQ ID NO: 852295 - DNA, 120 bp, Artificial Sequence
  ENSG00000266402_0 (sequence is synthesized)
ctttcagcgcctgcaggttccgggaggtcagctcccagccgaggacgtcggatgtcatcgtccttgctgctttgccaccccattcccgtcaataaagtggtttgaacccaaccctggtgt

SEQ ID NO: 852296 - DNA, 120 bp, Artificial Sequence
  ENSG00000266402_1 (sequence is synthesized)
cgccgagcttcctcgtggcgccgggggtcaatctgcagcgctagagcatgtgcttgcgcataactggggccgcctggcctcccgcgggcggcctttttaaccgcgagcgacaagaagtaa

SEQ ID NO: 852297 - DNA, 120 bp, Artificial Sequence
  ENSG00000262533_0 (sequence is synthesized)
tccaaatcaccactttattatgtggcagtcaccatggtgccagcctctgccttccccatgtcaccctcctaatccagggctctccaaccatattcatgtttgcgttttcacaagtcaatg

SEQ ID NO: 852298 - DNA, 120 bp, Artificial Sequence
  ENSG00000262533_1 (sequence is synthesized)
tcaagaattgatagttgtctcttaactggttctggtgaggcgcactcacagcagtgagtggagggtcctgggagggcatggatgacggaggctgcccctagaggagctggatgtaggagc

SEQ ID NO: 852299 - DNA, 120 bp, Artificial Sequence
  ENSG00000262533_2 (sequence is synthesized)
agagacatttcttgatctttcactctgcaaactggtccaagaacttgagaggggatgactttgtcagtgtccccaaaaacatggagcgaaggcaatgacaagggcctttgcaggatggat

SEQ ID NO: 852300 - DNA, 120 bp, Artificial Sequence
  ENSG00000268532_0 (sequence is synthesized)
aggtgcagcctctcccacgtgcacctgcgaggcctaccctttctcccgtctcagggccttgatgcccgtgcctgtgaagctggcatcagcgaagacctcagacgggaagggatgagtgag

SEQ ID NO: 852301 - DNA, 120 bp, Artificial Sequence
  ENSG00000268532_1 (sequence is synthesized)
caggagtatgagtacgtgagtttcgaatggaagcactgttatgccagcatcaaacaccctgcattgacagaaatgtgattccggcaaggtaataactgccactccctgggactgtttgac

SEQ ID NO: 852302 - DNA, 120 bp, Artificial Sequence
  ENSG00000268532_2 (sequence is synthesized)
atgactccaggaccacagggagtgcatgaggaagctggcagtccacctgccacccactgtgaacccagacagagaggccatctgacccacacagcaattctgggggactgggacctgcga

SEQ ID NO: 852303 - DNA, 120 bp, Artificial Sequence
  ENSG00000268532_3 (sequence is synthesized)
gcaaggttcgattcccagcccatccgtccctgtctctctgacacacggtcaccacgtgcattctgctgccaggccccggagctgaatcctgtgaaatccttgctccaggggccacacaat

SEQ ID NO: 852304 - DNA, 120 bp, Artificial Sequence
  ENSG00000268532_4 (sequence is synthesized)
gtaaccgggaggcaggaatatgacaggaaaagttaacccacaggatgggaggtcccaggctgtgtgcacagtgacaggagtgatcacaagagtgcatggggactcaccctggccagagac

SEQ ID NO: 852305 - DNA, 120 bp, Artificial Sequence
  ENSG00000268532_5 (sequence is synthesized)
agagaggcatataggaaggttccccaggggagccgagactctgtccagacctcaaagaattcggagaggagagtgagagtgagcccgtatctgggataactgaaaaaaaaaaatgactag

SEQ ID NO: 852306 - DNA, 120 bp, Artificial Sequence
  ENSG00000268532_6 (sequence is synthesized)
cttaaaaaaaaatctccatgtgtgacaccttacgtcactaaagcaaagtgtggatttgagttactaggtactaacgagaattttggaaaatggacacagccctgcgtttaaaggaattgt

SEQ ID NO: 852307 - DNA, 120 bp, Artificial Sequence
  ENSG00000268532_7 (sequence is synthesized)
cttttcttgctggctgatacacttgtaaacacacacacacacacacaccccacctggcatctccatataacatcccagggtgccgttagcctttctgcctcctccctcatcccatgtctc

SEQ ID NO: 852308 - DNA, 120 bp, Artificial Sequence
  ENSG00000268532_8 (sequence is synthesized)
cagcatgtgctcgctgctgggcataggtggccagcccatggctccttcctgtacccgttgctggcaggtcccgtgccccggggcagctcctgccaccagtcctctcctctgccctccctc

SEQ ID NO: 852309 - DNA, 120 bp, Artificial Sequence
  ENSG00000268532_9 (sequence is synthesized)
gcatctactccttacgtgcatctgtcaaggggcgctgagcaggtgtgtctgtgcttcactcaggtctcgttagtggttgtcagtaagctctgaattcttccatagaacccttaaatcctt

SEQ ID NO: 852310 - DNA, 120 bp, Artificial Sequence
  ENSG00000268532_10 (sequence is synthesized)
cctcaatccccacagcccacgagcaagcctcctaaatccaatcaattaacacagcccagaaagtggatccatttgcaggaaagctataagcttgcacctaatcgtccttccctaggggac

SEQ ID NO: 852311 - DNA, 120 bp, Artificial Sequence
  ENSG00000268532_11 (sequence is synthesized)
cggttagagcaactgtaggacggcaggaaggagccctctatggacctgaaaacatcaaggagaacggtacatgttgattggaaatatgtccgtgacatatattgctaagtttaaaaaact

SEQ ID NO: 852312 - DNA, 120 bp, Artificial Sequence
  ENSG00000268532_12 (sequence is synthesized)
taggctccaaagcagcagatgagtatgattgcagtagcttttgaaacggtcgtgttgggtgagtgtttatacagagatgtctggggcaggagagagaggcctgggggccaccaaatattc

SEQ ID NO: 852313 - DNA, 120 bp, Artificial Sequence
  ENSG00000268532_13 (sequence is synthesized)
ccagcagttgctgacagtgagacaccaggagggttcaattttaaaaactgtcttctttatttaaaaaacattttttttcagtggttgaatttttgacatgggtatgcattgtcttcataa

SEQ ID NO: 852314 - DNA, 120 bp, Artificial Sequence
  ENSG00000268532_14 (sequence is synthesized)
aggaaaaaaaaaaaaaaaaaagaaaaccagctaggtgatttataagcttccatggagcatttttggtaaatgagaagtgctgggttttccaggtaaatggaatatgcaaaccatgggtgc

SEQ ID NO: 852315 - DNA, 120 bp, Artificial Sequence
  ENSG00000268532_15 (sequence is synthesized)
atgggtgccggggctgggaggaagtgacaagaggggacactgcttagttgcgtagggtttccttttggggtgatgaaatgttagggaactagagagggctgatgcgcgttgtgattgcac

SEQ ID NO: 852316 - DNA, 120 bp, Artificial Sequence
  ENSG00000268532_16 (sequence is synthesized)
cgaacgttctgcatttactaaatgcccccgaattggacacttggagacggttaatttcctgttatgtgaattttacctcaataaaaagtgccagattctctagtaaaacaagtcacctaa

SEQ ID NO: 852317 - DNA, 120 bp, Artificial Sequence
  ENSG00000268530_0 (sequence is synthesized)
atgacagtggctgccctcggtccagaacacggggtgggaacacgtcctcctcactgtcactggctccctctgcagttggctcccagcctgcggggcacttaggtagatggtagcatgggc

SEQ ID NO: 852318 - DNA, 120 bp, Artificial Sequence
  ENSG00000268530_1 (sequence is synthesized)
agggggccaggtcggaggacccatgctcgagaaacacattcgcagacacatccgctagggctcccagttctttaatctgggggacaggtctccccctaaaacactcactctcccacaatg

SEQ ID NO: 852319 - DNA, 120 bp, Artificial Sequence
  ENSG00000268530_2 (sequence is synthesized)
ggaagaaccctggtgtccagagctacctcctcctccccaggtccccaagctaggccagggaagtgactctggctgttagccacagcccacgcctacccttgccctgtgattcagacaccc

SEQ ID NO: 852320 - DNA, 120 bp, Artificial Sequence
  ENSG00000268530_3 (sequence is synthesized)
gagttcagagccagcctccaagagtatcttacatcccagcgtctcctggaaggccgtatgatccagcactggggagaggagggaaatccccaggactcgaatgcccatcccacccttggt

SEQ ID NO: 852321 - DNA, 120 bp, Artificial Sequence
  ENSG00000268530_4 (sequence is synthesized)
agtgacacagtcaggccagaaatgttgcttctgaagtcctgagtccacctcctagcactgccaagcagtccacctggaggtgatgagaacttccaggctttggtaatggacaactctgta

SEQ ID NO: 852322 - DNA, 120 bp, Artificial Sequence
  ENSG00000268530_5 (sequence is synthesized)
tccctggagccttcattccttttggcattacagaaccacaagaagtcatctagaatcattgagattctcaactccattgggcaaactggaaccagcaaaatctcagatatctagaattgc

SEQ ID NO: 852323 - DNA, 120 bp, Artificial Sequence
  ENSG00000268530_6 (sequence is synthesized)
cactgcttccttgactctgtgatcagtctacagccacagaatcctgattccctttggacattctagaatggcactttaaaaaaaaacaacccacccagtggatcctttcaaagcactgct

SEQ ID NO: 852324 - DNA, 120 bp, Artificial Sequence
  ENSG00000268530_7 (sequence is synthesized)
tattctcttggctgggtgctctacagccagaagttggagttatctaatatcaagaactcttaatctgtcacttcagtctttctaaacccacagactaacaatgttttgtgcattctagaa

SEQ ID NO: 852325 - DNA, 120 bp, Artificial Sequence
  ENSG00000268530_8 (sequence is synthesized)
acattactctttagtttctggagtagttcaactctccacgtaaaatctgtcctagactcaccagtgcttgcctctgtggtcaacctagactcacagaatctcaactaatgagctttctgg

SEQ ID NO: 852326 - DNA, 120 bp, Artificial Sequence
  ENSG00000268530_9 (sequence is synthesized)
gctaggaaggcccgcggggaatccggggcggtcccgccagtcgggcctggatccgcgttggcccgcgggctcgggtgagcccgctcaaacgccccgggagccaccgccgcctcctcagcg

SEQ ID NO: 852327 - DNA, 120 bp, Artificial Sequence
  ENSG00000268530_10 (sequence is synthesized)
agcgccagtcctcagcgctgaaaagactcttcccttcgtcgcccaaccgccccttcagtagggaccgcccctctttttgacactgtccaatccacagtgggcgctttcgtcctccccgcc

SEQ ID NO: 852328 - DNA, 120 bp, Artificial Sequence
  ENSG00000268530_11 (sequence is synthesized)
ctcgccaccaaaggatcgttctccagggccaacagtcgtacaaaaagccggtgtaggtatgtccggccagaggtagacggcccgcggggccaatcggagtgcaggcagggcagcaggccc

SEQ ID NO: 852329 - DNA, 120 bp, Artificial Sequence
  ENSG00000268530_12 (sequence is synthesized)
cgcctccgaaacaacagaaagcacttgacaggcttgctctccaatgagaagccccggaaaagtgtcgcgcggaggcggagccacgcggtacagccacctctgcgcctgctcaaaggccct

SEQ ID NO: 852330 - DNA, 120 bp, Artificial Sequence
  ENSG00000268530_13 (sequence is synthesized)
gggccccgccggaagcccgtccagcgcccaacaaaagcggcgcgacaagtctacgactgagccgaacgcttctgggcgccgcgcgccagggggaaacgttcgcggcggaacgttcaggag

SEQ ID NO: 852331 - DNA, 120 bp, Artificial Sequence
  ENSG00000268530_14 (sequence is synthesized)
aaaacgctccagcaactcccagccgaccccgcccctccccgacctaccatagacgccgtcctccatggcggctaggaaggcccgcggggaatccggggcggtcccgccagtcgggcctgg

SEQ ID NO: 852332 - DNA, 120 bp, Artificial Sequence
  ENSG00000268531_0 (sequence is synthesized)
acagtgggacccgcgacctgccgtggtctcaggcactggaggacacctgcaacgccgtgcgctagactatgctactgaaggacctctaccgcggctcagccctggactaaggcaccggag

SEQ ID NO: 852333 - DNA, 120 bp, Artificial Sequence
  ENSG00000268531_1 (sequence is synthesized)
gatccccgccctgccccgccccgcggtgtcctggactgtgcactgcagaacccccacccttccacaccctggactctggctcccgaggaccttggccccggctcgccctgaactactcct

SEQ ID NO: 852334 - DNA, 120 bp, Artificial Sequence
  ENSG00000268531_2 (sequence is synthesized)
gcccctcagcgccctggactgtggttccagaggacctggtcctggggcaacttgtgctaccgcgtggactccaggaccccagtccttccacgccctagaccaaggcacgggagaacctct

SEQ ID NO: 852335 - DNA, 120 bp, Artificial Sequence
  ENSG00000268531_3 (sequence is synthesized)
gactcgccgcccccgacctagggcaccagaggacccacaccttgccgtgccccggactacagcacggaaggacccccgatccgccgggcactgggctcctgcacagagggacccccgcca

SEQ ID NO: 852336 - DNA, 120 bp, Artificial Sequence
  ENSG00000268531_4 (sequence is synthesized)
tggaggtctggactacccctgccccaccgcaccctggactactgcacgccaagaccctcgcctgaacacgccctacactctggcatgggggaacccggccccgcagagccctggactctg

SEQ ID NO: 852337 - DNA, 120 bp, Artificial Sequence
  ENSG00000268531_5 (sequence is synthesized)
gcattggaggactcctcggctaggttctggactcctgcaccagaggactcctgccctgccacaccctggacacctgcactagagaaccctgccccgtcgccccctagactatggcacggg

SEQ ID NO: 852338 - DNA, 89 bp, Artificial Sequence
  ENSG00000268531_6 (sequence is synthesized)
agagaaccctgccccgtcgccccctagactatggcacgggaggacccctgccaccgacttcggcacggtaagacccctgacccgccttg

SEQ ID NO: 852339 - DNA, 120 bp, Artificial Sequence
  ENSG00000268531_7 (sequence is synthesized)
cactacagcacagcaggaccgccgtcccaccgcgcactggactgaggcacagcagcacccgggcctcgtggttggtggactgcaggacgaggtgaccccccgccccgctgcgcgttggac

SEQ ID NO: 852340 - DNA, 120 bp, Artificial Sequence
  ENSG00000268531_8 (sequence is synthesized)
tatggcacaggaggaccaccattcccgcatgccctggaccactgcaggacaggtcccccactccgcagcggcctggaatatggcactgcaggacccccgccctgctgctccacggactcc

SEQ ID NO: 852341 - DNA, 120 bp, Artificial Sequence
  ENSG00000268531_9 (sequence is synthesized)
actgaagaccctcgcccccctgcaccctggacaaaggcacgggaggacccggcttcaccgcccagtgggctatcacataggaaaacccccagcccacccccatcgcgccagagactctga

SEQ ID NO: 852342 - DNA, 120 bp, Artificial Sequence
  ENSG00000268531_10 (sequence is synthesized)
caagagagaacccctgccccctgctccccggactacagcaaggcaggaaccaccctcctccaggatcctcactatggcaactgtggaaccccgccctggtacgccctggactaagtcacc

SEQ ID NO: 852343 - DNA, 120 bp, Artificial Sequence
  ENSG00000268531_11 (sequence is synthesized)
gaaggaccccgaccccaccacaccgtgaactccagcactggaggaccattgccttactgcggactcaagcactggactatcgcagggctggatccctgtcccgccatgccctacactatg

SEQ ID NO: 852344 - DNA, 120 bp, Artificial Sequence
  ENSG00000268531_12 (sequence is synthesized)
gcacgggaggacccagcctcactgagctctggactccagcaccggaggacacctacacggaggactcctgctccgccacgtcctggactcctgcacaagagaacccccgccccgcggcac

SEQ ID NO: 852345 - DNA, 120 bp, Artificial Sequence
  ENSG00000268531_13 (sequence is synthesized)
cctggatatagcaaggcaggaatcccgccctgcagtgttctggactgcggcacctgagaatccatgccccatcgcgccctggactgctgctccacaggactcctgttccactgcaccctg

SEQ ID NO: 852346 - DNA, 120 bp, Artificial Sequence
  ENSG00000268531_14 (sequence is synthesized)
gactatggcaccagaggacccagcccctcgcatcctggactatggcaccagaggacccagccccctggcgtcttggactaaggcacagtaggaccccgcagcatcgtgtactcctgcaca

SEQ ID NO: 852347 - DNA, 120 bp, Artificial Sequence
  ENSG00000268531_15 (sequence is synthesized)
ggaggaccctcgcagggctgcgtcctggactgagctactgaaggagcctcacccctgcctcaccctggtctaaggcactggagaactcttgctccacagagctgcggactcttgcacgag

SEQ ID NO: 852348 - DNA, 120 bp, Artificial Sequence
  ENSG00000268531_16 (sequence is synthesized)
agaacctgcgcccagccgtgccctggactgtggcacagtagggcccacaccgggccatggactcctgtactggaggaagagtggtgataaatgtccaggtttacaagttgaaaagtagca

SEQ ID NO: 852349 - DNA, 120 bp, Artificial Sequence
  ENSG00000268531_17 (sequence is synthesized)
gtcaatgtgctacaatggatggatttgatgtaaaattacaaatgctgaaaacattatgtgtaattgcctagccagatcaattacacaagacaaagaaataaaagaaatccatatagggaa

SEQ ID NO: 852350 - DNA, 120 bp, Artificial Sequence
  ENSG00000268536_0 (sequence is synthesized)
tgggagaacgccccgccggtttccaaggatgcaactatgaagagacacagtgggggctacgattgggtcgtgactgtggcccacgccaggcgagcgtccccgccccagcccctctgccat

SEQ ID NO: 852351 - DNA, 120 bp, Artificial Sequence
  ENSG00000268536_1 (sequence is synthesized)
cccatgccatgcgcaggcacatctcgggcggccagccaggcacacgctgcggggtgtcattagctgcagtgccgcctaaacgcggcggcccgtgcagaaccacggccaggccacctgcac

SEQ ID NO: 852352 - DNA, 120 bp, Artificial Sequence
  ENSG00000268536_2 (sequence is synthesized)
gggccagggaggtgatggggacagcgagagacatgccaaaccccactggggggttgggaggggaggcgctttcatcctaaggtgacttccgtttttttttctaataaaaaaatattttaa

SEQ ID NO: 852353 - DNA, 120 bp, Artificial Sequence
  ENSG00000244184_0 (sequence is synthesized)
tggactcgcgggctcaagctgggaaggagcatgcgcggagagagcagcctgggcgccgaggcagcggggtgctcggttcccggagtgatggcggatgaggctgcctgtgagcgtgtccga

SEQ ID NO: 852354 - DNA, 120 bp, Artificial Sequence
  ENSG00000244184_1 (sequence is synthesized)
agggaaagagaaggaatcaataactctctaggtaacttgaaatcacagacatttttaactacatttgcaacttcagaaatgatacaagacgtgcgccttgcaaaagccaattcaaacagt

SEQ ID NO: 852355 - DNA, 120 bp, Artificial Sequence
  ENSG00000244184_2 (sequence is synthesized)
acagaaaggcataaagtaaaaagaaaaactgctcctcccccgcaaagccctgccccagtagcgtgtatactttcctaatattagtctatgcacaagcacataaatgaatattttacaaga

SEQ ID NO: 852356 - DNA, 120 bp, Artificial Sequence
  ENSG00000204049_0 (sequence is synthesized)
aatctcaagcagaagagcaagagaagcaaaactcggttccctgtgaactcaagaggctttgcccagaagggatgcaaccagttatttcagcattaaatatccagacacagacagtacaga

SEQ ID NO: 852357 - DNA, 120 bp, Artificial Sequence
  ENSG00000204049_1 (sequence is synthesized)
cccatcctgctccaagaaacacatcagagcactgcactctgcctgcctgtgatgcccaggaagagcacagagatactgttgacggctccatcgcaaggactgagtcagcttcaggggaaa

SEQ ID NO: 852358 - DNA, 120 bp, Artificial Sequence
  ENSG00000204049_2 (sequence is synthesized)
tttggagacagacacacatggacggagaacatcatgtgaacacaaaggcagagatcagtgtgatgtcggcaaaccaaggagcaccaaggattaccagcaagccaccagaagcgaggagag

SEQ ID NO: 852359 - DNA, 120 bp, Artificial Sequence
  ENSG00000204049_3 (sequence is synthesized)
aggcccgggacagatctctccctagcgccttcagcctgcgtggcctcactgacactttgatcttgggcttctgtcctccagaactgtgagacaatcaatttctgctgtgtaagccacctg

SEQ ID NO: 852360 - DNA, 120 bp, Artificial Sequence
  ENSG00000204049_4 (sequence is synthesized)
gtctgcggcactttgttatagcagccctagaaaactaagatggaactcgccggctggtcactgtcttccctcttatcacactaccttcccttactgcagctacttatttaactgtttccc

SEQ ID NO: 852361 - DNA, 120 bp, Artificial Sequence
  ENSG00000204049_5 (sequence is synthesized)
accaaaagaccctaacatccaggagtgtggggcccacatctgcctaattcgccactacggcccaagcccacctctggcacactggaggtgttcaagatgtgagctgacatatgaaagagc

SEQ ID NO: 852362 - DNA, 120 bp, Artificial Sequence
  ENSG00000204049_6 (sequence is synthesized)
tgtcctgactagttctagaatctcaggcatgtgactccccctcccagaatgtcaatttccccatctctctgcagagggaaaagaaaataattggagtagatgacctctgtgagtccttcg

SEQ ID NO: 852363 - DNA, 120 bp, Artificial Sequence
  ENSG00000204049_7 (sequence is synthesized)
ggctcaaaagatggccgggactcaccactgaaggtgtctgcatccatcatggtcagatcaggccatgagaaaccccactagaggtgctaaacagagggaatgggtcacagaggtgtggga

SEQ ID NO: 852364 - DNA, 120 bp, Artificial Sequence
  ENSG00000204049_8 (sequence is synthesized)
cctgagaaaccactgcggccttcctgctggacttcagagaagggctggcctcattttatgggctttctgaaacccatattcagagaaacacacccaattcagcatggactggcaatgcct

SEQ ID NO: 852365 - DNA, 120 bp, Artificial Sequence
  ENSG00000204049_9 (sequence is synthesized)
atccccaaggaaactccaaaaggggtgagtctcctgggcagtggtcactgagttactacaaggcctttggggttggggtggggatggtgggtcaacaggctcccctagaagccctgtgcc

SEQ ID NO: 852366 - DNA, 120 bp, Artificial Sequence
  ENSG00000204049_10 (sequence is synthesized)
ctgacaaagtaaacaatggcaaaacatgtgcttcccagcactcacctccccacctccttctaacatcagaactgggtttctgatgatgggagaaaatgtaaatgaaatcaacggaaggat

SEQ ID NO: 852367 - DNA, 120 bp, Artificial Sequence
  ENSG00000204049_11 (sequence is synthesized)
gatcctgtgagtaatctgacaagggagaaccagcttcctctcccatgaaccccagctgccttggctttcacccagacccctggcccacccggtgtcctccccagacagtggtactcaccc

SEQ ID NO: 852368 - DNA, 120 bp, Artificial Sequence
  ENSG00000204049_12 (sequence is synthesized)
acactgctgagggagctgctgctttctgagtctgagggcatggtggacaggacgctgtaggtagaacctggggaaagaggggagaccatgttactaaccccaaggggtcactcgtcttca

SEQ ID NO: 852369 - DNA, 120 bp, Artificial Sequence
  ENSG00000204049_13 (sequence is synthesized)
ccccaagccagctgatcatcagtcaatgccaggccatgagagctacatgcaccaggcactagaaatccacatccacgggccaagcagaggaggcgcgctcagcagatctggacttcggtg

SEQ ID NO: 852370 - DNA, 120 bp, Artificial Sequence
  ENSG00000204049_14 (sequence is synthesized)
tttctgccaggcctcccacctcactttatcggcccctcctgctctgggcaggcgggcagaggggaacttggagtcagtcagctggcttcttgttgggacatctggggaaaggcttagcaa

SEQ ID NO: 852371 - DNA, 120 bp, Artificial Sequence
  ENSG00000204049_15 (sequence is synthesized)
gggagtgacatgccccaggtaaacatggggtgtgggggtttcctccacatctctagcaatatgattctggcttccatgcagagggtaacagagcagaaattaaagaacaactgaactatc

SEQ ID NO: 852372 - DNA, 120 bp, Artificial Sequence
  ENSG00000204044_0 (sequence is synthesized)
gatcgcacaagtggctgcaaccaggctctaggagggagaaagagcggatcccccaaccccctccgcccgcccgccccccgcgagacgcggcgccgcgcagggtcctagtgcccgctgtgc

SEQ ID NO: 852373 - DNA, 120 bp, Artificial Sequence
  ENSG00000204044_1 (sequence is synthesized)
gaagggttcctgaatctggccacttcgctgggaggccctgggctccccagtgccacccgaagggcctgaggaggccatctgcaggatcattctggctgctgggcgaaggttcaactaaag

SEQ ID NO: 852374 - DNA, 120 bp, Artificial Sequence
  ENSG00000204044_2 (sequence is synthesized)
tagaagctggaaatctaattaggaggctcctgcagaccccaagctggggggtgatgacagccagactagagtggtggcagttgtctgattccagttaggttttgaaagtgaaaccatcag

SEQ ID NO: 852375 - DNA, 120 bp, Artificial Sequence
  ENSG00000204044_3 (sequence is synthesized)
gacccactgatggatcggatgtgacacgtgaccataagagtgaagtcaaggagaaatcctggcaattcacacactgctggtgggagtgtagttaggcaaaaactactttgggaaactatt

SEQ ID NO: 852376 - DNA, 120 bp, Artificial Sequence
  ENSG00000204044_4 (sequence is synthesized)
acactttgcgttccgcggccccggccccttggtttcctagtcctggctccattcccctctcaggcctagggctgggacccctccccgcccccggtcttggccctgcccccttcaacagac

SEQ ID NO: 852377 - DNA, 120 bp, Artificial Sequence
  ENSG00000204044_5 (sequence is synthesized)
caacagacggtccgccccggcccctccccctcgtcccgcccggccctggcaggccccgccccctgcggcctctacctttgacgtcttcccccgggaggtggcgggggtctgcgaccgaat

SEQ ID NO: 852378 - DNA, 88 bp, Artificial Sequence
  ENSG00000204044_6 (sequence is synthesized)
gtgcctggcacattatcggcacttgatgactgttgtctaataactgagcttccatacaaaccacctgccgtcctgtactgaaggagaa

SEQ ID NO: 852379 - DNA, 120 bp, Artificial Sequence
  ENSG00000204044_7 (sequence is synthesized)
cttccatacaaaccacctgccgtcctgtactgaaggagaaagagcttccagccggggaggcaggaaatctgggtcctggtcttggttgcatccctgacttcctaaatgacctggagaagg

SEQ ID NO: 852380 - DNA, 120 bp, Artificial Sequence
  ENSG00000204044_8 (sequence is synthesized)
cctctgcctctgctgggatcttgtctgtgctggggcatttgtttccatttccaagggctttttcttcctcgctcagaatttgaccactcactaagaggagcttagtgtggtgtctcacga

SEQ ID NO: 852381 - DNA, 120 bp, Artificial Sequence
  ENSG00000204044_9 (sequence is synthesized)
cgtcgtgcgtgtccaaaggcaccccggggaacatccggtccacctcgctggcgctccggggatccaccatctgcgccttcacgtcgaacctgcgggcaggcgcggaggagacaggtgctg

SEQ ID NO: 852382 - DNA, 120 bp, Artificial Sequence
  ENSG00000204044_10 (sequence is synthesized)
gctgagccggctagcggacggaccgacggcgcccgggctccccctgccggcggccgcggcggcgctcacctccagaggcgccgcccgctgaacagcagcatcttccccctgccactccgg

SEQ ID NO: 852383 - DNA, 120 bp, Artificial Sequence
  ENSG00000204044_11 (sequence is synthesized)
ccccggtcacctgggccacgtcggctcccaggcccagcttgtccagacgcctcgggcccagcaccgacgcgcctgtgtacacccacacctggcgccctgcaggggaggagggtcacgtcg

SEQ ID NO: 852384 - DNA, 120 bp, Artificial Sequence
  ENSG00000204044_12 (sequence is synthesized)
gtttgggggcgcagagggagcacgtactcctagaacgcgaggagggagattccggcgaggcctttcctagcccgcgtgcccgcagtccctgcaacccaggggcagaggcgctgggtagag

SEQ ID NO: 852385 - DNA, 120 bp, Artificial Sequence
  ENSG00000204044_13 (sequence is synthesized)
cgacgcgagggcgtggagaggagggggcagaaactcagccgcccctacgtttgctaaactgcgtccgccagggggcgtatttttctaaaacgcacaagacgtttcgtgggttatcgatgg

SEQ ID NO: 852386 - DNA, 120 bp, Artificial Sequence
  ENSG00000204044_14 (sequence is synthesized)
tctcttgagcctccttgactgatggggattgaccgggcgggggagggaaagtaggtaactaaccagagaagaagaaaagcttcttggagagccgctcctcaaagaccgagtccagcttgc

SEQ ID NO: 852387 - DNA, 120 bp, Artificial Sequence
  ENSG00000204044_15 (sequence is synthesized)
ggggcagcgcgggccacttgtcggcgataaggaaggggccctgcggccggctccccctgccctcagagaatcgccagtacttcctgagaaagcgaggagggaaaggacgggctctaagcc

SEQ ID NO: 852388 - DNA, 120 bp, Artificial Sequence
  ENSG00000204044_16 (sequence is synthesized)
ttggacacagggccagtgggcgggaagggacgggcagcccctccgcaaagccccctcccgcatccacacaaccccgcctcctcacccatccttgaacaaatacagctggttcccaatctc

SEQ ID NO: 852389 - DNA, 120 bp, Artificial Sequence
  ENSG00000259255_0 (sequence is synthesized)
attaaccactcaaacttcaggcactaagcaaagttcactaaatgggaagttttccccaggaagaacctcattataattttttgtgttggtgcttcaaggaaaagactgctatgtgataaa

SEQ ID NO: 852390 - DNA, 120 bp, Artificial Sequence
  ENSG00000259255_1 (sequence is synthesized)
atgattttgatatcatagaagttcattaaaataaggattctatctgtaatgagatgggggtgcatgacccatggaagtgctggaagcaggtgctgaagaatacatgatggcaaagaggga

SEQ ID NO: 852391 - DNA, 120 bp, Artificial Sequence
  ENSG00000259255_2 (sequence is synthesized)
tgggagaacgcaaccatcagtaagaatgagaaaaaggcaaaagcaagaagcattctccctaagaactgtgacaagacaaggatttccactctcacaactcctattcaacatagttctaga

SEQ ID NO: 852392 - DNA, 120 bp, Artificial Sequence
  ENSG00000259255_3 (sequence is synthesized)
agtcctagccagagcaatcaggcaacagaaagaagagtcatccaaacaggaaaagcagaagtcaaattatctctcttcactgatgatatgattatctagaaaaatctaaaaccccaccaa

SEQ ID NO: 852393 - DNA, 72 bp, Artificial Sequence
  ENSG00000247982_0 (sequence is synthesized)
tggagatgatactccctaaatcacaagggtgtggtgtgaagatgaaatggctgcacgtgacagaggagttgg

SEQ ID NO: 852394 - DNA, 120 bp, Artificial Sequence
  ENSG00000247982_1 (sequence is synthesized)
gtgacagaggagttggagaacaggaagcaagtggattacttggatgaactgtgatgggcccaagaagaactaagccaatcactccagggggcgttttcccaggatccaggcagagagctg

SEQ ID NO: 852395 - DNA, 120 bp, Artificial Sequence
  ENSG00000247982_2 (sequence is synthesized)
attccagcatccacgttgtatccccctcccgctgtggccggggtctccaagagccgggcacccactgcagagcttccaagcccaggcccatttgaacacaggaggacttttgaggttcat

SEQ ID NO: 852396 - DNA, 120 bp, Artificial Sequence
  ENSG00000247982_3 (sequence is synthesized)
ttaaccccaaaatcagtgattctacatctcaagctcatattttgaagtgtttacggtctcgagctccagttccctgccaggaagagctgaagctgagctctggcaccccctgcttcttct

SEQ ID NO: 852397 - DNA, 120 bp, Artificial Sequence
  ENSG00000247982_4 (sequence is synthesized)
acttatcgctgctgatgttaaccttgatctcttggttcaggtggtgcctgccagctgtctccactgtggagttactatttttccttttccccattttattcatcagaagccagtcactaa

SEQ ID NO: 852398 - DNA, 120 bp, Artificial Sequence
  ENSG00000247982_5 (sequence is synthesized)
gcgaggtcaaactccaggacaggggaattaagtgccaccttctggagagggagcattcacatttattacttgggatccttctgtaaggaagagctgtttctcctctaaaaaactctttaa

SEQ ID NO: 852399 - DNA, 120 bp, Artificial Sequence
  ENSG00000247982_6 (sequence is synthesized)
tccttttaagcctcaatttcttaattgtgaaatggggctaatacctgtatccaaccaagggagtagttagaaggtaacatgataggtggaaagcacttaacataggcaaaatgttattat

SEQ ID NO: 852400 - DNA, 120 bp, Artificial Sequence
  ENSG00000247982_7 (sequence is synthesized)
caggaatgatcgagagacccatccaactatctgaaggagtcacttaactctactgtactgcagcgctgtaaagtctgcatctttcactgggggtaaaggcccccagtccctgagacgggc

SEQ ID NO: 852401 - DNA, 120 bp, Artificial Sequence
  ENSG00000247982_8 (sequence is synthesized)
cagtttggagacaggctggttttttctctgttctcctgagagcccttcagatgagaagggaggtctggagacagaatgccaaaagcccattaaaggcacggccttgcatttcagagaggg

SEQ ID NO: 852402 - DNA, 120 bp, Artificial Sequence
  ENSG00000247982_9 (sequence is synthesized)
agcaggtctagagaagaaccagaggagctcagctgagatatggtgtatggattggattttggtagaagatgggaagaaccaaacacctgagaaaccactttgaagatcggggtcagagta

SEQ ID NO: 852403 - DNA, 120 bp, Artificial Sequence
  ENSG00000247982_10 (sequence is synthesized)
aggcctaacacatagttggctcccagtaattattggttgattgaacagctcaaagagcaactcgaccaagaacactggactgggagtccagttacttggatcttgcattcctgatttatt

SEQ ID NO: 852404 - DNA, 90 bp, Artificial Sequence
  ENSG00000247982_11 (sequence is synthesized)
tgggagtccagttacttggatcttgcattcctgatttatttttattttatatgtattttttctatttttttgagacgactacaatggcac

SEQ ID NO: 852405 - DNA, 77 bp, Artificial Sequence
  ENSG00000247982_12 (sequence is synthesized)
gtagagacggggttttgccatgttggccatgctggtgtccacctcctgacctcagttgatcttcctgcctcagcctt

SEQ ID NO: 852406 - DNA, 120 bp, Artificial Sequence
  ENSG00000247982_13 (sequence is synthesized)
tgtttttgtcaacttgctgtgtgaccttaagcaagttacttaacttctctgggcttcactttccatggatgaacattgtaaagaggctggagagagatgaggactaggtacaggctttag

SEQ ID NO: 852407 - DNA, 120 bp, Artificial Sequence
  ENSG00000247982_14 (sequence is synthesized)
aggagagccaccgccccggacttctccctctgtcaccccgctttccatgaccctccttgcctgactttgtgactccttgcctcgctatcaaaacaagtgctgcaatctcagtgctttcca

SEQ ID NO: 852408 - DNA, 120 bp, Artificial Sequence
  ENSG00000247982_15 (sequence is synthesized)
agagccctgcattgttagaaacttcccagcacgcagcaaaggctgctgcaatactcgctctgcctgcctttgccctgcgcttcctacttaccctccttttgtttctcccaaacatctgtc

SEQ ID NO: 852409 - DNA, 120 bp, Artificial Sequence
  ENSG00000247982_16 (sequence is synthesized)
cctgactatgctcatctcatgtttgtcctcagctgctgaaagggccacgtttgttttcattacaaataagaccaccgagtgggctcctggcgtgggggcgggaccagccgcgcgcagtct

SEQ ID NO: 852410 - DNA, 120 bp, Artificial Sequence
  ENSG00000247982_17 (sequence is synthesized)
tcagaggcagccccccaggctgtctctggagggtgtgtctctgcttccctttccccgtgtttattttcagacgaagccaagtggcccggggggaccctccggactcccagccttcagaga

SEQ ID NO: 852411 - DNA, 120 bp, Artificial Sequence
  ENSG00000247982_18 (sequence is synthesized)
ggagggcagctcgggctttcgccgcagtgcttcctgcccgtcacgtgtgtgctcctagccggggtcgggggagctggtatcttggcccttctgggaggacgcgcacagcccgaggaggaa

SEQ ID NO: 852412 - DNA, 120 bp, Artificial Sequence
  ENSG00000247982_19 (sequence is synthesized)
gagccaaggaccccaaggagaagagaaaggagttcatgaaggcagaaatgcctggggcccacgaacatcccagtgtggccctggacgggacatcatgctgggcaacacagctaaaatgcg

SEQ ID NO: 852413 - DNA, 120 bp, Artificial Sequence
  ENSG00000247982_20 (sequence is synthesized)
ggtgaagaccagatttcttgcacatggcggtgacgggatgctccctagagagcttcaagtggattctttgctttttattttctctcttaataaaaatgtatgatgtttacattgtcagag

SEQ ID NO: 852414 - DNA, 120 bp, Artificial Sequence
  ENSG00000247982_21 (sequence is synthesized)
ttaatatttgatttatttttccaactggacttcttcccggggctctttctgggcccagctgcctttgtgatcccgcgccccggtcctcggcctctcacctccagcgccggggcgccccct

SEQ ID NO: 852415 - DNA, 120 bp, Artificial Sequence
  ENSG00000247982_22 (sequence is synthesized)
gctgtcggaagcggctgtgaccgggcagaggtgctatctgggactctgggttctcagcccggggacagcgaaccgaggggcagatgatccatcagaaaagagccggcactgcccagcccc

SEQ ID NO: 852416 - DNA, 120 bp, Artificial Sequence
  ENSG00000247982_23 (sequence is synthesized)
caaggaccccaaggagaaggtcaggagcggcggtgtggatgtcccttggctgcaggccccgccgcgcactcccttcagtccttcccttctctagggaccaggtagcatcagtgcctggat

SEQ ID NO: 852417 - DNA, 120 bp, Artificial Sequence
  ENSG00000247982_24 (sequence is synthesized)
ctcggccttgtgtgccctgctccctgccccacctactaagaaccaagtctggttcaccggctcccaagagctggaacccattctcagctagctgggggcccaggccaccccttccctcca

SEQ ID NO: 852418 - DNA, 120 bp, Artificial Sequence
  ENSG00000247982_25 (sequence is synthesized)
gacctgtgtgccttctgccctggctccagggccccccacaccgtgaccagggcgggatccctatggggctggccaggcggcaccgtgccaggcccacagtgccctgggcgtccatggaag

SEQ ID NO: 852419 - DNA, 120 bp, Artificial Sequence
  ENSG00000247982_26 (sequence is synthesized)
tcgttctgtgtctttaaaatcagaaggaagacattaacctttaggctgaagaaaatgttttagtacacagcaataacttatttgtctttatccaacagccataaaatataactttaaata

SEQ ID NO: 852420 - DNA, 120 bp, Artificial Sequence
  ENSG00000228412_0 (sequence is synthesized)
ctgacaacgcagacgccagcccgcacaatgacttccagctggagcagcccagccagcctgcgcgctcactcgcttgcttgcgctgggcttcagggcgcccgggtttttctgtggacctaa

SEQ ID NO: 852421 - DNA, 120 bp, Artificial Sequence
  ENSG00000228412_1 (sequence is synthesized)
attttcatttctctgggataaatgtccaggagtgtgattgctgggtcatatggtgtcacatgccattcttctgattttcatgaatatcctctaaaaggcagctaagcactcgctgtcttc

SEQ ID NO: 852422 - DNA, 120 bp, Artificial Sequence
  ENSG00000228412_2 (sequence is synthesized)
ttccttttgcctcatcaagcacgggggacgctggaaggaagaggacactcagtgatacagaattgaaaaagagaaagaccagatttcccatggagatggagaaattggaagcccagatga

SEQ ID NO: 852423 - DNA, 120 bp, Artificial Sequence
  ENSG00000228412_3 (sequence is synthesized)
ggaaccatctcatataagcaagcttatgtgttttgatttcgtgttcagatattcttatcaatgatttccagaaagtgacattgatttgctttggaaacaatgatggaaaaacagtgagtg

SEQ ID NO: 852424 - DNA, 120 bp, Artificial Sequence
  ENSG00000228412_4 (sequence is synthesized)
tgtaccggaatgcttttagagttctaaaatcatactggaaaatgtccgagcattccaacacagctataaacagtaccatgctgtatttatggggggtggcaagtctgtttttaaaagtct

SEQ ID NO: 852425 - DNA, 120 bp, Artificial Sequence
  ENSG00000228412_5 (sequence is synthesized)
ttgcgatattttttctatgtttttaatttattgaattaaagccagatttattcaattaagataatacacttcaaagttaactgccatttgctgttcatttaggcaagctattgtacagtt

SEQ ID NO: 852426 - DNA, 120 bp, Artificial Sequence
  ENSG00000228412_6 (sequence is synthesized)
atgtaaatttcatgaacagagacactacttgagtgtcttaattacaagcagaaagtgtcatttaaatatgaattaagtgaatagttgcctgtatttcctgtttctgtattttctgtcttc

SEQ ID NO: 852427 - DNA, 120 bp, Artificial Sequence
  ENSG00000228412_7 (sequence is synthesized)
ccatactgtgttagaagatttttctttttcctgtgaaagaaaaacacctccactatgaaatattaaaaaaaaaaaagtcgggaaacatgtaaaaacgccattgttattgcactgattagt

SEQ ID NO: 852428 - DNA, 120 bp, Artificial Sequence
  ENSG00000228412_8 (sequence is synthesized)
actcagagccatttctgaataacagggtaccaggttttttcagttggccactgatagtcattctcatattgttactgagatctaaaaattattccagcttatgctgggggaaataatttg

SEQ ID NO: 852429 - DNA, 120 bp, Artificial Sequence
  ENSG00000228412_9 (sequence is synthesized)
ctacatgtgtcatttgctccaattcattatatatgtgggttcattttttttttaaatcctcttttaaaagtactaatttataacacgtccaaacattgtcttccttactccaatgctggg

SEQ ID NO: 852430 - DNA, 120 bp, Artificial Sequence
  ENSG00000228412_10 (sequence is synthesized)
ctgtgcatatttttatcattcttttatctttgtcaaaagcaacatttattttcaatttagaactgtcacaaccatatttgtgtttagcaaatgtgacccatgacctgatactttgctgat

SEQ ID NO: 852431 - DNA, 120 bp, Artificial Sequence
  ENSG00000228412_11 (sequence is synthesized)
ttctgtgaaacaattccccatgcatcttggacttactgaccaacattgtttttgtttgtttctgtgttttggatgattcttatgtatacataaaaatgacctagagacaaatctggcatt

SEQ ID NO: 852432 - DNA, 120 bp, Artificial Sequence
  ENSG00000228412_12 (sequence is synthesized)
aatcatgaagaaaggcaaggattcacaattagttaatgaaaaccacacctctgttctgtggagtcagttcccagctcctgtctccagcctgggatatagatgcagcctgggaagatattc

SEQ ID NO: 852433 - DNA, 120 bp, Artificial Sequence
  ENSG00000228412_13 (sequence is synthesized)
ccagcaccccccaaggtagatcctgcgtgctcccccaggagtgagaagttcactattcactcagtgcttgcatcatcttttccaacatgttcccactgatacattaaaggaattaattgc

SEQ ID NO: 852434 - DNA, 120 bp, Artificial Sequence
  ENSG00000228412_14 (sequence is synthesized)
ttttttttttttcccaggctctcgcgggtttcccctgccagggaatccactcgctgtagttttctagggctctggtcccagtcctttctgaagcgcgcttgcaggctgtcttcctcagtc

SEQ ID NO: 852435 - DNA, 120 bp, Artificial Sequence
  ENSG00000228412_15 (sequence is synthesized)
gccctctccctgggtgctgttttgctgggcagcatcccatgctaggctcggcagacattctggcggttgggttcggcccttacagcgctaacacctgcagagtcgaggctcctgccaaaa

SEQ ID NO: 852436 - DNA, 120 bp, Artificial Sequence
  ENSG00000228412_16 (sequence is synthesized)
ggcagaaagcaaaggaggaaaaaattcattgtcataatagcgaaaatgataaacctcagctgtttaagagaagaatgtctgagtagctgttgattatctcccataatcacaaaacaactt

SEQ ID NO: 852437 - DNA, 120 bp, Artificial Sequence
  ENSG00000228412_17 (sequence is synthesized)
ttttttaaaaagaatttgcactgtctgttaaaacgcggtcattgttttgctttcaaatcgaacttcacgacagttagcaacttcaagaacgcttccaaatggataaatctttccagaagg

SEQ ID NO: 852438 - DNA, 120 bp, Artificial Sequence
  ENSG00000228412_18 (sequence is synthesized)
tttccttgttaaaaacaagcaccatcttcatacctgctgaaatctaattctcatccagagggatgtgaggaataaagggggcagtgataccaacagcgggcgtagacagcccatccatcc

SEQ ID NO: 852439 - DNA, 120 bp, Artificial Sequence
  ENSG00000228412_19 (sequence is synthesized)
cacgcaggtaatgaagctgatgcttagagaggttgagtaatccacccatgtctctctgacccaggtctgaccaccatactattgcctgcagatgaagaggagcaacatattgtatcctgt

SEQ ID NO: 852440 - DNA, 120 bp, Artificial Sequence
  ENSG00000228412_20 (sequence is synthesized)
gttgctcaagagagcagaattaggacttagaatagccttctaagaattgctctgtgccaccaaatgggtggcagacttctagacaagttttctaaacttgtcagcctcaactacaagtga

SEQ ID NO: 852441 - DNA, 120 bp, Artificial Sequence
  ENSG00000228412_21 (sequence is synthesized)
gctggtgagagaaaacaaacatcactatccaggggcttttgctggacttactgaatgtaacagagatcggattggattgtctctaatgtctgtttcacgaatagagttctgtaaatagtc

SEQ ID NO: 852442 - DNA, 120 bp, Artificial Sequence
  ENSG00000228412_22 (sequence is synthesized)
tcactcgcttgcttgcgctgggcttcagggcgcccggatctacagtccctcttggacagattttcctgtgtgtatatgatatgaggacactcagtgatacagaattgaaaaagagaaaga

SEQ ID NO: 852443 - DNA, 120 bp, Artificial Sequence
  ENSG00000228412_23 (sequence is synthesized)
cttttgcctcatcaagcacgggggacgctggaaggaagaggctccagggacctacctgacttcctattcatgctgatcccactgagacccttatcaaccctgacctgttccccatgtgcc

SEQ ID NO: 852444 - DNA, 120 bp, Artificial Sequence
  ENSG00000228412_24 (sequence is synthesized)
tcttggatctgccttatgttccagatccagcagataagccagtacttaatgccaataattgctccaactggggtggaaaatggatatttatacttcaaatttgtggatatcagttttcca

SEQ ID NO: 852445 - DNA, 120 bp, Artificial Sequence
  ENSG00000228412_25 (sequence is synthesized)
ctgacaggggattttggggaccgattcaccaatgtgtgacagtatccatgcataaagatgtgaactgtcttctccccaaacttttaatctatgtaaatgcaacgctacattccaatgtat

SEQ ID NO: 852446 - DNA, 120 bp, Artificial Sequence
  ENSG00000228412_26 (sequence is synthesized)
ttctaagacagttttgctctatgccaatcagcagatgagccggggctcattttttgtggggtctggctcttacctgtttcctctgaaatcctataagattttattttttcttctcttgga

SEQ ID NO: 852447 - DNA, 120 bp, Artificial Sequence
  ENSG00000228412_27 (sequence is synthesized)
catatcacgtatttccttgatttctacttatcgcagtaactgtcttttcattcacattaaggtaactttatattgtggagtcagacagttctctgtctgctacttaccaactgtcagatc

SEQ ID NO: 852448 - DNA, 120 bp, Artificial Sequence
  ENSG00000228412_28 (sequence is synthesized)
ttgtttgagcaaacgaattatattctttgagcctcagtttctttatctatcaaacggggataattatttccaagctcaaaatgctgttgtaagtatgaattagaataatgaatataaaat

SEQ ID NO: 852449 - DNA, 120 bp, Artificial Sequence
  ENSG00000228412_29 (sequence is synthesized)
atggtacatgctagtcattcataagtttttccttaaaagtagactgtttcgtatttatatttatatctcccacagtgcctcaatcatagtagatgctcaataaatgtgactcaataagca

SEQ ID NO: 852450 - DNA, 120 bp, Artificial Sequence
  ENSG00000228412_30 (sequence is synthesized)
agtatttgtacagttgagccgaaatgcctgttctaacaaagagagcctggtgtattcagctggaactcgtcagcatttcaagggaaagaagtcactcactaattaatgctggaggtggtg

SEQ ID NO: 852451 - DNA, 120 bp, Artificial Sequence
  ENSG00000228412_31 (sequence is synthesized)
ggactgccaagatgaatagacataatcctcgatctaaccacttcacagtttatcatcggagtcaagtttgcagataaacaattgccatgcaactttcaagctcacttctcagctacctag

SEQ ID NO: 852452 - DNA, 120 bp, Artificial Sequence
  ENSG00000228412_32 (sequence is synthesized)
ggcaaaagctgctgccagagttctaacattcatatgtttgcatattgttatgggttgcaatttggagaagaaaagagggctgtgatcttcctttcaaaagaaactccttggaagcaccac

SEQ ID NO: 852453 - DNA, 120 bp, Artificial Sequence
  ENSG00000228412_33 (sequence is synthesized)
atcctcgatctaaccacttcacagtttatcatcggagtcaagtttgcagataaacaattgccatgcaactttcaagagacggggtgtcatcctgttgctcaggctggtctcaaactcctg

SEQ ID NO: 852454 - DNA, 120 bp, Artificial Sequence
  ENSG00000228412_34 (sequence is synthesized)
ctcagcctctcaaagtgctgggattacgggtgtgaacctaatcgcagagttgagaataactcatccagggttgttgaatggtggaggatcttccaaaatcagcagctaggaggtcgagaa

SEQ ID NO: 852455 - DNA, 120 bp, Artificial Sequence
  ENSG00000228412_35 (sequence is synthesized)
agaacccttcatgccatactaagaagtttcatgctaggcaaagaagagtgacaaggtatttcaacaggtgaatgataggtacacaaagaaggattaccacaggaaatccagagaggcttt

SEQ ID NO: 852456 - DNA, 120 bp, Artificial Sequence
  ENSG00000228412_36 (sequence is synthesized)
agaagacgagcttgcgttgagatagaagccggaagcccacttagccaactgcctccatgggacttggcatgaggcaggcttatgacagtaaatgctacactgccctcagtgaaaaagaga

SEQ ID NO: 852457 - DNA, 120 bp, Artificial Sequence
  ENSG00000228412_37 (sequence is synthesized)
atttggcattcattcttctgaacccgccatccctcagccttggcgcctgggaattctgcgaatcgttgcctgtggcagtgacactgatttgtatctgggtatgaacttaaatgaaaacat

SEQ ID NO: 852458 - DNA, 120 bp, Artificial Sequence
  ENSG00000228412_38 (sequence is synthesized)
gaattgaactcattacttgaggaaggaaacactgccaaatttaacaggatgaaattccagcagggtgtaaggttttatggggctacagtggaatatctcatagaaaggtttccagttcat

SEQ ID NO: 852459 - DNA, 120 bp, Artificial Sequence
  ENSG00000228412_39 (sequence is synthesized)
aaaacactttcaaaacatgctcggcccttttaagttgaagggacattatcatttctatctatggcatttctctgcaaattgaactcaaatatcctttgggctgactacacagagaacaga

SEQ ID NO: 852460 - DNA, 120 bp, Artificial Sequence
  ENSG00000228412_40 (sequence is synthesized)
agaaagaagtggaagaaacttggactgaagattgcctccctgaaaaggttttcttcaggcagaattaggtgagaacaaatgacatcagaaagtagcatgtcagtatactgctgccagctc

SEQ ID NO: 852461 - DNA, 120 bp, Artificial Sequence
  ENSG00000228412_41 (sequence is synthesized)
atatattgagtatcagatgtgggatcctgttcaacacatttggggtacagtagtcaattagtctactctcatggcacatacatgctggaaggagagaaaaacaataaataaatgaacaaa

SEQ ID NO: 852462 - DNA, 120 bp, Artificial Sequence
  ENSG00000228412_42 (sequence is synthesized)
agatgcagtatcaggtagtgatcattgctatcaagaaaaataaagcaagagaaaatgggatagaaggtgtcaggggtgcggggtgacattttacatagtgtgtttggcaaaggcaattct

SEQ ID NO: 852463 - DNA, 120 bp, Artificial Sequence
  ENSG00000228412_43 (sequence is synthesized)
caggtggtgacatttgaacagaagcttgaatgaagtgacctacatgttgaatccagaaagctaattttatatatatatatttttggaagggggcaggagataataagctagtaaaagggt

SEQ ID NO: 852464 - DNA, 120 bp, Artificial Sequence
  ENSG00000228412_44 (sequence is synthesized)
tgggaaattattttgattcaaggatgcccagtttaaaaaactgtaagagacagcccctctttttctcccagtatagcgctttcggtggccatttgaatagagctctgcatgtttccttgg

SEQ ID NO: 852465 - DNA, 120 bp, Artificial Sequence
  ENSG00000228412_45 (sequence is synthesized)
gattttctggtgttcatggcataacaaccagccagcagtcttctggctggaccacgttttacttgctagcaaggagcagaagctgtggaaattggcatgtagagatgtaaaaggatttta

SEQ ID NO: 852466 - DNA, 120 bp, Artificial Sequence
  ENSG00000228412_46 (sequence is synthesized)
tacttttcagcctgggcagaaaattatagagaaaagtaggtgggagtcagaaaaacatgaaatgagaaagaaaagcataatctgagtgagttctctctctttttttttttgttttctatg

SEQ ID NO: 852467 - DNA, 120 bp, Artificial Sequence
  ENSG00000228412_47 (sequence is synthesized)
tttatctttccacagctttttcactggctctgttaaaaagcaaatatcactgcaaacttcatttcattttctctcaacagatgaaataaagcttgttaaaatgtttttcccttctgtcag

SEQ ID NO: 852468 - DNA, 120 bp, Artificial Sequence
  ENSG00000228412_48 (sequence is synthesized)
gtgcaaactccatgttagcaggtttgaaaactttcacatgttcagatagcaatggaggttttaacttggccaacatcaacaaacaaaccatgagtccctcacgtgtgcaatgcttgcata

SEQ ID NO: 852469 - DNA, 120 bp, Artificial Sequence
  ENSG00000228412_49 (sequence is synthesized)
gaatgaaattgagtatgagcatgtttgccaaccctactacaaatggtttatttagaatagtagaatgtgaaaaatacagatttatttttaatagctagtaccatgatgattattgatttt

SEQ ID NO: 852470 - DNA, 120 bp, Artificial Sequence
  ENSG00000228412_50 (sequence is synthesized)
ttcttccagattattaatttaaatagcaaaattatgctacatgtttaaaatatgtctgtatcctgaaagtacttattgtaagcttaagcccagtcttatttctaaaaagataatttgtag

SEQ ID NO: 852471 - DNA, 120 bp, Artificial Sequence
  ENSG00000228412_51 (sequence is synthesized)
gaggtataattttcatttgtattcatgtatattaatatattttttggtgttacactgttgcatgaggatagctgtaaggtcaggatatttaggaaacctctgaattgaacattgagcttg

SEQ ID NO: 852472 - DNA, 120 bp, Artificial Sequence
  ENSG00000228412_52 (sequence is synthesized)
tggatctaatatttaagtaactggtttctgtctacgtactcttttctcttccgtggtaagccctgcaggcaagctcacttctctatgttctcagttgtaaatgaggaaagtaggacgagg

SEQ ID NO: 852473 - DNA, 120 bp, Artificial Sequence
  ENSG00000228412_53 (sequence is synthesized)
tatggagctggagggtaaatggcagaatagaagacagagtgccattctgcgtaagagcaccaccttttgtgtttggcaggcttggttttagtcctgatttttccaggtccaagtataatc

SEQ ID NO: 852474 - DNA, 120 bp, Artificial Sequence
  ENSG00000228412_54 (sequence is synthesized)
tggagcatttctcaaattcactaaacctcagtttcaccttctgtaaaacgaagctatttcattgagttattttgggttacatatgtaaaatttacagccaaatacttaacactcaagtct

SEQ ID NO: 852475 - DNA, 120 bp, Artificial Sequence
  ENSG00000228412_55 (sequence is synthesized)
gcttccggtccaggagactttttccaaactttcttcccgggggccatcctctcacctgtcatacacagaaaagtgaattcttgttatcagaaaggggcccaatccagatcccaagagaag

SEQ ID NO: 852476 - DNA, 120 bp, Artificial Sequence
  ENSG00000228412_56 (sequence is synthesized)
gctcttggatctcacacaagaaagtattccagtatttgtacagttgagccgaaatgcctgttctaacaaagagagcctgggtgggactgccaagatgaatagacataatcctcgatctaa

SEQ ID NO: 852477 - DNA, 120 bp, Artificial Sequence
  ENSG00000228412_57 (sequence is synthesized)
ccagcagcgggaactctggatacagtggagagtcacagctggtcaaaccctgaaccgcttgctccttgaaatggccagagaggcccatcccagagccatctcatcatctctcctcagaca

SEQ ID NO: 852478 - DNA, 120 bp, Artificial Sequence
  ENSG00000228412_58 (sequence is synthesized)
ggaaaccgagaaggaaaacaatcagctctgttctctctgggccgagggagtgagctgtaatgagggagcacaggaacgcattgggcgccctcagacctgaacacacagttgagaataact

SEQ ID NO: 852479 - DNA, 120 bp, Artificial Sequence
  ENSG00000228412_59 (sequence is synthesized)
aattctccaacagcgtgtactcacttcttgtctccatgtcacattttgataattctgagaaagttaaggaatggggctggaccaattactcatcccaaaccgcttgaattaggaatgatg

SEQ ID NO: 852480 - DNA, 120 bp, Artificial Sequence
  ENSG00000228412_60 (sequence is synthesized)
gaaggctgttactgctatgtctggtggacccgaaaacatggcaggtcagcagttgggaagaaacgctggatctgaagcaggggaagtgaggacaaacagaacttgtaaaggcaacacgga

SEQ ID NO: 852481 - DNA, 120 bp, Artificial Sequence
  ENSG00000228412_61 (sequence is synthesized)
ggagaagctccggagtggaatctggcagggcctagagaagctgtgggctcagcagctgctctctcaccacagcatgagccagaatcagcaacgatgcttgtgagctgctgcagccattgg

SEQ ID NO: 852482 - DNA, 120 bp, Artificial Sequence
  ENSG00000228412_62 (sequence is synthesized)
taccttacgctgacctccagggatgaatggctgctgatacacatatgcctctgaatcttgcacaatcctcgcttatgccaaccccaatgaaaagccatacagggaattctgggaattgta

SEQ ID NO: 852483 - DNA, 120 bp, Artificial Sequence
  ENSG00000228412_63 (sequence is synthesized)
tttcctgctaagctaacttgacacaatgtaaatttactgcaaacatgaacaacacatggtccttccatcaagtctggggatgaaggttacaagtaataacaaataaatgcaataaagggt

SEQ ID NO: 852484 - DNA, 120 bp, Artificial Sequence
  ENSG00000228412_64 (sequence is synthesized)
tagcataaatctgctttgttgaagctgctcatttgtctgatctatgagtccagaagatgcaaactcccttcccagcttatgcaaaaatacttccagtaaaaacaagccctttggcccttt

SEQ ID NO: 852485 - DNA, 120 bp, Artificial Sequence
  ENSG00000228412_65 (sequence is synthesized)
tttatggtcctgtgatcacaagatggctgcagaagctctgagcatcacctcatatagctcaacaaaggggtctgaccaccatactattgcctgcagatgaagaggagcaacatattgtat

SEQ ID NO: 852486 - DNA, 120 bp, Artificial Sequence
  ENSG00000228412_66 (sequence is synthesized)
ccgcggccgggccaggcgccgagcaggcagctgcggccctcgggaagcccggagaggggacccactccggcgccctgcccgcgtccccctttgtgggtgacagactgcacgggaggacac

SEQ ID NO: 852487 - DNA, 120 bp, Artificial Sequence
  ENSG00000228412_67 (sequence is synthesized)
cggggcagctcccatgcccacgagggtgccctccctcgggaactagggaaggcagaagagcccgctgaccaccagaaaaaacacggggacggcggggacaagggctgacccgtctccacc

SEQ ID NO: 852488 - DNA, 120 bp, Artificial Sequence
  ENSG00000228412_68 (sequence is synthesized)
gagactgaacctcgagttctaaggtgggactgccaagatgaatagacataatcctcgatctaaccacttcacagtttatcatcggagtcaagtttgcagataaacaattgccatgcaact

SEQ ID NO: 852489 - DNA, 120 bp, Artificial Sequence
  ENSG00000228412_69 (sequence is synthesized)
tggctgacctggctcacaggtgcgcggttgccagttgagaataactcatccagggttgttgaatggtggaggatcttccaaaatcagcagctaggaggtcgagaacccttcatgccatac

SEQ ID NO: 852490 - DNA, 120 bp, Artificial Sequence
  ENSG00000228412_70 (sequence is synthesized)
gggcggtcgccctgacaacgcagacgccagcccgcacaatgacttccagctggagcagcccagccagcctgcgcgctcactcgcttgcttgcgctgggcttcagggcgcccggatttctt

SEQ ID NO: 852491 - DNA, 120 bp, Artificial Sequence
  ENSG00000228412_71 (sequence is synthesized)
tatgtatttggacccatcctcaaacagactttaaaccgtttaaaggcaaggagggactctttcgtaaacctttaatcccctggcccagctgagtagatgcacagtgtcttttgatgatgg

SEQ ID NO: 852492 - DNA, 120 bp, Artificial Sequence
  ENSG00000228412_72 (sequence is synthesized)
tgatatggaatgattaataaccacacaaggcattcggttggtcaagtcactgtttattggctcaaaataatccttggtttctgtatgtctacagctcacttcctaaacagttaaatccgg

SEQ ID NO: 852493 - DNA, 120 bp, Artificial Sequence
  ENSG00000228412_73 (sequence is synthesized)
agaagtctaatagataatagttggtgatcataaatataaataaccaatacattagaatgtgtagtcaaaataggaatacttgcttttcacttacttcccacgggtcgctgctggtggtag

SEQ ID NO: 852494 - DNA, 120 bp, Artificial Sequence
  ENSG00000228412_74 (sequence is synthesized)
tcaacacaaataaaaatttgaactcattttgttattcatctaaaatgagaaactcggtgaaacattgattttctaaaattgctgcatatttaaatgtgattataattgctttttagcatt

SEQ ID NO: 852495 - DNA, 120 bp, Artificial Sequence
  ENSG00000228412_75 (sequence is synthesized)
ctggcctattttgtgtaaaatggtctgtatcataatggatgactgattatcccatccacattatttggattcacttaatactaggttttaacgttaggagaataaaaccctcaagaaacc

SEQ ID NO: 852496 - DNA, 120 bp, Artificial Sequence
  ENSG00000228412_76 (sequence is synthesized)
taacatagatttgtatatttagttttctccttccttatcatcttccaccagacttacaggtgttccacctgcttgtagtttcggtaataataccagctggcggtggttcctaactctagc

SEQ ID NO: 852497 - DNA, 120 bp, Artificial Sequence
  ENSG00000228412_77 (sequence is synthesized)
tacactttaaaattacctcgtgcatttaaaaaaaaaatgcagttgtttaggttcttcccctagatattttaatttacaaggtttgggatgtggcctgggcaccgatttttttaacttttt

SEQ ID NO: 852498 - DNA, 120 bp, Artificial Sequence
  ENSG00000228412_78 (sequence is synthesized)
atttgaatgtagacttacaggaagttgcaaagatagtacagagaggtctgatagagcctccactgttggttacatcccgcatagctagagcacaataataaagccaggacattgacactg

SEQ ID NO: 852499 - DNA, 120 bp, Artificial Sequence
  ENSG00000228412_79 (sequence is synthesized)
agataaaatgtgcctgtgattctgtgtcaccttatccctgaagactcttgtaatcattaccacaatcaaaatacaaactatttcaacaccacgaagatctctctcatacagtccctttat

SEQ ID NO: 852500 - DNA, 120 bp, Artificial Sequence
  ENSG00000228412_80 (sequence is synthesized)
ggtcgtccctttctttcccccacaccatccctaaccctttgcaaccatcagtctgttctccatttctataattttgtcgtttggggaatgttttataaattggtcctcacagcttgtgac

SEQ ID NO: 852501 - DNA, 120 bp, Artificial Sequence
  ENSG00000228412_81 (sequence is synthesized)
cttctaagattagctcaccatcccccccacccccccaccccacccaactcagcagaatgccctagagatttatccaagttattgcaggtatttctagtttgttcctttctgttactgagt

SEQ ID NO: 852502 - DNA, 120 bp, Artificial Sequence
  ENSG00000228412_82 (sequence is synthesized)
tctacactatgggtgtaacacagtttgtttaatcattcagcattcacctatcatacattttggttccttctttttttgggcggggggagtgcctattacaaataaaactgtcttgaaaaa

SEQ ID NO: 852503 - DNA, 83 bp, Artificial Sequence
  ENSG00000228412_83 (sequence is synthesized)
aggagtgtgattgctgggtcatatgatctacagtccctcttggacagattttcctgtgtgtatatgatatgagacgaagtcac

SEQ ID NO: 852504 - DNA, 120 bp, Artificial Sequence
  ENSG00000228412_84 (sequence is synthesized)
gcctcagcctctcaaagtgctgggattacgggtgtgaacctaatcgcagaggttctacagtcattctccagtttccatcattcaagaaaatgcagcaatgagaggagggagaagaggaca

SEQ ID NO: 852505 - DNA, 120 bp, Artificial Sequence
  ENSG00000228412_85 (sequence is synthesized)
ccagctcaatcccagcgtccgtgttgagtgcgaacaccttcacatctttatgaaacccaatcatatgtttctgttgctttatagtttctatttcattgtgtcacatcaatgtgtatagac

SEQ ID NO: 852506 - DNA, 120 bp, Artificial Sequence
  ENSG00000228412_86 (sequence is synthesized)
tttagttgactgaaagtgtgtattctgtaaagagagaaagggatggggagagaaaggagactgttacttttattttcatgtcctttgctctcccacatgcatactccacctctagctctt

SEQ ID NO: 852507 - DNA, 120 bp, Artificial Sequence
  ENSG00000228412_87 (sequence is synthesized)
tgcagcttactgtagatgccactgtccttttccacatttgcacaagtagatttctcactcccaacccttattttgaaaataaggtgtttctacatctttcattttatttttaaaaataaa

SEQ ID NO: 852508 - DNA, 120 bp, Artificial Sequence
  ENSG00000228412_88 (sequence is synthesized)
agttggaccacagtttagatatattaatcacttttcccagaactcatgtttggtcatctaaaagcctgtgtctaaaagttgtgaggaatagttgaagctttcatcaatgtaaaggttggg

SEQ ID NO: 852509 - DNA, 120 bp, Artificial Sequence
  ENSG00000228412_89 (sequence is synthesized)
taatactctactgccaaaagtagttaattaatttctgcagagttaaggtagtagaaatgggagctctcatctgttttgagaaatgtgtacaaaattaatgttttcccagagaagcatttt

SEQ ID NO: 852510 - DNA, 120 bp, Artificial Sequence
  ENSG00000228412_90 (sequence is synthesized)
ccaatgtctccatctaatttggctccattctgaagagaagcacaatgatgcttcagcaacttgaaattttactaagtgaactaactaatcctgcctttgaaacagtggactggggctcaa

SEQ ID NO: 852511 - DNA, 120 bp, Artificial Sequence
  ENSG00000228412_91 (sequence is synthesized)
aagacaagcttcttagactaatactgggcactttctcttttctcactctctctttattcccttttctttctccttctcttgttccatcttttcactttggaaactattaggtttcaaaaa

SEQ ID NO: 852512 - DNA, 120 bp, Artificial Sequence
  ENSG00000228412_92 (sequence is synthesized)
tgcatctgtagctgtttattttacatgtgcctgattttatgagtttatgggctcctgaaaattaaattaattttaaatgagctttaattactaatgctttgggccattgcctttaacaaa

SEQ ID NO: 852513 - DNA, 120 bp, Artificial Sequence
  ENSG00000228412_93 (sequence is synthesized)
gtcaacataacaatcagggttaccttagtttgtctctttgaagaatgtagtcattcatttgggctcttattgagcagagcagctttctaactggaaaaacaaataaataaaataaaacca

SEQ ID NO: 852514 - DNA, 120 bp, Artificial Sequence
  ENSG00000228412_94 (sequence is synthesized)
gaagttgtagcagtgtaaattggagagtgtgtgagggtcgtatttggagagagagagacacacacacaggagattggtggtcttggggcaaggcaaatagctcattcgcccccccacacc

SEQ ID NO: 852515 - DNA, 120 bp, Artificial Sequence
  ENSG00000228412_95 (sequence is synthesized)
tccagtttccaccccagacctttaaatcttgaaggtggaggaaagggagacgtagctgttgattagagttgggtgggaggtaattcttattctaaattttcattttatttattttttggt

SEQ ID NO: 852516 - DNA, 120 bp, Artificial Sequence
  ENSG00000228412_96 (sequence is synthesized)
gacctaaattttcatttctctgggataaatgtccaggagtgtgattgctgggtcatatggtaagtatgtgtttaatttttaaagaaactgctgaactattttccagaaatgtggtactat

SEQ ID NO: 852517 - DNA, 120 bp, Artificial Sequence
  ENSG00000228412_97 (sequence is synthesized)
tttacattcccagcagccatatatgagagatccagtttttccacatccttaccagtattttgtattgtcactatttttttacttttactgttccgattaggtgtgcagtgatacctcact

SEQ ID NO: 852518 - DNA, 120 bp, Artificial Sequence
  ENSG00000228412_98 (sequence is synthesized)
ctggtcttaatttgcattttcctaatgactagggatgttgatcattttctcatgtctttgccatacacatatcctcttcagtgaaatccctcttcgtgtcattttcttattttcttgatt

SEQ ID NO: 852519 - DNA, 120 bp, Artificial Sequence
  ENSG00000228412_99 (sequence is synthesized)
tgttctgttactgttgagttttgaaggttctttaaattatagacatgagtcctttatcagttacatcagcagtcctcaacctttttggcttcagggacaagtttcgtggaagacagtttt

SEQ ID NO: 852520 - DNA, 120 bp, Artificial Sequence
  ENSG00000228412_100 (sequence is synthesized)
ttccacggaagtgggggtggtgggggaaatggtttccagatggaactgttccacttaagatcatcagacattagattctcataaggagcatgcaaactagatccctcgcattcgcagttc

SEQ ID NO: 852521 - DNA, 120 bp, Artificial Sequence
  ENSG00000228412_101 (sequence is synthesized)
acaatagggttcgctctcctgtgagaatctgatgccctggctgatctgacaggagacagagctcaggtggtgaggctggctcaggaggtgcttaactcctgctgtgttgccagcttccta

SEQ ID NO: 852522 - DNA, 120 bp, Artificial Sequence
  ENSG00000228412_102 (sequence is synthesized)
acaggccattgacctgtaccagtctgaggcccaggacttggggacccctgagagatgtggtttgcaaatagtttttcccagtgtttttgctgtcttttggatcttttgggccacatccgg

SEQ ID NO: 852523 - DNA, 79 bp, Artificial Sequence
  ENSG00000228412_103 (sequence is synthesized)
acataggcgggtgaatcacctgagtcgggagttcgagaccaggctgaccagcatggagaaactccgtctctactaaaaa

SEQ ID NO: 852524 - DNA, 120 bp, Artificial Sequence
  ENSG00000228412_104 (sequence is synthesized)
attgctgggtcatatggctccagggacctacctgacttcctattcatgctgatcccactgagacccttatcaaccctgacctgttccccatgtgcctcttggatctgccttatgttccag

SEQ ID NO: 852525 - DNA, 120 bp, Artificial Sequence
  ENSG00000228412_105 (sequence is synthesized)
gcctaaaagaatcaaagaactatataatttcgagagaacacaagatgccaaaattttcctagtgtagatggctcaatcagtgttgattgaactatccacactagaaattaagtgaaattg

SEQ ID NO: 852526 - DNA, 120 bp, Artificial Sequence
  ENSG00000228412_106 (sequence is synthesized)
agggactattcttaaatgtaaatatttttctaatataggtttttagagattgctgacttgatgtatttaggaactcaaagcaaatagagtcttctggagtaatagataagcattagaaaa

SEQ ID NO: 852527 - DNA, 120 bp, Artificial Sequence
  ENSG00000228412_107 (sequence is synthesized)
cactaggtctacctggccgaatgaatggattcacaaaggggggtggtatataaatgaaatatacttaactgatcttgaactacgtcgagatccactgcactgaagattccccttggctct

SEQ ID NO: 852528 - DNA, 120 bp, Artificial Sequence
  ENSG00000228412_108 (sequence is synthesized)
tttaattcccatactacttttctcagatttatatttctttgtgattaatttttctctgacacagtaataagatctgagtttttttctccaatcccatgtttatttatttgatttagagac

SEQ ID NO: 852529 - DNA, 120 bp, Artificial Sequence
  ENSG00000228412_109 (sequence is synthesized)
aacacagcaagtcctgctttgttcttctgtcatcttagttgtaggtctattggatctttgatcaatttagtcttttttatattgggttttctccagatattataaattgtagcaggtcat

SEQ ID NO: 852530 - DNA, 120 bp, Artificial Sequence
  ENSG00000228412_110 (sequence is synthesized)
ttggaattaatatagtttatcacctcagtaggttctaaattaagtttctttaatagtgcacaggaagtgtttatgacctttagaatgggtcaatgattacaggttttaagaggttcagaa

SEQ ID NO: 852531 - DNA, 120 bp, Artificial Sequence
  ENSG00000228412_111 (sequence is synthesized)
agtccaaggagaccttcccctcaaactattctgcttagaaagggaagggtcaccagccagaccagcaacaaaattccaaacaaaacaaaacaaacatacaagaaaaaaaccctcagtgtt

SEQ ID NO: 852532 - DNA, 120 bp, Artificial Sequence
  ENSG00000228412_112 (sequence is synthesized)
caacgcagacgccagcccgcacaatgacttccagctggagcagcccagccagcctgcgcgctcactcgcttgcttgcgctgggcttcagggcgcccgggtgagtttttttctctccctct

SEQ ID NO: 852533 - DNA, 120 bp, Artificial Sequence
  ENSG00000228414_0 (sequence is synthesized)
gggagcgcagggaacggcgggagccgggaggtgacggctagcagcgtgagaaggccgctggctcctgagaaatccccctcctccaggtggttttgtccttttggaccaattatctaacct

SEQ ID NO: 852534 - DNA, 120 bp, Artificial Sequence
  ENSG00000228414_1 (sequence is synthesized)
gggcctggactccatctaccactgtcctgcctggttcactgcagctcacttcatcttcctgtgccttctctgaaagggcccctccaaaagtttcctgggtatgtcccctcaagaaactct

SEQ ID NO: 852535 - DNA, 120 bp, Artificial Sequence
  ENSG00000228414_2 (sequence is synthesized)
caaacaactgagaaggtgcctcgacatctgatttgccccaaacctctatacactggacatcttctgaataaggctgtgttgtatgttgggacaagcaaagggatggaaatcaagaattct

SEQ ID NO: 852536 - DNA, 120 bp, Artificial Sequence
  ENSG00000228414_3 (sequence is synthesized)
gggttttagtcctgactgtcactacatggctgtgttacttctgctttctaccaccctcgtgcttttgggagggcctgattcagatgaagagtctcctgagagcatggattgtctcagatg

SEQ ID NO: 852537 - DNA, 120 bp, Artificial Sequence
  ENSG00000228414_4 (sequence is synthesized)
aagagtctcctgagagcatgaactgtctcaggtatccgtgtgttcctcagtgtctggcttggtgactggcacacaatcttgcactagatactggcttttgaattaatgcacgccgtgaaa

SEQ ID NO: 852538 - DNA, 120 bp, Artificial Sequence
  ENSG00000228414_5 (sequence is synthesized)
gagaacccagaaagtctgcacagctagagcttctcctcaccctgggttctttgtgatttgacttgctggtgatttctatttatcctgctaaactcaactcaggggagccctggaagcccc

SEQ ID NO: 852539 - DNA, 120 bp, Artificial Sequence
  ENSG00000228414_6 (sequence is synthesized)
tcctagtacgctgacactggggagatatgatcctccttatcacaaggtatccccagtacctgtccccccaggtggttctccccactctgagtgtctacatctcattcattcctccagtcc

SEQ ID NO: 852540 - DNA, 120 bp, Artificial Sequence
  ENSG00000228414_7 (sequence is synthesized)
cagtccttggcacagtgcttggtacagaataggtgccagtgactatttaatgtgtgaatgaggggctgaagctagtgcaaacaggagcttaaagttcaggaaagattggagaaagcgaca

SEQ ID NO: 852541 - DNA, 120 bp, Artificial Sequence
  ENSG00000228414_8 (sequence is synthesized)
cttaacaagctccttctgtatgccaggtatatgaaggacagcgcagaacacggcaccccaaaatatgctactttggcataggattattttgagctgacaaccattgagaagaagcagata

SEQ ID NO: 852542 - DNA, 87 bp, Artificial Sequence
  ENSG00000228414_9 (sequence is synthesized)
ggattattttgagctgacaaccattgagaagaagcagatacatgaaaggctctctgcttgccctctatttgcccaaaagcaagacac

SEQ ID NO: 852543 - DNA, 120 bp, Artificial Sequence
  ENSG00000228414_10 (sequence is synthesized)
ttacagacatgagctgtggcgcctggcccaggacaccaatttgtaaaggtttctcctcctctcctctctaccaagaaggacagaagttaatcactggcgagaagtctagacctttataaa

SEQ ID NO: 852544 - DNA, 120 bp, Artificial Sequence
  ENSG00000228414_11 (sequence is synthesized)
cccagagagggcaccagaggaatacgtacgtacgtgtgatgcacatgttaatctatttttcgtcagttgaatttacagggccccagctggaaaatttaggagagtagagggaaaaagatt

SEQ ID NO: 852545 - DNA, 120 bp, Artificial Sequence
  ENSG00000228414_12 (sequence is synthesized)
ttcttcccctacgcattgtacaaagtccttgcatactttctctcttttaatttttacaaccccttgaggtaaattctactattcccattttacagaggaggaactgaagatcagagctgt

SEQ ID NO: 852546 - DNA, 120 bp, Artificial Sequence
  ENSG00000228414_13 (sequence is synthesized)
taagtaacttactcaaagtcacacagctcatcaaaggagggcctcctattagcgtccaaatataacgttgtgccttctactgcacagtgatgtagggtgggctggagtcagaacactcaa

SEQ ID NO: 852547 - DNA, 120 bp, Artificial Sequence
  ENSG00000228414_14 (sequence is synthesized)
ttgtagcccatgagacactgctgggtataaggacccctttctttgcctgctgcttgcctgcaacattaccaccttcaccccttgaagccagtttgtctgcatattgatttgatttaggct

SEQ ID NO: 852548 - DNA, 120 bp, Artificial Sequence
  ENSG00000228414_15 (sequence is synthesized)
tacaggacttcagggtctatttccattgtgcttctcaaggaacattttgcaatatttgtttcattcacttcaagttcttaagacttatgttttcccatttatgggtacatggaccaagaa

SEQ ID NO: 852549 - DNA, 120 bp, Artificial Sequence
  ENSG00000228414_16 (sequence is synthesized)
gctgatggaatcagtaagtgtattttgctgaaactcttgaccagtgtgtcttacagtgaaaactaagactaaaatcctaagcccccagtcaactgcatggacccactcttggtcaagggg

SEQ ID NO: 852550 - DNA, 120 bp, Artificial Sequence
  ENSG00000228414_17 (sequence is synthesized)
aacccccgagacagccgaaaaacagactacctggccataatgggaaggagggtcagaccagcctcattatacccactcccttttggagtttaggcacaactggccagccttaatgttaaa

SEQ ID NO: 852551 - DNA, 120 bp, Artificial Sequence
  ENSG00000228414_18 (sequence is synthesized)
atagagatcacaagactgacaaaacagattctttgtggcactaagattccagattttaaaccatgcgaggccagggtgaagtcatgcctgcaggccatcaattttgctatgtagcatcct

SEQ ID NO: 852552 - DNA, 120 bp, Artificial Sequence
  ENSG00000228414_19 (sequence is synthesized)
tatcttaatttaaaacattcttttttgctgacgccaaattttagacagagccttactcctttaaccaactgtaaattaaagaatatctgaatccacttataacctgtaagccctccacgt

SEQ ID NO: 852553 - DNA, 120 bp, Artificial Sequence
  ENSG00000228414_20 (sequence is synthesized)
tatgtcccctcaagagatggggtttcaccatgtttccaaggctggtctcgaactcctgggacctcaagtgatccgcccacctcgggctcccgaagtgctgggattataggcatgaaccac

SEQ ID NO: 852554 - DNA, 120 bp, Artificial Sequence
  ENSG00000228414_21 (sequence is synthesized)
tttttaatgggaaggctgtgacacaacctaaaagaggcaccattagtgaggcaagcaggcagaagtctttggataggaggagcaatgaacctgggagagagcatcgagcaggggcacatg

SEQ ID NO: 852555 - DNA, 120 bp, Artificial Sequence
  ENSG00000228414_22 (sequence is synthesized)
tggagaacctgcttcggaacctattagaggcagaaaagaccctgggcaagtccagttcccatggatcaggcattccttggattgtccgccctgcatttgtcttctctctttcccttttcc

SEQ ID NO: 852556 - DNA, 120 bp, Artificial Sequence
  ENSG00000228414_23 (sequence is synthesized)
ttgcagtaccccgaggctcccactcctgttcccggaaccaagctaggtccggctgcattttctggaggctcaataacaagaagcagacaaactaggaaagaagggaattgactactatag

SEQ ID NO: 852557 - DNA, 120 bp, Artificial Sequence
  ENSG00000228414_24 (sequence is synthesized)
ccggatacagggagaaggccggagataattccaccagaccaactcaaaagtgttaaaattttcttagtgcagtctagcattcgcctaagtctattggtaactaattttgtttcaactaga

SEQ ID NO: 852558 - DNA, 120 bp, Artificial Sequence
  ENSG00000228414_25 (sequence is synthesized)
ctaagtccgattaaaagggccccagtaccttcaaggcctgtctatggtggtacggagtgattatttctatcttatctcttttacagcttggtctggagagctgccttagacttcccaatg

SEQ ID NO: 852559 - DNA, 120 bp, Artificial Sequence
  ENSG00000228414_26 (sequence is synthesized)
aatttattaaaacagctgcctctgtaaccttgacttgtctcagattttgtcgacctgagatgggtcctggcactaggaatgtaaaactgtctctattattttggtttgctccagcaaggg

SEQ ID NO: 852560 - DNA, 120 bp, Artificial Sequence
  ENSG00000228414_27 (sequence is synthesized)
agaagcccatgcaaggctcctactgactgtatgtttcatttctagcttggatgtctcagcaccgatttctctaggtttaactatttgctcaatgttcaggcagcactgtggaaatctgtc

SEQ ID NO: 852561 - DNA, 120 bp, Artificial Sequence
  ENSG00000228414_28 (sequence is synthesized)
tgtgtaacgggtgctacgcaggcctgtctgtgcgactgtcatgcaggcctgtctgtgcgattgtcagggagaattggcctgccacactcccactcatttctgcattctcattaaggcata

SEQ ID NO: 852562 - DNA, 120 bp, Artificial Sequence
  ENSG00000228414_29 (sequence is synthesized)
ttaaggattagaaagggattgctaggccaggcctggctagtcttccttaaatggaactttcagaaggaaaggggaaaaccaaaacaatttcccccttcaactttttaactgtgtttctct

SEQ ID NO: 852563 - DNA, 120 bp, Artificial Sequence
  ENSG00000228414_30 (sequence is synthesized)
tgggccaaagacctcttagggatttcccccgggagctctttttgcgaaggatgttttgtttttcctttgtgaatagggactaattcattcattaaagcaacatctactgagcttgtatta

SEQ ID NO: 852564 - DNA, 120 bp, Artificial Sequence
  ENSG00000228414_31 (sequence is synthesized)
caggtaagcactgctccaggtgctggggaaaacggagtgaactgaaatcacaaaaaccctgcagcgctcatgccatgtacgttctattgaggaaaacaagcaataaacaagattaataat

SEQ ID NO: 852565 - DNA, 120 bp, Artificial Sequence
  ENSG00000228417_0 (sequence is synthesized)
gtttggttgttattgttgtagaacgagcaacagaaaaacaacacttgtctgcctgagaaggctccggaaaaaaaaaaaaaaaaaaggaagaaaagcgacctcaaagagatgagctctcgg

SEQ ID NO: 852566 - DNA, 120 bp, Artificial Sequence
  ENSG00000228417_1 (sequence is synthesized)
cgcccgtctttgttacatctttagcagctttgtgcgtagctggcggcctcgagcagaatctgcacgttctgcagaaaagtgttgatgtgcttctccatcgagttctcgctggtgttgaaa

SEQ ID NO: 852567 - DNA, 120 bp, Artificial Sequence
  ENSG00000228417_2 (sequence is synthesized)
agttctcgctggtgttgaaaatgtctgagaaggggcacctgggcttggccccagcggggtcctcgggcagggccgggggctggggcgcggccacggcggggggcacagccgggggcgcgg

SEQ ID NO: 852568 - DNA, 120 bp, Artificial Sequence
  ENSG00000226702_0 (sequence is synthesized)
aacactcttagcaccctacaagcaggtatgtgcttaccagcaaactaaagcaaatggaaattaagaagcatgatcaccaccagcaaggtgctgctgaactataagccttcagatggtcag

SEQ ID NO: 852569 - DNA, 120 bp, Artificial Sequence
  ENSG00000226702_1 (sequence is synthesized)
ataaagtacctgatgctgaaaaacaggaaattgaatcatgtctccaaaatgtgccttttgtcatgcactgttacagctatatttcttgctctttaggccttaatgattgacatgatcttg

SEQ ID NO: 852570 - DNA, 120 bp, Artificial Sequence
  ENSG00000226702_2 (sequence is synthesized)
gaaaacaggtatgtagcaaaactctcctagaaacctgaaagatgtggcaagaagaaaacatggagccttttctgaacaagcctatgagagaagaagaatcacttcaatttattaagtgtg

SEQ ID NO: 852571 - DNA, 120 bp, Artificial Sequence
  ENSG00000226702_3 (sequence is synthesized)
attctgaacccaggtctttattctttccaaaacttcacagcaccttcctcagagcatctctacatgaaaatctgtataaagaagtgatctgtggtgtcgccatttgtatcaaaatggtat

SEQ ID NO: 852572 - DNA, 120 bp, Artificial Sequence
  ENSG00000226702_4 (sequence is synthesized)
cacaaacttatttaaaaggcttcatctaaaagtcttcagagttttggccagggaagagctctaatatcacacattaataaccttacctttgtaacatgtaaattgttttttgttttaaca

SEQ ID NO: 852573 - DNA, 120 bp, Artificial Sequence
  ENSG00000226702_5 (sequence is synthesized)
tctcagtttcattaaactgagaccagaaagagccatcatctttttaccaatttgtaatcattttattgtgttatggacctgcagcaatgctgactatatttacaaatctgtgagtgaaat

SEQ ID NO: 852574 - DNA, 120 bp, Artificial Sequence
  ENSG00000226702_6 (sequence is synthesized)
tttaaaaccattttcctcttctaatctctcccatcctgccttcttagaagcacacaaagcatctcaaccactcccaaattccctgttggaatacccttaatgattctgaaatattttgtt

SEQ ID NO: 852575 - DNA, 120 bp, Artificial Sequence
  ENSG00000283629_0 (sequence is synthesized)
agtcgcggatgcacactctcgagaggacccggcggccaggcacgcacccgggcagagatgaggctgagtcacgcacaggaaggaacgggtagctggtggacagcaagatgtggaggctca

SEQ ID NO: 852576 - DNA, 120 bp, Artificial Sequence
  ENSG00000283629_1 (sequence is synthesized)
gtgctgctaaacccccagcactctgctacagccaaactgaatgccatttgttgaatgagcaaagaaatgaacgaaagaaaaagcgacgatcttttccatttcatctgaccaccgacagta

SEQ ID NO: 852577 - DNA, 120 bp, Artificial Sequence
  ENSG00000283629_2 (sequence is synthesized)
acaaggccccactgctccctcccaaacagatgacctggagaccaggaaagaattcttgtcaagctcccagacaaaggttgctcaaacagccaataccccttgccccgagagaccaccaat

SEQ ID NO: 852578 - DNA, 120 bp, Artificial Sequence
  ENSG00000283629_3 (sequence is synthesized)
ctgtctccatctgctgactgctgggcttcttccaaatccttgagcctgaagtccactgacctgggggaatgacccacaagacagagagaagtggagggacatcaagaatgatgggcccag

SEQ ID NO: 852579 - DNA, 120 bp, Artificial Sequence
  ENSG00000226706_0 (sequence is synthesized)
ccaccatctgggacaccagctggtccaggcacagccttgccacagtccagagaaggccacctctaatggggcctgcaggcattgtggccacaggaggaaagggccggggggcccctctcc

SEQ ID NO: 852580 - DNA, 120 bp, Artificial Sequence
  ENSG00000226706_1 (sequence is synthesized)
ccactcctggggcagctcccttgcccttccccagcctcaggcactctcatcatctccgttggcctcttctgggggctcttggggttcatctccagggtggaaaacttggagggcccctcc

SEQ ID NO: 852581 - DNA, 120 bp, Artificial Sequence
  ENSG00000226706_2 (sequence is synthesized)
tggcagagtcaaggatggggtcagcgagaccccatcccctcagccctcaacctttgtttcacccagagcccctctgaatcctgggagctggctctttccactccccgagggggccctcag

SEQ ID NO: 852582 - DNA, 120 bp, Artificial Sequence
  ENSG00000226706_3 (sequence is synthesized)
gcccaccctggctgtcccagcatggcccccgcggcttctgcgctgcacccttcccgtccctccctgctcctcatggtcactagtgcctgcttatccactgggtcatcccctcggccaggg

SEQ ID NO: 852583 - DNA, 120 bp, Artificial Sequence
  ENSG00000226706_4 (sequence is synthesized)
tagctcctcagcgggtcctcgccggcctgtgccaggtgcaggggccagtgggaggacaacaggagccacgcaggccatcagcgcaagagcaaacgcacatggcaacgttggtccgctcag

SEQ ID NO: 852584 - DNA, 120 bp, Artificial Sequence
  ENSG00000226706_5 (sequence is synthesized)
ccactggttctgtggtggaacggtggatgtctgcactgtgacatcagctgagtacgagaactgccggttgcggcttataaacaagatgatgcccttgcggtaggccatgtgggcggtgaa

SEQ ID NO: 852585 - DNA, 120 bp, Artificial Sequence
  ENSG00000226706_6 (sequence is synthesized)
gttcaaggccagctggaggtgcgtggctgtctgttccaggtcgatgatgtcgtggtccaggcggctcccaaagatgtacggctccataaacctgccagagaccccaccaaggcaaggggg

SEQ ID NO: 852586 - DNA, 120 bp, Artificial Sequence
  ENSG00000226706_7 (sequence is synthesized)
atgagagttcacggggccatctccactggctccttgcaggaacacagacgcccaccagggactcccgggctcctctgtgggggcactatgggctgggaagcacaatttgcaacgctcccc

SEQ ID NO: 852587 - DNA, 120 bp, Artificial Sequence
  ENSG00000226706_8 (sequence is synthesized)
gtgtgcatggacagcagtgcagacccatccaggccacccctctgcatgcctcgtctcgtggcttaacccctcctaccctctacctcttcccgaaggaatcctaatagaactgaccccata

SEQ ID NO: 852588 - DNA, 120 bp, Artificial Sequence
  ENSG00000283627_0 (sequence is synthesized)
ggaggttatgttctttctccaggatggtggattattagggtcatggagcctgacgctgccagaactttttttcccacctcatggaaagaagaacttcctggaaggaaggcaggactgaga

SEQ ID NO: 852589 - DNA, 120 bp, Artificial Sequence
  ENSG00000283627_1 (sequence is synthesized)
gttggaatgaaaatgacagagccctgtccacaccgttaaagtactcaaatccagtatgaagaaaatctcctagttctacaaattgaggactatgatacaacggttgcaaaaatggtgtct

SEQ ID NO: 852590 - DNA, 120 bp, Artificial Sequence
  ENSG00000283627_2 (sequence is synthesized)
gcatctttgttctctctgcactccagaaaacctggagagaggctctgggtgtcttgtcttcatcagcagcatagcggctaaaggggtctctggagcctggatggttgggtgtgactcctg

SEQ ID NO: 852591 - DNA, 120 bp, Artificial Sequence
  ENSG00000283627_3 (sequence is synthesized)
gctttgccactggctctctgtgcttacttaacttccctgtgtttcaatttccttatatggacaacgagtctaatgttaccacatgcaatatttttgtaaacactaaatttgttcatcttg

SEQ ID NO: 852592 - DNA, 120 bp, Artificial Sequence
  ENSG00000226708_0 (sequence is synthesized)
cacaggaaccaccaaatccacagcctgtatgaaagctgcttcttccaacctcagcagtgtcaaaagactggacaccagctggatttgaggtcccatcagcttttggggacctctccagcc

SEQ ID NO: 852593 - DNA, 120 bp, Artificial Sequence
  ENSG00000226708_1 (sequence is synthesized)
ttttaccataatggaaatggaagtgtagaaaaaacaagaaaattgtgtacctaactctccatggtaacctctctcactttttattattcaattattcaataaatattgattgagcattta

SEQ ID NO: 852594 - DNA, 120 bp, Artificial Sequence
  ENSG00000183308_0 (sequence is synthesized)
cccgggcagcctgcggggggcagcgaggcgcaaagaccatgccccaagtgccgagggaaagtcctgagatgcgcgacttgggacgctaggggccaagctccgacgcggggctgggtgcac

SEQ ID NO: 852595 - DNA, 120 bp, Artificial Sequence
  ENSG00000183308_1 (sequence is synthesized)
ctggacgcacctcacacgccgcgagctaagcagaaaagggaggcaggctgccccgacaccccactactcaccgctaggtttccgtctggcgccgatccggctgcgtcacgccggccgaac

SEQ ID NO: 852596 - DNA, 120 bp, Artificial Sequence
  ENSG00000183308_2 (sequence is synthesized)
gacaccccgctgagtcgccgccgcagggaaggtaccttcggccccaacgggaaaagccaatttccagtaattcgcgcccgaccaccggggagagatggagtcttgcactgttgcctaggc

SEQ ID NO: 852597 - DNA, 120 bp, Artificial Sequence
  ENSG00000183308_3 (sequence is synthesized)
aggcgtgagccaccgtgcccggccaagatgaacattttttaaaaccaatttttcaggtataacataagatttctagccaaaggaaaattttgttgtattaattctaacatttgctgtgat

SEQ ID NO: 852598 - DNA, 120 bp, Artificial Sequence
  ENSG00000183308_4 (sequence is synthesized)
gctgtgatttggtattatgtggtatttcttttgtgctctaaccaaaatcatgctagatttagatgccaataaatgcacaatttgaattgaaaacagtctttttacctcccaaataattta

SEQ ID NO: 852599 - DNA, 120 bp, Artificial Sequence
  ENSG00000183308_5 (sequence is synthesized)
gagtgaatgtttccctctgaggatgaagatcactataaacaactctgatgagatcatgctgacacaatgccccttctgtcaaagccatggatccaattgttgaaggctacaaaaataagg

SEQ ID NO: 852600 - DNA, 120 bp, Artificial Sequence
  ENSG00000254588_0 (sequence is synthesized)
gtcaggagggaagaagggagggtggggtggggttgggggagaggggaggacttgggagcctgtttgccctggaaagctcaatataagaaaacaaagaggatagtagtgtgggctttggaa

SEQ ID NO: 852601 - DNA, 120 bp, Artificial Sequence
  ENSG00000254588_1 (sequence is synthesized)
taagactcaggttcaaattcttactctaccaactagccagctgaattgccacagccatctctttgcagaatagcttggatgctcaattttcctgaacgatctccagcgagagatagaaca

SEQ ID NO: 852602 - DNA, 120 bp, Artificial Sequence
  ENSG00000254588_2 (sequence is synthesized)
actatcaccacatttcatttaaaaatctcttcaagacccttcctcagttcttaaactggcaacctgcccagcatcagcctcacttgagaaattcgagaactacctgattggagaagagaa

SEQ ID NO: 852603 - DNA, 120 bp, Artificial Sequence
  ENSG00000254588_3 (sequence is synthesized)
ctagatttatatttgttttgagtcacagaaaagtgacagtttaaattctgaaagaagatcacatttgtagtgcctctttggagacaaaaccttaggtcttggatttgtcacatgttagag

SEQ ID NO: 852604 - DNA, 120 bp, Artificial Sequence
  ENSG00000254588_4 (sequence is synthesized)
ctcaatgggagtttatcagtgctctccaagtccagcactcctatttaccagaggtgaaaaatgagtgtgagtgaggaaattattatttccagggccacacaatctaaaaaagtcagtgtc

SEQ ID NO: 852605 - DNA, 120 bp, Artificial Sequence
  ENSG00000254588_5 (sequence is synthesized)
cactttggcaggagaagtaccagacacccttgagacacaagacaggatacaatggacatgggagtagatagatgagcagactcaatttctagaaatccaacttctctacactggatgtat

SEQ ID NO: 852606 - DNA, 120 bp, Artificial Sequence
  ENSG00000254588_6 (sequence is synthesized)
tgtctttgggcaaatacattgcaggataaccacactatggttccctgtgggagacagcttggcatgggctgtcaggagagaaagggcctgggttggctctattgctgtctgcagtttctt

SEQ ID NO: 852607 - DNA, 120 bp, Artificial Sequence
  ENSG00000254588_7 (sequence is synthesized)
tagactataattatgaaccattcaactgcatctgcagccccaacaatgtggggtggattggcctaatccacagaccaagcgacattttaaaatccagcagtttagacacgtattcctctt

SEQ ID NO: 852608 - DNA, 120 bp, Artificial Sequence
  ENSG00000254588_8 (sequence is synthesized)
gcagcaaatcaaacatggctcagacaggaagagatggctgctcagaagcagtcttcaggaatttccgaacttcgagttgaatcttttatttcactggcttccacaaagcgttacagctca

SEQ ID NO: 852609 - DNA, 120 bp, Artificial Sequence
  ENSG00000254588_9 (sequence is synthesized)
catttgattctcagctcttaaggaccaaaaagaaatgaagtcttctttaatttgcaagcagccagctgtgctcactccacatcttgcatcagccctgtgaaggagtcagaatgtagtgga

SEQ ID NO: 852610 - DNA, 120 bp, Artificial Sequence
  ENSG00000254588_10 (sequence is synthesized)
tggtcctgcccatgactcatgaggtggaacagacccagctcacatctcatctatctggattggctcccatacaataaaaatctttcttccgttgagttggtgaaaagaagagaagcaaaa

SEQ ID NO: 852611 - DNA, 120 bp, Artificial Sequence
  ENSG00000254584_0 (sequence is synthesized)
agcttgtgaagtctgtagctaaatctcaggaacagaaatgttgagaagggtagactgatgactacccctcagtggaaacagaccagatctcagcttatctggctggaaggaaagcaaaaa

SEQ ID NO: 852612 - DNA, 120 bp, Artificial Sequence
  ENSG00000254584_1 (sequence is synthesized)
aacaaagcaaaaccaaccaaaaaatcctaagaaacaaaagacagattcaagccaatctgtgatttgtaaaataagccaggtgcaggcttgtatactgggccacatggtgacttggatttt

SEQ ID NO: 852613 - DNA, 120 bp, Artificial Sequence
  ENSG00000254584_2 (sequence is synthesized)
taagggttacacacatgaggcaactacaatccagaggaatttgtgactatcctcagaggccacagccattgatgcctctttcactctgcccattatgtcccactgaacagcttgggtgtc

SEQ ID NO: 852614 - DNA, 120 bp, Artificial Sequence
  ENSG00000254584_3 (sequence is synthesized)
aaaaaaaaaaaaaaaaaaacctacactaatggattaaacaaccatttggaaaagacaggattttttcttaaacttttttgaggtaattttggaaaggatcattcaaattaacgtatgtga

SEQ ID NO: 852615 - DNA, 120 bp, Artificial Sequence
  ENSG00000254584_4 (sequence is synthesized)
ttggaaaggatcattcaaattaacgtatgtgaagcacctaacataacagacccttggtaaatggtagcaaagaagattgtgatcattaggagctcctgagagagggcaggtgccacagga

SEQ ID NO: 852616 - DNA, 120 bp, Artificial Sequence
  ENSG00000254584_5 (sequence is synthesized)
agggattggaccagatcaacatttcagtgtcttctgaggattataatttctggaagttgctcccagatgggggacaactttcaacctacggtcaaataaatattgcttagaaactctcaa

SEQ ID NO: 852617 - DNA, 120 bp, Artificial Sequence
  ENSG00000254584_6 (sequence is synthesized)
tcatgaagtctccatgtggacagacaattcagaggaatgagagagagagagacctgagcagctagcagtgccagcacctagatgtttgaatcttcccagcccagatacatgatggaaaaa

SEQ ID NO: 852618 - DNA, 120 bp, Artificial Sequence
  ENSG00000254584_7 (sequence is synthesized)
acttcaagatgcccattggacagcaaccacatgaaagacctggagtgagaactcctaagctgagatctcactctttcagactccagagccaaataaataattattaatgtttaagccact

SEQ ID NO: 852619 - DNA, 120 bp, Artificial Sequence
  ENSG00000254586_0 (sequence is synthesized)
tccaccctgttccctcttacccaccctacgccagcggctaaaagctgccttggctagctcagaccctgagagctaagggatgggaagggttccggtggggacacatggccagtggctgtt

SEQ ID NO: 852620 - DNA, 120 bp, Artificial Sequence
  ENSG00000254586_1 (sequence is synthesized)
cttccatattcatctgtctttaatattcagatgaatggaagtacatgaccttgctagtgttttggggtaggaaaggcaagagagtcctcagaagtcatctaaatcatgcctttttatttt

SEQ ID NO: 852621 - DNA, 120 bp, Artificial Sequence
  ENSG00000254586_2 (sequence is synthesized)
tgcgaagatcctgggattcatcaggggtctgaaccttggatcacacctgctccggctattctgatgtcatctccatctcctggagacagttgctgcatgagaacaaaggcagggcccaga

SEQ ID NO: 852622 - DNA, 120 bp, Artificial Sequence
  ENSG00000254586_3 (sequence is synthesized)
cgaggtctggagggataagcggcagggatctgggcactgagctgaggcactgggcaggcagagccattgccctcgcccctaccatgaacccctacagagatgctgctagaaccttgcttt

SEQ ID NO: 852623 - DNA, 120 bp, Artificial Sequence
  ENSG00000254586_4 (sequence is synthesized)
ctaaggggtaggagggtctggctgcctctgcctctactcaccccatagacacacaggccttctctccatccagggagaacatagctgccaagagcagtcctgcccccacaccaggctccc

SEQ ID NO: 852624 - DNA, 120 bp, Artificial Sequence
  ENSG00000254586_5 (sequence is synthesized)
tgggctgtcctcacccgccctcttggcctcaccctggcccttccctggccctgcctcgggatgccaggacccatagcaggtgcctggacaggcttggggatggaaagggggctgggcaca

SEQ ID NO: 852625 - DNA, 120 bp, Artificial Sequence
  ENSG00000254586_6 (sequence is synthesized)
gaaggccagcttctggccaagaacagaactcatagagaaacaagttccagaatcctcttcatcctccttttccccacccactctttagttttgttaataaatacagctaccatatactaa

SEQ ID NO: 852626 - DNA, 120 bp, Artificial Sequence
  ENSG00000254587_0 (sequence is synthesized)
aggccaggtccatggttagcaacatgatgaaggatgccagcttcccctgaagatcaacccatcatcgaagttgaaaactttgagatcacaagacaccaatagacgttccagtacatcttt

SEQ ID NO: 852627 - DNA, 120 bp, Artificial Sequence
  ENSG00000254587_1 (sequence is synthesized)
gtggattccaagacatcctcacagagacctccagtactacattgaatggaagtggtttgaatcacagagttgatctcagctgctccaagttctcctgtccaggtcaactatcctgaacta

SEQ ID NO: 852628 - DNA, 120 bp, Artificial Sequence
  ENSG00000254587_2 (sequence is synthesized)
ggaagtggggaaactgcccagatggatcatacaaccatgtctatgatcttcctgtttctctgggattctgatatgagagggtgcagcgtattgaacatggtacctgccttctctaatagc

SEQ ID NO: 852629 - DNA, 120 bp, Artificial Sequence
  ENSG00000254587_3 (sequence is synthesized)
attctttattaactttctcttttaaaatttatcttctgagtttgagttaaaattttgtgacgtctcttgtaaacgtctactgtaaaaacttttctctggccaacaatcttcattaaatac

SEQ ID NO: 852630 - DNA, 120 bp, Artificial Sequence
  ENSG00000254587_4 (sequence is synthesized)
gaatgagagtttgtgtttggggagagtggtggcaaagaaattggttcatttttttttcattcacctcctttattcaaagctatcctgatctttgagatcaggaacaatgtcttctttgat

SEQ ID NO: 852631 - DNA, 120 bp, Artificial Sequence
  ENSG00000254587_5 (sequence is synthesized)
tttcaacctcttatgcttagcacagtactagcacagaaagcataaactcctttagccaatttttgcttttttaatataataagggcatataaaataaacaaaaatttaaagaaaaaataa

SEQ ID NO: 852632 - DNA, 71 bp, Artificial Sequence
  ENSG00000254587_6 (sequence is synthesized)
tctgactgactccccttggaagccccctagaccatcatggatgccgagcttcaggtaactctcacagtgga

SEQ ID NO: 852633 - DNA, 120 bp, Artificial Sequence
  ENSG00000254587_7 (sequence is synthesized)
gcttcaggtaactctcacagtggaaggtagttcttcaatcaagactacattgaacaaggatggtgatgcagcttatacagcagaaaacactgttggtgctgaaatagttcgtacaagaga

SEQ ID NO: 852634 - DNA, 72 bp, Artificial Sequence
  ENSG00000254587_8 (sequence is synthesized)
acatgggcaattttttatagcagggagtggaatgtaacatttgtacttactgtatgagattcaagtgtaatt

SEQ ID NO: 852635 - DNA, 120 bp, Artificial Sequence
  ENSG00000254587_9 (sequence is synthesized)
tgtaacatttgtacttactgtatgagattcaagtgtaattagtctcctattatcaaatacattcagattcataaatcaaaggcctgtaattattgcctccagtatgtcaactgctaaaac

SEQ ID NO: 852636 - DNA, 120 bp, Artificial Sequence
  ENSG00000254587_10 (sequence is synthesized)
tttgctgtctagaaatgaacttctattaggaactactgtgatatttaattcttagcaaaatgcatccaatgaaaataaagtaatacattcagtttctgatttgaaaaggattcgcaatgt

SEQ ID NO: 852637 - DNA, 120 bp, Artificial Sequence
  ENSG00000254587_11 (sequence is synthesized)
gttaggtggtggtgttttctgggttgcccccttgcagagctagagcaggcccttgctcttccttgatggctgggcatctgccatgacttctgtcactgcttgatagacaacactttttct

SEQ ID NO: 852638 - DNA, 120 bp, Artificial Sequence
  ENSG00000254587_12 (sequence is synthesized)
cctctgcttgatgaaaccaattattttcttttcccgagagtgtgtcaattatgccattgtcatcgtggcagccaaaggcatattagtgctattttctgttaaattcactttgaaatctca

SEQ ID NO: 852639 - DNA, 120 bp, Artificial Sequence
  ENSG00000254587_13 (sequence is synthesized)
gcatttggttccaagatcaatctgttccctcccctcctttttatttttatttttttctgtactgtaattgtattttgttatctcttttgatatgaaagtgtctgcacttgacatactgtc

SEQ ID NO: 852640 - DNA, 120 bp, Artificial Sequence
  ENSG00000254587_14 (sequence is synthesized)
agagtatttttctttatctctaatactttattgtatatgtcactgtgattgtacgattgtgtcaaaatatttgtcacattctcacttttgatgtttagtatttgtcctattactgctaca

SEQ ID NO: 852641 - DNA, 120 bp, Artificial Sequence
  ENSG00000254587_15 (sequence is synthesized)
gatgcaagataaccttttatcaaatacttttatagacttcagaaagtctcaaagagtggtgaaagagaagttattcctgttatttctgaagcgttctgcatataatttaaaaacagagaa

SEQ ID NO: 852642 - DNA, 120 bp, Artificial Sequence
  ENSG00000254587_16 (sequence is synthesized)
aagaagtttctcaaatacacagatttcccaggttgcttgttaaagttgtcaatttcactgaaccctcttcatgaattgttttcctgtcatgttaaataaataaagaatttttccatgtta

SEQ ID NO: 852643 - DNA, 120 bp, Artificial Sequence
  ENSG00000254580_0 (sequence is synthesized)
gattcctaaattcaaacttggtctttcagccattgtgaagctaggaacaagaacacagaacacagaactggcccagagtggtgaggttgctcaggttgcagagggcctgtcatttcagag

SEQ ID NO: 852644 - DNA, 120 bp, Artificial Sequence
  ENSG00000254580_1 (sequence is synthesized)
gcaagacctgaagaagggagtgtggacggcagcacttctgtggaggaagctggctctaaaggctatttgaggaaggtacctcacataaatgaactcttgtgctctgaaagaaaagtttgt

SEQ ID NO: 852645 - DNA, 120 bp, Artificial Sequence
  ENSG00000254580_2 (sequence is synthesized)
tcttgccctgcctcaaggtcagcagaaagaaaatattctcttacaacatggcatgtaagaaatagagaaaagaggaaagaaaatctatttgaaataaagcaaccatttctcatgatgaaa

SEQ ID NO: 852646 - DNA, 120 bp, Artificial Sequence
  ENSG00000253127_0 (sequence is synthesized)
gctcctgatttatgaggtttccaaccaggcctccgaattctcagacaggttcaggggtaatgggtcaggtactgagtttacactgaaagtcagtaggacggagactaaggatgttggagt

SEQ ID NO: 852647 - DNA, 120 bp, Artificial Sequence
  ENSG00000253126_0 (sequence is synthesized)
atggcttggcccctctgctttttgacctcttccctccctgcccagggtctgtggtccacatggcactgacagcctctttcactgaccaagcctccgggactgacaattacaatcacccac

SEQ ID NO: 852648 - DNA, 120 bp, Artificial Sequence
  ENSG00000253126_1 (sequence is synthesized)
ctcagggacctcagggaatttcccagccccatgttaggcagtttggcctccctggccatctctgggctccaggctggcgacggtgctgattttcactatttagcacagaatggcagcctc

SEQ ID NO: 852649 - DNA, 120 bp, Artificial Sequence
  ENSG00000253125_0 (sequence is synthesized)
cttgcaggtccttggcgcggcccggcggcccctggatcaaggcgatccgaactgaacaaagcgggctagacgccacctttccgcccccacgccttggctaagtgggggaccgcgagggga

SEQ ID NO: 852650 - DNA, 120 bp, Artificial Sequence
  ENSG00000253125_1 (sequence is synthesized)
aggcgcctccagccctggcccctgaccgctggccggcgtgaaagacatcgccttcttacaatgcagaacagacgatgcactgtctcaggtcacgcttagcctcctacgggggcacgacag

SEQ ID NO: 852651 - DNA, 120 bp, Artificial Sequence
  ENSG00000253125_2 (sequence is synthesized)
gtgaagccttccttctcccagcattccctcccctcaccctactgtgttgtggccaccactctgcctgggactacagccatttgtccttctgcctctcctctgcctgagagcaaggagcct

SEQ ID NO: 852652 - DNA, 120 bp, Artificial Sequence
  ENSG00000253125_3 (sequence is synthesized)
actgtgatcagagctgggggagccagtgtgagcagcaggaacccacaattaaggctctgggccatgctttcctcttcctgatgaccctggtgtttcctcacagagccctttgtggcatgg

SEQ ID NO: 852653 - DNA, 120 bp, Artificial Sequence
  ENSG00000253125_4 (sequence is synthesized)
aaggtttgtgtttctttgggcaggagcctactgtgatcagagctgggggagccagtgtgagcagcaggtgcaatgaaaggatgtgggagtttgagacccatctctgctgtgtggccctgg

SEQ ID NO: 852654 - DNA, 120 bp, Artificial Sequence
  ENSG00000253125_5 (sequence is synthesized)
ccatgtgcagtgggtaagtacatcagcaagcaaactggcctcaagaatcccgccctatcctgggcatctggggttgaggctggctgtgccaacctttgcacagggtttcaatctgacctc

SEQ ID NO: 852655 - DNA, 120 bp, Artificial Sequence
  ENSG00000253125_6 (sequence is synthesized)
actcagaaaacggagccacttgcttagagtccctctctctgaacacgctctcccctctggaggaaaagcattgcaatcccaagctcctgctgctgccgtacatctgcatcttattcatct

SEQ ID NO: 852656 - DNA, 120 bp, Artificial Sequence
  ENSG00000253125_7 (sequence is synthesized)
ttgaagctcctgcaatgcctccaacggggacacaactaaaggaagctctcagaacgcccagctatccccactgcagaaggctctccctgaaagggcacaggtggaggacgtttgcattta

SEQ ID NO: 852657 - DNA, 120 bp, Artificial Sequence
  ENSG00000253125_8 (sequence is synthesized)
tctggagacagttcatggagaaacacaaagaggtgtcctgacaagacaacaggtccacagcagtcgtcatcatgagtgctcaccatatgccagggttcatcttttaaaatccttaaccaa

SEQ ID NO: 852658 - DNA, 120 bp, Artificial Sequence
  ENSG00000253125_9 (sequence is synthesized)
acaaccaaactgtggttgggattattctctttttataggtgagaaaactgaggctgaaagccattgggtggtttgccaaagctgagaagtagctgagctggggtttgtactcacaccacg

SEQ ID NO: 852659 - DNA, 120 bp, Artificial Sequence
  ENSG00000253125_10 (sequence is synthesized)
tcgttggaatgcttacacatttcagcaacttcatggcaactgcccagctcgacccagaagataatactaccttgtactccccctgccgcttccttcctccaggcagctcacagacatgac

SEQ ID NO: 852660 - DNA, 120 bp, Artificial Sequence
  ENSG00000253125_11 (sequence is synthesized)
ctcattccctctcccagagtcccataggggtgaaggacagggtggggatcgttaactctgcttcctagggaggaaagggaggcccagagagggatgctggcccaccctgggtcatccagc

SEQ ID NO: 852661 - DNA, 120 bp, Artificial Sequence
  ENSG00000253125_12 (sequence is synthesized)
cagctagcgggagagctgcaactggaaatcaggcttccctgccctcggggacagttatttagcctcctggatgtgagctagaatcacccctaagatgcagcaattggggtactcctcttg

SEQ ID NO: 852662 - DNA, 120 bp, Artificial Sequence
  ENSG00000253125_13 (sequence is synthesized)
gggtactgggactcagtggctgaaacagctccaagagagttgggcctgtgctgaaaacagaaatccgagatgcatataaattcaatccgtatgagaagagcagggtggcctgggaggagt

SEQ ID NO: 852663 - DNA, 120 bp, Artificial Sequence
  ENSG00000253125_14 (sequence is synthesized)
ggtcaccgcagtggctccacctcctacccggccacctgcagccctgcctgggctgctcttggtctctctgtgcccagcttccctggccggatgccctgggggccagagcagccgcaggtg

SEQ ID NO: 852664 - DNA, 120 bp, Artificial Sequence
  ENSG00000253125_15 (sequence is synthesized)
cgatgaaaagaacactggccttgaggtcatgggacctggggaggatattcaccaggggcccctaagttagtcattttagctctcagcttttccatttttcattcaaaaaatggggactct

SEQ ID NO: 852665 - DNA, 120 bp, Artificial Sequence
  ENSG00000253125_16 (sequence is synthesized)
aactccatgaaagagacattgtgtgtgaaatatttcatcataagctgtgaagcctgcaaagaaactcctggtgttctctgtagcctgatttcatctctactaaacgctattttgaaaatg

SEQ ID NO: 852666 - DNA, 120 bp, Artificial Sequence
  ENSG00000253123_0 (sequence is synthesized)
ccacagggaaagcaccatgagaagatgacggcagagatctgggcgacgcgtctacaagccaagcgacaccaaaggtggccagcagcccatgtgaagctggaggagaggcctcgaataaat

SEQ ID NO: 852667 - DNA, 120 bp, Artificial Sequence
  ENSG00000253123_1 (sequence is synthesized)
gctcccttacagcgttcagggggaactgaccctgtccacaccttgaccttgaacttctgggctccagaactgtgagacagcatgttctgttgttgaaggagcagcgtggctagaggaatt

SEQ ID NO: 852668 - DNA, 90 bp, Artificial Sequence
  ENSG00000253123_2 (sequence is synthesized)
acaaacttcctaattaatctgctaaagatcagaggaggactaataggagctgaagactgtgtgcgagaccacccctccgccctctccctt

SEQ ID NO: 852669 - DNA, 120 bp, Artificial Sequence
  ENSG00000253123_3 (sequence is synthesized)
gagatggcctcaccagcgacaaagcattcctgctgctgttgctgccacctaccttccctgctttgggaggatacattttctcctcttgcttagaagtttcagggagtcacccaagccttc

SEQ ID NO: 852670 - DNA, 120 bp, Artificial Sequence
  ENSG00000253123_4 (sequence is synthesized)
ttctcccagatacaacggtggaataaaatatcttccagccaacatattttttggagacggaatctcactctgtcacctggttgaagtgcagcagcgcgatcatggctcactgcaacctct

SEQ ID NO: 852671 - DNA, 120 bp, Artificial Sequence
  ENSG00000253123_5 (sequence is synthesized)
aggcatgagcccccgcacccggttgcaaccaacttttttgtggaatataggatcttgatgtttggatgcctgaaggcagaagctgttgcacatggaatggattaaagttttcccctctgc

SEQ ID NO: 852672 - DNA, 120 bp, Artificial Sequence
  ENSG00000253123_6 (sequence is synthesized)
aaccaaaaatccttggggtcccaggagcaaaagatgctccatggcacaggacaattcaagaaggcccgaggtgatattgaagactgcagagacatccagctcagttgtgtctccggaggt

SEQ ID NO: 852673 - DNA, 120 bp, Artificial Sequence
  ENSG00000253123_7 (sequence is synthesized)
gtccagactttgcagacagacgttgcacataaagagctgaaaaactgaggaagctgagctggagaaggaagtcacttctactcagacttgacctgcgtctgatgctatggggcctcttag

SEQ ID NO: 852674 - DNA, 120 bp, Artificial Sequence
  ENSG00000253123_8 (sequence is synthesized)
ggttacctcatgcttcatgcacccctttctctgttcttcagcagaaggcagggtgtagggaagcgggactgtgcctcctttctccctgccaggcctgactctccaggccaagagacacca

SEQ ID NO: 852675 - DNA, 120 bp, Artificial Sequence
  ENSG00000253123_9 (sequence is synthesized)
ttaaggagtataatttgttgatccaggctctccttgcgtttcagtgcagagtggcatcgttttctttatgacctcgtaaagtcacagccgagaggccgatttggaaaacaaactgcctca

SEQ ID NO: 852676 - DNA, 120 bp, Artificial Sequence
  ENSG00000253123_10 (sequence is synthesized)
ggttgacagataattagatacaggggacatattatatgcctttgcatataaatgtgctccgaggcgtgttggttcatctgaagttgaggttaaaggcgcgccaggtattcctgacacatc

SEQ ID NO: 852677 - DNA, 120 bp, Artificial Sequence
  ENSG00000253123_11 (sequence is synthesized)
aggatatatattttcatacagtctcaggtgctgtgttggttttataggcctttcatcctggtgctgacggatggggtgtgattgtgacccaacttagaagaaagggacttcccttgccca

SEQ ID NO: 852678 - DNA, 120 bp, Artificial Sequence
  ENSG00000253123_12 (sequence is synthesized)
ggggcctcctggcgtttttgttttgtgttctccctctccacccccactttctcttcttccttgggaagggaactgttctttggacctaggattctgccgtgagtgactaatggcctgagt

SEQ ID NO: 852679 - DNA, 120 bp, Artificial Sequence
  ENSG00000253123_13 (sequence is synthesized)
aggagggaccgggactcatttttcttttctggactctaataggcccaattaattcagctacaacatgggcccttacaagcctgggacaagcctgggtggaattctatattgaggagttaa

SEQ ID NO: 852680 - DNA, 120 bp, Artificial Sequence
  ENSG00000253123_14 (sequence is synthesized)
tcctaataaaaaatgattacagaagaggacgcctccacccacaggaaggagccagcacggtggggagctgtttcaccaggggagtgttctcagcagctgccacacgtggagttgtggagg

SEQ ID NO: 852681 - DNA, 120 bp, Artificial Sequence
  ENSG00000253123_15 (sequence is synthesized)
tagcaagcagagttgggggaggagggggagccctggttcctgctcttccatgatcagtgtgcagccttgagcatggcactccctctcttcccagcttagtgtcctcatccgtaaaatgag

SEQ ID NO: 852682 - DNA, 120 bp, Artificial Sequence
  ENSG00000253123_16 (sequence is synthesized)
gggctctctgagagtctgccagggccgctgtctgatctgtgacagcgtggcatgtggtgtggtatgtaatgcacgttcctgcctgcagggaggccctctcccttcccccaccaggcttct

SEQ ID NO: 852683 - DNA, 120 bp, Artificial Sequence
  ENSG00000253123_17 (sequence is synthesized)
ctggggagatggtggaacaattctgtgcttgaaattaccttcctctttaaatcttgccatggccctattagaaaagctaagggggcaggaggagaggagcgggcagggagaggagagaga

SEQ ID NO: 852684 - DNA, 120 bp, Artificial Sequence
  ENSG00000253123_18 (sequence is synthesized)
gagagaagaaggaagaaggaaagggaaaggtaagaaaccccatagcccgaccctcagccctgttgaaggagattatataaatagagtcgctgtcactttgatgaattaaatcctccgtta

SEQ ID NO: 852685 - DNA, 120 bp, Artificial Sequence
  ENSG00000253123_19 (sequence is synthesized)
attaggacgcatccatttaagggttgtccagccagatagtccttttcccttcccagcaagtcatagctcagggaggaggcatgagagggatcgttttctgtttctggcttgattgctggt

SEQ ID NO: 852686 - DNA, 120 bp, Artificial Sequence
  ENSG00000253123_20 (sequence is synthesized)
ttctttcttactaggcttcattaattatcctggaatgtggtcacccagttttcttcaacatgggccattctccttttagcaggatcttggcagtggactgccacgggagctctggggaaa

SEQ ID NO: 852687 - DNA, 120 bp, Artificial Sequence
  ENSG00000253123_21 (sequence is synthesized)
aaggaccagttggactccagtacctcctgagagaccaccaccctccatgcctccagctcatgcccagctctgagtcagacggactcttcctgttgtactgcgaggttctgcaaaccttga

SEQ ID NO: 852688 - DNA, 120 bp, Artificial Sequence
  ENSG00000253123_22 (sequence is synthesized)
agggcaaacacagtgagggtctctgacttgctgtgtggacagcccactctctgacagcccagatcatctgaagctatccctgggctgggagctggaagccattcttgtgaaccactcctt

SEQ ID NO: 852689 - DNA, 120 bp, Artificial Sequence
  ENSG00000253123_23 (sequence is synthesized)
ataccttgagcgaagcctctttgggtcccagaagtctgaagctccagctgcctggcaagactgagtctagatgatttcttgggtaccagtagtttggcatttaaaaatactggattaact

SEQ ID NO: 852690 - DNA, 120 bp, Artificial Sequence
  ENSG00000253123_24 (sequence is synthesized)
gcagtgtaaacttagattgcatttcagattgtaaacaataacccccgtgcttcatgtgatgttaaatcagaaatgagctattagccaagctagtcctcttatgaatgagcccctaaccct

SEQ ID NO: 852691 - DNA, 120 bp, Artificial Sequence
  ENSG00000253123_25 (sequence is synthesized)
gatccagggatcgttgaatgaaaatcatcaaaatgatttatcttcactttacctattgtctcacaagaatctcatcactcagggaaaaggagggtgttcttcagggaacggagggcatga

SEQ ID NO: 852692 - DNA, 120 bp, Artificial Sequence
  ENSG00000253123_26 (sequence is synthesized)
ggaagggggatttccttatatctcaactttcagagggagctgagttgtaaacagatggaacaaggtgtgtacgagaagcctcttagatttagtctttcatatcaaggctcttgctgaaaa

SEQ ID NO: 852693 - DNA, 120 bp, Artificial Sequence
  ENSG00000253123_27 (sequence is synthesized)
tcctggcacagctgtgaaatgaggggagctctgacacacagagacacgctccttgcctcaccaaccttcccatacacagtcatgcgcacagagagcaggtaccaatactgaaaatgccct

SEQ ID NO: 852694 - DNA, 120 bp, Artificial Sequence
  ENSG00000253123_28 (sequence is synthesized)
tccggagtttcctcagcttaaacccttgacagcattaagtgaggaaggagtttccttgacctggggaagaagaaccaactcataaacatggaactgtgcccactgccttttcctttgctc

SEQ ID NO: 852695 - DNA, 120 bp, Artificial Sequence
  ENSG00000253123_29 (sequence is synthesized)
tgtggattggctgtggttctgccctggcactcggatgtcaagttgctctggctgtttgggaggaagcccagcctgggtcaggtggtcataagccagaggccctgtcctgtccccagggtt

SEQ ID NO: 852696 - DNA, 120 bp, Artificial Sequence
  ENSG00000253123_30 (sequence is synthesized)
ggcctccctctggggtccagcatggccccagtgctgaggctcccactgctggggaatgtgccctctcctctctttgtttccataccaaggggatctgcagggtagagggcaaattattct

SEQ ID NO: 852697 - DNA, 120 bp, Artificial Sequence
  ENSG00000253123_31 (sequence is synthesized)
tagcagattggggctatgggtaaaccagaagggatgagggagagaggagagaggagaggaaagggaaggagaggggagggcaggggataggtagaggagagagacagcaagaaaaaatag

SEQ ID NO: 852698 - DNA, 120 bp, Artificial Sequence
  ENSG00000253123_32 (sequence is synthesized)
gggtgacctgtggacagctgctgctgcccactacctggcagtttggctatgtgatacatgtcagccttacaaggagatcccccttaccctggaatctactttgggggagcagaacttgag

SEQ ID NO: 852699 - DNA, 120 bp, Artificial Sequence
  ENSG00000253123_33 (sequence is synthesized)
cctcaggcaaatcagagacgagggggaaactttgctttttcctccagtggcagggagctctgggctggggaaatgtctttttgaacacaaagttccagttgcattcatccacaggaaaat

SEQ ID NO: 852700 - DNA, 120 bp, Artificial Sequence
  ENSG00000253123_34 (sequence is synthesized)
gcatgtcatttaatctctttgaggctgtttcttcatcttaaaatatgagtgagaaggtagtacccaccttacaatgtggacaagattaatttagggaaaacacgtagcacagggcttcac

SEQ ID NO: 852701 - DNA, 74 bp, Artificial Sequence
  ENSG00000245275_0 (sequence is synthesized)
aaagtggaagaggaaagagttaccccagcgagaaccgggaaccgggctgcagactctccggcccgggggaggga

SEQ ID NO: 852702 - DNA, 81 bp, Artificial Sequence
  ENSG00000245275_1 (sequence is synthesized)
tattggaagaatcgttctgtttctgcttggattgctgggtaagacaggatgccagccagagctgctgggccatatggcctc

SEQ ID NO: 852703 - DNA, 120 bp, Artificial Sequence
  ENSG00000245275_2 (sequence is synthesized)
gagcctgtccaaggatgaaatcaacccagaatgaagcagagcggagggctggatccaggaatgcattccgccttttaacaccagaatccagccatgtctgaagctagagctaccttggac

SEQ ID NO: 852704 - DNA, 120 bp, Artificial Sequence
  ENSG00000245275_3 (sequence is synthesized)
tttccagttacagaagcctgtatattctttcttcgctaagccaatttgatttggctttttgtcattttcaactgagagttttgaccaagctatgtgataaaggcaaattataatttgaaa

SEQ ID NO: 852705 - DNA, 120 bp, Artificial Sequence
  ENSG00000245275_4 (sequence is synthesized)
gcctcccgagtagctgggattacagttaatacatttctaaacagatatgcaggggataaaaatggcagtcacttcatgagttgtgaagattaaatgagaaaatgtgtgcacagtgcaacg

SEQ ID NO: 852706 - DNA, 120 bp, Artificial Sequence
  ENSG00000245275_5 (sequence is synthesized)
aatgtgtgcacagtgcaacgtccaggcatttagccaatgatggcctatatgttgatgctgctaaagaagggaaaacctgccatccctttgtctttagggaatgagcaaaatccagggata

SEQ ID NO: 852707 - DNA, 120 bp, Artificial Sequence
  ENSG00000245275_6 (sequence is synthesized)
gaaccgggaaccgggctgcagactctccggcccgggggagggatggtgagcaggggcctggctggaccgagggccagactccaggaacagaggaacacattcggggacagacagtagaga

SEQ ID NO: 852708 - DNA, 120 bp, Artificial Sequence
  ENSG00000245275_7 (sequence is synthesized)
catcccagagctgcgtatgctgaagggtctctagcacacaaagggagagggagttgatgcagtcggcagatctgtaattgcagacataatctttttagctggagacacctttctgattcc

SEQ ID NO: 852709 - DNA, 120 bp, Artificial Sequence
  ENSG00000245275_8 (sequence is synthesized)
actgaagatgaaatgaattcaatttgagaattcattcccattctaaataccaaaacagaggctttcaggaaatgaaggctctctctgtcatggagccaaatgtctgacagtggcagccag

SEQ ID NO: 852710 - DNA, 120 bp, Artificial Sequence
  ENSG00000245275_9 (sequence is synthesized)
gtactcggtctatgacctggaagagggaggggctgggaggtacagagtggaaggtaggtgccttggtgtagacctagcttccaggtaaggtgagccttacctcaaacttgccatgtgacc

SEQ ID NO: 852711 - DNA, 120 bp, Artificial Sequence
  ENSG00000245275_10 (sequence is synthesized)
ttagcctactcatgtatccttcctgagcgtcaatgtcctcatctctaaaatgtgttcactggatgtagtgagagtgcaaatgatggatggtgcctggaggcaggctgatgtgttttgtca

SEQ ID NO: 852712 - DNA, 120 bp, Artificial Sequence
  ENSG00000245275_11 (sequence is synthesized)
cttagccccagcatgtcagatatctcaactgcaaaatgggagcaaacaaatttactaatcgggagagaagtaatactggtgtcagagattctccataaataggataccaaaaaaatcact

SEQ ID NO: 852713 - DNA, 120 bp, Artificial Sequence
  ENSG00000245275_12 (sequence is synthesized)
tggcgagtgctgacatcaccagtgagctctaaggcatgcctactcccgctggacctggccctggcccttccttggctccctcctgagcttgagaggcagggccaggcccggaatgggagg

SEQ ID NO: 852714 - DNA, 120 bp, Artificial Sequence
  ENSG00000245275_13 (sequence is synthesized)
gggagcaaataacgagaggccaaccattcaagctccaggacctccagggaagagagggctgggccagagtatcagagaagccttctcagaaggcagagggcctgattgccctgggcctct

SEQ ID NO: 852715 - DNA, 120 bp, Artificial Sequence
  ENSG00000245275_14 (sequence is synthesized)
aggactagtgggactgtcaggaggcagataaacagatatgcattgggtcatgaaagcatgtgtgatgatgagagagggtgaggggggaggagcaggaagggaggttggacaggaaggtgg

SEQ ID NO: 852716 - DNA, 120 bp, Artificial Sequence
  ENSG00000245275_15 (sequence is synthesized)
ggccccgtgcctctgtctcctagcaatgtcaggcctgaccttgggagggcagatactgagccctgtcctgcagcagcatccacccctcatctgtcccaccccagctctacagcgtgcaag

SEQ ID NO: 852717 - DNA, 120 bp, Artificial Sequence
  ENSG00000245275_16 (sequence is synthesized)
acagacagagtgtgtgcgatacatttcaaaggggcattctacatctatcatgtggatgtcataattcagtacgatgcacaaacagtaccacaacgacttgacagtctggctggggcaatg

SEQ ID NO: 852718 - DNA, 120 bp, Artificial Sequence
  ENSG00000245275_17 (sequence is synthesized)
agaattagataagcaaaagcaatatccaatttatcacatggacttggagctgagatgaaaacacatatgactgatgatgttcacggagtgacaggatcacacggatatacccagggtcac

SEQ ID NO: 852719 - DNA, 120 bp, Artificial Sequence
  ENSG00000245275_18 (sequence is synthesized)
gtacagtttccatgcctggggctataagagctacaatggcatctctttttctcccacccagtaaagcacagggtacagcagatgtgtgagtgtcatgatataaagacgtactagacacaa

SEQ ID NO: 852720 - DNA, 120 bp, Artificial Sequence
  ENSG00000245275_19 (sequence is synthesized)
agatgtgtgccttctgtaatgtccttaactgtctcctctccccaacgatacccccccacccgaatgccccagcatctcacctgaatcaggtcacagggagactcagatgaaacatcacac

SEQ ID NO: 852721 - DNA, 120 bp, Artificial Sequence
  ENSG00000245275_20 (sequence is synthesized)
aaagcttcctccagccctgatgctggcctgcagtatggcacttgacagctactggtattgtggatagaagcaaaggctctggactcagcaacacttggtttgaattccagttctaccact

SEQ ID NO: 852722 - DNA, 120 bp, Artificial Sequence
  ENSG00000245275_21 (sequence is synthesized)
tactagctgtggtgctgctgacaacttaaactccatgaacctcagttttcttcatctgtaaggtgggataacagtacttctctaatagggatattgtgaggatcaaatatgatgatctaa

SEQ ID NO: 852723 - DNA, 120 bp, Artificial Sequence
  ENSG00000245275_22 (sequence is synthesized)
agcagttagcacaatatcttgcacatagtaagtgcttaataagtggcagttattatttcatacattataaggtgatacccctgaacttccattgtatccagattcagatttctgcatgtt

SEQ ID NO: 852724 - DNA, 120 bp, Artificial Sequence
  ENSG00000245275_23 (sequence is synthesized)
aaaggacacatcatattgcaagacgatagggtggtactgcctatcagccaattgtgtaggctccagatccatcagcacagcaatgattgggaaagtacttgattattccatgttatcctc

SEQ ID NO: 852725 - DNA, 120 bp, Artificial Sequence
  ENSG00000245275_24 (sequence is synthesized)
attttataaaattttgtcagtggaaaatggaagtaccaatagtagtgataagaagtatgcatctgtcaagtaagtgaaaatacaacccactgaatgggagaaaatgtttgcaaatcatat

SEQ ID NO: 852726 - DNA, 120 bp, Artificial Sequence
  ENSG00000245275_25 (sequence is synthesized)
ataaggcagtggtccacaacctttttggtaccagggaccggttttgtggaagacaatttttccacggttgggggtggggagggggttgggggtgagtggggatgatttcaggatgaaact

SEQ ID NO: 852727 - DNA, 120 bp, Artificial Sequence
  ENSG00000245275_26 (sequence is synthesized)
tcagatcatcaggcattagattctcacaaggagcacccaacctagatccctcccaagtgcagttcccagtggggttcacactcctgtgaaaatctaatgctgccgaagatttgactggag

SEQ ID NO: 852728 - DNA, 120 bp, Artificial Sequence
  ENSG00000245275_27 (sequence is synthesized)
gactggaggcagagctcaggtgctaatgctcccttgcctgctgctcacctcctgctgtatggccccattcccaaccagtacctctccatgcaggtgtggggaggcaatgcggtgtgggga

SEQ ID NO: 852729 - DNA, 120 bp, Artificial Sequence
  ENSG00000245275_28 (sequence is synthesized)
ggcaatgcggtgtgggggtgttgggaactgctatgataaggaacttgtattcagaatatatgcagaactcttattactcaataataaagagacaaataacccaattgaaaagtgggctaa

SEQ ID NO: 852730 - DNA, 120 bp, Artificial Sequence
  ENSG00000245275_29 (sequence is synthesized)
agataaacaaatggccaataagcccatgcaaagatgctcaacatcctaatcaccagggatatcagaagggaaatgcaaatcaaacctgcaattaggtattacttcacacctactaggatg

SEQ ID NO: 852731 - DNA, 120 bp, Artificial Sequence
  ENSG00000245275_30 (sequence is synthesized)
gctgtagccaataagacagacaataacaagtgttgacaaggatgtggagaaattgaaacctacatatattgctggtaggaatgcaaaatggtaaaacactttgcaaaacagtgtatcaat

SEQ ID NO: 852732 - DNA, 120 bp, Artificial Sequence
  ENSG00000245275_31 (sequence is synthesized)
caattcctcaaaaaaaatttttttttttttgagacggagtctcttgtcactgaggctggaatgcagtggcatgatatcagctcactgcaacatccacctcgtgggttcaagtgattctcc

SEQ ID NO: 852733 - DNA, 120 bp, Artificial Sequence
  ENSG00000245275_32 (sequence is synthesized)
tacaggcatgagccacctcacccagcccaattcctcaaaattttaaaatagagttactttattaatcagcaatttcactcttaggtatctgcccaagagaaatgaaacaattcatccaca

SEQ ID NO: 852734 - DNA, 120 bp, Artificial Sequence
  ENSG00000245275_33 (sequence is synthesized)
gtatctgcccaagagaaatgaaacaattcatccacacaaacacttttacatgaatgttaacagcagcattattcacaatagccaaaaggtggaaacagctcaaatatccatcaactgatg

SEQ ID NO: 852735 - DNA, 120 bp, Artificial Sequence
  ENSG00000245275_34 (sequence is synthesized)
aaaggataaacaaaatgtggtatattcacacaatgaaatattaatgatacaaaggaagtgctgacacatgctgcaacatagatgaactttgaaaatatgctaaatgaaagcagttacaaa

SEQ ID NO: 852736 - DNA, 120 bp, Artificial Sequence
  ENSG00000245275_35 (sequence is synthesized)
agaccacataatgcatgatttgatttatgtaaatgtccagaaagggcaaatccatagatacactatagaaaatagattagtcgttgtcagaggctaaagagagtagggaggattgggatg

SEQ ID NO: 852737 - DNA, 120 bp, Artificial Sequence
  ENSG00000245275_36 (sequence is synthesized)
gggagtgacttatgggtacagggtttcttttagggggacaaagatattttggaattagtagtgatggttgcacaacctagtaaatatactaaaatatatgaaattgtacattttcaatgg

SEQ ID NO: 852738 - DNA, 120 bp, Artificial Sequence
  ENSG00000245275_37 (sequence is synthesized)
gtgaattatgtagtatacgtgatttatatctcaacaaaaaggagtttaaaaagaagtatgtgtatcattgactctttcgatataaacatagaaatcattagacttatcgaaagggatgaa

SEQ ID NO: 852739 - DNA, 120 bp, Artificial Sequence
  ENSG00000245275_38 (sequence is synthesized)
tctttagcctccatgggatgttcttaagcctattgctgttttttgatttgtgaaggaaaataatcaaattgaaggtacattaggaaggacagcaaacatatgatcagcgattgtgtctaa

SEQ ID NO: 852740 - DNA, 120 bp, Artificial Sequence
  ENSG00000245275_39 (sequence is synthesized)
aaatgcaggtgtaattggacatgctgtaccactttttattcccaacataaatttgttgtttgacttttgtacttttgacattagtaatattttctgaaataaattgtgtatggaagcagg

SEQ ID NO: 852741 - DNA, 120 bp, Artificial Sequence
  ENSG00000245275_40 (sequence is synthesized)
ttttcaatcttctgctatggtaagtaacacttcagcaaataaatctttgctcatcactgtctctcttatataaactcctgggcatggaatttcaggtcaaagaatgtgcttgctctgaaa

SEQ ID NO: 852742 - DNA, 120 bp, Artificial Sequence
  ENSG00000245275_41 (sequence is synthesized)
tgtaatggattttgccaaattgctattcacagaagatatacccacttacactgccccaaagcctacatttttctcactttagtttggtcacattgtcctggttggatactttctgtctcc

SEQ ID NO: 852743 - DNA, 120 bp, Artificial Sequence
  ENSG00000245275_42 (sequence is synthesized)
cgtatctcatagttggagatatcctaaccatggcctcctggggacactgtgcagtttcctttctgctcatcctgctgcctccccccctaatccaaacaacccctcatatctgtgtatgtc

SEQ ID NO: 852744 - DNA, 120 bp, Artificial Sequence
  ENSG00000245275_43 (sequence is synthesized)
agagggctgtccacacagcatctcatttgatcctatcttgtggggtaggaaggaaaaccgtatcagcacagtctggggtatgaggaccagaggtgaaacaactggcccagggtcctagga

SEQ ID NO: 852745 - DNA, 120 bp, Artificial Sequence
  ENSG00000245275_44 (sequence is synthesized)
tggaaggagagcctccttgctgagcactttcccaccatacaccattgtccaaagatggcctcctaagtctgggaagggtagtaccaaggaggtatatcagttggaagtgatgccactaac

SEQ ID NO: 852746 - DNA, 120 bp, Artificial Sequence
  ENSG00000245275_45 (sequence is synthesized)
acactaacacttactgaaaacactgatgtgggccagagactggggatatagaggtggacaaaacctcctccctgcctccagggagcatgcagagatgggagtgcaatgtggggtagttcc

SEQ ID NO: 852747 - DNA, 120 bp, Artificial Sequence
  ENSG00000245275_46 (sequence is synthesized)
taggcagcatggggagccatctatataagctgagattggaagggtgaatgagggttggccagactaaggaatggcatttcaggagtgtacagtgtgggcctgcagagaggggctggcccg

SEQ ID NO: 852748 - DNA, 120 bp, Artificial Sequence
  ENSG00000245275_47 (sequence is synthesized)
taagcctggttcttacatgcagtcttgtctggctgggtaaggtagacatctacggtttgctctgccccacatccattctcccttctgggcacagcacctggactttcctttgggtaacta

SEQ ID NO: 852749 - DNA, 120 bp, Artificial Sequence
  ENSG00000245275_48 (sequence is synthesized)
gcccatccccaccttcctgcagtcacagggcatgtgactgcaggtgaccaattgcagtattgttcagggatgggcatggggccagcaggccaatgagactcaacctggggacttgtacaa

SEQ ID NO: 852750 - DNA, 120 bp, Artificial Sequence
  ENSG00000245275_49 (sequence is synthesized)
gatgatgggaaaaacactctccttccatgggctgctgaggatctccatgagaaaaagcccacctgagagggaagccaactcagatgaaatagggactaggcattgagagagacctagccc

SEQ ID NO: 852751 - DNA, 120 bp, Artificial Sequence
  ENSG00000245275_50 (sequence is synthesized)
gagtgagatgactgagtccctgcatccagcccggccttagggtctaccctggaatttcagttatgtgagcctatcaattctggtttttgcttaaatcagattgactaaggttttggttat

SEQ ID NO: 852752 - DNA, 120 bp, Artificial Sequence
  ENSG00000245275_51 (sequence is synthesized)
ctgtaagcaagaatccagactaatgcaatgggataagaggaaaaggggaaaggagagagcagtagggccagctcatgaacctagctggagctaggctatggagttaaagacttgtccaac

SEQ ID NO: 852753 - DNA, 120 bp, Artificial Sequence
  ENSG00000245275_52 (sequence is synthesized)
gggaaagtcaatgacttttctagaaatttcagagctgttgggacactttttggggattttctcatcaggatagagaatccggtctggaatcagccctcagccctgaaggtacgtgttgat

SEQ ID NO: 852754 - DNA, 120 bp, Artificial Sequence
  ENSG00000245275_53 (sequence is synthesized)
tgatcttaatttctgaaaatacactcatgcctttcagaccaggcttctctctgtcaccaagaaaagggatcttagcagagatgaatcagagggaattcggtccttcgtaaatgccagctc

SEQ ID NO: 852755 - DNA, 120 bp, Artificial Sequence
  ENSG00000245275_54 (sequence is synthesized)
tggctgaaagagaacacctgcattccagcagggcgctgccagggatgaatgggctcacctgttcccctcagccctgcaggcagtctttccacagggtcctgggagacagtgcactggcag

SEQ ID NO: 852756 - DNA, 120 bp, Artificial Sequence
  ENSG00000245275_55 (sequence is synthesized)
atgggctgttgctggctccagaaactctccttttccaagccaggagagagaaagcccagggagaaaagtctcccttccggacctcaggagcctcctcattacactgtctcatttcctctg

SEQ ID NO: 852757 - DNA, 120 bp, Artificial Sequence
  ENSG00000245275_56 (sequence is synthesized)
gagagtgacggacataattggatcaaatggaaatgtaagccagcctccttccccctcccggatgagatacttccaatatggcttcattaccaagtctattgtaaataactgtggagaaaa

SEQ ID NO: 852758 - DNA, 120 bp, Artificial Sequence
  ENSG00000245275_57 (sequence is synthesized)
atgccatttgttctgccataattgcctgatgagcatcagtagatgggtctttgaaacacatagaatgaaatcattttgggctggtttagaaattcctttgtgcaaatctttctccattca

SEQ ID NO: 852759 - DNA, 120 bp, Artificial Sequence
  ENSG00000245275_58 (sequence is synthesized)
ctgttctccatggtgggggttctgaagagggtcttctagagcaaggagccagttaggagcttggaggctgattctggccagggacacacttacttggagtattcagccaatatttgttaa

SEQ ID NO: 852760 - DNA, 120 bp, Artificial Sequence
  ENSG00000245275_59 (sequence is synthesized)
ctgctgtcaactaaagaaaaaaaacgaagcttttaaagaattaaagttagttttatttagaagtcttcttgaggattatagaccaaggcctgtagcctgggaggaggcttttagaaaggt

SEQ ID NO: 852761 - DNA, 120 bp, Artificial Sequence
  ENSG00000245275_60 (sequence is synthesized)
tctctcagactcctccaacgtagtattttagtttatacataggtggtgaagatttagtatgtgaaaaattacatcaaggtttgggtgttagagtacatctggttatagattacagaaaca

SEQ ID NO: 852762 - DNA, 120 bp, Artificial Sequence
  ENSG00000245275_61 (sequence is synthesized)
tagtcactattcttgtcgggtgttattttatgagtagagaaaggcgaggactagggtcatttatctttgatggaattagtgactcaggcgagagacatggggggccatgcgttctatcct

SEQ ID NO: 852763 - DNA, 120 bp, Artificial Sequence
  ENSG00000245275_62 (sequence is synthesized)
gttttgcctttaaaacatttttccagagagctgcacagtgtcccggagtcaggggctttgtgaaattctcccagcaaagggaaatgggcaaacacggcctcttacatttgccactttgtt

SEQ ID NO: 852764 - DNA, 120 bp, Artificial Sequence
  ENSG00000245275_63 (sequence is synthesized)
tcacgaagtttttggtcataaattgtttggttgtgttggtaagaattaatgttgattgccatctgtagttagaagggctcttgtttaggaaggttggtaatttttagttgtagttgtatc

SEQ ID NO: 852765 - DNA, 120 bp, Artificial Sequence
  ENSG00000245275_64 (sequence is synthesized)
agacctagtgtgttttttagccttttcttggaaaatatgttttggactgagtttagttctcattagtaggatgcagggggtttttgatggtgtcttttttttgtatttaatacaatattt

SEQ ID NO: 852766 - DNA, 120 bp, Artificial Sequence
  ENSG00000245275_65 (sequence is synthesized)
tgatggtgtcttttttttgtatttaatacaatattttaataggattattatgaggatattatagattctatacagtaatacagacttcatagtaataaagtctgttgtagactggaaaaa

SEQ ID NO: 852767 - DNA, 120 bp, Artificial Sequence
  ENSG00000245275_66 (sequence is synthesized)
cctttggtgagtcgccagatgaagcacagagggtgggaggctgggtgggacggatcctacctcgatcactgaagtcgtcgaccagtacaatctcggcgaccagctctggaggcgagcgat

SEQ ID NO: 852768 - DNA, 120 bp, Artificial Sequence
  ENSG00000245275_67 (sequence is synthesized)
tgagcacactgtggacggtgcggaggagggaggaccagccctcgttgtggaaggggatgatgatgcttgtgttgggaagtgtctccaggtagcgcttgctgttgcagctagagggaaaca

SEQ ID NO: 852769 - DNA, 120 bp, Artificial Sequence
  ENSG00000245275_68 (sequence is synthesized)
taaggggaggcagaggacagggtcagctctcctcctgccaagagaactcaggcacagggtttggctaactgcaaaccccacttcctctccagtctttagggaatgagcaaaatccaggga

SEQ ID NO: 852770 - DNA, 120 bp, Artificial Sequence
  ENSG00000245275_69 (sequence is synthesized)
taccttggtcacacaggaacttctacatgacatcccaaagtcctacctccaatctctgcatatacagcacacgcggatatgtataaaagacctccctgagtttgaatagttgtgatttca

SEQ ID NO: 852771 - DNA, 120 bp, Artificial Sequence
  ENSG00000245275_70 (sequence is synthesized)
tgtggaggactgccctacagtaacactctggcctctctgtccagctgtgatattgtgatttataataagaactatagactttggtctttgtccctggttcctggcacagagcttctaaaa

SEQ ID NO: 852772 - DNA, 120 bp, Artificial Sequence
  ENSG00000245275_71 (sequence is synthesized)
cttgtcatttcctaagcaaaaggagtgctaggaaaatcttatgttctaatatttcgtctttgaccccagttcttgatgcagagctcctaaatctcttggtgttttctgggtgacagaggc

SEQ ID NO: 852773 - DNA, 120 bp, Artificial Sequence
  ENSG00000245275_72 (sequence is synthesized)
atcttttgttctaatgaggtgactcttggtgggctccaggaggcggggtggtcaccagaaagaacatgccataattagaagcttggaactttcagccccaacccaccatcctccaggaag

SEQ ID NO: 852774 - DNA, 120 bp, Artificial Sequence
  ENSG00000245275_73 (sequence is synthesized)
gggacaggagctggagatcatgatgataattgatcatgccatgtgatgaggcctccacaagaatgtaggaggtccttcccacagaccctgccctatgcagctcttcatctggctgttcat

SEQ ID NO: 852775 - DNA, 120 bp, Artificial Sequence
  ENSG00000245275_74 (sequence is synthesized)
ttgtatcctttctaatatccttcataataaactggtaaacgtgttcccctgagttctgtgagacactctggcagataatcaaatctaaggaggggaaccaccaatttacagccggctggt

SEQ ID NO: 852776 - DNA, 120 bp, Artificial Sequence
  ENSG00000245275_75 (sequence is synthesized)
cagaattacccaaggtctggatttgcaaatggcatctgaagattgggggtgagggataatcttgtgggaccaatccctttacctgtgggatctgactctaactccaggtaggtagtgtca

SEQ ID NO: 852777 - DNA, 120 bp, Artificial Sequence
  ENSG00000245275_76 (sequence is synthesized)
gaattgaattgaatcacaggacaccaggctggtgctggagaattgcttgtcggggagcccccctccctgccccacacatttggtcacagaagtattctgtgttgcatgtgtgaacagaga

SEQ ID NO: 852778 - DNA, 120 bp, Artificial Sequence
  ENSG00000245275_77 (sequence is synthesized)
ggaaaaaacagtgagtttgttttttcatattacacattcctctccaatggaggagaaatgatttatccatgagtttggaagaataaactgggcttcaatggctcagcccctcctctctct

SEQ ID NO: 852779 - DNA, 120 bp, Artificial Sequence
  ENSG00000245275_78 (sequence is synthesized)
ccctgggctctagtctccaccagccccacggtaagcttaggggtggaaggccctgccccttgtgcgtctttcataccattataacacccagaagaattaacattgttccttaatatcatc

SEQ ID NO: 852780 - DNA, 120 bp, Artificial Sequence
  ENSG00000245275_79 (sequence is synthesized)
aaacatctagttggtttgcaaatttccctgatgttacgtctttctatagttggtttgtttaatacaggatcaaaacaaggtccacgtactgcatacagctcatgcgtctcctaagtctct

SEQ ID NO: 852781 - DNA, 120 bp, Artificial Sequence
  ENSG00000245275_80 (sequence is synthesized)
tttatacataagcttctgccctcctttttttttttccccttcgatttgtttgttgaagaaactgggctatttatcttataggagtccctgcagtctgcattttgctgcttgcatctctgt

SEQ ID NO: 852782 - DNA, 120 bp, Artificial Sequence
  ENSG00000245275_81 (sequence is synthesized)
ggtatcctttaaactgttcctctgtctgtccccctttagttcttgtaaactggtagttagatctataagcttgacctaattcaataagctattctgacagcctcttcaaaggtggtggta

SEQ ID NO: 852783 - DNA, 120 bp, Artificial Sequence
  ENSG00000245275_82 (sequence is synthesized)
gttgtctttccttttgtgataatcgatgcctaaatattttatttcatcaggagtttgaaaaacgattacattctaattctattactccatcttcatttaccagctgaaattcttctatag

SEQ ID NO: 852784 - DNA, 120 bp, Artificial Sequence
  ENSG00000245275_83 (sequence is synthesized)
agaaaactttaccacatcaactattcgttcaccccaaagtataggaaaggcagggtaagttcttgattctttacaagtctttagaatgagctggttccccagcatcctccaacgatggtc

SEQ ID NO: 852785 - DNA, 120 bp, Artificial Sequence
  ENSG00000245275_84 (sequence is synthesized)
aattatgttaactcacaaatggaaacataattaatgtgtttcaatcaaatgcagttattattcttactggttcccaaataaacccatctttagccaaaaggagtcttctcaggttggttc

SEQ ID NO: 852786 - DNA, 120 bp, Artificial Sequence
  ENSG00000245275_85 (sequence is synthesized)
ctgagtcctttggacatgatcagagtactgatagcttctttgttttacgataaaagatacgaaaatattccccaggcttaactcacacatttcctgccctaacctggaatcagccattct

SEQ ID NO: 852787 - DNA, 120 bp, Artificial Sequence
  ENSG00000245275_86 (sequence is synthesized)
gccaaagaacttttaatccttcatatcatcaatatcaccattcggatgctgcaacatgagcactaagggtgttccttactactaggttggttatagtttctatgcctttccagtggtcag

SEQ ID NO: 852788 - DNA, 65 bp, Artificial Sequence
  ENSG00000245275_87 (sequence is synthesized)
actaggttggttatagtttctatgcctttccagtggtcagaactacaaatatattttatttttta

SEQ ID NO: 852789 - DNA, 120 bp, Artificial Sequence
  ENSG00000245275_88 (sequence is synthesized)
agctgggactacaggtgcacgccaccctctgcctggctaatttttgaatttttttgtagagacaaggtttcaccaagttgcccaggctggtatgaatatattttaaacaatacattatga

SEQ ID NO: 852790 - DNA, 120 bp, Artificial Sequence
  ENSG00000245275_89 (sequence is synthesized)
aaacaatacattatgagtttaagcagaaattttatatttaacatatagaattactgagttttactgaactctaattttatattgtatctcctttgtattgagatataattcacataccat

SEQ ID NO: 852791 - DNA, 120 bp, Artificial Sequence
  ENSG00000245275_90 (sequence is synthesized)
ccataaaagttactcttttataatttagtagttcttaatatattcacagagttgtgcaaatataaccactgtctaattccacaacattttcatcactcctaaagaaaccctgtgtgtact

SEQ ID NO: 852792 - DNA, 120 bp, Artificial Sequence
  ENSG00000245275_91 (sequence is synthesized)
agcggtcattccccatcttcccctcctgccagctagctgctagcaatccctaatctgctttctgtgttcatggattttcctaacctggacattttatataaatggattcatatttgaggc

SEQ ID NO: 852793 - DNA, 120 bp, Artificial Sequence
  ENSG00000245275_92 (sequence is synthesized)
tttttgtgtctggccacacttggtgtaatgttttcaaagttcatctatgttgtagcatgcatcaatgcttcatttctttttcatagctgaataatagcccattgtatgaattcaccacat

SEQ ID NO: 852794 - DNA, 120 bp, Artificial Sequence
  ENSG00000245275_93 (sequence is synthesized)
tttatttatctattcatcaattaatggatatttgggctgtttcccccttttggctattatgaataacatgaatatgaacattcatgtgcaagtttttatgtagacatgttttcaattctg

SEQ ID NO: 852795 - DNA, 120 bp, Artificial Sequence
  ENSG00000245275_94 (sequence is synthesized)
tgggtacatagcaaacagctggattgctgggtcaaaggtaactccatttttaactttgtaaagacctgtcaaatgattttccaaagtgataacaccatttcacattcccaccagcaatgt

SEQ ID NO: 852796 - DNA, 120 bp, Artificial Sequence
  ENSG00000245275_95 (sequence is synthesized)
gaaatgagatttccagtttctccacatcctcaccaattcttgctattgtccatctttttgattatagctatcctagtgagtgtgaagtggtatctccttatggtttaatgactaatgatg

SEQ ID NO: 852797 - DNA, 120 bp, Artificial Sequence
  ENSG00000245275_96 (sequence is synthesized)
ttgagtatctttccatatgcctattggccatttgtacatcttctctggaaaaatggctagtaaatgtatattttactttcaggtttttttttttgctagtgtgtagaaatacaattgatt

SEQ ID NO: 852798 - DNA, 120 bp, Artificial Sequence
  ENSG00000245275_97 (sequence is synthesized)
tttgtatattaattttgtatcctgcaatcttgctgagcacatttattagttctaataattttgtataaactccttagaatttcttaggtacaagataatgtcatctacaaatagaggtaa

SEQ ID NO: 852799 - DNA, 120 bp, Artificial Sequence
  ENSG00000245275_98 (sequence is synthesized)
ttttacttattcctttccaatatagatgactttttatgtctttttcttgtctaattgtcttggctggcaactccagtacaatgctaaacataaggcaagagcacacatccttatcttgtt

SEQ ID NO: 852800 - DNA, 120 bp, Artificial Sequence
  ENSG00000245275_99 (sequence is synthesized)
cctgatcttaggaggaaaagctttcagtctctcaccagtaagtaagatgttagtgtgggtttttcacagatgcactttatcagcttggagcagttcctttctattcctagtttgctgagt

SEQ ID NO: 852801 - DNA, 120 bp, Artificial Sequence
  ENSG00000245275_100 (sequence is synthesized)
gttttaatcctcgaaaaagaagtgttggattttgtcaaatggctttttttttttttgcatctactgagatgattatgtaagttttgtcctttattttattaatatgatgtatttacactg

SEQ ID NO: 852802 - DNA, 120 bp, Artificial Sequence
  ENSG00000245275_101 (sequence is synthesized)
ggattacgggtgtgagccaccgctcccagccattctttatgtataattttgtagtctttattcaaggcatactttatcataatctttccccatattgctatgtagttttcacagttgcca

SEQ ID NO: 852803 - DNA, 120 bp, Artificial Sequence
  ENSG00000245275_102 (sequence is synthesized)
ttttttatgtagtacagtgcagtttctgtagtacagtacactgtggtgctaaagacagttggctttgctgtcagaactgggttcagatctggactccacccatgacttgttataacatgt

SEQ ID NO: 852804 - DNA, 120 bp, Artificial Sequence
  ENSG00000253121_0 (sequence is synthesized)
aaatatgctccagctataagtaatcttcttctagaattttaacatgaataagtaaaattcttccgatatgagtattggcaagctaaagaacaggcagggaatcttaactagatttccaca

SEQ ID NO: 852805 - DNA, 120 bp, Artificial Sequence
  ENSG00000253121_1 (sequence is synthesized)
gactattctgaaaaacagttaaaactttccatgggtgtatgtatttgcccaggaaagtatccaaaactttcaaatataacatattttcagaggtatctgggacaaacaaataaaaataca

SEQ ID NO: 852806 - DNA, 120 bp, Artificial Sequence
  ENSG00000253121_2 (sequence is synthesized)
atatcttagtggtcaaccctgaaggttctgcacagactcaaacaccaacaaacagattttgaaaaaaaagaaactgacgttttcaaggcgatagtgccagctgtttcaaaccaggcccct

SEQ ID NO: 852807 - DNA, 120 bp, Artificial Sequence
  ENSG00000253121_3 (sequence is synthesized)
tattcttactagagacttccatgaaaaccacagcaccttgaaacattccttttctgtataaactgagttctggcaacacacaaccaaagtactctgacctaatacatgtacttcccacca

SEQ ID NO: 852808 - DNA, 120 bp, Artificial Sequence
  ENSG00000253121_4 (sequence is synthesized)
ggtttttgcaattattaagtgagacaatggaagaaagagctttcaaaagcacaaagcattctacaagttttaagatgaagactaatcatcagaaaaactaacttcatgattagaaagttg

SEQ ID NO: 852809 - DNA, 120 bp, Artificial Sequence
  ENSG00000253120_0 (sequence is synthesized)
cccagtctgttctgactcagcctcgctcagtgtccaggtctcctggacagtaggttactatcttctgcactggaaccagcagtgacattgggggttatgaccttgtctcctggtgccagt

SEQ ID NO: 852810 - DNA, 120 bp, Artificial Sequence
  ENSG00000253120_1 (sequence is synthesized)
taattggccctcaggggcccctggttgcttctctggctccaagtctggcaacacggcctccctgaccatctctgggctccaggctgaggacgaggctgattattactgcagctcatatgc

SEQ ID NO: 852811 - DNA, 120 bp, Artificial Sequence
  ENSG00000255983_0 (sequence is synthesized)
ctttcagtttcattccaacatgcaggagaaaaggagcgattgacatgacaagaactgagatggggcagttctgatacaactgacaaagaattagcagtacagagcatgagaccctgcata

SEQ ID NO: 852812 - DNA, 120 bp, Artificial Sequence
  ENSG00000255983_1 (sequence is synthesized)
aagacaaatgggagaagccgaagcgcaaggtgtcagcaggtttcgtctcttctgaggcctctctccttggcttgcagatggcctccttctcgctgtgtcctcacgtggccttttttctcc

SEQ ID NO: 852813 - DNA, 120 bp, Artificial Sequence
  ENSG00000255983_2 (sequence is synthesized)
atgtgcgtgcatccgtcgtgtctctcttattcttggaagaaaaacatgtgccttctgctaactgtctggtgtgtccagttctgaatgtcaagaccaagtcctgaaaatgggtactgggga

SEQ ID NO: 852814 - DNA, 120 bp, Artificial Sequence
  ENSG00000255983_3 (sequence is synthesized)
cgacttaagagcatttgtcaagcaccttgtatgtgtcaagctgatgataggcattgatgctacacagatggttataacctggtccagcaaaatctcttgctgtctggtagggaccaggca

SEQ ID NO: 852815 - DNA, 120 bp, Artificial Sequence
  ENSG00000255983_4 (sequence is synthesized)
aatacaaatggatgagttaaagtcctgcataatagatacctcattggaactatgaaccaatgactccagagaaagagccacacctgactgcctgtcatcttctgacagaggatgtcatgt

SEQ ID NO: 852816 - DNA, 120 bp, Artificial Sequence
  ENSG00000255983_5 (sequence is synthesized)
acatttacgataaccaagcatccaaaagctatgaaaacacagaactggcagccaatccattaaatcactcaaacatctattaactagcaattgtataaaatttgctggatttgagcactg

SEQ ID NO: 852817 - DNA, 120 bp, Artificial Sequence
  ENSG00000255983_6 (sequence is synthesized)
taagggtatagaagggcaaatgaagatcaataacaggagaggaaagagaagagtaaaacagttagcatctgttgatggccaggcatcatattaagtatttcatatatattatttaattct

SEQ ID NO: 852818 - DNA, 120 bp, Artificial Sequence
  ENSG00000255983_7 (sequence is synthesized)
gaaaggatctttttgtaagttaagaagctgaggtgacatgagttgctcaagttcacacagacagcaaagggtgagccattgcaatgcaaagcccatgtccaattcctcactccttgctac

SEQ ID NO: 852819 - DNA, 120 bp, Artificial Sequence
  ENSG00000255983_8 (sequence is synthesized)
tctagcaagagttctgggggtaagttttgtaaggagagaaagaaaagagagaaaatccttgacagtaagtgaagcaaaagcctggatatctgaatgggaggagacaccgttgcagagccc

SEQ ID NO: 852820 - DNA, 120 bp, Artificial Sequence
  ENSG00000255983_9 (sequence is synthesized)
atccgtcctgattttcccagaggcacgggagcagagcacgtccccaccgaacctaagcacgcggaaagatgcccacagattgctgcatttgtatttttactgagccagcattgaggaatt

SEQ ID NO: 852821 - DNA, 120 bp, Artificial Sequence
  ENSG00000255983_10 (sequence is synthesized)
ccacagacacatatgttgtgtacatacgtgggctatcactttttaggtggatgtacgtgttaggattatcgaaataagcatccatttaaaagaatgatttgaatttgtacctttctgtca

SEQ ID NO: 852822 - DNA, 120 bp, Artificial Sequence
  ENSG00000255980_0 (sequence is synthesized)
acaggaagctgaaatgcatattgctagatagaagaaccaatccgaaaaggctactttctctatgattccaactacgtgactttctggaaaaggcaaaactatggagatggtaaaaagaga

SEQ ID NO: 852823 - DNA, 120 bp, Artificial Sequence
  ENSG00000255980_1 (sequence is synthesized)
aaaggatttctgctttcaaatccgctgtttcctgaggctgggtgctgagttcagctgcccctggaggagcagcagctctgggccgctggcagggccgcatcctcttcagtctggacaaat

SEQ ID NO: 852824 - DNA, 120 bp, Artificial Sequence
  ENSG00000255980_2 (sequence is synthesized)
tccctgcagccaggggaagtggcccatgcctgctgtcctggtatgcaacatcggacctgcatgctggaatttgacccttttcctgcctgacacccagcaaaataaaccccagggaaggga

SEQ ID NO: 852825 - DNA, 120 bp, Artificial Sequence
  ENSG00000255980_3 (sequence is synthesized)
tcaatgcctgcaaccggaatccagaagaaagaggagtgacagataagccctgggtcagaggccagtgaggtcaggacctcccagggacggacacacagcccaaggtttgggtgtgagatt

SEQ ID NO: 852826 - DNA, 120 bp, Artificial Sequence
  ENSG00000255980_4 (sequence is synthesized)
tcagagccccaggtaataaaaataaaagagttaaggtgcctagcagctcagtccctcacagtgctacctggggcaaggatggaaattcacctcagtttgctgtggttgctattggctgaa

SEQ ID NO: 852827 - DNA, 120 bp, Artificial Sequence
  ENSG00000255980_5 (sequence is synthesized)
tcatgtcctcccaaaattcatatgttggagtgtacctcgggatgtggtatctcaggatacctcagtacctcgggatgtggcgttgtttggagaaagggtcgctagagaggtaattaagtt

SEQ ID NO: 852828 - DNA, 120 bp, Artificial Sequence
  ENSG00000255980_6 (sequence is synthesized)
aaaatgaggccatgagggtgggcccaaatccaatttaattggcatccttctaaaaaggggaaatttggacacagagagagacacaaacagggagggcgccctgggaacaggaaggcggcc

SEQ ID NO: 852829 - DNA, 120 bp, Artificial Sequence
  ENSG00000255980_7 (sequence is synthesized)
acctccaagccaaggaggtcctggagcagatcctcgtctcagagctccagcgggaaccacccctgcccaaccttcattttgaacttctggcctccagagctgtgagacgatacacttctg

SEQ ID NO: 852830 - DNA, 120 bp, Artificial Sequence
  ENSG00000255980_8 (sequence is synthesized)
tggtttaagccgtgtagcctgtggcacttggttatagcagccccaggaagcccaacacagtggccaaaacagagaggacagctggcttgctaacgtcacacagcacactgacgagcaggg

SEQ ID NO: 852831 - DNA, 120 bp, Artificial Sequence
  ENSG00000255980_9 (sequence is synthesized)
tttgtatgtattacctaacctctctgtgcctcagtttaccaagctataaaatgggcataatgacagcacctgcctggtgatgctcttggagggatgaaaggaggcaacggtgtgggcatc

SEQ ID NO: 852832 - DNA, 120 bp, Artificial Sequence
  ENSG00000255980_10 (sequence is synthesized)
tggacggcaccaggcattgccctgagagctggccatgcggggaatgctccatccttacgccagccaggtgttgccacccctctcttgctgatggagaccaggagggtcgggacagaaggc

SEQ ID NO: 852833 - DNA, 120 bp, Artificial Sequence
  ENSG00000255980_11 (sequence is synthesized)
cttgcccaaggtctcacagccaggagcctgcctccactggtccctgtgtggccagtgctgccctgggggctgctgctgtgcactggagggtcagctgcatggaggagccagaggagatgg

SEQ ID NO: 852834 - DNA, 120 bp, Artificial Sequence
  ENSG00000255980_12 (sequence is synthesized)
tgccgaggacagagcttgcggccctgtacctggctcccagaggaatgggtcttggagctgctctgcacagacactgaccttgaggagagacaggggcgccactccctcctccactcgctc

SEQ ID NO: 852835 - DNA, 120 bp, Artificial Sequence
  ENSG00000255980_13 (sequence is synthesized)
aggtgagcattcaaagcgtcataggtaaccaggagcactagttggcatggcgatttcagaggtgagtccaatgtggaccctggccctgggaaggtcacagtttgatggaagatgccagac

SEQ ID NO: 852836 - DNA, 120 bp, Artificial Sequence
  ENSG00000255980_14 (sequence is synthesized)
tcacacattcactcactcactcattccctcgtgtattcattccgcaaagcttcactcattacctacctggggccaggactcagtctcagagccaaggagagcgtggttgggaggagactc

SEQ ID NO: 852837 - DNA, 120 bp, Artificial Sequence
  ENSG00000255980_15 (sequence is synthesized)
agacgctttccagcatccctgcccccaggtgtctacacacctgtgtactccccaacttggagtgtggcagggctgcaaagagggtggatgtgctcccgtggtgaggttactttatatcgc

SEQ ID NO: 852838 - DNA, 120 bp, Artificial Sequence
  ENSG00000255980_16 (sequence is synthesized)
aaaggtgccggacttctgcaggtgtaattaaggtcctaaccagctgaccttgagttaatcaaaatggagatgatcctgggtgggcccaagctaatcaggtgagccctttcaaaatggcct

SEQ ID NO: 852839 - DNA, 120 bp, Artificial Sequence
  ENSG00000255980_17 (sequence is synthesized)
tgaagtcagagactctcctgcaggatttggagatccagccccatgaggaacaggggcaaggaaatgcaatcttccacaaccgagagagcttggaagagggtcccaaacctcagaggagac

SEQ ID NO: 852840 - DNA, 120 bp, Artificial Sequence
  ENSG00000255980_18 (sequence is synthesized)
cccagctccggttggcaccttgactgcagccccatgagacagaagacccagctatgccatgtcctggctcctgacctgcccaaactttaagacaatagataaatgccattttaagctttt

SEQ ID NO: 852841 - DNA, 120 bp, Artificial Sequence
  ENSG00000254635_0 (sequence is synthesized)
gcgcagcgggagggggtgctctcgggcgagctctccggccgcggcccccgcccctgcgctgtcgggcggggaggtcggaaaccccctggcgagaccacgggcggacgcttcccgaagagc

SEQ ID NO: 852842 - DNA, 120 bp, Artificial Sequence
  ENSG00000254635_1 (sequence is synthesized)
gagctgcctgggctgcagccgcggaagctgcgttctggggagcggggagcgtgctccggcgccttcgggccgctgctggaagccggaaccgagcccgggccgctgcccctcaccggacgc

SEQ ID NO: 852843 - DNA, 120 bp, Artificial Sequence
  ENSG00000254635_2 (sequence is synthesized)
cgcgcgccaccggccctccgcggggcaggggctgctgcgagctcgccgggcgccctttagacagtcgtccttgtctactccactaccaaatgttgaagttcttcaagaatcagtcctttg

SEQ ID NO: 852844 - DNA, 120 bp, Artificial Sequence
  ENSG00000254635_3 (sequence is synthesized)
gaggcatttaaggaaatctgtttctcttttggatcactagctgcaaattaagctaacagaacaggagctcagctggtcacacacagcaacgaatacagactttataaagttcagaaaagt

SEQ ID NO: 852845 - DNA, 120 bp, Artificial Sequence
  ENSG00000254635_4 (sequence is synthesized)
taccaaacagtggtaaccataacaagtaccaacaatgaactatggggagggaggagaatctgatttccagagttaccacattataatactattcaaaatgtcacatttttagcaaagatt

SEQ ID NO: 852846 - DNA, 120 bp, Artificial Sequence
  ENSG00000254635_5 (sequence is synthesized)
acatgacaaggaaaaaccagaaaagtatggcccatacacaggtaaaaaaagaaattaatagaaactacccctgaagaagcacagacttcggatgtacaaaacaaagacttttcatcaact

SEQ ID NO: 852847 - DNA, 120 bp, Artificial Sequence
  ENSG00000254635_6 (sequence is synthesized)
cttttagatatgctagaagagctaaaggaaaccatggacagagaacaaaaaaattaggaaagcaatgtctcatccaatacagaatatcaataaagagattgaaattgtagaaaagaacca

SEQ ID NO: 852848 - DNA, 120 bp, Artificial Sequence
  ENSG00000254635_7 (sequence is synthesized)
aatagaaattctggagttgaaaagtattataactaaaactgaaaattcactagaggtattcagcagcagactggagaagtcagaagaaagaatcaacaggcttcaagataggtcaattaa

SEQ ID NO: 852849 - DNA, 120 bp, Artificial Sequence
  ENSG00000254635_8 (sequence is synthesized)
gattatacagtctgaggagcagaaaggaaaaagaatgaagaaaaatgaacagagcataaaagacctctgggactctatcaagcataccagtatatgcatgaggggagtcccagaaggaga

SEQ ID NO: 852850 - DNA, 120 bp, Artificial Sequence
  ENSG00000254635_9 (sequence is synthesized)
aaaatgtcccagctttgatgaaatacatgaatctagatattcaagaggctcaaagaaccctaaatagggtaaactcaaaaagacccacaccggaatgcaaaagtgagctgggtgtggtgg

SEQ ID NO: 852851 - DNA, 81 bp, Artificial Sequence
  ENSG00000254635_10 (sequence is synthesized)
taggtgagccgggattgcgccagtgcactccagctgggcgacagagcgagattccatctcgaaaaaaaaaaaaaaaaaaaa

SEQ ID NO: 852852 - DNA, 120 bp, Artificial Sequence
  ENSG00000254635_11 (sequence is synthesized)
aaaaaaaaaaaaaaaaaaaaaactattgctgcagtcattcagatggaaatggggaaagaataatattaactgatttcaaaaaggacttgaagatgtgaatcatctattttgctgaagaaa

SEQ ID NO: 852853 - DNA, 120 bp, Artificial Sequence
  ENSG00000254635_12 (sequence is synthesized)
tattttgctgaagaaatcttaactctttgaaattactttttgttgctgttgtcatactcttaggtgccaaactgcggtaaattttttatcagtgaagtggaagcatgtgttttgttgttt

SEQ ID NO: 852854 - DNA, 86 bp, Artificial Sequence
  ENSG00000254635_13 (sequence is synthesized)
gttgggagttcgaggccagcctgaccaacgtggagaaatgccatctctactaaagatgcaaggattggccgggcgtggtggtgcgt

SEQ ID NO: 852855 - DNA, 120 bp, Artificial Sequence
  ENSG00000254635_14 (sequence is synthesized)
aaactctgtctcaaaaaaaaagaaaagacagtagcttatgttcatgtcaagcacctctcatcacagtctagttccaaggaaaaaattcccagcgttttctacattcggtgctgcgtcatc

SEQ ID NO: 852856 - DNA, 120 bp, Artificial Sequence
  ENSG00000254635_15 (sequence is synthesized)
tgaaatcggcacattccatggaggaaggagtcctgctttgttgcatgtatcctagggtttaatgttggtaaatgagtcactctagcatttgtagaaggctccctgagactcctgcagcag

SEQ ID NO: 852857 - DNA, 120 bp, Artificial Sequence
  ENSG00000254635_16 (sequence is synthesized)
tcgaccaagcccaaggacataattgaatctggagagtcctggggccttgttttgaaaaagacttgaaatacacataggaagaaaggcataaaaataaatgttcacttgtctctgctgtga

SEQ ID NO: 852858 - DNA, 120 bp, Artificial Sequence
  ENSG00000254635_17 (sequence is synthesized)
tcccaccctcggccttcctccccgcaccgcgcgggtccggaacaccgccctcggcaaacctcggctggctccggcctttctcctcctctgaggcctggatcttctcttcgcgaccagtct

SEQ ID NO: 852859 - DNA, 120 bp, Artificial Sequence
  ENSG00000254635_18 (sequence is synthesized)
gccctttccttcttttcctcactcgcgagtcggccaccgccgttcccgtttagggatagtctcgctcgggcgcctgctcgaggctgatctcaggggctccgggctgcgcagggagggagc

SEQ ID NO: 852860 - DNA, 120 bp, Artificial Sequence
  ENSG00000254635_19 (sequence is synthesized)
ccggccagaaacggctaataggaagggctgaggggttctgtgttcaaggcagaaggccgtgcgtcagggcggccctcagcggagatgcgtgcacggagcggggagcgccgctcggggcag

SEQ ID NO: 852861 - DNA, 120 bp, Artificial Sequence
  ENSG00000254635_20 (sequence is synthesized)
ggaatgaaagcggcgcttgagactggaaatttagggagatgagttccttgggaacaacgctgaaccatctcactgccccaccctaccccttgttatttttttttgagacaggtctcgcgc

SEQ ID NO: 852862 - DNA, 120 bp, Artificial Sequence
  ENSG00000254635_21 (sequence is synthesized)
tgtcgtccagtctgagtgcagtgacgcgatcacggctcactgcagcctcgacctccggggcttacgggtcatcccacctcagccctctaagtagctggcaccacgggcatgcaccaccac

SEQ ID NO: 852863 - DNA, 120 bp, Artificial Sequence
  ENSG00000254635_22 (sequence is synthesized)
atgcaccaccacacccggctaattttttaaaaaaagtttttccggagatagggtctcgctgtgttacccaggctggtctcgaacccctggcctgaagcgatcctcccgcctcggcctccc

SEQ ID NO: 852864 - DNA, 120 bp, Artificial Sequence
  ENSG00000254635_23 (sequence is synthesized)
ttacaggcgtgagccactgcgctcggcttttcacccctttctaacgttttccatccctttctaacgttttccatacccagcggtgccctgcccaccctctctttatctctcacttttccc

SEQ ID NO: 852865 - DNA, 120 bp, Artificial Sequence
  ENSG00000254632_0 (sequence is synthesized)
ggcagacacagacacagacagtgactgtgggtgtgaccagcactgcgacagagggaaggaggcactctggctggggaagccagggcagatggcatctgatctgcttcaaggatgctcaaa

SEQ ID NO: 852866 - DNA, 120 bp, Artificial Sequence
  ENSG00000254632_1 (sequence is synthesized)
ggctcctgactgtggagagctaaagctgccaggagctgcctgtgcttgccaagtggttgcagatgtttcctccctactgctctgactttgccaggagcataaattcagtgaatctacgtg

SEQ ID NO: 852867 - DNA, 120 bp, Artificial Sequence
  ENSG00000254632_2 (sequence is synthesized)
actctcagtgatggcatcattgcctaatatccacccagcttctgcttgaaaacttccagagaactccccacatctccacggcttccttctaccttcaggtagcaggaagttctccctcac

SEQ ID NO: 852868 - DNA, 120 bp, Artificial Sequence
  ENSG00000254632_3 (sequence is synthesized)
aggtactgggcaccctggccaggcctcatgccagactccaggatcatggaggaaccagtgttgtccagcaaggactggacaggcataaagtcctgtagctctgtctgactccagactcaa

SEQ ID NO: 852869 - DNA, 120 bp, Artificial Sequence
  ENSG00000254632_4 (sequence is synthesized)
taataatcccagctgccaccgatagccccttctgggtgcccagccctgctgcctcatcaaataccagcaatatctacctcactgaatccccacaacaaccctgccagatagtaactctca

SEQ ID NO: 852870 - DNA, 120 bp, Artificial Sequence
  ENSG00000254632_5 (sequence is synthesized)
tccccatgttatagctgagaaaactgaggcccacagcaattagatatcttcccaaaggtcacacagttggtatgcgtggagcctgattaaaaccaatgtggctactagcctctcactggg

SEQ ID NO: 852871 - DNA, 120 bp, Artificial Sequence
  ENSG00000254632_6 (sequence is synthesized)
tttctctcccagtgctcaaaggctcctgactgtggagagctaaagctgccaggagctgcctgtgcttgccaagtggttgcagatgtttcctccctactgctctgactttgccagggtttg

SEQ ID NO: 852872 - DNA, 120 bp, Artificial Sequence
  ENSG00000254632_7 (sequence is synthesized)
ttggtgtcttggggtaagaggctcttcaggctgaaaggtgagcggaggctgtcagaagctggggagatctgggtcacccaaagcaaacatgagcccttactcagatctcacagcaaagac

SEQ ID NO: 852873 - DNA, 120 bp, Artificial Sequence
  ENSG00000254632_8 (sequence is synthesized)
gatcaagcatggaaactggagggggaaagaacagaactcacaggggtagaccattggctctaagacacccgcgcttgggccttaatgtacagctcagttaatcttcacctttgccctgag

SEQ ID NO: 852874 - DNA, 120 bp, Artificial Sequence
  ENSG00000254632_9 (sequence is synthesized)
aggttaaattattatccccattttacaggggagaaaacaagctgggagaggaggaatgacttgctcatggttgtgcagctagtagaaaattctaccctcttgtggtggcaccattgtttc

SEQ ID NO: 852875 - DNA, 120 bp, Artificial Sequence
  ENSG00000254630_0 (sequence is synthesized)
cagatatttttgaaaagagcattcagatgtaaaatgctgtattgaccctggagcgtgacattaatagagtgagaaacatgttgttgggcagattcagtaaatatcttagagtttctctca

SEQ ID NO: 852876 - DNA, 120 bp, Artificial Sequence
  ENSG00000254630_1 (sequence is synthesized)
catctggagtggtcatttcaagtgcagcttcctgggacccagaagcagactatgggggtggggcccaggaccctgcattctgacaaacccctcactcccacccaaggtgattcttaggaa

SEQ ID NO: 852877 - DNA, 120 bp, Artificial Sequence
  ENSG00000254630_2 (sequence is synthesized)
cactaaagttgggaaccagtgtggagaaaataatgctaggtgcattctaggatctaaagggtaaaacattacacttgggtaaagaggttttgtgtacttattataaaacaactgtagcct

SEQ ID NO: 852878 - DNA, 120 bp, Artificial Sequence
  ENSG00000254631_0 (sequence is synthesized)
taccagggagtgataaaaggccagcaactacctagcgacagaaggaggaaacacaccagaccagaactaaagcggatagcggttagaaacgcccagtaagggtgccagaaaccactttca

SEQ ID NO: 852879 - DNA, 120 bp, Artificial Sequence
  ENSG00000254631_1 (sequence is synthesized)
gaaagagggaagacagcacttgaaaggaaagagggtaaagaagaggaagggaggttacaattgagagcactgcagaaggaagcgatgcagatgttgccgcccggctctggcagtccgaag

SEQ ID NO: 852880 - DNA, 120 bp, Artificial Sequence
  ENSG00000254631_2 (sequence is synthesized)
gatggggtttcaccacgttggccaggctcgtctcaaactcccgacctcaagtgatacgctcgccttggcctcccgtggtgttgggattataggcgtaagccactgcacccggcctgaaat

SEQ ID NO: 852881 - DNA, 120 bp, Artificial Sequence
  ENSG00000254631_3 (sequence is synthesized)
cctgaaatactacctttattatacagctagttctaacacatcttggtctttttctaggttctttgttttattacttatttagctatctctgcaccaataccacattgcttcacatattac

SEQ ID NO: 852882 - DNA, 120 bp, Artificial Sequence
  ENSG00000254631_4 (sequence is synthesized)
agctgctttcctttgcctgcaagaggtgtcaagatgagttttgcctgacttctttgatgtcctgaactttctgtagtccttttttttcttcaatttgttcattataaatttagcttagca

SEQ ID NO: 852883 - DNA, 120 bp, Artificial Sequence
  ENSG00000254638_0 (sequence is synthesized)
gcacatgttgatgtggttgatgtgtaaaaaagccaactcatacaaggttctggcttcatctttataaaatagtccggaaatttcagagaaagatgaatctgattttccaagagaggacag

SEQ ID NO: 852884 - DNA, 120 bp, Artificial Sequence
  ENSG00000254638_1 (sequence is synthesized)
ctgtggactatctggcactggagactaacaggacaaaataaagaaaacagactcttcagcagtataaagttttcatcaagtcaaatatattcactttaaagtgactgtgctttattctga

SEQ ID NO: 852885 - DNA, 120 bp, Artificial Sequence
  ENSG00000254638_2 (sequence is synthesized)
cgtgctttcatgttaattggcccaattggactctacagttggaaggtgaaaacttactatttcaacttgagtcacgtatgtattcttatcatatacttcttaaaggtactattttttttc

SEQ ID NO: 852886 - DNA, 120 bp, Artificial Sequence
  ENSG00000254638_3 (sequence is synthesized)
ttctgatagtcaccacaccaagcacttccagccaccctgccacagacttcctttgtaatcactgttgaaggacatgatgtttttatgacttcccgaaatgaaaaccctatcttgttttta

SEQ ID NO: 852887 - DNA, 120 bp, Artificial Sequence
  ENSG00000254639_0 (sequence is synthesized)
ccgggaggtcccggtcccggcagcccgcggccgcgtccttggccctcctccgggggaacctcgttcattccaaactctggaaggccggctgtccttcggttactgataaggacgcgagct

SEQ ID NO: 852888 - DNA, 120 bp, Artificial Sequence
  ENSG00000254639_1 (sequence is synthesized)
cttggaaacccgggcacagagaggttaagtaacttgccccagggcacacagctagctgatgtcagtgccagaattccaaccgcggctgtcggaccccatgccatcctcatgtcaacccac

SEQ ID NO: 852889 - DNA, 120 bp, Artificial Sequence
  ENSG00000254639_2 (sequence is synthesized)
aaatttaagtataataccttgcccaaggtcacctagctggaaaatggacgagacagaaagcgaacccagggctcctttctgtacgcagaacccgcggtcttggccataggcgatgccact

SEQ ID NO: 852890 - DNA, 120 bp, Artificial Sequence
  ENSG00000254639_3 (sequence is synthesized)
tccgacagcccagcagggtctggccctgggtcccagaggcgcagcccctgcggggtttggatgggttcctgcggcctccgatccgctggtgaattgggtgtgtctgagcatcgtccccgc

SEQ ID NO: 852891 - DNA, 120 bp, Artificial Sequence
  ENSG00000254639_4 (sequence is synthesized)
tcagcccgcaggcgtaggatagggaggcgtctccgggaatctactccgggacgggtccgcggtcctcagtcgggatggagcgggggcggaggcagccggagggaactggagtccccattg

SEQ ID NO: 852892 - DNA, 120 bp, Artificial Sequence
  ENSG00000278017_0 (sequence is synthesized)
gcccctatgatttattcccccacttcacttgacacgtcctgagaagcagtgatgtgctgacgttaatggcaggatgcccaacctcactttgtccatccctcccagcactcactggttgca

SEQ ID NO: 852893 - DNA, 120 bp, Artificial Sequence
  ENSG00000278017_1 (sequence is synthesized)
ctgcatgcatccctcccctttctctacttgccctccaacacgcttattaaaaacaaaatttaaagaaagaaaagggaaagaaaaaaagactttcagcagttaaaatcagaaatcaagtac

SEQ ID NO: 852894 - DNA, 120 bp, Artificial Sequence
  ENSG00000278017_2 (sequence is synthesized)
ctttgttggaatagtatgaatggaatgatatgaggttccactgtgggacattttctttagacctgcaatttaaggctatctttacaatattgtatgttattacaataacattttaaataa

SEQ ID NO: 852895 - DNA, 120 bp, Artificial Sequence
  ENSG00000278011_0 (sequence is synthesized)
agataaggactaagagtatgtaggatgactaggacaagaacaaatggcatgtgatggtaaatgcagaatgtctttgtctttacaaaagtgcaatattgtctatacttagacgaagatgct

SEQ ID NO: 852896 - DNA, 120 bp, Artificial Sequence
  ENSG00000278011_1 (sequence is synthesized)
cacaaataaattcaagtttatgttattatttaaaaaatcccaaggcatacaagtatttttggataaaataaatatatctgtgaatctattgagaataaaggtagcatgttaaaactccca

SEQ ID NO: 852897 - DNA, 120 bp, Artificial Sequence
  ENSG00000278012_0 (sequence is synthesized)
ttatcattctgtgcccgagtggacagatggtgaaagatatttttagattctgaaatggtaacttcctattcttggtaggaagcttcatcccccttttccttcagcctaaagtgggccaga

SEQ ID NO: 852898 - DNA, 120 bp, Artificial Sequence
  ENSG00000278012_1 (sequence is synthesized)
tgcccctcgactcactggctatccccccattcagaatccacttacaagaaactaatacttctcttctttgttaagcataaactgagtttccctcaaatagggcaaaaatggccatgggtg

SEQ ID NO: 852899 - DNA, 120 bp, Artificial Sequence
  ENSG00000278012_2 (sequence is synthesized)
gtttcttggatatggataaaaggactagctatttctactatctcccatttgcaaaatgaggaggctgggatgagataagtttgtagggataacaatctaatagctcttaggttgaatgtg

SEQ ID NO: 852900 - DNA, 120 bp, Artificial Sequence
  ENSG00000278012_3 (sequence is synthesized)
gcttgtggaagtgttttgtgtggcttgcatagtattttaaaaacccagagtcgtagcttccctttaaaaaaattggatctagcagtatcaatcctgtaacaatttagaaagagtctatgt

SEQ ID NO: 852901 - DNA, 120 bp, Artificial Sequence
  ENSG00000278012_4 (sequence is synthesized)
gctctaatttgtccatctttccctttgatcatatctgtactatttcacttagacatgaaagccctaatttacagttctataacaattattttattaaacactgactttgtgccaagccta

SEQ ID NO: 852902 - DNA, 120 bp, Artificial Sequence
  ENSG00000278013_0 (sequence is synthesized)
ccggagacttgtcaggtagagacagggtgcgactgggcgagacgtatctcatttcttccgggcctttgctcaaatgtcgccttatcagagggctttcccttcaaacttagcccttaggca

SEQ ID NO: 852903 - DNA, 120 bp, Artificial Sequence
  ENSG00000278013_1 (sequence is synthesized)
ctggggcttctgaagtccctgttctcaatctgctgcacagtattggacttcacatctgtttgtcttcacattcctcagcacttttcctttgtctgaatcctgtaagaccatcaactacag

SEQ ID NO: 852904 - DNA, 120 bp, Artificial Sequence
  ENSG00000278013_2 (sequence is synthesized)
actactgatcttccctaccagaagtccctgctttaggacctagagtatttgggtcttaaatctatctagggccttgccactacaggaactcattaaaaatgcattttgggtcccacccca

SEQ ID NO: 852905 - DNA, 120 bp, Artificial Sequence
  ENSG00000257582_0 (sequence is synthesized)
tgcctggtactggcgccccgtctccaagcccgtgcacgtagggcctagcagtgctgggctttttcctggggcatctctctccatccgcccgccaagggcctggggccctagcgaagagga

SEQ ID NO: 852906 - DNA, 120 bp, Artificial Sequence
  ENSG00000257582_1 (sequence is synthesized)
ctgtctgaagagaaccagaacagagctggaggtgaccatgaggcctgggccccaggcatccctgagagcagatgggggctcccagaccaggaacacccacccccactgcaccacacacag

SEQ ID NO: 852907 - DNA, 120 bp, Artificial Sequence
  ENSG00000257582_2 (sequence is synthesized)
tacttagggtagcggcggcccgcaggcagtagggagagaccctctgtgggcagggtcttgtgctggaaccgccattcctcagccacaggggcgcccggtgtctttctgctttaaatcctg

SEQ ID NO: 852908 - DNA, 120 bp, Artificial Sequence
  ENSG00000257582_3 (sequence is synthesized)
aaactattgacgccccaggcggagaccagtgtctacaaaccaggcggtccttgctgagaatgtgactttcgatttctcagggagaggacttcacagctatctttgtggatctgcccctcc

SEQ ID NO: 852909 - DNA, 120 bp, Artificial Sequence
  ENSG00000257582_4 (sequence is synthesized)
aaaaattttaaagataaaaagcgctatctactcgaaactgtctgctctcaaccgtaaaccggctccgtgggatctcagcctcctaggacgtagaaagcttcctccaaatctccccggggg

SEQ ID NO: 852910 - DNA, 120 bp, Artificial Sequence
  ENSG00000257582_5 (sequence is synthesized)
ctttctcacttggaaagaaacgtttactgcagtcttgtttaagtaacatgtttaagtaacgtcttatgcggccttcgccgcgtccagcctggaggtccgggccttcggtcggcactggga

SEQ ID NO: 852911 - DNA, 120 bp, Artificial Sequence
  ENSG00000257582_6 (sequence is synthesized)
gagcgatccccaaggttccgctagaccttcgctgcgtcagcggacggccagggctgctcaggaaaatgcccatgcatccctgggcttgtgaaagggaagctactctgtgccctgttccaa

SEQ ID NO: 852912 - DNA, 120 bp, Artificial Sequence
  ENSG00000257585_0 (sequence is synthesized)
agcacaaagaacaaaactatttaaagaccacacacataccctctcaaacaaatcacctccctttgggaaagcaacatgttcactgtgataattcagcatcaggacctgaggtggtgggaa

SEQ ID NO: 852913 - DNA, 120 bp, Artificial Sequence
  ENSG00000257585_1 (sequence is synthesized)
cagctttggctggtttgctgctctccaaggagctcctgtgccggccgcattggacaagcatctctgccctgcggcgcagagtctccaggaccagcagatggcggacttgcacagtccaca

SEQ ID NO: 852914 - DNA, 120 bp, Artificial Sequence
  ENSG00000257585_2 (sequence is synthesized)
tgctacggacagtttccacctgtactctcaagacttagaagccatatggatagaatgaaataggatcccatcattctcggcccatctcgcccatctcaagtcatttttgccctctcccca

SEQ ID NO: 852915 - DNA, 120 bp, Artificial Sequence
  ENSG00000257585_3 (sequence is synthesized)
cgtgcagtcagaagactggaagtggaggtgtgagcagtagatagagcagtttataagacaatgttaagaccatgatgaaaagacattagaggaagcaggaaaaaagaatatgcgacactt

SEQ ID NO: 852916 - DNA, 120 bp, Artificial Sequence
  ENSG00000257587_0 (sequence is synthesized)
gctccctctgcatcacagaggagacaagaactacatttccacaaattcccattaggaggcacttcggttgagctatgattccttatggatttcactggccctgtcttgtctgctcattta

SEQ ID NO: 852917 - DNA, 120 bp, Artificial Sequence
  ENSG00000257587_1 (sequence is synthesized)
cctgaggagagaagatgatcaaaatggaatggaaaggatcaaataaagaagagagatatttaatctatatatttaattatatatacttatttatgatattgttcattgttttattttacc

SEQ ID NO: 852918 - DNA, 120 bp, Artificial Sequence
  ENSG00000257588_0 (sequence is synthesized)
aggccagggtcacccaaagccgtgatgacagcccgcttttctctggtggttctactcaaccgctccactgaggtgatgggagaggtgaggggcccaggaggaaggtggagctcaaagatg

SEQ ID NO: 852919 - DNA, 120 bp, Artificial Sequence
  ENSG00000257588_1 (sequence is synthesized)
tcaaggatggaaaaggccgggaactaccggaaacaagcacaaaagaggcactcactgtcctggcttaggatgggggtacagaggctgtggtgtgtccgtgcctggcctgtaaggagcacc

SEQ ID NO: 852920 - DNA, 120 bp, Artificial Sequence
  ENSG00000257588_2 (sequence is synthesized)
tgccacgggacctgcaaaccctcaaagcagaagaaatgctgggcccctcttctctcttgagaaccctgtgatgatcactccaaggctccccgcagcttggaaagcatgtctgctcgggac

SEQ ID NO: 852921 - DNA, 120 bp, Artificial Sequence
  ENSG00000257588_3 (sequence is synthesized)
aatactcaacagaaactgctctgcactggccccacattagggggttcctatctacggtttctaaatgtgagccccttgacacctgctgtggcagacacaaccatccccatggaggcgctg

SEQ ID NO: 852922 - DNA, 120 bp, Artificial Sequence
  ENSG00000257588_4 (sequence is synthesized)
agaacaatgaagcacagacaggccagggtcacccaaagccgtgatgacagcccgcttttctctggtggttctactcaaccgctccactgaggtgatgggagaggtgaggggcccaggagg

SEQ ID NO: 852923 - DNA, 120 bp, Artificial Sequence
  ENSG00000257588_5 (sequence is synthesized)
cggcgctcatcggtggaggcgaagatgcagagcaccagctgcagtgtcaggaagagctccacagtcaccgcctggccagccgtcgtgctgttgctgagctggggacagagaagaggcgga

SEQ ID NO: 852924 - DNA, 120 bp, Artificial Sequence
  ENSG00000257588_6 (sequence is synthesized)
gaagatttgaactaatgagggactataaaggccaagaccttgttcttgccattttagagattcagaatataatctacaaagttagagattataattggcctccactgtgtgatttgattc

SEQ ID NO: 852925 - DNA, 120 bp, Artificial Sequence
  ENSG00000257588_7 (sequence is synthesized)
ccacaggtcgccacatagacttggtcatcaggagtgggcctggtgaggccaaagaaggagatttcatctgtcaaggttactcacacagggcagctgattctgtttcctagggcctgtgtc

SEQ ID NO: 852926 - DNA, 120 bp, Artificial Sequence
  ENSG00000257588_8 (sequence is synthesized)
ttaggctcttccatctctctaaccactagagtccctctgtcctcaagtcatcacagtaaactcccattatgtctcggaattctctttgcccaagcactcaggccctgccctggcagctcc

SEQ ID NO: 852927 - DNA, 120 bp, Artificial Sequence
  ENSG00000257588_9 (sequence is synthesized)
agaggaatgcccgggacctttgtgagctgagtgatgggtctccccatttgtggcagggggaatttgaatgtcttagggagagcccttcccctcctctcctgatatggggacttctgagtt

SEQ ID NO: 852928 - DNA, 120 bp, Artificial Sequence
  ENSG00000257588_10 (sequence is synthesized)
ccctgggagaagttgagggctggggtagaagtggtagggagctccgcctgtcttctggtaccttgggctgtatttctattaccactgccaagttgtggaagaaacagtacttattggcaa

SEQ ID NO: 852929 - DNA, 120 bp, Artificial Sequence
  ENSG00000232931_0 (sequence is synthesized)
tgaggattgcttggctattagggctctttttttttttggttccatatgaattttgaaatagtttgctctagttctgtgaggaatgccattggtaatttaatagggataacttgcatctgt

SEQ ID NO: 852930 - DNA, 77 bp, Artificial Sequence
  ENSG00000232931_1 (sequence is synthesized)
gaatgccattggtaatttaatagggataacttgcatctgtaaattactttgggcagtatagccattttaatgatgtt

SEQ ID NO: 852931 - DNA, 120 bp, Artificial Sequence
  ENSG00000232931_2 (sequence is synthesized)
tagctgtattcctaggtattttattttttctgtgtgtagcaattatgaatgggattatgttcttcatttgactctctgctttactgctaggaatttttgcacattgattttgtatgctaa

SEQ ID NO: 852932 - DNA, 120 bp, Artificial Sequence
  ENSG00000232931_3 (sequence is synthesized)
tgactctctgctttactgctaggaatttttgcacattgattttgtatgctaagactttgctaaagtttatcagcagaaggagctttggggctaagactatggggttttctagatatagaa

SEQ ID NO: 852933 - DNA, 120 bp, Artificial Sequence
  ENSG00000232931_4 (sequence is synthesized)
cagagacagtttgacttcctgtctattcctctcttccctcctctatttggatgcccttccagttttgcacattcagtgtaatgttggctgtgggtttgccatggctagctctcatcattt

SEQ ID NO: 852934 - DNA, 120 bp, Artificial Sequence
  ENSG00000232931_5 (sequence is synthesized)
tggcacttccgactagaagtgcgagaggggccagtgttgttgttacctgaaaggtaagtgcagcccacaaaaatgcagtgaagaagaagatatatgcatatgtttaagttaatacaattg

SEQ ID NO: 852935 - DNA, 120 bp, Artificial Sequence
  ENSG00000232931_6 (sequence is synthesized)
agatacatttagcagacagaatcaatagagttgatgagtgactgactggatgtgtggggagtttatatcactcccaggtttttgacttgggcaaccgggcactcaagaaggaaaaagagg

SEQ ID NO: 852936 - DNA, 120 bp, Artificial Sequence
  ENSG00000232931_7 (sequence is synthesized)
atccagggagaggaacttttctgaggactggggtagggctgaacagctgcattcgagactggtggagggtgggctgggcatgggatgcacaaatggaaattccactgggtctgcagctca

SEQ ID NO: 852937 - DNA, 120 bp, Artificial Sequence
  ENSG00000232931_8 (sequence is synthesized)
atgtgaggacactgaagaaggagtgagcagacaataagaagcccacagaagacagagaaggaacaactagagggagaagccaaggcaggcatgtgtgataacatataggaactgagggag

SEQ ID NO: 852938 - DNA, 120 bp, Artificial Sequence
  ENSG00000232931_9 (sequence is synthesized)
aggacatttcaagatggaggggatgccatacaacaggactatgtgatggtttttggctgtgtccataggaagtcacaacaggcaagggaaagaaaccagaacccagtcatggagttaaga

SEQ ID NO: 852939 - DNA, 120 bp, Artificial Sequence
  ENSG00000232931_10 (sequence is synthesized)
agtgagtcagagaggagatgggtagggacagtgaggtaaggcctctttctaaggaagtttggctgaaggatagactagctggacacatgctggctgtgtggggtagagggaggaatgatg

SEQ ID NO: 852940 - DNA, 120 bp, Artificial Sequence
  ENSG00000232931_11 (sequence is synthesized)
gagggtaggagagccttgagcctgcgagaagagtctcctagaatagagaagctgaggttaaagttgtggaagacagtggggataactgagtgacagataatcaggagaagaaaaggagat

SEQ ID NO: 852941 - DNA, 120 bp, Artificial Sequence
  ENSG00000232931_12 (sequence is synthesized)
ccagaatcatgacagagagatgacctttgccaagagcacagccatctttcactgtcacagagaggtaggacaaaacgattggtgttcaagaattggtttgtagcacaatattttaactat

SEQ ID NO: 852942 - DNA, 120 bp, Artificial Sequence
  ENSG00000232931_13 (sequence is synthesized)
gtcctttaaaaagtttctccacagacactacccaaagcagtccttcactacagtggcagacagacctgaaaattttcatctgaagcagcagagtgaactgcagagtcagagatagaatct

SEQ ID NO: 852943 - DNA, 120 bp, Artificial Sequence
  ENSG00000232931_14 (sequence is synthesized)
atgttgaccaggctggtcttgaactcttggcacccaagcgatccttttgcctggaatcccaaagtgtcagatttactgaagaatatttcattgtaattactttttatactttataggtca

SEQ ID NO: 852944 - DNA, 120 bp, Artificial Sequence
  ENSG00000232931_15 (sequence is synthesized)
gtcaagagctctgttttaaagacaaaatttattgaatatactttttcaaacaaagtttcatgttctaatcattgtctgatttcagcattaaatgaaacacagtaaagaaagttgggctga

SEQ ID NO: 852945 - DNA, 85 bp, Artificial Sequence
  ENSG00000232931_16 (sequence is synthesized)
gacagagatttgaattctccttggcatggaggtatcagggtcctgctcagtgagggacctcccaacaggggcctgcaaccacccc

SEQ ID NO: 852946 - DNA, 88 bp, Artificial Sequence
  ENSG00000232931_17 (sequence is synthesized)
gctgacagagatttgaattctccctggcatggaggtcttggggtctggcccactgagggatctcctaaccagggcctccagccacccc

SEQ ID NO: 852947 - DNA, 120 bp, Artificial Sequence
  ENSG00000232931_18 (sequence is synthesized)
ttcctggtctcaaatcatcctgatattcttcattttgttattcacattggactagggcaaggaaatgagttctgcaggaacaaagatcaccacaactggctccccttcaactatgttaga

SEQ ID NO: 852948 - DNA, 120 bp, Artificial Sequence
  ENSG00000232931_19 (sequence is synthesized)
tggcaacttgccttcagtatggtgaaacacatcagttaagactggggttgtgcatggcaggactttctacaaggacacccagtctccttaataaacatgagatgctctctttccagaagt

SEQ ID NO: 852949 - DNA, 87 bp, Artificial Sequence
  ENSG00000232931_20 (sequence is synthesized)
aacaaaatacgaatccatcatgatcaagtatgcttcatccccaggatgcaaggttgcctcaacatacacgtcaattaatctgattca

SEQ ID NO: 852950 - DNA, 120 bp, Artificial Sequence
  ENSG00000232931_21 (sequence is synthesized)
gcaaggttgcctcaacatacacgtcaattaatctgattcatcccataaacaaaactaaagataaaaaccatgtgattatctcaatatatgcagaaaaggctttcaataaaattcaaggcc

SEQ ID NO: 852951 - DNA, 120 bp, Artificial Sequence
  ENSG00000232931_22 (sequence is synthesized)
tgcagaaaaggctttcaataaaattcaaggcctctccatattaaaaactctaaaaaatctgggtattgaggaaacatagctcaaagtgatgagctgtttttgtaccagtatcatgctgtt

SEQ ID NO: 852952 - DNA, 79 bp, Artificial Sequence
  ENSG00000232931_23 (sequence is synthesized)
acatggatgaagctggaagccataaacttcagccaattaacacaggaacaggaaaccaaacaccacatgtgaggggcag

SEQ ID NO: 852953 - DNA, 83 bp, Artificial Sequence
  ENSG00000232931_24 (sequence is synthesized)
actgaacaatgagaacacatggacacggaggggcagaacacacaccggagcctgttgggaaggtagggggaaggagagcatca

SEQ ID NO: 852954 - DNA, 120 bp, Artificial Sequence
  ENSG00000232931_25 (sequence is synthesized)
catgtttaactatgtaacaaacctgcacatcctgtacatgtatcctggaacttaaaataaaatagaaaagacaaagaaggatattacataatggcaaaggcttcaattcaacaagaagac

SEQ ID NO: 852955 - DNA, 120 bp, Artificial Sequence
  ENSG00000232931_26 (sequence is synthesized)
ctaactatcctaaatatatattcatccaacacaggagcacccagattcataagtaaagttcttagagacctacaaagtatgtttcacagtaatagtgggagactttcacactccaatgac

SEQ ID NO: 852956 - DNA, 120 bp, Artificial Sequence
  ENSG00000232931_27 (sequence is synthesized)
agtattagatcattgaggcaaaaaaatgaacaaagatattcaggacctgaactcaacattggatcaaatggatctgatagacctttacagaactctgcactcaaaaacaacagaatatgc

SEQ ID NO: 852957 - DNA, 120 bp, Artificial Sequence
  ENSG00000232931_28 (sequence is synthesized)
attcctcacatcatcatatgccacatactctaaaatcaaccacataattggacataaagcaatcctcagcaaatgcaaaacaactgaactcataccaaatacacactgagatcacagtgc

SEQ ID NO: 852958 - DNA, 120 bp, Artificial Sequence
  ENSG00000232931_29 (sequence is synthesized)
atagaagactaagaaaattgctgaaaatcatgcaattacatggaaatcaatcaacatgctcctgaatgactttttaataaataatgaaattaaggcagaaaacaagaagttctttgaaaa

SEQ ID NO: 852959 - DNA, 120 bp, Artificial Sequence
  ENSG00000232931_30 (sequence is synthesized)
taatgagaacaaagttgcaacatactagagcctctggacatagctaaggcaatgttaggagggaaatttatagcactaaatcccacatcaaaaagttaggaagaactcaaattaataacc

SEQ ID NO: 852960 - DNA, 120 bp, Artificial Sequence
  ENSG00000232931_31 (sequence is synthesized)
taacatcacaacggaaagaactagagaagcaagacaaaaccccaaagctagaggaagacaagaaataactgaaaatccgagctgaattcaaagaaaccgagacatgaagaaaaaaaaatt

SEQ ID NO: 852961 - DNA, 120 bp, Artificial Sequence
  ENSG00000232931_32 (sequence is synthesized)
agatttggattctccctggcatggagtgccccgagggaggggtgggctgccatatttgatgttttggcaacttagccattccaacctttgggctttaaggagtcccagctgacttagggt

SEQ ID NO: 852962 - DNA, 120 bp, Artificial Sequence
  ENSG00000232931_33 (sequence is synthesized)
ggatatagcccaccagcacagcacagctgctgtacaaaagcatagccagactgcttctttaagcaggtcccggattcattcctcctcactgtttgggacttcccaactggggcctccagc

SEQ ID NO: 852963 - DNA, 120 bp, Artificial Sequence
  ENSG00000232931_34 (sequence is synthesized)
cacccccactggtgttctcctgctgacagtgatttcagttttttcttggctggagctccctgatggaggggcaggccatcatgtttgctgtttttgcaacttaaccacttcaaccttcag

SEQ ID NO: 852964 - DNA, 120 bp, Artificial Sequence
  ENSG00000232931_35 (sequence is synthesized)
tctttggagtgtccaaggagaccaggggctgatgtggaccctcagcatagcacagatgctctataaaaatgtggtcagactgctttttaagcactttcccaatgtcattccgcctcactg

SEQ ID NO: 852965 - DNA, 120 bp, Artificial Sequence
  ENSG00000232931_36 (sequence is synthesized)
ggcaaaaccccctaactggggtctccagctacctcctacaggtgtgtttgggccagcaacaagttcattcatacctccctagggcaaagcttccaaagggagcagtaggctgccaacttt

SEQ ID NO: 852966 - DNA, 120 bp, Artificial Sequence
  ENSG00000232931_37 (sequence is synthesized)
tctgtttcacagccttcactgatgataactccaggtactggaaaatctgaggctactagagactgaagtgggccctgggcatactgcagcagccctatggaaaagtggccagactgttac

SEQ ID NO: 852967 - DNA, 120 bp, Artificial Sequence
  ENSG00000232931_38 (sequence is synthesized)
ctgggttcccattcctgtatcttctcactaggcaagtcttgcaggcctgggcctctacctaacccccctgccagagctgtcgagccagtagcaactcagccactccctggacagagcctc

SEQ ID NO: 852968 - DNA, 120 bp, Artificial Sequence
  ENSG00000232931_39 (sequence is synthesized)
cttctgcagtggaactgtccttgctaccctcagactgatgaaggagctaacacccttatctacaccttcaacaagctttaattgaccaaagcccatctcccacgggttttacacactccc

SEQ ID NO: 852969 - DNA, 120 bp, Artificial Sequence
  ENSG00000232931_40 (sequence is synthesized)
cactgctcataacagacagggaacccctggattggcccccacagcatgaattctccatcctgcttgctgattgcaataaacagttgctgacctgtattctccgggggtagaaccctgagg

SEQ ID NO: 852970 - DNA, 120 bp, Artificial Sequence
  ENSG00000232931_41 (sequence is synthesized)
agacaaacaaaagacccttggctacaaccactactaatgtcccttcctcttcttccccaaagttagggaagaaatataaacactgagattgccccagagctgcagtgggcagcctaggag

SEQ ID NO: 852971 - DNA, 120 bp, Artificial Sequence
  ENSG00000232931_42 (sequence is synthesized)
tgccaagccatgatctacagccagcactcaaggaggagagaagcacattttcagatcattgagagtgaacatggctgcaactgtgaggaaacataggggagccacatgaccaagcaagac

SEQ ID NO: 852972 - DNA, 120 bp, Artificial Sequence
  ENSG00000232931_43 (sequence is synthesized)
tctaccaactgaccagtaagcccaagtgccacctactggatcacatcccaaagcttcagcaccaaaaataccttactaatatactcccctctgaaaccagaaatgagaagtcagcttcaa

SEQ ID NO: 852973 - DNA, 120 bp, Artificial Sequence
  ENSG00000232931_44 (sequence is synthesized)
ataaagaacctgcacaaagcctcagcctggtgaaaacatctgaaaataagtctacggactgtactcaatctacactgcaattaaaggaaaacccataggtggaaatgagaagaaaccaat

SEQ ID NO: 852974 - DNA, 120 bp, Artificial Sequence
  ENSG00000232931_45 (sequence is synthesized)
gcaagaactccagtaactcaaatggcctctgtgtcatatgtccttcaaacaaccacaccagttctccaacaagagttcttaacctggatgaactgtctggaattacataaatataattga

SEQ ID NO: 852975 - DNA, 120 bp, Artificial Sequence
  ENSG00000232931_46 (sequence is synthesized)
ttattcacattggactagggcaaggaaatgagttctggtcagagtcaatgtttcccaacaatgttgatttatttggtcctaaatatttaaacacattttataaatagcttttccacacca

SEQ ID NO: 852976 - DNA, 120 bp, Artificial Sequence
  ENSG00000232931_47 (sequence is synthesized)
accctgtgtatctcacaccaaccctaagctttgtttccctcctgtcactttgctcctatttctttcatatgaaagaatgttcattttctttgaaaatgagctcatttcctcattttcttt

SEQ ID NO: 852977 - DNA, 71 bp, Artificial Sequence
  ENSG00000232931_48 (sequence is synthesized)
ataaccccatcaaaatgtgggcaaaggccatgaacagacattctgaaaagaagacatttatgcgtccaaca

SEQ ID NO: 852978 - DNA, 120 bp, Artificial Sequence
  ENSG00000232931_49 (sequence is synthesized)
aaaatgtgggcaaaggccatgaacagacattctgaaaagaagacatttatgcgtccaacaaacatatgaaaaaaaaaaagctcaacatcagtgtttattagagaaatgcaaatcaaaacc

SEQ ID NO: 852979 - DNA, 72 bp, Artificial Sequence
  ENSG00000232931_50 (sequence is synthesized)
ttaaaaagtcaagaaacaacagatgctagagaggctatggagaaacaggaacacttttatactgttgggaac

SEQ ID NO: 852980 - DNA, 68 bp, Artificial Sequence
  ENSG00000232931_51 (sequence is synthesized)
tttgacccagcaatcccattactaggtttatatccaaagaaatctaaatcattctattttaaagacat

SEQ ID NO: 852981 - DNA, 77 bp, Artificial Sequence
  ENSG00000232931_52 (sequence is synthesized)
cagcactattcacaatagcaaagacatggcatcaacccaaatttctatcaatgatagattggataaagaaaatgtga

SEQ ID NO: 852982 - DNA, 120 bp, Artificial Sequence
  ENSG00000232931_53 (sequence is synthesized)
taaacacaattagaaatgacaaagggaatgtaattaccactgaccccacagaaatagaaacaaccatcagaaactactgcaaacacttctgtgcatacaaactagaaaacttcaaagaga

SEQ ID NO: 852983 - DNA, 120 bp, Artificial Sequence
  ENSG00000232931_54 (sequence is synthesized)
tggataaattcctggacaaatacaccctcccacaactgagccaggaagaaattgatttgctgaacagaccaataacaagctccgaaattgaatcagtaataaataacctaccaatcaaaa

SEQ ID NO: 852984 - DNA, 120 bp, Artificial Sequence
  ENSG00000232931_55 (sequence is synthesized)
aaagcccagaacatgatggattcccagccatattctactagaagtacaaagaagagctggtaccatttttacaggaactatttgaaaatattgaggaggaggaactcctccccaactcat

SEQ ID NO: 852985 - DNA, 69 bp, Artificial Sequence
  ENSG00000232931_56 (sequence is synthesized)
caatagacaatattcttcaattcctatacaccaataatagacaagagagccaaatcatgaatgaactcc

SEQ ID NO: 852986 - DNA, 69 bp, Artificial Sequence
  ENSG00000232931_57 (sequence is synthesized)
aatggaaaaatattccatgctcatgggtgggaagaatcagtcacatcaaactaccattgacattcttca

SEQ ID NO: 852987 - DNA, 86 bp, Artificial Sequence
  ENSG00000232931_58 (sequence is synthesized)
ttcagtgctattcaaaaaaaaaactactttaaatttcatatgcaaccaaaaaagagactcaatagtcaagacaatcctaagcaaaa

SEQ ID NO: 852988 - DNA, 120 bp, Artificial Sequence
  ENSG00000232931_59 (sequence is synthesized)
caaagctggaggcatcatgctatatgacttcaaactatactgcaaggccacactaatcaaaacagcatggtactgataccaaaacagacacacagaccaatggaacagaatagagatctc

SEQ ID NO: 852989 - DNA, 66 bp, Artificial Sequence
  ENSG00000232931_60 (sequence is synthesized)
gaaggaatacctatttattcatttatttattttgagacaaagtctcactctgtcaccaggctggag

SEQ ID NO: 852990 - DNA, 120 bp, Artificial Sequence
  ENSG00000232931_61 (sequence is synthesized)
caggatggtcttgatctcttgacctcaagatccacccatatcagcctcccaaagtgctgagattatagatgtgagccaccgcacttggccaggattccctatttaaatggtgctgggaaa

SEQ ID NO: 852991 - DNA, 60 bp, Artificial Sequence
  ENSG00000232931_62 (sequence is synthesized)
tgaaactggacctccaaaccgtaaaaaaccctagaagaaaatctaggaagttccattcag

SEQ ID NO: 852992 - DNA, 120 bp, Artificial Sequence
  ENSG00000232931_63 (sequence is synthesized)
aaaccccaaaccgtaaaaaaccctagaagaaaatctaggaagttccattcaggacataggcataggcaaagattttatgatgaaatcatcaatagcaattgcaacaaaagcaaaaattga

SEQ ID NO: 852993 - DNA, 120 bp, Artificial Sequence
  ENSG00000232930_0 (sequence is synthesized)
gctaggaagacccagttgagacagcggacactagagcagcctggaagggaacacctgcctacgaagcccctaggagcatgaggtgtttcctcccacagcttcctgtcctgcccagggcta

SEQ ID NO: 852994 - DNA, 120 bp, Artificial Sequence
  ENSG00000232930_1 (sequence is synthesized)
gctaagaggacaagactggcagaaggacaaccagcaatgctgagggactgtggctcaaggcactgatgtcattgccttgggttgcaggagtctaactctgtcacctaggctggagtgcag

SEQ ID NO: 852995 - DNA, 120 bp, Artificial Sequence
  ENSG00000232930_2 (sequence is synthesized)
gctcaagcaatcctcccacctcagcctcatgagtagcttggactacagtgcccgaggggcaaaactgcagcagagtggctcctgtatcctcagcactcaacatggaccccgttgttggtg

SEQ ID NO: 852996 - DNA, 120 bp, Artificial Sequence
  ENSG00000232930_3 (sequence is synthesized)
ctcagcactcaacatggaccccgttgttggtgttcaagaaacatttgaggagctgcacttacttggaatgagaaaaagttacacccatgacctccagtctgtcccttcaggagataaagc

SEQ ID NO: 852997 - DNA, 120 bp, Artificial Sequence
  ENSG00000232930_4 (sequence is synthesized)
agagagctctcttgccactccaccatgtaagaacacagccagaggagagctgcctgtgaaccaagaagcaggccctcaccagacactgagtctgccagcacctggatcttggacttccag

SEQ ID NO: 852998 - DNA, 120 bp, Artificial Sequence
  ENSG00000232930_5 (sequence is synthesized)
cctccagaagtgtgagaaagaaatttctgtggttgataagccacccagcctgtaggactttgctatagtagcccaaacagactaaaattgggagattatcctggattatccaggcagccc

SEQ ID NO: 852999 - DNA, 120 bp, Artificial Sequence
  ENSG00000232930_6 (sequence is synthesized)
caacatattcaggagagttcttataagagaaaagggaggcaggtgagtctgagtcagagaaggaggtgtgatgatggaagcagaggtcaaagtgatgcggggccataagccaaggaatgc

SEQ ID NO: 853000 - DNA, 120 bp, Artificial Sequence
  ENSG00000232930_7 (sequence is synthesized)
gtgaagggccctgcagcagccacagacacaggcctggggaaatagaggatcccagatggaagagctgccacttactgggcaccgccctgtgccaaacccaacaccgtgtgcactctgtag

SEQ ID NO: 853001 - DNA, 120 bp, Artificial Sequence
  ENSG00000232930_8 (sequence is synthesized)
actctcattgaatccctaaatccttccgtggtatggattattatctccattttactaatgaggccattaaagctcagaagattaagtaacgtgaccagtataaagtacaagaaaatgaca

SEQ ID NO: 853002 - DNA, 120 bp, Artificial Sequence
  ENSG00000232935_0 (sequence is synthesized)
cccagttctcccttaaaaatacttgggggaagaaagtgcttgactactcacagtcctgtgatgacctgtggcggaaggtaaaccgaaggtgactgcggttaacgtcctcgatgggaatgg

SEQ ID NO: 853003 - DNA, 120 bp, Artificial Sequence
  ENSG00000232935_1 (sequence is synthesized)
ccaccttcaagaattgaaaaagaagtttaagcactgttatcaatatcatccagcgtaacagctttattcaactggagctatcagagaaatatgcaactgcgaagttctcacgggagaagt

SEQ ID NO: 853004 - DNA, 120 bp, Artificial Sequence
  ENSG00000232935_2 (sequence is synthesized)
cctgagcacactgcaaggcatcctgggaccacagtctcaagggtcacagaggaagggacttcggggctgagacctgcaggaagtgagggaactgcaggcctgtcctcacccaggggaggt

SEQ ID NO: 853005 - DNA, 120 bp, Artificial Sequence
  ENSG00000232935_3 (sequence is synthesized)
cagatcatgggagggagagtttgaagaaggaagaaccaccaatagaaagcggtccccaaagaggtatcggggatggcacccagacaggagcacatgtaccactgcccagaatgtgcattt

SEQ ID NO: 853006 - DNA, 120 bp, Artificial Sequence
  ENSG00000232935_4 (sequence is synthesized)
cactagacaagtgaccacaaaagttttcactgtgacttgaaaatgcccactcctcccagaagttcaaggaactggacccccggacatgagcccaaggttcgccggcttcaaagatcctgg

SEQ ID NO: 853007 - DNA, 120 bp, Artificial Sequence
  ENSG00000232935_5 (sequence is synthesized)
ccacacaccagtgagcctggcagaggcaggcttctggtcctctttcccagtgatttcctgctggcctgacaccaaactccactttccctgaatgactctaataaaagtttatcaaaactc

SEQ ID NO: 853008 - DNA, 120 bp, Artificial Sequence
  ENSG00000232934_0 (sequence is synthesized)
atagaaccagaggtcattccctctctctgctaagtacctgattgccttgcaagaaggaagaggttttaaaagttttcaaagctaacaggtgtccaaaggagattacacctgcaaatcaga

SEQ ID NO: 853009 - DNA, 120 bp, Artificial Sequence
  ENSG00000232934_1 (sequence is synthesized)
tttataatgtacaacctgaaacattccattgatgataaatgaacttaactgaaacagaagcacatgttcttgaactgtgccagcagattttacagtttctagaggaaccacagaattcct

SEQ ID NO: 853010 - DNA, 120 bp, Artificial Sequence
  ENSG00000232934_2 (sequence is synthesized)
ctaaacaggttactgagactcaccatggacattggtacatgctggttaactgtattgacttggatttacaaagtctcaggtatttcttcgtaacagtgtgataacgaactaatacagaca

SEQ ID NO: 853011 - DNA, 120 bp, Artificial Sequence
  ENSG00000232934_3 (sequence is synthesized)
gcataacatcattgtgtggatacacattagcaagcttgaagactacaggaaataaaactggaaagaagaacggtcatgagggatacatgtgcacagagaaaaggccgtgtgaagacaaaa

SEQ ID NO: 853012 - DNA, 120 bp, Artificial Sequence
  ENSG00000232934_4 (sequence is synthesized)
taattatccatctgggtgaaaattgagacaatatgcatggccaagcacttggacaaatttcaggtggaactgagacttaaaaggaaaaaatggaaaatggtaagtttgccagaaaataag

SEQ ID NO: 853013 - DNA, 120 bp, Artificial Sequence
  ENSG00000232934_5 (sequence is synthesized)
ggtgaaacagtcttatgaaatattgggggttaggaagtcctgtctaagcagtttaaaacctacaaatagaaaagattatttagtttgactataaaaacattggaaatttttatatggcaa

SEQ ID NO: 853014 - DNA, 120 bp, Artificial Sequence
  ENSG00000232934_6 (sequence is synthesized)
ccaaaatgttccaaaatccaaaactttttgagtgccaacatgatgttccaaggaaatgctttttggagcatttcagattttggattttcagattcagaatgctcaactgttttataatgc

SEQ ID NO: 853015 - DNA, 120 bp, Artificial Sequence
  ENSG00000232934_7 (sequence is synthesized)
aaacattacaaaattggaaaaaaatgcaaaattcaaaacacttttagtcccaagcatttcaaatagggagatactcaacctgtattactctgtgaagaactcttagaaatataaaaaagg

SEQ ID NO: 853016 - DNA, 120 bp, Artificial Sequence
  ENSG00000232934_8 (sequence is synthesized)
accaaattatcttttgcctgtttttctataaggaagtaatagaataattcatggataaaatatacatgtcaataagcaatagaaagatgtttggtgtaaataaaagaaacaaaactgtaa

SEQ ID NO: 853017 - DNA, 120 bp, Artificial Sequence
  ENSG00000232934_9 (sequence is synthesized)
actcaagtgtccattaataggagattagttatttgggtacggttgacccttgcacaacacaagtttgtatggcacagctccactgataggtggattttcttctgtctgtgctgcccctga

SEQ ID NO: 853018 - DNA, 120 bp, Artificial Sequence
  ENSG00000232934_10 (sequence is synthesized)
gatagcaaaaccaacccctcctcttcttcctcctcagcctactcaacatgaagacagtgaggatgaagacctttatgatgatccatttccacttaatgaatagcatcaaccatgagcttg

SEQ ID NO: 853019 - DNA, 120 bp, Artificial Sequence
  ENSG00000232934_11 (sequence is synthesized)
ctttccaaccacactacctgcgtttttgaaaggctgacatggctcttggttctcaaatcagcctcaaaatagcctgaaaagcctggagtccactcacagaagagcagacctcctccggta

SEQ ID NO: 853020 - DNA, 120 bp, Artificial Sequence
  ENSG00000232934_12 (sequence is synthesized)
tgcaccatgctgacagcaccaccttacacactcaggtgtgcaaaaaccggcgcgggggacatctcacaccttatgtagatcaaatgctccttccctgatcctctgtagggaacttccttt

SEQ ID NO: 853021 - DNA, 120 bp, Artificial Sequence
  ENSG00000232934_13 (sequence is synthesized)
cttaagaagtcattcagataacctaaacaggttactgaggtgtggttctatcactgttttatttgaggaggatagtagggaatagaagaaaaagaagggggcaaataggatttttagctg

SEQ ID NO: 853022 - DNA, 120 bp, Artificial Sequence
  ENSG00000232934_14 (sequence is synthesized)
aagacaaaatgaaaaagtggctgtctacaagtcaaggagagaggcctcgggagaagctaaacctgctgacactctgaccttggattcctagactccagaactgtgagaaaataaatttct

SEQ ID NO: 853023 - DNA, 120 bp, Artificial Sequence
  ENSG00000232934_15 (sequence is synthesized)
tcatgctctgcatggttggttgaatgaatgaactaattatccatctgggtgaaaattgagacaatatgcatggccaagcacttggacaaatttcaggtggaactgagacttaaaaggaaa

SEQ ID NO: 853024 - DNA, 120 bp, Artificial Sequence
  ENSG00000232934_16 (sequence is synthesized)
ataagcttggatcttctcattctgaacccaactatacaaatttcctgtagctacaagaaccagcatggtttgtgactgaaatgggctattgttaaaatgatatattaccccctactcaac

SEQ ID NO: 853025 - DNA, 120 bp, Artificial Sequence
  ENSG00000232934_17 (sequence is synthesized)
ttctctacattccctatcagcaccaatgccttttggggtgtgtcacagatcaccatggcgatatcagctggaagccaaaatagaaccagagactcaccatggacattggtacatgctggt

SEQ ID NO: 853026 - DNA, 120 bp, Artificial Sequence
  ENSG00000232934_18 (sequence is synthesized)
cctgattgccttgcaagaaggaagaggttttaaaagttttcaaagctaacagactcaccatggacattggtacatgctggttaactgtattgacttggatttacaaagcagcattgagtc

SEQ ID NO: 853027 - DNA, 120 bp, Artificial Sequence
  ENSG00000232934_19 (sequence is synthesized)
gttgcaaaagagcccatgtggtctgcaaattctatgccatttactgcctggcctttacagcatatgtttgccaacccctgctgcagaggaatcaagagatgctgagaataaaaccctatt

SEQ ID NO: 853028 - DNA, 120 bp, Artificial Sequence
  ENSG00000232934_20 (sequence is synthesized)
gaagtctcaagtcaattgagaggaaagctgaaagagaagtcactgaatttagaagttaggttatgagtgattcagagcactttggaggagatggtagtggtaaaaggtcagatctcagtg

SEQ ID NO: 853029 - DNA, 120 bp, Artificial Sequence
  ENSG00000232934_21 (sequence is synthesized)
ggttgaagttcagaagaggaaatcgataagcaaactactctcaaagaactctggtgggaaaggaaaggcatgagaggtggtggtggaatgcagcaggacgggaagatgtcagtgaagaca

SEQ ID NO: 853030 - DNA, 120 bp, Artificial Sequence
  ENSG00000232934_22 (sequence is synthesized)
ttgaacatgcagatgtacccacaggtgggagaggagctggagagtagaggtagcttggagtaagattccttctatcctggaaagagaagactgtaaaaacaacagaagaaattagccttg

SEQ ID NO: 853031 - DNA, 120 bp, Artificial Sequence
  ENSG00000232934_23 (sequence is synthesized)
aaacaaaaaagcagaaattgaagaaatactcagcattgagaaagaatcaagttgtaatgtaacagcaaaattttacccttgttgacaatatgtacgatggcttctggtcccaaggtgtca

SEQ ID NO: 853032 - DNA, 120 bp, Artificial Sequence
  ENSG00000232937_0 (sequence is synthesized)
tttttttttttgagttggagtctcgctatgttgcccagtagtcgatattttttaaaattggtgagatttactacaaaactgtctttccagtttctgttcaaaaatcatacgatacagcac

SEQ ID NO: 853033 - DNA, 120 bp, Artificial Sequence
  ENSG00000232937_1 (sequence is synthesized)
ataacgtgtgagctttcctattttgctacagccctaccctgccactccactaatttccataagctgtctaggcccctgaaggggcctagacaattagtttgcaattcctaccctacaagg

SEQ ID NO: 853034 - DNA, 120 bp, Artificial Sequence
  ENSG00000232937_2 (sequence is synthesized)
atcctgggttattaagggtagggatgataataaaaatactcaactggtatgaactgggaaccaactaatcaggtcaccactggatcagagccttggaagagtcagataccaactctttac

SEQ ID NO: 853035 - DNA, 120 bp, Artificial Sequence
  ENSG00000232939_0 (sequence is synthesized)
ccagggaaaacagtgtctgtccccacggaaagaagaagggcagctggcagggccacttctgctgcaaaggtgattttactatgcagccactattaaaaaccacagatgtcattgatgatg

SEQ ID NO: 853036 - DNA, 120 bp, Artificial Sequence
  ENSG00000232939_1 (sequence is synthesized)
gaaggagtccacaaaacaatgtccttcaaatcagagtttattcaatgctgatttttcatttttctatggttctgtttggggacaagtcagtcaaataacttgaacctcagcgtcctcatc

SEQ ID NO: 853037 - DNA, 120 bp, Artificial Sequence
  ENSG00000232939_2 (sequence is synthesized)
tgcagaatgggaataataacagtttgtaaagttatcgtgaagatgacacaaaatgctggagacgttggacgtgctctatagaaaataatttctaaacaataaagaatattataataaaca

SEQ ID NO: 853038 - DNA, 120 bp, Artificial Sequence
  ENSG00000258703_0 (sequence is synthesized)
cattttgacaagagagtgagagactaaaagaagcaagtcttcctttcttcttcagcttctcacacctgaagagcacccacaccaacaaggagaaggagaaaacccaaacaaaccataccc

SEQ ID NO: 853039 - DNA, 120 bp, Artificial Sequence
  ENSG00000258703_1 (sequence is synthesized)
acagcttggagatgagggctggtattacgaagataaaaagaacagcctttgcatctagactcccttgaagaaaatacatttgaaacattgtggtgaaagatgtctggttcccaagaagat

SEQ ID NO: 853040 - DNA, 120 bp, Artificial Sequence
  ENSG00000258703_2 (sequence is synthesized)
ggcaaacaactcgggatactggcttccagcatgaaacctcaattcttggtggtgccactgaggtgagagaggaactgatgattccagaacttaaaacccctagttctctttgaatagatc

SEQ ID NO: 853041 - DNA, 120 bp, Artificial Sequence
  ENSG00000258703_3 (sequence is synthesized)
cactttttcttcccctcagtgccctctgtgcacaagccaccactgactacctggggcagaaaaatattagtgccagctcagcactagctggcggcagtaggactcatatcaggatagccc

SEQ ID NO: 853042 - DNA, 120 bp, Artificial Sequence
  ENSG00000258703_4 (sequence is synthesized)
tgaagcccagctgtcatgagaagctgataacataatctatacctttcttgaaatttcaatcaaaattccaggaagactttttggaaacttcaacacacttagtctaacttgaatatggaa

SEQ ID NO: 853043 - DNA, 120 bp, Artificial Sequence
  ENSG00000258703_5 (sequence is synthesized)
gaataaagatccatgaatagctaagatgcttttaaaaaagaggagccaagagggaggaggagtgtgattcaccctatgagatgttcagacatttagtaaagccttgggaataataaaaaa

SEQ ID NO: 853044 - DNA, 82 bp, Artificial Sequence
  ENSG00000120664_0 (sequence is synthesized)
aggctgaggcaggagaatcacttgacccccaggaggtggaggttgcagtgagctgcaatttccatctcaaaaaaaaaaaaaa

SEQ ID NO: 853045 - DNA, 120 bp, Artificial Sequence
  ENSG00000120664_1 (sequence is synthesized)
aaaaaaaaatacccatgttatggaagaagaaacagaggctcaggaggtgaccagctgtgaaggggtgtagctatacccagatctaatgagtcacagctgactacatgtattcactacatc

SEQ ID NO: 853046 - DNA, 120 bp, Artificial Sequence
  ENSG00000120664_2 (sequence is synthesized)
tttgttaagcaacttgtccagtagtgactcagttattgaaaaaagtgcatttcaatatcatgctctgaatgagacattgctctcaggatgcagaatccctcgtttctttctcccctgtgt

SEQ ID NO: 853047 - DNA, 120 bp, Artificial Sequence
  ENSG00000120664_3 (sequence is synthesized)
gctctgcatgaggccacctgagaagatctggactcatgcagatcttgagtagatcttgagtaggaggagccctactcctccaccaggctaaccctcagggcttgcttggtgcctaagata

SEQ ID NO: 853048 - DNA, 120 bp, Artificial Sequence
  ENSG00000120664_4 (sequence is synthesized)
gcccacagcttgctgcccctcagctgctagcccaaaaccaacagcaagaaagcagactgtaatgtggaggatacttttttttttttaaatgagattttgttcctaggagactctaaaaat

SEQ ID NO: 853049 - DNA, 120 bp, Artificial Sequence
  ENSG00000120664_5 (sequence is synthesized)
taataccttattccactgttctttttggttatgtaagattattttccaaaatgctggcagtaattgtcctctgtattaactaattttctgctggtgattattaacatggtgaaaggcaga

SEQ ID NO: 853050 - DNA, 120 bp, Artificial Sequence
  ENSG00000120664_6 (sequence is synthesized)
actgctaaatcggggcttcccactctttaacatgcatacacatcctctgaatattttttttaaaaaaaagacagattctgattcaataggtctaggatggtacctgagaggctgcatttc

SEQ ID NO: 853051 - DNA, 120 bp, Artificial Sequence
  ENSG00000120664_7 (sequence is synthesized)
tggaaagccccaagggactggtccacagaccacactttgagtggcatggaacgaaagtatttcaaacagtccttgtatttgcctgacgatctgtgagaacaggatcagtctaaagatgag

SEQ ID NO: 853052 - DNA, 120 bp, Artificial Sequence
  ENSG00000120664_8 (sequence is synthesized)
taatgattcttttttctgaaaacaataacaaccaaaatgatttctagttgattttatttttccctatttactttttctaggagagtatgggaattaaatggaattctctttcctagtgtt

SEQ ID NO: 853053 - DNA, 120 bp, Artificial Sequence
  ENSG00000120664_9 (sequence is synthesized)
tgggaataaatcaggtgttgagttaaataagcatctctctctctctctctctctgtccctctttttgtctgtctctctttctttctctctctctctctctgaactctagagaaatgctga

SEQ ID NO: 853054 - DNA, 120 bp, Artificial Sequence
  ENSG00000120664_10 (sequence is synthesized)
gctgctgccttttggtcctcccccttctctgaattttcccatctactcttctctgcctttgcttgatcctttttcccctatgaagatttggggtttttattgaccagaggcagattttgg

SEQ ID NO: 853055 - DNA, 120 bp, Artificial Sequence
  ENSG00000120664_11 (sequence is synthesized)
caagaatgtcccagttattttagcttatgcagttggtcacattcttgtgaaattagcctgaaattagattactgctcaagatagccatgaaataatgtcagcactcagtatttaattctg

SEQ ID NO: 853056 - DNA, 120 bp, Artificial Sequence
  ENSG00000120664_12 (sequence is synthesized)
tatttaattctgaattatctggcaacaccgaatcagctctgccaaaatggacatgcctcagcgtctcagcagtgatagtgttgcagcctgttggttttttttgttgttgttgttttttgt

SEQ ID NO: 853057 - DNA, 120 bp, Artificial Sequence
  ENSG00000120664_13 (sequence is synthesized)
tttttattttgagacaaatactataataagatgcacaaataatagttttaagtgtacgtcatccagctttcctcaaagataacaccttacataaccatagtacattatgaaaatcaggaa

SEQ ID NO: 853058 - DNA, 120 bp, Artificial Sequence
  ENSG00000120664_14 (sequence is synthesized)
actagcattggtatgtattattaactaaactacaggccttattttgattttaccagtttttacatgcactctttttttgggctgggggacggtatgcagtagtataaagttttacatatc

SEQ ID NO: 853059 - DNA, 120 bp, Artificial Sequence
  ENSG00000120664_15 (sequence is synthesized)
tgtgtatagattcatggaaccaccatcacagtcttcctgattgctaaaagttggtgttctccaggattctgtcctgaacgctattccgttttcattctccacgttatccctggaccctct

SEQ ID NO: 853060 - DNA, 120 bp, Artificial Sequence
  ENSG00000120664_16 (sequence is synthesized)
tattagtaatagtgactgtaactatcttttctatttggataattctccaatgtataacgttaacctctcttgagctctatacctcaccatttcctggcctacttctggacacccactgac

SEQ ID NO: 853061 - DNA, 120 bp, Artificial Sequence
  ENSG00000120664_17 (sequence is synthesized)
tggcccaagtcagaattcccagggatcatcttagaagcatccagtctccctaatccacctccacataataaaaagagccaacactgctagagcaggtactgtgtgctggatactgtccca

SEQ ID NO: 853062 - DNA, 120 bp, Artificial Sequence
  ENSG00000120664_18 (sequence is synthesized)
cacctgcttgagggatcagctcacgttgttctgatggcaatcccacgctttgtcagaaatggatccaagtttcatgaagcctgaaacttgtatagtttcaggtcccattaacgaaaaaga

SEQ ID NO: 853063 - DNA, 120 bp, Artificial Sequence
  ENSG00000120664_19 (sequence is synthesized)
acagaagattacaaatattagaattaggatttgtcaagggaaatatttgggctagtgcaagtgaggggccctgaaaattgaccttcactaagttcataatctatctgtctttgagatcaa

SEQ ID NO: 853064 - DNA, 120 bp, Artificial Sequence
  ENSG00000120664_20 (sequence is synthesized)
tgctattcttcttgccgttttacagtgagacaatcaaggaacacaaagtttgcaaaagttgacttgaccaaggtcctcctgccacaggggcctcattacctcttgctgtgttttaacaga

SEQ ID NO: 853065 - DNA, 120 bp, Artificial Sequence
  ENSG00000120664_21 (sequence is synthesized)
ggcctcctatgtgacctctctgctgtcaatcagcccccttcatccattctccacactgaccccagagggatctgcacacagggccatgtctctctcctgatccaaagctgtcactggttc

SEQ ID NO: 853066 - DNA, 120 bp, Artificial Sequence
  ENSG00000120664_22 (sequence is synthesized)
ctggtcccttttaggataagaactaaactgttttgcatgactccttggctgtctcctctgacactggaggttgcatgatgctgaactgctaggggctcccaccaatgccccacacttcca

SEQ ID NO: 853067 - DNA, 120 bp, Artificial Sequence
  ENSG00000120664_23 (sequence is synthesized)
cttcctactcctttccacgtgtcctgctgctgccaggactgctctcctcccatctcctctacacactgcactctttatcattttatccaaagtagaaaatgcattattggttatttttag

SEQ ID NO: 853068 - DNA, 120 bp, Artificial Sequence
  ENSG00000120664_24 (sequence is synthesized)
cttataggagcaacagatggttaaagtaaaaaaaaattatacagtgcaaagaattaagtaaaaactaccacatctgtggccccattttttgggatgaaccactattaagtgtatggtgta

SEQ ID NO: 853069 - DNA, 120 bp, Artificial Sequence
  ENSG00000120664_25 (sequence is synthesized)
catacttttcatttttcctactctgtgtgtatgtgtatgtgtgttctagcctataaaattgggatatgttactatgttattattattctttttcatttttattaatcttccagacttttc

SEQ ID NO: 853070 - DNA, 120 bp, Artificial Sequence
  ENSG00000120664_26 (sequence is synthesized)
tccaaaatgtttttcattttgtttgtttttgcaaatatcttagattactaggaaagccaagtctctcttcctggatttcttctcctataaaccgcctattgatacctacccacttctcta

SEQ ID NO: 853071 - DNA, 120 bp, Artificial Sequence
  ENSG00000120664_27 (sequence is synthesized)
tggagcacagatgaaggatattggtcatctccagcatctagcacaacgtctgcaatggaacaggcgagctgtgaatatttgtggaatgcatgggtggactaaagacctatcacctcactc

SEQ ID NO: 853072 - DNA, 120 bp, Artificial Sequence
  ENSG00000120664_28 (sequence is synthesized)
tagaatgcccagcatgttggaggtaagagctcatcttctggtctctttaccccttctcatacagagccagtcaccaaatcctgcaaattcaaccctcaaaatgtctttacacgtcccaca

SEQ ID NO: 853073 - DNA, 120 bp, Artificial Sequence
  ENSG00000120664_29 (sequence is synthesized)
gccaccaccgctctgtcagacttaccatttctcacctggattcctgcagtagcttcctctctctggtctctctaagctaatgctttctctatgtgtgaccagggttttctaaaacacaat

SEQ ID NO: 853074 - DNA, 120 bp, Artificial Sequence
  ENSG00000120664_30 (sequence is synthesized)
ctgttcatttcaccgtcctgcttaaaaaccttgaatgactccatagtgcctggaaaagcaatctaaatacgttagaaaggagttcaaggccctccataaaatctggtctgacttccctac

SEQ ID NO: 853075 - DNA, 120 bp, Artificial Sequence
  ENSG00000120664_31 (sequence is synthesized)
tcagcgccgcctctctttcttcacatcttctattctccagctgtgccacactttattcagctgttctggaacagaccttatatttcacaactctgcttattagattcatctcaaatgtca

SEQ ID NO: 853076 - DNA, 120 bp, Artificial Sequence
  ENSG00000120664_32 (sequence is synthesized)
gacattccatggaatctcatcctgtctctctatcaaaattatcacactactattaccaccattagcaccacatcacttacctggtatacctccctgtatcctctacacttcctcattaat

SEQ ID NO: 853077 - DNA, 120 bp, Artificial Sequence
  ENSG00000120664_33 (sequence is synthesized)
tcaaagataactttatatttctctccctatttcaacttcctgcctccatagaaacagttttctggttcagcagtttcaatgaatcaatcaaatatttgcacatctgttatgtgcaaagta

SEQ ID NO: 853078 - DNA, 120 bp, Artificial Sequence
  ENSG00000120664_34 (sequence is synthesized)
ctgatgccatttctgatactcaactcacttttcagttgaaatttcgagtgcatctgagttctgaaaaattattagtttgtaaaagtctgaaaatacatgcatttataaaaatcttggggg

SEQ ID NO: 853079 - DNA, 120 bp, Artificial Sequence
  ENSG00000120664_35 (sequence is synthesized)
acctcctcttttggcttggaatacccctccctctgtctctgtacgggggaatttcttccttctgtctttgcccttccttcttgcctattaaactctccactccttaaaaccaccctacgt

SEQ ID NO: 853080 - DNA, 120 bp, Artificial Sequence
  ENSG00000120664_36 (sequence is synthesized)
cggccgcgcggccccgcccgtcggcctcgctcccgccacagagcccgcagcacgccgccgccgcagcctaggtcacagatctgtgaaaatctttaaaggcatgtgttttgccatatatgc

SEQ ID NO: 853081 - DNA, 120 bp, Artificial Sequence
  ENSG00000120664_37 (sequence is synthesized)
gcccaaaccaggcataaatgagcttccaaatgaacacaaacaaatctggaaggcttttgaggaagaaggaccattaaaaaagctgctgacgactgcctggaatctggtttggagcatctc

SEQ ID NO: 853082 - DNA, 120 bp, Artificial Sequence
  ENSG00000120664_38 (sequence is synthesized)
gcggccgcgcggccccgcccgtcggcctcgctcccgccacagagcccgcagcacgccgccgccgcagcctaggtcacattactaggaaagccaagtctctcttcctggatttcttctcct

SEQ ID NO: 853083 - DNA, 120 bp, Artificial Sequence
  ENSG00000287621_0 (sequence is synthesized)
aatcagcattaaggtgccgagtacaaaaggctgctcaaagagagagtttttctgaccaacaacattctactttattgaggatttggatgtgagagagatatatatatggaaagctgacat

SEQ ID NO: 853084 - DNA, 120 bp, Artificial Sequence
  ENSG00000287621_1 (sequence is synthesized)
ttggctgtgggagcagaagtaaaaagagacacggcgagacggacctgaggggtcatattgaaaatattagacaattgatgtaatacaggcacctgaccagcactgaccaatcagaggaaa

SEQ ID NO: 853085 - DNA, 120 bp, Artificial Sequence
  ENSG00000287621_2 (sequence is synthesized)
ttccaggtataaacatttgaaacatcttacagaaccagtttccagaccctatttattgatgacactgtcctctcctaattgtgtgtattttgcacctttttcaaaaatcaatggactata

SEQ ID NO: 853086 - DNA, 120 bp, Artificial Sequence
  ENSG00000287621_3 (sequence is synthesized)
aatgggtaacgtgtctaacaggacctctggagctcaaggttgggcaatgtaaacttctttctgagtgacatcccctgtctaggatctgagtgctcagtggaggggagtcagcaggctaag

SEQ ID NO: 853087 - DNA, 120 bp, Artificial Sequence
  ENSG00000287621_4 (sequence is synthesized)
gtcttctgggcttgcttctcctggcatagaaccaccatctcgagttggagaaaaggctactggggtctcaatattttcactgcaccgtgccagaagtagagcatttattccaccattggg

SEQ ID NO: 853088 - DNA, 120 bp, Artificial Sequence
  ENSG00000287621_5 (sequence is synthesized)
gaaaaagggagccctcatctcccatcaacactcaactggaatttgacctcagcaataaaccttcggaagtaagctgagaaacgctgaagtcctgctcttcctgggaaggaagctttctgg

SEQ ID NO: 853089 - DNA, 120 bp, Artificial Sequence
  ENSG00000287621_6 (sequence is synthesized)
ttgggcagaaaggcatccctatgttctttgctgcagcagtgtggagttgctgatctgggagagggaagggagggagaagtcttagttcaaataccgcaggctcttgcctttcttacagaa

SEQ ID NO: 853090 - DNA, 120 bp, Artificial Sequence
  ENSG00000287621_7 (sequence is synthesized)
ttttggcagattttcttgatgtttcttcattttctgtttgcccattggaccatttccagagtctctgaatggttgtttttcataataattttaatcaattttattggtgaaatgaagctc

SEQ ID NO: 853091 - DNA, 120 bp, Artificial Sequence
  ENSG00000287621_8 (sequence is synthesized)
ctcatactgtcatgctagaagtcagtttttcagattagattttaaatacataaaacacatacaattataaaataagccagctatattgaaatacagccaccaaaagtttttaaagttgtg

SEQ ID NO: 853092 - DNA, 120 bp, Artificial Sequence
  ENSG00000287621_9 (sequence is synthesized)
gcatagtacttatttgttgatatattaagtactgtctggctgtgttctaataactaccttaatttaaaatagagatgtacataaatgaaacatatgttttgggatatctacaacaatata

SEQ ID NO: 853093 - DNA, 120 bp, Artificial Sequence
  ENSG00000287621_10 (sequence is synthesized)
atgtaatatagaaatatctatgattgctaatgatgaaaaagtcatagaggttttaatttcattatggtttgttgtctacgctcatgatttcaggaaatgctgtttcagttagaggtcagt

SEQ ID NO: 853094 - DNA, 120 bp, Artificial Sequence
  ENSG00000287621_11 (sequence is synthesized)
aaaaataaaaatataaatttttccaatctgcatttactgatcccttgaattttacccacggtccttttggggaccaggcaaagatttcacataagattttagatcatcacagaatcgaga

SEQ ID NO: 853095 - DNA, 120 bp, Artificial Sequence
  ENSG00000287621_12 (sequence is synthesized)
ttttaatggtaaatgaaaacaacctgtaggaattttgaggttctctgaagtcttgcatgaacctttcttggaaagccatgatctctgtctatcaccagctttgtcacttctctgcatcct

SEQ ID NO: 853096 - DNA, 120 bp, Artificial Sequence
  ENSG00000287621_13 (sequence is synthesized)
ctgatgggagtaaccttggaaatgatggcagaagcatagacaaggaattttgaaaaaggatacatcatttccattgttgtaacaagagacctatcagtggttttagaaaaatagtactga

SEQ ID NO: 853097 - DNA, 120 bp, Artificial Sequence
  ENSG00000287621_14 (sequence is synthesized)
ctctggaatgtgcaaatctgggggatttaagctgtaaatatcaagcaaaacaaagagatttaaggctaagaaaaagtgtttaaataatattgcctactaaaattttagtctctgtagaac

SEQ ID NO: 853098 - DNA, 120 bp, Artificial Sequence
  ENSG00000287621_15 (sequence is synthesized)
acatctttgtgaaaacacagtacttttagaaattgactataattcacttatataatctctgtaaaagagaaatttatccacatcttatatgatggagaaaaaaagtattctttggtcgtt

SEQ ID NO: 853099 - DNA, 75 bp, Artificial Sequence
  ENSG00000287621_16 (sequence is synthesized)
catcttatatgatggagaaaaaaagtattctttggtcgttgctcatttctatcctttacttcaataactcagggc

SEQ ID NO: 853100 - DNA, 77 bp, Artificial Sequence
  ENSG00000287621_17 (sequence is synthesized)
ttcagatttcacttctaccactaaatgtaaatatttctatgatacaaagtttcttttagaattacttcctacaggtt

SEQ ID NO: 853101 - DNA, 120 bp, Artificial Sequence
  ENSG00000287621_18 (sequence is synthesized)
tatgatacaaagtttcttttagaattacttcctacaggttttatgtaacagcagtttgtgtgggaagcttagttaatgctgtttgtctatatacatatgcagttttactttcaccaccat

SEQ ID NO: 853102 - DNA, 120 bp, Artificial Sequence
  ENSG00000287621_19 (sequence is synthesized)
cgccatcagatatatcatttcaaaaattagtgacatgatatgaaataaaacaaaacctgaatgttattgtaccattgtaccttaagcgattcagattagatataaaggagattttatttt

SEQ ID NO: 853103 - DNA, 120 bp, Artificial Sequence
  ENSG00000287621_20 (sequence is synthesized)
ttatttacttaaatatcaggattgttaaatattagaaagatgctctctctttaaaggtcatttaaaaacttctatctgaggtgatttgagagacctgttgcctgaggggagtgggtgggg

SEQ ID NO: 853104 - DNA, 120 bp, Artificial Sequence
  ENSG00000287621_21 (sequence is synthesized)
ctggatgacttctcagtgttttgtctggccatttgatttatgattctgtgttctgatgtgcaaaagcagtttgttatgttgatgtgcaaatgatctggcttgaagaaatcacatcaaagt

SEQ ID NO: 853105 - DNA, 120 bp, Artificial Sequence
  ENSG00000287621_22 (sequence is synthesized)
aatctctctgttttagtatttttctcactttaaaaaatattctattttcagagagataacgggggccaattattagtatttgcagaatatttcacaaaatggaaagaaataaaaaaagca

SEQ ID NO: 853106 - DNA, 120 bp, Artificial Sequence
  ENSG00000287620_0 (sequence is synthesized)
ctcccgcccctggccgcgacagcacccacaactccgatcactgctccttctttttctgcgctttcctttctcccccacaagcttctgattcttggaaccaggctcggtgacctcacgcga

SEQ ID NO: 853107 - DNA, 120 bp, Artificial Sequence
  ENSG00000287620_1 (sequence is synthesized)
gtgacttcatatccgggactttctgggaattctcagcagcactttttctaaaatgagttaaacattttcatgagcttctaaaaggattgtggaccctaggcagtgttgccccctgtgccg

SEQ ID NO: 853108 - DNA, 120 bp, Artificial Sequence
  ENSG00000287620_2 (sequence is synthesized)
gatgggtgagttggccctgggtaaaatcagagcgatgtgacacagcctggaaagaacatgaaaggacctagaggatagaattctcccctcctggaggaggccataaacacaggaacagct

SEQ ID NO: 853109 - DNA, 120 bp, Artificial Sequence
  ENSG00000287620_3 (sequence is synthesized)
gcacaggaagggccttgaatgacctaagaagtgtggattttaaggcgacagaggtggtgagaaactgctgcaaggctggattggaggactgatggtttgggggtggcactggtggtgggg

SEQ ID NO: 853110 - DNA, 120 bp, Artificial Sequence
  ENSG00000287620_4 (sequence is synthesized)
agagaaatgaggaggctgttgctatggtagtcacatgttggagctcacaaatcaatgtggaaatgaagcagggggcaaggggaagacatacttgggaagccgaagcccactgatatgagg

SEQ ID NO: 853111 - DNA, 120 bp, Artificial Sequence
  ENSG00000287620_5 (sequence is synthesized)
agatgctgctacccctcttggaaaataggaagacgggaggagaacgtgtatgtgcaccaggactttgggaagatcaaatggaaggtctttcacaaataacaaagcaaggagacttcgagt

SEQ ID NO: 853112 - DNA, 120 bp, Artificial Sequence
  ENSG00000287620_6 (sequence is synthesized)
aacttcacaggcttgtgggcagcttcagggccacctcttgcccagaccctgcaagttgggacactttcctgctcactatggcctggaggacaaaaccacctcacttggacatttccagaa

SEQ ID NO: 853113 - DNA, 120 bp, Artificial Sequence
  ENSG00000287620_7 (sequence is synthesized)
taaagaatggggaaaagcagactaggttttcaataccctttcagtagaaaactgccccataaactcattggctacctacttcttaatccccaataactgtttttatgtgcgcatccccac

SEQ ID NO: 853114 - DNA, 120 bp, Artificial Sequence
  ENSG00000287620_8 (sequence is synthesized)
ccccataataggcttgactcccaccctccaatacaaacactgggctttctccagagcagatcaggccaaaagcaagggctgggacaggaaatacacttacagggagaagagctgggtctg

SEQ ID NO: 853115 - DNA, 120 bp, Artificial Sequence
  ENSG00000287620_9 (sequence is synthesized)
aatgactccttgaaagataatccttcatgtattcactctaaaacacgaatctagcacttactatgtgttctggtaccattctagcactggggatgcaataaaaatcaaataagacgtggt

SEQ ID NO: 853116 - DNA, 120 bp, Artificial Sequence
  ENSG00000287623_0 (sequence is synthesized)
agaccttcctagagtattccgactggttctgaatagtaacttctgtaggtcagagaagacctgaagcatgacccaggcagggcgactgatatggggacagaaacacaaagccaaattcca

SEQ ID NO: 853117 - DNA, 120 bp, Artificial Sequence
  ENSG00000287623_1 (sequence is synthesized)
ggaggacgatggaaggaacctgggacatctgcccataggcaggaaggaccagtggatggtcacgatttctgccttcaagcaactgacaggtttccatgtgacaggtttgatctgtttggc

SEQ ID NO: 853118 - DNA, 120 bp, Artificial Sequence
  ENSG00000287623_2 (sequence is synthesized)
cctctagggatgatcaggacctgtgagtgaaaacactacaagattccatttcggcattcgggagaattttctattgatcacggatgttcccacatggaatgagctatcctgagagggctg

SEQ ID NO: 853119 - DNA, 120 bp, Artificial Sequence
  ENSG00000287623_3 (sequence is synthesized)
atccacatctcacacttaaagcaagggccacgtgcaggggcttctggaatttgaagtgctcctctagtcataagaacagactccactgcaaaaggggaaatggagaatcatgaaaaggta

SEQ ID NO: 853120 - DNA, 120 bp, Artificial Sequence
  ENSG00000287623_4 (sequence is synthesized)
agttattaagtcaaaccacctcccgcatcagtgagaagctggcaggcagggcagctgcccaggcccaagccagaagataggcacaggacagacacctggcctagaagccgctcccatctc

SEQ ID NO: 853121 - DNA, 120 bp, Artificial Sequence
  ENSG00000287623_5 (sequence is synthesized)
ccgcagcctcactgccagactgtggcttggtagagccctaggaccccagctcagacatggggagtggtttctattcttagggatcactggcaagctaccatttaataagcacctactgga

SEQ ID NO: 853122 - DNA, 120 bp, Artificial Sequence
  ENSG00000287623_6 (sequence is synthesized)
taccaggcctgggctggacacttggctcacctctgcatattaaagcggccccctgtgaagttggcattgttaccagctccatttcccagatgacaaaactgagactcagagagacttgcc

SEQ ID NO: 853123 - DNA, 120 bp, Artificial Sequence
  ENSG00000287623_7 (sequence is synthesized)
cagggtgcagtgataggcagttctgagacaaactccaaaagcccagccactccgcctcctgctggtaatgacaaggggcccaaagcaaccaagtctgggttctccttgcagcctcccaac

SEQ ID NO: 853124 - DNA, 120 bp, Artificial Sequence
  ENSG00000287623_8 (sequence is synthesized)
gctttacttcctcacctgtaaaatgaggtgagtgaggatccccagtctgaccagagagcagcctccatagttgctttgaggtctgcgggaactattattatgtaaagagtgccggcctcc

SEQ ID NO: 853125 - DNA, 120 bp, Artificial Sequence
  ENSG00000287623_9 (sequence is synthesized)
attccgaaattaggtgtaactgatgcaacacaaaggggccgtgctgtgcaaagtcagccagccaggctccgtccgcgcctctctccaaagcccctgtgggctgggttgtttcctttgttc

SEQ ID NO: 853126 - DNA, 120 bp, Artificial Sequence
  ENSG00000287623_10 (sequence is synthesized)
taacctccatcacaagtcaggctgctgtcagcctaaatgagaactgaaaagatttatctcacttgtcccagggctcagctcaggaaaaaagacccttcatttcctaaaggccttgatgac

SEQ ID NO: 853127 - DNA, 120 bp, Artificial Sequence
  ENSG00000287623_11 (sequence is synthesized)
cctttctctgtgagtcactcccaccaaggaaaaaagatgtgacagcagcagcaggcgggggctgggaatgggaccaacagtccaaacttgcagacgtctggatcacttcagtttggcttt

SEQ ID NO: 853128 - DNA, 120 bp, Artificial Sequence
  ENSG00000287623_12 (sequence is synthesized)
gcaaagcactgtgtaatttttttttctttgcaccgtatttaccttcctaattgtgtttgcttatgcaatatgaaacttagcccacatttcataaacacaaccccagaaggagaccagaag

SEQ ID NO: 853129 - DNA, 120 bp, Artificial Sequence
  ENSG00000287623_13 (sequence is synthesized)
catattgtgtggcaggagaaaattagcctgcgattacacttttgctatagaagtaatcctcaaagtggacaatccaaacacagaccatggagagatgattatattttcaatcaacttgtc

SEQ ID NO: 853130 - DNA, 120 bp, Artificial Sequence
  ENSG00000287623_14 (sequence is synthesized)
cccttctttgtgcttctagcaatctcagatcaccaaacccctgaaactggcacctggcaagaagagatgagctagattcttttggtaataatagtctcttaaattcgcataataatagtc

SEQ ID NO: 853131 - DNA, 120 bp, Artificial Sequence
  ENSG00000287623_15 (sequence is synthesized)
agctttcatgagcacctactaagtgccaagtgatgctctccatgctgtacacaggaacaacaagcctgttaatccttccatctgcccatgggtatttatctccatcaccatttcacaaat

SEQ ID NO: 853132 - DNA, 120 bp, Artificial Sequence
  ENSG00000287623_16 (sequence is synthesized)
gaggaaactgaggcacagagcattgaagtaacaagcccgaagatacacagctaataaatcatggaaccaggattatgaacccaagaatttaagaattctggacccagaggccacatccca

SEQ ID NO: 853133 - DNA, 120 bp, Artificial Sequence
  ENSG00000287623_17 (sequence is synthesized)
aaccactttgcaataatgccactctccccgcacaccatttgtttaacgctcaccctcctgggaagtagctgatcttaaccctgcaggatagacaaagaggatgagtttcacagaggctaa

SEQ ID NO: 853134 - DNA, 120 bp, Artificial Sequence
  ENSG00000287623_18 (sequence is synthesized)
ataacttacccattttacagacaaggaaactgaaattcacaaaagtgagtttagttctacaaacatttgcacagcaccttgtacatgccaggcactgtgcaaggaacgtgggatacagag

SEQ ID NO: 853135 - DNA, 120 bp, Artificial Sequence
  ENSG00000287623_19 (sequence is synthesized)
acctcagtgctccttccacactcagcttctggatgtttatatgggtaaaacctttctgaaggcaataaggtacactgtcaaaagcattaaaaatgagcatactttcgactctaaaattcc

SEQ ID NO: 853136 - DNA, 120 bp, Artificial Sequence
  ENSG00000287623_20 (sequence is synthesized)
cactgcagaaactgatcctaagaaagtaacagcgaatgtgacaaagaagctcacggcagtgttatttataagagtaaaataacagaaataaactaagtgctcaacaataagagattaaat

SEQ ID NO: 853137 - DNA, 120 bp, Artificial Sequence
  ENSG00000287622_0 (sequence is synthesized)
gggaggctcaacatggtgttccagaatgaacaggtcaggtgagtggagtctgctggagaaagccatgaaatttagactgaggagagtggacttttaccttatagtctagagtctccaatg

SEQ ID NO: 853138 - DNA, 120 bp, Artificial Sequence
  ENSG00000287622_1 (sequence is synthesized)
tggaagacatatagccttaatggcatgatgatttcaggctctccatttaacagtgggcataacacaaaaccagacagtaagagagtgacctgtactcagttctctttaaatctttgagac

SEQ ID NO: 853139 - DNA, 120 bp, Artificial Sequence
  ENSG00000287622_2 (sequence is synthesized)
tgttttatctcgcattgccttgggaaatgagcctactgtgtggtctaagatacaggaaaagaaatgatgggaaaccaggagagaaggggatggagaactcacttggctggatttcaggtg

SEQ ID NO: 853140 - DNA, 120 bp, Artificial Sequence
  ENSG00000287622_3 (sequence is synthesized)
tctggcccctccaggagccctttatgttgattatttcaagacaggtttgaaagacatatttctagaatatgaatgatatctccatttcacagctagagactaaggcttgagaatttacat

SEQ ID NO: 853141 - DNA, 120 bp, Artificial Sequence
  ENSG00000287622_4 (sequence is synthesized)
gcccacgatccttcggggattaaacaaggaaaatgagcctgattcacccttctccagaatgtgtgttagttggccatgagcaaccatccataatgtattctataaattgaggaaccagct

SEQ ID NO: 853142 - DNA, 120 bp, Artificial Sequence
  ENSG00000256982_0 (sequence is synthesized)
acgtaagagggagagcaatggggacgggcagggacagagctgcgggctgaggttcctccgttcggcgaagccccttctctctgcccccgcctgctctgggctttcttggctatgtctgct

SEQ ID NO: 853143 - DNA, 120 bp, Artificial Sequence
  ENSG00000256982_1 (sequence is synthesized)
cctgacaggagggatgtgtgttgccaggggtgggggcttggcgtgtgtgcgtgtgagaatatgtgtgtgtgtttaaaatacaaaaaaaaaaaaaaaagaagcgtgcctatactcagccgc

SEQ ID NO: 853144 - DNA, 120 bp, Artificial Sequence
  ENSG00000256982_2 (sequence is synthesized)
gagacgctggccagcctccatccgtgccaactcccctccgagctggcactggggactccggaggcacggggaggaggaaggtgcgggcagcttgcggtgaggatggacgcgtgccaccga

SEQ ID NO: 853145 - DNA, 120 bp, Artificial Sequence
  ENSG00000256982_3 (sequence is synthesized)
cgtatgccagcggctgcagggggccaaacgcctatccacaaaacccaccgcgatcgctggcagccgtggcgggaggcggcagcagttggcagaggtgccagggagggccggctggggcag

SEQ ID NO: 853146 - DNA, 120 bp, Artificial Sequence
  ENSG00000256982_4 (sequence is synthesized)
gtggatcctggcagcagcagcgcaggggtcacgctccaggcctttctccaagccctccccgcgctgggacgcatttacccgcctgcctgttgacttcggctggcacccactcctgggctg

SEQ ID NO: 853147 - DNA, 120 bp, Artificial Sequence
  ENSG00000256982_5 (sequence is synthesized)
ctcagagctgctgctccctgttgatgagcactgtaggtggcttcgagatgcacgcctcgggacgatctgccttcctcccccgcctgccattcccgcactgacaaacgtctgccctgggtg

SEQ ID NO: 853148 - DNA, 120 bp, Artificial Sequence
  ENSG00000256982_6 (sequence is synthesized)
ttaggagcgaggtgcacattgcaccttacatcctcatgggcggctccaggagcctcactgcagctgatgagtacttaacaccatcatccatctgtgtggccgttggggctggcacagaag

SEQ ID NO: 853149 - DNA, 120 bp, Artificial Sequence
  ENSG00000256982_7 (sequence is synthesized)
ctctggatgcctctacctggaaaccagggctgttctccctggatggcaggaaggaagcaggtgggaggcgggcggaggtgcttgttccaccggcactcctgggttctgaggacatggcac

SEQ ID NO: 853150 - DNA, 120 bp, Artificial Sequence
  ENSG00000256982_8 (sequence is synthesized)
gggccgtgcactcagacacctccagtgaaagcttttggggtttggatggatggacagatggacaaattaacagcattctgcacttggaatgacaaaactttaggcaagaaaagggtcatt

SEQ ID NO: 853151 - DNA, 120 bp, Artificial Sequence
  ENSG00000256982_9 (sequence is synthesized)
ggagaatatctagtccaacactctaatgggatagagagggaaactgaggccagcagaaagcatgtcacctgacccagtcacagcccttggatacagagggaaactgaggccagcagaaag

SEQ ID NO: 853152 - DNA, 120 bp, Artificial Sequence
  ENSG00000256982_10 (sequence is synthesized)
gatgtcactggacccagtcagcccttggatagagagggaaactgaggccagcagaaagtgtgtcaccagacccagtcagcccttggatagagagggaaactaacgccagcacaaaggatg

SEQ ID NO: 853153 - DNA, 120 bp, Artificial Sequence
  ENSG00000256982_11 (sequence is synthesized)
tcaccggacccagtcagcccttggcctaggacctgcagacaggccacctgctgcttctgtgacccccacagcccagactcacacatcttcctccaggtcagggagtgaaggggtctgcag

SEQ ID NO: 853154 - DNA, 120 bp, Artificial Sequence
  ENSG00000256982_12 (sequence is synthesized)
tcctctccaactgagggcagggacagtctctacgtcctgagaccccaggcccctgacctacctgccggcctgcctggcaagggcacacctatcaggttgcaccataaggccaccgggctg

SEQ ID NO: 853155 - DNA, 120 bp, Artificial Sequence
  ENSG00000256982_13 (sequence is synthesized)
ggtctgactcacccacaatccatcagcctgctggtctttacacattctgggagaggcaagaatctctgtagttgctaaaacacttcctcttggttattctgagaactaaaaacacacatt

SEQ ID NO: 853156 - DNA, 120 bp, Artificial Sequence
  ENSG00000256982_14 (sequence is synthesized)
atttgaaagtcttgggtttagtctaatctaaacccctcaggtcgtgacttaagctctggcctcagaggtctccatttatgcttggatgagccactcctttggtctttgtcccctcactgg

SEQ ID NO: 853157 - DNA, 120 bp, Artificial Sequence
  ENSG00000256982_15 (sequence is synthesized)
aaggcatgtccatgaggaaatggggagaagaatatagagctatgaacttggaattttggtgtcagaaggacctaggttcaagttcaggctctatcactagctagggacctcactttcttc

SEQ ID NO: 853158 - DNA, 120 bp, Artificial Sequence
  ENSG00000256982_16 (sequence is synthesized)
atctgtagactgacgataataatagtacatacctcaaaagagctgtgcagattcaaagtgatcctgtgtctaaacctttctgtatgatgtctggtaccaagtgaatgcccagaaaacggg

SEQ ID NO: 853159 - DNA, 120 bp, Artificial Sequence
  ENSG00000287624_0 (sequence is synthesized)
attaggatatctgagagaagaaatttaaggaacagcaagttcaacgaatggaaatggctcctaggcagagctgggagtctgaagaaaagcaagggcaataaatttctctccggcctgatg

SEQ ID NO: 853160 - DNA, 120 bp, Artificial Sequence
  ENSG00000287624_1 (sequence is synthesized)
cttttgagttcagaggcaaggaaaagatttgtcccagatgttcggcaaaggttcaggagccctgtctcctgtcattcttcaggtgccagatttcatcctgttctcagtaggaggaaaggg

SEQ ID NO: 853161 - DNA, 120 bp, Artificial Sequence
  ENSG00000287624_2 (sequence is synthesized)
ggccttctgcaggcaagcccagcttcaggaaacccacatgggcaaacacccaaactcccccaagttgaccaacttcagctcaattaatcgcattataagaggattccagtggccttgaat

SEQ ID NO: 853162 - DNA, 120 bp, Artificial Sequence
  ENSG00000287624_3 (sequence is synthesized)
ccacggatgcgtttgtaggaaggagttctgaaatctccacatgtccctcctacagccgactcaaacccgatggacagtttgggggtgccttccccggatactcacatctcccttatgcaa

SEQ ID NO: 853163 - DNA, 120 bp, Artificial Sequence
  ENSG00000287624_4 (sequence is synthesized)
ctccggcgccgcgatcttcacgggctctttcctcttctttggcttgggaagccccagcgggggaccggcaccgccaattggagggggcagattgaggccagggcctcggggcgagggcaa

SEQ ID NO: 853164 - DNA, 120 bp, Artificial Sequence
  ENSG00000287627_0 (sequence is synthesized)
gagacctttcctcgtctgtgcacagactggcagccgactctggaacccagattgttgcttcccggtctagtgatccttcctccatagtctgatactcccacacgggaggtactggaacaa

SEQ ID NO: 853165 - DNA, 120 bp, Artificial Sequence
  ENSG00000287627_1 (sequence is synthesized)
ctaggtcagctacaggacttgggggatcggatgccctgtggggaggagaggattaaggagtggggcagacaaacccgggaccaatctcagactaatcagaaggctgaccaacaagctaaa

SEQ ID NO: 853166 - DNA, 120 bp, Artificial Sequence
  ENSG00000287627_2 (sequence is synthesized)
cactattactgcagactcaggcccagaagaaccggattgggctgcgctcatgcaatgggtgcatctccagtgaggacatctaggcatccagggaaccatggcttggggacagcaaagagg

SEQ ID NO: 853167 - DNA, 120 bp, Artificial Sequence
  ENSG00000287627_3 (sequence is synthesized)
gatatcattaccgaaggatgtggttcacacaactttatcccaacgcactacacgccaacagttaaaaactaagccagttcctcagagggttttggggcacattcataggggaaaaatgcc

SEQ ID NO: 853168 - DNA, 120 bp, Artificial Sequence
  ENSG00000287627_4 (sequence is synthesized)
aggacaaatttggcaaatggactatacttgtcctttgccacttctaaagggtgccaatacatatgtacttctgtagacacctgctcagggttcctagtagcctgcgcttatgctaatgct

SEQ ID NO: 853169 - DNA, 90 bp, Artificial Sequence
  ENSG00000287626_0 (sequence is synthesized)
gtagcccttggggctgctctatggagtagcttttgtttctcctgtaataaacttgcattcactttactctgaatttgccttcattcttga

SEQ ID NO: 853170 - DNA, 120 bp, Artificial Sequence
  ENSG00000287626_1 (sequence is synthesized)
ggattgggacccatttccagtaacatcttcctggcaaaccaccaagggacaacactggagaaaccccgacccaaaagaatagactgcagcactaattggccaactttgcactacggaaat

SEQ ID NO: 853171 - DNA, 120 bp, Artificial Sequence
  ENSG00000287626_2 (sequence is synthesized)
gacattagacaaaaagcaaatttgagcgattttcgtatcaaagttcgaaatgggtcataaagcagtggagacaactcgcaacatccacaatgcatttggcgcaggaactgctaatgaact

SEQ ID NO: 853172 - DNA, 120 bp, Artificial Sequence
  ENSG00000287626_3 (sequence is synthesized)
agacaagagccttgaagatgaggagcacggtggccagccatcagaagttgacaacgaccagttgaaagcgatcgtcaaggctgatcctcttacaactacacgagaagttgccaaagagct

SEQ ID NO: 853173 - DNA, 120 bp, Artificial Sequence
  ENSG00000287626_4 (sequence is synthesized)
tcctcttacaactacacgagaagttgccaaagagctcaacatcaaccattctgtggtcattcagcatttgaagcaaattggaagggtaaaaaagcatggtaagtgggtgccttatgagct

SEQ ID NO: 853174 - DNA, 120 bp, Artificial Sequence
  ENSG00000287626_5 (sequence is synthesized)
ttttgaagtgtcatcttgttttatcctacacaacaacaacaaaccatttctcaatcagactgtgatgtgtgatgaaaagtagattttatgcaacaaccggtgacaaccagttcattggct

SEQ ID NO: 853175 - DNA, 120 bp, Artificial Sequence
  ENSG00000287626_6 (sequence is synthesized)
agactgagaagaagcttcaaagcacttcccaaagccaaatgtgcaccaaaaaagagctcacggtcactgtttggtggtctgctgctggtgtgatgcactataggtttctgaatcccagca

SEQ ID NO: 853176 - DNA, 120 bp, Artificial Sequence
  ENSG00000287626_7 (sequence is synthesized)
taaccattatatatgagaagtatactcagcaaatcaatgagatgcccagaaaactgcaacaccagcagctggcattggtcagtagaaacggcccaattcttctccatgacaacgcccaac

SEQ ID NO: 853177 - DNA, 120 bp, Artificial Sequence
  ENSG00000287626_8 (sequence is synthesized)
tacacatcacacaatgcctcaaaagttgaatgaattgggctacagagttttgcctcatctgccatattcacttgacctctcgccaactgactactacttcttcaagcatcttgacaactt

SEQ ID NO: 853178 - DNA, 120 bp, Artificial Sequence
  ENSG00000287626_9 (sequence is synthesized)
ttttgcagggaaaacactcccacaaccaggaggatgcagaaaatgtttcccaaaagtttgtcaaatcccaaagcatggatttttatgctacaggaataaacttatttctcattgtccaaa

SEQ ID NO: 853179 - DNA, 120 bp, Artificial Sequence
  ENSG00000287629_0 (sequence is synthesized)
gcgtgagccaccgcgcctggcctctgtcccttttaaatggtgcatctgatcatcacttgctcaccccaccagcaggtcccagagggacacagcacctgagcaagctctggaggtggtcct

SEQ ID NO: 853180 - DNA, 120 bp, Artificial Sequence
  ENSG00000287629_1 (sequence is synthesized)
agagggacacagcacctgagcaagctctggaggtggtcctgtccctcttgctgaaaaggcaagggctcactcagggagggcaggtggtgagcttccagcccagccctggactgcagggca

SEQ ID NO: 853181 - DNA, 120 bp, Artificial Sequence
  ENSG00000287629_2 (sequence is synthesized)
ttgctagcaagcacagccagtgaggagacgaggcttgagaggctaggcaccttggccaagtcacacagcggacatgggctgcgccaggatttgaagcagatctgccctcttacaaagact

SEQ ID NO: 853182 - DNA, 120 bp, Artificial Sequence
  ENSG00000287629_3 (sequence is synthesized)
gtgggaacccttccctaccttgctgcctctcgtgaattaacaaaaacgttcatcaatcgtagtctcattttcaaagaccaggccagaagatactgactgaacaatttacttagatttatc

SEQ ID NO: 853183 - DNA, 120 bp, Artificial Sequence
  ENSG00000287629_4 (sequence is synthesized)
aaatgacttaatgaaatatttttagattatgatggatcccatagtgctcactgcctaccaggcattcaagtagaacatgtgtatgtggctcattcattcatcaagaacctgtgcactgct

SEQ ID NO: 853184 - DNA, 120 bp, Artificial Sequence
  ENSG00000287629_5 (sequence is synthesized)
ttaaatgctgaagagtcagcagtgagcaaatcaggcaggaattccggtcttcatggagcttacattcgtcaggaggtcggggcaaggttggtaggggagacagaaataaataaatagtta

SEQ ID NO: 853185 - DNA, 120 bp, Artificial Sequence
  ENSG00000287629_6 (sequence is synthesized)
tacggggcatcagatgatggttatggctgtggagacaagtgaaacggaaggcgcatgggaagtgggaggaggaggtggtaacgattttaaatggagtagtcaggatggactcaccgagag

SEQ ID NO: 853186 - DNA, 120 bp, Artificial Sequence
  ENSG00000287629_7 (sequence is synthesized)
gatcacatttgagaggggtcaaaccgtggaggattcccagtgggggaacagctggagcaaaggtcctgaggcaagagagtgcctggcacgttcccaaaacagcacggaggccaatagggc

SEQ ID NO: 853187 - DNA, 120 bp, Artificial Sequence
  ENSG00000287629_8 (sequence is synthesized)
tggagcagtgaacgaggaggtgaagccaagaactctcccaggctaagccccaattttgagactcgcctgtcctgcatcactagggcataaacgtgacagatctgacacttagacacaccc

SEQ ID NO: 853188 - DNA, 120 bp, Artificial Sequence
  ENSG00000287629_9 (sequence is synthesized)
acataagactgattcaggtcccaaggctgtcatctgtggtggcaggaggttcatcccatctgcagccagtggaaccttaggaggcagtgctcctctattttattgctgaccctccagaga

SEQ ID NO: 853189 - DNA, 120 bp, Artificial Sequence
  ENSG00000287629_10 (sequence is synthesized)
ctttagaaagcagctctacaggctggatacctctcaacctgacctctggagactgcaaggcccaagtgtaggaaaggatatggctactcacctatcttttttttttctttgagacagaat

SEQ ID NO: 853190 - DNA, 120 bp, Artificial Sequence
  ENSG00000287629_11 (sequence is synthesized)
ttacaggcgtgagccaccgtgcctggcagctactcaacgatctttccagctctcctctccttccggccacacaggagggttgcgtgtccacacccccctgaagtaaggcatgatgccaga

SEQ ID NO: 853191 - DNA, 120 bp, Artificial Sequence
  ENSG00000287629_12 (sequence is synthesized)
catgatgccagaacttgctttggatgatgacacagaaacagcagtgatacaccacttctggatggcagcactgaagagccaaggtgtgattctccaacctgtcttttccctggctctgtt

SEQ ID NO: 853192 - DNA, 120 bp, Artificial Sequence
  ENSG00000287629_13 (sequence is synthesized)
cagtctagaggcccatgttgatatggaggtgccccaaggtcaaagcctggaattctgggccaccaaatagagaatgactgccctggaacatcccctcagagccacagatgttgagtcact

SEQ ID NO: 853193 - DNA, 120 bp, Artificial Sequence
  ENSG00000287629_14 (sequence is synthesized)
gaggttaggaggtggtttgttactgcagcagaactcagcctaacctgacttattcaccagtcctggttctagaaagctacataatcagggggtaggtaggcccaaaagcaccactaagcc

SEQ ID NO: 853194 - DNA, 120 bp, Artificial Sequence
  ENSG00000287629_15 (sequence is synthesized)
agggtgcctcacctcccctcattgatcctttagaaagaaggaaagtccggccttccccagcaaggcagtgctgctctgacctatgcatgcttcaggacatgagatgttagtgagctgctt

SEQ ID NO: 853195 - DNA, 120 bp, Artificial Sequence
  ENSG00000287629_16 (sequence is synthesized)
ggtcccaaagagcaagatcagggaaagtgagtgctccagagacaccaatcgtggtgcccaccatcccacagccacccagaggcctctgccccagagcctaggatgacagtgtccaagact

SEQ ID NO: 853196 - DNA, 120 bp, Artificial Sequence
  ENSG00000287629_17 (sequence is synthesized)
ctggagtgtgaaggtggaaatgctgtgagaatgagggaggtggggggagggctggaggaaaaagaggtgtcatgcaacctgatataggaggaggtcaacagagtggaaacacagagatga

SEQ ID NO: 853197 - DNA, 120 bp, Artificial Sequence
  ENSG00000287629_18 (sequence is synthesized)
ctgcacaagagttgggggagcagccaggcccccaggcctgtcagccagccttgtttcagggtctcttgagcaagcctgtgtttcttccattcatagcaggactgtgcagaaaggcagtgc

SEQ ID NO: 853198 - DNA, 120 bp, Artificial Sequence
  ENSG00000287629_19 (sequence is synthesized)
caacatcctaggaacctgcacctcctttctggccagtcaacaaatccacccatgagacttctctcccagtccctcccagtcctgtctgacccttttctacatatacagagttaagtgcca

SEQ ID NO: 853199 - DNA, 120 bp, Artificial Sequence
  ENSG00000287629_20 (sequence is synthesized)
caaggaggctcattctgcacgtgtccccggggcctagaattccatttggcatggagtgagtgctctctgtatatactacttgtgccatgaaacaattctgagttccccagggagagccat

SEQ ID NO: 853200 - DNA, 120 bp, Artificial Sequence
  ENSG00000287629_21 (sequence is synthesized)
ctgctcctctggaggctaccacctgtcttccatctgagcttttgtcttcccgggtgcctgagtcagcatctctgttatctggccccttctgacctcccctgcctgccgagggaggaatga

SEQ ID NO: 853201 - DNA, 120 bp, Artificial Sequence
  ENSG00000287629_22 (sequence is synthesized)
gtccatactgctcatcacagcatccccagggctcagcacataagtgggagcaccggtccctgctgtcccagagctactgtggctccatgcctggtgctcatgggaaaccacacctgcaca

SEQ ID NO: 853202 - DNA, 120 bp, Artificial Sequence
  ENSG00000287629_23 (sequence is synthesized)
ggccctggcctcttgtggccattgccttcaggacttctcctctttcatgcccctctgcatctgacccaagacccacctatttgcccatcccccatcccccaccgctgcccttgcctcatc

SEQ ID NO: 853203 - DNA, 120 bp, Artificial Sequence
  ENSG00000287629_24 (sequence is synthesized)
tcctgactctgggtggtccccaaagcccagccccttgctctggtccaagagtcaaggcaggccaagtgcaaagaagaggctgggccaagggacacgagttgtactgactttattcccctt

SEQ ID NO: 853204 - DNA, 120 bp, Artificial Sequence
  ENSG00000287629_25 (sequence is synthesized)
catcctctcactcgcatgcctgctgtgccccatgctctggggctgtggggtgcctgtacacgagcagttgtcaatggtctcaacacacacctgggcatggccattctgccactaccaagc

SEQ ID NO: 853205 - DNA, 120 bp, Artificial Sequence
  ENSG00000287629_26 (sequence is synthesized)
cctctgtgaagggcaccgtggagactatggcagcatgagccagggttgaaggctcccagaactgtggccacagggcttgagttcatcactctagccacccatcgccagctggcctgagac

SEQ ID NO: 853206 - DNA, 120 bp, Artificial Sequence
  ENSG00000287629_27 (sequence is synthesized)
cagagagccccaaggagccggggagggggcagacccagactccaggcctgagttctagccaaacaggctgagaagtccagatggacggtgggacccccacagatctccttgggaggggat

SEQ ID NO: 853207 - DNA, 120 bp, Artificial Sequence
  ENSG00000287629_28 (sequence is synthesized)
gatcctgcgtcccccttcccccagccctggaaagtgagtatggtgccctagtcgcctcattctgacatctgggggcacattgtttttttgtgttgttttgttttaaataaaaagatgtaa

SEQ ID NO: 853208 - DNA, 120 bp, Artificial Sequence
  ENSG00000287629_29 (sequence is synthesized)
aagctagtaaaacaggaacccctatccatactggaactgctgaggtgccattattgcttctggccttgtggtctggccggaaaggagcccccaccaacaatggcccaagtgaagagagtg

SEQ ID NO: 853209 - DNA, 120 bp, Artificial Sequence
  ENSG00000287629_30 (sequence is synthesized)
cttagcaccagggacacaggctcctatccccagtggggcaggggcctcccaggagaggggttggttgtgcccacctagagctcccgtgaccgtcttgaccagctgtcaagctgtctggtc

SEQ ID NO: 853210 - DNA, 120 bp, Artificial Sequence
  ENSG00000287629_31 (sequence is synthesized)
agctgtctggacccctcacctgatcccagaggggaagtgtacaagaacatgaaacccatgtcccaggacagggtttcattgccagctccccaccagtgtctctgacctctgcttgtcagt

SEQ ID NO: 853211 - DNA, 120 bp, Artificial Sequence
  ENSG00000287629_32 (sequence is synthesized)
atggcctgacaggtctcagcctggccacggccactcaggcctactcaggctgtagtggggccagcaggtgatgacaccaccagtgcctgtgggagatcctggtgccagtgatgggggttg

SEQ ID NO: 853212 - DNA, 120 bp, Artificial Sequence
  ENSG00000287629_33 (sequence is synthesized)
gaaacccatggaggaccctgcctacagcccactgggagagatcaactttttttgggaaaatgtgagccagctccaaagagctgccaggcactgggactagagattaaaaatagcaacagg

SEQ ID NO: 853213 - DNA, 120 bp, Artificial Sequence
  ENSG00000287629_34 (sequence is synthesized)
gagggggggaccctgaggacatcacggaagcccaaagatcaaggagtgcaaggaagaaaaagagctacagtaaagcaggagcctggagtccccagccttggggtgggggtcctgaccaga

SEQ ID NO: 853214 - DNA, 120 bp, Artificial Sequence
  ENSG00000287629_35 (sequence is synthesized)
agccttcttcctcggggaggggcgaaccttctctcccccaggacagcaggagcgcctgagcgtacgtctacagctccaacatcaattgggcaaggaagctgctggcactgtaccctccaa

SEQ ID NO: 853215 - DNA, 120 bp, Artificial Sequence
  ENSG00000287629_36 (sequence is synthesized)
gcccagagaacaaccagggtggtgtggcttggattataaatcctcagatcactcgggcaccttgggcctgcccaaatctgtacagaataaagtgcttcgtttattgatgattaaaatgtc

SEQ ID NO: 853216 - DNA, 120 bp, Artificial Sequence
  ENSG00000287629_37 (sequence is synthesized)
cccagctccctgccccagtgccatgggcctcataaggtcagaggggttcagtccccctaaccattcccccggggcccaagcctcttcccactccagccatgctgggaaggcaatagtgtc

SEQ ID NO: 853217 - DNA, 120 bp, Artificial Sequence
  ENSG00000287629_38 (sequence is synthesized)
ggggagtggtgggggtttaaggtgcaaagagtataacaaacaaaactgtataaacacaataggaaagagcttaactaggaaacatgtagcttatggaaccttcctccccatattaaaggc

SEQ ID NO: 853218 - DNA, 120 bp, Artificial Sequence
  ENSG00000287628_0 (sequence is synthesized)
aggtgccgtctttgaattttccacactcttggcgcatgcgcctcagctccttggatatcaccctgacattgagcccctggtgctgtgcttgggactgagggtaaatgacacagtcagtgt

SEQ ID NO: 853219 - DNA, 120 bp, Artificial Sequence
  ENSG00000287628_1 (sequence is synthesized)
cccaaccccaccgcatggcaaaacaaatgctgacacttctaattgccttttgtcagccggggaagtgttgaatattaccaggatttcaggcaaaatgactgggtttttcagcaaccccaa

SEQ ID NO: 853220 - DNA, 120 bp, Artificial Sequence
  ENSG00000287628_2 (sequence is synthesized)
ctggaaaatctcaaagttatgtgaagccaaaaaaaaaaaaaaccaattaatttagggttttgatcctggggaaacctgccaaagatgtcaaaaggttaaaaacatttaattgaaacagaa

SEQ ID NO: 853221 - DNA, 120 bp, Artificial Sequence
  ENSG00000256988_0 (sequence is synthesized)
agcacctcagagatacctcagcccagggcacagtgcaccctggggatcctttgctcccaaccaccccgaaggatgcatctggaatttctgcttattgggtgaccaaaaaaagggagaaga

SEQ ID NO: 853222 - DNA, 120 bp, Artificial Sequence
  ENSG00000256988_1 (sequence is synthesized)
ggaaccttcgttctgcagaagcgtacacaccctgataaggtgtcaagaacctccgtttgagtacccctcgggttaagcctgactgggctgccggccacccttcaggcagagctgatgttc

SEQ ID NO: 853223 - DNA, 120 bp, Artificial Sequence
  ENSG00000256988_2 (sequence is synthesized)
tgtgatgaccttcacatcaagcatgaggtcgtgccccaagaagggtttcactgtgcccagggaggttcccctgagaaggacaagccattggcaaattcatgaatcagagttctgttttta

SEQ ID NO: 853224 - DNA, 120 bp, Artificial Sequence
  ENSG00000256988_3 (sequence is synthesized)
cactgggagcctctccaagatacagcctgtgtgaaggaaaaggtctggacaaggagaggaacagtaaagagaaacaaaagtcctcggtttgaatgaggagagattttgagcccgcagcgg

SEQ ID NO: 853225 - DNA, 120 bp, Artificial Sequence
  ENSG00000256988_4 (sequence is synthesized)
gttgcggggtggaggatggcggaaggggcagatgccgttaccgggttctgtttctctttcgctggccaccttgttaagctcccattggccaggtgtccggagtgggactcaccactgcag

SEQ ID NO: 853226 - DNA, 120 bp, Artificial Sequence
  ENSG00000256988_5 (sequence is synthesized)
ggggctccagccccacacagccgcctcccaggaaggactcaggtgggctttcaggttatccgcggtgggatgcaggggtgaaggaagctttggtggtggatgtgagaatttgggatgggg

SEQ ID NO: 853227 - DNA, 120 bp, Artificial Sequence
  ENSG00000256988_6 (sequence is synthesized)
gtgtggaactttactggctcctgccatgcagcgtgcacagtgctttctgcaggatggcatcgaaggggctggagctggggggcagcacgtctctgtcctcagaccacggtggaggatgtg

SEQ ID NO: 853228 - DNA, 120 bp, Artificial Sequence
  ENSG00000256988_7 (sequence is synthesized)
gactgtccaggctccaagctgtccatccctcagtgccatgacctaaccgttaagtgggatggagcatgggaggggaacgcaactgcacctttcagagagaggccctctgagcaggaagag

SEQ ID NO: 853229 - DNA, 120 bp, Artificial Sequence
  ENSG00000256988_8 (sequence is synthesized)
tggctgcagtagaaaagatgtggctgagaaggggaagaaagagcctcgcgagcatcagcactaggagaggcaattgatttcatcctgtgagtctcaggggagtggaggctgccccttcca

SEQ ID NO: 853230 - DNA, 120 bp, Artificial Sequence
  ENSG00000256988_9 (sequence is synthesized)
aaagaactggcaggactggccatgagccaagtagggaacagctgctgctgactgagggagaagctgtgcagcctcgggcaattcagtcaacctctctcggccaaggacaatataataatg

SEQ ID NO: 853231 - DNA, 120 bp, Artificial Sequence
  ENSG00000256988_10 (sequence is synthesized)
cctgctttactgaccttagtgaattgttacgatgttcaatggtgaaagagagttgtaaaatgtgaagtgcaattaaatgtataggtgcgatattatcagcagaacttcttgggctggagg

SEQ ID NO: 853232 - DNA, 120 bp, Artificial Sequence
  ENSG00000256988_11 (sequence is synthesized)
aaggacaggaagtggtacttttttcaaaagaatctggtgatgctgatatcctatgaaggttgagacctgctacctaagacttccccaaaatccatgaaggtgatcactcagagcacatgt

SEQ ID NO: 853233 - DNA, 120 bp, Artificial Sequence
  ENSG00000256988_12 (sequence is synthesized)
tttttaaaaaggcatattctcaggcttctcccagatcttctgaatcaaaatttcaaggggtcctggcaacctctatatttagcgagcaataagagcaatgtggacacgttatgccagtga

SEQ ID NO: 853234 - DNA, 120 bp, Artificial Sequence
  ENSG00000256988_13 (sequence is synthesized)
aaagtttgtcgattagctccttttctactggataatcatatccagcaatgcttctggacagcacaggcaaatcagctcaaggaggggaagcaccctcctcagacgcccacaggtcagcca

SEQ ID NO: 853235 - DNA, 120 bp, Artificial Sequence
  ENSG00000256988_14 (sequence is synthesized)
agtgaatagctgagtcatgagatgcttccacactcagtcattcaacctctctgtggattcccaagttttctggaagttctcgctgatctcggggattctcaatgggtttggagaagccaa

SEQ ID NO: 853236 - DNA, 120 bp, Artificial Sequence
  ENSG00000256988_15 (sequence is synthesized)
gcccccagtcaaggtgacctccagccatggaaggatccccctgaacatatctaaagagaactctcctttctgaaggaaacagaatatggacaacgaggagaaatgaccaggaccaagtcc

SEQ ID NO: 853237 - DNA, 120 bp, Artificial Sequence
  ENSG00000256988_16 (sequence is synthesized)
ttcacagcagtcttcaatctaccggtcaaggtcaggaggaagggcagccagcataggaggctgaggggttgtaggtgaagtcaaaggaaagccaagagatggagagctcctggaaaccaa

SEQ ID NO: 853238 - DNA, 120 bp, Artificial Sequence
  ENSG00000256988_17 (sequence is synthesized)
caaccaggactagaccccaggggccccatcctcctgggcccacgctggccttccagtggaacacatgatctgcaacaggtcaggagtacgtggggggcatccatgggaagaaccacctaa

SEQ ID NO: 853239 - DNA, 120 bp, Artificial Sequence
  ENSG00000256988_18 (sequence is synthesized)
gaatggacgtatgtgcccacaagatgagcacagataatgtgaagcattgtgtgataaccatttatattctgacctctgccctaggttctaaaatgtacctattccaggtatataaatgac

SEQ ID NO: 853240 - DNA, 120 bp, Artificial Sequence
  ENSG00000256988_19 (sequence is synthesized)
tggaaggatccccctgaacatatctaaagagaactctcctttctgaagggtttgttttcatcattgccatttttattcacgagactgtcaactaggtcagtaattcttcaaaaccaatcc

SEQ ID NO: 853241 - DNA, 120 bp, Artificial Sequence
  ENSG00000256988_20 (sequence is synthesized)
atgccagttcccaggtgaaggaagacacagctccatccataaacactgccaagtggcttccaatggcaggggatttttccccagcattcaccaagcaccaatttcatgccagcacagatt

SEQ ID NO: 853242 - DNA, 120 bp, Artificial Sequence
  ENSG00000256988_21 (sequence is synthesized)
ttgttgttattttttgttgttgtatccagattcagatgtttgccatggtcatagcaatcattcatttatttaaaaagtatatattgagcagctactgagtgccagcatggtgccaggtgc

SEQ ID NO: 853243 - DNA, 120 bp, Artificial Sequence
  ENSG00000256988_22 (sequence is synthesized)
tgaggatttagcagtgatctatacaaaatatctgctttgataagcatacattttcatgtaataaattacattatagacagaaaattttaacagtagacaataaggaaaataattccatat

SEQ ID NO: 853244 - DNA, 120 bp, Artificial Sequence
  ENSG00000256988_23 (sequence is synthesized)
tgcagtaaatgccttgaggaggataaatgggatgccatgtcagaaatgaacttggggactcaactttgcaagggtagctggaaaagttccctctgaagaggtagtatttcaactgacaat

SEQ ID NO: 853245 - DNA, 80 bp, Artificial Sequence
  ENSG00000256988_24 (sequence is synthesized)
ggcaaaactctgtctctactaaaaatgcaaaaattatctgggcatggtggagggcacgctttaacctgggaggtggaggt

SEQ ID NO: 853246 - DNA, 85 bp, Artificial Sequence
  ENSG00000256988_25 (sequence is synthesized)
tagataagagaatggggccacagtgccaaatgcagggaagagcattccagactgacaagtgcaaaagccctgagctagaaaggtc

SEQ ID NO: 853247 - DNA, 120 bp, Artificial Sequence
  ENSG00000256988_26 (sequence is synthesized)
tccagactgacaagtgcaaaagccctgagctagaaaggtcatgggtgttcaaggtcaaaaagaaggccgtgcgctgggaggagaatgggcaagggaaagggaggtgcaagataagattga

SEQ ID NO: 853248 - DNA, 120 bp, Artificial Sequence
  ENSG00000256988_27 (sequence is synthesized)
agaattagcaagggtaccatcttatagggtgaggtgttcaggttttatcttaagggcggtatgaagccaatgatggttttcaagcagaggagagacgtgatgtgatttacttagaggctg

SEQ ID NO: 853249 - DNA, 120 bp, Artificial Sequence
  ENSG00000256988_28 (sequence is synthesized)
ggaggggaatgaattatgaagaggtagaagaagaaatagaaagaccaggaaattgcagtcgtctggggaaaagatgatggtgacttgggccagagaaaggtagagtcagtagagatagag

SEQ ID NO: 853250 - DNA, 120 bp, Artificial Sequence
  ENSG00000256988_29 (sequence is synthesized)
tggagaggaggtgaggagaactgaggaggtatgtttagatgatagaatcagcaggaattagtcatcaataaaacatgagaaataagcagccaatgccaagctcaagcaactaggcaggta

SEQ ID NO: 853251 - DNA, 120 bp, Artificial Sequence
  ENSG00000256988_30 (sequence is synthesized)
ggtgtcgccctttactgagaaagggaagacaaggggttaaacaagttgggatgcgtcaagacctcacctttagatgttttacattggagagggaaattatacatgcaaattaagacatca

SEQ ID NO: 853252 - DNA, 120 bp, Artificial Sequence
  ENSG00000256988_31 (sequence is synthesized)
aggaggcagttatttatttaggtctggaatatgaaaaagaaacttacgatttatgaatttaagacatctagaaatatatacattcatggcaccaaggtcttctgcagaaacagaatatgg

SEQ ID NO: 853253 - DNA, 86 bp, Artificial Sequence
  ENSG00000254560_0 (sequence is synthesized)
ccaggtgcgggatataatctcgtggtgcgacgctttttaagcccttcagaaaagcgcagtgcccgtcacccctttctttgactcag

SEQ ID NO: 853254 - DNA, 120 bp, Artificial Sequence
  ENSG00000254560_1 (sequence is synthesized)
gatgaagatcctgaataccaaagagggccgctgacaggtctaggagtacacttctagcacctagcagagagaggcttcactacatcatgcttcctgacatctctccctttgaagagcagt

SEQ ID NO: 853255 - DNA, 120 bp, Artificial Sequence
  ENSG00000254560_2 (sequence is synthesized)
cagactcctgctttgctcttcagacttaatttgggggtttaacagccatgtgaagtgctcactccccctttgccttctgccatgattgtgtgtttcctgaggcctccccagaagctgaga

SEQ ID NO: 853256 - DNA, 120 bp, Artificial Sequence
  ENSG00000254560_3 (sequence is synthesized)
agatgcttcctgtacagcctgcagaactggatagcccagagctattccatgtattccatggatgggcacatttggaagtttggttctaaaatctaaaagaagaaatttaagtgtgctgaa

SEQ ID NO: 853257 - DNA, 120 bp, Artificial Sequence
  ENSG00000254560_4 (sequence is synthesized)
gataactgcaactccaaacctaacgctgtgtaattctatgttctgccattttgaagcaaagtggaaccagaagtgagaggactatttctaggtcatgctacggttaccctgaccccagtc

SEQ ID NO: 853258 - DNA, 120 bp, Artificial Sequence
  ENSG00000254560_5 (sequence is synthesized)
tccgggctgccagtttcatttggtttgggtgtcagtagcatgatggaaagacaaaaaaacacaacttgacatctgcagaaatgggttcaaattttacctgcaactcaccaattctgtggc

SEQ ID NO: 853259 - DNA, 120 bp, Artificial Sequence
  ENSG00000254560_6 (sequence is synthesized)
tgagagaggcagaagcacatttccaatcactgggggaacctgagaccattctttccaacccattttgccaaatggatgtcctgaggaaggtgttccaagagaggcgatgtcaggatagtg

SEQ ID NO: 853260 - DNA, 66 bp, Artificial Sequence
  ENSG00000285669_0 (sequence is synthesized)
tagtccccactttctaataccaccatcatggggatggaatttcaaacataaatttgggggatggga

SEQ ID NO: 853261 - DNA, 120 bp, Artificial Sequence
  ENSG00000285669_1 (sequence is synthesized)
catggggatggaatttcaaacataaatttgggggatgggacacagattcagaccatagcacatcactttcttcttcctaacagatcttcaattttgttcaactatccacccatccatgga

SEQ ID NO: 853262 - DNA, 120 bp, Artificial Sequence
  ENSG00000285669_2 (sequence is synthesized)
ttgactttaatcagtccattccaatgaatatttggcctttctctgatccacaggtgcatgtataatttgcctaatacaagctaagggaagaacatatttcatagttgggggaggttttcc

SEQ ID NO: 853263 - DNA, 120 bp, Artificial Sequence
  ENSG00000285669_3 (sequence is synthesized)
ttcttccactggatgtgaataggggaacatgctgcctgtttggaactggcagccaccttaccaccatgaggggaagcaacaaaatgcaaagatataaaaaatatagatgcttcaagacat

SEQ ID NO: 853264 - DNA, 120 bp, Artificial Sequence
  ENSG00000285669_4 (sequence is synthesized)
ggctgaacccaaacttagagcctagtccttgtagataatacattttctccctatttaagcgagagtgaactgcgttgtctgtgacttgcagaaattttgtgtcctgttacaaaatatcaa

SEQ ID NO: 853265 - DNA, 120 bp, Artificial Sequence
  ENSG00000285669_5 (sequence is synthesized)
aaagttgcctcaattttctagtgtcctgctctactgatgcagtaagcatctgcctggtcccaacattgctggctgctgtagggatggttaactgaaaaggggcaagagcatattatacat

SEQ ID NO: 853266 - DNA, 120 bp, Artificial Sequence
  ENSG00000285669_6 (sequence is synthesized)
gtacagtcacacactgcataacaacgtttcagtcaatgacagaccacatgtatgacagtggtctcataagattataatggagctgaaaaatgcttatcaccaagtgatgtcatagccatt

SEQ ID NO: 853267 - DNA, 120 bp, Artificial Sequence
  ENSG00000285669_7 (sequence is synthesized)
ggaacatcatagtgcaacacattactcatgtgttgtggcaatgctggtgtaaacaaacctactgtgctgctagttgtatagaagtatagtagttatcattgtgttacaatcacctatagt

SEQ ID NO: 853268 - DNA, 120 bp, Artificial Sequence
  ENSG00000285669_8 (sequence is synthesized)
attcagagcagtaatgtgcagtacaggtttgtagcctaggagcaatgggctatagcctagatatatagtaggatatatcatctagtttgtgtaagtacactctgtgatattcatacaatg

SEQ ID NO: 853269 - DNA, 120 bp, Artificial Sequence
  ENSG00000285669_9 (sequence is synthesized)
atgaaattgcctaatgatacatttctcagaactcatccccattgttaagtgacacatgattgtagatatgaagccagagaaaaagctttgtttaacaagagataatggcagctttgggat

SEQ ID NO: 853270 - DNA, 120 bp, Artificial Sequence
  ENSG00000285669_10 (sequence is synthesized)
gtggcaataaagatatggacaagtggaaaaattaaagatgtaattaagagacaaaactgataagattcagggatgaactaaatactaagggaagggagagacaggtggcaagcatgaccc

SEQ ID NO: 853271 - DNA, 120 bp, Artificial Sequence
  ENSG00000285669_11 (sequence is synthesized)
taggagtttctattttgcataagtagatggatagtgatacactcactaagctccagagatcaccagaacagagaaggtttaatattgaagaacaagaatttgatgtttgccaggcgcagt

SEQ ID NO: 853272 - DNA, 88 bp, Artificial Sequence
  ENSG00000285669_12 (sequence is synthesized)
cctgtaatcccagtactttgggaggctgatgtcgtggatcatgaggtcaggagtccgagaccagcctgatcaacacggtgagactccg

SEQ ID NO: 853273 - DNA, 120 bp, Artificial Sequence
  ENSG00000285669_13 (sequence is synthesized)
agcaagactccatctcaaaaaaaaaaataaaaaattgatgtttgacacactgaatttgagatacctttgaagtatccagtttagatttttctataacagcttgattaatatataatttac

SEQ ID NO: 853274 - DNA, 120 bp, Artificial Sequence
  ENSG00000285669_14 (sequence is synthesized)
ttaccttttaaaaaattatctggtttttaatatattcagagttatgcaaccatcatttctatctaaattattttttaatattttcatcactccaaaaagaaaatttcatatcctttagca

SEQ ID NO: 853275 - DNA, 120 bp, Artificial Sequence
  ENSG00000285669_15 (sequence is synthesized)
gtcatttcctattctcccttcctcctaacccctggcaaccaccaagctgcttttctgtctctaatgctggccttggattcggccttcatgagctgtaatggctttccctggtggcatcca

SEQ ID NO: 853276 - DNA, 120 bp, Artificial Sequence
  ENSG00000285669_16 (sequence is synthesized)
ttagaatatttaaggtgacaattttttttttcccattctgggagccaaccacttcaaaaaatctttgtcaggtcactgatgactctatagatagtagaacagaaacctcagtggccaaac

SEQ ID NO: 853277 - DNA, 120 bp, Artificial Sequence
  ENSG00000285669_17 (sequence is synthesized)
aaaaaaaaaatagtttgaaaaaatcagttaactagtggacagcagcagccttcaaaaagcaaaaatcagcaatcactgaggaggaggagaaattgatttccaaagttaccacattacaaa

SEQ ID NO: 853278 - DNA, 120 bp, Artificial Sequence
  ENSG00000285669_18 (sequence is synthesized)
acgcaaaatatccagttcttaacaaagaattacaaagcatacaaggaaacataaaagtatggctctttcacaagataaaaagagttgaacagaaaccactcctgaggaagcccagacact

SEQ ID NO: 853279 - DNA, 120 bp, Artificial Sequence
  ENSG00000285669_19 (sequence is synthesized)
ggaattactagccaaagatgtcaaattaactctcttaaatatagtcagtaggttaaaggaaaccaagaaaaagtctgatggaaaacaggagaataatgtatgaatgaatagggaacgtca

SEQ ID NO: 853280 - DNA, 120 bp, Artificial Sequence
  ENSG00000285669_20 (sequence is synthesized)
ataaagaaatagtaaaaaagaatcaaatcgaaattctggagctgaaaattacaacagctgaaatgaaaaattcattagaggaatgcaatggcagatttgagcagacagaagaaagaatca

SEQ ID NO: 853281 - DNA, 120 bp, Artificial Sequence
  ENSG00000285669_21 (sequence is synthesized)
gcaaactgaaagataaagcaattgaaattaaccagtctaaggaccagaaaacacagaagaaagaaaaatgaacagagcccaaggaacttgtgggacaccatcaagcatgtcaacatatac

SEQ ID NO: 853282 - DNA, 120 bp, Artificial Sequence
  ENSG00000285669_22 (sequence is synthesized)
acacatcataggagtgccaaagagagatttaaaaaaagaagaaaaatatttgaaggaaatattttaggaaataataacttctcaaatttgaggagagacatgaataaatacatccaagaa

SEQ ID NO: 853283 - DNA, 120 bp, Artificial Sequence
  ENSG00000285669_23 (sequence is synthesized)
actcaagcaggataaacttaaagagacccacaccaagacacattataggcaaattgtcaaaacccaaagacaaatatggaatgccgaaagcagcaagagagatgcaattcattatgtaca

SEQ ID NO: 853284 - DNA, 120 bp, Artificial Sequence
  ENSG00000285669_24 (sequence is synthesized)
atggatcctcagcaagattaacaactgattgctcatcagaaaccacagagaccagaaagcagtaggataacacatctaaagtctttagaaaataaaaacaaaaacaataaaagacctttc

SEQ ID NO: 853285 - DNA, 120 bp, Artificial Sequence
  ENSG00000285669_25 (sequence is synthesized)
aaccaagaattctaaaccagcaaaactattcttcaagaataaaggataaattaagatatttccactttttttttaagttgaagaagtttgttgctactagatctgccctacaagaaatgc

SEQ ID NO: 853286 - DNA, 120 bp, Artificial Sequence
  ENSG00000285669_26 (sequence is synthesized)
atgctaaagagaatctttctggctgaaatgaaggaatactagtcagtaactcaaagccatagaagaaataaagaacacgagtaaaggtaactacataggaattatgggagctacaattca

SEQ ID NO: 853287 - DNA, 120 bp, Artificial Sequence
  ENSG00000285669_27 (sequence is synthesized)
gagatttggttggggacacagtcaaaccgtatgaagaggaaagccttgactggaccttgaccttgactcaaccttagcccttactctgtgagcacaagtacacaggacgatacttgtgat

SEQ ID NO: 853288 - DNA, 120 bp, Artificial Sequence
  ENSG00000285669_28 (sequence is synthesized)
ttggattgaaggatgcaaagtattgttcgtgggtgcgtctgtgagggtgttgccaaaggagatggacatttgagtcagtggaccgggagaggcagactcacccctactctgggtaagcac

SEQ ID NO: 853289 - DNA, 83 bp, Artificial Sequence
  ENSG00000285669_29 (sequence is synthesized)
aggagatggacatttgagtcagtggaccgggagaggcagactcacccctactctgggtaagcaccatctaatcagctgccagc

SEQ ID NO: 853290 - DNA, 120 bp, Artificial Sequence
  ENSG00000285669_30 (sequence is synthesized)
ctacttttgaggttttgggactcggactgatccaccactaccttccttgcccctcagcatgcagacaacctatcgtgggactttacctggtgattgtgtcctctcaatcctgaagagatt

SEQ ID NO: 853291 - DNA, 120 bp, Artificial Sequence
  ENSG00000285669_31 (sequence is synthesized)
gattaattaaaactccagcaccttttaaacatctaaataggaaacacttgtcatctattgtgtctaagggcagccactataagacttcagaagaaccctgatctccacaattttttattc

SEQ ID NO: 853292 - DNA, 120 bp, Artificial Sequence
  ENSG00000285669_32 (sequence is synthesized)
taacctgaatatttcatttctatcgatctcaggtctttagacaaactccaccaattgtcaatcagaaaacgtttaaatttacctatagcctgagagcacctgctttgagttgtcccgcct

SEQ ID NO: 853293 - DNA, 120 bp, Artificial Sequence
  ENSG00000285669_33 (sequence is synthesized)
tcccgcctttctgcactaaactaatgtatttcttgaatgtatttgattgatgtctcatgccttcctaaaatgtataaaaccaaactgctcccccaccaccttgggcacatgttctcagga

SEQ ID NO: 853294 - DNA, 120 bp, Artificial Sequence
  ENSG00000285668_0 (sequence is synthesized)
ctggacttctccacacactgcctgaatgtcctccccacatagctagagtgaatgaactaaaaaagagagagaacacacacagcccagccccagcagaccacaggaggttggccccagact

SEQ ID NO: 853295 - DNA, 120 bp, Artificial Sequence
  ENSG00000285668_1 (sequence is synthesized)
caatgagtgcctgcagcagccgtacagacacagcatccttggccacctcatgcccatcccggccatctaggatcagcacaacccagatgaggccgctgaagggcaccggatgcccaggaa

SEQ ID NO: 853296 - DNA, 120 bp, Artificial Sequence
  ENSG00000285668_2 (sequence is synthesized)
gtgaggaacacagagctgcccagcttcattcgttggcacagcaactgcagggtagcccgagccccttgggaccctaacttgtcccttgccaaggccaactggctgccgtctggctgtggg

SEQ ID NO: 853297 - DNA, 120 bp, Artificial Sequence
  ENSG00000285668_3 (sequence is synthesized)
gaccacaaggagggacccacaagctgctggcgaagtcgctgcttcagttctggcttgagccactccacagccacctgctctccacagaggtgtggctgcccttcctccagggcctttttg

SEQ ID NO: 853298 - DNA, 120 bp, Artificial Sequence
  ENSG00000285663_0 (sequence is synthesized)
agatcaggcctggctgcctccgtgtccacaccctgacctgcggctgaggcccatttctgtctcccgcggtgatcctacctcccagcacgctcccatgtagctgttgattgttctccttcc

SEQ ID NO: 853299 - DNA, 120 bp, Artificial Sequence
  ENSG00000285663_1 (sequence is synthesized)
cttcctcccttcctcccatcctttctccctcttccctgtctgtgaatggcatttctggagtgtgagagaggcccgggaccgcaggtatgtttcctgtctgcccgttctaatcaaaggcag

SEQ ID NO: 853300 - DNA, 120 bp, Artificial Sequence
  ENSG00000285663_2 (sequence is synthesized)
atgcctgcggtgcgtctggcctcgcagaagcggagaacccatcctcggagaggggccagaggagaactgtgtgctcctttatagctgcatgctcggtgttcccctaacaggttcctgctg

SEQ ID NO: 853301 - DNA, 120 bp, Artificial Sequence
  ENSG00000285663_3 (sequence is synthesized)
gcacaaagggtcccacctttgaagacctttgggtttaaatcccagctcagttcctaaccagctgtgtgacataggaaagttgcttaacctctctgagtctcaggatcgccatctgcaaaa

SEQ ID NO: 853302 - DNA, 120 bp, Artificial Sequence
  ENSG00000285663_4 (sequence is synthesized)
tcaaagggctgatggcaacatcttcttctcaggactcatggaaaattaaacgagcgctgcttccaaagatgtttgtgcagggtggaaactcagcacagggtcgtgtccatttcacagcct

SEQ ID NO: 853303 - DNA, 120 bp, Artificial Sequence
  ENSG00000285663_5 (sequence is synthesized)
tccaagggctgcagcctaaatgtctccagccacgggagaggatgacagctgcccttctgtggcaggccttggagtaaaactcccaaaccatccccagccagcagaggctgcccagcccag

SEQ ID NO: 853304 - DNA, 120 bp, Artificial Sequence
  ENSG00000285663_6 (sequence is synthesized)
cccctccagcagggcggctccatagactacagggcaatacggcccagaggctgtccctgtccactcctgttgcgccaagctggctccgggaggggctggtgactgggaaagatgctacag

SEQ ID NO: 853305 - DNA, 120 bp, Artificial Sequence
  ENSG00000285663_7 (sequence is synthesized)
tgctacagacacaagtttgatttttcattaaatcctctaaacattgtgaaaggaaaataaatattgggaccccaaaatcactaagccaaaggataaagtcaagctgggaactgcttaggg

SEQ ID NO: 853306 - DNA, 62 bp, Artificial Sequence
  ENSG00000285663_8 (sequence is synthesized)
aaggaatttccttctggacaaatgacagacagaactcaaagtcatccctctgctcgcgtttc

SEQ ID NO: 853307 - DNA, 120 bp, Artificial Sequence
  ENSG00000285663_9 (sequence is synthesized)
ctcaaaaaaaaaaaaaaagaatgcaaccatttgtctctcacctacctatggcctggaagcccctccctgcctagagttgtcccgcctttctggacagaaccgatgtacatcttacacata

SEQ ID NO: 853308 - DNA, 78 bp, Artificial Sequence
  ENSG00000285663_10 (sequence is synthesized)
gaaggggtttcctttttggcttggctctcatttccctctttgcctgacaccatgtatgacatgcctttcaccttccat

SEQ ID NO: 853309 - DNA, 120 bp, Artificial Sequence
  ENSG00000285663_11 (sequence is synthesized)
tttgcctgacaccatgtatgacatgcctttcaccttccatgattatgaggcctccccagccatgtggaactgtgtgagtcctttaaacctctttttctttataaattgcccagattcggg

SEQ ID NO: 853310 - DNA, 89 bp, Artificial Sequence
  ENSG00000285663_12 (sequence is synthesized)
ctttaaacctctttttctttataaattgcccagattcgggtatgtctttatcggcagcatgaaaacggtctaatacgtgggcaaatgtc

SEQ ID NO: 853311 - DNA, 120 bp, Artificial Sequence
  ENSG00000254566_0 (sequence is synthesized)
ccaacacacagaggactaaagcagagacgatgaacccaagttgatgctcaaccctgctacctttggcaccctggttggaaagctctgagggcatgctgcttctgtattctcaggcatgct

SEQ ID NO: 853312 - DNA, 120 bp, Artificial Sequence
  ENSG00000254566_1 (sequence is synthesized)
gtatgggcactgccagccagcttcagagatgggtccaggtccttttagacatgttagttgatgcccaacctctagggacacaatttctttctgcagtggattcatgacctaacctgggca

SEQ ID NO: 853313 - DNA, 120 bp, Artificial Sequence
  ENSG00000254566_2 (sequence is synthesized)
tttctgaaaaagctactgagagagcccctttactctttctacaggatctggaggaggaagcaggcaggccctgggtctactggcaaccatcttgtgatcatgagttgagactatattacc

SEQ ID NO: 853314 - DNA, 120 bp, Artificial Sequence
  ENSG00000254566_3 (sequence is synthesized)
aggaaatgatccctacagaaggcagagtgcagagaggaagaaaacaatctgaggacattattgagtgctgtattaagcgcagcaaattacatgggccaataaataccttttctttcttaa

SEQ ID NO: 853315 - DNA, 120 bp, Artificial Sequence
  ENSG00000285661_0 (sequence is synthesized)
actccgaactaggatgcgtcagaggactagacgcaagttcccgggaaggggaatcctctgatcacgccgcccccaaagtatcgtcgatcatggtgctgttcgactgctttgttctcgttt

SEQ ID NO: 853316 - DNA, 120 bp, Artificial Sequence
  ENSG00000285661_1 (sequence is synthesized)
gcctcatcaggaactgaagagaacctacccggccagcgcggggaggaggaaagcctgcaaggcttggtgcattcaaacaagccctccacctctgtctccctccttccaaaccaccaccca

SEQ ID NO: 853317 - DNA, 120 bp, Artificial Sequence
  ENSG00000285661_2 (sequence is synthesized)
ctaactccactgacgagagttcagcaaactaaactgccaaggctcagcaccgaaagactctttaggagcatagggctccttctaggagcaagtaaggagcaaggaaaggacactggaaat

SEQ ID NO: 853318 - DNA, 120 bp, Artificial Sequence
  ENSG00000285661_3 (sequence is synthesized)
tcggatgcggactcaaacagcacaacactgcaggtgcctggcccctctaggatccgaagctacgttcctttcctaacagggctaaaatgaaggccagttctggaagagccttccccctct

SEQ ID NO: 853319 - DNA, 120 bp, Artificial Sequence
  ENSG00000285661_4 (sequence is synthesized)
tctccatggagcacatcctccatcatgaggtcttcagctggactccccactctcgctgccgtcaatgacctgcgctccagctccctgcctcttccctggctggggcctccgccgactcgc

SEQ ID NO: 853320 - DNA, 120 bp, Artificial Sequence
  ENSG00000285661_5 (sequence is synthesized)
tccctggctggggcctccgccgactcgcacctggaccacccgcaaggacttcaacttctcaggctcctggagtcatttctcaacatcttgtataggccaggcgcggtggctcatacctgt

SEQ ID NO: 853321 - DNA, 120 bp, Artificial Sequence
  ENSG00000285661_6 (sequence is synthesized)
gaggttgcagtgagctgagatcgcaccatgacactccagcctggcaacagaggaagactccatctcaaaaaacaaaaacagaacaaaacaaaaaagcttatatattctttgatattttta

SEQ ID NO: 853322 - DNA, 120 bp, Artificial Sequence
  ENSG00000285661_7 (sequence is synthesized)
tcttctacataaactttttcatgccttattgctctagctaggccctttcataaaagtgatgacaccgggcatcattgtctaactctcaaatttggggaatggggcatcttcatactgtta

SEQ ID NO: 853323 - DNA, 120 bp, Artificial Sequence
  ENSG00000285661_8 (sequence is synthesized)
tgtatgatgttaactgtaaacgtggtaataatgaacagcatgtcttagtcataacttcagagggaaagcactcttactaataagtatgatgctaaccataggtgtataggggaggaaaaa

SEQ ID NO: 853324 - DNA, 120 bp, Artificial Sequence
  ENSG00000285661_9 (sequence is synthesized)
taagttcccttctacccttctaaaatgtttggctggggcttctgaaacaaaatacagattaacaagagaaaaccaaacaagtttattaacatgtatatcttacatatgcctggaggatac

SEQ ID NO: 853325 - DNA, 120 bp, Artificial Sequence
  ENSG00000285661_10 (sequence is synthesized)
ccagaaaataagtaattctcacagagatagcttcaaactccatcttatacaacatcttcaacaaagaataataaatttttagagaagtgacaagacaaaagaaaaggactttgagtctcc

SEQ ID NO: 853326 - DNA, 120 bp, Artificial Sequence
  ENSG00000285661_11 (sequence is synthesized)
tacaatttaggaaattgtaggaagccaaatatacaggaaactaatggtagataaatgctagttaagcatgttatgtagatgttctgctgctgtctccaggctgataagggtctaaagtca

SEQ ID NO: 853327 - DNA, 120 bp, Artificial Sequence
  ENSG00000285661_12 (sequence is synthesized)
tttctatctggtgatttacttttagcgttcttggttgagagtggaggggagactttcatgtatatgtatgccctggttttaggaaaatagggaaaggacagagagtttttcttgtatctg

SEQ ID NO: 853328 - DNA, 120 bp, Artificial Sequence
  ENSG00000285661_13 (sequence is synthesized)
cttttccccaattgtctttagctcaagataagccttatgccaaagtggcatattttggggagatatttctaatctttatatttaaaagcttccctcttctgttagattgctatgaaatat

SEQ ID NO: 853329 - DNA, 120 bp, Artificial Sequence
  ENSG00000285661_14 (sequence is synthesized)
ataataaatgggtgttaaattttgtcatttttttgcatctactgagatgaccatatgtatttttttctttcatttgattaatatagaaaattaccttgaatgacttttgaatgttaaacc

SEQ ID NO: 853330 - DNA, 120 bp, Artificial Sequence
  ENSG00000285660_0 (sequence is synthesized)
attcacagtggtgaaagggagaaggaaactcaaagcttcaagctcattttatcctttaaaatgacattgaggccaccagagttggctgagccctgtgcagccccagtcaggacctgctga

SEQ ID NO: 853331 - DNA, 120 bp, Artificial Sequence
  ENSG00000285660_1 (sequence is synthesized)
agcgctatctgcataattgcttaaagattttactgcaaaattaatatccttgctgtgaacaaggcgaaaaccaggatgacagagcctgagatgaggggagacctaaggacacgtttacct

SEQ ID NO: 853332 - DNA, 120 bp, Artificial Sequence
  ENSG00000285660_2 (sequence is synthesized)
aacttacaatattttttcaaatcttcacaacatagtttattaaaatttgaattggactgcaaataaaatacagttaagacatggagcaaatatactgttctgatgaatcgcaacaaaaca

SEQ ID NO: 853333 - DNA, 120 bp, Artificial Sequence
  ENSG00000285660_3 (sequence is synthesized)
catgatcttagatgtcatcagtttctaccttactttccaaataaaatatttgacttcagagcagccaagagacttagccaaaaatcatatagttagagacagaatttgaacaaaaaccta

SEQ ID NO: 853334 - DNA, 120 bp, Artificial Sequence
  ENSG00000285660_4 (sequence is synthesized)
gatatcctggttttcaatctaaagttctttacattatactccttgttagttctcttggaaatattttacaagttttctgaaatagcattgtgttttgaaataatttgaatgctaattaga

SEQ ID NO: 853335 - DNA, 120 bp, Artificial Sequence
  ENSG00000285667_0 (sequence is synthesized)
ttttttttcctaacttgagtggggagaccttaactaaaggagctgagaggggagaatggcagatagatgtaggataattgatggtgcaagaaaccagaaaaggaaaagtagatgggaagg

SEQ ID NO: 853336 - DNA, 120 bp, Artificial Sequence
  ENSG00000285667_1 (sequence is synthesized)
gggaaaggggtgagcaaaaagtcagagaagtccgcctcttcctacaagatttaaagagtgcataaagattgaaatattttgaggtagggaggcatgcatgcttccatggatcagctgcct

SEQ ID NO: 853337 - DNA, 120 bp, Artificial Sequence
  ENSG00000285667_2 (sequence is synthesized)
ggattaccctctacaatcatccttagggcagctggggtcactgtcctttaaaatttaagtacaattgactccaaacctgtgtaccacttaagaaacccagcatacctgccaatatctcca

SEQ ID NO: 853338 - DNA, 120 bp, Artificial Sequence
  ENSG00000285667_3 (sequence is synthesized)
gagtttcattgggaacttacatttctcctaattatctcaggccctaatttcttgtttgcaaaaaatattgtgctctttggaagatttgtcaccatatcccagatattagtccatttatat

SEQ ID NO: 853339 - DNA, 120 bp, Artificial Sequence
  ENSG00000285667_4 (sequence is synthesized)
tacctcaaaatattgcaccctacctataagcaggaaaaatgcccaatattatattattatattatagttatatgattgttaaataaactagagtttgtggccattaaaaatcatggtaaa

SEQ ID NO: 853340 - DNA, 120 bp, Artificial Sequence
  ENSG00000285667_5 (sequence is synthesized)
agcacattataaggtgatatagcagatggtaatatataaatatacataaataagtataatgcgtagattttaaaatgagacttttcttctgtgacatctatattttcttatttttatagt

SEQ ID NO: 853341 - DNA, 120 bp, Artificial Sequence
  ENSG00000285667_6 (sequence is synthesized)
tttatagtgcatgtatatttctcctggaagcagggaaatggtatctttaagtagcttttaaaagtatttttaagaaaggtgttttttaaaagatatttatggggttcgaaagaaaaaaat

SEQ ID NO: 853342 - DNA, 69 bp, Artificial Sequence
  ENSG00000285667_7 (sequence is synthesized)
agtggcgtggtggcacgcctgtagtcccagctacttgggtggctgaagcatgagaatcacttgaaccca

SEQ ID NO: 853343 - DNA, 120 bp, Artificial Sequence
  ENSG00000285667_8 (sequence is synthesized)
ctccagtctgggcaacagagtgagaatctgtctcaaaagaaaaagaaaaatatattaggactctggaaaggaatttggaaatgaatctttgaagtgtagatgggactttagcaaatagag

SEQ ID NO: 853344 - DNA, 120 bp, Artificial Sequence
  ENSG00000285667_9 (sequence is synthesized)
atgggctgagtaaggagactgtcccaggcagaaggaacagtacaaccaagaacccacagtgggaaatagatggagtgttcagaggggagcaccaagaaatccatttggctggagcacagg

SEQ ID NO: 853345 - DNA, 120 bp, Artificial Sequence
  ENSG00000285667_10 (sequence is synthesized)
actggtgtagaagaaaagtaggggaatcaatgtggaaagccatcctccaataaattcaagtttttattttggaatgactttccatttaaagaatttcgaggatactacaaagagttccag

SEQ ID NO: 853346 - DNA, 120 bp, Artificial Sequence
  ENSG00000285666_0 (sequence is synthesized)
ttctgtttttttttctctcccacccatccttattgccaaccaccccttagttgataagtggagaaaggaagagggttatgaagatttcaggtcactgcagatgaaacatacaaagacaaa

SEQ ID NO: 853347 - DNA, 120 bp, Artificial Sequence
  ENSG00000285666_1 (sequence is synthesized)
cccagggcttcccatattatattgaatatagagaatgccttaggggaactctaagaagcttgaagtcattttccctttagaaatcataaagaggtcagtgatttataattcagaagaaca

SEQ ID NO: 853348 - DNA, 120 bp, Artificial Sequence
  ENSG00000285666_2 (sequence is synthesized)
atggacaggaaaagttctctacctgcccgtgcaagcaacgactgtcttgcgaggctttctaatgtagtcagagcttcaagatgctcaatgtttgagaatgaggaaataaatgaatgaacg

SEQ ID NO: 853349 - DNA, 120 bp, Artificial Sequence
  ENSG00000285666_3 (sequence is synthesized)
agaaggaaattttcctgaatgcattcagtttattccagacagactttgttcaacactccgctgtgaatcagaacaagacctcagtcaagctgtggactacataacatgacataggctatg

SEQ ID NO: 853350 - DNA, 120 bp, Artificial Sequence
  ENSG00000285666_4 (sequence is synthesized)
aagcagcaaaagaaacttctgtcttaaatagagtggatagctgactataatagaagacaattctacaatccacagtacaagacaagttctcatgactattaaaaatctgtatagatccca

SEQ ID NO: 853351 - DNA, 120 bp, Artificial Sequence
  ENSG00000285666_5 (sequence is synthesized)
agagactccaaatagaagcaggccagacatcatggcatccatgcaaaattagactgagggattgaagacaaaggcgctagaatgctggagaggcacttttgcagaaatgctggtgagaag

SEQ ID NO: 853352 - DNA, 120 bp, Artificial Sequence
  ENSG00000285666_6 (sequence is synthesized)
ctggagaggcacttttgcagaaatgctggtgagaagcaccaaatgctaccctcccatctccccagctgctttcatttctctggagctgaaacaaaggttcaagcgattctcctgcctcag

SEQ ID NO: 853353 - DNA, 120 bp, Artificial Sequence
  ENSG00000285666_7 (sequence is synthesized)
acgcagagctagagctttgctactgcttttcggggccagcctttctgaaccagaaaaaaaggtatatgggtaccaacacgaggtctaactaggagtcaggaaagttaaaagagaagtttg

SEQ ID NO: 853354 - DNA, 120 bp, Artificial Sequence
  ENSG00000285666_8 (sequence is synthesized)
aagataaatcattctggtggcacgaggacgttatcgataaagatgctttggtctggaaagagtatattaagccacttctgtcatgcagcgaggaattaataaacagttttcatgcctata

SEQ ID NO: 853355 - DNA, 120 bp, Artificial Sequence
  ENSG00000285664_0 (sequence is synthesized)
gaggctcgagtcgcggcgcctggggcggtggccgccggaccaaagctggcctctcccggctcctcctcctcgctccccaaggcctttcccaccgcgtcattgtctcggtttatctgcaga

SEQ ID NO: 853356 - DNA, 120 bp, Artificial Sequence
  ENSG00000285664_1 (sequence is synthesized)
tacgtctacctagcagtcagcccagcagcgtaagtggtgaccagtgtgggcctctttgatcctgagaccgaaggctcggccactggccctctccatttgttccttgttgccctcccttca

SEQ ID NO: 853357 - DNA, 120 bp, Artificial Sequence
  ENSG00000285664_2 (sequence is synthesized)
tgattcaatccattaattaggacttttcctaccagctggcagttcagagctccgcatccccaggcctctgagtcacagttcctgccttcatgaaactaggagttggggccactgcattct

SEQ ID NO: 853358 - DNA, 120 bp, Artificial Sequence
  ENSG00000285664_3 (sequence is synthesized)
actccttcgggactattgtttcatttctcagtccctcaaaccctttattggatgaacatggggttaggacagcggttctccactgcaacagttttgcctcccaggagacatttggcaatg

SEQ ID NO: 853359 - DNA, 120 bp, Artificial Sequence
  ENSG00000285664_4 (sequence is synthesized)
tatgaatcattttcagcctctcatctggggtgagatgtcattggaatctacagatggtggagggcacaggctattttctgatcggtttctgaaacctgaaaatggaattagcagaagaac

SEQ ID NO: 853360 - DNA, 120 bp, Artificial Sequence
  ENSG00000285664_5 (sequence is synthesized)
tatcctgaacgaatatgtgaccacagagaacagaaaactaagggcagaaaaagataacctgcaaagaatgctggtaatcaagtagagttactgttgagctgaactgaatgatcggatcct

SEQ ID NO: 853361 - DNA, 120 bp, Artificial Sequence
  ENSG00000285664_6 (sequence is synthesized)
cttgagccccaaatgagatataactattaccataatcaagagttgactggaggtaaagaacactacaatcccagtgttctagtgacaaagccactaaagaagctggttctgacctactgt

SEQ ID NO: 853362 - DNA, 120 bp, Artificial Sequence
  ENSG00000285664_7 (sequence is synthesized)
aagcaagccatgcagactcagcagaccagaaaacgtctttctcctgcttttcaggctacttgctcataccatttacctataccacttagttgctcatctattaaacttagaggacttttc

SEQ ID NO: 853363 - DNA, 120 bp, Artificial Sequence
  ENSG00000285664_8 (sequence is synthesized)
tgtctaccacggtgtttcgaacttctcacacttctgagaatcctcctccttctcagtagacaaccatggattctactgcagaaaacacagaagccatcagattcaaactctttcaccttc

SEQ ID NO: 853364 - DNA, 120 bp, Artificial Sequence
  ENSG00000285664_9 (sequence is synthesized)
acgccaacccatctataagccttcttaaatttgtacccagatgggcctcctgtctttgtgttaacatgaaaaagtgtctcttcctgtctatctaaagccaatcccacctcctacgctctg

SEQ ID NO: 853365 - DNA, 120 bp, Artificial Sequence
  ENSG00000285664_10 (sequence is synthesized)
ctgcccttcccatcttctaggaaccgtgtgcttctttccttacattggctctccaggtgtctcatccattctcatagctttaaaagacacttattttcgtcactggtgtcagcagcccaa

SEQ ID NO: 853366 - DNA, 120 bp, Artificial Sequence
  ENSG00000285664_11 (sequence is synthesized)
ccttctactcagacgccagcctatacaccctactgcctatctcacatctcttcttgatgtcccacagataactcaatttatctaaaatgtaacccaattttttttcttatccctactctt

SEQ ID NO: 853367 - DNA, 120 bp, Artificial Sequence
  ENSG00000285664_12 (sequence is synthesized)
attatactaactagcaccaaccgtcaacccagttgctcaagctaggaatctgaaagtcattgattttcgctttccctcattccttacatttatcagcaaactgtcaaatccacttccaaa

SEQ ID NO: 853368 - DNA, 120 bp, Artificial Sequence
  ENSG00000285664_13 (sequence is synthesized)
aatctccactccagtctccactggcaccaccctatttcaagctgccatcatctcttgcactgactactgccacagcctcctaactggtctccttcattccattcagcactttgcatacaa

SEQ ID NO: 853369 - DNA, 120 bp, Artificial Sequence
  ENSG00000285664_14 (sequence is synthesized)
cagccagagtcatcttttcagcgctttcatgccattcccctgctgaaaatcctttgcaactgcttctaactgcacttaaataaaatccaaatgccgtatcaggtctacaaagccccacac

SEQ ID NO: 853370 - DNA, 120 bp, Artificial Sequence
  ENSG00000285664_15 (sequence is synthesized)
aatacagcctatctactcctccaaatttatcctgtgctactcttcctttgctccagccacactggccttttttagttctaagaatcatataactaagctctttcctgccgcagtgccctt

SEQ ID NO: 853371 - DNA, 120 bp, Artificial Sequence
  ENSG00000285664_16 (sequence is synthesized)
gtacatgctactccactcctggaatgtctaactctctctcatctttcaggttttagcattaattccatattctcagagaagccttttttagctaccctagccctccaatgtcctatgtcc

SEQ ID NO: 853372 - DNA, 120 bp, Artificial Sequence
  ENSG00000285664_17 (sequence is synthesized)
ggggaggagggtgctatctttctttcctaatagattataaactgtctaagaagacaaaggcaatgtctattttgatcaccattgtattttcagcacctagcacagtgctgggcaggcaag

SEQ ID NO: 853373 - DNA, 120 bp, Artificial Sequence
  ENSG00000285664_18 (sequence is synthesized)
aaatatttaacaaatgaattaatcctccttttgaaaattttaaagatctctcattactcaaaacaatctcaacaagaaacttatttttaaaccatcaataaaagcaaatacaagttttac

SEQ ID NO: 853374 - DNA, 120 bp, Artificial Sequence
  ENSG00000285664_19 (sequence is synthesized)
taatttataattagtaaaattataatttactaatacaagttgtatgtctgaagaatccattttatcttcaacttcagaattaaaatatacttcaatactaactagaagagtggcagagat

SEQ ID NO: 853375 - DNA, 120 bp, Artificial Sequence
  ENSG00000285664_20 (sequence is synthesized)
tgagagcaaagactgaggctccctaaagtataaggaattctcaagactgcaacacggaaaccctgcccaagcttccagcctgctgccctgtggaattaattctccggactgcaacagcct

SEQ ID NO: 853376 - DNA, 120 bp, Artificial Sequence
  ENSG00000285664_21 (sequence is synthesized)
ctcttgtctgcatttccagcctgctggtctgctcttcagatttcagacttgccagcccccacaaccacgctattttctgatcggtttctgaaacctgaaaatggaattagcagaagaact

SEQ ID NO: 853377 - DNA, 120 bp, Artificial Sequence
  ENSG00000285664_22 (sequence is synthesized)
cctaatttcaacgtatttccatatgttctttaaaatcacctgaaactgccctgcgcaggctcacaccacggctctgtaccaagggcttggacccgcctgcagccagacggcatctcacta

SEQ ID NO: 853378 - DNA, 120 bp, Artificial Sequence
  ENSG00000285664_23 (sequence is synthesized)
gatgtcatcatcatcaaagagatcttcaaaaccatttaaaaagtctacatgaacagccttttcattagttgccaagtccatcaagaacctggtgctgcctcccgcctcgtccaggtccac

SEQ ID NO: 853379 - DNA, 120 bp, Artificial Sequence
  ENSG00000285664_24 (sequence is synthesized)
ggaaacatctcatccacggccagctacatcttgggctgcggcgctctaggcccacttccggccacggggccgcttcctatttttctattttttaacaactccccatattaatattcattc

SEQ ID NO: 853380 - DNA, 120 bp, Artificial Sequence
  ENSG00000285664_25 (sequence is synthesized)
actcattgactgttaagcccttctatgtatcaggaattgttctaggtactaggacatatcagttaagaaaacatttgttaatccttgccttcatgtagtttattagattgtgaacagatc

SEQ ID NO: 853381 - DNA, 120 bp, Artificial Sequence
  ENSG00000285664_26 (sequence is synthesized)
agaaaaaaacatgtaaaaaattataaaatgttaggtgatcaaagttatggtgaaaaacaggaaagggaagaggcagaaggagtgttgaggtgcagtgttaaatagagtagtcagagaaga

SEQ ID NO: 853382 - DNA, 120 bp, Artificial Sequence
  ENSG00000285664_27 (sequence is synthesized)
cctctctgaaatgtcatttgagttaaattctgaaaggtgtgaggaagtcagccttgtgactatgtctagaggaagagcattccaagaaaataaaactgtcagagtggcttggtgatgcct

SEQ ID NO: 853383 - DNA, 120 bp, Artificial Sequence
  ENSG00000285664_28 (sequence is synthesized)
tgatgcctgaaaatgcattttactatttttgtacacgtctgaaattttccatgaaacaagttaaaaaaaaaagtagccctggtaaaagggaggttgaagcgggcggatcacttgaggtca

SEQ ID NO: 853384 - DNA, 120 bp, Artificial Sequence
  ENSG00000285664_29 (sequence is synthesized)
aacgaatatgtgaccacagagtaggtaaatataactgctctttaattattaataaatttggggtaagtatatctaataaagagcagaaatcatgttaagtaaatacctgctccttaaatt

SEQ ID NO: 853385 - DNA, 120 bp, Artificial Sequence
  ENSG00000285664_30 (sequence is synthesized)
ctgccactttcttgaaagcatctaggcatatctggtttttttaaaaaacatactacagcatttttcagctaaagttacacaattaaaaatcaaatattttcttcattcttgtatatttaa

SEQ ID NO: 853386 - DNA, 120 bp, Artificial Sequence
  ENSG00000285664_31 (sequence is synthesized)
gatataaagttaatccacttatcctcaaatgtaatttttggggtttcatggattagcaataattactataattaggtaggttcagaaactcagaagtgatttcaagtatattctttgaac

SEQ ID NO: 853387 - DNA, 120 bp, Artificial Sequence
  ENSG00000285664_32 (sequence is synthesized)
ctaagatttatctaatacaactgcatcattacttcctagagttatttttaaaggagtaagatttaacatgtgaagagatctaatggtttatgaattctacttttaattcacaacgtaccc

SEQ ID NO: 853388 - DNA, 120 bp, Artificial Sequence
  ENSG00000285664_33 (sequence is synthesized)
tcagctttaaatgccagtggggccatactgggataaaataaaggcattagaaaattccaagcctctgaataagcagttgtctacactgcttcaacattaagtggaggcagggtggtggtg

SEQ ID NO: 853389 - DNA, 120 bp, Artificial Sequence
  ENSG00000285664_34 (sequence is synthesized)
gtactctctctccacccattcatttctccaaagtaaatcaagtactagtatgtggtgaaaaatctaaaaagtattgaaggataaataacaaatccttacataacaaatctcatgcctgag

SEQ ID NO: 853390 - DNA, 120 bp, Artificial Sequence
  ENSG00000285664_35 (sequence is synthesized)
atatgatatgcttctaacaaagtcaccacaggcactatttagtgggagacagtaaggcaagcattacatttcgaaaagttctcccaaatgtttccgccatatcccccaggtttgagagtc

SEQ ID NO: 853391 - DNA, 120 bp, Artificial Sequence
  ENSG00000285664_36 (sequence is synthesized)
actgtactacatgattcaaatgtatttttgttcctaggtcattttctgtctggctcacaaaccaggtagtattaaatgtatattaatatgcatatttacattagtaaaagaatattgtta

SEQ ID NO: 853392 - DNA, 120 bp, Artificial Sequence
  ENSG00000285664_37 (sequence is synthesized)
agtagcttttttgtctgtcttaagtagataaagcagttcttaactagatgggcccatgagaattgcttgtaaaatcaataataataatattaaaaatacatgctgggaccatatccccag

SEQ ID NO: 853393 - DNA, 120 bp, Artificial Sequence
  ENSG00000285664_38 (sequence is synthesized)
acaggtgtgagccactgcacctagcctccagcttcttgataatcactagtttagggaagggagagaatgaagggtagcaagaatgacttatttttctaatggtaggtagttccatattgg

SEQ ID NO: 853394 - DNA, 120 bp, Artificial Sequence
  ENSG00000285664_39 (sequence is synthesized)
taatggtaggtagttccatattggaactgggtagccattggctgcatatgaagtgtgaaaaagtggtttgcatttcattacaacaataacaaagtaaacctaactctccacattaagata

SEQ ID NO: 853395 - DNA, 120 bp, Artificial Sequence
  ENSG00000285664_40 (sequence is synthesized)
ctgatcatttcactgacatgagaatttaggacttactgatttactgtatgccttgtatcaagaagtaattaacagacttagaaatctgtataagatttctaaatgtgtaagagtggggct

SEQ ID NO: 853396 - DNA, 120 bp, Artificial Sequence
  ENSG00000285664_41 (sequence is synthesized)
ggagaagaacataagtaagtaaacaagatttataccaaaataaaacatacccagaggactgtgagacatgaaaactttaaaatagccataccaaaatactatactaatttatgctcaatt

SEQ ID NO: 853397 - DNA, 120 bp, Artificial Sequence
  ENSG00000285664_42 (sequence is synthesized)
ttacatttcaataaggataagctagcatttatgaggcactacacaaagcaatgctccagaacctctataacagaatatatagcaatgtttttttttgtttgtttgtttgttttaaagata

SEQ ID NO: 853398 - DNA, 120 bp, Artificial Sequence
  ENSG00000285664_43 (sequence is synthesized)
gtttgtttgttttaaagataggggctcactgtcacccaggctggaatgaagtagtgttagtgtgctcacaggtcacagcagcctcgacttcccaggctcaggcaatcctcctgcctcagc

SEQ ID NO: 853399 - DNA, 120 bp, Artificial Sequence
  ENSG00000285664_44 (sequence is synthesized)
cagcaggcctgagccactacacccagtgatagcaacgaaatttaatgttcattataattagcatgttatcaaacagaagatgaatctagtctaatctacacaggctatataaatactata

SEQ ID NO: 853400 - DNA, 120 bp, Artificial Sequence
  ENSG00000285664_45 (sequence is synthesized)
catataaaaaagcatgagggtgaggggaattgagaaactgaggtaaagaagggttctcagggaagataaagcgtttctggttaaaaaagtatattgaatacgtgcatttattttcactcc

SEQ ID NO: 853401 - DNA, 120 bp, Artificial Sequence
  ENSG00000285664_46 (sequence is synthesized)
tttcaaaatcacgtaaaaaataaagaaaacataaacctataagggcccccaaaatggaagaaaatatgggataagaaatctcagaaaagttttgggaagcagaagtcagatggaacagta

SEQ ID NO: 853402 - DNA, 120 bp, Artificial Sequence
  ENSG00000285664_47 (sequence is synthesized)
actttgtaaactggagaaatataaaaccaaggtgtttgtagaaggaggtaccaatgggtaacaccctgattcactgttctaatcatcaaactgaggcacagaaaacagatagactacctg

SEQ ID NO: 853403 - DNA, 120 bp, Artificial Sequence
  ENSG00000285664_48 (sequence is synthesized)
aaaaaatttagtccgccccagcatccctttcctgttccattactgaattaaactcaggtaacctactccacagacacacaccctttaggatcctttacaaacagaacctgaatagcccta

SEQ ID NO: 853404 - DNA, 120 bp, Artificial Sequence
  ENSG00000285664_49 (sequence is synthesized)
gggaaaagatcttttagatagtgatgtttgaaaaagcttgctcaatatgtctaaataccttacagagggatgatgagctaaactccacccaatatagagcttcctattaggtactgatat

SEQ ID NO: 853405 - DNA, 120 bp, Artificial Sequence
  ENSG00000285664_50 (sequence is synthesized)
gagatgtcattggaatctacagatggtggagggcacaggttcacttggcaatgaggagcccaagataaccaggagacagtctcaacttctggtttaatggaaccattggctcacaccacg

SEQ ID NO: 853406 - DNA, 120 bp, Artificial Sequence
  ENSG00000256670_0 (sequence is synthesized)
gtttcattaggaggggaagagagacgttagaaaagagaaaatgtccatccatcatagccaaactagccaaactctcttacattatctccttcaatcctccgagcaactctgcaaggggct

SEQ ID NO: 853407 - DNA, 120 bp, Artificial Sequence
  ENSG00000256670_1 (sequence is synthesized)
tgaggctgggagattaatgctgtcctcaaagtgaagagtcaccactacttgtcaagtcatgtcatctctgcagccacgtgcattttgtaaactgggaagaataaacagacatttctgaca

SEQ ID NO: 853408 - DNA, 120 bp, Artificial Sequence
  ENSG00000256672_0 (sequence is synthesized)
gattcacaggccaagacgctgccttggcgcagcactccccgtgttgacgtggaaggtggtgatggcagtgagcaaaaaagtgatccatgcacagatgcatttgtgaacgccggatgaaac

SEQ ID NO: 853409 - DNA, 120 bp, Artificial Sequence
  ENSG00000256672_1 (sequence is synthesized)
aaagttaaaataggacccagcggatgaagtggactgaaacactgaatctgaaacattgatgatcactacagcaaagggaagagctcggtaaattgtgcatatcgttcttagatcttccac

SEQ ID NO: 853410 - DNA, 74 bp, Artificial Sequence
  ENSG00000256672_2 (sequence is synthesized)
gcatatcgttcttagatcttccacccaaaagtaacacttccacttacatgtattggccacgagacaggattgca

SEQ ID NO: 853411 - DNA, 120 bp, Artificial Sequence
  ENSG00000256672_3 (sequence is synthesized)
ggcgcgaaccactgtgtctggcctccgggtggttttaagtgggaacttttatttctcacacattcttctgtatattctatattttctacaagaaatatatattacttttctaatcaggaa

SEQ ID NO: 853412 - DNA, 120 bp, Artificial Sequence
  ENSG00000237036_0 (sequence is synthesized)
ccggcgcagagacctcgtctgccccgggagggggatctgtgtggtggggagagggaggcggatgccgggaaaccgtagggacgcggtcagaaaggcgacgggctgtcggagttggaaagg

SEQ ID NO: 853413 - DNA, 120 bp, Artificial Sequence
  ENSG00000237036_1 (sequence is synthesized)
taaagttggaggctcggcggcgtcctgcctccgcgctggccacacccgccgcggctgcccggggcagggagggatctggctgattctccctgtaccctgtgccctcggagctgcccctcc

SEQ ID NO: 853414 - DNA, 120 bp, Artificial Sequence
  ENSG00000237036_2 (sequence is synthesized)
aggaaagggatcgcggtctggactccccggggagttcccttgatgaggggaagggcaggtttggggacggcgaggacacgcggcgaccggagagaggctacctgacccgcgcagcccgga

SEQ ID NO: 853415 - DNA, 120 bp, Artificial Sequence
  ENSG00000237036_3 (sequence is synthesized)
ctcccttcccttcccttccagggacgcctggtttccccccaagcgaaccgggatgggaagtgacttcaatgagattgaacttcagctggattgaaagagaggctagaagttccgcttgcc

SEQ ID NO: 853416 - DNA, 120 bp, Artificial Sequence
  ENSG00000237036_4 (sequence is synthesized)
ctccccgccctcttcctcgcgtagaaccgtgggatcctaggtggcaggactcagagctaaggtatccacaggccatgaattccttcctaaatgagcggtcatcgccgtgcaggaccttaa

SEQ ID NO: 853417 - DNA, 120 bp, Artificial Sequence
  ENSG00000237036_5 (sequence is synthesized)
ggcaagaagcatcggctgacagatgtgatctctgaacctgatagattgctgattttatcttattttatccttgacttggtacaagttttgggatttctgaaaagaccatacagataacca

SEQ ID NO: 853418 - DNA, 120 bp, Artificial Sequence
  ENSG00000237036_6 (sequence is synthesized)
accttgttgctagggaccgggcggtttgcggcaaccgtgggcactgctgaatttgaattgaggggcgagggaaaagttttcctcaggtgtggtggggagagggaggcggatgccgggaaa

SEQ ID NO: 853419 - DNA, 120 bp, Artificial Sequence
  ENSG00000237036_7 (sequence is synthesized)
tccttcgaataaggaaacgtctttgggaccaactttatggaataaataagctgagctgtatttcaagtaatatagttataaattaacaatgtagcagttattgatagagaaattgagaaa

SEQ ID NO: 853420 - DNA, 120 bp, Artificial Sequence
  ENSG00000237036_8 (sequence is synthesized)
actgaaacgtgaccggagtattggaaataacgtagtacatcacctagcacaatgacacatagtaggtgctcaataaatttatgcttataatttttgtcacttctatggcaggattttttt

SEQ ID NO: 853421 - DNA, 120 bp, Artificial Sequence
  ENSG00000237036_9 (sequence is synthesized)
attaggttaaaattatcttttaaacaccttccggaattttagaatattcattaataatgtcttcaaacctttcaactgaaataaatttacagctgaagtctgatgatttaaagttagaaa

SEQ ID NO: 853422 - DNA, 120 bp, Artificial Sequence
  ENSG00000237036_10 (sequence is synthesized)
ctgaagtctgaggagacaaatacatgcccaccataacaacatcacacaatacctagagtcaaaacagttatccctattcctacccccaactgagttattcaataaagcctgccttgttga

SEQ ID NO: 853423 - DNA, 120 bp, Artificial Sequence
  ENSG00000237036_11 (sequence is synthesized)
ttttgagaagtaaatgcgttatttattggtccatgaaatgtgactgtaaatattctttgctatacattatgtctatatatctgcattcatcctcaatgccaaaactagaatcattagtct

SEQ ID NO: 853424 - DNA, 120 bp, Artificial Sequence
  ENSG00000237036_12 (sequence is synthesized)
taatgatcattttaagtacaggcagtcctcgctttccttgataccatgttaaccgaaacttgtgtatgtcaacacggtgtccttgctttgcttggttaagtgtgagttcttcctcccttt

SEQ ID NO: 853425 - DNA, 120 bp, Artificial Sequence
  ENSG00000237036_13 (sequence is synthesized)
ttttaagagttgtacaatgtttttcagtcgcctaccgaatcaggtcatagactatggaattgaccccaccccaccaacatttttacagctaccctgatttctgaccagaaaggaaaaaaa

SEQ ID NO: 853426 - DNA, 120 bp, Artificial Sequence
  ENSG00000237036_14 (sequence is synthesized)
aactttccagctctatcacacattttacctactcttaaacttaggaggtattacaaatagcattttctcatgttctctttctggcctgtacctccctgctaagcttccttcagtgttcat

SEQ ID NO: 853427 - DNA, 120 bp, Artificial Sequence
  ENSG00000237036_15 (sequence is synthesized)
cctcacctcatagagagatgaagtgaagagacaaacagaagtcattttcttccttactttagtggtttctggtttagttagtttgggccaaactgtggacaagtaccttttcaggtaact

SEQ ID NO: 853428 - DNA, 120 bp, Artificial Sequence
  ENSG00000237036_16 (sequence is synthesized)
tttttttcttatttctatgtcctcaacacctagtggagtacgtagccaatagtagatgcttaataaacatttcttaaattaatattgttgaccttttctgaccctgttcttgacagtaag

SEQ ID NO: 853429 - DNA, 120 bp, Artificial Sequence
  ENSG00000237036_17 (sequence is synthesized)
gtacataatctgccttcatccctttagtccttaggaacagataaagtcatggatatgaaagtgatcactgtcattaatatccacattaaaattgctcttgattttagtttctccataatc

SEQ ID NO: 853430 - DNA, 120 bp, Artificial Sequence
  ENSG00000237036_18 (sequence is synthesized)
attttccctaaacaatgaactctgttcacctttttttttaaaatatgcacagtgaatattactggtagcccaaatcttctaacataaaatttccattttgtaaaagcttctgataagcat

SEQ ID NO: 853431 - DNA, 120 bp, Artificial Sequence
  ENSG00000237036_19 (sequence is synthesized)
atatgttatgaattgaatgtttgattattatactttaatattcttgaaaatattgatacctggactggaaagaaaacagacaaaagtaaatctcagaataaattactgctttaaacatga

SEQ ID NO: 853432 - DNA, 120 bp, Artificial Sequence
  ENSG00000237036_20 (sequence is synthesized)
attatccggcttcagcgctccgtgcgtccggcccaggtaacaacttccccaaaaaccgaaagagaaaagcgcgaggcgcacgcacaccggcccatcccggcgcagagacctcgtctgccc

SEQ ID NO: 853433 - DNA, 120 bp, Artificial Sequence
  ENSG00000237036_21 (sequence is synthesized)
cccgagcgacagcgacggcgccggccggggccgcggcgcgcggaagccactttgcacggtcagcgccgggcacaagtttgttccgcggctcccgggggcctgggcgctgagggagaatcg

SEQ ID NO: 853434 - DNA, 120 bp, Artificial Sequence
  ENSG00000237036_22 (sequence is synthesized)
aagaagcaacagccgctccacccgggaccagaaaagtggccagtgcgtcccggccgcccgccctgcgccggggatgcggcggcgtcggcgccggctaacggtccagggaggcggcagggg

SEQ ID NO: 853435 - DNA, 120 bp, Artificial Sequence
  ENSG00000237036_23 (sequence is synthesized)
cggcgggagccgctaggcggagagagaccagggacgcctggtttccccccaagcgaaccgggatgggaagtgacttcaatgagattgaacttcagctggattgaaagagaggctagaagt

SEQ ID NO: 853436 - DNA, 120 bp, Artificial Sequence
  ENSG00000237036_24 (sequence is synthesized)
gcaagagggcagtatagacacctgcttcgctgatagtgctgctggcagccccgcctgctattcctagcgccttttgtgctatactgcaggaccaaacagagactccagctttggtaatgt

SEQ ID NO: 853437 - DNA, 120 bp, Artificial Sequence
  ENSG00000237036_25 (sequence is synthesized)
acaattagttttttccatatacttaggataactacatgtaatttagtattctgctgttttcacttacatatcacatacattttcctgatacaggtacatagtctttatatttgtcatttt

SEQ ID NO: 853438 - DNA, 120 bp, Artificial Sequence
  ENSG00000237036_26 (sequence is synthesized)
tcacttgactgctatgtttctcaaattgatatactgtcatttcctaagccagttatatattgttgaacatttaaattactcccttttttggtttgtaaataaacattgttatgaaatagt

SEQ ID NO: 853439 - DNA, 120 bp, Artificial Sequence
  ENSG00000204860_0 (sequence is synthesized)
gagtgcacctggcctgagagcccgccaggccctgcccctgctcggctcctcgtctgctgaagctcgggacctctagccagtggccctctgcagccacggggaatggggctgagagccggt

SEQ ID NO: 853440 - DNA, 120 bp, Artificial Sequence
  ENSG00000204860_1 (sequence is synthesized)
tcccgctgcagggcagaccacctagctcagccgcagccacagggacatctggccccggttctgagatgtggggagtgctggcgggctcgggggttgcctggaggctgctgcctgcacaca

SEQ ID NO: 853441 - DNA, 120 bp, Artificial Sequence
  ENSG00000204860_2 (sequence is synthesized)
gaaggcggatgcagcttgggtgcccaggcgggctggaggacagcgggctgggaagccaggggccgccgggacctggggctggaaaccacatctgcccacagccgcagcctcctgcacctg

SEQ ID NO: 853442 - DNA, 120 bp, Artificial Sequence
  ENSG00000204860_3 (sequence is synthesized)
tcatcctggcggcgccctgacgtcggagaagcagcaggcgcggagctcctgcagcgggcaccgctgcagcaacccgacccggcgcaggcggcagtggaaggcggcctgctagcacggctc

SEQ ID NO: 853443 - DNA, 120 bp, Artificial Sequence
  ENSG00000204860_4 (sequence is synthesized)
ccgcggccccaggaccaggggtgcggccagcaccgccctcactccccgcgtctcgtggatattgccctccctggaggcggctggacctaagcgaggctcgcagcgatcggccccgcgaag

SEQ ID NO: 853444 - DNA, 120 bp, Artificial Sequence
  ENSG00000204860_5 (sequence is synthesized)
actcgcatgcagggctcaggatcccgcattctggcgccgcggcaccgcacctttcagcagccctgctcctcttcttgttggtaaacttttgtcactctgccatgaaaagcatccaggcgt

SEQ ID NO: 853445 - DNA, 120 bp, Artificial Sequence
  ENSG00000204860_6 (sequence is synthesized)
ccttgatttcgacattgcgtgcacgctcagccgagctcatcagacgggcggttgtccccagagcccgcgggtagcttgttcccgggcggcggctcctgctggatgcagctccttgtgggc

SEQ ID NO: 853446 - DNA, 120 bp, Artificial Sequence
  ENSG00000204860_7 (sequence is synthesized)
ctaccaggcttggtggagccacagcagacctgtggagaggaagagtaaggcgggctctgcagggcagtgggccgggaccatgagagaggcgggtcagtctgggctccaagctcagcctct

SEQ ID NO: 853447 - DNA, 120 bp, Artificial Sequence
  ENSG00000204860_8 (sequence is synthesized)
cggattccccgggacccacggcttataatgcgcttaaatcccacgcctcgcccgagagacagcacgtcaccgtcaccgtcaccgcctagcgcccctgacccgctcccactccgctgcagc

SEQ ID NO: 853448 - DNA, 120 bp, Artificial Sequence
  ENSG00000204860_9 (sequence is synthesized)
ggagggtgtgtgagggagagggacgcagggagggaaaagcgttgggagggcaaacatcttttcataagcttttccccttctatatgccatctctgatgggagcctctttagatctttcgt

SEQ ID NO: 853449 - DNA, 120 bp, Artificial Sequence
  ENSG00000204860_10 (sequence is synthesized)
ccatttactaattgggttgttcgatttcttattgttgagttgtaagtggtttttaatggtctggatgccagacaggtgttttgcaaatattttctccgtctgtggcttgtttctccattc

SEQ ID NO: 853450 - DNA, 120 bp, Artificial Sequence
  ENSG00000204860_11 (sequence is synthesized)
tcttatttcctttcccagagcaaaagtttttaattgtaacgacttcataccaatatcttctttcatggtagaaatttgtcttttatgtactttactgttgtatctacaaagtaattgcca

SEQ ID NO: 853451 - DNA, 120 bp, Artificial Sequence
  ENSG00000204860_12 (sequence is synthesized)
aacccaaagttacctaaatatcccttttgttattttacagaagttttacagcttttggatttaaatttaggtctaaaaattgaattcataaaagtagagagtataatgatgcttaccaga

SEQ ID NO: 853452 - DNA, 120 bp, Artificial Sequence
  ENSG00000204860_13 (sequence is synthesized)
ggctgtgttgctggggagaaaaatgggaagttgttcacagatgcaaagattcagttaaaccggagaaatgcgttttgaaatctattgcacagcaggatgactatagtcaataataatgta

SEQ ID NO: 853453 - DNA, 120 bp, Artificial Sequence
  ENSG00000204860_14 (sequence is synthesized)
gccatgaggtgatggatattttatcctcgatgtagtcattcctcattttatacacatatccaagcatcacattgtaccccataaatgtatgcaattgtggtttgacaatttaaaatatta

SEQ ID NO: 853454 - DNA, 120 bp, Artificial Sequence
  ENSG00000204860_15 (sequence is synthesized)
ttaacttaaaaatgtgtcgttcgagttaatttttgaggagcaaggtctgtgtctcaattctttttttttttgcatatatgtatatatacatacacgcaatgtattcatcactgtttttga

SEQ ID NO: 853455 - DNA, 120 bp, Artificial Sequence
  ENSG00000204860_16 (sequence is synthesized)
aaaagctaccctttctcccttgaattgcctttacctttttgtaaaagatcaattgactgtgtttgtgcactcttatttctgagttctctattctgttccgttgatcactttgcaagtcct

SEQ ID NO: 853456 - DNA, 120 bp, Artificial Sequence
  ENSG00000204860_17 (sequence is synthesized)
tgaactttgttcctcccccacaatattgttggctattcttgttagtttgtctttctatataaactttagaattagtttgtcaatttccacacaataatttattcatgttttcacgagagt

SEQ ID NO: 853457 - DNA, 120 bp, Artificial Sequence
  ENSG00000204860_18 (sequence is synthesized)
tgtaatgaatttgtaaatcacactgaagagaactgacatcttaacaacactgggtcttattttgtgaatacagatgtcccttcatttatttagatctttaatccctttcaacagatttta

SEQ ID NO: 853458 - DNA, 120 bp, Artificial Sequence
  ENSG00000204860_19 (sequence is synthesized)
tagtttttctcacatagaccctgcccatattttgctagattgtgtctatttcattttcttgatgctaatgaaaatggtattgggcttttaatttcaaattctcgttgttcattgctggat

SEQ ID NO: 853459 - DNA, 120 bp, Artificial Sequence
  ENSG00000204860_20 (sequence is synthesized)
gtaggacagcaattgattttgtatattaaccttataccgtgcaaccttgctataatccagaagggtttttggctgatgctttgagattctctacatagaaaatcaagttatcagcaagca

SEQ ID NO: 853460 - DNA, 120 bp, Artificial Sequence
  ENSG00000204860_21 (sequence is synthesized)
aagggcattttaatgctccctttccaatctgtataccttttattttattttcttgtcttattgcattagctaggattttagtatgatgttgaataggagcagtgagaggggataacattt

SEQ ID NO: 853461 - DNA, 120 bp, Artificial Sequence
  ENSG00000204860_22 (sequence is synthesized)
ccttgcttcttttgtgtaaaacatcccatttttcacattatgtatgatattgtctgtaggatgttcttttggtatatgttctttatcagttgaggaatttcccttctatttctaatttgc

SEQ ID NO: 853462 - DNA, 120 bp, Artificial Sequence
  ENSG00000204860_23 (sequence is synthesized)
tgagagttttaaccatgaatgggctttggattccgtaaaatgctttcttgatctattaatataatcaaataacttttcttctttagctagttatctgagggattgccttaactattttgt

SEQ ID NO: 853463 - DNA, 120 bp, Artificial Sequence
  ENSG00000204860_24 (sequence is synthesized)
gttaagccaggcttgcatacctggaataaatctcacttggtcttggtgtgtaattcaacaatgtattgctagattcagcatgctaatattttgttgagaatttttgatgagagacatttg

SEQ ID NO: 853464 - DNA, 120 bp, Artificial Sequence
  ENSG00000204860_25 (sequence is synthesized)
tctgaacatttttctttaaatgtctttttctgcttttggtattagaacttcataaaatgagttgggatatgttccttttgcttctgttttctggtagcaattgtaaataattggtatctt

SEQ ID NO: 853465 - DNA, 120 bp, Artificial Sequence
  ENSG00000204860_26 (sequence is synthesized)
ttcctccttaaatgtttcatacaattcgctagtgaaacaatctaggcctgttgctttctttcttggaaggttgttaattattcatatatttctatactagataaagagttatttgaatta

SEQ ID NO: 853466 - DNA, 120 bp, Artificial Sequence
  ENSG00000204860_27 (sequence is synthesized)
gggctcccgcgggacgtcccggaatcccaggagtgcatcccttcccgcctgagggcctgcctggccctgactcccgacccgctcctcctccgaagagagatcggggccgctgacaggggc

SEQ ID NO: 853467 - DNA, 120 bp, Artificial Sequence
  ENSG00000204860_28 (sequence is synthesized)
cctccgcagccaccggggatgggactggggggtcggttcctgtcccggtgcagccgccgccgggtagaccgcctggcttggccgcagccagggcgacatgtagccccggttctgccaggc

SEQ ID NO: 853468 - DNA, 120 bp, Artificial Sequence
  ENSG00000204860_29 (sequence is synthesized)
cacagccttcagcagcgacactcgcagactccgacctctcagaccgagtgagcccagctaagccgttaggcgcgcgcctgaacctcagcgctccgaactctcagaccgagacagcgggct

SEQ ID NO: 853469 - DNA, 120 bp, Artificial Sequence
  ENSG00000274818_0 (sequence is synthesized)
agacctaggaacaactgaagctaacacctgagatactgaaggcctggaagagttaggtacggctgatgacactgttgaaaagtcataaacgcacccaagttgagcaagaactgtgttggc

SEQ ID NO: 853470 - DNA, 120 bp, Artificial Sequence
  ENSG00000274818_1 (sequence is synthesized)
gtggacaggttaccatttgtacgcggtgattgtatttttaaatgtgctgtaactagcagccatttttattaatgggccaatctaaacagggttgaaaaagattaaccgtgacgccacccc

SEQ ID NO: 853471 - DNA, 120 bp, Artificial Sequence
  ENSG00000274818_2 (sequence is synthesized)
aaattacaatagggtcttgtagatctctttttatagctgtaaaaacggaatcattcttggctctgtgtaatgtttataaggcgtgtctgatctcactgaataaaattttatagaaaagtt

SEQ ID NO: 853472 - DNA, 120 bp, Artificial Sequence
  ENSG00000274578_0 (sequence is synthesized)
gtggtatagtacttaagaataccatagacagaggactttgaaatgtaaatggcctcttagctactatcgttcttgggtgcaggttacattttattttaatttctatttaaattaggattt

SEQ ID NO: 853473 - DNA, 120 bp, Artificial Sequence
  ENSG00000274578_1 (sequence is synthesized)
ctcaacactgaattgctatctcatctggtgggtaatggaggtttaatttaaatccgtgtacagcctttctttaacttaatatgacttttggagttcttctgtgtgtatcccattttcttt

SEQ ID NO: 853474 - DNA, 120 bp, Artificial Sequence
  ENSG00000274578_2 (sequence is synthesized)
aaatctttaaattattacttggcaccctagaacttgtatgacctgtaaatgtgtataaaatatattgatatgattctgtagaataattcagacagataataaaaagtggaatttgttgca

SEQ ID NO: 853475 - DNA, 120 bp, Artificial Sequence
  ENSG00000198221_0 (sequence is synthesized)
ctatgtgagcatcccggtgcctgcacagcaaggactctcattgggttccacacgtgctgcgcagatccctgacgcagcgttcactgaacctcaactgcaggagcttcattcctgaggacg

SEQ ID NO: 853476 - DNA, 120 bp, Artificial Sequence
  ENSG00000198221_1 (sequence is synthesized)
agacatgaaaatttccaggctgacaaataatttcgctgtcatcggtcaagactccaggatgatattctgagccatatgttaattttgataaccacctagaacaataaaaggtaaacatgc

SEQ ID NO: 853477 - DNA, 120 bp, Artificial Sequence
  ENSG00000198221_2 (sequence is synthesized)
ccatctctgcagtctccccacgccgggttcagtcaggcgaagttgcgttatctgtgatgtgttgtaacaaaaagcgtttatctttgaaacactaagacaattaaagaattctgtcatccc

SEQ ID NO: 853478 - DNA, 120 bp, Artificial Sequence
  ENSG00000198221_3 (sequence is synthesized)
gcggtggtgggtcccaaccggcggtaccgggttccttcccgaccagcggtgctaggttcggttcggacgcgcgctgctggatctaaatgggcagtgctgggtccgatgggtggtgctgtg

SEQ ID NO: 853479 - DNA, 120 bp, Artificial Sequence
  ENSG00000198221_4 (sequence is synthesized)
ttgggtccggacgcgcggtgcagagtccggacgggcggtgctggatccaaatgggcggtgctggatctggacgggcggtgatgggtccgatgggcggtgctatgttcggttcggacgggc

SEQ ID NO: 853480 - DNA, 120 bp, Artificial Sequence
  ENSG00000198221_5 (sequence is synthesized)
ggtgctaggtctaaatgggcgctgctgggtccgatgggcggtgctgcgttcggtccggacgggcggggacgggcggtgctgggtccaaatgggtggtgatggatctgtggacgggcggtg

SEQ ID NO: 853481 - DNA, 120 bp, Artificial Sequence
  ENSG00000198221_6 (sequence is synthesized)
ctggttccagacgggcggtgctgggtccagacgggcggtgggtccgatgggcggtgctaggttcggttcggatgggtggtgctaggtctaaatgggcggcgccggatccgatgggcggtg

SEQ ID NO: 853482 - DNA, 120 bp, Artificial Sequence
  ENSG00000198221_7 (sequence is synthesized)
ctgggttcggtccggactggcgggtccgggtctggacgggcggtgctggatccaaatgggggtgcagtgctggatctggacgggcggtgctgggtccgaacgggcgatgggtcccatggg

SEQ ID NO: 853483 - DNA, 120 bp, Artificial Sequence
  ENSG00000198221_8 (sequence is synthesized)
cggtgctaggttcggttcggactggcggtgctgggtctaaatgggcggcgctgggtccgatgggtggtactgggtccggacgggcggttctgggtctggacgggcggtgcagtatccaaa

SEQ ID NO: 853484 - DNA, 120 bp, Artificial Sequence
  ENSG00000198221_9 (sequence is synthesized)
tgggcgctgctgggtccggacgggcggtgctaggttcggtccggacgggtggtgctgggtctaaatgggcggtgctaggctcagcaggggaccggtgggcgtggcggcacaggtacggag

SEQ ID NO: 853485 - DNA, 120 bp, Artificial Sequence
  ENSG00000198221_10 (sequence is synthesized)
cgcagggccggtggagcgccctctccgaagggccctgcgctccccgcgctcgctgctcctcctgcccgcgcattgccccggggctgctgcgtgtttcttccagggtgattcctttccgct

SEQ ID NO: 853486 - DNA, 120 bp, Artificial Sequence
  ENSG00000198221_11 (sequence is synthesized)
gggtcacttcaaagccgaccttttcaagctgttttcttccgcggaggacacgttgttaggctttgtgtgcatttcaagggtcatgttttctgaaccgcgctctgccgctcttggggtgtt

SEQ ID NO: 853487 - DNA, 120 bp, Artificial Sequence
  ENSG00000198221_12 (sequence is synthesized)
cgagcccccacactgctgtgcggtgttcctctcacagagtgaggttggagggtcccactccctttgtgtgtctccttagaaaacgcctcttctctcagacacatcgttatctgccaattc

SEQ ID NO: 853488 - DNA, 120 bp, Artificial Sequence
  ENSG00000198221_13 (sequence is synthesized)
ttcgcagacgtagagaacggactgcagagttaataaacgtcgaggggaagctttgatgcgccccatttggccctgagagatgccacgtgatcgtcattttaaatcctttcctgggcttcc

SEQ ID NO: 853489 - DNA, 120 bp, Artificial Sequence
  ENSG00000198221_14 (sequence is synthesized)
aattcaggattcctggaaaacagttatgggctctctgcagtgttatttttgtaataaaaaacatatagcatatgtgaaatacctactgggtgatgcaggacacatagaaggctcgaaatt

SEQ ID NO: 853490 - DNA, 120 bp, Artificial Sequence
  ENSG00000198221_15 (sequence is synthesized)
aatgtgaatcattctcgtttttctgactgtcattaaaagtccccatttgtattatgtatgagtggtatatcaatatctaaactacactttattgtaggtcccaaccaacattagtttatt

SEQ ID NO: 853491 - DNA, 120 bp, Artificial Sequence
  ENSG00000198221_16 (sequence is synthesized)
gacaaatgtttaagagcagccaaaaattcatagaatacctatgattcttaaatcatgaacactcccataactggtatatgtttaggacatgaaaatttccaggctgacaaataatttcgc

SEQ ID NO: 853492 - DNA, 120 bp, Artificial Sequence
  ENSG00000198221_17 (sequence is synthesized)
ataaccacctagaacaataaaaggtaaacatgctaccatcttctattctcattgcaccactggattctggtacatctaaaaattgtacttaaatgatatccaagaaatgctgtaaaaaac

SEQ ID NO: 853493 - DNA, 83 bp, Artificial Sequence
  ENSG00000198221_18 (sequence is synthesized)
gaatgggcttttctgttattaattccattttatacatggtgagactgaaatgcaagataaaggactggactgaagctaaacaa

SEQ ID NO: 853494 - DNA, 120 bp, Artificial Sequence
  ENSG00000198221_19 (sequence is synthesized)
actgaaatgcaagataaaggactggactgaagctaaacaaacctgcactgggcgaggttgaaaaagacctttttaatctataagtcggtttttgaaaattcaagtttctactttataatt

SEQ ID NO: 853495 - DNA, 120 bp, Artificial Sequence
  ENSG00000198221_20 (sequence is synthesized)
ttagttttccttttaaacgtatattattgttagttgcactgttcaaaaagttttacagcttctatttcaatcagcactggtatactaatatttttaagtatctcctatctaaaaccaaaa

SEQ ID NO: 853496 - DNA, 120 bp, Artificial Sequence
  ENSG00000198221_21 (sequence is synthesized)
tctacgtaaaacctaaaagtaccaggtaatagaggacaacagagcaagactgtctcttaaaaaaagaagtatcacataataggaataaatatgaggacagaaagtaataatatttttgaa

SEQ ID NO: 853497 - DNA, 120 bp, Artificial Sequence
  ENSG00000198221_22 (sequence is synthesized)
tttctgattaaactttgcacttactttaaaatttttttcgaaatattatgaaaaccaggttctgagaccagccacatgaaataaaccttttcctgccccaattttcacagcctctagaaa

SEQ ID NO: 853498 - DNA, 120 bp, Artificial Sequence
  ENSG00000198221_23 (sequence is synthesized)
atagtaggtaccagggaaaagattaatacatctaaaaaaaaaaagatacaaatatatcaactatgtttaactatatcaactatatttagtaccctaggtcatttaattttctagccacca

SEQ ID NO: 853499 - DNA, 120 bp, Artificial Sequence
  ENSG00000198221_24 (sequence is synthesized)
ataaattccatattttattaaattaatcaaattttgaaaagtgtcaatattactgtataaatcatcttacaagtccttttagtagatatatcaatttagaggatggtctttagcaaaaaa

SEQ ID NO: 853500 - DNA, 120 bp, Artificial Sequence
  ENSG00000198221_25 (sequence is synthesized)
agtaaaggaaaaggatttaataaaggtccaatagcagaccttctagggcaggcagccttctatagtagcccatgcatgtgaaagttaatctaattagttgatctataaagttaaataacc

SEQ ID NO: 853501 - DNA, 120 bp, Artificial Sequence
  ENSG00000198221_26 (sequence is synthesized)
aaactctcctttgcttaacccattgctagaaaggccagtgttgttaatttcattttttaaacaaacaagcaaaaaaaattctagaggatgagtttttcataagtagggtatgtgctactt

SEQ ID NO: 853502 - DNA, 120 bp, Artificial Sequence
  ENSG00000198221_27 (sequence is synthesized)
tattggaaaatgaagaaatatatctttcaactctgcttccttcattgctttcccgtgttcctaatatttagtcacattttaggttagaactttcaggaagtgagtttttacacagaaatt

SEQ ID NO: 853503 - DNA, 120 bp, Artificial Sequence
  ENSG00000198221_28 (sequence is synthesized)
agtgctataaacagcccttaaaatgggaatttaatcgtacttatttaaaatatatatgtatataatcttaccaacccagaaagacatgttctctggcattttataaactaagatgctact

SEQ ID NO: 853504 - DNA, 120 bp, Artificial Sequence
  ENSG00000198221_29 (sequence is synthesized)
ggaaggaaaaagctaaatctgaaatacacaaacaacatatttacactgtgatatggtttagatctgtatgccaaagctgaatctcatgtcagattgtaatctccaatgttggagatgggg

SEQ ID NO: 853505 - DNA, 120 bp, Artificial Sequence
  ENSG00000198221_30 (sequence is synthesized)
cctaggaggaggtgattggattggatcatgggggcggatttcctcctttggtgctattctggtgatggagttctcactaaatcttgttgtttaaaagtgtgtggtacctcccttccccag

SEQ ID NO: 853506 - DNA, 70 bp, Artificial Sequence
  ENSG00000198221_31 (sequence is synthesized)
atcttgttgtttaaaagtgtgtggtacctcccttccccagcttcctcctgttccagccaggtaagacatg

SEQ ID NO: 853507 - DNA, 120 bp, Artificial Sequence
  ENSG00000285081_0 (sequence is synthesized)
ggcgggatcactagggccacggtgctaggcagaagggaacctgggatgacagagccactatggagcgctccttccactcctctccaaattgtcctttgttgctctggagctgacggtccc

SEQ ID NO: 853508 - DNA, 120 bp, Artificial Sequence
  ENSG00000285081_1 (sequence is synthesized)
tgccctgcaagaaggtgcgtttcctaaaacacccgggaagccaacccagctacacttaagtaacccagccacggacagtgcccgacgcgtccgtgggcctctgaggttggccttcaaaga

SEQ ID NO: 853509 - DNA, 120 bp, Artificial Sequence
  ENSG00000285081_2 (sequence is synthesized)
aatagagccgtccaaacgtgtcatcaggcccacacaaagctggtgtcaaagagaaagaggttctccgtgccttgcaaaaaaagattctcacaaaagacttaagacttggcagcaggtccg

SEQ ID NO: 853510 - DNA, 120 bp, Artificial Sequence
  ENSG00000285081_3 (sequence is synthesized)
actgtgccctttcaggataggaactgctcaggtgtgtgagagaaagagactcgagcacaaggtgtgtcccttccccctgtatttaaacctaaattaatttcactgggaggaaataccatg

SEQ ID NO: 853511 - DNA, 120 bp, Artificial Sequence
  ENSG00000285081_4 (sequence is synthesized)
cagattttttttaagtctgtttcacgctcccagcgggctaatcggttctttcaatcctaaagcaacagaaaactgtgaaatttgaagagaaattgttagatcaaaggaaaaagcaaacat

SEQ ID NO: 853512 - DNA, 120 bp, Artificial Sequence
  ENSG00000285081_5 (sequence is synthesized)
taaaggaatgaaagtactctcattatatagcaaaaatggaaagtgttcacattggggtagttcaactttttaaaacatggttaaaagaacatagtcaatttaaaaattatcaggagtgac

SEQ ID NO: 853513 - DNA, 120 bp, Artificial Sequence
  ENSG00000285081_6 (sequence is synthesized)
acagaacagcagctaggccctggggatccacatcaaccaaggacctaacatacagtgaataatgaatgttaaataatcacagtacgcacccacgtcacattttctagttgattagaactt

SEQ ID NO: 853514 - DNA, 120 bp, Artificial Sequence
  ENSG00000285081_7 (sequence is synthesized)
aaaaaaaaaaatccctccaggatactatcccagtgtgtcttctcattaaggtccattttttaaaaatacaccttgctaaactgttaaaggagtgtgagcactcttcagtcacgtgggact

SEQ ID NO: 853515 - DNA, 120 bp, Artificial Sequence
  ENSG00000285081_8 (sequence is synthesized)
gcgtcttcctacccctcaactgtatggaccttgaaacagccctggctggtctaaggagacccaagcgcccgcattttcccagcccctaccactatccttcattttgtggactgcacgaaa

SEQ ID NO: 853516 - DNA, 120 bp, Artificial Sequence
  ENSG00000285081_9 (sequence is synthesized)
tgatgcagttcctaatctggagccttcagggacacgtgacccatcacacacttggcttgttgatcagatcagaaggaacttactgtttccccagagttcttctgatagaaaacagcactt

SEQ ID NO: 853517 - DNA, 120 bp, Artificial Sequence
  ENSG00000285081_10 (sequence is synthesized)
gactagtaatctatgtagccccccagatctttagatggtggactatctgacttggctatgtcgcccggtagaattttaccatctgggcttcgaagacaactgggttcaaactctggttct

SEQ ID NO: 853518 - DNA, 120 bp, Artificial Sequence
  ENSG00000285081_11 (sequence is synthesized)
gtcacttagctgcgaacttgagcaaattacttagacctactgagcctcagtttctacacctgccacaaaaatctgataacacaggatgctgtgaagattaaataagatgctatgtggaaa

SEQ ID NO: 853519 - DNA, 120 bp, Artificial Sequence
  ENSG00000285081_12 (sequence is synthesized)
gctacagtgtacctggcatgaagtttgtgttccaaagtgattgtaagttgctcactttaaggaaggaatgtatagtttgaaaaatttttgctttcttcattgcatctggagataactaat

SEQ ID NO: 853520 - DNA, 120 bp, Artificial Sequence
  ENSG00000285081_13 (sequence is synthesized)
caactgtgacctgttctactagggggaaatgtcttatcttcaatctatggcttatatttcttgtcccaaattgtgcaatagggtaacaggtttcattattcatctctgaaatttcacaaa

SEQ ID NO: 853521 - DNA, 120 bp, Artificial Sequence
  ENSG00000285081_14 (sequence is synthesized)
aggacaacagattatgtttctgcagttcggatactcatatttcccttcatagtgttttaactggagaaagtaaagcatggctctgtgaggcagattatttttattgtcctaaattgacag

SEQ ID NO: 853522 - DNA, 120 bp, Artificial Sequence
  ENSG00000285081_15 (sequence is synthesized)
atgaagggacgggggtatttgctgtgaaggcaccacctgaaggccctgtgctgtacagaagtagaaaaaagctgagactcatgttttcctggatcctggggccagaagaggaatacaagg

SEQ ID NO: 853523 - DNA, 120 bp, Artificial Sequence
  ENSG00000285081_16 (sequence is synthesized)
ccaacaaacacgcttgctgaacagagaagtgctgatgggggaggcccagtctgtcggtgtgatatgagctataactttgacacccattattttgaataccaaacagaaagctccaggttc

SEQ ID NO: 853524 - DNA, 120 bp, Artificial Sequence
  ENSG00000285081_17 (sequence is synthesized)
agaactaaaatctgaaagttgattgatcatctggattgataaagccataaccaatgcagaaaactcaacatgaataatcattcactatcatccttcttagattcaggagcctgaaggctg

SEQ ID NO: 853525 - DNA, 120 bp, Artificial Sequence
  ENSG00000285081_18 (sequence is synthesized)
gctgctccttgcaaaaatgtttagtatcagtaagttatcaggacatgctggaaataaaatgctaacatccctctttggtaggctcagggacctgtttgtggaccttctaaagtatttctc

SEQ ID NO: 853526 - DNA, 120 bp, Artificial Sequence
  ENSG00000285081_19 (sequence is synthesized)
caaatgaaacaatgaaaaagttatcatctattttattcatttatgtgttgccttaattctaggtaatacctatttgccagtggaaagaatattggtgctacagaaatcttaattgtttgg

SEQ ID NO: 853527 - DNA, 120 bp, Artificial Sequence
  ENSG00000285081_20 (sequence is synthesized)
aaagtagaattttaaaagacatttctgccttttttcttcaaatattaaaagacttatgggataaacggagtcttgtggataatgtgggcttcttaagaataaaaattatcattttgtttt

SEQ ID NO: 853528 - DNA, 120 bp, Artificial Sequence
  ENSG00000231772_0 (sequence is synthesized)
ctgctgtggaacttgtctctgtctctttttctgattttgtccctcagtcgaattatttcttctgaggaggcaaggactgaagttgctacagacccctaaggacaggccatcggtaacact

SEQ ID NO: 853529 - DNA, 120 bp, Artificial Sequence
  ENSG00000231772_1 (sequence is synthesized)
gggtaaatcagatctcttccacgggtctatcaatgagaagaaagtgccaactgaaaacttttagaaaatacccagtttactcaaggaaaataacatgcattgaaggtgattgctcaatag

SEQ ID NO: 853530 - DNA, 120 bp, Artificial Sequence
  ENSG00000231772_2 (sequence is synthesized)
ctctaaacatattttcacaacattcacctgacaacatcagctgagagaaaaattttcagactgccgagaaacatcaggaggccatgaattcttaatcaacacaccaaattatgaaaatgg

SEQ ID NO: 853531 - DNA, 120 bp, Artificial Sequence
  ENSG00000231772_3 (sequence is synthesized)
cctataggttgaggttgatctgaaagataggactatttgtgatccagaatcaaaagagtcaagaaaagtctgagaatttcatccttggagcagaaagtgaaagtgttctggagccaaaag

SEQ ID NO: 853532 - DNA, 120 bp, Artificial Sequence
  ENSG00000231772_4 (sequence is synthesized)
tagtaacaaagatggagggcaagagatcattggattaaatcatattggcagaccaaatttcagaagaatcaacacaccagagacaagaagaacttgaagttaaagcaaagttcccttata

SEQ ID NO: 853533 - DNA, 120 bp, Artificial Sequence
  ENSG00000231772_5 (sequence is synthesized)
atgcagaaaaatcatttgacaaaattctacacccattgatgataaagaactctgaccaaactagaaatagaaggaaagttcttcagccaaataaagagctaccacaggaacatacaagga

SEQ ID NO: 853534 - DNA, 120 bp, Artificial Sequence
  ENSG00000231772_6 (sequence is synthesized)
aagctgagagaatccacagaccctctgaaggaactggatcgccactgcaggctccctgagatgctgaaaaactcaccattcacaatagcaaagacatggagacaacctaaatgaccatca

SEQ ID NO: 853535 - DNA, 120 bp, Artificial Sequence
  ENSG00000231772_7 (sequence is synthesized)
tatacaccacggaatactatgcagccattaagaagaaccagattcatgtctgtctcaggcagtggtgagacaagatggtggatccccacaccattatccatcagaccctgtgctccatag

SEQ ID NO: 853536 - DNA, 120 bp, Artificial Sequence
  ENSG00000231772_8 (sequence is synthesized)
ggaatgtgtaggacaattgccaagcgcaagacacatggaggatcctcatacagtggctgggtgaagtgacttttgttctctactgcaagtagtgatgtctcagtgaaggtctatcaatga

SEQ ID NO: 853537 - DNA, 120 bp, Artificial Sequence
  ENSG00000231770_0 (sequence is synthesized)
gtgccctgctggtgctgggagtagggcgcaagatgtcggcggatgcagctccgaggaggtaggcagtgggagccggcgttcagtccggcccgtgccaacagtggttcctctctcccccgt

SEQ ID NO: 853538 - DNA, 120 bp, Artificial Sequence
  ENSG00000231770_1 (sequence is synthesized)
agttcgaggagaccacgcgctgcccctctggcacgatcgtggatgaaccccctggcaactgaaatgggaaaggcagcgcccccgactctggggactggaccgaagtccacggtagtgaca

SEQ ID NO: 853539 - DNA, 120 bp, Artificial Sequence
  ENSG00000231770_2 (sequence is synthesized)
gctgccagaccctgaggagaggacgagaagacccgaggcctctgctacgaacactggcagccgatggaaaattcagacggatttgggacagtatgcagagttctccaagcgacagattaa

SEQ ID NO: 853540 - DNA, 120 bp, Artificial Sequence
  ENSG00000231770_3 (sequence is synthesized)
tgccttatttggctttcagggttggtgaaagaaaaagcaaagtagatgctttctaatgctaagtcatttaatgtagcaccattccttgaacttctttcatctctaaggtcgtccctttca

SEQ ID NO: 853541 - DNA, 120 bp, Artificial Sequence
  ENSG00000231770_4 (sequence is synthesized)
cctgatgatgacctttgggccatcgtacaggcatgtgtaaacttggagatcttcctcaacattgcaccatatcttgggttcattcaaggcagagtctccttgcaaaagcattctaaaaca

SEQ ID NO: 853542 - DNA, 120 bp, Artificial Sequence
  ENSG00000231770_5 (sequence is synthesized)
atgtaaagtcgaagagagtagagcaatacctccatagttggaaaatgtggaggaggccaattaagggacagaaaaagaagtgcagagaatcttggaattgttgcaaaattattctggaga

SEQ ID NO: 853543 - DNA, 120 bp, Artificial Sequence
  ENSG00000231770_6 (sequence is synthesized)
tatttctaagtctcctctatccttttccttagtgattaatacaggtttttatattaagtggacagtaaaatccaaacagaaagaggtatatgtcgtataatgaagcctatgttcaaagta

SEQ ID NO: 853544 - DNA, 120 bp, Artificial Sequence
  ENSG00000231770_7 (sequence is synthesized)
aataactgcgtaatcacgtgttctgctcaaaagaaggcctgaatgcccagtgccttatttggctttcaggggtcttgcggtgtcacccaggctagagtacagtggtgcaatcatagctca

SEQ ID NO: 853545 - DNA, 120 bp, Artificial Sequence
  ENSG00000231770_8 (sequence is synthesized)
acgagataagaagatctctcccatttccaagcgtctatgatgattctgaggcacaaggtcacatttgacagtactaggaaacccaggaaacaagaagcaaagatgacaaaggctgtgtct

SEQ ID NO: 853546 - DNA, 120 bp, Artificial Sequence
  ENSG00000231770_9 (sequence is synthesized)
gcctgggcagacgatctatttggacaagataatagacccaggcatggacatgctctccaagaaagatgccctgacagctgctcacactgaagctgaatcgaacattccaatccttagagg

SEQ ID NO: 853547 - DNA, 120 bp, Artificial Sequence
  ENSG00000231770_10 (sequence is synthesized)
ttccagcgaagatcttgaagtctccctgagccattgacacaatggccatgccatcccagtgataaaacacaaattgtggccttgttttggacagaaataaagagcccagtttgttagtga

SEQ ID NO: 853548 - DNA, 120 bp, Artificial Sequence
  ENSG00000231770_11 (sequence is synthesized)
cctgaggctcagccgacttgtcatcacttaaaacccaattcagagcgggggggcactgccagtgaatagttcatcaccgactcagtttccccatgtgtatgctgtggtattggatcagca

SEQ ID NO: 853549 - DNA, 120 bp, Artificial Sequence
  ENSG00000231776_0 (sequence is synthesized)
aaaatcaaatccctattaggataaatgattgagtgttcctgtaaagaattgttcccctggttcaagcaaccagatttcattcccagatgatcaaaaatggacttgatgaaatggaaaagc

SEQ ID NO: 853550 - DNA, 120 bp, Artificial Sequence
  ENSG00000231776_1 (sequence is synthesized)
accaggatatgccaccggaccactgaaggaatggtgatggtatgaagaaagtatttttaatgagcagagccattgtttgctctgctctgtcctcacccctcaagagaatttcccttatta

SEQ ID NO: 853551 - DNA, 120 bp, Artificial Sequence
  ENSG00000231776_2 (sequence is synthesized)
ttatgaaaactttttatcttaaaagatattacatgttaatggaactgtcgtttaacaaatgttttataagtgtaccaatcaagcacattgtcgaaataaaagatatgaaataagtgaaaa

SEQ ID NO: 853552 - DNA, 120 bp, Artificial Sequence
  ENSG00000231776_3 (sequence is synthesized)
aggcaggatgacacagtgtgagtaaaacttgaccagtcactgttcactttgagacagaagggaccagccaagaattgtgaatagtgtacagaagctctaaaagccgtcgatatatagcta

SEQ ID NO: 853553 - DNA, 120 bp, Artificial Sequence
  ENSG00000231776_4 (sequence is synthesized)
ccgtcgatatatagctaaggatgataacaagcacaacaaggacttacagcatttgctttgcaccagacaccatctaaaacacttcacaaatattaactcaaaggaacctatcattaatct

SEQ ID NO: 853554 - DNA, 120 bp, Artificial Sequence
  ENSG00000231776_5 (sequence is synthesized)
cagaggccacatgctgaacatggcctatccacagtgtggaagaagccttggatcctgagccactgttctgacaaccaaccaatttatagaagagagctacataattccactgctcaaaat

SEQ ID NO: 853555 - DNA, 120 bp, Artificial Sequence
  ENSG00000255219_0 (sequence is synthesized)
atgaggagcctgggagagcaaagcagtgtgagttctccaaattgcacagcttatgagtgcccttcagggttctgtaagttggccctggaccagggaccaggaatggtatttcttctcatc

SEQ ID NO: 853556 - DNA, 120 bp, Artificial Sequence
  ENSG00000255219_1 (sequence is synthesized)
tgccttaggtagattgaatggtatgcgaaaaaagtcctggttgagaagttgaggcacaggttttgctccatatttgctgataactgcatgtgagattttagactttctgcctgtgtaagt

SEQ ID NO: 853557 - DNA, 120 bp, Artificial Sequence
  ENSG00000255219_2 (sequence is synthesized)
tcaattagtcagcaatagctgagaacttcaacgcctctgaaggaacaaaggtggaaagacaggcagatactccagcatctggatcatgcaacttgctggctacaaataatggcaccttct

SEQ ID NO: 853558 - DNA, 120 bp, Artificial Sequence
  ENSG00000255219_3 (sequence is synthesized)
ctggcttttatctgtgtttagtcctcaaatctatgtaacattatgggttattaatgtatccagccacataattagatatggagcatctaagacatatatgtttctttggcattattggga

SEQ ID NO: 853559 - DNA, 120 bp, Artificial Sequence
  ENSG00000255216_0 (sequence is synthesized)
agcgttggggaaacatgctcaacttccagcagtcattcccgctcgcctcctttctctttgctcgaggtcttcggttcaggctccacaactgattgatgctgttttcctgttagtatctct

SEQ ID NO: 853560 - DNA, 120 bp, Artificial Sequence
  ENSG00000255216_1 (sequence is synthesized)
ttttcatcatgcacgatcctccatagtgatggaatggagacagcttctcagagaaagcacagctttggaaggtaagtgccgtttggatggtgagaccatcagatcaatttaactaggcca

SEQ ID NO: 853561 - DNA, 120 bp, Artificial Sequence
  ENSG00000255216_2 (sequence is synthesized)
atccattctcaatgaattattcatttgaccagcactttctgactttctagcttcagccagacaccgtacaagggacaggggagactgagatgaagaacactcggtgcttcttcccaaggc

SEQ ID NO: 853562 - DNA, 120 bp, Artificial Sequence
  ENSG00000255216_3 (sequence is synthesized)
actcgcaatctcggagaagacagatgtgtactcacacagatgcatatgctacagcactgtgtgatgatgctatacatgcacaaagtgaccgggaacagagcggccgtccctggcgactca

SEQ ID NO: 853563 - DNA, 120 bp, Artificial Sequence
  ENSG00000255216_4 (sequence is synthesized)
ggaggcagtctgatgcgcctccgcgttaggaagattggggtttgttccgggtctgtgatattagttctgggactattgtcaaggtgcaaaactgtaccgagcttcattttctttatgtgt

SEQ ID NO: 853564 - DNA, 120 bp, Artificial Sequence
  ENSG00000255216_5 (sequence is synthesized)
aaatgaagctgtcagtacctattctacaggattactttgaggatcagtgaaatagtgtagtgtctctacatggttggtttttaacaattaatattctttccttttccgtgccccagggcc

SEQ ID NO: 853565 - DNA, 120 bp, Artificial Sequence
  ENSG00000255216_6 (sequence is synthesized)
aggactccagtgagcccaacctggtgttttccagtgttttcaggaggcattcattctcaggggcccacctgggcttgtggaagcccgagagtgtgtatctccttgaattttgcaccctgg

SEQ ID NO: 853566 - DNA, 120 bp, Artificial Sequence
  ENSG00000255216_7 (sequence is synthesized)
atgccttccttgctcaccctggacccagccctgccctgcttttgagcaatttgtattcttggtttaacaaagtgtggagaggaccctcaaggatctcagaacctactggatgaggcagga

SEQ ID NO: 853567 - DNA, 120 bp, Artificial Sequence
  ENSG00000255216_8 (sequence is synthesized)
attcccgctcgcctcctttctctttgctcgaggttcagtctgtctgcaaagcctcccttgtcagcagctggcgaggcagctcaacaatagaatgatgcttgtttcaccgcttccaactga

SEQ ID NO: 853568 - DNA, 120 bp, Artificial Sequence
  ENSG00000255216_9 (sequence is synthesized)
gctccctcgccaagctctctccctccagcacagagaggtgcatctgcaatagacctgagggctggtggtggggtcttcagcaatgttttttccagcttgatgctcagcccagaaagagcc

SEQ ID NO: 853569 - DNA, 120 bp, Artificial Sequence
  ENSG00000255216_10 (sequence is synthesized)
tttcctctccacctgctgccacagagcccaccaccacctctggctgctgccttgtagaaattccagctagctccagtggaaatctctgggctggtgataaatgcacagtggggcaaggct

SEQ ID NO: 853570 - DNA, 120 bp, Artificial Sequence
  ENSG00000255216_11 (sequence is synthesized)
gcctggggatggggagattgtagaaaatgacttctggagtcctctccagacttccatcattaggacaattgttctcaggggctttgaagtctcttgctgttttgcgccattttctttcta

SEQ ID NO: 853571 - DNA, 120 bp, Artificial Sequence
  ENSG00000255216_12 (sequence is synthesized)
tagtaatggtcagattcttcagggctagaaagagtttgaaggccatctggtccactctcatttctctcccctccaatgccttcttctctcccctttccatgtttaaatctcctctacaag

SEQ ID NO: 853572 - DNA, 120 bp, Artificial Sequence
  ENSG00000255216_13 (sequence is synthesized)
ttgggcaacgtttcacttatacccttacagctacaggatgctcagagggtctcaaggtccctggcttttcttctgttgagctggagtctgtccacattgggttgataacaactggctctg

SEQ ID NO: 853573 - DNA, 120 bp, Artificial Sequence
  ENSG00000255216_14 (sequence is synthesized)
cttttaccccatggagcaacaggatggagtctcagctctcccctccacgacagcctggctcctgctgaaaggcgactagcatgaaaccccgaggcttctcctccaggagaacaaggctga

SEQ ID NO: 853574 - DNA, 120 bp, Artificial Sequence
  ENSG00000255216_15 (sequence is synthesized)
cttccttgaactcctcctcacatgcacagttttaagtccgtttgactggaaacgaacatttgaaatccatctcgattcagacttcctccttctgagggatttagtagacaatatgacagc

SEQ ID NO: 853575 - DNA, 120 bp, Artificial Sequence
  ENSG00000255216_16 (sequence is synthesized)
tccgagtccagcatgtgggtttataaaggtgacatcatagctgctgcccccaaagtatgtcatttagcgctgaaagccttgtctggctggtggtgttcagacccatgggagtcagtcagc

SEQ ID NO: 853576 - DNA, 120 bp, Artificial Sequence
  ENSG00000255216_17 (sequence is synthesized)
tgctggagcactcactgcccagaatcccaggcttcgagggaggtacgaaggaagaggaggcctgagccggctcgtgtggggccctcagattaaggcaggctggaagaaacaccagaaaga

SEQ ID NO: 853577 - DNA, 120 bp, Artificial Sequence
  ENSG00000255216_18 (sequence is synthesized)
gacttaatgacattcataaaggagcccagagggctgcagtgaagcatgtgcagatgctggggcctgcccaggtagcctgtgcagaggcttccagagaaagctgggtcaacttgcaagaga

SEQ ID NO: 853578 - DNA, 120 bp, Artificial Sequence
  ENSG00000255216_19 (sequence is synthesized)
aagtggagagcaagaggaggaagagcttcctaatggcagaggtggaagccagagattcagtagtgtgaaggacgctgaaaaggcagaaggggtgaaaaggctgcgtatgtgtgggcgggg

SEQ ID NO: 853579 - DNA, 120 bp, Artificial Sequence
  ENSG00000255216_20 (sequence is synthesized)
gaacttatcgggactgaacgtgtagggcaggcttttccagaggaggagatgagacttgtgcctagaaaaacatattattaggaagaacactcccttttagtttgtctttttttttttttt

SEQ ID NO: 853580 - DNA, 120 bp, Artificial Sequence
  ENSG00000255216_21 (sequence is synthesized)
ttttgctttttgtggataaaagagtctcactatgttgcccaggcaagtttcaaactcctgggctcaatctatccccccacctctgcctttctaaatgctgggattacaggcatgagccac

SEQ ID NO: 853581 - DNA, 120 bp, Artificial Sequence
  ENSG00000255216_22 (sequence is synthesized)
ttgtcttccaaatgggacactgctgaatccccagggacattgtcctcaaaagacagtaagccactgaggtgtgagcttggtggagtccaccctgcattctgggttctttgtcctccagtg

SEQ ID NO: 853582 - DNA, 120 bp, Artificial Sequence
  ENSG00000255216_23 (sequence is synthesized)
tgtacagatatgtctggccaccagcactttcaccgatgccaagatgagaaatgttttcaagggttcccagacagccttaccaggaaatcactgttggcaggagaatcaaccagtcttttc

SEQ ID NO: 853583 - DNA, 120 bp, Artificial Sequence
  ENSG00000255216_24 (sequence is synthesized)
aggttacagtggctgctagggaagaattacaggccaggagaggcctccgcttgggccacctttttgctgatgaagtggcagcagaccaagctaccttcactccatggaaatacaacgcac

SEQ ID NO: 853584 - DNA, 120 bp, Artificial Sequence
  ENSG00000255216_25 (sequence is synthesized)
acctgttggctctcaggtcctttccagagagatcagctctttggggagctgcatcccagcacgagagcattccaattccttccctccacctctgtgcccgatttccaatttgttggtttt

SEQ ID NO: 853585 - DNA, 120 bp, Artificial Sequence
  ENSG00000255216_26 (sequence is synthesized)
ttccatttcatttccctcctgttcacctttcctccctgcgggatcatttggggctttgatttccttttgtcagagtgagcatttccttcctattacaccgtccctctctgcccctactcc

SEQ ID NO: 853586 - DNA, 120 bp, Artificial Sequence
  ENSG00000255216_27 (sequence is synthesized)
catgactttgtttaattcagctgctttctgcacctggctctgcctcacagccacggggagggaaggattacagccagaaagcgcgcttcacctccccgcacatgacactcgtctctgcta

SEQ ID NO: 853587 - DNA, 120 bp, Artificial Sequence
  ENSG00000255216_28 (sequence is synthesized)
ataacaggaagaaatgagctttaatgactgacaccgctgtgcctggactggggacttggagaaggcagtccctggtggtctgcccagtatcttggcagcaggatgctgggagagccccag

SEQ ID NO: 853588 - DNA, 120 bp, Artificial Sequence
  ENSG00000255216_29 (sequence is synthesized)
aagccctggctgctggaggtcccagcctctctccctttgcctccaggaaggatagccccacagccacttgacatacttgacatggatgaagggtgtgggggttgggggggaggaggagag

SEQ ID NO: 853589 - DNA, 120 bp, Artificial Sequence
  ENSG00000255216_30 (sequence is synthesized)
aagtggtagcctctctaagaactgcagaaaaggaaatcctatgatctgacttccatgctaccagttctgggaccctcctgtgggaattaattgctctaacctaaactttgcccactgtag

SEQ ID NO: 853590 - DNA, 120 bp, Artificial Sequence
  ENSG00000255216_31 (sequence is synthesized)
ttttaaatgagtttgccctcagatgtgagtaatctggccgtcttatctttcactccactgacctccagggttggcctgacaggtcaggtggggggtccttatctccttcctcactttatc

SEQ ID NO: 853591 - DNA, 120 bp, Artificial Sequence
  ENSG00000255216_32 (sequence is synthesized)
cgggcctttaaaggaaacacaggatctctgcagcagtcaagaaggggaagagaagacttggtgttaaaaaatcatgggttcaggacatactgccccacaatatggcactttggcatgttg

SEQ ID NO: 853592 - DNA, 120 bp, Artificial Sequence
  ENSG00000255216_33 (sequence is synthesized)
aatattttaagctagaggaatttgagaaaacagcagaagcaggaaggtcccctgaggcggtcccctgaagtggtcataaactttgggaaggactctgaccttctgaagcaggtcataaga

SEQ ID NO: 853593 - DNA, 120 bp, Artificial Sequence
  ENSG00000255216_34 (sequence is synthesized)
ccctcgtgtgagagttgcccttcctgtagctggaggaaaggggcatccttatctctcaagacaaaaggagacagagaggaatccagaaaaacaagccttgctaagcttccccagttcacc

SEQ ID NO: 853594 - DNA, 120 bp, Artificial Sequence
  ENSG00000255216_35 (sequence is synthesized)
ccctccttatcaaacctattattaaaaacactcccatttaactgtttcttcagatcctcatttccttatgaaggctctctcgtcacataaaacttgtattaaataaatttgtaagctttt

SEQ ID NO: 853595 - DNA, 120 bp, Artificial Sequence
  ENSG00000271156_0 (sequence is synthesized)
tttctctatgcattcattcattatttcaacaaatatttatcgggtgtttaatatgtttatagccatgtgctaagcactgaggttatactttgtcgtgactccatggttaaactccacagg

SEQ ID NO: 853596 - DNA, 120 bp, Artificial Sequence
  ENSG00000271156_1 (sequence is synthesized)
gacaagatccacacaaatattctgtgtgaaggacacataaatagtttgggggtacatcatgcctatgactgatatgaagaaggtgtaaacaaatgtatattgaattaaagaataccttaa

SEQ ID NO: 853597 - DNA, 120 bp, Artificial Sequence
  ENSG00000271156_2 (sequence is synthesized)
aagtaactactaaaataatctagtaacacttttagagtcatttagaaaagaataaaataatcttagcctagctaacaggatgttccaataaaactattgtgaagtggtaggactcttgat

SEQ ID NO: 853598 - DNA, 120 bp, Artificial Sequence
  ENSG00000271156_3 (sequence is synthesized)
tatggtgagaatgggtcagaatggatgaatcaacacatttgtgtaaagaataatatctagaaatgatgacaatgtatatttgaaagaaaagagtattaaaaatgtctttaaattttccaa

SEQ ID NO: 853599 - DNA, 120 bp, Artificial Sequence
  ENSG00000249978_0 (sequence is synthesized)
atgcggtgggccccagccctgcttctagctttcctgcctcttgccagtcagaaatcttccaacttgcaagggagaaggaagtcagtcaccaggccagctgggtcatctgctgtaatcact

SEQ ID NO: 853600 - DNA, 120 bp, Artificial Sequence
  ENSG00000249978_1 (sequence is synthesized)
atcaagaatcagtagaggaaagtattttacttatgcaagcatgaggaggagctggaaattgatactgcaaaatctaattgaaaatgattctggatctattactgtgccacctgggacagg

SEQ ID NO: 853601 - DNA, 120 bp, Artificial Sequence
  ENSG00000249971_0 (sequence is synthesized)
ttatggatttttcttttaatataaaacaaagtttacgaaaatttttttccactttttgtatttgtaatcccattagcacagggactttggcagcaggtgggagtgaagggcagctgagct

SEQ ID NO: 853602 - DNA, 120 bp, Artificial Sequence
  ENSG00000249971_1 (sequence is synthesized)
cttcactcacacacacagggatactcacctactggccaaccacactacacacacagcacagatgcagacattgacccagtgtcagccacatgccctggaggtgtgctccactctgggtaa

SEQ ID NO: 853603 - DNA, 120 bp, Artificial Sequence
  ENSG00000249971_2 (sequence is synthesized)
gcccaatatgtgaaaattcaaatagtcaaaacagctaaagtggagggagaagatttccagctgccctgagtcggagccctccactcacccccattcccaggctcggcccccagccttggg

SEQ ID NO: 853604 - DNA, 120 bp, Artificial Sequence
  ENSG00000230798_0 (sequence is synthesized)
ggctgcgggctgcagaaactgtccggagagtggcacgctaagaatgggcgcgatggtggcagtcgtccggctcagcgacagcggttggtgtggacaaatcctccaagatttaacttccaa

SEQ ID NO: 853605 - DNA, 120 bp, Artificial Sequence
  ENSG00000230798_1 (sequence is synthesized)
gaaaaccggcggcggagcgggtggaggaggcgaggatgtgtggccaatgcacgcggagtgcaaggccgcctagttgggagccgcaagagcctgcctggtgtggcaggcacacggaaccca

SEQ ID NO: 853606 - DNA, 120 bp, Artificial Sequence
  ENSG00000230798_2 (sequence is synthesized)
tccgctgcggcctgggaggggagcgccggcctcaccagaggaaggagcacgaggggaggagttccgagaggaaataattagtgaaatatttgcagaagatgctgggatgtggatttaatt

SEQ ID NO: 853607 - DNA, 120 bp, Artificial Sequence
  ENSG00000230798_3 (sequence is synthesized)
ccggatggacagtggtgcttctgattccctcagtctgtttccccacccacgatctcctctttccttggcctagacacaccaaaaataattcaataaaataaaaataaaaatttaaaaatc

SEQ ID NO: 853608 - DNA, 120 bp, Artificial Sequence
  ENSG00000230798_4 (sequence is synthesized)
cgcaactccgctccgcactgtgcgccagcatccccggggcacggagggcgctgcggcccgcccggagacccccccacccaggctggatccgggccctggggcccagggagcggctttaaa

SEQ ID NO: 853609 - DNA, 120 bp, Artificial Sequence
  ENSG00000230798_5 (sequence is synthesized)
gctttaaagagtaagagcagcgcacccggctccctcctgctaattagatttcagattcccctctggcctcagtgctcattccggggaagacacctgctgagatgtctttttccccctccc

SEQ ID NO: 853610 - DNA, 120 bp, Artificial Sequence
  ENSG00000230798_6 (sequence is synthesized)
ccaaccaaaccactcaggtcctacctgctctttcccggcttgatgcgggcgtgttttcctgtatgtattttttcgtgcggccacaaaaagcatcagctggggttcccgaaggtcagaaaa

SEQ ID NO: 853611 - DNA, 120 bp, Artificial Sequence
  ENSG00000230798_7 (sequence is synthesized)
aagcggttgctgatgaactcgcagatgccgctcagggtcagcttcttctgcgggctctgcaggatggccatggtgatgagcgcgatgtacgagtgtggacaaatcctccaagatttaact

SEQ ID NO: 853612 - DNA, 120 bp, Artificial Sequence
  ENSG00000253913_0 (sequence is synthesized)
ccgtggcctggacccctcccttgctcaccctcctccgtctctgtgctgcctcccagggtgactcaggagccagtagggtctgtggccctgggacagtcagccagggtaacctgccaggga

SEQ ID NO: 853613 - DNA, 120 bp, Artificial Sequence
  ENSG00000253913_1 (sequence is synthesized)
ggtcatacatcgacaaaataaccagccctcagggctcccagaccaattctctggctccaagtcaggaacacagccaccctgaccatcactggggctcaggttgaacatgaagctgactat

SEQ ID NO: 853614 - DNA, 60 bp, Artificial Sequence
  ENSG00000253911_0 (sequence is synthesized)
gagatggagtctcgctgtcacccatccaggctggagtgcagtgacatgatctagctgtta

SEQ ID NO: 853615 - DNA, 120 bp, Artificial Sequence
  ENSG00000253911_1 (sequence is synthesized)
ctccaccttccaatttacttcatggtttaagatgggtggttgaacattaccacacactgactccagaactcaaaaaaaaggggaagggaatggcaatatagagtattaatcagatctctt

SEQ ID NO: 853616 - DNA, 120 bp, Artificial Sequence
  ENSG00000225113_0 (sequence is synthesized)
gcctttatcttttagtttttaagatcatttctctccctcctttccccccagttttctcaacatttatgagttagttctgctgagaacaacatacttcagaacatgtcaggatagggcagt

SEQ ID NO: 853617 - DNA, 60 bp, Artificial Sequence
  ENSG00000225113_1 (sequence is synthesized)
tgagaacaacatacttcagaacatgtcaggatagggcaaggcaggagaatcgcttgaacc

SEQ ID NO: 853618 - DNA, 120 bp, Artificial Sequence
  ENSG00000225113_2 (sequence is synthesized)
tgatctattttttgccaataagaagtaccatttgtacatgacttaaagtgccttccaccaagaaaattattgaaaactgttgggtcacataacattcctacactttggatacagagtatt

SEQ ID NO: 853619 - DNA, 120 bp, Artificial Sequence
  ENSG00000225113_3 (sequence is synthesized)
tagttttatacaaaattaagacaacaagaaacctaggatgtccaaacattcatttcatttattttactgcatttatttatgcagtgaaaattgaaagatacaccaaattaaagataaaac

SEQ ID NO: 853620 - DNA, 120 bp, Artificial Sequence
  ENSG00000271945_0 (sequence is synthesized)
gagactttattcactctgggcagtttgttgaagattaggtggtcagctcacaatgaatcataagctgcttttgtcccttgctgtctatgcttagaagctaaaaggttaagcagcgatgtc

SEQ ID NO: 853621 - DNA, 120 bp, Artificial Sequence
  ENSG00000271945_1 (sequence is synthesized)
agcgctatcagggagctgtggagactggaattgaagttcagaacctttcatgggagacagctcagcaaaggatttcctatgtgagttcctgatccccttctgttctgacctggtagtcac

SEQ ID NO: 853622 - DNA, 120 bp, Artificial Sequence
  ENSG00000271945_2 (sequence is synthesized)
tggattctggcagaacatcaaaactggtttctgataactttggagattgggacattggaataaaggaaaaatgtacaggactcatgaagagcttaaatgttcacgaatatcaagctaaac

SEQ ID NO: 853623 - DNA, 120 bp, Artificial Sequence
  ENSG00000271945_3 (sequence is synthesized)
aagagttaactaaatggactaaactcacagaaaaatgaagccatcttttttacttttgtttggaatattgctgattcttgttttgttttttagagtcaataaaatttattttgaactatt

SEQ ID NO: 853624 - DNA, 120 bp, Artificial Sequence
  ENSG00000271945_4 (sequence is synthesized)
atacgaaactcactacccactgtgggctgctttcaagctttaacttcagatcctcctgctagtttttacttttcagagtgtttaagtgcttgtttttgtttgtttgtttgtttgtttttt

SEQ ID NO: 853625 - DNA, 120 bp, Artificial Sequence
  ENSG00000271945_5 (sequence is synthesized)
aacttagatattttatctttaaaattacaaaccaatatggactactacaaacatctattagagcgtcgctgcctttaaatatgattccctaggttgggtgtgatacttctgtattttaga

SEQ ID NO: 853626 - DNA, 120 bp, Artificial Sequence
  ENSG00000271945_6 (sequence is synthesized)
aagttcccctgccccaataaatctaaaatgtaaggttaaaaaccctcatttcttctttatttgcctagttcagccaatttgactctcagttggattttgagaatctcagtgatgtttcag

SEQ ID NO: 853627 - DNA, 120 bp, Artificial Sequence
  ENSG00000271945_7 (sequence is synthesized)
tttggaggtcagttcagaatagctttttattctaattttaatacctctattatcctgataaaagtgttgttgatgaaataattttgaatatctcaataaaaatctcaagtgcctaccaaa

SEQ ID NO: 853628 - DNA, 120 bp, Artificial Sequence
  ENSG00000271945_8 (sequence is synthesized)
ctaatcttctaaactctggatttatatgatttctcaatatgctatatcaacctcattttgctaataatgatacaggacggaggcagcaaagttctggatagagaaggatggggtccctgg

SEQ ID NO: 853629 - DNA, 120 bp, Artificial Sequence
  ENSG00000271945_9 (sequence is synthesized)
tgagggctccaccctcaggcctgtgcccatggacctaagtatggacaagcactcctgtttttgcacccaaatgttgcattttccaagaccactctgacccaacacatgctccatcctgtg

SEQ ID NO: 853630 - DNA, 120 bp, Artificial Sequence
  ENSG00000271945_10 (sequence is synthesized)
ctaacaggcacacacagaagtggctggacgttgagaggagcagaagagcacactgacagacaccagcaaatgctcgcaggccatcgagggcaggatgaggatgacttggaatttggcagg

SEQ ID NO: 853631 - DNA, 120 bp, Artificial Sequence
  ENSG00000271945_11 (sequence is synthesized)
ggatgattagaggagagtctggccactgggcagccaactccacattcccacttaatcctccttctgttctccccatccatcttgctgagagctacctccgctcaataaaatcttgcaccc

SEQ ID NO: 853632 - DNA, 80 bp, Artificial Sequence
  ENSG00000271945_12 (sequence is synthesized)
cttgctgagagctacctccgctcaataaaatcttgcacccaccctcaaagcctatgtgtgatccaatttttccggtacat

SEQ ID NO: 853633 - DNA, 120 bp, Artificial Sequence
  ENSG00000271945_13 (sequence is synthesized)
gaaagtgcacactgtaacacatgcccactggggcctcaggagctgtaaacactcaagcctagatactaccatgggattggagcccaaaatgctttccacagcctccctgactgcatgctc

SEQ ID NO: 853634 - DNA, 120 bp, Artificial Sequence
  ENSG00000271947_0 (sequence is synthesized)
tgctgagaggggtttaggaacaagttgaggtggccctgaatgaaaaaagtaaacaatgtttgggcagttttccagattccccaagaatgaactttcacagagctttgtgtgtgtgtgtgt

SEQ ID NO: 853635 - DNA, 120 bp, Artificial Sequence
  ENSG00000271947_1 (sequence is synthesized)
gtgtgtgtgtgtgtgtgtgtagagagagaatattactaaaattaataggataccacttacatccataaacaaatatgtaaacaactcaaaaacaaatccagtgggttttttttcaaatga

SEQ ID NO: 853636 - DNA, 120 bp, Artificial Sequence
  ENSG00000271947_2 (sequence is synthesized)
tacaaaatgctaattaactttaaaaagcttcagaagatataatgtgaaaaataaaagtattgagtaagaatgcaattctattaagcaatatatatgactggacagatgtgagctaaatta

SEQ ID NO: 853637 - DNA, 120 bp, Artificial Sequence
  ENSG00000271947_3 (sequence is synthesized)
ccagttacctctatgtgatacaattatgggtaattttaattttcttcattttgttttactctgttttcaaatatcctacaaatgtgtatttttaataataataaaaataaatattgttgc

SEQ ID NO: 853638 - DNA, 120 bp, Artificial Sequence
  ENSG00000230423_0 (sequence is synthesized)
tacaggtgtgagccaccacgcctggtccaagaacccaacttttagatctagagtgatgtcagcatgacattgatttcctgaggcccaggggtgaaggagctgaggacagcagaggggtga

SEQ ID NO: 853639 - DNA, 120 bp, Artificial Sequence
  ENSG00000230423_1 (sequence is synthesized)
gaaggagctgaggacagcagaggggtgaaggaagtcagctacagacagcagcagctgatgcacaggcctcccagcgcctgaagtcacccggaattgggaagtgctcagaagcttacaaag

SEQ ID NO: 853640 - DNA, 120 bp, Artificial Sequence
  ENSG00000230423_2 (sequence is synthesized)
ctgcctcgaggtgggaacacaatattaatccaagagcagatccctgatcctataaaaatgtactagatgcagtgggggcattttaaatgagcagggaagaacagacagatagacagaagg

SEQ ID NO: 853641 - DNA, 120 bp, Artificial Sequence
  ENSG00000230423_3 (sequence is synthesized)
acaaacagtattgggattgggataaatgctcagcttttgcccaaatcttagtgacttaagcatcacttatttgctcacgattctgtggctggaccatttggtttggctcacagggcaggg

SEQ ID NO: 853642 - DNA, 120 bp, Artificial Sequence
  ENSG00000230423_4 (sequence is synthesized)
accatttggtttggctcacagggcagggactgtgctggtcttacctgagcagacctgcatgtctgcggtcagctgggttggcagagacagagtgactgtcttcctccaggaagcagcagg

SEQ ID NO: 853643 - DNA, 120 bp, Artificial Sequence
  ENSG00000230423_5 (sequence is synthesized)
ggctctggttccttcgtggggcagctggtctctagggcagcaagagagaccaagcccccgtgcacattctacagcctctgtgcacatcagacttgttaatatcccattggccagtgcaag

SEQ ID NO: 853644 - DNA, 120 bp, Artificial Sequence
  ENSG00000230423_6 (sequence is synthesized)
tcacacggccaagcccagattaaggagtggaaagatggatgctatctcctcctgggagaggaggcaaaggaggtgagagcattatgtggccacttatgtttgcaatctaccatacttagc

SEQ ID NO: 853645 - DNA, 120 bp, Artificial Sequence
  ENSG00000230423_7 (sequence is synthesized)
cctttgagaaaagaattaactgagaaacttgcttcaaatagggcattcagtaaaatgaagccccaattgaagtaaaatgcatatataaaaaatgaaactgtgaccgattttaaggacagt

SEQ ID NO: 853646 - DNA, 120 bp, Artificial Sequence
  ENSG00000230423_8 (sequence is synthesized)
attggcaaatatttctgtgctcttggaggagaagacccttattggcatgacatgtcagaaaccacaatgaaagaattattttaacttgcattcataataattaaaattattcattaaaaa

SEQ ID NO: 853647 - DNA, 120 bp, Artificial Sequence
  ENSG00000230423_9 (sequence is synthesized)
catcgtgaatgaaattaaaagtcaaaatgtaagccagaaaattatttacaacatatgtgtcaggaaaagacaatacccttcagactttgagagtttacatcagaaagaaaatagcaaatg

SEQ ID NO: 853648 - DNA, 120 bp, Artificial Sequence
  ENSG00000230423_10 (sequence is synthesized)
acatgatccaaacttgataaaggacatgaaaaagagccagcacttagtatgttttatgaatgaataagtagccaacagcacatgaaaatgtgtgtaatccacttgtaagcagagaaatgc

SEQ ID NO: 853649 - DNA, 120 bp, Artificial Sequence
  ENSG00000230423_11 (sequence is synthesized)
aaactaaaacagtaaagtgtcattttcacttcctggattggcaaagggttttatgtattttactgacagtgctcaatattagcagtaaacaacaaatggtgagtaaatatgagcttcgga

SEQ ID NO: 853650 - DNA, 60 bp, Artificial Sequence
  ENSG00000230423_12 (sequence is synthesized)
tggacctcactgtgggaacaacaagatcaacaagaggagcaagaacaacatcaagagtca

SEQ ID NO: 853651 - DNA, 120 bp, Artificial Sequence
  ENSG00000230423_13 (sequence is synthesized)
acaagatcaacaagaggagcaagaacaacatcaagagtcagggcccgggggtcctgacgggtacaggatgggtacagacccacacaggaatcccagagtgtgttccacagcaggacacgc

SEQ ID NO: 853652 - DNA, 120 bp, Artificial Sequence
  ENSG00000230423_14 (sequence is synthesized)
ctgcgctgaaagagtgggcagaaaggagctgacctgggattatgatccaaactcagctgggcctcccctccctgccccaggattgtggagtgagaacgttgcagcaggagagaacaacgc

SEQ ID NO: 853653 - DNA, 120 bp, Artificial Sequence
  ENSG00000230423_15 (sequence is synthesized)
agcaaagcacagcaggggaaccggaaatgctcaccttttgacagggtacttttagttctggggccttatcttaaggatattccaacatatacaaaaagattcatgcacagagatatgtac

SEQ ID NO: 853654 - DNA, 120 bp, Artificial Sequence
  ENSG00000230423_16 (sequence is synthesized)
tttagtattatttaccataggaaaaaagttggaaacaatacattttatgttctgtaaaatgaaagaacagttaaataaatcatggctctaagacgactccagggctgtgtacggaagttc

SEQ ID NO: 853655 - DNA, 120 bp, Artificial Sequence
  ENSG00000230423_17 (sequence is synthesized)
agggacagaatcagttgaggctgttccacctgagcctaagcttcctctgctgtatgtcgggaatcaggtgggggccaagcgagatcaccacagtgcaggccagtgtgcagggcacaggtg

SEQ ID NO: 853656 - DNA, 120 bp, Artificial Sequence
  ENSG00000230423_18 (sequence is synthesized)
ggcaccagggaggggacgccgcacagccccatgctctcgccaaaaacgtgcagcacaatttggaagaaaacatttccatctgttaataaagagcaagggcctctggtcataagtgacaca

SEQ ID NO: 853657 - DNA, 120 bp, Artificial Sequence
  ENSG00000230423_19 (sequence is synthesized)
aatgcacaactcctacgtactgatggtggtcttacgtttccctaagtttctgccgactaaactgtgcacacgttctcaggacctcctgaagctgcgtcacaggcgctgatcaaagaacac

SEQ ID NO: 853658 - DNA, 120 bp, Artificial Sequence
  ENSG00000230423_20 (sequence is synthesized)
ttttcttcagcactgggaattgtgatccaaagcttttcctgatgaggcacaaagttggagaaacaaaacgcaaactaagcaacaatgaaacagaacagagtgaatctgctgtagctcaag

SEQ ID NO: 853659 - DNA, 120 bp, Artificial Sequence
  ENSG00000230423_21 (sequence is synthesized)
tctgctgtagctcaagagaggacgtagctgcccccactccgcatccccgggctcgggtttgccttgctgacctctgctgccacctggtgccgcacagagaaactgaggagaaaccacatc

SEQ ID NO: 853660 - DNA, 120 bp, Artificial Sequence
  ENSG00000230423_22 (sequence is synthesized)
agtctccttcagcctcagcttcacatctgtggtgggtcaagcaaccctttcagaagctgtataatgtgggaaagctttcctctcaggaaaatgcacacatccaactttgagaagatgccc

SEQ ID NO: 853661 - DNA, 120 bp, Artificial Sequence
  ENSG00000230423_23 (sequence is synthesized)
ttgggggcgcttcaaggatcctagataaagaaccccctttcccgaacatccaagaacctaagtttttttttttttttttgagaaagtctcactctctctcccattctggagtgcagtggt

SEQ ID NO: 853662 - DNA, 120 bp, Artificial Sequence
  ENSG00000230424_0 (sequence is synthesized)
gcgcggtgggagttgctcaagcaggtggtagcgacttggcttccgggcagcgggtaaaggaaatgcctcaggccagaagaagcagtggcagcctctcacctgcagtgggatctgtctcaa

SEQ ID NO: 853663 - DNA, 120 bp, Artificial Sequence
  ENSG00000230424_1 (sequence is synthesized)
ctcccattccgtctccagagccaaagtttggagggaacgtgagctcgggtcaggacacaccaggacagcctcatccaccacaccacaggctccagacaggtgctgcagccacggagttga

SEQ ID NO: 853664 - DNA, 120 bp, Artificial Sequence
  ENSG00000230424_2 (sequence is synthesized)
taacaggaagctcgtgaaagatttttacatttccctctcagcccaacagcaatattgctgccagcatcccactgggggtcctaagctcaaaggttcttcatggttggttgtataggagtt

SEQ ID NO: 853665 - DNA, 120 bp, Artificial Sequence
  ENSG00000230424_3 (sequence is synthesized)
cttcctgtcccctgaaaccccaccctccaacctcctgagagccttcaaagttggaaaaaatatcaggattttctttctggtcactggaaaaatatatccgataattttaaatacctggca

SEQ ID NO: 853666 - DNA, 120 bp, Artificial Sequence
  ENSG00000230427_0 (sequence is synthesized)
caacacagctatagcagggcctcttgagccactgaaggcagcaccagacactggcttctcctctcttcctgtacattatcttcattcttctatctatagactacctttatcttctaagtg

SEQ ID NO: 853667 - DNA, 120 bp, Artificial Sequence
  ENSG00000230427_1 (sequence is synthesized)
aaaacatgactgtcagcagctttcaagctttatcatttacagagcttgcctgaagacagactgattccattctctaggtctccaagcccagaaagctcagagaaagacttcgattggtct

SEQ ID NO: 853668 - DNA, 120 bp, Artificial Sequence
  ENSG00000230427_2 (sequence is synthesized)
gagttaggccagctgtccacccctgaactatccagagcagccctgcagctgggccgttcccagagagagggatggataaaggcactcactctacataaggaacagctctagtttccttcc

SEQ ID NO: 853669 - DNA, 120 bp, Artificial Sequence
  ENSG00000230427_3 (sequence is synthesized)
ttaattaagaagtagtttcacttaaaaaaaaaaatctctaaacactgactaaaatgctataatgaagtgagcaaccaggggtaaagaagtactaataatttcaaaggcagacacaagtat

SEQ ID NO: 853670 - DNA, 120 bp, Artificial Sequence
  ENSG00000230427_4 (sequence is synthesized)
agcagtcatagataaatcaaattatcaataaacgtaacacattgatagagagctttaatgaagagccaataagcacatgaacaggatgcttcgtgtatgaaaccctcattgaatactgtg

SEQ ID NO: 853671 - DNA, 120 bp, Artificial Sequence
  ENSG00000230427_5 (sequence is synthesized)
aaagttgtcaggataaaaatagagtcacttgtgacaaaatggagctgggaaaggccatgaaggaagggttcttaatgctcaatcgcctgaaaacaagaactgttacaaaagactatacca

SEQ ID NO: 853672 - DNA, 120 bp, Artificial Sequence
  ENSG00000230427_6 (sequence is synthesized)
aaaccacaaccttgtacaaaggccactgcaaccttatgcaaaaaaaaacttctgcaaggacatctgcccagcagttgcctgcctaaccttggactgatgccacccttattattgatccct

SEQ ID NO: 853673 - DNA, 120 bp, Artificial Sequence
  ENSG00000230427_7 (sequence is synthesized)
gtaagcaaggataattgtttcaaaacaacttatgtaaccctccccattttagctttaaaaattgctgtcttcccttgcctctttgaatgtgcccatagtttactcggcatgtgtgttcca

SEQ ID NO: 853674 - DNA, 120 bp, Artificial Sequence
  ENSG00000230427_8 (sequence is synthesized)
cactacaatgcttactcttgaatacacttattatctttggagaatctctctctgttatttagcttgacagtatattcactgaaaatttaaacttgttactgaataaagtcattaaaatga

SEQ ID NO: 853675 - DNA, 120 bp, Artificial Sequence
  ENSG00000230426_0 (sequence is synthesized)
gtagggactctggctttgtccctgtttcccccttttcttcctcttcacccactaaaaccctgttttactcacggttcaaattgtttggcagcctgaattttcatggccatgggacaaaga

SEQ ID NO: 853676 - DNA, 120 bp, Artificial Sequence
  ENSG00000230426_1 (sequence is synthesized)
accccgtctttagctgaattaaggaaaagttctgcaacatttttgacgtgcaacttgggggctcaagcggagaagcggacggatcagcagctccctgccactgtcccctccctgccaggg

SEQ ID NO: 853677 - DNA, 120 bp, Artificial Sequence
  ENSG00000230426_2 (sequence is synthesized)
ctgggacacatggctcaaggcgctgcagaaggctggctggcgttttctaccatgtgcccatggaatctcctcccacagtcagggagcccagctccaacccacagcaattacacttctccc

SEQ ID NO: 853678 - DNA, 120 bp, Artificial Sequence
  ENSG00000230426_3 (sequence is synthesized)
cctggtgaaggaaacacttgcataagaataagagcagagcccctggaaaactcacatatgtgtcaacaatagtccttgatgcccctgtaacaaaacttgagcaaggcctggtgatgaaga

SEQ ID NO: 853679 - DNA, 120 bp, Artificial Sequence
  ENSG00000230426_4 (sequence is synthesized)
gatacaagattgtcacccaaggatttgattatacctctgttgaaagttaatgcacactcaaccgaatatggcaattggtactctcaattctatattctcaacaattacagtgaagataca

SEQ ID NO: 853680 - DNA, 120 bp, Artificial Sequence
  ENSG00000230426_5 (sequence is synthesized)
taaaacatattaaataggctcatccaacttgcattctttattaagcttattttcatattttttcctatggatgaacttaaaaataattttgtttcttaattaagattctatgcatgaaga

SEQ ID NO: 853681 - DNA, 120 bp, Artificial Sequence
  ENSG00000230426_6 (sequence is synthesized)
tgctgaataatttaagacaattgttcattcaaatagttgctaattacaccctcctggcatagttattgtattattactacatttaggaataatatgctgtactacttggacttgaaaatg

SEQ ID NO: 853682 - DNA, 120 bp, Artificial Sequence
  ENSG00000230426_7 (sequence is synthesized)
tttctgacattttaatgaacacactacttagttatattttacaagggttttcagtgaaccacagaggattaaaaaatgtcattcaagggttgtagataattaaactgactgaatataaga

SEQ ID NO: 853683 - DNA, 120 bp, Artificial Sequence
  ENSG00000230426_8 (sequence is synthesized)
agcctcatatggaagtgaaaattatgtatgaattttgttgagctggaaatgtgttttactaaatgacttcagatttgttacttttaaatacaagatgaagggaatcaaggggatactttc

SEQ ID NO: 853684 - DNA, 120 bp, Artificial Sequence
  ENSG00000230426_9 (sequence is synthesized)
ttctcacctcaatttgttccatttgcataagctattttatctttcaatatcccttttgatatttcattttggcccttgaatacactaaagattatttaaaataaataaatgttgactttg

SEQ ID NO: 853685 - DNA, 120 bp, Artificial Sequence
  ENSG00000230426_10 (sequence is synthesized)
agagaagactgctttagaccagagtggaaagcctgtgcggaggccttgaatgaggaaggaggatggtatgttccgggatccagaggacattcagtatatctggaaattgatgataaaaac

SEQ ID NO: 853686 - DNA, 120 bp, Artificial Sequence
  ENSG00000230426_11 (sequence is synthesized)
ttggagaagactgctgtattggattacaggttcatatgttctaagcaagagagaaaagcctaaaatctatttctctgtcatgatactgctcgaagtgctgcttgttgctgacgtttctgc

SEQ ID NO: 853687 - DNA, 120 bp, Artificial Sequence
  ENSG00000230426_12 (sequence is synthesized)
ccaaacatcatgaaatgtggagaagaaagaacactcagatgtgccctggagactttccttttatttttaaacaggtgcctgcaatctgtctggaattcagactattacccttctggattc

SEQ ID NO: 853688 - DNA, 120 bp, Artificial Sequence
  ENSG00000230426_13 (sequence is synthesized)
actaaaactatactcttaatctgtactgggaagttctatactgttgctttaatccttggtgctgtttatttcaaccaagatacaccttgaagacaatctgcctgcaacactcataatccc

SEQ ID NO: 853689 - DNA, 120 bp, Artificial Sequence
  ENSG00000230426_14 (sequence is synthesized)
tgaatggatagcacccaataaaagagagaacatcattgccaattttttcttctatccaagtcctcctctgtctttataccttatttgacctgaatatcttatctttccgtgttaaatgct

SEQ ID NO: 853690 - DNA, 120 bp, Artificial Sequence
  ENSG00000230426_15 (sequence is synthesized)
cttctctcttgacctctagatcactgtactctctggggtctgcctctgtttccctaatattttccgctttaaattgtccacatctgctcatgcttcaattgatgccctctttttaaaaat

SEQ ID NO: 853691 - DNA, 120 bp, Artificial Sequence
  ENSG00000230426_16 (sequence is synthesized)
tctgtccttagccatcatttctctctaagttctacttaataataaccttagacatttttgtgattttatcttttatttctatgcatatttttttaccaaatgcatacttctagatgtgat

SEQ ID NO: 853692 - DNA, 120 bp, Artificial Sequence
  ENSG00000230426_17 (sequence is synthesized)
ccccctcatatttttcagaacatatatagttcattgacattattttcaaagatacatcaacagcaccccaaattaaacatgtacaaaaatatttgtcttctccacaaatatgttctcatt

SEQ ID NO: 853693 - DNA, 120 bp, Artificial Sequence
  ENSG00000230426_18 (sequence is synthesized)
tgaatatttactgccattgctgttggaggatacctctaaagaaccctggaagaaaatatcagtgttagtcacaatttcttatatttttcatctctgtagtcaagaagtaaatcaccatat

SEQ ID NO: 853694 - DNA, 120 bp, Artificial Sequence
  ENSG00000230426_19 (sequence is synthesized)
catagagaattgtgaaggatctgagattttatcatcttacaagctaacaggttagctggctacaatttcacagattctgcagaagacacaggactccaggatcagacacaaagaactttg

SEQ ID NO: 853695 - DNA, 120 bp, Artificial Sequence
  ENSG00000230426_20 (sequence is synthesized)
ctactcatggcacagcaggtagcatgagcttcatgttcacaccagtttcctttgactcctcagtcacattggagtggtgcagagaaaactcaggtggatgctggacacacagtgagtttg

SEQ ID NO: 853696 - DNA, 120 bp, Artificial Sequence
  ENSG00000230426_21 (sequence is synthesized)
tttcacagtcaaagaattctgatctttggaaacccaaatcttttataaggtatatgcaaccaaaagcaccaagtctttgccctgacgggagacaccgtctctatctgtaaggagatagaa

SEQ ID NO: 853697 - DNA, 120 bp, Artificial Sequence
  ENSG00000230426_22 (sequence is synthesized)
gtacctgctgtatcttctgttcctcatttctaaatagctgtgtgaaactggacaaattacttaccttcattgtcccacaattttttatgtgttaatgggaataataatagtacctaaaac

SEQ ID NO: 853698 - DNA, 120 bp, Artificial Sequence
  ENSG00000230426_23 (sequence is synthesized)
acagagctattatgatttttcaaagagttaatatgtctaaagtttctgtggtaaaggctggcacattattaaatgctatttaagtcattattaaataactgaataagtacttattactat

SEQ ID NO: 853699 - DNA, 120 bp, Artificial Sequence
  ENSG00000230426_24 (sequence is synthesized)
tatcatcatcatatttactgttccttttccattttgtttgccactggcacttagcttctcccttgtctactgcagtatagtcttactgtgattctgcacccagactctcacctcccccat

SEQ ID NO: 853700 - DNA, 120 bp, Artificial Sequence
  ENSG00000230426_25 (sequence is synthesized)
ttactctttgtgcagtttccaaagcttatttcctaaaataagtatcagtgatgtccacttgattcttccagaaattttagatgattccaggttgcagacagaaactggcctgcagtatgg

SEQ ID NO: 853701 - DNA, 120 bp, Artificial Sequence
  ENSG00000230426_26 (sequence is synthesized)
aattcaggatccttctcaacatgactttttggtagtctctttcccctttagacttccgtagtttagactttctgtattttatgaagagattaggcacatctaggcatccacaaatttgat

SEQ ID NO: 853702 - DNA, 120 bp, Artificial Sequence
  ENSG00000230426_27 (sequence is synthesized)
cctgctgttccctcagtcagaaacccttttatctttacctgtgaaaattcttgtaatgttactgatgtcagttcatgctattgcttccccaaacttcttgcaagcacacactctgcctgg

SEQ ID NO: 853703 - DNA, 120 bp, Artificial Sequence
  ENSG00000230426_28 (sequence is synthesized)
cttatctttcaatactctcttggttgtaaaaatcatttttagcaacacaagtatcatattcatcatccatccactttccttatattcttcctctttaactttctacccatctagttcctt

SEQ ID NO: 853704 - DNA, 120 bp, Artificial Sequence
  ENSG00000230426_29 (sequence is synthesized)
tgtctttgcttgtcaacatatcctggtcattctcttcattcatatgaactgacttagcaggctcactttcctgcagctttaggttctgcatagatggcttccttgtggacatctaatttg

SEQ ID NO: 853705 - DNA, 120 bp, Artificial Sequence
  ENSG00000230426_30 (sequence is synthesized)
ggctgatccaggatgaacactgccctatactgcttcccctctaatactgctgagttctgtctttgaggttgaggccttacaagtccagaaacaaatcatcaatgcctcatagtcctaccc

SEQ ID NO: 853706 - DNA, 120 bp, Artificial Sequence
  ENSG00000230426_31 (sequence is synthesized)
ttcaccgtgtaggaggcttatcgtcttgataatcaaacaaaaagcccagcatcaaaaagtcacctgtggtcaaagctgcaaatactaaggaaatgttttggtgagcatgaataaaaaaag

SEQ ID NO: 853707 - DNA, 120 bp, Artificial Sequence
  ENSG00000230426_32 (sequence is synthesized)
gcatattacttcctccatttagcctgtgccaattaagactgtgtaggaggagatttattgcaattaaataatttaaaatattatgtataatttcagttaattgagcaaaaatgtaacagc

SEQ ID NO: 853708 - DNA, 120 bp, Artificial Sequence
  ENSG00000230426_33 (sequence is synthesized)
attcaagagaaaagagcaaaggaaaaaccaatgtaaaatttaaaagtatatacagtctatatattgatctgggtttataaagggatttaaattgcagttctaaatttatttagttttata

SEQ ID NO: 853709 - DNA, 120 bp, Artificial Sequence
  ENSG00000230426_34 (sequence is synthesized)
tttcaattgcacatctgtttctcgttttcatggaacatgtttcaatctcagagtgaaagatttcctgaaaatcataagatttatgtttactgtgttccttataaaaccaaactcatgaca

SEQ ID NO: 853710 - DNA, 120 bp, Artificial Sequence
  ENSG00000230426_35 (sequence is synthesized)
acttctgggattctgaaatatcttaccaagcactttattcaatctaaatttaaatagaagttttccccacttcccaagagagaaacaacaacgaactagatgagaatgagaggaactgga

SEQ ID NO: 853711 - DNA, 120 bp, Artificial Sequence
  ENSG00000230426_36 (sequence is synthesized)
agaagggtcagatgaaagtgagatccatacatccttcttcagcaacttgtgcctctgctctgcacctcccgcaattaactactgaaaaaagaacacagcttcacaaaagagattgtaaaa

SEQ ID NO: 853712 - DNA, 120 bp, Artificial Sequence
  ENSG00000230426_37 (sequence is synthesized)
aaatgaaaagtgaagacctctttgaattatcttatttcatttgactatgttcctcctgagtcacaaaaaaaggatgttacagctatttttcttaagctgatgggccaaaagattgtattc

SEQ ID NO: 853713 - DNA, 120 bp, Artificial Sequence
  ENSG00000230426_38 (sequence is synthesized)
taaactaaactttgctatcaaccacaataggataacacagggtgctgagagaataacacagaggtgcttgagtaacatgagctcctaactgaccaccactaagtatgtggttctaccaaa

SEQ ID NO: 853714 - DNA, 120 bp, Artificial Sequence
  ENSG00000230426_39 (sequence is synthesized)
tgaataaaatcactggccatcctattagttttgtctttgcttagcctaatgataggaaacgaatggaactttgccatcaaacgaatacaagataatccctattgcttgaattcttaattg

SEQ ID NO: 853715 - DNA, 120 bp, Artificial Sequence
  ENSG00000230426_40 (sequence is synthesized)
ttttttggactactgatatattttacttcatttggtaccgtagtttacatattttaaataaagtattatacataatatcttacataaatatgaatgatttcaaggtgctacatccctgga

SEQ ID NO: 853716 - DNA, 120 bp, Artificial Sequence
  ENSG00000230426_41 (sequence is synthesized)
attgttatattttaatctgttgatgttgctaaaacccacagtggtggcaatgttactaaaattgaattcattctttcacctgaaggtaatgcataaagaggtaaggccaaaatactgaac

SEQ ID NO: 853717 - DNA, 120 bp, Artificial Sequence
  ENSG00000230426_42 (sequence is synthesized)
gtcattctcattcctgaatacatctagattcacatgctcaaaatctaaaagattcataaggataaaccctggaaagactctctccctctcggataccagccgtgacctacatgctgttta

SEQ ID NO: 853718 - DNA, 120 bp, Artificial Sequence
  ENSG00000230426_43 (sequence is synthesized)
aattagtctctagtcttcagccctcaccagtgcacaatttttttttccattgggtttgaccaactctatattcgacttgaacaaatccgaaggaaagcttccaattatggggaacaagtc

SEQ ID NO: 853719 - DNA, 120 bp, Artificial Sequence
  ENSG00000230426_44 (sequence is synthesized)
ctctgaagtggctaaattcccacacacacaaaagaaaagatgagtctatgcccaggaccaccagataattgagtcctgtacaaaagcttctgactaaacaatgtgctctggctcaggact

SEQ ID NO: 853720 - DNA, 120 bp, Artificial Sequence
  ENSG00000230426_45 (sequence is synthesized)
atacagagaaaagacacagtttttaaattgatcgttcaaaaggaaacatatttatgatatttgctccatgatatgtatctctcatctgttagctcaggcagaattaaaatgctagacaat

SEQ ID NO: 853721 - DNA, 120 bp, Artificial Sequence
  ENSG00000230426_46 (sequence is synthesized)
agatttggctttatgtttttgaatggggatgctaaaggagattggtgaaagaaatcggttatctcctttttacattaggtagagattttttttttgttcccatcaatgcctccaattttt

SEQ ID NO: 853722 - DNA, 120 bp, Artificial Sequence
  ENSG00000230426_47 (sequence is synthesized)
tttttttccctcattgccttttgactcctagcctcaatataattctctggaaaactaccgtttacttatgccaagaaggaagattaaaagaatgtcactctgtcccccaggctggagtgc

SEQ ID NO: 853723 - DNA, 120 bp, Artificial Sequence
  ENSG00000230426_48 (sequence is synthesized)
tttatttttaaacagaaaccctggagttctggtatccaacctaaatcacagatgaccttgaggatagtgaagcagaaagttctggacctgtgccagccacatagaaactgcttaataatt

SEQ ID NO: 853724 - DNA, 120 bp, Artificial Sequence
  ENSG00000230426_49 (sequence is synthesized)
aggagtgaagctgcagaccttcacggagattgtaaaatcaggaagtatatctaagtcacctccagtagccgtaactctaccttgtccagtaaaaggataattctggcagctattgaaaac

SEQ ID NO: 853725 - DNA, 120 bp, Artificial Sequence
  ENSG00000230426_50 (sequence is synthesized)
ttaaacaggtacatcctgaaattatgttagagtaagtttcaacatattcaaaatcatgtcataaaatgaatgttgtgagaattattgacaatcctgaaaaagcttgggttgttactgggt

SEQ ID NO: 853726 - DNA, 120 bp, Artificial Sequence
  ENSG00000230426_51 (sequence is synthesized)
tgggttgttactgggttaagatgtaaaagaacccacaggttattttccttttcttcttctctgcctcactgtaggttcattgttaccagccctgtaaaaacaaaacaaaaaaaaaaaaac

SEQ ID NO: 853727 - DNA, 120 bp, Artificial Sequence
  ENSG00000230426_52 (sequence is synthesized)
taatcgggttcaactgtctctcccctactataatagtttgttaaaaacatgcttctggcaatgtgtaaacctaaatacaatgcagaattttcattatcctgcaataagagcgaccgcctg

SEQ ID NO: 853728 - DNA, 120 bp, Artificial Sequence
  ENSG00000230426_53 (sequence is synthesized)
aaaataaagcctgcacaaaggagggcaaagccaagttgtggagagagaatgaatgtgaaagcagagctgagccagagggacacaggcagcctctgggtcagtgtgactagtgggcctgaa

SEQ ID NO: 853729 - DNA, 120 bp, Artificial Sequence
  ENSG00000230426_54 (sequence is synthesized)
gccagattcctttctttatctttttagttatatgagttaatgaatttgctatatttgctaaaattggcttgagttggctatttaacatctgagaataaagtatgctggaaaacagaataa

SEQ ID NO: 853730 - DNA, 120 bp, Artificial Sequence
  ENSG00000230426_55 (sequence is synthesized)
cattttaaaaccttttttctttcctcttctccacaatatcagcatttaagtttaagcaagtttttttatttctagaagacattttactaggcaaggaatgataagaatccctgtgtatat

SEQ ID NO: 853731 - DNA, 120 bp, Artificial Sequence
  ENSG00000230426_56 (sequence is synthesized)
tctctattaagctttaattgtgaaaaaggatttgtagggctagtcttgggctgtggccaatctggtatgcttcctgtgtctgtatggtttgtgctgtaagcctccatcttgttttacaca

SEQ ID NO: 853732 - DNA, 120 bp, Artificial Sequence
  ENSG00000230426_57 (sequence is synthesized)
tcctggggacatggcccacaactgcttgacaggactttgtttagcagtcctgccttaggggatcagccctctctggccaatatctgcatgttttcctactcctgtctcttaaagggcccc

SEQ ID NO: 853733 - DNA, 120 bp, Artificial Sequence
  ENSG00000230426_58 (sequence is synthesized)
acccagcgactggattttcttctgcctctctgtgtgggtactgtgtgtgatatctgtaaaaagtgcgctaattaatttggcctaaagaaagacaagaacttggatcaaattttttttaag

SEQ ID NO: 853734 - DNA, 120 bp, Artificial Sequence
  ENSG00000230426_59 (sequence is synthesized)
ggaagttaaaagctgtggtacctttcagttcacatgactttaatctctgagaaataaaaacagccctaaagactattggtaaaatgcaggtgagatgcaaggttttctaagtgttttgag

SEQ ID NO: 853735 - DNA, 120 bp, Artificial Sequence
  ENSG00000230426_60 (sequence is synthesized)
gttaaaaactgctttttgggttttgagaactatttgacttgaaggcttcacaattggtaaggcctggggacatatggaaataaccacgctcttaattatgctgggagtcaaaccttggct

SEQ ID NO: 853736 - DNA, 120 bp, Artificial Sequence
  ENSG00000230426_61 (sequence is synthesized)
agatgtgtaagaacagtaaaatgtggtgtttttttgtaaaatattataagaaggcatggaaatgtatacttttgcttagggttaaaggattgtttaaattaggaaaaagctgaaggttca

SEQ ID NO: 853737 - DNA, 120 bp, Artificial Sequence
  ENSG00000230426_62 (sequence is synthesized)
aacaagtggtggagaattgtggaaattaatcttgcagaagaggttcaacatattaactaaattcaaaagggttataaggttataaaaggtttttgcttctttgaaatttctgagtcatcc

SEQ ID NO: 853738 - DNA, 120 bp, Artificial Sequence
  ENSG00000230426_63 (sequence is synthesized)
ttttggcaaaataaataacttaatggcaatttggaactctgtttcataatatcaagtgttttaaacctcaaacatgtttgacagccttcccaaaatcaaactttggtttcaaaactgtct

SEQ ID NO: 853739 - DNA, 120 bp, Artificial Sequence
  ENSG00000230426_64 (sequence is synthesized)
tccctggcacttggcttttggaatacttcagagggcccctgaagtgtccagaaaagagaggtaaacagggttatttgacatgtttaggtacatggattgccaaaatgatgttcaatcttc

SEQ ID NO: 853740 - DNA, 120 bp, Artificial Sequence
  ENSG00000230426_65 (sequence is synthesized)
tttaggttatatcttggtaaataatgctaatatatgttccaaaattgtatgggacttctaaaattctaatgtctaagtatttgctaccaatcgtaattaaggttgttatgttaagttatt

SEQ ID NO: 853741 - DNA, 120 bp, Artificial Sequence
  ENSG00000230426_66 (sequence is synthesized)
gtaaaccacggagacaaccaaacttctttttccatcgtgtttctaactgtaagtaccttggacatttttctattcacagaaaattgtcttgttttaatccttttcaaaagatggtttata

SEQ ID NO: 853742 - DNA, 120 bp, Artificial Sequence
  ENSG00000230426_67 (sequence is synthesized)
ataagctatatgactttaacaggcactctcaaatataggcttctggtaactttggagatggtaacattggaatagaagaaaatgtacaggacacataaagagctgaaatgctcaagaata

SEQ ID NO: 853743 - DNA, 89 bp, Artificial Sequence
  ENSG00000230426_68 (sequence is synthesized)
aagctgaagcaaaacttgttttgtttttcagagtcaaggaaattattttgaactgtttacaggaacgataaaccaaaagtgttttatac

SEQ ID NO: 853744 - DNA, 120 bp, Artificial Sequence
  ENSG00000230426_69 (sequence is synthesized)
gaactgtttacaggaacgataaaccaaaagtgttttatacatttttgctctttgaattacttcattattaacttatctgcaaaattccctgagaatattttaacattatagagaagcact

SEQ ID NO: 853745 - DNA, 120 bp, Artificial Sequence
  ENSG00000230426_70 (sequence is synthesized)
gtaaaaccttgataaattacccttaaatatttacctaaattagataggagcagataagaaatatctctaccatcaactttcagatataaccaaataaatgaacatattcagaagaaaaaa

SEQ ID NO: 853746 - DNA, 81 bp, Artificial Sequence
  ENSG00000230426_71 (sequence is synthesized)
ggagtgaagctgcagaccttcacggatctcgctgtgttgcccgggctggtctcaaacttctggacacaaacaatcctccac

SEQ ID NO: 853747 - DNA, 120 bp, Artificial Sequence
  ENSG00000230426_72 (sequence is synthesized)
tgtgccctggagactttccttttatttttaaacagacatacttgcaaccagagtcatcaattttgaagacagcaaccaagccaagcaatgtgaggttacagctatgaaatagaacagaga

SEQ ID NO: 853748 - DNA, 120 bp, Artificial Sequence
  ENSG00000230426_73 (sequence is synthesized)
tgtctagactatagacacagcctgccgttttgtgctgattggtaaagtgttccagccaactggaagcaaatatttctcagaagcagtttcctgctctcatcctctcctcgccatgcccac

SEQ ID NO: 853749 - DNA, 120 bp, Artificial Sequence
  ENSG00000230426_74 (sequence is synthesized)
tgtgcccaacatggctccagctgggtcacagaagactttgtcctggaatacagcatttccctatttaaatctctaactttgtatgtactcttttcaataaaagcatatttttcattacca

SEQ ID NO: 853750 - DNA, 120 bp, Artificial Sequence
  ENSG00000230426_75 (sequence is synthesized)
aaattttggtgctcaaaaaacatttgttgagtaagtgaacctgagactatcaacaagcattattttaaaatcactagcaaaggagattgtaaaatcaggaagtatatctaagtcacctcc

SEQ ID NO: 853751 - DNA, 120 bp, Artificial Sequence
  ENSG00000230426_76 (sequence is synthesized)
agggacaggacctctatatgttgctcaggctggagtgtggcagctattcacggatgtgattatagtacactacagcctcaactcctgggctcaagcaaagcttcccaaatcggtgggact

SEQ ID NO: 853752 - DNA, 120 bp, Artificial Sequence
  ENSG00000230426_77 (sequence is synthesized)
ataggcacacgccactgtgctgttcaataataagatttctgtctaacaccactgcgcctgtttccttgataaatatttattatctgtgtttatttattttatcctgggagaacatacaag

SEQ ID NO: 853753 - DNA, 120 bp, Artificial Sequence
  ENSG00000230426_78 (sequence is synthesized)
atttcggggtcagagaacagactgattgttttatgtacagcaataacagcactggctccccactccctatttctcctttgaagccgtgctgtgaaggtagatgtcagcctgcacatgcaa

SEQ ID NO: 853754 - DNA, 120 bp, Artificial Sequence
  ENSG00000230426_79 (sequence is synthesized)
aggggtcgctgcataagacgaatcctgaaattgtgtaactgggagtttatatgaagtgcctctcagcagccccgccaaccctcctccctctagagaggggaagagaagtcatcactgtct

SEQ ID NO: 853755 - DNA, 120 bp, Artificial Sequence
  ENSG00000230426_80 (sequence is synthesized)
aatgtgaaggaattctctctgggaagggaggagacggtccctaaattgttacaaccctttgaaatgtaaaggaagcctctggattgtttctcattcttttaaatgtaaataaatggcaaa

SEQ ID NO: 853756 - DNA, 120 bp, Artificial Sequence
  ENSG00000230426_81 (sequence is synthesized)
cagtaaaaggacagtgtacaaatcatgaattcaaataaccaccatgcaggtcaagaagataaaatcagcagcacattccaggtcaccctcttgtctctaccatcccttctcatctctcca

SEQ ID NO: 853757 - DNA, 120 bp, Artificial Sequence
  ENSG00000230426_82 (sequence is synthesized)
agttttgtcagtgtttggaatttgtataaatgtgattgtacagaatgtaccctttcgtatctggtttctttcagtcaatactatgcctattttatttattcatgttaatgaatggaaaaa

SEQ ID NO: 853758 - DNA, 120 bp, Artificial Sequence
  ENSG00000230426_83 (sequence is synthesized)
tagttcatttattttaacttctgtttggcattccgttgtgtgatcattctacaatatatgtattttacctatagctggtgggctttgtgcggcttccagaatagtaatgttatatatagt

SEQ ID NO: 853759 - DNA, 120 bp, Artificial Sequence
  ENSG00000230426_84 (sequence is synthesized)
gctattatattcatttttgtatgaatacaaatggtacctttgttttgttttgaataggaggggatttactagataaatgggttatgggtgttttcaactttgacagaccctaaaagtttc

SEQ ID NO: 853760 - DNA, 120 bp, Artificial Sequence
  ENSG00000230426_85 (sequence is synthesized)
tcaaagtaatagtaccaaattaccttctcaccaggaatataagaggtctatttttttctaggtctttggtgataactgctgttttagccttttaattttgtcatatttgttgatttgctg

SEQ ID NO: 853761 - DNA, 120 bp, Artificial Sequence
  ENSG00000230426_86 (sequence is synthesized)
atggtctgtccatttgtacgttcaatctcttgacaacttcaactaatgttgaatgccaaagtgtaaacgttgatcgtgtgacaaatgtaaattgattcatgaggagagactgtggtttgg

SEQ ID NO: 853762 - DNA, 120 bp, Artificial Sequence
  ENSG00000230426_87 (sequence is synthesized)
tgcaaagaaagtgttctggaattggaagatctggatcagactcaggctctgtcagataatggctgtatcatctttgaaaagcaaaacaatctactaatgaaatcagaaggatttccagtg

SEQ ID NO: 853763 - DNA, 120 bp, Artificial Sequence
  ENSG00000230426_88 (sequence is synthesized)
atgctgcccacatttctgtgaaaaagaggaagttttttaagtcagatggaagttacactttttcaaaaaaaaaaatatgcagggaagaataactctctctcatcaatgtggaaattgatg

SEQ ID NO: 853764 - DNA, 120 bp, Artificial Sequence
  ENSG00000230426_89 (sequence is synthesized)
gttcatatgttctaagcaagagagaaaagcctaaaatctatttctctgtcatgatactgctcgaaggtgctcaaaaaacatttgttgagtaagtgaacctgagactatcaacaagcatta

SEQ ID NO: 853765 - DNA, 120 bp, Artificial Sequence
  ENSG00000230426_90 (sequence is synthesized)
taacatatgaagatgctcctttttctctctgaagcaagagaaacaattgtctctcccttctgctctttaatctgtcatctgcacatttttactgcgaattaagaataaacgttttaaaaa

SEQ ID NO: 853766 - DNA, 120 bp, Artificial Sequence
  ENSG00000273891_0 (sequence is synthesized)
ctttgatctggggaggccaaggcagaggctcccagcccaggactacagaacacatctgtcttaggataacagggcaagtcacagccatgggattccttttccttctggattctgccctca

SEQ ID NO: 853767 - DNA, 120 bp, Artificial Sequence
  ENSG00000273891_1 (sequence is synthesized)
tgcagacttgggttacagtaatagatgtaagtctgcatcatgtagagatcaaagccccaagaataaggctcatgtggtccctacccttgaggagacaaaaatatacgatgtagatggaca

SEQ ID NO: 853768 - DNA, 120 bp, Artificial Sequence
  ENSG00000273891_2 (sequence is synthesized)
gctgcattatgcacacagatccatttcaatataacatggtgggctactctgggaacactcctgctccacaaggagcagtataaaaaaataaattaatcaaattttaaaaaagcaacatgg

SEQ ID NO: 853769 - DNA, 120 bp, Artificial Sequence
  ENSG00000273891_3 (sequence is synthesized)
tagatcctgggcgcttagagagtactgctcaagtgctatgagaacacttgggcagagatatctacccagacatgggagtgacgtggttgagaaatctgatcctacactgctaacacctct

SEQ ID NO: 853770 - DNA, 120 bp, Artificial Sequence
  ENSG00000273891_4 (sequence is synthesized)
gtctggagaagttgctggaggcttccaagatggggcctgtgggataaacaaactttaccgaatggaaaagatgaaaaggaattggaggccaagagaacagcaagtacaaagacacagagt

SEQ ID NO: 853771 - DNA, 120 bp, Artificial Sequence
  ENSG00000273891_5 (sequence is synthesized)
tttaagtacttcattgtggctggaaattgggctggatgatgagataaagtttaaggctttatctttataacctaggatttatgagtttagtacaatagcaaaaaacaaagatttagactt

SEQ ID NO: 853772 - DNA, 120 bp, Artificial Sequence
  ENSG00000273891_6 (sequence is synthesized)
tatcctaagatgaagaagtttggactacatcctattaaatagaacatacacaaatggctctgggcacctgagttacctgaagtcttattaaaaatagatgccagaccccacaccacacta

SEQ ID NO: 853773 - DNA, 120 bp, Artificial Sequence
  ENSG00000273891_7 (sequence is synthesized)
ctacattggcatctccaaggccttctacccgagctactatcaatctcaatggtttttagaaagacaaattagaaaagacaaaagcccaggagctataccacttaaagaaggactgaacaa

SEQ ID NO: 853774 - DNA, 120 bp, Artificial Sequence
  ENSG00000273891_8 (sequence is synthesized)
aagtatttactgggcaacaaaaccagtatacttgaaggtcctcttagagaagagccagtaagagctgttcttaatttctccataggaccatgccaggaagttaagacagaagccaacttc

SEQ ID NO: 853775 - DNA, 120 bp, Artificial Sequence
  ENSG00000273891_9 (sequence is synthesized)
attcaaatataaagaaatcttttttttaaatcagagttctatctaaaaaatgaactggacagtttatgtggcagtgacaagtaatcttcaaatacaagtcagtggtcatctaacagggta

SEQ ID NO: 853776 - DNA, 120 bp, Artificial Sequence
  ENSG00000273891_10 (sequence is synthesized)
ttataataaatgtcactttagacgttgggagactcataagataccctcagtaggaggtatcatcctcctatatgataaggattttaaagatgataaacccagagtctcatgagctagaag

SEQ ID NO: 853777 - DNA, 120 bp, Artificial Sequence
  ENSG00000273891_11 (sequence is synthesized)
caaaggagccaggagagcactggtaaagaggttctggccttttctgctaaagcagaatgagagatcctttaaggttccatccacatctagagtttatggacttttttttcttttttgaga

SEQ ID NO: 853778 - DNA, 120 bp, Artificial Sequence
  ENSG00000273891_12 (sequence is synthesized)
taattttttgtatttttggtagagatgggttctcgccatgttgcccaggctgatcttgaattcctgagctcagatgatctacctgcatccacctgccaaagtgccgggattacaggcatg

SEQ ID NO: 853779 - DNA, 120 bp, Artificial Sequence
  ENSG00000273891_13 (sequence is synthesized)
caggcatgagccaccacacccggcctagtgtttatgaactttcatatcaaagtttcaaaagtctccaaacaacggcatcatgactgtcacctctacaataccaaataatctttgtcccta

SEQ ID NO: 853780 - DNA, 120 bp, Artificial Sequence
  ENSG00000273891_14 (sequence is synthesized)
tctttgtccctacaagaaaaagcaatttaaggttcacaaataactggtctgttggatttttaaaataatcttacagaaagtggaatgtatgggttttattaaaggtgttttctgctgttc

SEQ ID NO: 853781 - DNA, 120 bp, Artificial Sequence
  ENSG00000273890_0 (sequence is synthesized)
gcgtcttgctgacctaaatccttgaactggaaacacaggcttatggatgggaggataaataatcctcttcctcctatgtctcttttcagagataatggacctgaggaaaacaccaaacta

SEQ ID NO: 853782 - DNA, 120 bp, Artificial Sequence
  ENSG00000273890_1 (sequence is synthesized)
gatggtcattaagtctctaaagtagaaacggcctcttagcttgaggactaccccagcataggtattgcatcagagcctacaatgtggatcctccccgcagctggaccaggtcattcatat

SEQ ID NO: 853783 - DNA, 120 bp, Artificial Sequence
  ENSG00000273890_2 (sequence is synthesized)
actaccctttcttagatgcctttgtctgataaactttgaacctatctctctgtttccagaacagagtccataactcttctaagaagaggaagcaaatcaaagcctggaattcaaagcttt

SEQ ID NO: 853784 - DNA, 120 bp, Artificial Sequence
  ENSG00000273890_3 (sequence is synthesized)
cttcagcagagtcaacagaccaataaagaaagggagtccctctgcctgtggcattgtccacactcacagggtcccacactcttatttgttcctacagagtaaaacgaggctagaaatacc

SEQ ID NO: 853785 - DNA, 120 bp, Artificial Sequence
  ENSG00000273893_0 (sequence is synthesized)
gaccacgcccacaccacgtgctaccttaggggttgggaacatctacattagcgaaggcatgcagggcataatctctgatttaactgcaagaatccaccatattcctgaccctggttccaa

SEQ ID NO: 853786 - DNA, 120 bp, Artificial Sequence
  ENSG00000273893_1 (sequence is synthesized)
taaaactttatttacaaatcagacagtcggcccgtgggcgatagtttgccaatttgatttttaaaaccatcccattaagatattttttggattattgagtttttggatgcctccttaaat

SEQ ID NO: 853787 - DNA, 120 bp, Artificial Sequence
  ENSG00000273893_2 (sequence is synthesized)
tggtttgaatgtgttccccgtatttcatgtgttggaaactgaatgcccaacttagcagtattgaaagatggggcctttaagaggtgattggatcctaaggcctctgccctcatgaattga

SEQ ID NO: 853788 - DNA, 120 bp, Artificial Sequence
  ENSG00000273893_3 (sequence is synthesized)
ttaatccacgtgtggactaatagattaatgggttattatgagagcaggactggtggctttataagaggaagagagacctgagctagcacacccagcccccttgtcacatgatgccatgtg

SEQ ID NO: 853789 - DNA, 120 bp, Artificial Sequence
  ENSG00000273893_4 (sequence is synthesized)
ccgcctcaggtctctgtagagtccccaccttcaagaaggctgtgcccccaccagatgtgccccctcgaccttgtattcctccataacagtaagaaataaactccttttctttataaatta

SEQ ID NO: 853790 - DNA, 120 bp, Artificial Sequence
  ENSG00000278840_0 (sequence is synthesized)
ctttatgggtacgaggcttaaaatctaagataaaaagacaaaaaaactctagcatccatagagaaaattagcaggatgtagaaaaagtatattataaattaaatgcaaaagaaatttttc

SEQ ID NO: 853791 - DNA, 120 bp, Artificial Sequence
  ENSG00000278840_1 (sequence is synthesized)
gaatctgtattgtagatcggtacttaaggtttgaagtcaacgtatgattatgtgtatgctaattctaaatgcatatttgatgctcctaaagataaacattaaaaattgttcctgagtaca

SEQ ID NO: 853792 - DNA, 120 bp, Artificial Sequence
  ENSG00000278847_0 (sequence is synthesized)
aaaaaaagaaagtaaatggacttgccacagtgtacaggcaagaggaggggaggattatcctaatcaattactgagccaattgatttttttttttgcgttaacgtaggtattttgaccaag

SEQ ID NO: 853793 - DNA, 120 bp, Artificial Sequence
  ENSG00000278847_1 (sequence is synthesized)
aatgtctagtgtgtgttctttatggcagtgtttcatcttttggcatccttgaaatgtcagttttgtgtaattgtctcatgaacaatgaattatgcacaccctttaataaatgtaaactaa

SEQ ID NO: 853794 - DNA, 120 bp, Artificial Sequence
  ENSG00000278847_2 (sequence is synthesized)
caattggttttgggattgtcttcttacaaaattatttatcctcttaaagtttaaaaaggctttagagactgagaggaaaatgcatttgattaaacagatagtactgatgaactccaaaaa

SEQ ID NO: 853795 - DNA, 120 bp, Artificial Sequence
  ENSG00000272760_0 (sequence is synthesized)
agggagccctaatgtaactatggacttcgggtgactggccaagagtaagccctaatgtaactatggactttgggtgactatgacccaaatgtcaatgtagcttcattaacagttaataaa

SEQ ID NO: 853796 - DNA, 120 bp, Artificial Sequence
  ENSG00000272760_1 (sequence is synthesized)
catttcactgtggtgtgggatggtgactgtagtgggggtggcggtgtgtgtgcatgggtatgggctggggtatatgggaactcactgtactttctgtaattttgctgtgaacttaaaact

SEQ ID NO: 853797 - DNA, 120 bp, Artificial Sequence
  ENSG00000272760_2 (sequence is synthesized)
aactgccctaaaaattgtctatttttaaaaaacaataattataaactggaaaaattctcttaggaaatcctaaaatatggaagataaaatatgaaatgttttctcagtattaaatgttta

SEQ ID NO: 853798 - DNA, 120 bp, Artificial Sequence
  ENSG00000272760_3 (sequence is synthesized)
aaccactttctaaccctcagagagcaacacagcaaatacttattaacagtgccataaagaaataaaagctagtcaaccaaaacttcccattaaataggaactgtaaactttatatacaga

SEQ ID NO: 853799 - DNA, 120 bp, Artificial Sequence; identical to SEQ ID NO: 829686
  ENSG00000272760_4 (sequence is synthesized)

SEQ ID NO: 853800 - DNA, 120 bp, Artificial Sequence; identical to SEQ ID NO: 829687
  ENSG00000272760_5 (sequence is synthesized)

SEQ ID NO: 853801 - DNA, 120 bp, Artificial Sequence; identical to SEQ ID NO: 829688
  ENSG00000272760_6 (sequence is synthesized)

SEQ ID NO: 853802 - DNA, 120 bp, Artificial Sequence; identical to SEQ ID NO: 829689
  ENSG00000272760_7 (sequence is synthesized)

SEQ ID NO: 853803 - DNA, 120 bp, Artificial Sequence
  ENSG00000275389_0 (sequence is synthesized)
ctggtgcttcctggggtcacctccccaataaacacctgcactcactctctcatctcggtgtctgcttctggggcagcctagacggacacagagagcttgtggatggtggatgaacaaggc

SEQ ID NO: 853804 - DNA, 120 bp, Artificial Sequence
  ENSG00000275389_1 (sequence is synthesized)
ctgtctgagggagcaaggtatcagggaacctgagcctgagggaggtgcgggagctggagcatgggtctggaggaggaaaaagcactcttggagtagagaaaataagggaggcagagggga

SEQ ID NO: 853805 - DNA, 120 bp, Artificial Sequence
  ENSG00000275389_2 (sequence is synthesized)
tttaaccaatgagaaacccaagaaaagaacctccagggcaagaagtccaatagggctgatttcttttctttgcactctttaaacaatcattatcatagtaaaatatgcgcatagttaaaa

SEQ ID NO: 853806 - DNA, 120 bp, Artificial Sequence
  ENSG00000275389_3 (sequence is synthesized)
aaaaaaaaaaaaccaaactgcctagaatagtggtctagtgaaggcacagctcctcgcgctacctctcgcctccagctcctgcctgctccctgaaggtaaaacctcctttgagcagtttta

SEQ ID NO: 853807 - DNA, 120 bp, Artificial Sequence
  ENSG00000275389_4 (sequence is synthesized)
ggctttggctctggaggttgcccccatgcctctgaatgacagctgctgtggttatttggagtttatcagcctcagatattgtctgttgacctgctgcgatgaaggatggagtagtagacg

SEQ ID NO: 853808 - DNA, 120 bp, Artificial Sequence
  ENSG00000275389_5 (sequence is synthesized)
gaattataaaatggcccagagtctggcccctggtgcacagctacctccccgctcccgtgcacttctcaaacacggttctgggtgcagctgataacagcccagatcactggactttaagat

SEQ ID NO: 853809 - DNA, 120 bp, Artificial Sequence
  ENSG00000275389_6 (sequence is synthesized)
agggagtgggcctgagtgggcctgacctaatcacaggagtgctttacacctgcggctggagggcagccatggagaaggtcaaagattcaaagcacaagggggatctgaagtgtgagaggt

SEQ ID NO: 853810 - DNA, 120 bp, Artificial Sequence
  ENSG00000275389_7 (sequence is synthesized)
gccctgttgctggcttgaagatagaggggccacatggcaaggagctgtgggtggcctctggggactgagggtggcccccagctgacaaccaccaaggaaacaaggactgaggtcctacag

SEQ ID NO: 853811 - DNA, 120 bp, Artificial Sequence
  ENSG00000275389_8 (sequence is synthesized)
ccccaaggaaccgaattctgactcagccatgtgaccatggaagaggactccatgcttcagaccacagagcagcttcaatttctgccttgtgaggccctaagcacagaacccagccatact

SEQ ID NO: 853812 - DNA, 120 bp, Artificial Sequence
  ENSG00000275389_9 (sequence is synthesized)
atacctagtcttctgatgatttttgttgttgttgttgagacagggtcttgctctgttgctaaggctggagtacagtggcgtaatcatagctcactgcagctttgaattcccaggctcaag

SEQ ID NO: 853813 - DNA, 120 bp, Artificial Sequence
  ENSG00000275389_10 (sequence is synthesized)
ctgcctcagcctcccgagtggctgggatcataggtgtgcgtcaccacatctggctaaattttattttttttttttagagatgggatctcactatgtttcccaggctggtctcctggcctc

SEQ ID NO: 853814 - DNA, 120 bp, Artificial Sequence
  ENSG00000275389_11 (sequence is synthesized)
tggttctttatgcagaacaggtagctagcacagtggtgtcagatggtgtaaggattgagctgtcacaccattgttcatcaccccgccgtgcctgggccagcctggccgtattgctacttt

SEQ ID NO: 853815 - DNA, 120 bp, Artificial Sequence
  ENSG00000275389_12 (sequence is synthesized)
aacctcctctgcaacttccaactgtgccttgccacgtccctttccaattccagccgtgacaggcagtctcttggctccccatgttataagttgtggacatcttcagtgttgcaggccata

SEQ ID NO: 853816 - DNA, 120 bp, Artificial Sequence
  ENSG00000275389_13 (sequence is synthesized)
tggtctctgtcagaacaaaactctgcccttccagacagcatccataggcagtatgtaaacacatgagcatggctgtgcgccaataaaactttatttacaagaaagaaatacgggcccacc

SEQ ID NO: 853817 - DNA, 120 bp, Artificial Sequence
  ENSG00000275389_14 (sequence is synthesized)
cacccttcgggctccttctccacctcttgtcctctgtccagggaaccattactgtcaccagatccaggttgctacccttgggaatctcttggcctcatccttaggattctatttccaatg

SEQ ID NO: 853818 - DNA, 120 bp, Artificial Sequence
  ENSG00000275389_15 (sequence is synthesized)
tatgaaaagcagatttctgattaatgtgtagtaataggaagcgctggaactatccaggcttatctctccttgccagtgacttttaaaacggttgcttctatccaattctgtcggagagag

SEQ ID NO: 853819 - DNA, 120 bp, Artificial Sequence
  ENSG00000275389_16 (sequence is synthesized)
gcagaggccccatgggacatgaagatggagacccagctcctgctggcccatagtataggattccttgtctgggactgtgtgtttgaaacatcctttatatacaaactccagcctccttca

SEQ ID NO: 853820 - DNA, 120 bp, Artificial Sequence
  ENSG00000275389_17 (sequence is synthesized)
gcccgtgcattgcaagccaggggtcacagctggaagcattttcatgggaaattcagagttgtcaaaggcatttatctggtattttattgtaattggttaatttatgctttatttaccttg

SEQ ID NO: 853821 - DNA, 120 bp, Artificial Sequence
  ENSG00000275389_18 (sequence is synthesized)
cggataggatctgagagctaaggctgggtactgctgcctttttctgttccacactgtcagggaaatgtatgtctccttaggcttaaaagcatttttttttttaaatgagaaatggagctt

SEQ ID NO: 853822 - DNA, 120 bp, Artificial Sequence
  ENSG00000275389_19 (sequence is synthesized)
tggaataaatatttttcattgctcacgacacggagcccctgggtcaccatggcctgtgttcttttaagtcatgtaaaactagtttctgctgagaacattcaaatgtttcaccttgtgctg

SEQ ID NO: 853823 - DNA, 120 bp, Artificial Sequence
  ENSG00000275389_20 (sequence is synthesized)
aggaatttggaactaatcttctcagatcggtgttgctggaagtcggtccaggagctttttggataatccacctcatgactggaaaacaacgaagaaacccagtagcttcttcgccgtgtg

SEQ ID NO: 853824 - DNA, 120 bp, Artificial Sequence
  ENSG00000275389_21 (sequence is synthesized)
gattcagaccccgggagcccaggcctgcacctgggcagctgctccctgcacgtggccggacatatggaatatggagccccgctgccttggagtcagagagctgccaagtagaatttgcat

SEQ ID NO: 853825 - DNA, 120 bp, Artificial Sequence
  ENSG00000275389_22 (sequence is synthesized)
gtaatgctgctatcattttcaattgctctcccaataaaacaggccctggagccgaggtgaatgccgtagaaggcattttttccactgggtgtgggtccagaataaataatcaaaagaaaa

SEQ ID NO: 853826 - DNA, 120 bp, Artificial Sequence
  ENSG00000272763_0 (sequence is synthesized)
ctcctcctggctgcccaggaagtagtgtcttcttttgcaagctgggggaggggtttaaagatgctggcgctgccctctagccggctgctggggacatcaaaggagattcgggctgtggaa

SEQ ID NO: 853827 - DNA, 120 bp, Artificial Sequence
  ENSG00000272763_1 (sequence is synthesized)
tggagttaggagagggcgccaaaggcgacgtgccggccgccagctccaggccgagccccgagcgcctgcaggaacacgccccttcacccggcgcgggacgcagagctgcgagagaatctt

SEQ ID NO: 853828 - DNA, 120 bp, Artificial Sequence
  ENSG00000272763_2 (sequence is synthesized)
gttcagcgcggactcaacgccagggcgccgcctagaggttggtctctgtctcggcctcacccgccgggagaccacagagctgcttccccagccgcccgccgccagaaattggaaaaaaaa

SEQ ID NO: 853829 - DNA, 120 bp, Artificial Sequence
  ENSG00000272763_3 (sequence is synthesized)
ccggtggggtgcagccctgctgaagccccagagctcagcccagtgctgggcacatagtaggcgctcaggaaatgattgctgaatgtggaatgaaagtccccagcaggcaaaaggctgtga

SEQ ID NO: 853830 - DNA, 120 bp, Artificial Sequence
  ENSG00000272763_4 (sequence is synthesized)
tccggccatctgggcgctgctcctccgcgcctctggcctccccgcggcgcgccaggcccatctcctcaccagccgctctgggatccgacggcgccgtgggtgggggcaggtgagacggcc

SEQ ID NO: 853831 - DNA, 120 bp, Artificial Sequence
  ENSG00000272763_5 (sequence is synthesized)
gagccccgcccgggcggaggcaggaagcgctctcgcctatccccctcccggaccctgtcctcgcccgccactcaccggcgccaggggaacgcaggagcgtgagccccttcgcgcccccag

SEQ ID NO: 853832 - DNA, 120 bp, Artificial Sequence
  ENSG00000272763_6 (sequence is synthesized)
cgccgtcggcgtcgctgccccagacacagacactgcctcgagaggcctcacagaggcgggggcagaaggcggcgacccagagccgccacatcccccgccttgggcgccgtcacagtcccc

SEQ ID NO: 853833 - DNA, 120 bp, Artificial Sequence
  ENSG00000272763_7 (sequence is synthesized)
ctggggtctaggaactcggcttctggcacctctgaattctccgagactgtctcctccctccccgcctgtaatgaaccctgtgaagggagacaggccaggaagtcccagaaatatttattc

SEQ ID NO: 853834 - DNA, 120 bp, Artificial Sequence
  ENSG00000272763_8 (sequence is synthesized)
ttgtgactctcacaaaatggaaaagggtctcaatttttgtttctttaaggaacttgtgttctgcgtctgtgtctacactgcctcctctcaccaaccaaattgtctagcccccctccagtt

SEQ ID NO: 853835 - DNA, 120 bp, Artificial Sequence
  ENSG00000272763_9 (sequence is synthesized)
acgctagaactctgctttatcttcaaggaagaaagggagtggggagaagttacctctaaaccctccagcatggccatcaattttctgaataatttggaggtcaacatgcttttggaaaag

SEQ ID NO: 853836 - DNA, 120 bp, Artificial Sequence
  ENSG00000272763_10 (sequence is synthesized)
tgtttggaaaacgtttgggggtgaaaagaaatgttgcctaactggcctttactcacggagtgaccatcatctcagctagttagtgtatgagcggcaccagcaccccggccatgggtgtct

SEQ ID NO: 853837 - DNA, 120 bp, Artificial Sequence
  ENSG00000272763_11 (sequence is synthesized)
gtgctgagcctctgaaagttgacttatcctttggggagccctcggaaagacacagctggtatctatgggaatggctttggggtgtcctttggcaccatacagataattttgtttttttaa

SEQ ID NO: 853838 - DNA, 120 bp, Artificial Sequence
  ENSG00000272764_0 (sequence is synthesized)
gtgcgttgccggtgggcgctttaggaaattggtaggaggaaaagcggcttcttttgaaaagaattctcttaggaatctctggcttcattgaggacacaggtgtaagcagaagctgtgttc

SEQ ID NO: 853839 - DNA, 120 bp, Artificial Sequence
  ENSG00000272764_1 (sequence is synthesized)
aggtgaatttcgtaaagacgttgacagttggaaaacctgtgctttcagcacgtgataaatctgcagagtcagcagacaatgaagatttggcattcaagaactcctcaaatacttctcgat

SEQ ID NO: 853840 - DNA, 120 bp, Artificial Sequence
  ENSG00000272767_0 (sequence is synthesized)
ggtcgacccctccgggatgggggccagggcagcctccgcggctatcccgggagtcctgctccgacaccacctccacaggggaagccgctcggagagacgcagggacccaggcaagggatg

SEQ ID NO: 853841 - DNA, 120 bp, Artificial Sequence
  ENSG00000272767_1 (sequence is synthesized)
cgggcaaacgcgccaagggttcagcagaggggcgtgaccgccagttggccgggctgagcgaggcgccagagggaagcctgcaaggtacgtctgcgagagccgggtgcgggcgcggcaggg

SEQ ID NO: 853842 - DNA, 120 bp, Artificial Sequence
  ENSG00000272767_2 (sequence is synthesized)
gaaaaggggggcgctgactctcttaccgccaggtccggattgcggctgtccctgtgtgacacggctcggatgacccccgctcgccagcttcgccagccgcgtccgctctcccagcgctcc

SEQ ID NO: 853843 - DNA, 120 bp, Artificial Sequence
  ENSG00000272767_3 (sequence is synthesized)
gaacgtgcctcgtcgccgaccgccacacacaggaaccgcttacccaccagctctgcccgcgtctctaccgccatagctgtcgctgccgaagcggccgctgcctcctccagtgcgagggaa

SEQ ID NO: 853844 - DNA, 120 bp, Artificial Sequence
  ENSG00000272767_4 (sequence is synthesized)
ccgatgaaacctcactcctaccggccgctcatgctgaggagagcggaccgggacacagcagcggacccgaaagagcgcagactcgggacgaaccggccgctctgccccggacacagcgac

SEQ ID NO: 853845 - DNA, 120 bp, Artificial Sequence
  ENSG00000272767_5 (sequence is synthesized)
caaacactcctttggactcccagattcgcagccttgtgctgcagcgccacacaagaaaactgaaacaaaacccaacgcggccgtcgaagaccccgaggcagcccagccgccgccaccgcg

SEQ ID NO: 853846 - DNA, 120 bp, Artificial Sequence
  ENSG00000272767_6 (sequence is synthesized)
ggccagtactgctccgtctccctccccgggcagcggcggcgcgcagcgcgtctccttccgccggcgcgggcggggcagcagccgcgggagggtcggcggaaccaccgcagacggaaagta

SEQ ID NO: 853847 - DNA, 120 bp, Artificial Sequence
  ENSG00000272767_7 (sequence is synthesized)
agtagtgcccggccctgcggaggcggcagcggccactgggtccgtccagatccagaggcggcggcggcggcggcagcgggagacgaaaaaatgaagagggccgcgggaaagtaggcgaca

SEQ ID NO: 853848 - DNA, 120 bp, Artificial Sequence
  ENSG00000272767_8 (sequence is synthesized)
gctattcaaagcttttgggggtctacctttgtattcgttgctccctcagaggtggaggtgaggggaaagtgaagtgtagtggttccactctgatcacaaaataaactcctgggttgacgc

SEQ ID NO: 853849 - DNA, 120 bp, Artificial Sequence
  ENSG00000272767_9 (sequence is synthesized)
ctcacccgcggtttgatgttcagagcacacagcgcccgccgcctgagttagcctgaattagcagtcccgcagtaacagcagcagagcaggacaacacttctactgaaaactaagccccaa

SEQ ID NO: 853850 - DNA, 120 bp, Artificial Sequence
  ENSG00000272767_10 (sequence is synthesized)
agtcacagcagaaccaaccgttcatgacttcaagggaaaacgagggggaaaatgtgatcctttcattcttctcatttgtggtgatactaattacatgtttaagctattcacagatttaaa

SEQ ID NO: 853851 - DNA, 120 bp, Artificial Sequence
  ENSG00000272768_0 (sequence is synthesized)
gtagtacttgcggttctcacgcaccaagaattcgctcttgagcgcgcgccgcggcccgccgccctcctcggcgccagccgccagctgctcggggctgctagggcccagctgcgcgtagtg

SEQ ID NO: 853852 - DNA, 120 bp, Artificial Sequence
  ENSG00000272768_1 (sequence is synthesized)
ttctatgaagtcgcccagcgagtcgcggaactcggcggccaccgccatggacagcgtgaggcggctcttggaaccgcccgcgcccacctcggcgatcttgaggaagcggcccttggcgtt

SEQ ID NO: 853853 - DNA, 120 bp, Artificial Sequence
  ENSG00000272768_2 (sequence is synthesized)
ctgcttcacatctaagtagaagcgcttgttctggatgtccagccgcttcgaggccagctcctgcgtctcttgctcgccgccgccgcgggacgcgggctggaacccgcacggcccaccgcc

SEQ ID NO: 853854 - DNA, 80 bp, Artificial Sequence
  ENSG00000272768_3 (sequence is synthesized)
gccgccgcgctcgctgccgctgtcgccgtccgccatcttctaggccgccgcctcgccgccaccgcccgccgcgctcgcgc

SEQ ID NO: 853855 - DNA, 120 bp, Artificial Sequence
  ENSG00000272768_4 (sequence is synthesized)
gctcgctcacgcgctcccgccgctcatcgccggccgccgccgcccccccatcgcctccgcgccccgcccccgcgacttccgtgcagccctagccacttccggcgcgcgatttcccgtgaa

SEQ ID NO: 853856 - DNA, 120 bp, Artificial Sequence
  ENSG00000272768_5 (sequence is synthesized)
cccgtgaagtcactccgtcccgccctccgcggcctcgcggccggaagcgccgcggcggcgtggcgcagaggggtgacgtcaggggccgcgccgggcgggcggcaagctgagagtaggcta

SEQ ID NO: 853857 - DNA, 120 bp, Artificial Sequence
  ENSG00000272768_6 (sequence is synthesized)
tgttactgctcggtttctagccctggggacttgccagccttagcgtgactcagccgcccgctgcgtctgtctacgcgcctcttcccgtgacacttttactttagactccggtgtcgtcca

SEQ ID NO: 853858 - DNA, 120 bp, Artificial Sequence
  ENSG00000272768_7 (sequence is synthesized)
cttccctccttctcgcttccggggcgttagctgagcatactcaggccccagcctgctcgcgctggttgtgtgctgggaacagagttccagtctatacactggcgaccggggggagggaga

SEQ ID NO: 853859 - DNA, 120 bp, Artificial Sequence
  ENSG00000272768_8 (sequence is synthesized)
tcctttggagcactcggaagcgggttctgaccagcctgtggggttccctagaggaggcatgagctgactctgaagggcaaactgcagttggcctggcaactctggagaagagccacccag

SEQ ID NO: 853860 - DNA, 120 bp, Artificial Sequence
  ENSG00000272768_9 (sequence is synthesized)
cataggagacggcagtgcagaggcacccagggcctgatgctgggagctcagagcagctgggggtgtgtatgcctgaagaatggtcgtagatgacactggagggtggattagatcaaggaa

SEQ ID NO: 853861 - DNA, 120 bp, Artificial Sequence
  ENSG00000272768_10 (sequence is synthesized)
agccatttgcagtgcgggagagttagtgcctaccccagagtctggagccaccgtatgtgatcaggttcacattttggaaagatcactgtgggaacaatatagaaagaagatgatttagga

SEQ ID NO: 853862 - DNA, 120 bp, Artificial Sequence
  ENSG00000272768_11 (sequence is synthesized)
tgaggttagatttgggatccagagatcagttaactgtccccacagttagccatattaaagtggttaaggaaattgactgccaatctttagtttctttatcaataaaatgaataattccta

SEQ ID NO: 853863 - DNA, 120 bp, Artificial Sequence
  ENSG00000272769_0 (sequence is synthesized)
tcacatgtgccggtcccaaaggaattccttaactctcccttcctggaaccgaaatgcttccaaaggcagagagctcctatatatatttctctgttttccccggaggaccgtgcatgaaag

SEQ ID NO: 853864 - DNA, 120 bp, Artificial Sequence
  ENSG00000272769_1 (sequence is synthesized)
gcgcctttttggcgcgtgtgtctctgaccctgtggatcttctggacaattcccggaatttcttgcagggcagcacttccccttaagtcgtctctttctcgtttggatagtcagtatttgt

SEQ ID NO: 853865 - DNA, 120 bp, Artificial Sequence
  ENSG00000272769_2 (sequence is synthesized)
atagtcactattctcttttggttagccgtctaattttatactgccagtcaagctctactcccttccccctagagtttgaatttattttttttcaaacgctacacaaacccaaataaactc

SEQ ID NO: 853866 - DNA, 120 bp, Artificial Sequence
  ENSG00000272769_3 (sequence is synthesized)
aaccaaagcggactttacctaccttcctacctacctaccaagaaaatatcccacaaaggagagaacggagaagcttgcaatacaggaagaaaaaaaaagaattacagaatggaagggatg

SEQ ID NO: 853867 - DNA, 120 bp, Artificial Sequence
  ENSG00000272769_4 (sequence is synthesized)
tgtgctctaaaaatgcaggtactcaaaggaaattgggctgatttgtactggacaccgaatttgaggaatacaggatctcaacctttctttgactggattacttttttattccattttggt

SEQ ID NO: 853868 - DNA, 120 bp, Artificial Sequence
  ENSG00000272769_5 (sequence is synthesized)
gtggacgcgtctgaaactgatagtgctgctgctacctaccataatgtgtttgttgcaagatccacaagaacgtggatgccaagaatccacaaaaaaaaacagatgcaaccgttgatgagg

SEQ ID NO: 853869 - DNA, 120 bp, Artificial Sequence
  ENSG00000272769_6 (sequence is synthesized)
ccataaacagaaacagcaagcggttcccacgtttcctctgctttaactactgatgatgaaatgcaagtcataaggcaaatagaagggctgtactgatacagacaaaatgttattattatg

SEQ ID NO: 853870 - DNA, 120 bp, Artificial Sequence
  ENSG00000272769_7 (sequence is synthesized)
aagggataagtcccttgtaaaaccttgaaatttttttcttctttgagaaaaatctatcacctattttcaccctgctcttgatatagcaaatattgtaagttgtcttatggaggatgactc

SEQ ID NO: 853871 - DNA, 120 bp, Artificial Sequence
  ENSG00000272769_8 (sequence is synthesized)
agggaggacggtgaatgggttgactcaatccagaaaaggaagaggaaaataaaaagacataacgaccaatctgtgaaaacgctcagtggcttaaaagacactattaagagatgagactat

SEQ ID NO: 853872 - DNA, 120 bp, Artificial Sequence
  ENSG00000272769_9 (sequence is synthesized)
ttgattctttatttaactcctttccaaggaaatgtttttgaaaatccatacggtttacatattaaagaggatcaatctgataataggtgatttttttgaaaaaaatgaaaggaaaattta

SEQ ID NO: 853873 - DNA, 120 bp, Artificial Sequence
  ENSG00000272769_10 (sequence is synthesized)
aaaataaaagggacagaataatactttgtatacttccacttctagtaataataaaatgagtgatttggaacaaacatgtagcagaggaaaggtgagcaaactttttaaatgtcaaaagac

SEQ ID NO: 853874 - DNA, 120 bp, Artificial Sequence
  ENSG00000272769_11 (sequence is synthesized)
atcaaaagacaagataatggagaaatggtgggccaaaattcagaaacagttgggagagtcatgcatttggggctaattttctcctggggatgatggtctagtctaggatctgaaaagcct

SEQ ID NO: 853875 - DNA, 120 bp, Artificial Sequence
  ENSG00000272769_12 (sequence is synthesized)
agaatctctgcagcacttttgacacctatatgaagctgggggaaagaaagattctagcaaaaattaaaatgcacatcttttcaagagcacataagatttgtacaaatgagtaaaatgata

SEQ ID NO: 853876 - DNA, 120 bp, Artificial Sequence
  ENSG00000272769_13 (sequence is synthesized)
tgggatttcaaaatactgaaatactatgttttcgaatacagtgaaatttggctagaaatcaataaaaatacaactaaatgattcatgtgtgcatttaataaatattgtctcatctccaaa

SEQ ID NO: 853877 - DNA, 63 bp, Artificial Sequence
  ENSG00000249395_0 (sequence is synthesized)
atgtgattttgaagaaaggaggaaagatgtgaaaagtgattggtcagccacattcatggtgtt

SEQ ID NO: 853878 - DNA, 120 bp, Artificial Sequence
  ENSG00000249395_1 (sequence is synthesized)
aagatgtgaaaagtgattggtcagccacattcatggtgttgagaaaagaatttgcttttctggaacatagcctgtgatagcagaacaacacctggcaagaaacaggttatgtttggctgg

SEQ ID NO: 853879 - DNA, 120 bp, Artificial Sequence
  ENSG00000249395_2 (sequence is synthesized)
ccaggtgggacccagacagcagcaaagcaatggaagcatgtattttggtcaatatagagttaatacacaattttgcccctcttcttctgatcatgggactcatattaccagtcttcacat

SEQ ID NO: 853880 - DNA, 120 bp, Artificial Sequence
  ENSG00000249395_3 (sequence is synthesized)
ttcctttaaattcaggaatcaggaagaatttccagagtttgcagatggacacatttgctgcttccattctaaacataagttagaagaacctttcaactggattccaactttaatatgtca

SEQ ID NO: 853881 - DNA, 120 bp, Artificial Sequence
  ENSG00000249395_4 (sequence is synthesized)
aagttaacagaaatgctaaaattataagacaaagacttcaaaatagctattttaattttgcctagtgaggtaaatgcaaacatgctcactatgaatgaaaacaggtaatctcagcagtca

SEQ ID NO: 853882 - DNA, 120 bp, Artificial Sequence
  ENSG00000249395_5 (sequence is synthesized)
aactataaaaataagcaaatataaattttagaattaaaacacaatatctaaaaataaattcacctgatattctcaatagaaaaaatggtaatgcagagaaaaatgtatgaaaatatggca

SEQ ID NO: 853883 - DNA, 120 bp, Artificial Sequence
  ENSG00000249395_6 (sequence is synthesized)
ggcaatttgaagaagagagaagagatcaataaaataaataagtatatccttggagacctgtggatgttttttgaaaagtgaatcatgtaagtaattgaagtcccagaagaaaagaaaaga

SEQ ID NO: 853884 - DNA, 120 bp, Artificial Sequence
  ENSG00000249395_7 (sequence is synthesized)
agaggatgagcagaaaaaaatttctgaaaaaatatctgaaagcttaaacactataatgaaagacacacatttacaaactcaagaagtttagtaaaccaaaaacaataaaatcaaagagaa

SEQ ID NO: 853885 - DNA, 71 bp, Artificial Sequence
  ENSG00000249395_8 (sequence is synthesized)
agactccgtgggcgtaggaccctctgaaccaggtgcaggatataatctcgtggtgggtggttttttaagcc

SEQ ID NO: 853886 - DNA, 72 bp, Artificial Sequence
  ENSG00000249395_9 (sequence is synthesized)
tgggaaagggaactccctgaccctcagtgcacgcacccactgacccgcgcccactgtctggcactccctagt

SEQ ID NO: 853887 - DNA, 120 bp, Artificial Sequence
  ENSG00000249395_10 (sequence is synthesized)
tacacagagaggaacaatacattaaatactagcacacttctcatcagagatcattaagcccagaagacagtggaatgagatctttaaagtgctgaaataaaataaatgttgattaaaaaa

SEQ ID NO: 853888 - DNA, 66 bp, Artificial Sequence
  ENSG00000249395_11 (sequence is synthesized)
gtctggcactccctagtgagatgaagccggtacctcagatggaaatgcggaaatcaccgtcttctg

SEQ ID NO: 853889 - DNA, 67 bp, Artificial Sequence
  ENSG00000249395_12 (sequence is synthesized)
ctctttaaagtgattgctcactgatgccttatctagttctcttggtgaggtcatgttttcctggatg

SEQ ID NO: 853890 - DNA, 120 bp, Artificial Sequence
  ENSG00000249392_0 (sequence is synthesized)
agttttaaaaagtacactaactacagtaagggttcatgattactacattgttgaatacgatcaagcagtctggaagactgtcgagtgttgctttggaggagatttctacccaggattatc

SEQ ID NO: 853891 - DNA, 120 bp, Artificial Sequence
  ENSG00000249392_1 (sequence is synthesized)
ttgaaatgtcagactctctggaactactagactcagcataaacaacaggagttggttttactctgtgggactccactttacaatgggtcttcctttccctgcccaaactccagagctcga

SEQ ID NO: 853892 - DNA, 120 bp, Artificial Sequence
  ENSG00000249392_2 (sequence is synthesized)
tcagtctccagagtagctgggactacagaaaaatacatagcagcttggattgctggcaagatggtcaactaggaaaagctctggtctgcagcttccagcgagattgacacagaagagtct

SEQ ID NO: 853893 - DNA, 80 bp, Artificial Sequence
  ENSG00000249392_3 (sequence is synthesized)
ctaggaaaagctctggtctgcagcttccagcgagattgacacagaagagtcttgctttgtcagcctccatctcccaggtt

SEQ ID NO: 853894 - DNA, 120 bp, Artificial Sequence
  ENSG00000241560_0 (sequence is synthesized)
acggaattgctgaagttgtgaaggttgatgctgtgaatgcgctcggtcatccccttgcaactgatgtcacctgcagcatgtcaacgcagacacaaaacagggcatgggtcagatctagct

SEQ ID NO: 853895 - DNA, 120 bp, Artificial Sequence
  ENSG00000241560_1 (sequence is synthesized)
ggttgcattcctaacacctaggtttcagagtaaaaatacagagtcagcttgtgatggcattccctcaaaacatggaaggaattgcagtaatgaaagtcatcatgtattctaagagactgt

SEQ ID NO: 853896 - DNA, 120 bp, Artificial Sequence
  ENSG00000241560_2 (sequence is synthesized)
tctgcgagagcacaacacagacggggctaaagcagggattgtctaagcccagtgtggaggaaccatcaaggatttcagcacgtttttttagccattgtgagaagcaaaagtgctcaggag

SEQ ID NO: 853897 - DNA, 120 bp, Artificial Sequence
  ENSG00000241560_3 (sequence is synthesized)
ttaagagaagcagacgtccgaaattatctccatgcattaccaaaaaccgtgggcaccacggcacggggaaaacttaccagacaactctcatgccatcaagccgacggactttcaaaaaaa

SEQ ID NO: 853898 - DNA, 120 bp, Artificial Sequence
  ENSG00000241560_4 (sequence is synthesized)
taaaagatgcatttctttacttgagctacggtgaaagggcacctaaggtgaatggacagattgtagatgggtgcacacaggaaaatgtacagctcctacaatgtattctgagggcccatg

SEQ ID NO: 853899 - DNA, 120 bp, Artificial Sequence
  ENSG00000241560_5 (sequence is synthesized)
atctgtaggcaacatcagctcctgatttctaggtctggatctgggttctctgtagcacaggaaggtctctacttctcctacataaatgccttgcatggcgggaactaaatcaactacaca

SEQ ID NO: 853900 - DNA, 120 bp, Artificial Sequence
  ENSG00000241560_6 (sequence is synthesized)
gacccatacatccagagagcagaggtgagctggatacaagtggcttagagatgtggtggaaggaggccagagctccaagggaagggcagcaaggagacaacagcatgggttgcagctcag

SEQ ID NO: 853901 - DNA, 120 bp, Artificial Sequence
  ENSG00000241560_7 (sequence is synthesized)
acaacaggtaaataaaaccaagcaaagctgctggtcacagatttgaccagggtggcaagaaatgacaagctaccatgagattcaacagtggcacggaaggatgatgagaagcaaacagat

SEQ ID NO: 853902 - DNA, 120 bp, Artificial Sequence
  ENSG00000241560_8 (sequence is synthesized)
taggagaagctgccaccaccgtacatagaggcacagatgaccaagcagaacagcaccagtccctgcaaggtgtgctcagatacagctcagcacagccatctggccaggagggaatgataa

SEQ ID NO: 853903 - DNA, 120 bp, Artificial Sequence
  ENSG00000241560_9 (sequence is synthesized)
tgcacatggtgtgcactgcagccgggaagttgagaaccgctgtgggcacctcaggactgagtctggttaccctgctgatccaagaaatgaagccatctaaaattttgcctgctttcacaa

SEQ ID NO: 853904 - DNA, 120 bp, Artificial Sequence
  ENSG00000241560_10 (sequence is synthesized)
acttaccaggtacaatgagccagtgactgttactgaatttcttaagattacacttttcccaactactgcagactgcttcagaatagaagaagacaactctcatgccatcaagccgacgga

SEQ ID NO: 853905 - DNA, 120 bp, Artificial Sequence
  ENSG00000241560_11 (sequence is synthesized)
taggtctggatctgggttctctgtagcacaggaagcatagttactctgtgatgaagaaaaactcagaaaactatccagatgtgggaatttctcgggtattccttgcacttgaacttaagg

SEQ ID NO: 853906 - DNA, 90 bp, Artificial Sequence
  ENSG00000241560_12 (sequence is synthesized)
agagacaggatctcactctgtcacccagggtggaatgcagtgggatgatcatggctcactgaagccttaactattcccaagtagctggac

SEQ ID NO: 853907 - DNA, 90 bp, Artificial Sequence
  ENSG00000241560_13 (sequence is synthesized)
gggctcaggtgatcctcccacctcaaattcccaagtagctggactacaagtgcacaccactatgccccgctaactgtgaggctggtctca

SEQ ID NO: 853908 - DNA, 120 bp, Artificial Sequence
  ENSG00000241560_14 (sequence is synthesized)
tacaggcgtgagccaccatgcccagcgtgaaaatctcttattgactagaatgcacttgaagacaaaaaggaacttaacaggttaacactagaatgtaatgctataatattaataacactc

SEQ ID NO: 853909 - DNA, 120 bp, Artificial Sequence
  ENSG00000241560_15 (sequence is synthesized)
ttaataacactctaacccttccctataccaagaagacaacattcagagagatttgaaacttctttcagccccagtttccttatctgtaaatggggtgttttgtaataagattatgcatat

SEQ ID NO: 853910 - DNA, 120 bp, Artificial Sequence
  ENSG00000241560_16 (sequence is synthesized)
tagtcctctttcatttttaggaaaaaaaaacatacaaatgggggaataaaagaaggcaaagagataatggagaaacttcccagtctattcaggcctgaatccaagaagggacaagaagaa

SEQ ID NO: 853911 - DNA, 120 bp, Artificial Sequence
  ENSG00000241560_17 (sequence is synthesized)
gggcactggcttttcctcgaagtgaaggatgtaactgtcttacacacaatctcctcccatagatctagggcttttcagcctcagtcgttctcagggggaaaggatggggacctgcaacaa

SEQ ID NO: 853912 - DNA, 120 bp, Artificial Sequence
  ENSG00000241560_18 (sequence is synthesized)
ctttcacttaggctgcatcaattttagttcatattaataattttcaagcacttaaaactgtagccgacactcaaattcacggagcgctggctgtttttctggtgctgctttaagggcttt

SEQ ID NO: 853913 - DNA, 120 bp, Artificial Sequence
  ENSG00000241560_19 (sequence is synthesized)
acatgtagtgttccatcgaatccttctaataaccctatgagatgcatactatttttattctcattatgcaattatgcacatgaggaaatggaaacatagggaggttaattaaaggcacat

SEQ ID NO: 853914 - DNA, 120 bp, Artificial Sequence
  ENSG00000241560_20 (sequence is synthesized)
aaaatgcattcataggctgaagttcatgttaaaaagagcaaataagtagaccatgggggtgagaaaatattttctgaatattggaaaacaacacatagccccagtcttagtccattagca

SEQ ID NO: 853915 - DNA, 120 bp, Artificial Sequence
  ENSG00000241560_21 (sequence is synthesized)
acatgttcaagaaatagctttagcagtctgttatcatacctgcccccaccctgaaggcatatcggagggacccgagaggacatcaggagccattctgcattgggatgttcacagggacct

SEQ ID NO: 853916 - DNA, 120 bp, Artificial Sequence
  ENSG00000241560_22 (sequence is synthesized)
ctcctcattgcttctaagttcactcttgggtgccaggtttgagggtgcagattctgattaggatatgtcctggggaagtggctttttccttctgttagttctctgaccctaatgtaacaa

SEQ ID NO: 853917 - DNA, 120 bp, Artificial Sequence
  ENSG00000241560_23 (sequence is synthesized)
gcctccaggtcaagaactcctgctctggagcagggctggaagtgggggcacgctttgcctgtatcactgcccagtgaaaccaggcctgctttgcagtgcctgttagcatgtcaacccagg

SEQ ID NO: 853918 - DNA, 120 bp, Artificial Sequence
  ENSG00000241560_24 (sequence is synthesized)
attacttaggccacttcaggaatcccaggatctagtcacccatctgggacctttaggtcaggaagaaaatggaatgggctagatttatgaaaattggaaaaaatccagtcaggtgtacct

SEQ ID NO: 853919 - DNA, 120 bp, Artificial Sequence
  ENSG00000241560_25 (sequence is synthesized)
ataaagacctacagtatttccctgagaaaatgacatgtatcctttaccctggggttaacttctaaaagttttagtttagaatttgcatgtgtcttttccattagacacagagttatcttt

SEQ ID NO: 853920 - DNA, 120 bp, Artificial Sequence
  ENSG00000241560_26 (sequence is synthesized)
tgtagttcaaacttatatgcacctttctttcattgtctcctttacatctaaatacctggttaagatatgaggcaaagagataatcagtgattatatagggaagaacgtgattacagtaaa

SEQ ID NO: 853921 - DNA, 120 bp, Artificial Sequence
  ENSG00000241560_27 (sequence is synthesized)
aaattgaaggacaaagttaattcagttactgctttttgaaattctttgtagtattctacatgccacaccaagcttttttaaaaattctgtactctttggtctaatatcttggtataaaac

SEQ ID NO: 853922 - DNA, 120 bp, Artificial Sequence
  ENSG00000241560_28 (sequence is synthesized)
tgataacataaccaagctaaaactagtgaggataaataagtaggaggaaactcatttttagaattggagaggaaaggaaaaaactcctcaaggtcaattttgacatcaactataaattca

SEQ ID NO: 853923 - DNA, 120 bp, Artificial Sequence
  ENSG00000241560_29 (sequence is synthesized)
tttggccttgtgaaattataaagactcatgttcaacattgttccatgtggttgtttatataattttcagtagtgacaaaataatctccttatttagttttacaggtaatttaatagtaga

SEQ ID NO: 853924 - DNA, 120 bp, Artificial Sequence
  ENSG00000241560_30 (sequence is synthesized)
acaaagtatcgtttgattcagttggttccagatcaccatcctacagtagaagtatatcagatacttttgtgtacaggtgggattggcctttggaatgtcttggaccatcacagaaagcag

SEQ ID NO: 853925 - DNA, 120 bp, Artificial Sequence
  ENSG00000241560_31 (sequence is synthesized)
catactttaagtaaacaaattgaaaccctccctacaaataatgaatttgaggatgtcccatgacaatgaaggtggccttgagaacaacacataggtttgttattagtaattacagagcta

SEQ ID NO: 853926 - DNA, 120 bp, Artificial Sequence
  ENSG00000241560_32 (sequence is synthesized)
cctgaattgggcatatcatgaaagaagtacacagaacatggcttttaaagaattatgctttgtcatttcaaaaacaattgtttttaaaaattgttttaaaaattgttaagatgatttaaa

SEQ ID NO: 853927 - DNA, 120 bp, Artificial Sequence
  ENSG00000241560_33 (sequence is synthesized)
tgttcaaagtgtatgacacctatcctctgcttagtgttcagaggttactgagggtaaggaactgagttaatatttgtgaagtaataatacttgtaaaacattatttctcataaaaaataa

SEQ ID NO: 853928 - DNA, 120 bp, Artificial Sequence
  ENSG00000241560_34 (sequence is synthesized)
tagaaagcaatgttgagaagaagtagagaaagaaccagtataatataattactgcctcactgggcttgggtagtgccttcaaattcctttcacatatatttaccattccaattgccctgt

SEQ ID NO: 853929 - DNA, 120 bp, Artificial Sequence
  ENSG00000241560_35 (sequence is synthesized)
gaaatggaagatctaattccttctcactttgcctatttaattgcagagtctcccttaacactggtttttctcagtctataatgggctaggaactcttgtatcataaaaatattcattact

SEQ ID NO: 853930 - DNA, 120 bp, Artificial Sequence
  ENSG00000241560_36 (sequence is synthesized)
ccacttttgagttacccattcattatttctttttaaaacattaaacttgtactttgtaatagttgctttcccatttatcctatgtttgctcctgaacccctctttatggtcttttttgtg

SEQ ID NO: 853931 - DNA, 120 bp, Artificial Sequence
  ENSG00000241560_37 (sequence is synthesized)
acacatctgattctgttttcttgacaacaatcaggaggctagtaatcccaaaacctaaggtaatcttttcctaggtctctccctcgttggtgtctgtggcacctgatactgactgctgat

SEQ ID NO: 853932 - DNA, 120 bp, Artificial Sequence
  ENSG00000241560_38 (sequence is synthesized)
ccttcctctccctgatggtctctctgcactatcctggtttttctcctatcccttagaactctcttttcttttcctctatttattcattcttcattctctttcttatcactcatgtaaata

SEQ ID NO: 853933 - DNA, 120 bp, Artificial Sequence
  ENSG00000241560_39 (sequence is synthesized)
tttcccaaggttttgctttccttttttctctcaacaaagacttctttgaagtttactcccatatttatggcttatagtgctcttggccaaagtgtttgctagtcctaatctcacgcattc

SEQ ID NO: 853934 - DNA, 120 bp, Artificial Sequence
  ENSG00000241560_40 (sequence is synthesized)
ctgctgtgccccaggaccctgtttgtaactcagtgttagttgtctccactgggaacacctgtggtagctcatactcggcactatataaaatggaattcaatttgattcctttaaatgctt

SEQ ID NO: 853935 - DNA, 120 bp, Artificial Sequence
  ENSG00000241560_41 (sequence is synthesized)
ttcatctttacttgataccttggagttatctttgataactgcctttgttgtaactaacactcagctcccagagctgtctaccctcatccacaaaatctgttgcacctggatcctccccat

SEQ ID NO: 853936 - DNA, 120 bp, Artificial Sequence
  ENSG00000241560_42 (sequence is synthesized)
aattaattatctggaagaacaggaacatacatgacggctagaatatggtcttagcccaaccttaaatagaacaagctctcttcaccccaatcctgccgccagctcatttccctctcttta

SEQ ID NO: 853937 - DNA, 120 bp, Artificial Sequence
  ENSG00000241560_43 (sequence is synthesized)
gagactatcatgatgaagcaagtagagaatggaatctcctggaccattgtctcttgccttctttgcagaattttacatttgttctgtcagaaaaataacaataaaagatttagaatctca

SEQ ID NO: 853938 - DNA, 120 bp, Artificial Sequence
  ENSG00000241560_44 (sequence is synthesized)
ataattccagacaacattctgaaagacacttacgccgtcattccaaagttgaaatgaaatgagggggagaagacttgctgggactaaggaaaaaagtcaatgaaatctgagtgagaagca

SEQ ID NO: 853939 - DNA, 120 bp, Artificial Sequence
  ENSG00000241560_45 (sequence is synthesized)
taagtatttgtctttgcaaagggctctctgatatggtagcacagaagtttgcacattctaaggatctgatgttttgccctcttcgggtatcccggctggaaggagctacggtgaaagggc

SEQ ID NO: 853940 - DNA, 120 bp, Artificial Sequence
  ENSG00000233219_0 (sequence is synthesized)
gctctctgctaaagatagtagaagtccagcctctcccagagtcagactggtcattggtcatctccactcctagaagagtttcaaacatctgtactttcagactggaggaaataaggaccc

SEQ ID NO: 853941 - DNA, 120 bp, Artificial Sequence
  ENSG00000233219_1 (sequence is synthesized)
ttatccctaagccctgcctgacaatacaacgaaactgacatcaaggacgagtgaagaaacaatgaaccagacagtctataaccagcatggaacactattgtaatgcagtctccaaaaggg

SEQ ID NO: 853942 - DNA, 120 bp, Artificial Sequence
  ENSG00000233219_2 (sequence is synthesized)
caggaattttcatctctcttgcttacaaccgaaactccagcatctgaagcaatgtctggggaatatcagccactccgtaaatctttgttgagtgaatgaataaatgagtacgagaaagaa

SEQ ID NO: 853943 - DNA, 120 bp, Artificial Sequence
  ENSG00000233213_0 (sequence is synthesized)
cgccattctttgggtccctttgcacatttgtgcagcatttcatggttaacagagggtgtaccccctctacattatccttggtggtaagaagttgcctgtgtcatcagctgtgcagtaaca

SEQ ID NO: 853944 - DNA, 120 bp, Artificial Sequence
  ENSG00000233213_1 (sequence is synthesized)
tcttattttcaatgaaggactactgagggagatcatctaaaagtcaaagctgtcagactagagagtaggctctgcagaacagatgctgtctcttcctgaggctgaaacacaaaaacagat

SEQ ID NO: 853945 - DNA, 120 bp, Artificial Sequence
  ENSG00000233215_0 (sequence is synthesized)
aggatagctgtcagtgttttagaaagtcaaagaaggctgctgggcttaaaatgtcatgagaccaagagacagtggagcaatgcatgtttgaaaagggaaagagaaaagaagctcagaagg

SEQ ID NO: 853946 - DNA, 120 bp, Artificial Sequence
  ENSG00000233215_1 (sequence is synthesized)
aattccaatattcagatgtgacatatagaagaaagtgtcgacatgaaagaattatccgccagagaattcagaggaaaatcaagaatgcattatatcatgaaagtaaagaaaggataatga

SEQ ID NO: 853947 - DNA, 120 bp, Artificial Sequence
  ENSG00000233215_2 (sequence is synthesized)
cccaaaaaagagagagttgttgttatgatgagtctccaatgaacctgctgcatccctgctgcatatctattatctggggtaatcttcctaaaaagcagagtgtcaagcagcatgcctggt

SEQ ID NO: 853948 - DNA, 120 bp, Artificial Sequence
  ENSG00000233215_3 (sequence is synthesized)
tattccaacttatgcagaaatagaagtgtcctaagcttggggcaagatggccgactagacacagcaagtggaattaccgccagcaagggactgagacaactggcgcactcctaacaaatc

SEQ ID NO: 853949 - DNA, 120 bp, Artificial Sequence
  ENSG00000233215_4 (sequence is synthesized)
ggaacattgcactgggctaccatgcgctgggacttgttcctggcccccaaggactctcagggaatgggtttaaggtgtacatcttcaggttcaacacatggacaaattttgtgttactga

SEQ ID NO: 853950 - DNA, 120 bp, Artificial Sequence
  ENSG00000233215_5 (sequence is synthesized)
ggtttggcgtatgaatgatcccatcacccagctagaattcaagccttagatattttgagtttttaaaggtaagccaacaacacattctagaaataaacaagctatacatgcaaatttcct

SEQ ID NO: 853951 - DNA, 120 bp, Artificial Sequence
  ENSG00000233215_6 (sequence is synthesized)
ttttaacgaaacacaacattcacttctaacacagctcagaaaaatatatcgcttgaggagaaaatgttaacacgcttgctacattccaaactgtgaatctgtatgtgatgtgtttagcac

SEQ ID NO: 853952 - DNA, 120 bp, Artificial Sequence
  ENSG00000233215_7 (sequence is synthesized)
caaaaatcagcattggcacttatctgaaaaagagtaaatatattagttattgaaaattctactcctccattatcatttatttacgtggaatgtaaaattcctgggttataaaaatacaat

SEQ ID NO: 853953 - DNA, 120 bp, Artificial Sequence
  ENSG00000233215_8 (sequence is synthesized)
ctgggttataaaaatacaatttaaatgttaaatttaaccaatttgatatcttaggtgattccagtaaaatgtattatatttttcagtaggtatagaggaaaaaatgttactgtaataaag

SEQ ID NO: 853954 - DNA, 120 bp, Artificial Sequence
  ENSG00000233215_9 (sequence is synthesized)
aggatagctgtcagtgttttagaaagtcaaagaaggctgctgggcttaaaatgtcatgagaccaagagacagtggagcaatgcatgtttgaaaaggtacaaagggctcagatcaaacata

SEQ ID NO: 853955 - DNA, 120 bp, Artificial Sequence
  ENSG00000233215_10 (sequence is synthesized)
gcttctagatcatagtgaggaggttggagtttatttgaaatcaatggaaagtttaaagatttttctttaccatagtggcatggcccagttaatgttttaaggatatctatacatgacata

SEQ ID NO: 853956 - DNA, 120 bp, Artificial Sequence
  ENSG00000233215_11 (sequence is synthesized)
tacaacagatatgaaggaccaggaataaaattaagaagatatgtaaagatgctgtttgatctctaacagggggaatgtggtttcatttttggaggcttagacaggaccagttttggaact

SEQ ID NO: 853957 - DNA, 120 bp, Artificial Sequence
  ENSG00000233215_12 (sequence is synthesized)
ggtttgagagtttgatttgagagtgctaaatttaagatagctgtaagatgtccaaatgtcaatatgtaaatatccagtatttacatataatttaaaggcatggaaatgtattaattacta

SEQ ID NO: 853958 - DNA, 120 bp, Artificial Sequence
  ENSG00000233215_13 (sequence is synthesized)
tttttaaagttccagatccttgaggaatcgcgacactgtcttacacaatggttgaactaatttatacgcccaccaacagtgtaaaagccttcctatttctctacaacctctccagtaact

SEQ ID NO: 853959 - DNA, 120 bp, Artificial Sequence
  ENSG00000233215_14 (sequence is synthesized)
ccgcataaatgtcttcttttgaaagtgtctgtttatatcctttgcccagttttgatgttttttttttattttcttgtaaatttgtgtaagtgccttgtagattctggatattagcccttt

SEQ ID NO: 853960 - DNA, 120 bp, Artificial Sequence
  ENSG00000233215_15 (sequence is synthesized)
gaaggacattctgtttctagggaaggactgggaaagagaccaggctgttccagatagttctttcttatctcaggacattgcattcacaacacattctgcaatcattcttgagaactctaa

SEQ ID NO: 853961 - DNA, 120 bp, Artificial Sequence
  ENSG00000233215_16 (sequence is synthesized)
gtgagaaaatggggagaaacgggttggtctaaggtcacccagagaattattctccagtcaacatatttcagtatatctgcagcaagatcatatttcaagtgtgctggtagagcttctcct

SEQ ID NO: 853962 - DNA, 120 bp, Artificial Sequence
  ENSG00000233215_17 (sequence is synthesized)
ggtttggcgtatgaatgatcccatcacccagctagaattcaagccttagatattttgagtttttaaagatctaacggtgggaacctaagtcacacaactacaaaatttaaatacaatggg

SEQ ID NO: 853963 - DNA, 120 bp, Artificial Sequence
  ENSG00000233215_18 (sequence is synthesized)
gtaggcaccaagtgacagcactcaactatcaacctcaaggtcatcctacattggccaaaggaataaagaagaatgacagggttaatgatggatatttgaattattctgatttttctgacg

SEQ ID NO: 853964 - DNA, 120 bp, Artificial Sequence
  ENSG00000233215_19 (sequence is synthesized)
tgcaaggtgtagattccttttgttagtcattcaaaccaacagcagctttaagtatgtaatttgtgatatctaattaatcagtcattcatatccaaggttataaaaactcatactgtacaa

SEQ ID NO: 853965 - DNA, 79 bp, Artificial Sequence
  ENSG00000233215_20 (sequence is synthesized)
aggagattaacatttgagtcactgggttggggaagaaagatccacccttaatctcatgggcataatgaaaaggagagac

SEQ ID NO: 853966 - DNA, 78 bp, Artificial Sequence
  ENSG00000233215_21 (sequence is synthesized)
cctcccagcctacatctttctcccgtgctagatgcttcctgcgctggctctgcctcctcctcagcttgcagacagcct

SEQ ID NO: 853967 - DNA, 120 bp, Artificial Sequence
  ENSG00000233215_22 (sequence is synthesized)
aaattaaattggaacaaaggtaaaagttctctccaggaggccagacaatgaagaacaggcagtttcttacacatctctactttaattatagcaaatggcccatctgcttcaaaaccagaa

SEQ ID NO: 853968 - DNA, 120 bp, Artificial Sequence
  ENSG00000233215_23 (sequence is synthesized)
agaagagtcactttacagcaaaggagatatggtggtacagatatgacgatgggacccataaatactgttatgtactgcactgccaaagatgaacaggcaataaaaaaagccagcatgttg

SEQ ID NO: 853969 - DNA, 120 bp, Artificial Sequence
  ENSG00000233215_24 (sequence is synthesized)
atgtccataacagtgcatgagaaactgttctaagtactggaattttactagggagtcagcagttctgctaatcctcatggagcttagaattaggaaggcagacaataaaatgtaataagt

SEQ ID NO: 853970 - DNA, 120 bp, Artificial Sequence
  ENSG00000233215_25 (sequence is synthesized)
cctccgcctatcttcgtgatactataacactgtctaggtattatcgcatttataatgatgtattataatttatttgattatttatttatttatttattacctcaatttgatgaattattt

SEQ ID NO: 853971 - DNA, 120 bp, Artificial Sequence
  ENSG00000233214_0 (sequence is synthesized)
agtgggttttcatttgcactccagggttcagctgcagacccaccaggtgaagacccaccagcacaccttgccctgcttctgggccacgtctctccagtgcacctgcaggagacctctgtg

SEQ ID NO: 853972 - DNA, 120 bp, Artificial Sequence
  ENSG00000233214_1 (sequence is synthesized)
cgtccttgccccacaccctctcacagctgcctctctgtcatctttccaatgtctgtcctcagagagcccttcctggccactccatctaaaggagtcctgggccaggtgtggtggcccaca

SEQ ID NO: 853973 - DNA, 120 bp, Artificial Sequence
  ENSG00000233214_2 (sequence is synthesized)
cctgtaatctcagaactttgggagacggaggtgggaagatcacttgaggccaggggttcaagaccaacctgggcaacatactgaaacccccatgcctataacaataaaaaaggaaaaaaa

SEQ ID NO: 853974 - DNA, 120 bp, Artificial Sequence
  ENSG00000248378_0 (sequence is synthesized)
ttggaagtgaattaagaccctctcttggataccagctgtgaaagaacggactttttttacctagtaaggatgtgacagacctgctcctgacccttctttgttagtggccagtaaatatac

SEQ ID NO: 853975 - DNA, 120 bp, Artificial Sequence
  ENSG00000248378_1 (sequence is synthesized)
ggaaacaacatcagagcagggttaaatcaacaaccaagccatagaccttaaaaggaccagacttcatggttcaatgatgccaagaaaaagattccacctataaactctttagaaagtaac

SEQ ID NO: 853976 - DNA, 120 bp, Artificial Sequence
  ENSG00000248378_2 (sequence is synthesized)
cacctcagaaagttccagacaaaccagttctgctttgcagatcagccctgtataaagctcttaccacattagtaagaagttacttgtgctttggttacaaacaggcacaattaaagggaa

SEQ ID NO: 853977 - DNA, 120 bp, Artificial Sequence
  ENSG00000248373_0 (sequence is synthesized)
cacagctttggccaatgaagtgtgaatggaagttttcagaacctttaagagcctgtacgcaatttgccatgctttctctttttgctttgtcaccaaaacctctgtgttccagatagtgac

SEQ ID NO: 853978 - DNA, 120 bp, Artificial Sequence
  ENSG00000248373_1 (sequence is synthesized)
tactctgtctgcgtgggtcctggagagaggaggatgcagagcacagcacttagccaacctgcaatggacacgtagaatcctccttactgtcttgtgttcaatgctgaagacctggtgtcc

SEQ ID NO: 853979 - DNA, 120 bp, Artificial Sequence
  ENSG00000248373_2 (sequence is synthesized)
atgcctaacataacctgaaggtgcctcttgaatggatcacatttggctttccttatgtccttgctcactatcatggctaccacgagagccaaggcaacccacagagatggacttgaagtg

SEQ ID NO: 853980 - DNA, 120 bp, Artificial Sequence
  ENSG00000248373_3 (sequence is synthesized)
agaaatctactctgacctttgccagaacatccagctcagattttggcctagaaacctcaagaaaggctctggcctagacttgccccttgttcctgtcttctggctcttgactgacactgg

SEQ ID NO: 853981 - DNA, 120 bp, Artificial Sequence
  ENSG00000248373_4 (sequence is synthesized)
tgtgtggtgactacctcattgggccctaaaacttctaaaatcatcaggagatatcactgaaaaggtttcaaaacaaagccataatctctagaaatgtgtccttgatgggttggtcttcat

SEQ ID NO: 853982 - DNA, 120 bp, Artificial Sequence
  ENSG00000248373_5 (sequence is synthesized)
ttgcctgaagactgatcattctaaggaggattttgtgctgctcttgttttgctgctgggcctatcctgtttccattcccaaatcaagtattcctggaatttaaggtatcactttaccagc

SEQ ID NO: 853983 - DNA, 120 bp, Artificial Sequence
  ENSG00000248373_6 (sequence is synthesized)
ctgaccacaagttccccattgtttcctctgctctgctcatgacctggaataatgcctctccctggatactaaatttactgaccctgcctaggaccgagaagattgatgagtcctcaaccc

SEQ ID NO: 853984 - DNA, 120 bp, Artificial Sequence
  ENSG00000248373_7 (sequence is synthesized)
gtgcatgtcttcaaaaagccaccaactgatagctacaaaactgcacttcctagagacatgttgagagaggttcaaggctcaacagaacttacccttttgctgtcagagctccaccaccag

SEQ ID NO: 853985 - DNA, 120 bp, Artificial Sequence
  ENSG00000248373_8 (sequence is synthesized)
ataagcacaactgagcgaatgacaccaaccagtgccaagagaagcaggactacccaactacactttgcctaaattcctgattcacagaattataagcaaataaaatgattgtttaaagca

SEQ ID NO: 853986 - DNA, 120 bp, Artificial Sequence
  ENSG00000248373_9 (sequence is synthesized)
ccaaaacctctgtgttccagatagtgactactctgtctgcgtgggtcctggagagaggaggatgcagagcacagcacttagccaacctgcaatggacacgtagaaaaacttctaaaatca

SEQ ID NO: 853987 - DNA, 120 bp, Artificial Sequence
  ENSG00000248373_10 (sequence is synthesized)
gtactgttatcaactatgagccattgcttagggctgaacctgtagtggcaccaaacaaaaatggggttaacaaggaaggagaggaaaatggacattacgtaaccaacttgcctgccacac

SEQ ID NO: 853988 - DNA, 120 bp, Artificial Sequence
  ENSG00000248373_11 (sequence is synthesized)
atagtaataagaactatggcagttggtgacacccacctaacaacctcacaggtgtatgtcaaatacttcccattcttgagggaaggctcctgctccacctcctctagaaataatttgcct

SEQ ID NO: 853989 - DNA, 120 bp, Artificial Sequence
  ENSG00000248373_12 (sequence is synthesized)
aattaccaaaatgcacacaggtgttcttgctccctgacaccttatttcactgacctcacagatgtggacaggcaataatgcacaagctccactctcagtcgtaccgtcagtatttatggt

SEQ ID NO: 853990 - DNA, 120 bp, Artificial Sequence
  ENSG00000248373_13 (sequence is synthesized)
cccgtatttttcttcgggcttcttctatcctccacagcaggcagcctgtgggccaaatatgctctggtgctaatttttttgtaaagttttatcagaatagacatactaattcatttagat

SEQ ID NO: 853991 - DNA, 120 bp, Artificial Sequence
  ENSG00000248373_14 (sequence is synthesized)
tgcagctgcttcacacttgttggggcagaaaccacgtgacctccaaagccaaaaatattttgtgtctggccctttagagagaaaagtttgtcaactatctacgtgtacttcaattctctg

SEQ ID NO: 853992 - DNA, 120 bp, Artificial Sequence
  ENSG00000248373_15 (sequence is synthesized)
atgatagtgactactctgtctgcgtgggtcctggagagaggaggatgcagagcacagcacttagccaacctgcaatggacacgtagaaaacctcaagaaaggctctggcctagacttgcc

SEQ ID NO: 853993 - DNA, 120 bp, Artificial Sequence
  ENSG00000248373_16 (sequence is synthesized)
gcaagatttctcaaccatggcaggacgttaggatcatctgtagaactttaaaatattgtttaatttttttcatttggtttcctttatagttgattttgtttaactttgccagtgaaattt

SEQ ID NO: 853994 - DNA, 120 bp, Artificial Sequence
  ENSG00000248370_0 (sequence is synthesized)
cttccggtctgaacagtgaactcctccgcatggactcacgggttcacctccttccggtctgaacagtgaacgcctccgcatcgactcacgggttcacctccttccggtctgaacagtgaa

SEQ ID NO: 853995 - DNA, 120 bp, Artificial Sequence
  ENSG00000248370_1 (sequence is synthesized)
ctcctccgcatggactcacgggttcacctccttccggtctgaacagtgaactcctccgcatcgactcacgggttcacctccttccggtctgaacagtgaactcctccgcatggactcacg

SEQ ID NO: 853996 - DNA, 120 bp, Artificial Sequence
  ENSG00000248370_2 (sequence is synthesized)
ggttcacctccttccggtctgaacagtgaactccgcatcgactcacgcgttcacctccttccggtctaaatggtaaactcctctgcattttctgttcggttctattttggtggggcccac

SEQ ID NO: 853997 - DNA, 120 bp, Artificial Sequence
  ENSG00000248370_3 (sequence is synthesized)
gcgtcatcacagagtatctgggagccctgccctcttgcagatgggaatgaaggcccaggtgctctggagaggtgactctcctctagttgtctcgcttctcagaaaggaaacactggttct

SEQ ID NO: 853998 - DNA, 120 bp, Artificial Sequence
  ENSG00000248370_4 (sequence is synthesized)
aaagctcgaggtttcttggcctctctgcttctggagccaggggaaaaaatagccccaggctgaagacaggagggaccagattgctgcttggtgatgcgatctcactgcagaggcagccag

SEQ ID NO: 853999 - DNA, 120 bp, Artificial Sequence
  ENSG00000248370_5 (sequence is synthesized)
gagaccctcctgagacgaatcggagagtccatgctgcttttacacacatcctagttcttttataactagccttttcctattaacggacatcattcaaaagccagttttaagcaacataaa

SEQ ID NO: 854000 - DNA, 120 bp, Artificial Sequence
  ENSG00000248370_6 (sequence is synthesized)
tattgaaaacaatactatactatttagaattaattataagttttgtttttaaagcctaaatcttttattgttgtttgaaccctgggcactgaagctaataatgtaacttttctcccttct

SEQ ID NO: 854001 - DNA, 120 bp, Artificial Sequence
  ENSG00000248370_7 (sequence is synthesized)
ttcttctttggcatagatttaaagaactgttagactcatttaaaatgctattaggcattttaaagagtaattgttaaatgtgttgtctcttgtgggactggaaatgttctgttcttatct

SEQ ID NO: 854002 - DNA, 120 bp, Artificial Sequence
  ENSG00000248370_8 (sequence is synthesized)
ggcgctggttacatcctgtttttcatttgggaaagtgcattgagctggaaatttatatgttcaatttctgtatgtaaattgtacttcagtaaaaattttcaaaaaagtggctgcctttta

SEQ ID NO: 854003 - DNA, 120 bp, Artificial Sequence
  ENSG00000248370_9 (sequence is synthesized)
tccttgcagggtccggctgctttcggaggctgtttttctcagctccccgttttgtccctccaaattgtgcccctctccttccaattgtcactctcctttcccccaaccctccctgtctcc

SEQ ID NO: 854004 - DNA, 120 bp, Artificial Sequence
  ENSG00000248370_10 (sequence is synthesized)
ccttccggtctaaatggtaaactcctctgcattgtaagtcagtgtctagagtggtgatttgctttctggggtgtgtttttcacagtgatggtggatccacaaatttcaaacaaattcttt

SEQ ID NO: 854005 - DNA, 120 bp, Artificial Sequence
  ENSG00000248371_0 (sequence is synthesized)
caaagggtgtttaaatggtctgcccaaagtcacacagctaagaagcagtgatgggatatgaagtcaaacagtcttaaaagcaagctatcctgttgcaaaatagaaattagttgataacgt

SEQ ID NO: 854006 - DNA, 120 bp, Artificial Sequence
  ENSG00000248371_1 (sequence is synthesized)
cttccaggagacctacggccatcctactgatatgaaccagatcatacctgccctgatgggatgccagagaaagactgctgcaagggatcctctggaaacagaacagagggaagaagatac

SEQ ID NO: 854007 - DNA, 120 bp, Artificial Sequence
  ENSG00000248371_2 (sequence is synthesized)
gggaaccaagttagatcctacttcagcatcagcacatgccagcgatggtgcacacaggtggagagcggcctgcccgtcttttccatggtgcccacagacccatttaggatgaaagatcag

SEQ ID NO: 854008 - DNA, 120 bp, Artificial Sequence
  ENSG00000248371_3 (sequence is synthesized)
aaaattctctccatgtcaccgcttctgaaacatgtgaatattaatatttggtgcctaaaaggccatggcaaattttcattggttttatcttattcatgattatagagttgaaagaataca

SEQ ID NO: 854009 - DNA, 120 bp, Artificial Sequence
  ENSG00000248371_4 (sequence is synthesized)
gagacctacggccatcctactgatatgaaccagatcatacctgccctgatgggatgccagagaaagactgctgcaaggtacgcgccactcacagacctctccatttatctcactgatgca

SEQ ID NO: 854010 - DNA, 120 bp, Artificial Sequence
  ENSG00000249028_0 (sequence is synthesized)
agcagtaacagccgtgtctcctggtggagtcggaccttcactaccgcacagcagtaaccaggccccccttccttcacccccactgtgttagtggaggccttcctaccctaaccaggcagg

SEQ ID NO: 854011 - DNA, 120 bp, Artificial Sequence
  ENSG00000249028_1 (sequence is synthesized)
gatacaccagtgaagcctagtggggacatgaatacccatctccacctaggagtaacaagaagcctccaccccttgagtgtcagcagggtccaagtgggagaaactggacttctacctcca

SEQ ID NO: 854012 - DNA, 120 bp, Artificial Sequence
  ENSG00000249028_2 (sequence is synthesized)
ctgggcaatactgaggcagcaccccattcttcccctgctggagtggtgtcaaagaaaaccagctaaaacagaagtctaagtaagacccagagtcatatcgcataacatccaacatgtcca

SEQ ID NO: 854013 - DNA, 120 bp, Artificial Sequence
  ENSG00000249028_3 (sequence is synthesized)
ggtttcaactgagaatcactcaacatcccaagaaccaggaagacctcaaactgaatgaataaaagacaattatgattaaaggcacagcagcgaactgaaacattcatcttgccaatagga

SEQ ID NO: 854014 - DNA, 120 bp, Artificial Sequence
  ENSG00000249028_4 (sequence is synthesized)
ttaggtaattaggcagcaactgatcagctaccatagctggactactgctgggcaccagaagtcagaaacagctcttagaagacatgccaacatagctgctccctccctcatcaaacttgt

SEQ ID NO: 854015 - DNA, 120 bp, Artificial Sequence
  ENSG00000249028_5 (sequence is synthesized)
cagtaaggcttcattaatttcctctccattcctggagtgggatggttgaatcagagtgcgactgtgtgtgtctggaagtgacctcaacttaatcagacctcaactcaatcaactaggaaa

SEQ ID NO: 854016 - DNA, 120 bp, Artificial Sequence
  ENSG00000249028_6 (sequence is synthesized)
cttctagggcagggcaacctattccagtcccagttcttgtagtaatttgaccatagtgaatccacaactgggttcatttaatactccaaaattcatggtttgaccacagttttattttgg

SEQ ID NO: 854017 - DNA, 120 bp, Artificial Sequence
  ENSG00000249028_7 (sequence is synthesized)
tggtgactaaactaaccccacctccgggagatgaactgacagtacctttgggcatcctaagcatgctctggtaagataaaacaacagtcaccatcaaggagataacatcatgcaggacag

SEQ ID NO: 854018 - DNA, 120 bp, Artificial Sequence
  ENSG00000249028_8 (sequence is synthesized)
caagggcaaggtgaaggggccctggcagtgcctaacacagatgtgttttgaggaatgtcttctcagtcataaaacaggcacctggcattatagatgacagattcatatataaaacaaatg

SEQ ID NO: 854019 - DNA, 120 bp, Artificial Sequence
  ENSG00000249028_9 (sequence is synthesized)
ggtacataaatgctctctgaggctggcctcattatcgaggatttaaactaagtgagatgaacagatgtttacaacattttactttccacagtttccgcagcacttaagctgctgcgatac

SEQ ID NO: 854020 - DNA, 120 bp, Artificial Sequence
  ENSG00000249028_10 (sequence is synthesized)
ttgctatttaattttccctttattcactaacaactcaggagctctctgctgttttatcctaccattgttatcttcttttagaatgtaaaacagttttaatagtatgatgaatgggctttt

SEQ ID NO: 854021 - DNA, 120 bp, Artificial Sequence
  ENSG00000249028_11 (sequence is synthesized)
ccagttgttatagaattggtgaccaaggcccaaagcaggtgacaaaaaagagctaagcaaccaagatgtataaaggcagcttagtggccagtggctgaaaaggcactactgtcagcagtc

SEQ ID NO: 854022 - DNA, 120 bp, Artificial Sequence
  ENSG00000249028_12 (sequence is synthesized)
cactgcctcagcaggtgcccttcatccatctgtctaagactgttgtgagcgtagtgctactgccggaaggacttgccacatggagagttacgtgttcattcacaagagtcccctttgcct

SEQ ID NO: 854023 - DNA, 120 bp, Artificial Sequence
  ENSG00000249028_13 (sequence is synthesized)
tagctaagacagagagggctcaaagagaaccactcctaaagactgagtgtgagtacacgtcaaggagactggcatctcattccatcagacttgttgatttgccttgtgcttatctgagaa

SEQ ID NO: 854024 - DNA, 120 bp, Artificial Sequence
  ENSG00000249028_14 (sequence is synthesized)
ggagacagatggcagacggaaacagaagtatcggaggcggcctatttctcaccgtttggcacggcgaggatgcatgcgctttctgtgggtcaagtgatattacagaaagctgtcaggttt

SEQ ID NO: 854025 - DNA, 120 bp, Artificial Sequence
  ENSG00000249028_15 (sequence is synthesized)
gcgtcttttggctgctgctccaccccaaaggaaacaatgttggccagagaagcagcatcagaagatgaagaaggcagaggagtgaaagagaatggaacttgtccctttccccctgcaggc

SEQ ID NO: 854026 - DNA, 120 bp, Artificial Sequence
  ENSG00000249028_16 (sequence is synthesized)
ctctcaagtgagctgacgaggggaagaaacgatgaataagttctgctttgttgtctgatctgctttcttacactgtatagtatggtggaatcatacagtatgtacttttctgtgtctcca

SEQ ID NO: 854027 - DNA, 120 bp, Artificial Sequence
  ENSG00000249021_0 (sequence is synthesized)
agctggctgagtacagttattcagcataagcataacaaaaacagaatggcagcccagttcctttgttaatgaaatagtaagggtgtaactagggcaagctggccctgtttatgtcacatg

SEQ ID NO: 854028 - DNA, 120 bp, Artificial Sequence
  ENSG00000249021_1 (sequence is synthesized)
gataattttcaacataaatctccttaagaagggagtcacatgttctggagagatctaaatttaatacaatctcatagggagcaaaataaggagttgctgtgataaactttttgctttgcc

SEQ ID NO: 854029 - DNA, 120 bp, Artificial Sequence
  ENSG00000249021_2 (sequence is synthesized)
aggtatgggctacaatgattggttgaaatcatccaaaaatgaactaaaatcacaaattcattttcacagatttattgttagaacttatgttgcttccttaagaaaacgcaactatattaa

SEQ ID NO: 854030 - DNA, 120 bp, Artificial Sequence
  ENSG00000249021_3 (sequence is synthesized)
ctcttggctattgcagtcaagaataaaacagtcaaggggaaaaaaaaccagtggctaaatttataaagttatgtgtatttggctttgaaatatttttggaatgtgaaactggcctcgctt

SEQ ID NO: 854031 - DNA, 120 bp, Artificial Sequence
  ENSG00000249023_0 (sequence is synthesized)
gtaataaacaaaaatgtaaggcataaaaatcttacagaacaaaactaatgtataccattgcatttaagaatatttttcatgatttgtaaactaaatgtcatagaaacttacctctgaata

SEQ ID NO: 854032 - DNA, 120 bp, Artificial Sequence
  ENSG00000249023_1 (sequence is synthesized)
cagatctgaatacagagtaggcagaccaggatttcagactattttttctattaaaatgttcacatttgattctgttctacctaaaaatttaggtttttcaaacacaaaaacctaggtggc

SEQ ID NO: 854033 - DNA, 120 bp, Artificial Sequence
  ENSG00000249023_2 (sequence is synthesized)
tttaatattctgtagttagatcaatcatgaaagtcttatgatatttggttctgtattataagaaataaacataattaaaggaaattgcctagcactaataccagttcagttttctctgag

SEQ ID NO: 854034 - DNA, 120 bp, Artificial Sequence
  ENSG00000249023_3 (sequence is synthesized)
tttctcttgatcttatgtgactcatttggttgattttgatttccagagtaacgaaattcagaagaagcaatcagggactgtgtgcaccaacatttcactatgaattagacctagatcctg

SEQ ID NO: 854035 - DNA, 120 bp, Artificial Sequence
  ENSG00000249022_0 (sequence is synthesized)
gtaggaaggggctgtggctttcggactcgacatccctactgctagcacaacagggctccaccacattgcccaggctggtctcaaagtcctaggctcatgcgatcctcccacctcaacctc

SEQ ID NO: 854036 - DNA, 120 bp, Artificial Sequence
  ENSG00000249022_1 (sequence is synthesized)
ccaaagtgctggaactacaggtgtcagccacagccccctgtgaggatgcttaatcactcgaggacggtataaaggtacagaagaacagcgagccacaggtgggcctcatcccatcagctg

SEQ ID NO: 854037 - DNA, 120 bp, Artificial Sequence
  ENSG00000249022_2 (sequence is synthesized)
cttccctgggtttccagcctgccagcctaccctgcagactttggacttgcacctccacaaccatacgtttccaaaatctggagagcggctgtgagtttgcagtgcagtatggggagagac

SEQ ID NO: 854038 - DNA, 120 bp, Artificial Sequence
  ENSG00000249022_3 (sequence is synthesized)
cagaacccaccggaagcctccaggtgctgcagtgaggaggagctggaacccttctcctccaggtgccagctcgcgctgctgtggttctcatctgtagaggacgtggaccatccagggaat

SEQ ID NO: 854039 - DNA, 120 bp, Artificial Sequence
  ENSG00000249022_4 (sequence is synthesized)
ctctttgctgatgaaagctgacatttcacgggaagaacagtcaatccctgggaagatgctgggaccaaaggagccacaaacgtttccaaaatctggagagcggctgtgagtttgcagtgc

SEQ ID NO: 854040 - DNA, 120 bp, Artificial Sequence
  ENSG00000249022_5 (sequence is synthesized)
gcctgtacagactggggaaacaccagtgcctgaggatagtggctaaactgccagagaacatggggctgaggtggagcctggatgactcttctgcctctgagcaaagctgcttgccctaca

SEQ ID NO: 854041 - DNA, 120 bp, Artificial Sequence
  ENSG00000249022_6 (sequence is synthesized)
cacaacagtattgtcttaacatctgctgagttcccaggtcctcttagcagcaggcagaggcattcagagcccagaccccaaagacatgctgatctggtttaaacctgactgtgctactca

SEQ ID NO: 854042 - DNA, 120 bp, Artificial Sequence
  ENSG00000249022_7 (sequence is synthesized)
tcaactgggggacctaggcaggttacattgtctttttgtgcctcagtttcctcatctatagaatagaggtattctagtttcctgtgatttctgtaataaatttacaaactttgtaacaaa

SEQ ID NO: 854043 - DNA, 120 bp, Artificial Sequence
  ENSG00000268678_0 (sequence is synthesized)
ctcccagcaccctcagaagagaggaccagctcctcgggcggccattccaggcctacctctgaccccctagtccctgttctcaccaggcacagagagttcccggaactccccaaactcatt

SEQ ID NO: 854044 - DNA, 120 bp, Artificial Sequence
  ENSG00000268678_1 (sequence is synthesized)
ctcctctccatgcatgcatttgtacgaactgcccctgcgccttcgagtccgttccacaccttatgccactgatgaggggagcggaacccctccacataatgcgacggagtgagcaccctg

SEQ ID NO: 854045 - DNA, 120 bp, Artificial Sequence
  ENSG00000268678_2 (sequence is synthesized)
aagtgcgcgatgagagcgaacatcccaggacacaccaaccaggccggggtgcgcttgagggatgcccccactcacctgaacccggtccatcagcaccgccgctgccatgagaagcggatg

SEQ ID NO: 854046 - DNA, 120 bp, Artificial Sequence
  ENSG00000268678_3 (sequence is synthesized)
aacagtctgtgccctgtgggctcagccgaaaccccacgcctccaccgcgctggacgccctcgggctgagtgtagcactccaagtctcaatctacccggtgtaaaaacgctcacaagacta

SEQ ID NO: 854047 - DNA, 120 bp, Artificial Sequence
  ENSG00000268678_4 (sequence is synthesized)
atctctagaactcagccttcacaaccagaatgcacggaccgggcataggaaaaatacgtcacgacggcgacgccagaagtctcgcccctgcagcccagagcagcaggaaacgcccagttt

SEQ ID NO: 854048 - DNA, 120 bp, Artificial Sequence
  ENSG00000268678_5 (sequence is synthesized)
ctgggctgtcattggctgcacgccggctaacaatgagctgggcacagatttctgggtaacgtagtttgtaccctgcatccaaccaggcaacgagcgcctttcgggttctcccggatgtct

SEQ ID NO: 854049 - DNA, 120 bp, Artificial Sequence
  ENSG00000268678_6 (sequence is synthesized)
gccaagaggcgtcgtgcagggagggggagaaaagactgggaaaacgatatctcggaggccacagctgcttttaaagggtatgcaccctgatttccatggccacctgggacaatgccacgc

SEQ ID NO: 854050 - DNA, 120 bp, Artificial Sequence
  ENSG00000268678_7 (sequence is synthesized)
cactgaagtcgccagcaagggacccattcttcaatcctgcttctgaggccctgggaaacctgcttcacctctctcagatttggggattgaaacgtattaataaattgaacgttgtctgta

SEQ ID NO: 854051 - DNA, 120 bp, Artificial Sequence
  ENSG00000268670_0 (sequence is synthesized)
ggactccagccctgccccaggctcctgtgtgagagctcccttgcaaggcagctctgagggctgtggacggccactcggtggaagtgtcgccacccacgcctttctggtttgactggaaaa

SEQ ID NO: 854052 - DNA, 120 bp, Artificial Sequence
  ENSG00000268670_1 (sequence is synthesized)
caaggcccatcccacctatcaggatgcctgagagaaggatctggccggattctgcaggccgccaggctcccaggctgagccttccacctgctcaggcgagagtgggggtggggcaggtat

SEQ ID NO: 854053 - DNA, 120 bp, Artificial Sequence
  ENSG00000268670_2 (sequence is synthesized)
agcctgggctgatggcagggtggacaaggatgggcttccgagagtctggccttgcttgcccccagtgacgggaagctcagcccctccactgtcgtcatgaagcttcctcttggaacctgg

SEQ ID NO: 854054 - DNA, 120 bp, Artificial Sequence
  ENSG00000268670_3 (sequence is synthesized)
gctcgggctgtagtctgggcttcctggcccatgacatctcagagtgtgggaacagggtgggcctcagtcccgcccatgagttgggcgtcagatgggatccccctggcctcctcatcgctg

SEQ ID NO: 854055 - DNA, 120 bp, Artificial Sequence
  ENSG00000268670_4 (sequence is synthesized)
cccccatccccgctgtcacacttcccactgggtccccacggccttcctgcctctggccctttaaggcccaggcaggaagcccctccccatttagggcaataaatggacacgtaaaatggc

SEQ ID NO: 854056 - DNA, 120 bp, Artificial Sequence
  ENSG00000268673_0 (sequence is synthesized)
gaccaccttcatcttcgccatggcgaacgcctgcccgatgcagttcctgcgggtgggagtggggactgtgactgcgcccaggatccgcatttgggccccatcacgccggaaacctggccc

SEQ ID NO: 854057 - DNA, 120 bp, Artificial Sequence
  ENSG00000268673_1 (sequence is synthesized)
gggatcctcaaccgcacccagatcagcctgagagatagagaggggctgagcatgcgtgggacccccctgtgggtttgcatgtcccccagagcctgggccagactccagctcccagctcag

SEQ ID NO: 854058 - DNA, 120 bp, Artificial Sequence
  ENSG00000268673_2 (sequence is synthesized)
ataaactgtgaaggaatggagggaaagagaactggaactgggaccatctgcaaacttccccctttttcgaccctcgcacctatcaccccatccccataccagacacaggtggcccttacc

SEQ ID NO: 854059 - DNA, 120 bp, Artificial Sequence
  ENSG00000268673_3 (sequence is synthesized)
tgggtcccgcagagaagggaataaaagccagaggtgacctctccttgctgttctctgagttgaagcggaaggggttgtagacctggagtttcagaattagcagtcccctgcgggctgcat

SEQ ID NO: 854060 - DNA, 120 bp, Artificial Sequence
  ENSG00000268674_0 (sequence is synthesized)
atggtgtcttcaaagggactgtggaaagagaggccttcagcccacacctctgaatgcttttccaccacagcatgccctgtggcctttatcctgctggtgtggaacagtcagacccctgca

SEQ ID NO: 854061 - DNA, 120 bp, Artificial Sequence
  ENSG00000268674_1 (sequence is synthesized)
gggctgcagagcctctgtactgggcggcatcccagcctgagtgccagagctcagagggcaggcccccgagcaagcagagaggagggcaccttttggacagaacgtgtgggacaagagcga

SEQ ID NO: 854062 - DNA, 120 bp, Artificial Sequence
  ENSG00000268674_2 (sequence is synthesized)
gagagtcaggaagatcagggcgccggcctgatttcccaggcagggctgaaagcagacaaccggagggagagcagcacctgggccaatgaggtagaagacagaagaccacagtgtactcct

SEQ ID NO: 854063 - DNA, 120 bp, Artificial Sequence
  ENSG00000268674_3 (sequence is synthesized)
gccctcaacctcaccccctcccacccacatcctccacactccctgaccaccttcctcagaagtgtaataggaatccagattccccctggcctggttgctgcaggaggcacagtagcctga

SEQ ID NO: 854064 - DNA, 120 bp, Artificial Sequence
  ENSG00000268677_0 (sequence is synthesized)
aaacacggaactcttgtttattcggctctgggcgtcagtgttcttcgcccagcctggtcccgtgtgcttctaggtccaacctagtcgcagcccggggagggactggggaagacggtttca

SEQ ID NO: 854065 - DNA, 120 bp, Artificial Sequence
  ENSG00000268677_1 (sequence is synthesized)
cgaggaggggacgagccgtgcccgaggtcacccagcgagctgggcactgcgctagccccctcgctgcagctgcaactcccactgacctccatggagggcaagtccccagccctaagcccc

SEQ ID NO: 854066 - DNA, 120 bp, Artificial Sequence
  ENSG00000268677_2 (sequence is synthesized)
aagccattctaggggaggaagcagggccactcccccatgagaaattctatccttgcaaacatacacccccaacccactcagtgtccccagctgcagagggctgggcacagttgggccttg

SEQ ID NO: 854067 - DNA, 120 bp, Artificial Sequence
  ENSG00000274383_0 (sequence is synthesized)
aaaaagaagaaaagaggaagaaaagaaaaaagaaaaaagaggaagaagaaaagaaaaagaaagaagaaagaggaagaagaaagaagaggaaagaagaaagaaaaagaggaaagaagaaag

SEQ ID NO: 854068 - DNA, 120 bp, Artificial Sequence
  ENSG00000274383_1 (sequence is synthesized)
aagaagaagagaagaagaagaagaagaaaagaaaaagaagaagaaataaacaaagtgtgccaagagctcaaaaggaccatacctgttggacgggattacaggcccttggacccatcctca

SEQ ID NO: 854069 - DNA, 120 bp, Artificial Sequence
  ENSG00000274383_2 (sequence is synthesized)
gcatgactgtgcatttcagtagaatcacctggaggtctgttaacagtgattttttaaaaagcccttaaatgatggtcatcttctgttcaggtggctccacacgctgaggtcccacgtgcc

SEQ ID NO: 854070 - DNA, 120 bp, Artificial Sequence
  ENSG00000274383_3 (sequence is synthesized)
tgaaggtctggcccctccggttacatggctgtgcacctcctgggggcactcggggctgcgtttgctttcttcctgatattttctgttaaaaacaagaatcttacttcctctgttgcctaa

SEQ ID NO: 854071 - DNA, 120 bp, Artificial Sequence
  ENSG00000274387_0 (sequence is synthesized)
acaatgaagggcaggtgacaatgaagaagggcagggaaggtgactgagatggaagatacagtcaaaatggtgttcgaaaatacagagggatccagcataattaagagcattaagcaatca

SEQ ID NO: 854072 - DNA, 120 bp, Artificial Sequence
  ENSG00000274387_1 (sequence is synthesized)
tctcagcccaaggaggcagttgaagaaaagaacagagtttgggcaacacttggggaaataaattccacagcctttcaccaagttgaaatcttggctttggacacacataaaaatgagcct

SEQ ID NO: 854073 - DNA, 120 bp, Artificial Sequence
  ENSG00000274387_2 (sequence is synthesized)
caatcttagctctcagtggacatctgccatatcacaagatttgacccaattggcctgccttaccatagagaaggccactgctggagcagcagatggtactgctggtaagagccaacgtgg

SEQ ID NO: 854074 - DNA, 120 bp, Artificial Sequence
  ENSG00000274387_3 (sequence is synthesized)
acggacagggctgtggcagggaaatggcagagcacagctggccccagcctgggtaggaggctttgctttgaagagaatcatttttgtgatgcatttttttaaaataacatcgatctgatt

SEQ ID NO: 854075 - DNA, 120 bp, Artificial Sequence
  ENSG00000274387_4 (sequence is synthesized)
tccttctctcgtagacttcaatcacttttcatgtcctacagaacattgctaattattcttttattttctctcttgtcaccaggtactgtcatacagtagtaaaacaagtgctaaactcta

SEQ ID NO: 854076 - DNA, 120 bp, Artificial Sequence
  ENSG00000237665_0 (sequence is synthesized)
taggtttgcactcaagactgacatttaccgtaatggaagctgttcatatgcccccaggaaagaatgaacaatttaatagaaaatgctaaaggagtgatattaggaaaaaatcaataaatg

SEQ ID NO: 854077 - DNA, 120 bp, Artificial Sequence
  ENSG00000237665_1 (sequence is synthesized)
ttactgatgctatcgtcatcatcatcatcatcatcattatcatcatcatcaaggtcatgacagaaagaggacacattacatgaaatctcaacttcatccctgggccatgcacacctgtag

SEQ ID NO: 854078 - DNA, 120 bp, Artificial Sequence
  ENSG00000237665_2 (sequence is synthesized)
cgttttgtcccacacaacagaagctgatctccaaagagaggaatgatgtagcctcaagtaacaaagacattgagggaagtctttcacatcctgggatgcctgtggcccagcacagagggc

SEQ ID NO: 854079 - DNA, 120 bp, Artificial Sequence
  ENSG00000237665_3 (sequence is synthesized)
tgttgggttgccaacacagagtttacccctcaggtgtctgtaattgggtaaagagaggtgaagtttagcatgtgatatgtaaaacgggcagctacaaatacaattctaaaacaagcagaa

SEQ ID NO: 854080 - DNA, 120 bp, Artificial Sequence
  ENSG00000271239_0 (sequence is synthesized)
gaagaggcgagtgctgggtgcctctagtcaaccatgttgatgacgtcctttctagaaaacaccctgataccttgtgcctgtgcttccaaggtggctgacgctgtgcctgtgcttccgagg

SEQ ID NO: 854081 - DNA, 120 bp, Artificial Sequence
  ENSG00000271239_1 (sequence is synthesized)
tggctgacttctaactgagtgcagtggagaccccgtggtgctttacagaacagatggcagtgctgcccaagctcagaacacagctggacggatccccatttttaaaatgttgcttttaaa

SEQ ID NO: 854082 - DNA, 120 bp, Artificial Sequence
  ENSG00000271239_2 (sequence is synthesized)
caatagagcactaatttgtgtccacagctagggaaaaagcaccccaaatactcatgttatgtcactttcagtaccacaattcaaatagtgaaagacgatgcttccatgtaccacgtatag

SEQ ID NO: 854083 - DNA, 120 bp, Artificial Sequence
  ENSG00000271239_3 (sequence is synthesized)
gtctctactagtgatttttctctcatttcaacctagcttcacatatttttatggtatagctaactcaacattgattctatacaaaatatattatctaagatagtctttaaaaatatttga

SEQ ID NO: 854084 - DNA, 120 bp, Artificial Sequence
  ENSG00000271239_4 (sequence is synthesized)
attccactgggatttgtttaaacccctacacaaataattacctcttactaaaaacactgagtttggcaagtgaaattttgtaataaggtgaagattcaataaaatcttgtctcaaactaa

SEQ ID NO: 854085 - DNA, 120 bp, Artificial Sequence
  ENSG00000271234_0 (sequence is synthesized)
atagaaactaacattctgagattaggaaatatgttgatttgaaagtgagaaaatacttgcctaaattttgttccttcttttttttcccctctgatacttggatacttgggctgtttattg

SEQ ID NO: 854086 - DNA, 120 bp, Artificial Sequence
  ENSG00000271234_1 (sequence is synthesized)
gggtccctttctctccagcccatttattggagcagggctttgcaaagccggtctcctagcagccaaatgcagaaggcccattcatattacaatggaaggaaaggaaagaaagagcttggt

SEQ ID NO: 854087 - DNA, 120 bp, Artificial Sequence
  ENSG00000271234_2 (sequence is synthesized)
ttcattcacagcctgatgtccatgtgcattgtgagtccacaatggcactaaaggactcattgtggccgaaaacaaatcaaaataaaataagggatgctaagataaaagagtcatgcaaca

SEQ ID NO: 854088 - DNA, 120 bp, Artificial Sequence
  ENSG00000271234_3 (sequence is synthesized)
aaattgcttaaaaaatctaagtcttacatctgagatttatgttaccttttggctgtgtggcctattgaccggtatttataacaaccgctagagtttaataaacaaaaagataaatgggaa

SEQ ID NO: 854089 - DNA, 120 bp, Artificial Sequence
  ENSG00000223704_0 (sequence is synthesized)
ggcactgtacatgggtaacttcacctgaaatgctgaaaataaatcttgctcattctttcctgggatatagtgaatgacttcatgccctacattgtatgggctacccacataggtgaggaa

SEQ ID NO: 854090 - DNA, 120 bp, Artificial Sequence
  ENSG00000223704_1 (sequence is synthesized)
ttgaggatacagccatggaggatttttctgttaaacctcagaagggatgctctcaatttctgcaaggctctcctgggcaacatgaacggtccagacaagttcattcatttttttgttttt

SEQ ID NO: 854091 - DNA, 120 bp, Artificial Sequence
  ENSG00000223704_2 (sequence is synthesized)
ctggagggttaaatgggggatagagtattcaggaggtaggtttagctcagtccaaggatggctacaaagagctgtggtaggtagtgctctgacaaagagttccctgtcgtggggatattc

SEQ ID NO: 854092 - DNA, 120 bp, Artificial Sequence
  ENSG00000223704_3 (sequence is synthesized)
aagtgtaactcagttaatttcttgttggggatgttctgagcatggtcagaacaaagagaaagggaaattcagggggaattggtctagaagatcccttcaattccaggatgctgtggtttc

SEQ ID NO: 854093 - DNA, 120 bp, Artificial Sequence
  ENSG00000223704_4 (sequence is synthesized)
aggaaggcaggaatgatctaccatgaaaggtttttacaacagtaggaaacatcatcatcttggctttgcctgtctccaggaggcttgaatgtgatttgcataaccacagggggatggatg

SEQ ID NO: 854094 - DNA, 120 bp, Artificial Sequence
  ENSG00000223704_5 (sequence is synthesized)
tcttgatctttcacagtttttttccagcccttagaatcattctggtctttgcttgcaacctcctttagaaccatatcctgagccacctccatccttctcccaaattattgtaacaacttc

SEQ ID NO: 854095 - DNA, 120 bp, Artificial Sequence
  ENSG00000223704_6 (sequence is synthesized)
tgagtaggtcccctagcactctataatctaccctccacacagaagcaaaagctatcatataaaataaaaatcggatatattttccccctacagttgtaacttatgaccatagccgtcccc

SEQ ID NO: 854096 - DNA, 120 bp, Artificial Sequence
  ENSG00000223704_7 (sequence is synthesized)
aacccaactggttctcccattccacctcccctcacctaatgtgcacaaaccactctcccttcttttctgactcacaaacattcagggcttttgcctttcctctgtctgagccctcttccc

SEQ ID NO: 854097 - DNA, 120 bp, Artificial Sequence
  ENSG00000223704_8 (sequence is synthesized)
ctaggactttgcaaggccagtttttttctcatcgttaaattcccagctcaactgtcaccccagacagggctctctgaccagtctccagtcactccatccggacgacccttttaattttcc

SEQ ID NO: 854098 - DNA, 88 bp, Artificial Sequence
  ENSG00000223704_9 (sequence is synthesized)
cactttgctccagtctggatgacagagcgagaccctgtctctaaaacataaataaataggccaggtttggtggctcatgcctgtaatc

SEQ ID NO: 854099 - DNA, 120 bp, Artificial Sequence
  ENSG00000223704_10 (sequence is synthesized)
gattgtttgagcccaggaatttgagaccagcctggacaacaggtgaaaccctgtttctaggaaaagcaaaaattagccaggcatagtggtacatacctgtggtcccagatactcaggagg

SEQ ID NO: 854100 - DNA, 120 bp, Artificial Sequence
  ENSG00000223704_11 (sequence is synthesized)
ctgggaagttgaggctgcagtgagctgagactgctccactgaactctagcctgggcggcagagtgagaccctgtctctaaatacataaataaaataagtaaagcacttttcagtatcttt

SEQ ID NO: 854101 - DNA, 120 bp, Artificial Sequence
  ENSG00000223704_12 (sequence is synthesized)
agtaaagcacttttcagtatctttctggaattcttatctatttgttaacatatgtatggtctttttctgctgctgagaggtgaagccagctggacttcctggctcgagtagggacttgga

SEQ ID NO: 854102 - DNA, 120 bp, Artificial Sequence
  ENSG00000223704_13 (sequence is synthesized)
gacttggagaacttttctgtctagttagaggtttgtaaatgcaccaatcagcgctttgtgtctagccaaaggattgtaaatgcaccaatcagcaactctgtaaaatggaccaatcagcac

SEQ ID NO: 854103 - DNA, 120 bp, Artificial Sequence
  ENSG00000223704_14 (sequence is synthesized)
atggaccaatcagcactctgtaaaattgaccaatcagcaggatgtgggaggggacaaataaggaaataaaagctgaccaccccagccagcgggggcgacgtggtggggtccatttgtagg

SEQ ID NO: 854104 - DNA, 120 bp, Artificial Sequence
  ENSG00000223704_15 (sequence is synthesized)
ttgtggaggatttgatcttttgctcttggaaataaatcttgctgctgcgcgcgctctctctctgggtgcatgctgcttttaagagctgtgatactcaccaggaaggtccgtggtttcatt

SEQ ID NO: 854105 - DNA, 120 bp, Artificial Sequence
  ENSG00000223704_16 (sequence is synthesized)
ccaagaacccaccagaaggaaccaactacagacacactgctatatggtccagctatgtacaaactgaatcaagattctatgtacatcagaatcaagagagagtgagttcttgacatcacg

SEQ ID NO: 854106 - DNA, 120 bp, Artificial Sequence
  ENSG00000223704_17 (sequence is synthesized)
gtacatcagaatcaagagagagtgagttcttgacatcacggagcggtctacattctagttcatgcggtggacctgctgggtggcctcaggggcatggatgaaactggaaaccatcattct

SEQ ID NO: 854107 - DNA, 120 bp, Artificial Sequence
  ENSG00000223704_18 (sequence is synthesized)
aagattttaaaccatctttaaagacaactgtgttcatcacaaaagaaaggcacagggtagtagaaagacctggtttgaatcatgactgcttcattgaccagttacaaagaaacaagactc

SEQ ID NO: 854108 - DNA, 120 bp, Artificial Sequence
  ENSG00000223704_19 (sequence is synthesized)
aaagtgtttgctcaaagcaatccagcagataaggggcagagttgagacacaaactcacacctgtctaactttgctctcaaccatgaaactctaatgcctttctttgaccatgatctcaat

SEQ ID NO: 854109 - DNA, 120 bp, Artificial Sequence
  ENSG00000223704_20 (sequence is synthesized)
taatcctgtcaagcatataataagacagtcaccactgtcacatttttgcagatgaggaagaacttcagagagagaagagacctggctaaggtcacacagatcaagagggccagggtgatg

SEQ ID NO: 854110 - DNA, 120 bp, Artificial Sequence
  ENSG00000223704_21 (sequence is synthesized)
ctacaggacaaaacgcaggagatttgggggatctgaaaacagaagataacacagaggcaagatacttggaacctaattctggcattgcctcttactagccatatgaacttgggcatatca

SEQ ID NO: 854111 - DNA, 120 bp, Artificial Sequence
  ENSG00000223704_22 (sequence is synthesized)
ttgaaactcaattttctcatccataaaatagccattttaagaggattttactgagatcataggtatgggaataacttctaagacaaagagctctatgctttcaatattgtcaattccaat

SEQ ID NO: 854112 - DNA, 120 bp, Artificial Sequence
  ENSG00000223704_23 (sequence is synthesized)
gccttgataagtcaacatatccatgcctttgacagtccagtgacatttttgagtagtcagtttctctgctaaaattagtcacctctaaaatccttctggctctgacattctatggcaccc

SEQ ID NO: 854113 - DNA, 120 bp, Artificial Sequence
  ENSG00000223704_24 (sequence is synthesized)
aagtagtaacataaaatgctttattcaaaaaatggaaaagagacatgatgtccaaatgccagacttcaatgttggtaatattgataagaaaaggcccattactcactatgttctagtcac

SEQ ID NO: 854114 - DNA, 120 bp, Artificial Sequence
  ENSG00000223704_25 (sequence is synthesized)
ctggctcatcttcccatccagaaaacatttcattttcagtctcatcacaaggcctttgctctgggtgttttcttgcctggaacaagctccccattcgattcagtaggatgtcagctcaga

SEQ ID NO: 854115 - DNA, 120 bp, Artificial Sequence
  ENSG00000223704_26 (sequence is synthesized)
catcgtctccacagagaagccttcttacccaccgctatctaaagaagtgctacccactccatcccccatcaccactctttcccaacccgttgttctgttgttttttcagcattcaccaaa

SEQ ID NO: 854116 - DNA, 120 bp, Artificial Sequence
  ENSG00000223704_27 (sequence is synthesized)
agcagggtcttggttttttttctttctttccttcttttcttcttaactttcccccttccccttccctttcgcctttccttcctttccttccttttttttttgagacgtagtcttgctctg

SEQ ID NO: 854117 - DNA, 120 bp, Artificial Sequence
  ENSG00000223704_28 (sequence is synthesized)
agtcttgctctgttgcccaggctggagcccagtggcacaatctcccctcattgcaacctttgcctccagagttcaagtagttctcctgcctctgcctcccgagtaggtgggattacaggt

SEQ ID NO: 854118 - DNA, 120 bp, Artificial Sequence
  ENSG00000223704_29 (sequence is synthesized)
tttcaaatgctggcccagaaaggtgaggcaaggaggggacctggcctccatctctgtgaatcccacagccctcctcctgagatctgcaggggtagcatgaaatatttaaaagctcaaatt

SEQ ID NO: 854119 - DNA, 120 bp, Artificial Sequence
  ENSG00000223704_30 (sequence is synthesized)
gaaatcttgttagagccaggtcttgtaaagccaagttctccaaccccagaacatcagtatctgtttgctggtgtcatttagggaccccggctttccaaaccattgactgaaactttctgt

SEQ ID NO: 854120 - DNA, 120 bp, Artificial Sequence
  ENSG00000223704_31 (sequence is synthesized)
caatccaacacttttagggtaatttaacttaataatacctttgtcggcactggcgcctgtatctgaagggtgattaccatagaagttattttaggttgtttaatggaatgtagtaaattc

SEQ ID NO: 854121 - DNA, 120 bp, Artificial Sequence
  ENSG00000223704_32 (sequence is synthesized)
tcaattgacagggcagatcctcaaaatggcttttcaaagtgtttacctttcaaagctttctccctcactttaccgaacttactactttgagccagcgaagacttcataaattattagcaa

SEQ ID NO: 854122 - DNA, 120 bp, Artificial Sequence
  ENSG00000223704_33 (sequence is synthesized)
aaaagttcaaactgtccggggcttaattgttatcacttggagaacggctagaaatggatgcaggctgtattatttctgtcaaaaattttgacttattgctcttgatattttacccatcac

SEQ ID NO: 854123 - DNA, 120 bp, Artificial Sequence
  ENSG00000223704_34 (sequence is synthesized)
atcacatcctcggtacaggagagaggaaaaaggagagggggaggagaaagaacataaatgcgttttcttgaaacaaaacaaatataataatacatatatttctgaggagaaaagtcaagg

SEQ ID NO: 854124 - DNA, 120 bp, Artificial Sequence
  ENSG00000223704_35 (sequence is synthesized)
attcatctgacaaaataatagttttaatcctccaaagagagaggaggagggcagcattagggggaaatttctattgtaaattctattgcttcacactgtacttttattctaagttttgaa

SEQ ID NO: 854125 - DNA, 120 bp, Artificial Sequence
  ENSG00000223704_36 (sequence is synthesized)
ggttgtataattctaggaatctaatgtttaacgattctgagatattgaaattttatgagtccaaattcccaaggtgtttgattttaaggataaattaatcccaccgtccagtattcagga

SEQ ID NO: 854126 - DNA, 120 bp, Artificial Sequence
  ENSG00000223704_37 (sequence is synthesized)
ctgctaaaaagtatagtagaattagaaagatattgacaataaccacagaaatagctaagctttgttgagaccttaaccatatgcaggcactgtgctgagtgcttcatgtgcagcacctta

SEQ ID NO: 854127 - DNA, 85 bp, Artificial Sequence
  ENSG00000223704_38 (sequence is synthesized)
aggcactgtgctgagtgcttcatgtgcagcaccgcttttgctaattttttaaaattgtactttaagttctggggtacatgtgcag

SEQ ID NO: 854128 - DNA, 72 bp, Artificial Sequence
  ENSG00000223704_39 (sequence is synthesized)
tgtttccaggttcatccatgtccctgtgatcccattactgggtatgtgtccaaaagattataaatcattcta

SEQ ID NO: 854129 - DNA, 120 bp, Artificial Sequence
  ENSG00000223704_40 (sequence is synthesized)
ggataaagaaaatgtggcacatatacatgatggaatactatgtagcagcaccttatttaatcttcatgtcactgtaaagtaggtactgttattaaccccttatatagctgggaaaactga

SEQ ID NO: 854130 - DNA, 120 bp, Artificial Sequence
  ENSG00000223704_41 (sequence is synthesized)
tgggaaaactgaggcacagagagggtaagtaacttactcagggacacacagctggtaaaaagcagagttaaactctgacttcaggccctgtgtgtgtagaacttaacgtatattgtgccc

SEQ ID NO: 854131 - DNA, 120 bp, Artificial Sequence
  ENSG00000223704_42 (sequence is synthesized)
catctcaagacactgctcttttgccccacctggcatgctgtggatcagtgtagaagtgatccacattggtatatgagtctattgtcagactacccctgaggcaacccagccctgacctgc

SEQ ID NO: 854132 - DNA, 120 bp, Artificial Sequence
  ENSG00000223704_43 (sequence is synthesized)
tttttgtttgtgttgacgttgctcatccagtccagcagatcaccctttcccatacattctacaaggtcatctcctccaagaaggcttcagtcctgccgcaccatcctttgaatcctcaca

SEQ ID NO: 854133 - DNA, 120 bp, Artificial Sequence
  ENSG00000223704_44 (sequence is synthesized)
acagttggtaccagggaaagggataatgaggcagtctagtaggctggccaaaagcatggactatggggtcagatcccttcggttgggatcttacttctgccagtaaatccatgcgctaag

SEQ ID NO: 854134 - DNA, 120 bp, Artificial Sequence
  ENSG00000223704_45 (sequence is synthesized)
cttcagttaggcaagccatttcagcctcagctttcacatctgtaaaatggatataaccacccctgcctcacagaactgttgtgaagaggaagggaggtgctccaagggagctctgtttac

SEQ ID NO: 854135 - DNA, 120 bp, Artificial Sequence
  ENSG00000223704_46 (sequence is synthesized)
tgcttcacaacagtcagtgctgaatacatgttggctgttgttctctcttgtcttgtagtgatctcgtactgagagttttgtacattaaagtataagagtcagtattttttttcctagtca

SEQ ID NO: 854136 - DNA, 120 bp, Artificial Sequence
  ENSG00000223704_47 (sequence is synthesized)
acatttattttcaatgagatttggaaatttccttaccaaataattcaaggtgaaagtatattaaactatatttttaaaaattgtatttttgacaagtgaccattatatatatttatgagg

SEQ ID NO: 854137 - DNA, 120 bp, Artificial Sequence
  ENSG00000223704_48 (sequence is synthesized)
tacaatgagatgttttgattatgtttatcttgtgcaatgattaaatcaagctaattaacacatcacctcatttacttatcattttttgtggtgaaagcatttaaaatcttgtttttttag

SEQ ID NO: 854138 - DNA, 120 bp, Artificial Sequence
  ENSG00000223704_49 (sequence is synthesized)
caattttgaaattatatattgcattattgtttattattgtcatcattctgtacaataggtcactgaagcttattccttctgtcagctgaaactttgtaccctttgatcactctctcctct

SEQ ID NO: 854139 - DNA, 120 bp, Artificial Sequence
  ENSG00000223704_50 (sequence is synthesized)
ttctctacccacctgcttcccccagcctctggtaaccaccattctacgctctcaacttctttagatttcacatataactgagatcatgcagtgtgtgtctttctgtgtctggcttatttc

SEQ ID NO: 854140 - DNA, 120 bp, Artificial Sequence
  ENSG00000223704_51 (sequence is synthesized)
acttggcctaatgttctccaggttcactgaagcaaatgacaggatttccctcattgtaaaggctaagttgtattccattgtgtacatacaccacatttttttaatccattcatctgatgt

SEQ ID NO: 854141 - DNA, 120 bp, Artificial Sequence
  ENSG00000223704_52 (sequence is synthesized)
tggacattaaggttgcttccatatcttaactattgtgaattacatttcaatgaacataggagtggaaatatctcttgggcataggatttcaattcctttggatatacaccccacatggta

SEQ ID NO: 854142 - DNA, 120 bp, Artificial Sequence
  ENSG00000223704_53 (sequence is synthesized)
atcctatttttagttttctgaggaactcccatactgttttccataatggctgtattaatttactttcccaccaacagtgcacaagggttcactttttccatacccacatcaacttattat

SEQ ID NO: 854143 - DNA, 85 bp, Artificial Sequence
  ENSG00000223704_54 (sequence is synthesized)
aagcgatgaccagcactttttaattcctcatttgtccattcgtagatcttcttctgagaagtgtctatttaggtccttagctaat

SEQ ID NO: 854144 - DNA, 120 bp, Artificial Sequence
  ENSG00000223704_55 (sequence is synthesized)
atcttcttctgagaagtgtctatttaggtccttagctaattttttgattgggttatttattttcttgttattgagttgtgtttcttatatattttttatgttagctccttatctgatgta

SEQ ID NO: 854145 - DNA, 120 bp, Artificial Sequence
  ENSG00000223704_56 (sequence is synthesized)
agtttcttcaactgcaaagtggggatcgtggggcatagaagacatcctcgttggttgttgtgaagattcagtgagagagtgaccagttcttaaagcaattctctgtcttgagtcatgaag

SEQ ID NO: 854146 - DNA, 120 bp, Artificial Sequence
  ENSG00000223704_57 (sequence is synthesized)
aatacatttgttggactccactttccattacgagaaatacacattccatcatctgaactactggacaagcgcttgcggctctcagacacacaaatggccccgtatgaacaatttggccac

SEQ ID NO: 854147 - DNA, 120 bp, Artificial Sequence
  ENSG00000223704_58 (sequence is synthesized)
caccatctctctcggtgccagattgcctgtggcaggagttgtggctgaccctaagtcctcagactggggctcacgtctaagccacatttgctgtactgggcatgccaggacagctggttc

SEQ ID NO: 854148 - DNA, 120 bp, Artificial Sequence
  ENSG00000223704_59 (sequence is synthesized)
caaagtcaactgcattccctgccgaggagccagggctgaagtcttcatcacagcctggttatggcttaggcattataaatgatgctgtgctgacagccaggtggacagcctgcctaactg

SEQ ID NO: 854149 - DNA, 120 bp, Artificial Sequence
  ENSG00000223704_60 (sequence is synthesized)
cctgacagggacagccctgcaaatagaatctgagggatggcagacctattggagtcatcgtgtccttccactgagtctggtgggactctcttccactcatctcagactggaagatgcctg

SEQ ID NO: 854150 - DNA, 120 bp, Artificial Sequence
  ENSG00000223704_61 (sequence is synthesized)
ccttttttctttcttataagtctccacagagaaagggagctctccccaggacacactttatttttcttttggcagtggttagtgcagggttaaaaagttctggagtcagatctgtgttca

SEQ ID NO: 854151 - DNA, 120 bp, Artificial Sequence
  ENSG00000223704_62 (sequence is synthesized)
aatctggattgagccactcacaagctgtgtgaccttgggcaagttaccaaacctctctgagcctcagttcccttactgttaaaataaaaaagaagaatgatgaccagctccaagagttga

SEQ ID NO: 854152 - DNA, 120 bp, Artificial Sequence
  ENSG00000223704_63 (sequence is synthesized)
tgtgggtttcagttggaagaaggatcacaggaaatgctctgggaatgggaggtgtgattttttggggggacactgggtcatcaaggacaattgctctgccccctcccttggcgtgcatgg

SEQ ID NO: 854153 - DNA, 120 bp, Artificial Sequence
  ENSG00000223704_64 (sequence is synthesized)
gaatggtgagagctgcccatcacttgggacaggtatagctctgtctggttccagggctagataagaccccctctgaagggccactggtgtcctctcccgggccctactcaggaggcagag

SEQ ID NO: 854154 - DNA, 120 bp, Artificial Sequence
  ENSG00000223704_65 (sequence is synthesized)
tagcacaatgggaggacacaggactgaggatcagggcttgattcctggctgggtgaccttagtacatcaactgctttctgtaggccatagctgatggggaaagccctggatagagcttta

SEQ ID NO: 854155 - DNA, 120 bp, Artificial Sequence
  ENSG00000223704_66 (sequence is synthesized)
aaaaatagccatgtttgtgtttgtggttctcaaactacccttcagggaacagaagtgcttcagatgtggctgtgctcacccccatgcccagccttcattaaaaatagatttgtggctgaa

SEQ ID NO: 854156 - DNA, 120 bp, Artificial Sequence
  ENSG00000223704_67 (sequence is synthesized)
ataaaaccatacgttggctctcctgagtctccaccttcttgactgcagatttgggacttctcagcctccataaatatagtctccctatgtctcccaagctggagtgcagtggcgtgatct

SEQ ID NO: 854157 - DNA, 90 bp, Artificial Sequence
  ENSG00000223704_68 (sequence is synthesized)
ggcctattgcttttatgttctctacagtctctgcatgcctctgttggctgccatcgggggcagaccactcccactgcccatccttggact

SEQ ID NO: 854158 - DNA, 120 bp, Artificial Sequence
  ENSG00000223704_69 (sequence is synthesized)
ccatcgggggcagaccactcccactgcccatccttggactccactgttttggtttccctgggcagttaccctctgtctgggcaagtgaagattctcagcctgagcccaatatcaacaatg

SEQ ID NO: 854159 - DNA, 120 bp, Artificial Sequence
  ENSG00000223704_70 (sequence is synthesized)
ttccaggctgaaacagcagtagccaattgtctgcccatttctgaacggttcttactattctggaactgtagtccttatactttttttctttgctttcacagttctggattcccttaaaaa

SEQ ID NO: 854160 - DNA, 120 bp, Artificial Sequence
  ENSG00000223704_71 (sequence is synthesized)
tactatttctgtgttaagtgttttctagctgtcagcacacatgctgtcttaccgtgacctattatatctttcttggaaacagaaggcactactggtttttgaatgctgatcttatatttt

SEQ ID NO: 854161 - DNA, 120 bp, Artificial Sequence
  ENSG00000223704_72 (sequence is synthesized)
agtgttcttattagtcgtaaagccttatctataaattctcctggaaagttcccttcaatccttcttttaatgacaatttgaattataaatgaggattgaattttttcaaaattttttcag

SEQ ID NO: 854162 - DNA, 120 bp, Artificial Sequence
  ENSG00000223704_73 (sequence is synthesized)
aatggatttagcgaattatgcgaatttctcatttaatgtgatgtattatacaataagtttttctgatatggaaccatccttgcatttcttagattcaccctatcctttcataatgtattt

SEQ ID NO: 854163 - DNA, 120 bp, Artificial Sequence
  ENSG00000223704_74 (sequence is synthesized)
tctaaaatattactgaacctgacttcctagttttccattttacactttcatgtctatttttctatagatttctttacttttgtattattcttagtggattttggtataaaggtcttatta

SEQ ID NO: 854164 - DNA, 120 bp, Artificial Sequence
  ENSG00000274038_0 (sequence is synthesized)
cggttatgaaacacccatatttgcacgaggttttatttgtccccacattgtttccctgttcctttgtaaaaccacaagcagtttttgtgtttatcactattggccttgaggaaatagaat

SEQ ID NO: 854165 - DNA, 120 bp, Artificial Sequence
  ENSG00000274038_1 (sequence is synthesized)
acttagacatcttttgtgctcctcctatctttgtctgtaaaaagagtgtactgtggtcttgctttcatcccttctttttctttcttttcgtcgtagcacaagaagtttttcatgttgtca

SEQ ID NO: 854166 - DNA, 120 bp, Artificial Sequence
  ENSG00000274038_2 (sequence is synthesized)
cagtttaaataagtctcatttcttatggcctcataaaggttcatctggcattttcttgcaagtagacattttcgttgcttccagtattacattattttcaactaaactataatgagcagc

SEQ ID NO: 854167 - DNA, 120 bp, Artificial Sequence
  ENSG00000223701_0 (sequence is synthesized)
gacaatgattttatagtgaagttgaagcaaagagagtgaccacctgtgagacaaagatgcaggttccctctgtgtgccgggcagtatgccagttaattcaagtgcatgtcagacccagag

SEQ ID NO: 854168 - DNA, 120 bp, Artificial Sequence
  ENSG00000223701_1 (sequence is synthesized)
ggtgacatcctgtgactcagatgctagggcccttatgatgcctggtaaggatgaaccgttgtccacattctgttttctgagtcaaagaggaggaagatctgtccatcgaaactgagctgc

SEQ ID NO: 854169 - DNA, 120 bp, Artificial Sequence
  ENSG00000223701_2 (sequence is synthesized)
gccgtgtccttcggctttctgctcacaagacatcctggcctgcagggtgaggggttctgcccccatcaaagagagatcagctctggccttgacagatattgagcccccatcctcttccac

SEQ ID NO: 854170 - DNA, 120 bp, Artificial Sequence
  ENSG00000223701_3 (sequence is synthesized)
ttgcaatttcctggtcttacttgctctgccacatcctggccttgcctctagacgtcttgcggggtgagatgaccttcctatttgtatttttacatgaaaactataaatgcctctaaccta

SEQ ID NO: 854171 - DNA, 120 bp, Artificial Sequence
  ENSG00000223701_4 (sequence is synthesized)
ggctgtcagcgatcgaggaccacagtatacctgatgccctccctcctgacctgtgattgggattgagctgaagatagtcactgacatgattcaaaggattagcacttggtacaggatgaa

SEQ ID NO: 854172 - DNA, 120 bp, Artificial Sequence
  ENSG00000236485_0 (sequence is synthesized)
attaaatatcttacagaaaacaaaggaaatcgtaacatcttatttaccatcattaagagaaacctgaaggccaattactcattgaatggcaggcaacacaattacattattgtatagaat

SEQ ID NO: 854173 - DNA, 120 bp, Artificial Sequence
  ENSG00000236485_1 (sequence is synthesized)
cctcaggactgtattaaaaaattatgagaaggagtttacacaggtcagcctataaaactactctataatttctatctgtaaattgaaatagaaaagaaataagattgaattaaatatgat

SEQ ID NO: 854174 - DNA, 120 bp, Artificial Sequence
  ENSG00000236485_2 (sequence is synthesized)
aatagtaaatttcatgtctaagtgtgctaaactagctggcctttcctattcttgaataaaattattctggttgccataatgcatcccgaagcttacctagatgaggagaaattcgaagta

SEQ ID NO: 854175 - DNA, 120 bp, Artificial Sequence
  ENSG00000236485_3 (sequence is synthesized)
ttccaacgtctgccctcatgaatagatcaagccttgggggaaaccagtgatctcttggcaacaggaccagaaggtggcaagaagaaaagtttaagaatttcaagtggcttgattggactc

SEQ ID NO: 854176 - DNA, 120 bp, Artificial Sequence
  ENSG00000236485_4 (sequence is synthesized)
ttcttcatggtcgctgagtcaaggaccttctcttctagtgaatttaagggttttgtggaacactagtctttctttatgaactctgtcctctttctcatacaatttatcttttccacatat

SEQ ID NO: 854177 - DNA, 120 bp, Artificial Sequence
  ENSG00000236485_5 (sequence is synthesized)
atatggatggaataaaactgcagaaaatataatgaaatggataaccatatattttttaaaatagaaatttttgagtactgacattcaaggttttaattctagatttaaaaatacatttta

SEQ ID NO: 854178 - DNA, 120 bp, Artificial Sequence
  ENSG00000236485_6 (sequence is synthesized)
cacactcatcagttaatggatgcttgaattattttcactttcagtctattatgaataatgctgctatgaacgttaatgtataagtatttgtgtgaacaaatagaacagacatggtcagtt

SEQ ID NO: 854179 - DNA, 120 bp, Artificial Sequence
  ENSG00000279006_0 (sequence is synthesized)
ctgcaaaataggattcatggtcactaacatgaggctgaagtaggaattggcaaggcctgagaggctcaaaaaatgaagatgaacatgaacttaaatgggaaaataacagcacaaagtcat

SEQ ID NO: 854180 - DNA, 120 bp, Artificial Sequence
  ENSG00000279006_1 (sequence is synthesized)
tcatcaaagcagtgatgggaatcatagcagacacagtgaatcccttcaaacacctcatgagacacaaaatgcatgtatgaccaatttccagaggagcagggacagccaccaggggctcag

SEQ ID NO: 854181 - DNA, 120 bp, Artificial Sequence
  ENSG00000279006_2 (sequence is synthesized)
gaccccagccctcctctgctgggtcaccctggttaagtcaggtcctctctcctggcttcactttccccttttataaaaagagaattggacaggtgagaaaaaaagcagaggagaggaagg

SEQ ID NO: 854182 - DNA, 120 bp, Artificial Sequence
  ENSG00000279006_3 (sequence is synthesized)
ggaggaggaggatgagaaagggaagggaaagtagaagagatggaaaggatcaggaaaggaggaagggaagagggagaaagaagcaaaagctaccactgcagttgagacattgagaattta

SEQ ID NO: 854183 - DNA, 120 bp, Artificial Sequence
  ENSG00000279006_4 (sequence is synthesized)
ctatgtgctgggtgatctcatttactactcacaaaaatactcttgaggtcatagagaactatccttatcttacagaagaaaaaactgatatttagtgacgtccatgaagtcacttgccca

SEQ ID NO: 854184 - DNA, 120 bp, Artificial Sequence
  ENSG00000279006_5 (sequence is synthesized)
aggtcacacagtggcagagttggaacttaaagccacttctttcagcctccagagcccaatactaaaaggtccctctaggatgggctgttggaggcaccaggataggagctgaacaccacc

SEQ ID NO: 854185 - DNA, 120 bp, Artificial Sequence
  ENSG00000279006_6 (sequence is synthesized)
tcctccttgtggccactccccagaattgcaggtatgagtcccaaaagcagggaaatgaggtctgaggccccagcactctccggttcatgctaagtccctccacccacctacctctgagga

SEQ ID NO: 854186 - DNA, 120 bp, Artificial Sequence
  ENSG00000279006_7 (sequence is synthesized)
gaggaaatcaagcaggcaagagtggggcaggggcctcagaggccagaaggaaagagccaaggcaagctgcccgaggactccaaggacaaaagctcttcaatgacagagagtgaaagagga

SEQ ID NO: 854187 - DNA, 120 bp, Artificial Sequence
  ENSG00000279006_8 (sequence is synthesized)
ggagcaggacggccaaggaggatgccagcaagcagactctaaaaagacaggtttaaaatgcttctctcccatcacctttgtcttcacacacacactcataaaagttcaagtacaatcaga

SEQ ID NO: 854188 - DNA, 120 bp, Artificial Sequence
  ENSG00000279006_9 (sequence is synthesized)
taagctaagtcagagctatctgagagggactggagaaatagctgagaaagaagtcaatggaagggaatgtttatcaaaaaatccaggcaggtttcaaatgtgtgtgaatctttggctagg

SEQ ID NO: 854189 - DNA, 120 bp, Artificial Sequence
  ENSG00000279006_10 (sequence is synthesized)
atctggatcctcgaggaaaattcctgggctgctcagtaaacacctagctgggatctgagttcctccccggcccgtctccctcagccccacagtcgggctcacgttgtggctgttctgcat

SEQ ID NO: 854190 - DNA, 120 bp, Artificial Sequence
  ENSG00000279006_11 (sequence is synthesized)
cactcctagcacaaaccatgccagggtatcttctttacccccattttacagaagtggaaactgaggttcaggaaagcaaagtttcttgcctgtggccataaaactggaagggatggactc

SEQ ID NO: 854191 - DNA, 120 bp, Artificial Sequence
  ENSG00000279006_12 (sequence is synthesized)
tcaatggagcttcagcacaaaatcatatgtctccaaaacgtgagaccaggcccaggtatccctgaagcttgtggagctgagcaaccaaagaggcctttgtgggcagaagtgtcgctgcct

SEQ ID NO: 854192 - DNA, 120 bp, Artificial Sequence
  ENSG00000279006_13 (sequence is synthesized)
taggagccctgtcttcgatgcccctgtataggacctgggccggaaaggggcttcatgagcaagtgcaaaactccaaacagcatggaactaaagtccgaaaagaaactcactggaggtggc

SEQ ID NO: 854193 - DNA, 120 bp, Artificial Sequence
  ENSG00000279006_14 (sequence is synthesized)
gaagccctggaacccatgtgggcacactgaagctctgaatgggacagctgtccctggggcctgctcagtgtgtactcacctcctttcacaagtaaggaaacaggatgagggggaagaggg

SEQ ID NO: 854194 - DNA, 120 bp, Artificial Sequence
  ENSG00000279006_15 (sequence is synthesized)
cacaaggacacagagataagcaagagccagagggagacttgaaaacaaggacagtcgtaccagtaacagcaagagtaataattatgtgacgatgacacttattgtttgctatgtacccag

SEQ ID NO: 854195 - DNA, 120 bp, Artificial Sequence
  ENSG00000279006_16 (sequence is synthesized)
aagcatgctaagcacttcatgaattctctcatctgagccccacatcagccctgtaaagtagatactattattatccccattctacagatgaggaaactgaagccagaggccagcccaagg

SEQ ID NO: 854196 - DNA, 120 bp, Artificial Sequence
  ENSG00000279006_17 (sequence is synthesized)
tcacacgtgaatgtatgcagatccgggacttgaacccaggcaatctggctctggaaccagctttctgctgcctcctgttatcaccataactgtcagttcctaaatgtgttatgacgtgct

SEQ ID NO: 854197 - DNA, 120 bp, Artificial Sequence
  ENSG00000279006_18 (sequence is synthesized)
gggccccacacacacttttattccatcctcgcaacacagctagataggaatcaagatcctgttttccaggtgaagaaactgaagtgcagcgaaattaagtaaattgctcaaaatctcaaa

SEQ ID NO: 854198 - DNA, 120 bp, Artificial Sequence
  ENSG00000279006_19 (sequence is synthesized)
gaggttgacaggagaccgtgctgggattggaacccaggactttccaacaccagtctatgttcccttaaccactccatgccaggcagtgctgggctggaaactcaagaggaagaaggtttc

SEQ ID NO: 854199 - DNA, 120 bp, Artificial Sequence
  ENSG00000279006_20 (sequence is synthesized)
cccagcagagccaccaaacaccctccacatcaagaaccacaacacagctagtcaggtgacaccagattcctggacagttgcctgctgccctcaaccccgtcagggccctgggctgtccag

SEQ ID NO: 854200 - DNA, 120 bp, Artificial Sequence
  ENSG00000279006_21 (sequence is synthesized)
atgctccaccaaccacattcacagcagtgtccagcaaccagcacccctgtgcaatcctctccagccatgttgcatcactcaccacaaagggcccactcctcctgtctttgcagaagctgt

SEQ ID NO: 854201 - DNA, 120 bp, Artificial Sequence
  ENSG00000279006_22 (sequence is synthesized)
ggcttctccagggaaccgaggccacaggggacacctgctggagcggtcgctccttctcctggggggcatcctccttctccaggtcccgtggcagcacctgaaacacagagcacaagaaaa

SEQ ID NO: 854202 - DNA, 120 bp, Artificial Sequence
  ENSG00000279006_23 (sequence is synthesized)
ggactttactgggagccttctcatttacaggaaaaaatatattatgccaagagtccattctgtaccaaaaagggcaaagaagaaaattaaacccccagaaatcccccactttaatgatca

SEQ ID NO: 854203 - DNA, 120 bp, Artificial Sequence
  ENSG00000279006_24 (sequence is synthesized)
gaggtaacatgtagggcggtagctctgggttccagtggcccagcctcagccatttaataactgtgtgacctcaggtgggtgcctcaacctctctgagcctcaactatctgggaaaggaac

SEQ ID NO: 854204 - DNA, 120 bp, Artificial Sequence
  ENSG00000274031_0 (sequence is synthesized)
cagcagggcatctgcaatagtttaatggacaccttagatccctgcagatagtgaccagctgacacctgactctgcatttaatatcagtccgtttgacattcaactgtaatgtcagctcca

SEQ ID NO: 854205 - DNA, 120 bp, Artificial Sequence
  ENSG00000274031_1 (sequence is synthesized)
gctttaaatgtcctccagctttaaaatgacacttatttctcctcttttataagtaaacaaataagtcaatatagaaaactctaaaaataaagagcacataattagatagatccagatata

SEQ ID NO: 854206 - DNA, 120 bp, Artificial Sequence
  ENSG00000274031_2 (sequence is synthesized)
cctacatatatgtatttactttaaaaaaaatagcatccgacagtgtctatttgtggcctgctttttaaattacatggcaagtatctttccctatcaatatacacacttggtatcactttt

SEQ ID NO: 854207 - DNA, 120 bp, Artificial Sequence
  ENSG00000274031_3 (sequence is synthesized)
aatggctgtagttattctactatatggattatgaacttacctccttccacccttaatagattttctatttgttaattaagttgtttctatttcttggctactataaagactaatttaatg

SEQ ID NO: 854208 - DNA, 120 bp, Artificial Sequence
  ENSG00000270720_0 (sequence is synthesized)
aatgggtttttgtttatctgtattttattcagagttccttggtttgaacctggtgtcctgttccaggcatccagccaggatactacattatgtttagtcattgtgtgttcttaggctcct

SEQ ID NO: 854209 - DNA, 120 bp, Artificial Sequence
  ENSG00000270720_1 (sequence is synthesized)
cttggctgtactagtttcttagaatttcctcgtttttgattgtctggacatgatgatcttgacagttttgaggaaaagtggtcaggtattttgtagaatgtccctcatatgataaaaagt

SEQ ID NO: 854210 - DNA, 120 bp, Artificial Sequence
  ENSG00000270720_2 (sequence is synthesized)
atctgggaaggcttttcatcacaagtaatgttgtccatgaagtaattagttgtgtttgtgatagaatagggggtgtcacgtgaaaatcaagagtgcaggtcatgttctagtaacagacta

SEQ ID NO: 854211 - DNA, 120 bp, Artificial Sequence
  ENSG00000270720_3 (sequence is synthesized)
atagaattgcaatgtgatgcgagtaaggtgcaattagaagtaacagtgttaaagtttggcaggggcctgagagcttttttccctcctgacaccaaataaatggtatcttttccaacaaca

SEQ ID NO: 854212 - DNA, 120 bp, Artificial Sequence
  ENSG00000270725_0 (sequence is synthesized)
aactttacaagagaacaataaattattttccaaaggtttgtaccatttttcacctccattggctgtgtagctttgggagcttgggctaccctgtaacgtctaaatgcctgtgcagtgtgg

SEQ ID NO: 854213 - DNA, 120 bp, Artificial Sequence
  ENSG00000227492_0 (sequence is synthesized)
gcgtcacttccggtaaccgctgcgagaaggcccttccctaagttctcccagggcgctgccagagccctgccggctaagggatggggaaacaaacaggtggggctgtaatctcgtaattcc

SEQ ID NO: 854214 - DNA, 120 bp, Artificial Sequence
  ENSG00000227492_1 (sequence is synthesized)
cagtcaaaagaggtaggaagggatgctgaggacccagggatactgatgattgggctgacccagaagtggccatctttgtggaaaccagtcatccagagtaaagtcatagggctcaaagtc

SEQ ID NO: 854215 - DNA, 120 bp, Artificial Sequence
  ENSG00000227492_2 (sequence is synthesized)
tttccggaagcggcgagccagggtctcctcgtcttccttgctgatctgacactgcctccagtcagacttatcaggaacattaaggatggcttcactggccaggacctccctgcagaaata

SEQ ID NO: 854216 - DNA, 120 bp, Artificial Sequence
  ENSG00000227492_3 (sequence is synthesized)
cagcctgagctctcctcaacatcacccaaaggaggggactcaggcccacgtaacagcagcacaagcccaatgtcaacaaaacaactatcttggctcttaggactaaagaataactacata

SEQ ID NO: 854217 - DNA, 120 bp, Artificial Sequence
  ENSG00000227492_4 (sequence is synthesized)
cagacacactcacacacaagctgccttctaatcgccattgctttatatttttatttttacttattttgatatattagaaataattctattacacatttatatggttcattttccactttg

SEQ ID NO: 854218 - DNA, 120 bp, Artificial Sequence
  ENSG00000227492_5 (sequence is synthesized)
aagttacagtaaatagaagagttagaaacaaatcatgaattctctataagtcaaagaacctaagctccctgggcaaactttgagcctatttcaaatataaaaggaaaatagaactacctt

SEQ ID NO: 854219 - DNA, 120 bp, Artificial Sequence
  ENSG00000227492_6 (sequence is synthesized)
tcttgtacagctgaaaaaaatatgccatttcaaatattttgttaactataaaatgctatataactataaattagtatcttgataattactcaatattgaaaatacatcataagcacaaaa

SEQ ID NO: 854220 - DNA, 120 bp, Artificial Sequence
  ENSG00000227492_7 (sequence is synthesized)
cctgcctcagcctcccaaagtgctgcaatcacaggcatgagccacctggcctgttttttaaaaagcctaagcctgttgaccccaggctccacaatcttcaattttccgagtctcagtttt

SEQ ID NO: 854221 - DNA, 120 bp, Artificial Sequence
  ENSG00000227492_8 (sequence is synthesized)
tttttttttcatgagtaaaatagaggtaatacctacctcacagagattttgtgaagattaaatgaaacagtgtctggaccataagtgcccaatataaagtcatccagagtaaagtcatag

SEQ ID NO: 854222 - DNA, 120 bp, Artificial Sequence
  ENSG00000227495_0 (sequence is synthesized)
gacacatcttctacctgacttcagcaccagcggctccgtcacaagcttcccattcacatatgtctcagctccttcacaaggctccagagtgaccaccactgaatggaggggcagaggaag

SEQ ID NO: 854223 - DNA, 120 bp, Artificial Sequence
  ENSG00000227495_1 (sequence is synthesized)
gggaaagattagaccctggaggaagatgtccattcctacctttcccactgacattatccctggtggggcctgggctcctccagcaggcttgtagcccacccctctgcctcatgcatcttg

SEQ ID NO: 854224 - DNA, 120 bp, Artificial Sequence
  ENSG00000227495_2 (sequence is synthesized)
tgagcctgccagtttctggggacgcgaagatgcacgaggcagctccctgtcctcgaggagcagtggccattgccgcagaggaaccctggtatcccaaaggcccaggctctgcagctcctt

SEQ ID NO: 854225 - DNA, 120 bp, Artificial Sequence
  ENSG00000227495_3 (sequence is synthesized)
agccagggatgctgaacaagtcaatttaacttctgtgatattctataagatgggataatgaagtctgaatgaagagtggttagaaggcccaaaaaagtaaaccataaaataacatgcaaa

SEQ ID NO: 854226 - DNA, 120 bp, Artificial Sequence
  ENSG00000227496_0 (sequence is synthesized)
tacatcacataatgtgcctggttgagaaaaggccttaggaagagccagagagtgccagagaatggaaagagtatgacacatgcctcgctgaggtcggacagcgcgtcagccttactttcc

SEQ ID NO: 854227 - DNA, 120 bp, Artificial Sequence
  ENSG00000227496_1 (sequence is synthesized)
cagctgactaaggacgcctcccaccaagctgcttgcctgctgaagcctgtcttgaaaactgacagtagatggctgtgactacccagagttttttccccagcagttaatgaacacacagca

SEQ ID NO: 854228 - DNA, 120 bp, Artificial Sequence
  ENSG00000227496_2 (sequence is synthesized)
gacgcatgcatgcaataccttggaatcatcccagaggctccagctcaatcatccggccttgtgagagacgcccacatgctgaagagcctttctgcagttctgcattgaactcttcatgtg

SEQ ID NO: 854229 - DNA, 120 bp, Artificial Sequence
  ENSG00000227496_3 (sequence is synthesized)
gccccatctagtaatgagtgcgagtggtcatgtggcaaagacactttgaggagcccatcctgggatgaaaaccatggccagggaagaggccacagcagagaggcagaggtgctgaaacca

SEQ ID NO: 854230 - DNA, 120 bp, Artificial Sequence
  ENSG00000227496_4 (sequence is synthesized)
acctcaatcctacctgatcagttcagccagaactgatctctcagccaagtctgtaccctggctagaatgtgatcttcaaaatgtgatcctaacctgttttgttcactcctatgaccccag

SEQ ID NO: 854231 - DNA, 120 bp, Artificial Sequence
  ENSG00000227496_5 (sequence is synthesized)
catccagaacaatgcttggcaccattggtaggcactcaaatactatacttggtacatcaaataacaaattaactcctccattctatgccttcttggaagggatacaggatggcagctggg

SEQ ID NO: 854232 - DNA, 120 bp, Artificial Sequence
  ENSG00000227496_6 (sequence is synthesized)
gagaggagagcacagaagaaagatgagaacaggatcttagaaaacttccctggggcatatttgtaggccctgacttacccagatccttggaacaggaattatggcttagggagcagtagg

SEQ ID NO: 854233 - DNA, 120 bp, Artificial Sequence
  ENSG00000227496_7 (sequence is synthesized)
caagccctgatcatggagcctggcagacccatttattccttcaacaaggatttatggaacacttaccagatgccaagtcctgctgtattctcagccttgccaggcctagctttcataccc

SEQ ID NO: 854234 - DNA, 120 bp, Artificial Sequence
  ENSG00000227496_8 (sequence is synthesized)
ttctggccctgtgatttctggctagctgttagcctctctctctgttcattcattggtaaatacatcacagggttcttgagaagattaaatgacataatatataaaatacttgcttgtgca

SEQ ID NO: 854235 - DNA, 120 bp, Artificial Sequence
  ENSG00000227496_9 (sequence is synthesized)
acagctcctggtgagaagggcgaagccatgtcagaaataatagaaaaggctttttcctttgaaatatctaaacgttcaaagatgggaacagccgcaggggggagaatactgtgctatgca

SEQ ID NO: 854236 - DNA, 120 bp, Artificial Sequence
  ENSG00000227496_10 (sequence is synthesized)
agttgatctgattttgtggaccatccatttccaattgggaagctcacttactttcaacttgaagcatcagaaaaccagacttacagcagcttcagcctataggggtttatttttctcatg

SEQ ID NO: 854237 - DNA, 120 bp, Artificial Sequence
  ENSG00000227496_11 (sequence is synthesized)
aacagaagtggacagaggccgagttctcaaggactcagtttctttctgtcccaccaaccttaccatgttggattgtcatctttgtgcttgttgcctcatgatggcaagatggctgcagca

SEQ ID NO: 854238 - DNA, 120 bp, Artificial Sequence
  ENSG00000227496_12 (sequence is synthesized)
cctctgggactcacgactgatttttaagactacagagcctaagtcaaagcttgttcttggacccaggaaatatgtcaaatccttccagtgaatggtatgtcttcctaaatgacgcacttg

SEQ ID NO: 854239 - DNA, 120 bp, Artificial Sequence
  ENSG00000227496_13 (sequence is synthesized)
tgagaacagctggacctaactgtctaaaggacagctagcttccagcccgattttcagagctgatatatcaaaatctaattccttttacagaatagccaaataaatattttcactgtcaaa

SEQ ID NO: 854240 - DNA, 120 bp, Artificial Sequence
  ENSG00000227496_14 (sequence is synthesized)
caggattggagactactcccccagttgctgatggtgtggtcagccctcagttttcagtcctctttgggaattgccttggatgaagaaagtcacctcacccaagatcactccaactcctgg

SEQ ID NO: 854241 - DNA, 120 bp, Artificial Sequence
  ENSG00000227496_15 (sequence is synthesized)
gacccacatccaatgattggccaatatggggactcaaaggcctggtcccccttccccaacttgagactactctgaaggatcacccagcttcagagcttcccatggttgagacttttagac

SEQ ID NO: 854242 - DNA, 120 bp, Artificial Sequence
  ENSG00000227496_16 (sequence is synthesized)
ttcactgtggtccaaccaatctcttcctatacacggtcctgactccttcacttccctcccagcacttcttctgtgttaatatcaaacttctgtgctaataacaaacttcttccgtgctaa

SEQ ID NO: 854243 - DNA, 120 bp, Artificial Sequence
  ENSG00000227496_17 (sequence is synthesized)
ccagcgacgaccaagcctgggtggttctgacaccaagaacaaaacgcctgcaagatccacactgggaactcaaccaagaagaaagaaaagaacaaacaagatcaatttcttccccacagg

SEQ ID NO: 854244 - DNA, 120 bp, Artificial Sequence
  ENSG00000227496_18 (sequence is synthesized)
cctctcctgtctcacctcctcctgaaaaaagagacaaagtcccactcccatcaaaacacctctgaggtgtcagcttcaaatgatttatgaattacttctcccagcctgggttagcttcaa

SEQ ID NO: 854245 - DNA, 120 bp, Artificial Sequence
  ENSG00000227496_19 (sequence is synthesized)
aactgggaatgggtcagggtgtcagcatgggaagaacctttaagaatgtcaggcttttagagcctcaaagccacaaatctctcaaatggtgccctctccaaccctgggcactaggtccga

SEQ ID NO: 854246 - DNA, 120 bp, Artificial Sequence
  ENSG00000227496_20 (sequence is synthesized)
tgagcaggggatggaggcatatttggacaggggcctgcatctgagaccagcccctgataccaaaccaaatgtgtctcttgtatttttaactgcaagctcccaccaccctgagtgagtttt

SEQ ID NO: 854247 - DNA, 120 bp, Artificial Sequence
  ENSG00000227496_21 (sequence is synthesized)
tcccaaagcagtggtgtcacaagcagccattcagttggcctttgcagtcatgctgacccaggggtacttggtcttcatcggattctcagtctaagcatcaatcctctgacagagggacct

SEQ ID NO: 854248 - DNA, 120 bp, Artificial Sequence
  ENSG00000227496_22 (sequence is synthesized)
accccaggcacttccagctcagcagaaagcaccctgagctaataaaggaagatataatttagaggtcatgccccaaagccagctatttctgactgcagatccagctccaactaaagccaa

SEQ ID NO: 854249 - DNA, 120 bp, Artificial Sequence
  ENSG00000227496_23 (sequence is synthesized)
gccaaaaattaacattattttgcattttaaacaacttactagtctttcaaagggtactgattggtgaacagcaatttacaatgaagtaatcagttgcaaactaccaataattgctatcac

SEQ ID NO: 854250 - DNA, 120 bp, Artificial Sequence
  ENSG00000227496_24 (sequence is synthesized)
ggcacagaggaaaatggacataaggtagcggtaacaggctggcgactgtggcttttacacattgcttcacacaaccctgtccaggagttttacacactcactaaacaaacagaagacacc

SEQ ID NO: 854251 - DNA, 120 bp, Artificial Sequence
  ENSG00000227496_25 (sequence is synthesized)
atccaattcactggagccccgttggataaatacggaaagaatgtgggagctatgtcatgaaccacaatggttttgtgttctgtgtaatttgaagacgagattcctttgctgtgtgtcacc

SEQ ID NO: 854252 - DNA, 120 bp, Artificial Sequence
  ENSG00000227496_26 (sequence is synthesized)
tcccatattaccactgtcgcccaacatttcataaccatcaactctttgccagtgcccacatgcaaagatgggtttgtattaaaaaataaatgagaacagcacattctgatgtggtgtagt

SEQ ID NO: 854253 - DNA, 120 bp, Artificial Sequence
  ENSG00000227496_27 (sequence is synthesized)
gggactcacgactgatttttaagctcaatcatccggccttgtgagagacgcccacatgctgaagagcctttctgcagttctgcattgaactcttcatgtggccccatctagtaatgagtg

SEQ ID NO: 854254 - DNA, 120 bp, Artificial Sequence
  ENSG00000235688_0 (sequence is synthesized)
gcagcgcagggccccgaggacggcctggcccggagaaaagataccgaagctccaactttccccaaccccgctcccctcctccttccaccctcccttcccgcccccaaagctcgggggtcc

SEQ ID NO: 854255 - DNA, 120 bp, Artificial Sequence
  ENSG00000235688_1 (sequence is synthesized)
tatccctcctccggtccgcggagtctcccgaaccctgcggggacccggcgctcggcggtgccctcctggggcgcacggggctggggcgggagcgaggagaccaggtggggaggggacccc

SEQ ID NO: 854256 - DNA, 120 bp, Artificial Sequence
  ENSG00000235688_2 (sequence is synthesized)
ggagcctcacagatgcagtattgggtttggtagactcaaatcgtcttgttttaatgtaaatgaaatccttcgacccaggcacgagcgcccatcgcggaggccacgatgcccgttttattc

SEQ ID NO: 854257 - DNA, 120 bp, Artificial Sequence
  ENSG00000235688_3 (sequence is synthesized)
cctctccacggcaaggaaaagcagcgaaatctgaggtcttcagaggttaaccctatctaggagcagaatgtgacgcattgtaaacaaataaatattgaaaactcgatgttaaacacttta

SEQ ID NO: 854258 - DNA, 120 bp, Artificial Sequence
  ENSG00000231015_0 (sequence is synthesized)
aggcatgattgcatttgttacctctggataaatgctcatggattgaagcacctgtttaaatcgcaccctacttctagccctgcctccagactcgcctctttgcattcagggagcacagaa

SEQ ID NO: 854259 - DNA, 120 bp, Artificial Sequence
  ENSG00000231015_1 (sequence is synthesized)
atgtggaaccccatctaatgggttcactggcacacagacctcagacaagggggagctgaggactggactctgaccactgttttggttctaaatttcttcctgaggcccaagaggaggtca

SEQ ID NO: 854260 - DNA, 120 bp, Artificial Sequence
  ENSG00000231015_2 (sequence is synthesized)
cgtccaccagctaaacctagcattcttttctgctggctacaaaatttttagacaaggctttgcctccttaaacaatcgcaagtttaaaaatctttgaatccagccatctatgacctgtgg

SEQ ID NO: 854261 - DNA, 120 bp, Artificial Sequence
  ENSG00000231015_3 (sequence is synthesized)
tgcctccctccctttaaaaactcctacctgtaagccattgaggccaggtctaaatcatgagctgccctgcaatcggtgcctcaatttctctcgccgcaaccctgaggtcagccttggctt

SEQ ID NO: 854262 - DNA, 120 bp, Artificial Sequence
  ENSG00000231015_4 (sequence is synthesized)
tgctctgctgcactggtggacccaagctctgttcactgttgtcagcctagggtcctgcctccagccctgatttctcagagattggacttggaccctccaagccccctgattacaaaagga

SEQ ID NO: 854263 - DNA, 120 bp, Artificial Sequence
  ENSG00000231015_5 (sequence is synthesized)
agtgagcttgttccaagactgcagggaagggatttccattttgagctccataggcggctccttcagctatctctgtggctcacagacaaaagccggcccagggtgaaagtgatcctgcca

SEQ ID NO: 854264 - DNA, 120 bp, Artificial Sequence
  ENSG00000273568_0 (sequence is synthesized)
ccttcagtctcttgcctcggcacctgggtggcttaccgcccacaacccaacgtttggcagacggggacagcagagccggagagaacagatagcttttctgtagcacgtatgaggcatcag

SEQ ID NO: 854265 - DNA, 120 bp, Artificial Sequence
  ENSG00000273568_1 (sequence is synthesized)
ggctctgtcacatggctctcaggctgcctgaaggcattaggggcctatcagagacataactttttgccggtcaggatcctccgggaatctgaataaagctatggctctttttcccacaaa

SEQ ID NO: 854266 - DNA, 120 bp, Artificial Sequence
  ENSG00000261202_0 (sequence is synthesized)
agagagactcaggggaaattagagcatgatggcggccgaggtcgcttggcgcaaccatcgtcttttttctttatttttagctcattagtgccttgcctcggcgctgtttccctaagctcc

SEQ ID NO: 854267 - DNA, 120 bp, Artificial Sequence
  ENSG00000261202_1 (sequence is synthesized)
tctctccaaccagtactgccctataacggaatccatacgtgccggctccttgatttatcccctccgaagtgctgagtgtgggctggttgtgcgtcattggactgtcaggatgtcactccc

SEQ ID NO: 854268 - DNA, 120 bp, Artificial Sequence
  ENSG00000261202_2 (sequence is synthesized)
cagtcaaatcttcaagctattggtggaacagcaagaaagcccgtccatcaacaagggctaataccattggtttgactccactgtgttatttcctggcaccttattgggcaaataggtgcg

SEQ ID NO: 854269 - DNA, 120 bp, Artificial Sequence
  ENSG00000261202_3 (sequence is synthesized)
tcagatccggattcgctctgctacggttaattgtttactggggatttggggtcaactctggttgtttggccagtagttgacgataatagtgactcccttgcctattttgtgccaagtatt

SEQ ID NO: 854270 - DNA, 120 bp, Artificial Sequence
  ENSG00000261202_4 (sequence is synthesized)
gggctgctttcttcacaaacattatctggttaaacctgggagtaatgcagtatccagtttttatagatgggaaattaaggctggcgagagcttagaaaacttgcccaaggtcatccagat

SEQ ID NO: 854271 - DNA, 120 bp, Artificial Sequence
  ENSG00000261202_5 (sequence is synthesized)
acagagtcgttggtgggcctggcatctggtcctgggtcaaactgcagagacttcactctttttattatgctttagtgcctccaccttagacgatgtacttgtcagccaacctagcatctt

SEQ ID NO: 854272 - DNA, 120 bp, Artificial Sequence
  ENSG00000261202_6 (sequence is synthesized)
aagtcttcagtcagtttctagaagtgactttgttggggacttactatggaaaggttgtcattgcctccaccacatcttcctccccaggacccattcctctcccctttaaggtagacattt

SEQ ID NO: 854273 - DNA, 120 bp, Artificial Sequence
  ENSG00000261202_7 (sequence is synthesized)
ctgcctccttttatgcgaagcctaggcaccactcgcaacccctgaccaaccatctacaactcattctttggagagagtcctcaagagctggaaaactaggagaaatcaagtctaaagaga

SEQ ID NO: 854274 - DNA, 120 bp, Artificial Sequence
  ENSG00000261202_8 (sequence is synthesized)
gagacagaataaatcgtcttagaaatgaataatttattgcatgcaaagagaacagcccttcagctcctggaaatcttccaggatagttgatgctgagcaagacgtgtgctcctggctggt

SEQ ID NO: 854275 - DNA, 120 bp, Artificial Sequence
  ENSG00000261202_9 (sequence is synthesized)
ggccactgggttctttccctatagcagcattcatcgaagtgaatccaacatttcagccagaggagggcaggacgcttaggacccattgccagtgagcttttgcgaccgaaatgatctcca

SEQ ID NO: 854276 - DNA, 120 bp, Artificial Sequence
  ENSG00000261202_10 (sequence is synthesized)
ggagcacaacgctggactctagcccacattccatcttgggtaattaacattttaccgtcccaaatccccatcccctgtagcttcagtgggatcaccgcccttgtttcacttcctgatcca

SEQ ID NO: 854277 - DNA, 120 bp, Artificial Sequence
  ENSG00000261202_11 (sequence is synthesized)
agctgttgtgtaacctccttggcactgctttaataataaaacaaccattgtaacatagtaacaatgctcaacacttagagcctttcagcaaatgaagccaaggtatttcataaacgtcaa

SEQ ID NO: 854278 - DNA, 120 bp, Artificial Sequence
  ENSG00000261200_0 (sequence is synthesized)
ttgacctggccatggccctgcctctgccctggaccagcgctgtcactggcatggaccctggccctggccctttgctacttaaggccataacctgtcccagccctggtcctgaccctgtcc

SEQ ID NO: 854279 - DNA, 120 bp, Artificial Sequence
  ENSG00000261200_1 (sequence is synthesized)
gcatgctattctggccctagccttgaccctgtccctgtccctctcctggccctagccccattgctggtcctgccatggctcttatcctgacattgccctttcctggtcctggccccggcc

SEQ ID NO: 854280 - DNA, 120 bp, Artificial Sequence
  ENSG00000261200_2 (sequence is synthesized)
ctgtcccagccctgttctggccctggtctgaaccctggccctgcaatggaccctccttggtcctacccagaccctggttctggtcctacctctgccctggccatacctttgccctggcct

SEQ ID NO: 854281 - DNA, 87 bp, Artificial Sequence
  ENSG00000261200_3 (sequence is synthesized)
tggtcctacctctgccctggccatacctttgccctggcctggaccccggtactggtccttgtcctgccccagccgtggccccggccc

SEQ ID NO: 854282 - DNA, 74 bp, Artificial Sequence
  ENSG00000261200_4 (sequence is synthesized)
ctggctctggtcctgcccttatgcaggcctgaccgtgcccctgccttggctttggcctggaccttggcctggcc

SEQ ID NO: 854283 - DNA, 120 bp, Artificial Sequence
  ENSG00000261200_5 (sequence is synthesized)
ggtaaggcctgaagatgggaagggctggggcagcggcaggaccagggaagggtcagggccagtgatgtggtaggactaggggcagagccggcactagggctgagccggagcagagcagga

SEQ ID NO: 854284 - DNA, 120 bp, Artificial Sequence
  ENSG00000261200_6 (sequence is synthesized)
gagcaggagagattatattaggctattacataaaatttttattttagatttttaagataactatggtagtggtaataatgtccatactatgttgtttgtaatagtaataatatttgcagt

SEQ ID NO: 854285 - DNA, 69 bp, Artificial Sequence
  ENSG00000261200_7 (sequence is synthesized)
taaaaatgcacaaaaagagctgggcgtggatagggcagggccagggacaaggtcaggtcaggaaggggc

SEQ ID NO: 854286 - DNA, 64 bp, Artificial Sequence
  ENSG00000261200_8 (sequence is synthesized)
tggttataaaacactggtcaaacacaccgggcgtggatagggcagggccagggacaaggtcagg

SEQ ID NO: 854287 - DNA, 120 bp, Artificial Sequence
  ENSG00000261200_9 (sequence is synthesized)
cctggctctggccctgccttgcacaggccatgctctgccctgcatgtcccagcctgggcccagcccttgccctaccatatttctgaccccacccgtacccttgttctggccttgaccctg

SEQ ID NO: 854288 - DNA, 120 bp, Artificial Sequence
  ENSG00000261200_10 (sequence is synthesized)
gccctgcccttccatgccctggcctttccctcaccctgcactggtcctgccctgccctggcagtgccttggccctggccctgcctctgccttctccctggccttgctctttccctgccct

SEQ ID NO: 854289 - DNA, 75 bp, Artificial Sequence
  ENSG00000261200_11 (sequence is synthesized)
gccctgccctggcagtgccttggccctggccctgcctctgccttctccctggccttgctcttccctggacctgcc

SEQ ID NO: 854290 - DNA, 85 bp, Artificial Sequence
  ENSG00000261200_12 (sequence is synthesized)
cctgtgctaccctagccgtgccccgccttggccttggccctaccgtggccttttcctaccctggcctggccgtacactggccatt

SEQ ID NO: 854291 - DNA, 77 bp, Artificial Sequence
  ENSG00000261200_13 (sequence is synthesized)
gctaccctagccgtgccccgccttggccttggccctaccgtggccttttcctaccctggcctggccgtacactggcc

SEQ ID NO: 854292 - DNA, 120 bp, Artificial Sequence
  ENSG00000261200_14 (sequence is synthesized)
tcctggttctgccctggccctgccctttctctggatgctctctggttctgccttctccctggccctgcccttgctctggccctgttcctggctcagccttgaccctggccctggccctga

SEQ ID NO: 854293 - DNA, 120 bp, Artificial Sequence
  ENSG00000261200_15 (sequence is synthesized)
ctgacaatccccaggccccacactggccatgcttggccctggcccctcctttggccctgccctggccctgtgctatcttagtacagggccttggccttggccctgtgctatcttagtcct

SEQ ID NO: 854294 - DNA, 120 bp, Artificial Sequence
  ENSG00000261200_16 (sequence is synthesized)
tggccctgaacttgccctggccctaccctcaccctacactggccctgccctaccctggccttgccctgacctggccctgcctttggcctgccctggctctggttctgccctggccttgcc

SEQ ID NO: 854295 - DNA, 60 bp, Artificial Sequence
  ENSG00000261200_17 (sequence is synthesized)
ccctggaccctccctggccatgtttttactgtggtccttctctggccttgcccttgccct

SEQ ID NO: 854296 - DNA, 65 bp, Artificial Sequence
  ENSG00000261200_18 (sequence is synthesized)
cctgccctggccctggttctgccctacttctggccctggccttggtcctctggttctgtcctatc

SEQ ID NO: 854297 - DNA, 120 bp, Artificial Sequence
  ENSG00000273565_0 (sequence is synthesized)
gcaaccaagccccaataggaaacagccacaaggcccttcgctgggcccgcccaccggccgcctaggcgcgagggcggggaatgaggctgtgtctccggggatggggcggtttgcaggcac

SEQ ID NO: 854298 - DNA, 120 bp, Artificial Sequence
  ENSG00000273565_1 (sequence is synthesized)
tcccaagcgcctttgacaccttgatgacacctggggcactgagacactagagaggaaaatttcgaggaaagatttcaacttggctattagacagtgtggaccttagagaagaagttttag

SEQ ID NO: 854299 - DNA, 120 bp, Artificial Sequence
  ENSG00000273565_2 (sequence is synthesized)
gtcacctgatgaatgtgtgccgggcagacatccggttcatgtcccatagcagggtatttgggctggagtaattgtctggctaactgaatgtacatggtattattattattattattatta

SEQ ID NO: 854300 - DNA, 120 bp, Artificial Sequence
  ENSG00000273565_3 (sequence is synthesized)
attattattttagcaaacattgaatgtgttctaagctatattcaaaataaatttgaatttggtatttaaattgaataaaacaacatgttttggtccagtctcagatgaacataattaagg

SEQ ID NO: 854301 - DNA, 120 bp, Artificial Sequence
  ENSG00000261206_0 (sequence is synthesized)
aaggagaccaagtggggtaacatgagcatgaagtgattaacctgcttgaattatttgtcaactgagattccatgtgttttgctcatctcaccagcatacagaaattagcctactagagat

SEQ ID NO: 854302 - DNA, 120 bp, Artificial Sequence
  ENSG00000261206_1 (sequence is synthesized)
tggcctttggccagatgtacaggacattgttgtctgcagtagatgcagaaaatataaaaatgctgtcagctctttccctaccttcaagtcaagaagcttttccaggacagggtcatgtct

SEQ ID NO: 854303 - DNA, 120 bp, Artificial Sequence
  ENSG00000261206_2 (sequence is synthesized)
tcctcatctttgcttcccagctgcttggcatatcatctgtcgcagagcaacttctcagtatacgttgaaaaatacttctgaagtgttctgctccaatcagaattttgccttaccttaagg

SEQ ID NO: 854304 - DNA, 120 bp, Artificial Sequence
  ENSG00000261206_3 (sequence is synthesized)
atctgaatagcatcacatcagcatttgtattcctggacctgaaagagaagaagatgtaaagttcctcagatcctacctgttcagacacagccatccttcagtgtcatctctgtaccgaag

SEQ ID NO: 854305 - DNA, 120 bp, Artificial Sequence
  ENSG00000261206_4 (sequence is synthesized)
acctctccagctgcatcaacctttccatatcctaaatgccttaatcttaatgcaactttggaccacgtaaggcattctctgatttagtggttctaacgcaaggtcaatgacacagtggct

SEQ ID NO: 854306 - DNA, 120 bp, Artificial Sequence
  ENSG00000261206_5 (sequence is synthesized)
gtgaaataagttgtgagaagaaagggcttttcagctagccctgggagtcaaatgtagttcaaagactctgttacctctaatgtagcctgatgtctccaggaatgtggaaaaaaaacatga

SEQ ID NO: 854307 - DNA, 120 bp, Artificial Sequence
  ENSG00000261206_6 (sequence is synthesized)
agagctactcctctgacagtttcatgttgattgttctccatttgttagttttgtctcattgtctaaattgtaaactagaaaatttggataattctctacataatgctccatttcattgat

SEQ ID NO: 854308 - DNA, 120 bp, Artificial Sequence
  ENSG00000261206_7 (sequence is synthesized)
aaataatttacaagtaaattatttaaatatgtttttaaaatgtatgacttttacatataagtaatactttttactttcatgtacattgaaggcaatctctatacaggaacatacagagct

SEQ ID NO: 854309 - DNA, 120 bp, Artificial Sequence
  ENSG00000261206_8 (sequence is synthesized)
gccatgttcttattaatagctgcacactattttgaggacatatgtacatatacaagtatagacacctatatgcacaaatatatatatgtatacatgccataacttaaacaatttcctatt

SEQ ID NO: 854310 - DNA, 120 bp, Artificial Sequence
  ENSG00000261206_9 (sequence is synthesized)
gatacgcatttatattattttgatttcacatgagctcaaaatggaactcaaataattctgcaattatccttttacaaatatacttttgtgtgaagtggcattgtaggatcaacaaataag

SEQ ID NO: 854311 - DNA, 120 bp, Artificial Sequence
  ENSG00000261206_10 (sequence is synthesized)
cacattttaaaatttctatactcttgcccaatttcttaccaaacctgtggtacccatttctgtcccattcaacagtgtggagggagccttgttccatactttcttctattctttcttaat

SEQ ID NO: 854312 - DNA, 120 bp, Artificial Sequence
  ENSG00000261206_11 (sequence is synthesized)
ttagttcatttgagctgctataacaatttatgatagactagatggcttataaacaatcgaaatctatttcttacaattctagagattggaagtctaagatcacacagccagcatggttgg

SEQ ID NO: 854313 - DNA, 120 bp, Artificial Sequence
  ENSG00000261206_12 (sequence is synthesized)
gttctggtgatggctggctctggttcatacatggttctctgaagtgggattttgagagctacagacacttaataccactaagtagttttccacagcaagggagccctatggtttcaaaat

SEQ ID NO: 854314 - DNA, 120 bp, Artificial Sequence
  ENSG00000261206_13 (sequence is synthesized)
actgtagggagaagtccatgtatcaaattggaagcctcctgggtgtcaatgctcaacttcaaagagttgctagaacctctgcagaaaccgagccacaatttctatgacctacattttttt

SEQ ID NO: 854315 - DNA, 120 bp, Artificial Sequence
  ENSG00000261206_14 (sequence is synthesized)
tttctgcagtgaaccaggtcatgcaacctaagagacttccccaacaaaagatcttgaacttctggagtattacccccaagcattttctactgtaagctagaattttttctaataatttat

SEQ ID NO: 854316 - DNA, 120 bp, Artificial Sequence
  ENSG00000261206_15 (sequence is synthesized)
ttctgatataagggaatgctattggtttttacacattaatcttgtatctccactaaaatctatttctagtagctttttcatgtcatctataatgttattttatcaacttattaaaaatag

SEQ ID NO: 854317 - DNA, 120 bp, Artificial Sequence
  ENSG00000261206_16 (sequence is synthesized)
ttaattttcatgtcatatgtgataaaaatctatttcttccttatacagcttattgctttttcttccctttttatgttgactgaaagtaccaggaagatactgaatactaatcatggcatg

SEQ ID NO: 854318 - DNA, 120 bp, Artificial Sequence
  ENSG00000261206_17 (sequence is synthesized)
tatatacaaagagaaaggaaggattattttaaattatccaaataaataatttgacatttcaatctgtttgctattgtgaatgtacatatactttccttctgggagctccaaaggacaaac

SEQ ID NO: 854319 - DNA, 120 bp, Artificial Sequence
  ENSG00000261206_18 (sequence is synthesized)
ttggccgactccatgcataacagcgccagaatgcaaagctccaccagcacggagtttcaaattcacttcccactactcctttgaccagagactcctgtgggacttttctagcgggactat

SEQ ID NO: 854320 - DNA, 120 bp, Artificial Sequence
  ENSG00000261206_19 (sequence is synthesized)
gcacaaaataaacagagctccagcccaagactctttagtctaccacataaaaccaggaaggaatgtttttacctcttctatggaaattcactacagccatcagttgcaccactgcaattg

SEQ ID NO: 854321 - DNA, 120 bp, Artificial Sequence
  ENSG00000261206_20 (sequence is synthesized)
cacacttcctactggatgcaacacatagtgagtactaatacgtgccaagccatgtatgttggttggcattgtggaaaacatgcagtctggtaagacatgattctaacatataagtgttaa

SEQ ID NO: 854322 - DNA, 120 bp, Artificial Sequence
  ENSG00000261206_21 (sequence is synthesized)
tcaccctctagaagtaataacccgtgtaatggcaggtatactaacactttacatgtttttctcatttaattctcaaaacaatattttatgcccactttacaataaaaagggtaaacctga

SEQ ID NO: 854323 - DNA, 120 bp, Artificial Sequence
  ENSG00000261204_0 (sequence is synthesized)
ggctggcgcacgctttgtattgagtggtgtcttcctctttgtagcctctgtggttggcccaaaggtaagtccccaccctgatccctagaatgtgacatttgccttatttggaaaaagagt

SEQ ID NO: 854324 - DNA, 120 bp, Artificial Sequence
  ENSG00000261204_1 (sequence is synthesized)
aatacggagacaggaggagatttcacacaggcagacgaggaggctgcagtgcgaccacagagaccgagacgggagtgatgtggccgcaggccaagcacacctggagccttcaaaagctgg

SEQ ID NO: 854325 - DNA, 120 bp, Artificial Sequence
  ENSG00000261204_2 (sequence is synthesized)
gagaggcaggaaggagccccagggcctctggagggagcgaggcctccacacaccttgacttcagccccgcagtcctgattttggacttttcatttccagaaatgtaagaaaatgaacgtt

SEQ ID NO: 854326 - DNA, 120 bp, Artificial Sequence
  ENSG00000269072_0 (sequence is synthesized)
gggcccagggcgacagcggagccttcacaccgctttctccgcgcgctgatggaggattcctggcctcacagcagtgcctggcctgtgggcgtccccggcagtcctcggctgcgggacctg

SEQ ID NO: 854327 - DNA, 120 bp, Artificial Sequence
  ENSG00000269072_1 (sequence is synthesized)
tatcgggactgcgcaaagtgggcttccaggagagcagggcgtccctcagtcagctgaccccttggagcgtggggcagcccaggcccgtgaggccgccagtgtcaccctcaggcccgcgag

SEQ ID NO: 854328 - DNA, 120 bp, Artificial Sequence
  ENSG00000269072_2 (sequence is synthesized)
gcccccgagccccttgtggggtccaaggcccattctggatcagtcacgaggcaagaccgcggaccctcaggagatcaccaggagcccgccgcgcattcctccgcctccaccacgccagtc

SEQ ID NO: 854329 - DNA, 120 bp, Artificial Sequence
  ENSG00000269072_3 (sequence is synthesized)
acctgctcagcccgagggcagccagcggccgtcgccccagtgaggcggccggtgaggagctgaggccgtgaccagggcagcgccccgcgagtcagcgtcagtccccgcgccagccagttc

SEQ ID NO: 854330 - DNA, 120 bp, Artificial Sequence
  ENSG00000269072_4 (sequence is synthesized)
ctcagacaatcagctcaccattcccatcgcgtatgctgggaaatcatcaatatacccgctgtcatgcccttcagctgcctactggggcaagttcacaacccagcaagatcctcacaaatt

SEQ ID NO: 854331 - DNA, 120 bp, Artificial Sequence
  ENSG00000269072_5 (sequence is synthesized)
ctcggacagctcttggaaatctaatctactgagcttataaatacatcaacacttagattcttccagtgttccagggcaaatcaggctgcatgtcctcagacccgaggacaagaccagagg

SEQ ID NO: 854332 - DNA, 120 bp, Artificial Sequence
  ENSG00000269072_6 (sequence is synthesized)
ggcaagcagctcctgtgtgtccaggttctcggattccttcaccagaggccatggagtcaacggagatgctgcaaacttatggctaaggggtgcccagtcagtggttgcttcactcagtgc

SEQ ID NO: 854333 - DNA, 120 bp, Artificial Sequence
  ENSG00000269072_7 (sequence is synthesized)
gcagcccccgtgaggctcccgcacctcgatgcaccatggaacgatcaagtcagcatgattagcacatccatcagctcaaatttttatcttttttttttttttttggtgacaacatttaaa

SEQ ID NO: 854334 - DNA, 120 bp, Artificial Sequence
  ENSG00000269072_8 (sequence is synthesized)
ctcctctcttttagctattttgaattattcagtacattactctgtcattggaaacaacacagatgaacttagaggatgttatgttgagtgaaataagccaggcacagagagacaaacacg

SEQ ID NO: 854335 - DNA, 120 bp, Artificial Sequence
  ENSG00000269072_9 (sequence is synthesized)
ttacaatctcactatattcggaatctaaagtagtcatccttagagaagtacagaggagaatggtgggtaccagaggccagggcggggagtgtggaccgattggatggggaaagggagagt

SEQ ID NO: 854336 - DNA, 120 bp, Artificial Sequence
  ENSG00000269072_10 (sequence is synthesized)
ttggtcatcaggcatgcattttcagttagacaagaggaataagttctgatgtcttgttgcacagcattgagggctgctaattctactggaatcagcctcagactcctttgctggaggggt

SEQ ID NO: 854337 - DNA, 120 bp, Artificial Sequence
  ENSG00000269072_11 (sequence is synthesized)
cgtgaaccctcaaacaagcccgagcctctgcattttcttacttggggatcttgatctctgagtactcattgttggtggcttcttgtcctgataggtcctgaggctcccccttatgaaagc

SEQ ID NO: 854338 - DNA, 120 bp, Artificial Sequence
  ENSG00000269072_12 (sequence is synthesized)
tgaggggtgcatactggatctctctttcctcccctgaggagtgggcagccaggccatggtgtcgggggttatcatctgcccaggactcagtcaggttaccctgaatggagagagagaaga

SEQ ID NO: 854339 - DNA, 120 bp, Artificial Sequence
  ENSG00000269072_13 (sequence is synthesized)
gagtcagagcagagcagtggaaataggataaggcagggagagtcacaagttgtttgatcggttggttggttcggatatattcctctgtatagaattaaacttcatgagttcctgcctcta

SEQ ID NO: 854340 - DNA, 120 bp, Artificial Sequence
  ENSG00000267334_0 (sequence is synthesized)
ggcggtgtctccggggttgggcacacgagagtagcgggcagaagccaacgcagggttgggatacgtggggccacagccagtctctgtggtccccgggtctaggcttagcaccagttacag

SEQ ID NO: 854341 - DNA, 120 bp, Artificial Sequence
  ENSG00000267334_1 (sequence is synthesized)
caaccagacatccaacaggtgtttaaacctgttttttctgtaggctaaattcacatccgtttgtcaagaggggattgtcaacctctgtccagcgtctctttccgctgcaggaccatccca

SEQ ID NO: 854342 - DNA, 120 bp, Artificial Sequence
  ENSG00000267334_2 (sequence is synthesized)
agatgaacttaaaggacagccttgatgtggcaaagccggcggacgccaagaatggcaattccatccgcttggctttgacagtgtcagaagcatgatgcctgacgattgcgcatgagggtc

SEQ ID NO: 854343 - DNA, 120 bp, Artificial Sequence
  ENSG00000267334_3 (sequence is synthesized)
ggccccttgcggcagcggtggggtgcactgcctccatagtacaccgctgcccgctgcttggattctggtgggcccacctcatgctgatttccaacacctgaggttgtgggagttgaagag

SEQ ID NO: 854344 - DNA, 120 bp, Artificial Sequence
  ENSG00000267334_4 (sequence is synthesized)
tttcctcatctataaaatggggccgatatcctgcccttcctactcacctaggagagcgtaggtatgaaagccttccaacgtccccagcatatgtaagggataacctttatacatttaatt

SEQ ID NO: 854345 - DNA, 120 bp, Artificial Sequence
  ENSG00000267334_5 (sequence is synthesized)
agaaccaaataggtgaaggctgcaaagagccaggtgctcattacttttaggaaatcttcagtacatctgttcccacactgggactatgagcaggtttgcggcatgtaagagaagggtgag

SEQ ID NO: 854346 - DNA, 120 bp, Artificial Sequence
  ENSG00000267334_6 (sequence is synthesized)
gcaaaactccctcatcagacttgccatcaggataagggttactatttaatacctagttgacttggcccaaactcattcacctccctggaccccaactgacccctatacaatagaatagca

SEQ ID NO: 854347 - DNA, 120 bp, Artificial Sequence
  ENSG00000267334_7 (sequence is synthesized)
ttgctggtttggtgaggttaaaaccagaaaattatgtggaggtgctggtcattgtaaaactacaagaaatttggagtactcttgccatctccacaactcatgataaataaaaacaaaaaa

SEQ ID NO: 854348 - DNA, 120 bp, Artificial Sequence
  ENSG00000267337_0 (sequence is synthesized)
atcaccaaactgttttgaaagataaaagtacttcctgaatatgtggatggtgagccacgtgaatggaagacatggagatatggactgttaacaccttgtcaaacatttattgtcccttcc

SEQ ID NO: 854349 - DNA, 120 bp, Artificial Sequence
  ENSG00000267337_1 (sequence is synthesized)
acctctaaacttctgtgataataggtgaacaggacccacgtggtgcagaatactgcgatacacactgcggaataattcagtgcagaacaacacgtggattgctcagtacaacttgttcat

SEQ ID NO: 854350 - DNA, 120 bp, Artificial Sequence
  ENSG00000267337_2 (sequence is synthesized)
cacatcctcctgttcactgaagaattatggaaatattctctgagctgctttcctccctgcccaacgagtcatctctgtgtgaaaggccaagcttataaatcctgggactgggagttggag

SEQ ID NO: 854351 - DNA, 120 bp, Artificial Sequence
  ENSG00000267337_3 (sequence is synthesized)
aggggagactggagagagtaggaagaagaaagagacattatacaaatgcaagctgttgtcacaacaatgataagaaatcaggagtcgaaagatgtggagtaagggggaatttcagagaaa

SEQ ID NO: 854352 - DNA, 120 bp, Artificial Sequence
  ENSG00000267337_4 (sequence is synthesized)
ccacaaaacacaaaataggaaacagagacaggagaagattgctatgacaaaattgcagaaggtgaaatctttggcagcctcttatttctctggagaatatgatattgtcaggctgaggtg

SEQ ID NO: 854353 - DNA, 120 bp, Artificial Sequence
  ENSG00000267337_5 (sequence is synthesized)
acattgggctttcctctacaagcggaaggatagcactggcagccatccactggcccagcaatatcctggattgagacgatatcatttgcattacttgctgaatgaaacatagtgaaaatg

SEQ ID NO: 854354 - DNA, 120 bp, Artificial Sequence
  ENSG00000267337_6 (sequence is synthesized)
actgcagataacctcaactaagtccaagatatcattttcaaatctggaccagcccttgccatctagactgaacagagattccagtttccaggagagtagatggagtaatgataaaagcac

SEQ ID NO: 854355 - DNA, 120 bp, Artificial Sequence
  ENSG00000267337_7 (sequence is synthesized)
ctcccaaaacttttgccttgctccatcaaaacttataaaatcttgggaagaggaactgtggcccatcactgatcatttcatctattaagtgaccacttattgtcttataataggagatgt

SEQ ID NO: 854356 - DNA, 120 bp, Artificial Sequence
  ENSG00000267337_8 (sequence is synthesized)
tctggaaacatgcattgaatcgaagtggctttgaggaagcatgaagagaaaacaggatggcatccttttggcaccatttcttatgctataataaggattccttctgtttacacataaaac

SEQ ID NO: 854357 - DNA, 120 bp, Artificial Sequence
  ENSG00000267337_9 (sequence is synthesized)
agaagagtttaatcaccccagcaatctttaacttggtaatgaaggccataaattaaattttaagcaaagttaaagaagatgagatgaaatataaaacaaaaacatcatcagaatctgccc

SEQ ID NO: 854358 - DNA, 120 bp, Artificial Sequence
  ENSG00000267337_10 (sequence is synthesized)
aggaacaatattcttgacaccaaaccatgacattatggggctcagttgtttgtttctagggcagccccttgttttatgtgccaaatagcatttccctaaataaaactgcatggaacaaaa

SEQ ID NO: 854359 - DNA, 120 bp, Artificial Sequence
  ENSG00000267337_11 (sequence is synthesized)
gaacaaaaatgcaagaaaaaggaacttctgtcctccaagccacgtcgtggtaaagatgcagcatacctctcagaaatttaagttaatagaaacaagcactacatgctaatgtacatggaa

SEQ ID NO: 854360 - DNA, 120 bp, Artificial Sequence
  ENSG00000267337_12 (sequence is synthesized)
tgtgtgactaacagagaaaaagtgatactgtgaggatgtaaaaagtgagctaactcgaaaagtcctcaagaagtagtgttaatgagtgcttcaagttggaaacaattttcaactggagaa

SEQ ID NO: 854361 - DNA, 120 bp, Artificial Sequence
  ENSG00000267337_13 (sequence is synthesized)
atgtgcccagtctgttggtgaagagaaagcacaggagaggtcagattatttaatatagaataaagtaagcatcagctacctaccctctaaaagatgaacctacttgagagaggagagaac

SEQ ID NO: 854362 - DNA, 120 bp, Artificial Sequence
  ENSG00000267337_14 (sequence is synthesized)
atcaaaggctgtaatatgctgagctttctaagaaaactgctttgaagggaacaggttttgcttggatggggactgggagttggagaggggagactggagagagtaggaagggaaactgga

SEQ ID NO: 854363 - DNA, 120 bp, Artificial Sequence
  ENSG00000267337_15 (sequence is synthesized)
aatcattctaatggtctaagatgttgcaagtaatttactcacggcctgaacaccagaagtgccaaaattgcctgggagttttattctgcatccaaccagtaccaggaaggaggatgtatt

SEQ ID NO: 854364 - DNA, 120 bp, Artificial Sequence
  ENSG00000267337_16 (sequence is synthesized)
acttctcgtttctctacaagtgtcagtgcaaatccagccatcaaacaaaacttagacctaaaagcttttagattacagcgattattgcagattttacatgagataaaaatgtaattgctc

SEQ ID NO: 854365 - DNA, 120 bp, Artificial Sequence
  ENSG00000267337_17 (sequence is synthesized)
aatctttgctgtttcacggccttcatttgtgatacatccagaaaactgcagcagccctatgatagagtagcctgatggttgaaaacaacaacaacatcaacaagaaagacccaactaaaa

SEQ ID NO: 854366 - DNA, 120 bp, Artificial Sequence
  ENSG00000267337_18 (sequence is synthesized)
tcctttattctttctttcattttcttccctctcactgtatattttagattgtcctgcttgactgccaggtcagacccagcacacaaagatatctgtcataagactggggagctgcagtgt

SEQ ID NO: 854367 - DNA, 120 bp, Artificial Sequence
  ENSG00000267337_19 (sequence is synthesized)
tctttttcataagaaatgaaatgcttgaaatttctcttccaaatgaatcacaaaacttccatggtcattttcattttaaattattttatgtctatgtaaactcatgcattgcctataacg

SEQ ID NO: 854368 - DNA, 120 bp, Artificial Sequence
  ENSG00000267337_20 (sequence is synthesized)
gaataatattcccagccatgtggatagtgacagagaatgagctgaaggcagcaatacttcacaggcaaagtggtacatgcatttttttttcatcttgcttttttccttttccatattcac

SEQ ID NO: 854369 - DNA, 120 bp, Artificial Sequence
  ENSG00000267337_21 (sequence is synthesized)
tcatccttttaaattctttgaatctactttttcctccctcgctcccttcctatcctccatctctatctttgtcatttattaattctttttcttctttttctccagacttggatatttctc

SEQ ID NO: 854370 - DNA, 120 bp, Artificial Sequence
  ENSG00000267337_22 (sequence is synthesized)
tatcctctcatcattctctttcatacacattctctgacttgtaggtcctaagattctcatattctaaaattaaccctctgcttaacagggtatgtttataaaccattggactgaggagga

SEQ ID NO: 854371 - DNA, 120 bp, Artificial Sequence
  ENSG00000267337_23 (sequence is synthesized)
attgcccaagttatcaaagacatcctatcaggaatgtcagccttttactctcattcatgctcagagaaacagtgctgcagggattatagcctggaatatggcagaaccagattttaaatt

SEQ ID NO: 854372 - DNA, 120 bp, Artificial Sequence
  ENSG00000267337_24 (sequence is synthesized)
tgtttgccctttgcctcctaatatccattttcccctaagtttaactgggcatatttcccagtttgccttgcaaatgtgttgccatatgactgcactttgtctaataaaatgaaactgagt

SEQ ID NO: 854373 - DNA, 120 bp, Artificial Sequence
  ENSG00000267337_25 (sequence is synthesized)
acagtggctggcaccacgtaggaggacaaatcatgcttgtggagtgagtgaataatcagaaagcgtaggtcctgataatagaagttaatgactgaagtatctacacttatttattcccta

SEQ ID NO: 854374 - DNA, 120 bp, Artificial Sequence
  ENSG00000267337_26 (sequence is synthesized)
acatcccttgggcacttaactcttagttagatactgtttaaaacacttaaaaagtattacctcacaattactctatcctaaggtagcaactctatgatcccaggtttatcattgtgccac

SEQ ID NO: 854375 - DNA, 120 bp, Artificial Sequence
  ENSG00000267337_27 (sequence is synthesized)
aatatataaattgtgtgctcccaccataagaaggcaaacggcatccctaagagctgtgcaaataaagccttcctggaatttgaatagagaaaaaaaacggtgtgaggatcgagtcacctg

SEQ ID NO: 854376 - DNA, 120 bp, Artificial Sequence
  ENSG00000267337_28 (sequence is synthesized)
tggcacattgtaataaatttgttgaactgcattggaacagagcatacagtatgcacattgtgagcaatgatataattccaacaaaatgatatcacattaaattaatgttgttaattttaa

SEQ ID NO: 854377 - DNA, 120 bp, Artificial Sequence
  ENSG00000267337_29 (sequence is synthesized)
agaacttctggactagctttcatgatggaaaaagtgttctcttcatactaccaagaaacatgatgagctgagattccagccatagttctttaggatccacagcacgacttgcagtaaacg

SEQ ID NO: 854378 - DNA, 120 bp, Artificial Sequence
  ENSG00000267337_30 (sequence is synthesized)
ttgcagaaacttgaaatgggaagctgagttctatgcctgggataatacaatgcaagaccagattatgtaggaaagctgagtttgaggacacaggaaatcctgaaaagcctaaagatctga

SEQ ID NO: 854379 - DNA, 120 bp, Artificial Sequence
  ENSG00000267337_31 (sequence is synthesized)
gagttagcaaaaatccatgggccaacttcaaacttggagggctgcagaattagtgacatccgagctgagaataacaaaagatcagtggcaataaatgcaagagaaaaaactgcatcagga

SEQ ID NO: 854380 - DNA, 120 bp, Artificial Sequence
  ENSG00000267337_32 (sequence is synthesized)
ggggtaccagggaaaaatggtttaacaacatcagaatcacgtcatggtcatcatgtctggaggcattgtcagttatgatcttcagtgcttctctgtcatttattaaatgcttccaaactg

SEQ ID NO: 854381 - DNA, 120 bp, Artificial Sequence
  ENSG00000267339_0 (sequence is synthesized)
gtgtgttctctgagcacctcgtgaccttgctgggagtgtgtctgatcagccgcttcccttgtgaccaaatatttggtcatggcagcaggagagaattccatcagtggacagctctatttt

SEQ ID NO: 854382 - DNA, 120 bp, Artificial Sequence
  ENSG00000267339_1 (sequence is synthesized)
taaggctctggctttgttttctctttcctgagaggcagtccctgcagcaggcttgagcctctctcactgacagcctgcctcgcataatgttaagcaggcatcggacacttgctggaaggc

SEQ ID NO: 854383 - DNA, 120 bp, Artificial Sequence
  ENSG00000267339_2 (sequence is synthesized)
agcttctgtgctcctgggatctactgttaagccagggtgacgccagcttgcatgctaccggaggggaagagaaaatttggacacacagggagaaaaccacagggaggagatggccatcta

SEQ ID NO: 854384 - DNA, 120 bp, Artificial Sequence
  ENSG00000267339_3 (sequence is synthesized)
caattccagaaaagcagcctcagaagaaaccaatctgcaaacatctttatctgcaactccctgcctcccaaatggagtaaagagacagaaagggaatgaatttccaagaagaccagcgta

SEQ ID NO: 854385 - DNA, 120 bp, Artificial Sequence
  ENSG00000267339_4 (sequence is synthesized)
gctgggtgcatggagccccagtagacagaaagtgaagaaaacatcaacgttctgaagttttagataggtgcaccatcccttatggataccaatctgtgctccccataaacttctgtgccc

SEQ ID NO: 854386 - DNA, 120 bp, Artificial Sequence
  ENSG00000267339_5 (sequence is synthesized)
agggtcaactggccagggacaactggctcaccaggaggcctacatagcctcttcttcaggccctaattacagctctatgcaatagggactctgccatctgacagccaaggaggtggttcg

SEQ ID NO: 854387 - DNA, 120 bp, Artificial Sequence
  ENSG00000267339_6 (sequence is synthesized)
gtttctgcacatggttttttccgctgggtcccttgaggtccatggtaacctcttcctcattctctacaggcagatcacactttgtaataagatcagaggcagagaactttgaccagatca

SEQ ID NO: 854388 - DNA, 120 bp, Artificial Sequence
  ENSG00000267339_7 (sequence is synthesized)
cactttataataagatcagaggcaaagaactctgaccagatcacactttataataagatcagaggcagagaactttgacaactatctccttgccctctggccctggggtcagggctactc

SEQ ID NO: 854389 - DNA, 120 bp, Artificial Sequence
  ENSG00000267339_8 (sequence is synthesized)
aaacaacacctgctgtcccaaacccggagaagtgtagattttggcactggtagaggaataacagctattgttgacacttaatcttgtgggcctggaatttcaactatgttttcacaactc

SEQ ID NO: 854390 - DNA, 120 bp, Artificial Sequence
  ENSG00000267339_9 (sequence is synthesized)
ggagcctattgctgccacctctgtcagggaagataaatgggcatgaataatagacagatgagtttcccaaaagcccagacaggctgcagggaacacgtaatgagcagacagtgtggttca

SEQ ID NO: 854391 - DNA, 120 bp, Artificial Sequence
  ENSG00000267339_10 (sequence is synthesized)
tactcaaaggatgaagaaagatgatacgatgtgatggacaacagagacttatatggtggggtctgggctggtctttctgaagctaagactggcaggatgagcaggagtttgccagacaaa

SEQ ID NO: 854392 - DNA, 120 bp, Artificial Sequence
  ENSG00000267339_11 (sequence is synthesized)
gaggagtggagttgttttccaaacacatctcagcacaaagtgttgtctttgctgggagctgaaaaaagatagtgtgggcagagaccattaggagacagagaatggaaaaaagccagcaga

SEQ ID NO: 854393 - DNA, 120 bp, Artificial Sequence
  ENSG00000267339_12 (sequence is synthesized)
taaatcatctggccttcctcccctatgacagactgttctgagccacagtgtttcacatgtcttcctggagatgtcccacatgacttgagcaaccagctggagctctggagaaactgtggc

SEQ ID NO: 854394 - DNA, 120 bp, Artificial Sequence
  ENSG00000267339_13 (sequence is synthesized)
catcctgaggaagaaacaggcccagagaagttgggtaactcatcaaaggtcacagagctaagagtggcagagtcaggcctggagcccaggaagtctggtttcgaatttcatgcttctaac

SEQ ID NO: 854395 - DNA, 120 bp, Artificial Sequence
  ENSG00000267339_14 (sequence is synthesized)
ctgagcactgtactgcttggtggagttctctgctagtcctacctttcaggcagaggtgatgcagcaagaaagctgccaccagatgcagccccttgatctcggactgcccagcctctagaa

SEQ ID NO: 854396 - DNA, 120 bp, Artificial Sequence
  ENSG00000267339_15 (sequence is synthesized)
ctgggcttcagtagaagaggaagaggcttgggtttaattgaaggtggcctgagacatctgtgaggaacagcccttttagagacatatcccctacaaataaagcatcagaattattatcct

SEQ ID NO: 854397 - DNA, 120 bp, Artificial Sequence
  ENSG00000267339_16 (sequence is synthesized)
agatgggcaaggatgggtgtcagccattggagagctgttccagggagggagcccgaccactctctggccttagccagcccagtcagcactggagaaagacctcatccaacgctgaaatag

SEQ ID NO: 854398 - DNA, 120 bp, Artificial Sequence
  ENSG00000267339_17 (sequence is synthesized)
atggtgctagtgtatgcattacaatagcagaaacagggtcttgctatgttgaccaggctgatctcaaacttctgacctcaagcagtccttccacctcagcctcctgaaacactgggatta

SEQ ID NO: 854399 - DNA, 120 bp, Artificial Sequence
  ENSG00000267339_18 (sequence is synthesized)
caggccagagccaccatgccaggctatgaagttttattttaagtttcgagatgtggggatttcttttttaaagcagcaagtactacctgaactaaaacgggtgattttgcaacttgctac

SEQ ID NO: 854400 - DNA, 120 bp, Artificial Sequence
  ENSG00000267339_19 (sequence is synthesized)
ggattatggaaatagttggcatctatattggtgaggtacccaccaaaactcaaacagaaggaatgccattttggagaacgaatctcaactttaaccttctttcatccgtgggagtaaaga

SEQ ID NO: 854401 - DNA, 120 bp, Artificial Sequence
  ENSG00000267339_20 (sequence is synthesized)
tgcctggtggatggctaagaaagtggccctgcctaacacacacgtacggagagacggagtttgcagcaagacagtgaattatctgcttctcagtggtggcagggccctgtgagtagaatc

SEQ ID NO: 854402 - DNA, 120 bp, Artificial Sequence
  ENSG00000267339_21 (sequence is synthesized)
cttacatgtcctcttccatgggcttgtgggataagagcagagcagcctgtaggcctgtccatccccagccttgaggtaaatcccaccagtgaacaagatccacccatccacccagagctc

SEQ ID NO: 854403 - DNA, 120 bp, Artificial Sequence
  ENSG00000267339_22 (sequence is synthesized)
cctattagccttgtgagagaatggccagaaataaaacagaaactcctttattcacaaatccctaatttataaatactttgaaacaatgaagaattgccagctgctgtggtaaacagagca

SEQ ID NO: 854404 - DNA, 120 bp, Artificial Sequence
  ENSG00000267339_23 (sequence is synthesized)
cagaagagaggtgagtaaaggttctagttagcactcgctgagcactttgtgctggcacttttctaaagattttgcaaatgttaactgatgtaattctcacatccattctctggggtggtt

SEQ ID NO: 854405 - DNA, 120 bp, Artificial Sequence
  ENSG00000267339_24 (sequence is synthesized)
tcgtgatccgcccacctagccctcccgaagtgctgggattacagaggtgagccaccacgcctggcctctggggtggttttcacaaaggaggaaaccaaagcacaaagcctaggtggctcg

SEQ ID NO: 854406 - DNA, 120 bp, Artificial Sequence
  ENSG00000267339_25 (sequence is synthesized)
ctctaggtcaacaacaagccaatgccagagctgggatgagaacccaggttctgtgtctgtcatgaacatacactgcgtggctctgaagagaacagagaaagtcaaaaggagataatttct

SEQ ID NO: 854407 - DNA, 120 bp, Artificial Sequence
  ENSG00000267339_26 (sequence is synthesized)
tatagactttaaataatttttccagagaaattcaagaaaacatcacatccatagaaacaaaacaaagccaagttgctatataaaagaaacaatatgtaaatgagaacaaatcattggaaa

SEQ ID NO: 854408 - DNA, 120 bp, Artificial Sequence
  ENSG00000267339_27 (sequence is synthesized)
aagggtcagtttagggcataattaaagtcaattactttctgaaaggccatcaggacaactgttagagaaaatgatagcagccccgcacttgctgtaggaattattagcttgtcagcctcc

SEQ ID NO: 854409 - DNA, 120 bp, Artificial Sequence
  ENSG00000267339_28 (sequence is synthesized)
aggcttatggagacaaaggatcaaaaagttagagagatccaggtgttcacctatttgttcactaattcttttattgtgagtgtgcatgtgtgtgggtgggtgtgacatttattatgaacc

SEQ ID NO: 854410 - DNA, 120 bp, Artificial Sequence
  ENSG00000267339_29 (sequence is synthesized)
agagggcaggagccagtgacacagtggtgcagagaataatcatattccctgccttcctggggtcatacagcttggtggaggacacagatgtgaattcggtaatcactccaataaatattc

SEQ ID NO: 854411 - DNA, 120 bp, Artificial Sequence
  ENSG00000267339_30 (sequence is synthesized)
gggcagagaccattaggtgagacgcttgatatgagatacaacctcaacaggtggaagaagatcatgagagatgaagagaggaatatagtacagcagagaggacacagaagctgacgtcag

SEQ ID NO: 854412 - DNA, 120 bp, Artificial Sequence
  ENSG00000267339_31 (sequence is synthesized)
ggtgtctcagtttgaaaccagtggccaccctgttcctctcccatgtggtcccatcatgggcctctagggtctgggataagaggttaatgaatatctcataccctaagcaggggtggtccc

SEQ ID NO: 854413 - DNA, 120 bp, Artificial Sequence
  ENSG00000267339_32 (sequence is synthesized)
tgcactttagcaaaaagttaaggaactagggaaaagagatggaaataataaagagatgggacaaagactttgaagaccaaagcccctgggctattctcttttttaaatttttttatttaa

SEQ ID NO: 854414 - DNA, 85 bp, Artificial Sequence
  ENSG00000267339_33 (sequence is synthesized)
agcccctgggctattctcttttttaaatttttttatttaaattttcatttatttttatcaagatatttggcctaaagcaatcctc

SEQ ID NO: 854415 - DNA, 120 bp, Artificial Sequence
  ENSG00000267339_34 (sequence is synthesized)
caccacgtccagcctcctgggatatttctcaatgaaacattggatgccaagattggttttgtgccacatgccaatttcacagaagccagtctatgagccaccagctctactcagcaatta

SEQ ID NO: 854416 - DNA, 120 bp, Artificial Sequence
  ENSG00000267339_35 (sequence is synthesized)
cagtttctggaactttggctaaattcctgtagatgcaccactgcttgtggcctgactctttgccacccaagtgcgctcagcctcccctggggagtctgccaggcttgcatggctcccact

SEQ ID NO: 854417 - DNA, 120 bp, Artificial Sequence
  ENSG00000267339_36 (sequence is synthesized)
gcacttgctgtgctgggaccgaaaacagtttttgtgcccctagcttaactccactggattcatagaggctttggcctcctcaatggctgtcctgggacagggaggctggttagcacaatt

SEQ ID NO: 854418 - DNA, 120 bp, Artificial Sequence
  ENSG00000267339_37 (sequence is synthesized)
agtcttgtcacaaaatattaaacctggacctgatcaagcatctggactggcttatggatatagagaaaatgtaggggatagatgagcacgggaaatgtctccgtggggcaaaattcacga

SEQ ID NO: 854419 - DNA, 120 bp, Artificial Sequence
  ENSG00000267339_38 (sequence is synthesized)
aattcagattgttggacactctccaggacaaaaggtctagattcttcaaaaacaacaacatcgaaaaaaaaaaactgccagaaagaaaaaatacagagggagaaggacacagaacacatt

SEQ ID NO: 854420 - DNA, 120 bp, Artificial Sequence
  ENSG00000267339_39 (sequence is synthesized)
tatgagtcttttcaccctcatttcgttgaagattttattggccgaagaaccctcagtaggcacgaaattcattctcacaagcagagagatgcattatgctccatttattgctcatcctaa

SEQ ID NO: 854421 - DNA, 120 bp, Artificial Sequence
  ENSG00000267339_40 (sequence is synthesized)
attataaacatttccagtgaatgtaaaggaagatatgattgaaaaggactctgtgaagacaggatgtttctgtacagtccttgtatctgctcacctattccaaactttccagagatttta

SEQ ID NO: 854422 - DNA, 120 bp, Artificial Sequence
  ENSG00000267339_41 (sequence is synthesized)
ccagaggtttaagatattctcctgagggtttgctgtagagagatttttcttaactaaggagtgcaagtagcaagcaatagcccacccagttggagacaaaaaagaagggtgtcagtgttc

SEQ ID NO: 854423 - DNA, 120 bp, Artificial Sequence
  ENSG00000267339_42 (sequence is synthesized)
tgaaagaagaacaaggagagtagatctctctggatcttctgatgctcacagcaaagagctcaaggtatctgagtcaactcttgaggcttcttcgaacagagggatgaagagagaatatgg

SEQ ID NO: 854424 - DNA, 120 bp, Artificial Sequence
  ENSG00000267339_43 (sequence is synthesized)
tccattagaaatgcttcttcttccatatcaaatattgtgagatagcctgaaacacctttcaacactttactacccttctccaaaattcaacagatatgatttccacggactttactcaca

SEQ ID NO: 854425 - DNA, 120 bp, Artificial Sequence
  ENSG00000267339_44 (sequence is synthesized)
ccaacttgccgggttgaaaacagacaacctccatggagcagggacttcaattagttaattccccatccccactgtcacttactaacatgggattctgattaaaaattagattctctgcaa

SEQ ID NO: 854426 - DNA, 120 bp, Artificial Sequence
  ENSG00000267339_45 (sequence is synthesized)
tactgttaagccagggtgacgccagcttgcatgctaccggagggttctttttctaggaaatccatcctaagatgagaatctcatcagaaacttcccttccaggcctgaagccttccagta

SEQ ID NO: 854427 - DNA, 120 bp, Artificial Sequence
  ENSG00000267339_46 (sequence is synthesized)
gcctctttgtggacatgtcagagctttggtagagtctgaggctcaagttcaaatcctgagcaaggtcttaaatattcctgctcagccggattcaccctttgggatgtgagtactagtgga

SEQ ID NO: 854428 - DNA, 120 bp, Artificial Sequence
  ENSG00000267338_0 (sequence is synthesized)
gatcttcagtcttatttagaaaagcttaatgttaaagatctagtttattcaaaactaaagataaggagtatgagaatttctatttcggagtgtaaaggaggagatgtttccttggcttct

SEQ ID NO: 854429 - DNA, 120 bp, Artificial Sequence
  ENSG00000267338_1 (sequence is synthesized)
ctgagcctacaggccttccttgctctttaaggaagtagagagagagaggaaagtaaagaagccccacccagtgcttgttgaaggcagaaagttgttgaaagcaatccgggatttgaacag

SEQ ID NO: 854430 - DNA, 120 bp, Artificial Sequence
  ENSG00000267338_2 (sequence is synthesized)
ccattctgaggtgttacgtatttcttgaatggggattttaggaaaagtttctgtatttctgtgctcattttgttgacctctgtatgtgcaaaatctctaagggggtgtttgggcacttag

SEQ ID NO: 854431 - DNA, 120 bp, Artificial Sequence
  ENSG00000267338_3 (sequence is synthesized)
atttcttggatgcagatttgtttgtgtatgaaacaaattttaaattgtttcgtatacactggatttaaaatagtttagtttactaaagtgttttaatgttttcatcttaattttcagttc

SEQ ID NO: 854432 - DNA, 120 bp, Artificial Sequence
  ENSG00000224165_0 (sequence is synthesized)
cgagtttctaaggcctcgtcccctgacgggaaggcggcgttggggggcggctgggtttacccttcgaggtgagcgcgtccttgttttcagggacgcccggacgggaggcgtttgttgctt

SEQ ID NO: 854433 - DNA, 120 bp, Artificial Sequence
  ENSG00000224165_1 (sequence is synthesized)
cagccgagtggtggaaatgtattggctcttcagggcgggtctgatctctgatggatttgttgactcctctgtgggagaaaggcttggtctactgcaggtgttaacgctaagccaggctgg

SEQ ID NO: 854434 - DNA, 120 bp, Artificial Sequence
  ENSG00000224165_2 (sequence is synthesized)
agctgtggacgtcagtttcctcagctccccgctgttcgcttcgaacgtgacctcgacgtctgctctccccttccctttagctgacaatgtgacagtgcttgaataaaagtcagtctgaca

SEQ ID NO: 854435 - DNA, 120 bp, Artificial Sequence
  ENSG00000224165_3 (sequence is synthesized)
gacgtcatctgcaggccctggagacgcgactgcagttaccgagtttctaaggcctcgtcccctgacgggaaggcggcgttggggggcggctgggtttacccttcgagagtccgtgtgaga

SEQ ID NO: 854436 - DNA, 120 bp, Artificial Sequence
  ENSG00000224165_4 (sequence is synthesized)
accgggacacctgtcctgttgaaaagggggacgcaaaagctgaaaatgcccggaaggatatggcttccttgaactgcgggacgtgtagctgcagctgtggggtggaccatggaaacaggt

SEQ ID NO: 854437 - DNA, 120 bp, Artificial Sequence
  ENSG00000224165_5 (sequence is synthesized)
aggaactctctgctgagtggcagatggccttgggcagcgatgagtattacattgttttccctgcgtgtctttcccgtcagctccatcagaagtaccagggaggactctgacaggcctggc

SEQ ID NO: 854438 - DNA, 120 bp, Artificial Sequence
  ENSG00000224165_6 (sequence is synthesized)
ctgggagttagaaaacaccaggaaaagggttgttcccacctggaagagaaatgctagagcaacacaccatcttcctcaacattatcatctgtctctggatgacaatgaaattcacaggac

SEQ ID NO: 854439 - DNA, 120 bp, Artificial Sequence
  ENSG00000224165_7 (sequence is synthesized)
actgattgtctttttatcccattggacatcgtgatagtctacaatactgataacaccatgatgataggatctgaagacctggaagtaccagatcagcaggaagaagagatggaagcaacg

SEQ ID NO: 854440 - DNA, 120 bp, Artificial Sequence
  ENSG00000224165_8 (sequence is synthesized)
ccatggaccttcacgtccttcagagtgtgggtgggcttgggctttgcagtgagagcaagtatcacccaggatggagatgggaggtaatgggtggccccgacaggtgcctcctactgctgg

SEQ ID NO: 854441 - DNA, 120 bp, Artificial Sequence
  ENSG00000224165_9 (sequence is synthesized)
cagcaaggagagagtgaagaggcagaatttccttggtctagactagagtctgggtcatgggcatggcagtgcttgagcttttgaccagaagcaagtggacatggatttgagcttcgggta

SEQ ID NO: 854442 - DNA, 120 bp, Artificial Sequence
  ENSG00000224165_10 (sequence is synthesized)
agaagggagacttctctccagggaccataggggctggcagctgaagaaggtgacttggcccctctctagagggtgaacgcaggatcaattcaaggccatgaagtggatgcagctgggaga

SEQ ID NO: 854443 - DNA, 120 bp, Artificial Sequence
  ENSG00000224165_11 (sequence is synthesized)
gcctgcttggtgcttttaaacctcaacatgtcaaccgcaaatacctcaaacactgctcacaccgtggtaaaatctagttgcgaaacctgtcccgcggcagccttctccatcccaggtgcc

SEQ ID NO: 854444 - DNA, 120 bp, Artificial Sequence
  ENSG00000224165_12 (sequence is synthesized)
caggccccatctcctgggagcaggcagctctccccaccccgattcatgtccctcctacagcccaaggcaactccctgccaccttggtgaatgaagcacatcatgctgcccaggcttctga

SEQ ID NO: 854445 - DNA, 120 bp, Artificial Sequence
  ENSG00000224165_13 (sequence is synthesized)
gctgtttgccgtgttgcggagatgcagccttcagccttggatacccacccactcctctacttgggcattgttttcacaggctgctcttccctgtagcttcagagaagtaggtcaagtagg

SEQ ID NO: 854446 - DNA, 120 bp, Artificial Sequence
  ENSG00000224165_14 (sequence is synthesized)
ttaactcgctttaagggagaagtgccaggggttcaagtcacccagcctggaggcaggaatcctgggttctatttttggcttcacagctaatccgctgtgtgacagtcgttaggagctcat

SEQ ID NO: 854447 - DNA, 120 bp, Artificial Sequence
  ENSG00000224165_15 (sequence is synthesized)
tctcccctctgggtctccctgagcccttctctaggtcccacaatttttttttttttccctgaagctatattccctggactgtcatattcttccctcttccctccctctgggaggtgcttt

SEQ ID NO: 854448 - DNA, 120 bp, Artificial Sequence
  ENSG00000224165_16 (sequence is synthesized)
aaagccgttggctgctcaaggctggcgccctaggcaagaggggctgcagttgttgtagctgatgaggaggagataagaggcttttctgtagacacagttgagctgatgggctgtgtgagg

SEQ ID NO: 854449 - DNA, 120 bp, Artificial Sequence
  ENSG00000224165_17 (sequence is synthesized)
ctggagtgccaggaaaccagactcctgtaactacaggacaggccctggtgatgtgatgatggggatgtgacggggatgctgaagcctggaatgcgagtgggggttcctgcgttttatgca

SEQ ID NO: 854450 - DNA, 120 bp, Artificial Sequence
  ENSG00000224165_18 (sequence is synthesized)
atggctgtagatttcctcccacttctaagcctccctttctgtgacacgcagggaaattcagtctctagttcatatggaaacttgggacctcactgtgctgcttgctcttggcagaggata

SEQ ID NO: 854451 - DNA, 120 bp, Artificial Sequence
  ENSG00000224165_19 (sequence is synthesized)
tcatttgagctgtcatagcagaggaccacatttaccagggtgcactttggccaaagaatagtaacctttctaaggcttagttcctctggcctgaccaaaccagtcccaggaggcccctgg

SEQ ID NO: 854452 - DNA, 120 bp, Artificial Sequence
  ENSG00000224165_20 (sequence is synthesized)
gttccagtcaaggtcatgggagaggcccaccatggatgaggcctgggggagcagggtggaaattaagtgcccaggtatgttatggatagcctgcagccctctccaatccctaccctccaa

SEQ ID NO: 854453 - DNA, 120 bp, Artificial Sequence
  ENSG00000224165_21 (sequence is synthesized)
acccagtgaagggggacatgaaacaggtgaggcagaggagcaaatgcgggtcaagaattccgaactatacttgacttacagtgcagctgtgatgtgcacattggtgtgtgccacgagaca

SEQ ID NO: 854454 - DNA, 120 bp, Artificial Sequence
  ENSG00000224165_22 (sequence is synthesized)
gcatagtgtggtggaaagaaaatgggttttgaacagagtgtcctgggtttgaatctctgcttgcccatgtactagagagtagtcgaacctctctgggcctcaatttcccagatgtaaaat

SEQ ID NO: 854455 - DNA, 120 bp, Artificial Sequence
  ENSG00000224165_23 (sequence is synthesized)
gcctggcataggcatatcacattagggcactcagtaaatgtgatgtcttttctacttgccttcctgtcataccggtccccatgttttggatttctgcagctaaagttaagaagcttttta

SEQ ID NO: 854456 - DNA, 120 bp, Artificial Sequence
  ENSG00000224165_24 (sequence is synthesized)
agataggaatcccaattctcactttgcctccttttcatagctcacctaaatggctgacttctgttcagcacctcttcatgggtgcactattctggagagggagatcctagagttcccacc

SEQ ID NO: 854457 - DNA, 83 bp, Artificial Sequence
  ENSG00000224165_25 (sequence is synthesized)
ggtgcactattctggagagggagatcctagagttcccaccttctgtttgtttgtttttgtttgtttgtttgtttttttgtttg

SEQ ID NO: 854458 - DNA, 60 bp, Artificial Sequence
  ENSG00000224165_26 (sequence is synthesized)
gcccttctgttctagactgtgagcccgaagactgcattctctcccaggctcagtttcctt

SEQ ID NO: 854459 - DNA, 120 bp, Artificial Sequence
  ENSG00000224165_27 (sequence is synthesized)
gagcccgaagactgcattctctcccaggctcagtttccttatatacataatgccaccgtggtcaacctctacagcatcatttcctgcacatattttgtctaaacaccttgactgcacctc

SEQ ID NO: 854460 - DNA, 120 bp, Artificial Sequence
  ENSG00000224165_28 (sequence is synthesized)
agagaagctgggtatgggccggattcctttgccatttaatgcatacagcccgcagaacaatgttgtctgctgagcccctgggggacagcagagaattggagcctcttttcatggttctca

SEQ ID NO: 854461 - DNA, 120 bp, Artificial Sequence
  ENSG00000224165_29 (sequence is synthesized)
caggccatgtgacacacagatgggagaagctggcatctgcagggccaaaggcctctggccaaggcacccataccaaaggggacagactggccaaagcagccttatccctatctccttagg

SEQ ID NO: 854462 - DNA, 120 bp, Artificial Sequence
  ENSG00000224165_30 (sequence is synthesized)
aaccacattctagtgggatctgtttggtgatacaggttgggagcatgggtggggaagcctaccccaggcctgattcagtcatgaggatccaggagcaccctccaatggctgttgctaact

SEQ ID NO: 854463 - DNA, 120 bp, Artificial Sequence
  ENSG00000224165_31 (sequence is synthesized)
acagttgccagataaaacttaggtggaatctgagtttcagaaaacaaacaaaaaatgtttttagtatgtctcacctactgcctggggcgtacattacaaatcagtccttatatatttgaa

SEQ ID NO: 854464 - DNA, 64 bp, Artificial Sequence
  ENSG00000224165_32 (sequence is synthesized)
cctggggcgtacattacaaatcagtccttatatatttgaaactcaaattacattgggcatcttg

SEQ ID NO: 854465 - DNA, 120 bp, Artificial Sequence
  ENSG00000224165_33 (sequence is synthesized)
gctaaccctagagctgacaggaaggcttttgggttgggcggttttacggggaaaatactctgtaacagcgtttttcctttactctcacatcacaacaatcaacgcagaagagttatgacc

SEQ ID NO: 854466 - DNA, 120 bp, Artificial Sequence
  ENSG00000224165_34 (sequence is synthesized)
aaatgtcggggtggggggggggcgtttccccacacaccaagcagctgggtgtcctctaatgcagtctgacactgaaaagtagtgtcagatcccacattggagggctcagtccccaagact

SEQ ID NO: 854467 - DNA, 120 bp, Artificial Sequence
  ENSG00000224165_35 (sequence is synthesized)
gttcccccaacaccagttgtaagtccagacctccagaacttctgaccaactggcttcaagttggggttcccgtgactccctcttcgggttcaattaatttgctgaagttgttcagaggga

SEQ ID NO: 854468 - DNA, 120 bp, Artificial Sequence
  ENSG00000224165_36 (sequence is synthesized)
ctgaaatttacaaaggtcagagatggtagaggaaagagtatggtaagtgtggtgtgcaagcccatctagtgggagcacagttgaggagggaacaggaggtggaagccaggtgggaaagga

SEQ ID NO: 854469 - DNA, 120 bp, Artificial Sequence
  ENSG00000224165_37 (sequence is synthesized)
agtctggggccctgttggaaggaccttgaatgctgtgttgttatgatagacagttttcctccatgattcctggctcataactcccatagcccttgttacagtcttttgttgtaatattga

SEQ ID NO: 854470 - DNA, 120 bp, Artificial Sequence
  ENSG00000224165_38 (sequence is synthesized)
gtgtgttaggccacaggaaacagactctctccttctcctgccctcctttcacctgcccccaggcaggactctaatctttcctggactttccaatggttgttcttaagaccattcccagag

SEQ ID NO: 854471 - DNA, 120 bp, Artificial Sequence
  ENSG00000224165_39 (sequence is synthesized)
aggttcccaccctataccccgggggaaggaatgctgacgttataaagctttcataaaaacccaagcggacagggttcagggagctttgggataactgaacacatcgaggttcctggaggg

SEQ ID NO: 854472 - DNA, 120 bp, Artificial Sequence
  ENSG00000224165_40 (sequence is synthesized)
tggtgcctgggggagggcttggaagccctgtgcccctcctcccacacctgaattgttttttctttttcccttcatgaaactcttccctgctccttgtatgtgcctccatagtcattataa

SEQ ID NO: 854473 - DNA, 120 bp, Artificial Sequence
  ENSG00000224165_41 (sequence is synthesized)
cgcgaaccccaaattctcacacgcaccccataacgttccgccggctcccaggcccggctgggggaactaaactttcatcctccatctcccggtcccggacggccccctagaacgcgggca

SEQ ID NO: 854474 - DNA, 120 bp, Artificial Sequence
  ENSG00000224165_42 (sequence is synthesized)
ccccgctcctaagtaccttccacagtgtctagcatgtcatagggagtgattggtaaatagctgatagaaagaacaaattaaactatcagccttgtgaattttctaaatagaggtctgtac

SEQ ID NO: 854475 - DNA, 120 bp, Artificial Sequence
  ENSG00000224165_43 (sequence is synthesized)
agggtgctctcagaatccagtcctgcagccaaggaggaagtccttccttccttcattttaccaggctgtttcaaaccaaggcactgggtttttttgaaacttatgatcagcaggaagaag

SEQ ID NO: 854476 - DNA, 120 bp, Artificial Sequence
  ENSG00000224164_0 (sequence is synthesized)
ggaactgctagcaaataggacagaagccaaggaagccgaacatttgagatacgtgaaattccggtaataagggacaaaatggttaagctcttgatttgagactaaggatggagatggggc

SEQ ID NO: 854477 - DNA, 120 bp, Artificial Sequence
  ENSG00000224164_1 (sequence is synthesized)
catttagaatgcccagattcaagaggcaagtagaaaggagagttgacgaagggtcccgagcagggacagctggaaaagcagagctggtggaacttggagagctgtggcttcctgtggttg

SEQ ID NO: 854478 - DNA, 120 bp, Artificial Sequence
  ENSG00000224164_2 (sequence is synthesized)
gtttattgttgctattggctttgtttgtgggtttatttcttattttgggacttttagcacataaagttggagataatgaatgggaacagaatgggaaagagtggatataatgatacacca

SEQ ID NO: 854479 - DNA, 120 bp, Artificial Sequence
  ENSG00000224164_3 (sequence is synthesized)
catacccatcacctactttcaataattacctacactttcccagtcttcttccatgtattccccatactctattgtctatttttctggagaattttgaagtaaatctaatatatcatacca

SEQ ID NO: 854480 - DNA, 120 bp, Artificial Sequence
  ENSG00000224164_4 (sequence is synthesized)
agacgttgctgctgtggcttaggagaggagcagcccagtctgactcgtggatttttacccactgctgtcagaacacactttctgttagaatcccccaagacctcagacctacagcctgcc

SEQ ID NO: 854481 - DNA, 120 bp, Artificial Sequence
  ENSG00000224164_5 (sequence is synthesized)
ccttaggtggttcactgtcttcatcgaaacgtttgccgccgagtcgcacgtccttggcaccaaaaagcgttgagtccatttttcaaagctctaatgtgctctttaaaacacagttatagc

SEQ ID NO: 854482 - DNA, 120 bp, Artificial Sequence
  ENSG00000224167_0 (sequence is synthesized)
ggaaaagccaccgagaggcctgaccctgaggggtcggggggagatgcgggcgcgtagtagagggaagcgactgaggagcggggactgggcagcatttgaatggatgcgggtgccgctggc

SEQ ID NO: 854483 - DNA, 120 bp, Artificial Sequence
  ENSG00000224167_1 (sequence is synthesized)
acccgggaagacgcctgggagccggcgctggggagccgggcatgggctgggatgtgtttggattccaatctgggcctgacaccagttcagtgacctcgggaagttccccaaccctgcggg

SEQ ID NO: 854484 - DNA, 120 bp, Artificial Sequence
  ENSG00000224167_2 (sequence is synthesized)
cgcggcgactggctcctggtgggtattaaagacgagtcgggaaagaagagcagggttgcctgctgaggaagcttttcacagcatgagaccttccgcaggctcaatcaaaccttcaatggc

SEQ ID NO: 854485 - DNA, 120 bp, Artificial Sequence
  ENSG00000224167_3 (sequence is synthesized)
cccgaaagacatcttgattgaaacctcatgagagactctgagccagaaaacccagcaacttagaacccagatacctgaccatcagccactgtgtgaaataataaatgtttgttgttttaa

SEQ ID NO: 854486 - DNA, 120 bp, Artificial Sequence
  ENSG00000224167_4 (sequence is synthesized)
ccccggccgagcctgcgcactggggacgcagtcggccctcgcgtcctctgctgcccgaaacaagcgcgtggaaagcttggtcggggcttctcacagccgcgcgcacagactggttctccc

SEQ ID NO: 854487 - DNA, 120 bp, Artificial Sequence
  ENSG00000264587_0 (sequence is synthesized)
gaagtcagagactgcatcagagaaaaactggcatacaaaagattctgctgagtactgaaggcaaaattggactgagccagatgaaagagtattataataataagagtggtcccagcagag

SEQ ID NO: 854488 - DNA, 120 bp, Artificial Sequence
  ENSG00000264587_1 (sequence is synthesized)
aagacaacacttgaggaagaagaaagtatgactgataatatgctcacggccctgcaaatgaacaattgaagtttttagtttaacttgtccaggattacgtagctacatgaccaagatgga

SEQ ID NO: 854489 - DNA, 120 bp, Artificial Sequence
  ENSG00000264587_2 (sequence is synthesized)
accttctccagaaaaggtcccagtctatacccccgggagaagaaatgctgatttcacaaagcttccataaaaactcaagaggaatgggttccagagcttctggaagcctgaagatgtgga

SEQ ID NO: 854490 - DNA, 120 bp, Artificial Sequence
  ENSG00000264587_3 (sequence is synthesized)
agactctggagggtggtgcactcaggaagggcatggaagttttgcacagctgtctccatgcctcatcctccacatgtctttacatctgtatcctttataatatcctttacaataaaccag

SEQ ID NO: 854491 - DNA, 120 bp, Artificial Sequence
  ENSG00000264587_4 (sequence is synthesized)
aaaacaggcccccacacaggaggagaatgacacaatgaacccacatttcaagctggtttccaagtgtttttggagtctcggcttttgacaggtcccaatgctactgtcaagaggaggtat

SEQ ID NO: 854492 - DNA, 120 bp, Artificial Sequence
  ENSG00000264587_5 (sequence is synthesized)
ggccagatactcaaatttgctccagactttgctgtatatcagatgatcccatgatgcttgcagcctggaacagttccttataaagggagagaggggacaaaatcacttatgctgaagcaa

SEQ ID NO: 854493 - DNA, 81 bp, Artificial Sequence
  ENSG00000264587_6 (sequence is synthesized)
gatcagatgaacaattgaagtttttagtttaacttgtccaggattacgtagctacatgaccaagatggattcaaaacctgg

SEQ ID NO: 854494 - DNA, 120 bp, Artificial Sequence
  ENSG00000264589_0 (sequence is synthesized)
acacgccgggcgccctgcgctccgagcgctgagaaagaaatccgccccgagatgcacctgcagccccgcgcccatccgtgcgtggctgcggctgtgcgtgcccgcgaacggggaccagcg

SEQ ID NO: 854495 - DNA, 120 bp, Artificial Sequence
  ENSG00000264589_1 (sequence is synthesized)
gccgccgagtccgtccacatcgccaggccaggagtcagaacaaggacgggcctgtgatgtgtctgtctatgacgaggaggacaatgtcctaaggaatggagaggaagaaagtgaagggaa

SEQ ID NO: 854496 - DNA, 120 bp, Artificial Sequence
  ENSG00000264589_2 (sequence is synthesized)
ccaggtccctggattccatgtggaacagtagcccaggatgtgcactatggactgttacaagagagagacatgatcttccttaaggcattgatttgtcatgagtctctttgttatagccac

SEQ ID NO: 854497 - DNA, 120 bp, Artificial Sequence
  ENSG00000264589_3 (sequence is synthesized)
ttaacgttaccttaatacacccacttcatggataagtaaaactgaggcttggagaagcccacattgacacagcaaagaaggctggggctcttgtgctggttaaatggaccttgatgtctt

SEQ ID NO: 854498 - DNA, 120 bp, Artificial Sequence
  ENSG00000264589_4 (sequence is synthesized)
ccaaatgttttcatgctggattctgagccactctcctggctgcaactctgaggccgggcagactttccgctggaaagagaactcaaatactggtcctggggacaggaggaggcagtgctg

SEQ ID NO: 854499 - DNA, 120 bp, Artificial Sequence
  ENSG00000264589_5 (sequence is synthesized)
gggtcttctcacctgagccgcagaaagaggacaaaggccaccaggagggccaccagggagatacagtggcccaggtagttgatgatgactgcgacatggtagtgcaccttgctttttttc

SEQ ID NO: 854500 - DNA, 120 bp, Artificial Sequence
  ENSG00000264589_6 (sequence is synthesized)
tggagcaggagagaggggcagagagccaccaaggagctactggccaccaaggagctactccataggccttcctgttggaattacagaacccacttgaaaccagagatcaagtccagccct

SEQ ID NO: 854501 - DNA, 120 bp, Artificial Sequence
  ENSG00000264589_7 (sequence is synthesized)
atccaccaggcatcccaggagaagccaagaccctatgcccagttccgcccggccaccaaggcccttctgaaggagcaccctcattggggaacctctccagaggctgctacagaagctctg

SEQ ID NO: 854502 - DNA, 120 bp, Artificial Sequence
  ENSG00000264589_8 (sequence is synthesized)
ttcttggagctggtttccaggcagaggctttctggaacatggcagctgcccttggagactgctcctctcatcccagttctttccgtagaagagactgaataattggccacgccacgcagc

SEQ ID NO: 854503 - DNA, 120 bp, Artificial Sequence
  ENSG00000264589_9 (sequence is synthesized)
cggtatctggaacctgggtctgcctggctttaagctccctcttttccctgtttcccagggacatttctttttttgggtgggggagggatggagtctcactctgtcgcccagtctggagtg

SEQ ID NO: 854504 - DNA, 120 bp, Artificial Sequence
  ENSG00000264589_10 (sequence is synthesized)
cgtgtccggccccctgcgacatttcttgggggacaagcaggaattgaaagcagaggcactctctggggtggtctcacgccactttgggcccaggagcctcgggggacctcctgctgggac

SEQ ID NO: 854505 - DNA, 120 bp, Artificial Sequence
  ENSG00000264589_11 (sequence is synthesized)
aatagcgcccaagagggctttcctccaagagcctgagggagaatcaggccaaaccattcccgggggacaaagtctcagtgtgcctccctgagcagtcgggcctgggccgggttcaagccc

SEQ ID NO: 854506 - DNA, 120 bp, Artificial Sequence
  ENSG00000264589_12 (sequence is synthesized)
tgtctctcatcggccacatcagcatcatgcaacctgagaagacagctggagagacagcctgagggatggctgctgataccctgagacaaatacatcctgcgacacccagacagaagccag

SEQ ID NO: 854507 - DNA, 120 bp, Artificial Sequence
  ENSG00000264589_13 (sequence is synthesized)
acactgtgacatttccaataacaaccagagttctggccagcattatttagagagacagcaaggccttaagaggcacccaggaacaccctgagaggtggccagtgatacctggagaggaga

SEQ ID NO: 854508 - DNA, 120 bp, Artificial Sequence
  ENSG00000264589_14 (sequence is synthesized)
gtcagcagcacccccagggacagccagtgacaccccgaccgatggccacgataacagcaaagcagctgggatgtccgaaggacaaatgggcacagctacccctcgggccctgaccagcac

SEQ ID NO: 854509 - DNA, 120 bp, Artificial Sequence
  ENSG00000264589_15 (sequence is synthesized)
tccatctccatccagtctggagacctaagaccagcaggcaccccgccctaaggagggtggcacagcgtggtacttggcagaggccactccgctgtaccctcagtgatctgaattgaataa

SEQ ID NO: 854510 - DNA, 120 bp, Artificial Sequence
  ENSG00000264589_16 (sequence is synthesized)
gcaatttgtgcccggctgactctgactggactctctgcaggacaccacctcgtcccaggcgctgcagtgccagatccgtcctgatgcctctctgggttggtggcaatgagacctcccttc

SEQ ID NO: 854511 - DNA, 120 bp, Artificial Sequence
  ENSG00000264589_17 (sequence is synthesized)
caagctccccactggtgcccactccattctggcacgtcctctccaccgaggcttccagagctactcctcttaccctgcagtgggcactcactccagcccctcgatcctcaaagggtggcc

SEQ ID NO: 854512 - DNA, 120 bp, Artificial Sequence
  ENSG00000264589_18 (sequence is synthesized)
cctggcccagcaacagcacgcagaggagcacgcagagatcttgaggaaagtggaatgtatgccctacgccaggcccatggaatcggagcttggttttaggaaaaagcacctctgcagttc

SEQ ID NO: 854513 - DNA, 120 bp, Artificial Sequence
  ENSG00000264589_19 (sequence is synthesized)
agaagccctggtccaaccaccactcacctctccccacacgctagcactgatgctcagcttgggagagtccccagagcccccaggggtcagggaccgcactggccttcggcagagccacag

SEQ ID NO: 854514 - DNA, 120 bp, Artificial Sequence
  ENSG00000264589_20 (sequence is synthesized)
ctggacagccatccttcaacacggtccctcgcccttctgctgagccccaaggcagtcctgtcactggctgtgtggctttcggtgagtcacctgactcctctgagactcaacatcctcatc

SEQ ID NO: 854515 - DNA, 120 bp, Artificial Sequence
  ENSG00000264589_21 (sequence is synthesized)
tgtgaagtgggggcaatgtggtctttcttacccacttcactgggagatggaccatttgtggggaaccaggagacctgcatctgcaatataaagtccctacaagcatcggcagggtcatca

SEQ ID NO: 854516 - DNA, 120 bp, Artificial Sequence
  ENSG00000264589_22 (sequence is synthesized)
gcccagcttggctgttctgggccccagaatgcacctccactgcagagggctggcctggagcagctttcctgatgtcccttccgggccctgggggaggccccgcaggctggacctggcctc

SEQ ID NO: 854517 - DNA, 120 bp, Artificial Sequence
  ENSG00000264589_23 (sequence is synthesized)
tcctcatcttccgccaggtccttctgccttctcaggaagccttgctttgggaaggagtttttccatttaaaaggctgcctgcggagggcctcagacactgggttgagatggatccagtcg

SEQ ID NO: 854518 - DNA, 120 bp, Artificial Sequence
  ENSG00000264589_24 (sequence is synthesized)
gcctggagcaccatggcaggttcctgagcagtgaattatcccagcttgtcaccctcatcatcccagcgagacagccgacagtcacctgttccacggaggcggttcagcaggtcagagtga

SEQ ID NO: 854519 - DNA, 120 bp, Artificial Sequence
  ENSG00000264589_25 (sequence is synthesized)
aaccaggccttgttgccttccctggcctgggagactctggcggaccctgactcggggcccagagaagcccttgactctccagtgtggccaagatcgaagatgtacctggtgaccccagag

SEQ ID NO: 854520 - DNA, 120 bp, Artificial Sequence
  ENSG00000264589_26 (sequence is synthesized)
gcaagggccccagcccacactttccatctgctggccaaggtcctgggtcctggggtcctgcaggctccacaatcccaatatccgacccttctgactctgctttgctttgcactgtgttca

SEQ ID NO: 854521 - DNA, 120 bp, Artificial Sequence
  ENSG00000264589_27 (sequence is synthesized)
ggtggagcctattttaagcaaaggcaagagaagaaaatctaaacgcgaaaaagaaatgaggtcataaatgaagatttctgtaaaaagctgggtccgccgttgcatttaaatactgggatc

SEQ ID NO: 854522 - DNA, 120 bp, Artificial Sequence
  ENSG00000264589_28 (sequence is synthesized)
tagtaggggcatactcaatgcctgaagatggaatgggtggtgcatacaggaacttgctgggcttggtgctgctgcctgggattcttgaacagagacgttttgcagaatggatgtgagctg

SEQ ID NO: 854523 - DNA, 120 bp, Artificial Sequence
  ENSG00000264589_29 (sequence is synthesized)
aggttttggctctgcaggtttgcacccagctctgtggtgtatgccctcacaggtcacccaggacctcctgtccaggcttcttcaggccacccatgatggagtagatttgaggaatgaggt

SEQ ID NO: 854524 - DNA, 120 bp, Artificial Sequence
  ENSG00000264589_30 (sequence is synthesized)
tttcaaagcagttagtgtgcgggagagtaaccctggggcctccggaaccagaagggagggatttgggggctggagcttggcagtccaggttccattgtcctcatgttctccccactggcc

SEQ ID NO: 854525 - DNA, 120 bp, Artificial Sequence
  ENSG00000264589_31 (sequence is synthesized)
tggcctgtcactccagtctctgcataggttgtcacatggcattctccctgtgtgtctctgtgtctcttctcttctttataaagacatagttataatggattagggcccaccctaatgaca

SEQ ID NO: 854526 - DNA, 120 bp, Artificial Sequence
  ENSG00000264589_32 (sequence is synthesized)
ccatcttaacttgattatgtctgcaaacaccctacttccaaataaggtcgcattaacaggtactggggtttaggacttcaacatgcctatttgggggcacaattgtgggcagccccacaa

SEQ ID NO: 854527 - DNA, 77 bp, Artificial Sequence
  ENSG00000264589_33 (sequence is synthesized)
acatgcctatttgggggcacaattgtgggcagccccacaacacacatgtaattttaacctctaaggagtaagcatgc

SEQ ID NO: 854528 - DNA, 120 bp, Artificial Sequence
  ENSG00000264589_34 (sequence is synthesized)
tggtctcgaactcctggccttaagtgaatcgcccacctcagcctcccgaggtgctgagattacaggcacaagccactgtgcctggccaatcactgatctttctcaaggactctccttctt

SEQ ID NO: 854529 - DNA, 80 bp, Artificial Sequence
  ENSG00000264589_35 (sequence is synthesized)
tgtgcctggccaatcactgatctttctcaaggactctccttcttttctctttgagatggagtctcactctgtcccctagg

SEQ ID NO: 854530 - DNA, 120 bp, Artificial Sequence
  ENSG00000264589_36 (sequence is synthesized)
gattacaggcgtgagccaccgtgcctgtcaaggcctctccttctattacgggtccatctcttgcagtcccaaactgctttccttgggaaatccacagggatgaaacatcatctccaacat

SEQ ID NO: 854531 - DNA, 120 bp, Artificial Sequence
  ENSG00000264589_37 (sequence is synthesized)
cacagggatgaaacatcatctccaacatcagctgtggattctttgaagtggagggtgagtttaaagggccatgtgaagtggtcagcaagtggaacccatctgagattctgacaattctct

SEQ ID NO: 854532 - DNA, 120 bp, Artificial Sequence
  ENSG00000264589_38 (sequence is synthesized)
ctcacccagttatttacactcatctcacccacacctaatttgccaatatttttggtgactcatttgtaaagtatccttcaaagcattagactgaattttcataagaaacatctctccttg

SEQ ID NO: 854533 - DNA, 120 bp, Artificial Sequence
  ENSG00000264589_39 (sequence is synthesized)
ttagtgcacttctgattcatcagtaatataacatttagttagattacgacagtaattacaatgacaagtgaactgtcagaaacatgttcaggaacaaatacaagtgactggcaaacaaac

SEQ ID NO: 854534 - DNA, 120 bp, Artificial Sequence
  ENSG00000264589_40 (sequence is synthesized)
caccagccggtgtgaggagaagcaggcagagcccaggggaggaggctgccagctgtcccttccgagtgctcccatttcaaaggggaggttggcaggagggtggttaggagagggaggctc

SEQ ID NO: 854535 - DNA, 120 bp, Artificial Sequence
  ENSG00000264589_41 (sequence is synthesized)
gcctgtaggccacaggagggctgtgacagtaaaaccctttctggccccccagcaacgaatgggcaacctagaccctcactccaggccctgttctccacgcagggagtcgtggatctttta

SEQ ID NO: 854536 - DNA, 120 bp, Artificial Sequence
  ENSG00000264589_42 (sequence is synthesized)
aaaaacaagaaccagcacacccactttgtcacaaaacccagacaatcacaagctttgtcgaggatatagggaagttgggaccctcatacactgctggtgggaatggaaaattgtgcagcc

SEQ ID NO: 854537 - DNA, 120 bp, Artificial Sequence
  ENSG00000264589_43 (sequence is synthesized)
gctgcaggaaacagcttggtggttcctagataagttaagcagagttatcatatgacccagcacttatactcccagctatatatcccaaagaattgaaatcaggccttcaaacaaaagcgt

SEQ ID NO: 854538 - DNA, 120 bp, Artificial Sequence
  ENSG00000264589_44 (sequence is synthesized)
gtacatgcatgctcatagcaggactattcatgataacttggaataggtggagagaacccatatgtccatccactgatgaatggagaaactgcggtctctccacacaagggaatagcattc

SEQ ID NO: 854539 - DNA, 120 bp, Artificial Sequence
  ENSG00000264589_45 (sequence is synthesized)
agccataagaaggaatgacgttttgatacctgctaccatgtggatggaccttgaaaacattatgctaagccgaaacacattatgctaagtggaaacacattatgctaaatgaagacgcca

SEQ ID NO: 854540 - DNA, 120 bp, Artificial Sequence
  ENSG00000264589_46 (sequence is synthesized)
gcggccgccgagtccgtccacatcgccaggccaggtgaaccctgcctttgcgagcgtgcacagtgggatccgcgcactgttctcaggcacggcgctgctcgcgtctctgtgccaggcgtg

SEQ ID NO: 854541 - DNA, 120 bp, Artificial Sequence
  ENSG00000264589_47 (sequence is synthesized)
cgcagggggaagggcaactaaagtgacagcgcgtggacccctccccatctcctcgatttctcccagcccccaaatgtcccctacgggtttctgaaggaggaaaaggggagggggccggcc

SEQ ID NO: 854542 - DNA, 120 bp, Artificial Sequence
  ENSG00000264589_48 (sequence is synthesized)
cccgcctaaaatcaggggcagtgaaggccctgtcggaatcactgctcgggaggtgcagggaggggcgtgcagggagtcatcttttctagaacccgatccacgtctttcttagagctgatg

SEQ ID NO: 854543 - DNA, 120 bp, Artificial Sequence
  ENSG00000264589_49 (sequence is synthesized)
tctagaacccgatccacgtctttcttagagctgatggcgaacagcggcagggacagcggatttcagattcggtttcgggggtcgttatcggacccctccacacacacacacacacacaca

SEQ ID NO: 854544 - DNA, 120 bp, Artificial Sequence
  ENSG00000264589_50 (sequence is synthesized)
ccctccagcacacacacacgcgcgcactcacgcgtgcgtgcatcccttgctcaggtccctttccaggccgccctggccccagcccccgagcaggggaggcagggaggggccctgcggtgg

SEQ ID NO: 854545 - DNA, 120 bp, Artificial Sequence
  ENSG00000264589_51 (sequence is synthesized)
ccccgaccgatgcccggcgcacgaagccccagtctgcggagagggagggcgaggggcggcggcgcaggggtgcacagaggcggacggcgaggcagatttcggagccgcggcgcttacctg

SEQ ID NO: 854546 - DNA, 120 bp, Artificial Sequence
  ENSG00000264589_52 (sequence is synthesized)
cgtggcgggcaggggctgggggaggggagaatgaggagtgactggtgggtatgggatttccatctggggtgatgaagaagttccagaactttttctatctcagtggtttcagttgcacga

SEQ ID NO: 854547 - DNA, 120 bp, Artificial Sequence
  ENSG00000264589_53 (sequence is synthesized)
cgagggcgctgctgtggggcacagggtccctctagaatgatgccccccaaccctgggagaccaggggagaggtcatatggaccctgctctctgcccagaccctagtgggtttagaccagg

SEQ ID NO: 854548 - DNA, 120 bp, Artificial Sequence
  ENSG00000275805_0 (sequence is synthesized)
cctttctagctggcaggctagagactaagccatttccccaggtcacaaagaccgtgacttgcagaaacagaccacaccatttctgacctggctgtctttgttctggtgtctggatcatgc

SEQ ID NO: 854549 - DNA, 120 bp, Artificial Sequence
  ENSG00000275805_1 (sequence is synthesized)
ccctccctccacccctggagagacagagagaggaaagttagaaaccgccccgtccagggggtcgcagtctcaggcgtgaactagttttgtttcccgaaccctgcccgcacgcacaccacg

SEQ ID NO: 854550 - DNA, 120 bp, Artificial Sequence
  ENSG00000275805_2 (sequence is synthesized)
ttcttgggagacgctgcatgtggtttcccaggaacgcaggctttggcgcggcgctctgcattttcaagtctgcacgcgtatccgagttgccacgactcggcgatgctttgctggcggctc

SEQ ID NO: 854551 - DNA, 120 bp, Artificial Sequence
  ENSG00000275805_3 (sequence is synthesized)
ccagagagccacttgcagccaagaaaaccaaccctcccctgctcgtttgtctcagggaacagccttttgtggcactaccctcaaggctgatgcctccaccaccccagggacactggggca

SEQ ID NO: 854552 - DNA, 120 bp, Artificial Sequence
  ENSG00000275805_4 (sequence is synthesized)
caaatccctgactggaaatgaacagatacatagatcataatcccttccctgtttgcccccacccccaactttttttttttttttttttttagatcttgcctccaaagtagagcttgggga

SEQ ID NO: 854553 - DNA, 120 bp, Artificial Sequence
  ENSG00000275805_5 (sequence is synthesized)
ctgttgtctaatccaaaccaccaggggaaatgccagttgtgtgggctgtgactttgggatgagaccgcagagcctgtagaatcaagttgaacctcaaagtgccagccttgtggatttcgg

SEQ ID NO: 854554 - DNA, 120 bp, Artificial Sequence
  ENSG00000275805_6 (sequence is synthesized)
ccatcctcacccttcgtaggcagaagcaattctagagctgtcttctcagcgaattgttaaccaactcagagcctggtggtgtaccgggagtggcaagttctgtcagtttatttcaggaca

SEQ ID NO: 854555 - DNA, 120 bp, Artificial Sequence
  ENSG00000275805_7 (sequence is synthesized)
gccagaaggtgttcggtggaactggtcccgtgcctctgcagtgcaggtgtgggcctggtggggtgggaagtgcagccagggaaaacacagggcagaagcctgggcagaaactgtccttat

SEQ ID NO: 854556 - DNA, 120 bp, Artificial Sequence
  ENSG00000275805_8 (sequence is synthesized)
ggaatctgactttcctactccctacccaggtcacagatacagtgctaggatccttggacagaccatgaaacctggagaattggaatttcaagaagaaaatggtttaaaatgccataatct

SEQ ID NO: 854557 - DNA, 120 bp, Artificial Sequence
  ENSG00000275805_9 (sequence is synthesized)
tgcattgaattaattgaagaggaaacaatatttgattacagctatctgataccacttcaaaatggcaagccattagattcaactcagttcaacaaactggtccctactgtgtgctagggt

SEQ ID NO: 854558 - DNA, 120 bp, Artificial Sequence
  ENSG00000275805_10 (sequence is synthesized)
ctgtgttaggcactgaacataatgcctggatacaatgaatcccatagggttcagcttctaccaagacaagaaagttatcttggggggggaaaaaaaagtaaaaagtacttgtcaaagaaa

SEQ ID NO: 854559 - DNA, 120 bp, Artificial Sequence
  ENSG00000275805_11 (sequence is synthesized)
cacatttttcctaaacaaaacttaacatcataaatctggagagaaaaatatccagtaataatatactctctgaatggaaaattcccacaataataacaaaaataacaatgatctgtatac

SEQ ID NO: 854560 - DNA, 120 bp, Artificial Sequence
  ENSG00000275805_12 (sequence is synthesized)
ttagtacagctctatttttgcttttcatctaatgatttcaaagagtttagcaaccactgctgagctaatccttagtactaaacttgactcttccatccttctttgaaaaaaaaaaaaaaa

SEQ ID NO: 854561 - DNA, 120 bp, Artificial Sequence
  ENSG00000275807_0 (sequence is synthesized)
attggctacggccggggaccccttcccgcagcagactccccattggctgaagccggggaccgcgagacccttcgtggtaatggaaccggggaccccgatcagctccttgcccccccccaa

SEQ ID NO: 854562 - DNA, 120 bp, Artificial Sequence
  ENSG00000275807_1 (sequence is synthesized)
ccaactccccgttccgacggcgccggcgggatgcgccccgcctcccctgaaggccggggctgcgagccctgactaggccccgagagccgagcgcggcccctcagtgctccggtggccgcc

SEQ ID NO: 854563 - DNA, 120 bp, Artificial Sequence
  ENSG00000275807_2 (sequence is synthesized)
gaccctttccgtccgacctgttcggacctgagggggccctcccccagcttcacggggactccccacccagccggtgcccctgacggtgccgggtcggggtccgccccaccggaaccgagc

SEQ ID NO: 854564 - DNA, 120 bp, Artificial Sequence
  ENSG00000275807_3 (sequence is synthesized)
gagccacagcctctgggtggccgcggctccctcgcccggagcccacccttctcacctggcgctgccgatggcggctgcccccggcctctcctggtgttgctgcggcggcggcggctgcgg

SEQ ID NO: 854565 - DNA, 80 bp, Artificial Sequence
  ENSG00000275807_4 (sequence is synthesized)
aagatgccttcggctccccggcggagcccgctcccggcagcggccacaggccccaggcagggggaggcggccgctggagg

SEQ ID NO: 854566 - DNA, 120 bp, Artificial Sequence
  ENSG00000275807_5 (sequence is synthesized)
ccgccgttgggagggctggtgcccccggggggccgacgggccacggcctgttgcgtggggggcggctgctggggctgggagggctgttgtagcggctgaggcttcaacatgatggcagcg

SEQ ID NO: 854567 - DNA, 120 bp, Artificial Sequence
  ENSG00000275807_6 (sequence is synthesized)
cgccgtgggcgggcggggggagccccgcggtgtcgggggtggagagagaagaccgcggcgcgaggaagcgccgcgaggcggaaggggagggggtctcgcggctggaggaaagcgagaggg

SEQ ID NO: 854568 - DNA, 80 bp, Artificial Sequence
  ENSG00000275807_7 (sequence is synthesized)
cgagagggcgcgagccgggctggcgcgcgtgcgcgtcgccggggagcggagagggaggagcgcgcgggtgggagctcccg

SEQ ID NO: 854569 - DNA, 120 bp, Artificial Sequence
  ENSG00000275807_8 (sequence is synthesized)
gccgcgcacaccggcgcggttagctcccggcgggaaagtgggagagaatcaagtcggtgaacctcgcacccctagccctgggagtgggtaaggagcggcgcgggcgctcacgcgcgccaa

SEQ ID NO: 854570 - DNA, 120 bp, Artificial Sequence
  ENSG00000275807_9 (sequence is synthesized)
ggatttagggtcttaaggtctcaaaccgccttagaagccggcggccgctgtcgcttcacaatgagcgtgtgaggcgcagggggaggagccgaaggcgccagaggaagggccggcctctcc

SEQ ID NO: 854571 - DNA, 120 bp, Artificial Sequence
  ENSG00000275807_10 (sequence is synthesized)
gcccacgccgtcgctgcgtcgcgatgcctccgcgggagtgtgaggcggcacgtcgtgcgtgaggctcttccgccacttggcggcccgtgggcagagccttaagtgccaagaaagtctccg

SEQ ID NO: 854572 - DNA, 120 bp, Artificial Sequence
  ENSG00000275807_11 (sequence is synthesized)
ggactggaccacccgagccactgcgcttttaggcaggtggtaggtttcgcaaggagctaccctccaccttgtttgctttaagtaaaagactgatgagcattagtgattcgtttgagcgtg

SEQ ID NO: 854573 - DNA, 120 bp, Artificial Sequence
  ENSG00000225413_0 (sequence is synthesized)
tgccctttcccctccaggctgcttccagactctgccggttgtcgagtgccctggaaacccgctcaccctgcaggagttactcagtgtcctgtgtgcatccagaccttggtgtgtggtatc

SEQ ID NO: 854574 - DNA, 120 bp, Artificial Sequence
  ENSG00000225413_1 (sequence is synthesized)
ggctggaggatagaagcaatcaatccccaataccgtggacgtgcttggtggcaggagatgctttgcttcgatgaaatgctccgcctccaggacaggagaagaccttggttttgaccctga

SEQ ID NO: 854575 - DNA, 120 bp, Artificial Sequence
  ENSG00000225413_2 (sequence is synthesized)
ggaaacagcaaaacttggaccttgaagacaggagattgccatgactaatttgggggcaggcggtgtgactttgagtatgttacctaaccttgctgagccacgtggtactggtgaggattc

SEQ ID NO: 854576 - DNA, 79 bp, Artificial Sequence
  ENSG00000225411_0 (sequence is synthesized)
aaagggagagggtgagggagttgtggagcgacagcgacagagccttggagagggaggctctgctcaggatttgtcccca

SEQ ID NO: 854577 - DNA, 120 bp, Artificial Sequence
  ENSG00000225411_1 (sequence is synthesized)
gatgctagtagatgttcttcagtgtctggacattaaaatcttgggcatgcaacaccatatgagaggtttaaaaaataaaatttaaagagagaaaagtggtgggattgctgaatcagacag

SEQ ID NO: 854578 - DNA, 120 bp, Artificial Sequence
  ENSG00000225411_2 (sequence is synthesized)
tcagacagagccaatagatgatcagtaatggtggccaatcatcagctagaaagaaagtgcttagcagggcttgaaaacaccaaaactctgagaccactgaccttcaaaaacttcaacagc

SEQ ID NO: 854579 - DNA, 120 bp, Artificial Sequence
  ENSG00000225411_3 (sequence is synthesized)
cctgagtgaaaagcccaaacacatttatctaccattcaaagacgcttcattgtctgttctctgtgcatctcagtagtctctttttaccacactgtctatatactgcatgagccatttata

SEQ ID NO: 854580 - DNA, 120 bp, Artificial Sequence
  ENSG00000225411_4 (sequence is synthesized)
tgaaactatctgacactccaaggcatcttatactatatattcaaccatgtatccctagtacctagcacagtcctggcatatagtttgctactaaacttttacagaatgaaggaattatct

SEQ ID NO: 854581 - DNA, 120 bp, Artificial Sequence
  ENSG00000225411_5 (sequence is synthesized)
tgtatccaggttccaagttttaaggtgattcttcactaaaaaaagtattacagttcacaaataatctacttccctttttacaaatgggatcaattttaatcttatctcctaataacatta

SEQ ID NO: 854582 - DNA, 120 bp, Artificial Sequence
  ENSG00000225411_6 (sequence is synthesized)
ctttcatttactctgatctaaatatactgtcctaagagagcaataagaaagagagttgaagctggagtttgaagaattgtacatggtcctgtgataccctaccttgttttaacctgagtg

SEQ ID NO: 854583 - DNA, 120 bp, Artificial Sequence
  ENSG00000225411_7 (sequence is synthesized)
actctctcctagcagagagagagccggacagactccattttagtttcttcacgtgcatccccctttacctcccacccttaattgcataactagtgtaaactaactcaaagcaggtccagg

SEQ ID NO: 854584 - DNA, 120 bp, Artificial Sequence
  ENSG00000225411_8 (sequence is synthesized)
aatgcacttactgataagatattgaggcaagctgcaccagctgctcctgggtacgcactcggtgaatgtcacgcaaaacccctgcatttctctctttgtgatggtttaagcccctgcacc

SEQ ID NO: 854585 - DNA, 120 bp, Artificial Sequence
  ENSG00000225411_9 (sequence is synthesized)
tggaactgtttatttgttttgtaactgttattgtaaccaattaattttttaactatttgccagctctgcttctgtaaaacttgtttcagctaaactcccccctcccctatttagaccacg

SEQ ID NO: 854586 - DNA, 120 bp, Artificial Sequence
  ENSG00000225411_10 (sequence is synthesized)
gcataaaaacaaaaccagccccttcctcggggccaagagaattttgagcattacatgcctcttggttgctggctaataaaggactccttaatttgtctcaaagtgtggcgttcctctata

SEQ ID NO: 854587 - DNA, 120 bp, Artificial Sequence
  ENSG00000225411_11 (sequence is synthesized)
agatctctggcttacccatctggcaagcgcacctctgtgagcaaagacttcagagccagatgacaagaacggcccaagcagtccaccagggaaacctgggcccagtgtacatcaatgcag

SEQ ID NO: 854588 - DNA, 120 bp, Artificial Sequence
  ENSG00000225411_12 (sequence is synthesized)
agcatcaagcatggcgtaacaggtgcacagttgcctactcctgttcagagatgactgcatcccacataccgtaaaatgaggaaatgcagagaagcagaagtaactgaagaagacagcaga

SEQ ID NO: 854589 - DNA, 120 bp, Artificial Sequence
  ENSG00000225411_13 (sequence is synthesized)
agcaacaaggagggacaaccaggacctaggagggcaccatgccagagacgcctggaccccacgctaggctcagtgcctgttatactcttgggatccagcactttccctctccatcacatg

SEQ ID NO: 854590 - DNA, 120 bp, Artificial Sequence
  ENSG00000225411_14 (sequence is synthesized)
gcatacttgccattatttgttgtgtaaaatattgtccttagttttcacctttcctaggagacacaggcagagcctgtgacactacagcttctggcacacagtaggtaggtgcatcacaaa

SEQ ID NO: 854591 - DNA, 120 bp, Artificial Sequence
  ENSG00000225411_15 (sequence is synthesized)
catctgctgagttcacacactcttgccttctcaaaccttcctgtcaagtcttcagtgaaaaggaattgctgattgagcaagaattaaacttctagagactcctggatccactgaagtttg

SEQ ID NO: 854592 - DNA, 120 bp, Artificial Sequence
  ENSG00000225411_16 (sequence is synthesized)
agacaagctctagtcaggaagtgttagagagttctaaacaggaaatgttccaacacaccatctaagcatgaagcaggagacacccataattgagtttgctgccaccaaccccaacagcaa

SEQ ID NO: 854593 - DNA, 120 bp, Artificial Sequence
  ENSG00000225411_17 (sequence is synthesized)
gaattccagtcctgctgctgcaaattctcttttggagtctttcttgcagttgcggttgcttggctgctgctgaagtcacctgaaagctcaattaggctaaagagtctagacgggtcactt

SEQ ID NO: 854594 - DNA, 120 bp, Artificial Sequence
  ENSG00000225411_18 (sequence is synthesized)
acatggttggcagtgcatattggctgctgagtgtgatgcctatctgacctctccatgttacctggagtgctcataacgtggtagtttgtcccaagacacacaggcaaatactataaagct

SEQ ID NO: 854595 - DNA, 120 bp, Artificial Sequence
  ENSG00000225411_19 (sequence is synthesized)
tcttaggacctagccttggaggtcctagaacaagacttctgctccatccttttggaaaagcaagtcattgtgaccagcacagattcaagaaatgggagattcgactctgcctgtcaatgt

SEQ ID NO: 854596 - DNA, 120 bp, Artificial Sequence
  ENSG00000225411_20 (sequence is synthesized)
aaacagcagcatgtgcatgcagggaggaaagaaatcgagggcatcatctagaagactatcatatcacaccattattccaactaatgaacattatgttttagatgggtagtactagctact

SEQ ID NO: 854597 - DNA, 120 bp, Artificial Sequence
  ENSG00000225411_21 (sequence is synthesized)
catctctcccccagaaacccaagctaagcatggacatattgaagagaatgtcagcaccattaaaaaaaaactctagaaaaatcacatgtgatgactgaggttaattcagtctgtcaatta

SEQ ID NO: 854598 - DNA, 120 bp, Artificial Sequence
  ENSG00000225411_22 (sequence is synthesized)
catcaatataattgccttcttgtagccctaagtatggtgaagcagaattgaattctacaaaagtctttcatctgttttcctatggaataattaacaaacccaataaatgtataaatagca

SEQ ID NO: 854599 - DNA, 89 bp, Artificial Sequence
  ENSG00000225411_23 (sequence is synthesized)
agtccttccgggagctccggagctccggggcttccaccacatctgccggctcaggacgggtcgtgttcatcccttaatttattgtgcta

SEQ ID NO: 854600 - DNA, 120 bp, Artificial Sequence
  ENSG00000225411_24 (sequence is synthesized)
tgtcttgaaatgttgttgtagctattacttttgattggatattatttagtattcctactttaaataagagtagtttgcacaccacacagctatagtgttataatattctgttttgttttg

SEQ ID NO: 854601 - DNA, 120 bp, Artificial Sequence
  ENSG00000225411_25 (sequence is synthesized)
tatcctattagcagtgaggatttttttttacctttaggtgatcatttattactcattaatgtccttttcttcctgactgaagtactccctttagcattcctttaggacaggatttgtccc

SEQ ID NO: 854602 - DNA, 120 bp, Artificial Sequence
  ENSG00000225417_0 (sequence is synthesized)
aacaatgaaggcagagaagccagtggctgctttgacatgaggcttcccgtgtgggaggtgaaccagaagccaagcctggacggagactgtgccatcaagaggctctgtcacgagatgcca

SEQ ID NO: 854603 - DNA, 120 bp, Artificial Sequence
  ENSG00000225417_1 (sequence is synthesized)
aaatgatcaccaagcaagaggaaacagagtgagccctagaggtgaggaagttgcctgaattccatctgtgtgcccacatacacaaagctctgttacacaaaggagctactccagcgacta

SEQ ID NO: 854604 - DNA, 120 bp, Artificial Sequence
  ENSG00000269694_0 (sequence is synthesized)
tcctgccacaggtcctttgcacgtgctgtccccatgacccagcatgccagtgcctggcattcagcacctcccttcactcctttcagtctctgctcatctgctcatctgtcacccccagac

SEQ ID NO: 854605 - DNA, 120 bp, Artificial Sequence
  ENSG00000269694_1 (sequence is synthesized)
agaccaactaacacctaacacctgcagccacaatttttttttggagacacagcctcactctgttgcccaggctggaatgcctcggctcacagccacctctgcctcccgggttcaagcgat

SEQ ID NO: 854606 - DNA, 89 bp, Artificial Sequence
  ENSG00000269694_2 (sequence is synthesized)
agctgggggactacaggcatgagctactgctcctggagttttatttaagtctaattaaagttgaaagggccacctctttgttgctctat

SEQ ID NO: 854607 - DNA, 120 bp, Artificial Sequence
  ENSG00000269694_3 (sequence is synthesized)
tctaattaaagttgaaagggccacctctttgttgctctatatttgtggggcgtggctaccctattatcgcagctagagcagctagtcccgtaggaatagtatatgagcagtgtatttcat

SEQ ID NO: 854608 - DNA, 120 bp, Artificial Sequence
  ENSG00000269694_4 (sequence is synthesized)
tttaaagtttctattggccacatttaacaagaaagagaaaagaacaggtaatattaattttaataatgcattctaattaattcagtatatccaaaatattgtcatttcaatatggagtcg

SEQ ID NO: 854609 - DNA, 120 bp, Artificial Sequence
  ENSG00000269696_0 (sequence is synthesized)
gttcagaaatagggcgctggctttgccaggagcggctcctctccaagcctggcggtcactgccctgtgtccccttttgggcctctcctggtcctcctggttggattaggaggcctctcag

SEQ ID NO: 854610 - DNA, 120 bp, Artificial Sequence
  ENSG00000269696_1 (sequence is synthesized)
cccggagtctgggtcgccgaagtacaggccccttcactgaagcgacccacggcgcaggggtttctggaagccatcgccaggctccgagtgttcagatgcagctgccaggctcaggacgca

SEQ ID NO: 854611 - DNA, 120 bp, Artificial Sequence
  ENSG00000269696_2 (sequence is synthesized)
gagaactggcttccagctcgcaggagcgcctgtccgtggtgggtagggtcgcaggcgtggggtgtgcaggagcagtgggacagcactgaaacgcagtcggaagagataccacggtgtgca

SEQ ID NO: 854612 - DNA, 120 bp, Artificial Sequence
  ENSG00000269696_3 (sequence is synthesized)
tgcaggcacagggaaaagaccacgtgaggacacagagagaagacggccgtctgcaagccaaggagagaggcctcaggtgaaaccaaacctgcaggcaccttgatcttggacttccagcct

SEQ ID NO: 854613 - DNA, 120 bp, Artificial Sequence
  ENSG00000269696_4 (sequence is synthesized)
aagcttgagaaaagaaatttctgttgtttaagacacccattctgtggtatttgttctggcagccctaacaaactaatatagggatctaaagattccttgtcttcattttgagtaagagac

SEQ ID NO: 854614 - DNA, 120 bp, Artificial Sequence
  ENSG00000269696_5 (sequence is synthesized)
tataaactcagaactgtggagatctagttaggtattgtacagctagcctcattctgtcttaaactccaggtaaaagagaaaaatatggagacagcccctgactttggagaacttgcagtt

SEQ ID NO: 854615 - DNA, 120 bp, Artificial Sequence
  ENSG00000269696_6 (sequence is synthesized)
ttgtggaggtgaaaggaggcagccacaagaaaaacccctgacatcaattcaaaactataaataacaaagactaacttgttctatgcacaacaggtactacagcactgtccaacatgggga

SEQ ID NO: 854616 - DNA, 120 bp, Artificial Sequence
  ENSG00000269696_7 (sequence is synthesized)
catgtgagtggcctgaagcagcacaagaactgggcaataaacttgagatgaacctcaaagcatcaatattattcatgactaaactgggttctaagaatttctatttttactctcagtgtt

SEQ ID NO: 854617 - DNA, 120 bp, Artificial Sequence
  ENSG00000269696_8 (sequence is synthesized)
gaggtcattaaaaaaaaatctagcaatttttttttctaaaatgaatatgtaataagaatgaaaaacaaaaagcactataatgtttttaattaatgaaatgcctttacgaaccaaggtgcc

SEQ ID NO: 854618 - DNA, 120 bp, Artificial Sequence
  ENSG00000269696_9 (sequence is synthesized)
atcttggagaagctaggcattatgaggagctatcaggagcacatttgctaacagcttggcatgagcaggattttcttgaccaactggcaagatggggctgctcagctcctgctggcagat

SEQ ID NO: 854619 - DNA, 120 bp, Artificial Sequence
  ENSG00000269696_10 (sequence is synthesized)
ttttatggagcatagttttacaaattcagcctacaactctgatacgttccaatgtattttaaacatctattcagttgcaactctaatcccaggaacctgtggctaacagaaggcagattt

SEQ ID NO: 854620 - DNA, 120 bp, Artificial Sequence
  ENSG00000269696_11 (sequence is synthesized)
aactgactagcagctgtgggattttcaaagtctaaactgaaatgaacatgcgaaacagttggactaccccaaaagctgaattacaattccagcactcaccagctctgaaacctcacttgg

SEQ ID NO: 854621 - DNA, 120 bp, Artificial Sequence
  ENSG00000269696_12 (sequence is synthesized)
ttacctaacgcctctgtgcctcagttccccagctataaaatggaaaaggcaacaataccaaccttgtagattatgttttggattaaatgaggcaacacatacacagcacttagaacgtgc

SEQ ID NO: 854622 - DNA, 120 bp, Artificial Sequence
  ENSG00000269696_13 (sequence is synthesized)
aaggcacaatggaagcatgcagtgaacatgacttgtaatgatgctgactgtcataactctcatccatagggatgctgcctctgcttgtcacccttgacctatatattttcaggcagtcct

SEQ ID NO: 854623 - DNA, 120 bp, Artificial Sequence
  ENSG00000269696_14 (sequence is synthesized)
cacccagtccccatttgtgtgttctagatagaaaaggccccatactatgaaatgactactgtccttctgcatgaagcctggtgaacctgataatgtagccttcaagttcccttactgagc

SEQ ID NO: 854624 - DNA, 120 bp, Artificial Sequence
  ENSG00000269696_15 (sequence is synthesized)
cttgagctcccttcaaagtatccaagccaaccctgtcttgggaaactcacctagataatgccctgaaccccaataaaggctccagcccacaggtccctccctctctcttggtccccaccc

SEQ ID NO: 854625 - DNA, 120 bp, Artificial Sequence
  ENSG00000269696_16 (sequence is synthesized)
tttggctgggcatgtgtgtcctcaatgtctccaagcccttccagtaagccctgcaaggtgtgctggccactgttctctggaatctgtgagtaataaacaatctttttgccattctgctct

SEQ ID NO: 854626 - DNA, 120 bp, Artificial Sequence
  ENSG00000259843_0 (sequence is synthesized)
ggtcccattcgccgccgcagccgcctcggcctgacagtcgcccgtaggggagaactgaggtcgcttgaagcgcttcgtccggctcttgcccatggtgacgtgcgctgggcggacagacca

SEQ ID NO: 854627 - DNA, 120 bp, Artificial Sequence
  ENSG00000259843_1 (sequence is synthesized)
tggtgacgtgcgctgggcggacagaccaccgagagaggagggcaacagcaggcggtggaggctgccgcgccgttaacaagagtctcactctgctgtccaggctggagtgcaatggtgcga

SEQ ID NO: 854628 - DNA, 120 bp, Artificial Sequence
  ENSG00000259843_2 (sequence is synthesized)
gccttagcctcctaagtagctgagattacagctccagctaccatgcggtgaccacgggcccgggtgcttcttgctgtgatgaatgagccacagggaccaggtctgcatgctctgctgcgc

SEQ ID NO: 854629 - DNA, 120 bp, Artificial Sequence
  ENSG00000259843_3 (sequence is synthesized)
attgcttaaccccgacagctccttctccagcgccgcctcagagaagactgacatcccttccaccccacattcacgccgtcccacactggggtgacaggaggagagttaagttgccctctc

SEQ ID NO: 854630 - DNA, 120 bp, Artificial Sequence
  ENSG00000260645_0 (sequence is synthesized)
ttttcttttggctgtgttttaaaagggtcttgctcaaattttaaaggttggggcattttagagtcagatttgtttcataatttttctatgtaacatattcacttcccattaaaatgtaat

SEQ ID NO: 854631 - DNA, 120 bp, Artificial Sequence
  ENSG00000260645_1 (sequence is synthesized)
tttccctaccaataaggtgttaggcttctgatccctcaggggaactgtggttgacatgagcattacctcatccaaatgtatgttcccagtgaacctgtcatcgagtggacttgatgcctt

SEQ ID NO: 854632 - DNA, 120 bp, Artificial Sequence
  ENSG00000260645_2 (sequence is synthesized)
cattttttccttttgtagcaagatgcctaactggttacttatgcaagcattgttattgaaattagggggagtaaggggaataaaaaatgtatggaaattatgagtgttagaactgagcac

SEQ ID NO: 854633 - DNA, 120 bp, Artificial Sequence
  ENSG00000260645_3 (sequence is synthesized)
aatcattgcagcatctgatgcagacatttcagggtaagcgaagtagtctcttcagaataaaaatgagggtaattagactcaattcatttattcaacacttgggtcaagtccatgaactct

SEQ ID NO: 854634 - DNA, 120 bp, Artificial Sequence
  ENSG00000260645_4 (sequence is synthesized)
acaaagataactgtgccatggattttgctctctagagtggtaagacacgtatatggtttgtctactcattcagcaaacactttctgggcatgttttgtctcctgaggtcagctctggaga

SEQ ID NO: 854635 - DNA, 120 bp, Artificial Sequence
  ENSG00000260645_5 (sequence is synthesized)
tacaatggtacatggcacaaatctttgcaagtgctaaatataatacctgatattaataggctgtgagtgaagagcacaaaatgtgtagtgggtgttcctgggatacagtagctctgtgca

SEQ ID NO: 854636 - DNA, 120 bp, Artificial Sequence
  ENSG00000260645_6 (sequence is synthesized)
tgtagaagggattagtaagggcctcgtgaaggagacagcatttgttctgggacttgaaggaaagacaggattggaaatgtagagatgctaaggaaggttgtcctcaatagagaaaatgcc

SEQ ID NO: 854637 - DNA, 120 bp, Artificial Sequence
  ENSG00000260645_7 (sequence is synthesized)
atagctgaaggcccctcatatgctattcttatctaactatgtgattctaagctcaggtgatccaaagaggctcctcagagttgtggcaaactgaagccagtggtgtaggttgaaaggaat

SEQ ID NO: 854638 - DNA, 120 bp, Artificial Sequence
  ENSG00000260645_8 (sequence is synthesized)
acagactcactaccaaatactcatggacttatatttttggttcagaggtttgatgaaaaactctggaagcctattgcagagaactgaataaggtaaaaatctaccttttactggacacat

SEQ ID NO: 854639 - DNA, 120 bp, Artificial Sequence
  ENSG00000260645_9 (sequence is synthesized)
cgtttaggaagcaaattagtctccgttatcagaaagttccaagggggaatctaaaatgtgatactttgctcagcagctgacagtatttttgctacattttcaacttgccttcaattctgt

SEQ ID NO: 854640 - DNA, 120 bp, Artificial Sequence
  ENSG00000260645_10 (sequence is synthesized)
ttatttcgcttgtctaatttactatctaggtaatttaaacaatgagaatacagtgacccgcaattttcctaatttaaaggtatctcttctgcaatattaaatttgcatctacattgcctg

SEQ ID NO: 854641 - DNA, 120 bp, Artificial Sequence
  ENSG00000260645_11 (sequence is synthesized)
cctaacaagactgtcacctccttgaggtcaatgtgatgttatctaattttttagataacatctatgtctctaatagatctatctgtgcaatagaaccatacagtccttcgtagatagggg

SEQ ID NO: 854642 - DNA, 120 bp, Artificial Sequence
  ENSG00000260645_12 (sequence is synthesized)
aagcacaaatgttggttaatatttaacagagtatcagacctgcatccttctctctaagagctcaaacttcagagagtagattcagagagtaaatgttttcccaggctcaggcaagagggg

SEQ ID NO: 854643 - DNA, 120 bp, Artificial Sequence
  ENSG00000260645_13 (sequence is synthesized)
tggtttgtatgttatttctttcttattttccagttagacttttggaaatctgccagatgcaattgaaaaaccctgctcagctttgtccaatgtctcatttgaggatcagcatgagtttgt

SEQ ID NO: 854644 - DNA, 120 bp, Artificial Sequence
  ENSG00000260645_14 (sequence is synthesized)
ttacttgagattaacaggagtcaaggatatacaaattcagcaatgtatggataactttcccctttttaacgctggcctcaccacaaaactaccaccatattgttgaattttggaagttta

SEQ ID NO: 854645 - DNA, 120 bp, Artificial Sequence
  ENSG00000260645_15 (sequence is synthesized)
ctaccaccatattgttgaattttggaagtttattatgctttattttttcctataaaaaaataaatgtcatcacattgtaatagttttataacctgttttatcatattttaaaatacatct

SEQ ID NO: 854646 - DNA, 120 bp, Artificial Sequence
  ENSG00000260645_16 (sequence is synthesized)
gcataattttaatatctatgaagattccattatgtgcttgtattatacatttttactctgaatacattattgttgtaaacaatgcttacaattatgaaaataaatatatatggctcattt

SEQ ID NO: 854647 - DNA, 120 bp, Artificial Sequence
  ENSG00000260646_0 (sequence is synthesized)
ttcctgtgaattctggaggctgcagcccagcgagcccgacacggtcgccagcatgtttcccaagctcatttctcgatactcagtttgtgagtcccgggaactatctaatagggcaacaca

SEQ ID NO: 854648 - DNA, 120 bp, Artificial Sequence
  ENSG00000260646_1 (sequence is synthesized)
actggtgggtgcagaggccctgcaggcatcggcatagctgcagggtctgacggatgcaggcgcgtgcaattctctatgttggctacaacagaattatggttgaaaaagaggccgggcgcg

SEQ ID NO: 854649 - DNA, 80 bp, Artificial Sequence
  ENSG00000260646_2 (sequence is synthesized)
cgactttttgttgaccacagcagctggaatgtgaaggtggaaacgttgggatgcagcaggcatagaggggatcccaaatc

SEQ ID NO: 854650 - DNA, 120 bp, Artificial Sequence
  ENSG00000260646_3 (sequence is synthesized)
aaacgttgggatgcagcaggcatagaggggatcccaaatcctgagcatatgctgccctcgtcactagttgctcccacactacacatgaggcaggggaggtgcagactttaagccaactca

SEQ ID NO: 854651 - DNA, 120 bp, Artificial Sequence
  ENSG00000260646_4 (sequence is synthesized)
cgctacaagcagggatttcagctgctatccaccacaggggaaagagtttcggctctgagctgagcaaaggtgattgcctaataaaatgaaccaaaaaaaagcaatactctttggaggaat

SEQ ID NO: 854652 - DNA, 120 bp, Artificial Sequence
  ENSG00000260647_0 (sequence is synthesized)
cagccacatccaagccccagcacagcaaggtgctcccagatgccactccagcccctggtcagagcgcagctgtccaggaagcaagctcagtctagagtgccactccttcgacgaccagac

SEQ ID NO: 854653 - DNA, 120 bp, Artificial Sequence
  ENSG00000260647_1 (sequence is synthesized)
cccaacacaagcctgatgtagaagccacttgcttcaggtagctctaaatgtactgtctcataccatggcttaaaaaaaaaaaatccaggatgagttaaaagtgttcgtggtttcatcacc

SEQ ID NO: 854654 - DNA, 120 bp, Artificial Sequence
  ENSG00000260647_2 (sequence is synthesized)
tagccaaggttaatgtctgggtcttccgtttctagccagagaactggaaacaaatcactgttttgctaggagctttgcatgacctcacgccctaggctgccgggtcctgggctgtcctga

SEQ ID NO: 854655 - DNA, 120 bp, Artificial Sequence
  ENSG00000260647_3 (sequence is synthesized)
gctgccgggtcctgggctgtcctgatgggctgtgaaatcccacccactcccctccccgcgaggcaaggacagcctctgccctgcctgcctgggagcacggtatgggcttgcctaggcctc

SEQ ID NO: 854656 - DNA, 120 bp, Artificial Sequence
  ENSG00000260647_4 (sequence is synthesized)
agtgtcttaacactgtggtgactcaaattccttgttttaccttcaccaagtaacccagagccaggatccttgatgactctggtaaggcagtgactacccctgctcagaatgcaagggtcg

SEQ ID NO: 854657 - DNA, 120 bp, Artificial Sequence
  ENSG00000260647_5 (sequence is synthesized)
ctagggaagattttagaaaaaaaaaaaggactccaaaaatggagaatctaaatgtagtcctttgaaaatgtcacccatagatcctctaccactaactgtaataaatttgaccaaatagca

SEQ ID NO: 854658 - DNA, 120 bp, Artificial Sequence
  ENSG00000260640_0 (sequence is synthesized)
caatatttgaaacatacatttttttttcattgttcatttgggattcaaatttaactggatgtcctatattttatctggcaacactaactagttaacagtcaaggatcctattactaatcg

SEQ ID NO: 854659 - DNA, 120 bp, Artificial Sequence
  ENSG00000260640_1 (sequence is synthesized)
tctcttccctttccctgtaaggcaaggcaaaaccagagggtggctgcagggataactgctggtagagccaacatctgtttttgaaatagaaccaatgttctattttaatggctagtttaa

SEQ ID NO: 854660 - DNA, 120 bp, Artificial Sequence
  ENSG00000260640_2 (sequence is synthesized)
tcacatgagatgcatgtacttggttaagacctcagagatctctgctgtatgcatgaaagagacaactgtggcctgaaaagcaacattaataaaagcactgcttctttttaatcacaaaaa

SEQ ID NO: 854661 - DNA, 120 bp, Artificial Sequence
  ENSG00000260641_0 (sequence is synthesized)
aggcgagagggagaaggaagggcgcccggggagcaggctggcagagtgaccgggattgatgagcggcgcagctctggagggacgcgggcgagagggtcgctcctcggggagagggctggg

SEQ ID NO: 854662 - DNA, 120 bp, Artificial Sequence
  ENSG00000260641_1 (sequence is synthesized)
tgagtgaggacctgcgagccacccccgacaccccttccagggtagccacactggcgccccctcctccacaacaggcttatgtggctagagaagatgcgatgccactggacagggaaggaa

SEQ ID NO: 854663 - DNA, 120 bp, Artificial Sequence
  ENSG00000260641_2 (sequence is synthesized)
agtcgtcgtggacttcgctgaatggaaaagggggtagttggggaaggtggagaaaagagccacgggaagtgggaggaaaggatgaagggatgggacgttgaaaaggaaagcttcctgaat

SEQ ID NO: 854664 - DNA, 120 bp, Artificial Sequence
  ENSG00000260641_3 (sequence is synthesized)
ccctgtgtgactctaacccaacctccccacctaccggagaaatgggttttatcctagaaatggggacgaggaaaaagagatggctcaagggagtcctggcccgggatgcgatcctcgccc

SEQ ID NO: 854665 - DNA, 120 bp, Artificial Sequence
  ENSG00000260641_4 (sequence is synthesized)
tagggtctattgcaaccacacaaacccggacagcgcacgctcccccctaccccgacagaatagtgcctaagaaacctgcttgcctcctaactctaggaaggaatccacaacggattccag

SEQ ID NO: 854666 - DNA, 120 bp, Artificial Sequence
  ENSG00000260641_5 (sequence is synthesized)
ggaggtcttctggggaatctgaattgggtttttggatcacgaaccattaagcttttgaactctggggaagaatagaacaggtggctggaaattgttttagaaccctacctgagcaggtgt

SEQ ID NO: 854667 - DNA, 120 bp, Artificial Sequence
  ENSG00000260641_6 (sequence is synthesized)
gctcattagttgcttatccgccctcctcctggagcactttcataggtgttggcaaagcaggtaccagtatttcacggaaggagaaggaagaaccgcccaggactgtgtataaatgtctat

SEQ ID NO: 854668 - DNA, 120 bp, Artificial Sequence
  ENSG00000260641_7 (sequence is synthesized)
gggaatatttttaaggattcaaaaggctagaaggaggtgagatcaaaaaatttttccagcaccacccagtgcaacccgatcctggacacagaaatctaaaagatgatacttaaatacttg

SEQ ID NO: 854669 - DNA, 120 bp, Artificial Sequence
  ENSG00000260641_8 (sequence is synthesized)
agtttgagagcctctagttataaggtttcctacgtaacaacctctcacttttctcaaaaactggctagttgacaaccggcagtcaagttttggctagtcaagaagctactttttcctgca

SEQ ID NO: 854670 - DNA, 120 bp, Artificial Sequence
  ENSG00000260641_9 (sequence is synthesized)
ataaaccacatttagagatagtactgggcttcagcaggattgaggctatattgaggtcgcaagtatgaacgaggtacccacagagatgggagggccaggagatcctactcattcagtacc

SEQ ID NO: 854671 - DNA, 120 bp, Artificial Sequence
  ENSG00000260641_10 (sequence is synthesized)
tcagaagctatgacacgggataacagtagcttcagccctttggatgaaataatcctcactccctcaaaagtgctctctacccactcaaaacacaggccatactaccaccaatctggtaga

SEQ ID NO: 854672 - DNA, 120 bp, Artificial Sequence
  ENSG00000260641_11 (sequence is synthesized)
cttcaaaagtaaggtctttcagcagcagatttccttgttaacaggaaggtactgacaagctttacctaagcctattggagctatgttgtaattctgtatataaatagaacagtcgctgca

SEQ ID NO: 854673 - DNA, 120 bp, Artificial Sequence
  ENSG00000260641_12 (sequence is synthesized)
ggaatactggatgagtcagaagaaaggtctgtcctaagctgatgtgacacatttcaaaaggaccagaaattagatgcaattgatgactgagttgatctctaagtggatttatctttgaaa

SEQ ID NO: 854674 - DNA, 120 bp, Artificial Sequence
  ENSG00000260641_13 (sequence is synthesized)
taaaaatcagtggatatcccatatacccgaccccacaccctcccccattgtcaacatccccaaccaaagtagcacatttgctacaaatagtgaacctacattgccagatcattatcaccc

SEQ ID NO: 854675 - DNA, 120 bp, Artificial Sequence
  ENSG00000260641_14 (sequence is synthesized)
tagtttacattagggttcactcttggggctgtatattctatagggttggacaaatatagaataacatgaacccaccctcatagtatcatagtatcatacagagtattttcactgccctaa

SEQ ID NO: 854676 - DNA, 120 bp, Artificial Sequence
  ENSG00000260641_15 (sequence is synthesized)
tgccctaaaagtcctctgtacaccacctatttatcccttcctccccccagtctctggcagccactgaagtttgactgtatccctgtctccttagttttgccttttccggaatgccatata

SEQ ID NO: 854677 - DNA, 120 bp, Artificial Sequence
  ENSG00000260641_16 (sequence is synthesized)
taaggaatcatacagtatgcagtctttctttcaattttgctgtgaaactaaaactgctaagaaaataaagtcttaaaaagaaaaatcaatggagaagggaaaggtaagataactaatcag

SEQ ID NO: 854678 - DNA, 120 bp, Artificial Sequence
  ENSG00000260641_17 (sequence is synthesized)
taatttggaggggggggtggaaaaactaattgaattatctcatttcgtatatccaaaataagttctatgaggattaaggagttaaatatattttaaagcagaccagaaggaaaaatattt

SEQ ID NO: 854679 - DNA, 120 bp, Artificial Sequence
  ENSG00000260641_18 (sequence is synthesized)
gtcaaacctctgtatagaagtatttctcaacttagaggcaatagaaggaaataatcaatggatatgattgggtaatatcttaaacacttctacgtgtccagctttttttagtgtaagcta

SEQ ID NO: 854680 - DNA, 120 bp, Artificial Sequence
  ENSG00000260641_19 (sequence is synthesized)
aaccagaaaaaaaattggcagcaaacatgaaaaataaaaacctgaatgtctatattataagtagggctcatagagctatagtaaaatatagaatcgcagtggttgagtataaacagaaaa

SEQ ID NO: 854681 - DNA, 120 bp, Artificial Sequence
  ENSG00000260641_20 (sequence is synthesized)
taaatcatataagaaataaaatatatggggaaattaatctagtaataaatgaagtatacattaaaactaataaagatacaaaaataatgagcactggttagcacatacattgttggtgtc

SEQ ID NO: 854682 - DNA, 120 bp, Artificial Sequence
  ENSG00000260641_21 (sequence is synthesized)
cttatgaaataatatgtccatttggaaagcattttggctgtatatatcaggtcagagtgctcctacattttgactcagcagtccctcttctgggaatctacccaaagaaataccccagca

SEQ ID NO: 854683 - DNA, 120 bp, Artificial Sequence
  ENSG00000260641_22 (sequence is synthesized)
gatggaaaaagttatacactgcaagatgtatatcatagcattatttatattgaagacttggccagaaattaaagatcaaagagtaggggtgatatccaattccttgtagttacttggacc

SEQ ID NO: 854684 - DNA, 120 bp, Artificial Sequence
  ENSG00000260641_23 (sequence is synthesized)
tccttcacattctgtgcctctgcacatgtcatttagagtttctgcctggggcattctccttgtctcttgtctgtgagctgatttctcttattcttcactacttttgttcaatgtctcgga

SEQ ID NO: 854685 - DNA, 120 bp, Artificial Sequence
  ENSG00000260641_24 (sequence is synthesized)
ggctccttctttattccctcaacacccgctgtgttcttccatcccggcacttaaaggctgcctgtaagaacttgtttacctacctgtctcctcaatctgctgtgactccttctagggtgt

SEQ ID NO: 854686 - DNA, 120 bp, Artificial Sequence
  ENSG00000260641_25 (sequence is synthesized)
gacctaacccttggtaatcttagaatcaccagagctctgcagatatggcaggtgcttgataaatatttattaaaggaatgaatgagtcatttgctcacagtttttacagctcttgaagat

SEQ ID NO: 854687 - DNA, 120 bp, Artificial Sequence
  ENSG00000260641_26 (sequence is synthesized)
actgcttatagagtatgtggcaatatatggatacattataatgttaaattttaaaggcactatatatggaattatctccaagtaatattgttaaattttaaaaacaaggaacaaaaacag

SEQ ID NO: 854688 - DNA, 120 bp, Artificial Sequence
  ENSG00000260641_27 (sequence is synthesized)
tgtacacagtaggctatcattttgtgaaaagataagctctgttggcaaaagaatatccatacacatatttccttgttaatgggtaggctatctatggaagaaaacgaaataaactggtaa

SEQ ID NO: 854689 - DNA, 120 bp, Artificial Sequence
  ENSG00000260641_28 (sequence is synthesized)
cagcgagttagggtggaatggggggcaaactgggggactaaagatactgataggaaggagacatgttttatttttaaataacccctttagtctgtttttgaaatttgtaccatgtatatg

SEQ ID NO: 854690 - DNA, 120 bp, Artificial Sequence
  ENSG00000260641_29 (sequence is synthesized)
atacacgttttgaaaaataaagcagtctacaaaacggtatgcagttgtatgaaaaaaagttaggagttaatttttgccaaataagaacagttataaggctgggtgattttgttttcatgt

SEQ ID NO: 854691 - DNA, 120 bp, Artificial Sequence
  ENSG00000260641_30 (sequence is synthesized)
ttctggtttgcaatttttaagtgtggttaaattgcttttacaattaagaagataaaattatacataaagatgtaagaaagtaactaagtaatcatatttatttcacgcaactccttcaca

SEQ ID NO: 854692 - DNA, 120 bp, Artificial Sequence
  ENSG00000260641_31 (sequence is synthesized)
actcaataaatgctgatctattttaaggagaaaaggagaaaaattttctgtctgaatactgctaaggccacctcccttataactctgaggttgaaaaatggttaataagtttaactactg

SEQ ID NO: 854693 - DNA, 120 bp, Artificial Sequence
  ENSG00000260641_32 (sequence is synthesized)
acaagttaatcagctcttcaagtggcagtgaaaacaggtaaagcgtgttcttctaatagttgcctggctgaggagcaagatatgacaacagcgttttaacctaagacaccaaacttaacg

SEQ ID NO: 854694 - DNA, 120 bp, Artificial Sequence
  ENSG00000260641_33 (sequence is synthesized)
agcttgtctgtctccacctgtgctttattgttcctgcccaccttcctgcctccctcctcttgggctctgtcattgtctgcctctctgctcctctctgtttttcttttgcttctctgtagc

SEQ ID NO: 854695 - DNA, 120 bp, Artificial Sequence
  ENSG00000260641_34 (sequence is synthesized)
cgccctgctggttgcctccacacccctcctgccgccttcctctcagaaccctagcagctgtgttcagcgtccccctcttaaagcagccacatgctctgggaagactggccctctgcgtca

SEQ ID NO: 854696 - DNA, 120 bp, Artificial Sequence
  ENSG00000260641_35 (sequence is synthesized)
catctggcagtcccattcctcttgctaatgtgtggttcaggaatgggcaggtggcccaattctggtcaacaagccatgagaagaatctgctagaggtttccttgcatctaagaaatggtc

SEQ ID NO: 854697 - DNA, 120 bp, Artificial Sequence
  ENSG00000260641_36 (sequence is synthesized)
tctttcgcccttggacttggttgggtttggatgtgatgcctcgatcctctacagcctgatgacaaagaccacaccaaggatggcagagtggaaggataaaaagaaccagggccttccagc

SEQ ID NO: 854698 - DNA, 120 bp, Artificial Sequence
  ENSG00000260641_37 (sequence is synthesized)
ctttgttgtatggctgacttaaccaaccttgaaggtggccttactcacgacttcctgtcagatgagacaaatttcttggttaagatactttgacaggggttttccgtttcatacaactga

SEQ ID NO: 854699 - DNA, 120 bp, Artificial Sequence
  ENSG00000260641_38 (sequence is synthesized)
aagtatcctgacttaaacaccttttgaggttctgccccaagcctttattgattttctcctcttgaatcaccaccagcatttctgcatttctcttagtaccacgttttttctattccccac

SEQ ID NO: 854700 - DNA, 120 bp, Artificial Sequence
  ENSG00000260641_39 (sequence is synthesized)
acccaccaccccctctcttccctagctgtttctgtctcaaacaatacagggaaacattttagggtgtctgacagatcacacccacccctttctcagaccttctcaaccacaaggtgctct

SEQ ID NO: 854701 - DNA, 120 bp, Artificial Sequence
  ENSG00000260641_40 (sequence is synthesized)
cccacctccagcgaggtttgtacttcacagttgatggggtcccggtagattcaggctgggccaacctgagagtctgtctcagtaacaaagggaaccctgcgcccagctgaagtgcaggca

SEQ ID NO: 854702 - DNA, 120 bp, Artificial Sequence
  ENSG00000260641_41 (sequence is synthesized)
atgtttacccgaaagctgggggtgggtccgcatttccaggaggaagccaagactctccctcatcctctgcagaaagaggaaggaagcctaaacagagaaaaacagtagcagagtctgaca

SEQ ID NO: 854703 - DNA, 120 bp, Artificial Sequence
  ENSG00000260641_42 (sequence is synthesized)
gcctgggtgctgtgtatggttgtgcattttgtgctctgaaaggctcccatccctgctaaaggcctgcttctagatttaaagaggactctgtctttgaggtctatgagatttttagatgga

SEQ ID NO: 854704 - DNA, 120 bp, Artificial Sequence
  ENSG00000260641_43 (sequence is synthesized)
atcattcatcacatcccatttgggctttagatactttgaagtgagtatctcaaattttcaaatcaaagaaccctgattaaaacaaaaggtcttctcacctcaaatcctttatgaaatgag

SEQ ID NO: 854705 - DNA, 120 bp, Artificial Sequence
  ENSG00000260641_44 (sequence is synthesized)
gtcaacttaaaatactttttagttagctatgatataaaattaaactatatttttgttatagttaatgaattaatattgtatcttctgttccttagtcgaaaagtgagcagttaaatggtc

SEQ ID NO: 854706 - DNA, 120 bp, Artificial Sequence
  ENSG00000260641_45 (sequence is synthesized)
tatttctctaacaaaacaattaactgattcctcaggatttaccgcccactgtgaccctcttgccctgtgcccacacatacctactaaagaccagttttcagatccccaggaataacataa

SEQ ID NO: 854707 - DNA, 120 bp, Artificial Sequence
  ENSG00000260641_46 (sequence is synthesized)
aatggggcatatctgtctcgtaaatatgattgaataagcatatgtagagcacagttgtttcacttttaagaatcaattataatcatttgtacaataaaatgaattatgtctttcacacaa

SEQ ID NO: 854708 - DNA, 120 bp, Artificial Sequence
  ENSG00000260642_0 (sequence is synthesized)
tccgaggctcaggattttgccagtttggaagagcactggatgatttggaagagcactggattccaagcttggaagagcacttggaagagcactggattccaagccagcttggaagagcac

SEQ ID NO: 854709 - DNA, 120 bp, Artificial Sequence; identical to SEQ ID NO: 817566
  ENSG00000260642_1 (sequence is synthesized)

SEQ ID NO: 854710 - DNA, 120 bp, Artificial Sequence
  ENSG00000260648_0 (sequence is synthesized)
tcaacctagatcccttgcatgcgtagttcacaatagtgttcgcatgcctatgaaaatctaatgccccttgcaggaggcagagctcaggcagtaatgcatgcttgcctgctgctcacctcc

SEQ ID NO: 854711 - DNA, 120 bp, Artificial Sequence
  ENSG00000260648_1 (sequence is synthesized)
tactatgcagcccggttcctatcaggccacagaccagtaccagtccacagcccaggggctggggacccctggggtgtcttctggctcctttgcactacctatgccaccaggcttagcagc

SEQ ID NO: 854712 - DNA, 120 bp, Artificial Sequence
  ENSG00000260648_2 (sequence is synthesized)
agtcctagaaacaggtgtatcaagaagactctgctcctggtgggctggggctgagatggcagaggcccatcccatcatatgccagaaagaggacacacttgtgagtccaggacttgggac

SEQ ID NO: 854713 - DNA, 120 bp, Artificial Sequence
  ENSG00000260648_3 (sequence is synthesized)
tctacagtttgcagctctgctcagactggcttctgggcagctcctcactttgccattaactcctcagagtcaagccccagatgccccttggaccagccccactcctaaggtcatctggtc

SEQ ID NO: 854714 - DNA, 120 bp, Artificial Sequence
  ENSG00000260648_4 (sequence is synthesized)
agggtctgcaggggtgacgctttcactgacaaaaggattttaattttggtcctatccctagtgtagtcccagccagtctttggtagtcacccacttttcctgctctgacagagatgggcc

SEQ ID NO: 854715 - DNA, 120 bp, Artificial Sequence
  ENSG00000260648_5 (sequence is synthesized)
agcccctcccataggggctgctcccgggaaaggctcatccacaggctaggcctctgccgggcctgctgccagccactgagcctttggcgattgagagctgactcccgactgaggtgtagg

SEQ ID NO: 854716 - DNA, 120 bp, Artificial Sequence
  ENSG00000260648_6 (sequence is synthesized)
cctccgtccagccagcacaaagggaggcacatcccttgcagcagtacccacagcccctgtcacggcaggctgtggccagaccctgattgagtggctccctctcagccatctgttcagtca

SEQ ID NO: 854717 - DNA, 120 bp, Artificial Sequence
  ENSG00000260648_7 (sequence is synthesized)
cccagaaacaagtcaagtcaaagctcccagtgagttcctgcctcagccatttggtgtcacaaggaaagccagggcgttgccacttcctgatttgggacaagatgtgtaaatgcattgagc

SEQ ID NO: 854718 - DNA, 120 bp, Artificial Sequence
  ENSG00000260648_8 (sequence is synthesized)
ctcagactccttatctgtagaacttggggtaatgataactacttcatggtgttttaagaattccatggaatcacagatggaaagagcctagatgtactatgcctgactcgttggagactt

SEQ ID NO: 854719 - DNA, 120 bp, Artificial Sequence
  ENSG00000260648_9 (sequence is synthesized)
cacataaaagggttttcagctgctgccacccccatcttttaagtattttcacaattccatacacctgttcctggcaaaaagaatttcattccctgttcacttacttgaaaacccctcttc

SEQ ID NO: 854720 - DNA, 86 bp, Artificial Sequence
  ENSG00000260648_10 (sequence is synthesized)
gaatttcattccctgttcacttacttgaaaacccctcttcttttttttcgagagagtggccaaatctcagctcactgcagcctcaa

SEQ ID NO: 854721 - DNA, 89 bp, Artificial Sequence
  ENSG00000260648_11 (sequence is synthesized)
atgtgcaccaccatgcctggctaattttattttttgtgagacgaggtctgttgcccaggctggagtgcaatggccaagtagatgggact

SEQ ID NO: 854722 - DNA, 88 bp, Artificial Sequence
  ENSG00000260648_12 (sequence is synthesized)
atgtgcaccaccatgcctggctaattttattttttgtgagacgaggtctcactgttgcctaggctggtctcgaattcctggactccca

SEQ ID NO: 854723 - DNA, 120 bp, Artificial Sequence
  ENSG00000260648_13 (sequence is synthesized)
gagccaccacgcccagcctgaaaacccgttttcctgagggaaaactgttctggaagtcaacagcagagtcgcttgccagggccacttctaatattgatgagattctggcctgtgctcccc

SEQ ID NO: 854724 - DNA, 120 bp, Artificial Sequence
  ENSG00000260648_14 (sequence is synthesized)
tccctcatatcttgtgtagcattgtgactagagattgggtaaaaagggaagaccttgccaaatgttgcccacctgctaccctctccggctgtctgctgacgttggccacttgagtctctt

SEQ ID NO: 854725 - DNA, 120 bp, Artificial Sequence
  ENSG00000260648_15 (sequence is synthesized)
gtcactgactgtgcccacccttggcccctgccagcatcctccacacaccttgcccacaggaggacagctggagcagggccacaggggagggcatgcaagggacctatctgacaaggccct

SEQ ID NO: 854726 - DNA, 120 bp, Artificial Sequence
  ENSG00000260648_16 (sequence is synthesized)
gggagcaggcagatgtccaggaagcgtctgttcctctgtaccctccctgccaaggaaggagcttgagaaaaatctcttgaaggtagagcccctgcttctggcctagctctcccggaggcg

SEQ ID NO: 854727 - DNA, 120 bp, Artificial Sequence
  ENSG00000260648_17 (sequence is synthesized)
cagggctgacgagtgccgccaaggtaagaccagctctggagtgtgggatatacaggccttcagtggcaacacctgctcattaatcaagcccttcctttccggaacctgccctggcttggg

SEQ ID NO: 854728 - DNA, 120 bp, Artificial Sequence
  ENSG00000260648_18 (sequence is synthesized)
atggtgggaaggaaggagaacagaatctgttcctcccttcctggccctgcggtgagaggcgctgactagtgtaggtgggtggagacaggcccatcagaaggcctgagtgaggcaccctct

SEQ ID NO: 854729 - DNA, 120 bp, Artificial Sequence
  ENSG00000260648_19 (sequence is synthesized)
gtacatgcagcacaagcgggtgtggagtgtggggaagcatctaaagatctagaaaaatttggcagcaaaggaattttacccacacactggagccctaggctttgtttctaaaagttttta

SEQ ID NO: 854730 - DNA, 120 bp, Artificial Sequence
  ENSG00000260648_20 (sequence is synthesized)
ttattctttaggaaaacttgggaagcactagtttatgaaaatttttagaacttcattgctacatggcctttccaaacacatccccagatggtttctttaaaaccatgcagtgggacaagg

SEQ ID NO: 854731 - DNA, 120 bp, Artificial Sequence
  ENSG00000260648_21 (sequence is synthesized)
ttgatataaacagttgttccagctgaatccaactcaccaaaacggtgcaggtgaggcaaattacttttgagactgcaagtactgtatatgtccattaacaaaaacacagtaaaagacttt

SEQ ID NO: 854732 - DNA, 120 bp, Artificial Sequence
  ENSG00000260648_22 (sequence is synthesized)
aagaaattgtaaggacactggcttgactgattcatgcggctgcaaatccctgggagccaagattcaaaggcagaaatgtctgtggtgacagcaccaccactgcctttgtccaaattacag

SEQ ID NO: 854733 - DNA, 120 bp, Artificial Sequence
  ENSG00000260648_23 (sequence is synthesized)
atctgtcacactcagagcttgctgctagcatggggctgccgtcggcagcaaagggaacttcatggatctgtgaggaggaacagctgagttcctgactgcctttaattttctctgaggctt

SEQ ID NO: 854734 - DNA, 120 bp, Artificial Sequence
  ENSG00000260648_24 (sequence is synthesized)
tgctgagtcacctaatctcttggggctgtggttttctcacctgtagaaggagggacagggctgatatccctagagtgcctttcagctctgggattcacgcattctaaggagggtggctag

SEQ ID NO: 854735 - DNA, 120 bp, Artificial Sequence
  ENSG00000260648_25 (sequence is synthesized)
agcacagaacctctaaagatgttcattcattccttcaacaaagtttacatgagcacctgccatgtgctaagcaccagggccgaccactggcccaaaaacacaggcatctgctggcctgcc

SEQ ID NO: 854736 - DNA, 120 bp, Artificial Sequence
  ENSG00000260648_26 (sequence is synthesized)
cactgcagcagcagccatacctttgcaggccggtggagcccccctttctacagcctgtggaaaaaatggttctaaatttgcagatcctctcatcaaatcaggaagtcaagaaacatgata

SEQ ID NO: 854737 - DNA, 120 bp, Artificial Sequence
  ENSG00000260648_27 (sequence is synthesized)
gaatagaggaactggtctcagtttgcacaggccatcagtttcacaagacaggaatcgaatatcaacagtggctgattatcacactcaggaattgaaaataattagaaaaagaggcaaaga

SEQ ID NO: 854738 - DNA, 120 bp, Artificial Sequence
  ENSG00000260648_28 (sequence is synthesized)
tgctgtggcaatcattggctggtcccctttggtctccagcacccattcccctttggtttagtaacagcaccctaactttcctccctatatcgtgtgataacagaagcactctctccagga

SEQ ID NO: 854739 - DNA, 120 bp, Artificial Sequence
  ENSG00000260648_29 (sequence is synthesized)
taccctccctgagagacaggcatatgacctgagccagccaatcagactccttccctgcaaggatgcactaggtggacagcatggtgggagcatctctcatccaggcaggggtgatctgtg

SEQ ID NO: 854740 - DNA, 120 bp, Artificial Sequence
  ENSG00000260648_30 (sequence is synthesized)
ggactgcagtcagtcctgttgcttagagaccccaggactgccatagcttctgtcctggacttgattctccaggctaacagagaacctgactgatgcagattcaggagagctggtttgttt

SEQ ID NO: 854741 - DNA, 120 bp, Artificial Sequence
  ENSG00000260648_31 (sequence is synthesized)
agttctcagttcctttcatgaaatggctattatctctgctagctactatagcagaaatctggaaaacatgatttttcttgatttatgaaattgttgatgtttcttcaggaatttccgcct

SEQ ID NO: 854742 - DNA, 120 bp, Artificial Sequence
  ENSG00000260648_32 (sequence is synthesized)
gcttctcataaactggcagaaacttagaaatgttacatttcttaaagagagtcattgtaattattatctgaataagatgatagtgttttgaatttaacgtaataaactctatctcctgcc

SEQ ID NO: 854743 - DNA, 120 bp, Artificial Sequence
  ENSG00000271916_0 (sequence is synthesized)
aactgggaagaaaactcggttacatatctaaggctcccaaacaaaaagacaaggtttaagacacctgctgctgcttccacaaaataaacataggttataatgcacttaagtcaacacccc

SEQ ID NO: 854744 - DNA, 120 bp, Artificial Sequence
  ENSG00000271916_1 (sequence is synthesized)
attaatccatattacaaggcagtaaaggccagaaatgctcccaagtttaaacaacatataatcctatttactgtcattcaactgattggactaggtctgattaaaagaaatagaaaacta

SEQ ID NO: 854745 - DNA, 120 bp, Artificial Sequence
  ENSG00000263171_0 (sequence is synthesized)
tttgtggttccaaaagcagttttatttttcttcttgtaaatcatgaccagtgagaaataatgtgtgccccaccccccaccagtgaagaagctgtgcgtgagtatcccacccgctctggga

SEQ ID NO: 854746 - DNA, 120 bp, Artificial Sequence
  ENSG00000263171_1 (sequence is synthesized)
tctgccctgggcggccttgggccttccccagctatctcctagcaacaggtccatggttgcctcagcaaccaagagttccatacaggcctcagaggagaaattttgggaagtacaggagac

SEQ ID NO: 854747 - DNA, 120 bp, Artificial Sequence
  ENSG00000263171_2 (sequence is synthesized)
accgaaagaaaagaaaaggcagaacttcctgggtgtgtgcagaattgggtcgaagctgtcagattcgctgggttggaggcacaggtggagcacacccagtaaggtttggggctcaccccg

SEQ ID NO: 854748 - DNA, 120 bp, Artificial Sequence
  ENSG00000263176_0 (sequence is synthesized)
gctccaaatacatccagagatgagaagaaagacggtgacctgattctggaagttcagatgtccatgttggtgacctgattcaggaagtctttcaggaggatatcaagcttggatcttgga

SEQ ID NO: 854749 - DNA, 120 bp, Artificial Sequence
  ENSG00000263176_1 (sequence is synthesized)
tagaactgggatgcgaggcactggtgattgggcaatatccctgcctgtaggattctttgtggaatgctggatattcatattctggtcttttcttatctctggttgcctcagggaagtaag

SEQ ID NO: 854750 - DNA, 120 bp, Artificial Sequence
  ENSG00000263176_2 (sequence is synthesized)
cccaagctggagaccaggagaatctagaggaaggaggtgacacaggcctgctcctagtctgatgggaaaacctacgttataccctcaaagaaccccaatctgatggagttttgctgttgt

SEQ ID NO: 854751 - DNA, 120 bp, Artificial Sequence
  ENSG00000226140_0 (sequence is synthesized)
ggcctaacttatgtgtcatgcaaaggatggctcttggaaaaatgcaaagaagcaggggccgctaagggagagatgtgaaggtcaaggaagctctgagctcctgacagccgcccttccagc

SEQ ID NO: 854752 - DNA, 120 bp, Artificial Sequence
  ENSG00000226140_1 (sequence is synthesized)
ttgaacaaagagtggtcaggagaagaaaccaacaagaaatgtaacctacctccagaactcaggaactcagcaaattctcccagattgtgatacctcatttctgaggacttcatctttacc

SEQ ID NO: 854753 - DNA, 120 bp, Artificial Sequence
  ENSG00000226140_2 (sequence is synthesized)
aaatctttcaatccaaagcaaacgaatactgaaaattcatgtatccaaagcaaatgaatactgaacattcacgttgagatgatctttaaatgtaattaaatagagataatgtaactaaaa

SEQ ID NO: 854754 - DNA, 120 bp, Artificial Sequence
  ENSG00000226140_3 (sequence is synthesized)
ggtagagcaatctgaaacacagagcagttgtccaaagaatcgagttaaggcccccaaaacagataaaattatcttgtcttgctgtgattcagattaaactaagacttcttttcctgttta

SEQ ID NO: 854755 - DNA, 120 bp, Artificial Sequence
  ENSG00000226140_4 (sequence is synthesized)
ctcaagatgtagacacttgatgagaaactggtctggagaaatctaggagctatattgtctttggacatccatattagaggatgagtaaatttgtaatcccattaagtattttttgagctt

SEQ ID NO: 854756 - DNA, 120 bp, Artificial Sequence
  ENSG00000226140_5 (sequence is synthesized)
tccaacagttttaattattattgggaaataaatcagagaagtctctaaagcaacaaagaattattgaggtttcgtttgtttggggattttaaggtctagtactgtggtattttttgataa

SEQ ID NO: 854757 - DNA, 120 bp, Artificial Sequence
  ENSG00000226140_6 (sequence is synthesized)
aaaaattgctcattaaagctgatcgcctttttttaaatgccaccaaagctttggagggtggagaataacccagttgaaaatctacaagcaatgctgtccacatcccaaatagactggtca

SEQ ID NO: 854758 - DNA, 120 bp, Artificial Sequence
  ENSG00000226140_7 (sequence is synthesized)
cgtgacttacagaagtaactttcctaaattcaaaaaactggtaggtggcagagacaaatccagaatccagcaaattctcccagattgtgatacctcatttctgaggacttcatctttacc

SEQ ID NO: 854759 - DNA, 120 bp, Artificial Sequence
  ENSG00000226140_8 (sequence is synthesized)
aatgtaacctacctccagaactcaggaactcaggtacccttaaggatatcagaaacaatgaaatatggattggcagaagcatcttcaccaccatcttcagatgtaattaatgcagctgtt

SEQ ID NO: 854760 - DNA, 120 bp, Artificial Sequence
  ENSG00000226140_9 (sequence is synthesized)
taatcagcatttttgttttcttgttatgttgtcctgatagtacagctacaaatggatttgatgtgctgaataatggtctactaggcctaaaaatgaaagtctagacccttagtcaaaaat

SEQ ID NO: 854761 - DNA, 120 bp, Artificial Sequence
  ENSG00000226140_10 (sequence is synthesized)
aacttggatctatgtggtaccaagaaaagaggaattataagaaaaagaatattagtttaatgttctgtaaatttttttcttaacctattctgtccagtatttactacttggctgcattcc

SEQ ID NO: 854762 - DNA, 120 bp, Artificial Sequence
  ENSG00000226140_11 (sequence is synthesized)
taaaacataaatttcacaggggcaggagtctttgtccattttgctcattaatgtgttaggaatactaaaaagagtgtctagcggggtagtcacataataaatacctgttgcatgaacaaa

SEQ ID NO: 854763 - DNA, 120 bp, Artificial Sequence
  ENSG00000226140_12 (sequence is synthesized)
ggggccggttagattggttgaaagggacatggagaccagaagggcttctttccagttccttctttgtggggaacattgggatcagagagggttctaagctcatttcagaagccccaacat

SEQ ID NO: 854764 - DNA, 120 bp, Artificial Sequence
  ENSG00000226140_13 (sequence is synthesized)
acttaaatgaacatggctagaaaaactgaagattgaatttactaatcattccttgcttctcatttgtctcaggattaagctttggagggtggagaataacccagttgaaaatctacaagc

SEQ ID NO: 854765 - DNA, 120 bp, Artificial Sequence
  ENSG00000226140_14 (sequence is synthesized)
tagtatggtccacgtagggtggcctcacagcaaagcctttggggtggtggacatgagccaggggcagatgacagatgtggcagtgactcagaggagtcttcaaaacccatgaaggctaag

SEQ ID NO: 854766 - DNA, 120 bp, Artificial Sequence
  ENSG00000226140_15 (sequence is synthesized)
gggaagccaagtcattagggcggatcctccagggtccagagacactagaaaagcatagactacgaatgagtttatccaccatagatgtcaacaacagctatcaataggctccctaggatc

SEQ ID NO: 854767 - DNA, 120 bp, Artificial Sequence
  ENSG00000226140_16 (sequence is synthesized)
agaactggctgaggcaagcttcagttgagctccgttcgcatcggtcaccacacgctcccctcccaactccagaaagcctgtggcccctcccatgctttggctgccatcttggaaaggagg

SEQ ID NO: 854768 - DNA, 120 bp, Artificial Sequence
  ENSG00000226140_17 (sequence is synthesized)
atcttcacattcccttttcaggaggctggtatctctctttcccacgtaagtccatctcttcagtttcagggatggagagaggaagatgtaaccttggaagcggaaggacacaatttatag

SEQ ID NO: 854769 - DNA, 120 bp, Artificial Sequence
  ENSG00000251661_0 (sequence is synthesized)
cacccgggacccacttcggagttcgcccccttcgggactcgcctccgggagacccccgagggggagagggcgcttcctccgcgtccatcgcccttgccgcccctgggccgacagcctgga

SEQ ID NO: 854770 - DNA, 120 bp, Artificial Sequence
  ENSG00000251661_1 (sequence is synthesized)
acaggccgcgagcgtggccttgggcccagggtgtcccggactcagcactgacgttcccggaaagagcccacgttgagtaggagctgagacctgcaggacacaggaactcctcccagggtc

SEQ ID NO: 854771 - DNA, 120 bp, Artificial Sequence
  ENSG00000251661_2 (sequence is synthesized)
ctggatccagctgctgctcacggcaggaggcccgaaaccagaaggcctgagcacttgcccggtccccaagagatgcacagaggccggaaggggcagtgcaggggctgaccaacctgctca

SEQ ID NO: 854772 - DNA, 120 bp, Artificial Sequence
  ENSG00000251661_3 (sequence is synthesized)
cgggactcgcctccgggagacccccgagggggagagggcgcttcctccgcgtccatcgcccttgccgcccctgggtggaactgttttacaaatctgagggccaccattccaggtatggct

SEQ ID NO: 854773 - DNA, 120 bp, Artificial Sequence
  ENSG00000251661_4 (sequence is synthesized)
agcctcccgttggaaaatttttaccatctttcttcaatgtagttcttattcttgtgggcaaaccaagacttttcgtttggaggggaccttgggatccccaggaggggaatctccgggagc

SEQ ID NO: 854774 - DNA, 120 bp, Artificial Sequence
  ENSG00000251661_5 (sequence is synthesized)
gggaggcatagctaaggcttcctctctagaaggtggagttgtcgttgcagcccgtttgcctcttcgtctgcctttctgctttgctgcttttcggggcctcctgcagcgcatcactgccac

SEQ ID NO: 854775 - DNA, 120 bp, Artificial Sequence
  ENSG00000251661_6 (sequence is synthesized)
ctcttccagggcccacacagcgtttaacagaggtggaatttcctccttatactttgttttttcacttccagccgttaaaagtcttttattctttgtaaacagcctcatgaacatgcaaag

SEQ ID NO: 854776 - DNA, 120 bp, Artificial Sequence
  ENSG00000251661_7 (sequence is synthesized)
gctattagctctgctttctaagcagaagtttctgcagacagagacggtacctctactgctgagtccaaagtcaccgcggcatacccagctcggcagactccccttagtacgaaactgctt

SEQ ID NO: 854777 - DNA, 120 bp, Artificial Sequence
  ENSG00000251661_8 (sequence is synthesized)
ccatcagtaaaatattcaatgtccaggtccccgaggggccaatctgttaaatctttccagcttgagaacactttatctaccacgtccacacagcaatgaaggggacttcctgtgtagggt

SEQ ID NO: 854778 - DNA, 120 bp, Artificial Sequence
  ENSG00000251661_9 (sequence is synthesized)
ccagccctacgggggcttagcgggtgttctccccgtgtgcagagacaagagatcgtaagaaataaagacacaagacaaacagataaagagaaaacagctgggcccaggggaccactacca

SEQ ID NO: 854779 - DNA, 120 bp, Artificial Sequence
  ENSG00000251661_10 (sequence is synthesized)
ccaagacatggagaccgctagtggctccgaacggctggctgcgctgatatttattgaatacaagacaagggggcagggtacggacggtgagtcgtccaagtaattgataaggtgaagcaa

SEQ ID NO: 854780 - DNA, 62 bp, Artificial Sequence
  ENSG00000251661_11 (sequence is synthesized)
gagcatgaaagtggacaaggagtgtgatcattcaagcaccacagggagggggttaggcctcc

SEQ ID NO: 854781 - DNA, 120 bp, Artificial Sequence
  ENSG00000251661_12 (sequence is synthesized)
tgtgatcattcaagcaccacagggagggggttaggcctccggatgactgcaggccaggcctggagaatatccagcctcccacaagaagctggcggagcagagtgttccctgactcctcca

SEQ ID NO: 854782 - DNA, 70 bp, Artificial Sequence
  ENSG00000251661_13 (sequence is synthesized)
acaagaagctggggtcggctaagtaacgggtgccttcccaggcactggcgttaccgcttgaccaaggagc

SEQ ID NO: 854783 - DNA, 76 bp, Artificial Sequence
  ENSG00000251666_0 (sequence is synthesized)
tacaggcgtgagccactgcacccggcccctctgatttttaaatgtgtaactaaattaaaaaatttttaagcccaat

SEQ ID NO: 854784 - DNA, 120 bp, Artificial Sequence
  ENSG00000251666_1 (sequence is synthesized)
aggcattagccaccaagcccagccaaaaaaaaaaaaaactatttttaaaccctgtgtaagtcagacctgtctgcaagccagatttgggccaaggacccttagcggattagatcagaatct

SEQ ID NO: 854785 - DNA, 120 bp, Artificial Sequence
  ENSG00000251666_2 (sequence is synthesized)
acctccacaaaggtgaacccctgagagagaaaaggttgcttcctatcagcagaatttagacccctacattaaagttttgcctcccccattctttggttgtggttatgttaaggagatact

SEQ ID NO: 854786 - DNA, 120 bp, Artificial Sequence
  ENSG00000251666_3 (sequence is synthesized)
ggtactaagaaaaactactaaaactacacgtacacatggtccccaacttcctatggttcagctttatgatttttttcaactttacgatggtgtgaaagcaatagatgttgagtagaaact

SEQ ID NO: 854787 - DNA, 120 bp, Artificial Sequence
  ENSG00000251666_4 (sequence is synthesized)
gtacttctcttgcactgctaggcagcaattggtaataagtttatctagatgtaaccccattgtaagtcaaggaacatctgtagagtgagagaaagcatggaaatcttctgctgacttgca

SEQ ID NO: 854788 - DNA, 120 bp, Artificial Sequence
  ENSG00000251665_0 (sequence is synthesized)
gtcccctcatgggtgctaccagagtccctccccagcctgagactcctgaagccccagactcagggattttctttccactaagctctgaacaagaagctgaagctcaaggaaggaggttct

SEQ ID NO: 854789 - DNA, 120 bp, Artificial Sequence
  ENSG00000251665_1 (sequence is synthesized)
gggactcatctcagatcccatggccaggaagcggtggccactctggaattcttgaccctgcccagaccagcaccttccacagcagagaccccctccaaggagcgggcgacgtgtgacttc

SEQ ID NO: 854790 - DNA, 120 bp, Artificial Sequence
  ENSG00000251665_2 (sequence is synthesized)
cccatgggtggactctgggctgcagtgatcggctagcggtgccatctttagtctgggagctgtgtgaagcctgctccccaccttccccctcctgcaaatattgggggaggggcatggagg

SEQ ID NO: 854791 - DNA, 120 bp, Artificial Sequence
  ENSG00000251665_3 (sequence is synthesized)
gttccccggagcagagctggctgcccttggcactgggcccaggcggaggagtggcaagaccaacagttcctggagcacaagtccctcagccggtgcccagtgccagccatcgccatgttc

SEQ ID NO: 854792 - DNA, 120 bp, Artificial Sequence
  ENSG00000251665_4 (sequence is synthesized)
tcatctgccagcagcaaaatgagaaaaataaggacaatatagtgaggttttactaaagctaggtttactcaatccaaaagactgtccttttatctgagctttgtattttcaatcgtgtgt

SEQ ID NO: 854793 - DNA, 90 bp, Artificial Sequence
  ENSG00000251665_5 (sequence is synthesized)
gtgtctgtgtgtgtgagcacaaaaggacctttcctttgacatttccttttaatgacctcaaactcagcaaaataaaaaaactggtgacta

SEQ ID NO: 854794 - DNA, 120 bp, Artificial Sequence
  ENSG00000251665_6 (sequence is synthesized)
acaaccacgtgtcccctcatgggtgctaccagagtccctccccagcctgagactcctgaagccccagactcagggattttctttccactaagctctgatgaggaaactgaggctgggaga

SEQ ID NO: 854795 - DNA, 120 bp, Artificial Sequence
  ENSG00000251665_7 (sequence is synthesized)
ggcagccacacagctagagtgaatggtgaactggactaggaacatgggtgggcgtgtttcccacactgccccacagtgacacagcgggggcggggacagcccttaaaatccgatcctccg

SEQ ID NO: 854796 - DNA, 120 bp, Artificial Sequence
  ENSG00000251665_8 (sequence is synthesized)
ccttggggaggcccttcgcacacttctctacaatttgaggggccgtcggctgcaataaccacatagtggggccactacaagtcaacagaagcagaccctctctccaaaaacacagcagac

SEQ ID NO: 854797 - DNA, 120 bp, Artificial Sequence
  ENSG00000251665_9 (sequence is synthesized)
cctgtctccaacacagactaggcctagttccgacttccagaatgccgtggtccagccctggcattgctgactcatggggtcaggctggcgttgctcctctgtggggctggaggggcccca

SEQ ID NO: 854798 - DNA, 120 bp, Artificial Sequence
  ENSG00000226149_0 (sequence is synthesized)
gggtttgagcagagccatggcatatactgatgtgagattaaatttacctacacctagagaaataattggagcacatgtctatttgggccaagaggataaaggccagtagaggaatcagat

SEQ ID NO: 854799 - DNA, 120 bp, Artificial Sequence
  ENSG00000226149_1 (sequence is synthesized)
caaagaacttcctcagggaagtgtgcagagaactggagtggaccttcccctaggaagctgcccaaaacgagagtgctggaaagctggccgcagtgaggcacttcagatcccaagggtatg

SEQ ID NO: 854800 - DNA, 120 bp, Artificial Sequence
  ENSG00000226149_2 (sequence is synthesized)
ctgcaccatctgcaggagcccagcaagccaaagccaggcatcccatctggagagagagaagactgaagcagaaacacaatgggaaggaagcaaagatggaggtagaatagctgccacgag

SEQ ID NO: 854801 - DNA, 120 bp, Artificial Sequence
  ENSG00000226149_3 (sequence is synthesized)
ccctgatagtttcaggccttgactgcatgtccttaggatctcaggcttctctgtttttcctttgggttccatgaaaaaccccgatattttggtaataaacacccttgggttgctttgcct

SEQ ID NO: 854802 - DNA, 120 bp, Artificial Sequence
  ENSG00000226149_4 (sequence is synthesized)
acactgctaggaagaaatacctgagactggggcagcataagatcatttcagaatgaagatgctttgggatctgacttcggactgtaagaatgacaaactctgaatgggtgcaaaggtagc

SEQ ID NO: 854803 - DNA, 120 bp, Artificial Sequence
  ENSG00000226149_5 (sequence is synthesized)
ggaagctgccacaggtgggagcacttgctgctggaccctaggcactgttgaaacaactgcaccatctgcaggagcccagcaagaggtgccttcagccatgattataagtttcctgaggcc

SEQ ID NO: 854804 - DNA, 120 bp, Artificial Sequence
  ENSG00000226149_6 (sequence is synthesized)
cataagaaactaaagaacttgtttgcatccctgctagacaaaaacctacaagttaacctttgcccgtatggagttgtaaaacagaccagttgatagaaagagaagcctgcttcccgaagc

SEQ ID NO: 854805 - DNA, 120 bp, Artificial Sequence
  ENSG00000226149_7 (sequence is synthesized)
accatgcttcttgtacagcctgcagaacttgaagaaacactccatattagttttctggagccatcgttatgaagcaacacagactgggtggcataaacaatggagatttattttttcaca

SEQ ID NO: 854806 - DNA, 120 bp, Artificial Sequence
  ENSG00000226149_8 (sequence is synthesized)
ataaacaatggagatttattttttcacaattccggaggctagaagtttgagatcaaggtgttggaaagtgtctcaggatgatacataccggtttttaactttggtgtcatcaaatgcaat

SEQ ID NO: 854807 - DNA, 120 bp, Artificial Sequence
  ENSG00000226149_9 (sequence is synthesized)
tgcaatgtgactgtttcttgaaagcccgaactgcttgctccctatcaaaagagctggttctgattctgcagcacaaggaccctgtaaaatacccaggagagaaaaacaggagattatgga

SEQ ID NO: 854808 - DNA, 120 bp, Artificial Sequence
  ENSG00000226149_10 (sequence is synthesized)
ctgttctttaaaaaggcacaccttgagaattcctaatctcttctcaactggaaaaatttcagaggaaaaaagcaccggggcagagctagaagacttggattccagctttggaactgcatg

SEQ ID NO: 854809 - DNA, 120 bp, Artificial Sequence
  ENSG00000226149_11 (sequence is synthesized)
acactcaatttctgaggccaatctatgaaagaaggaaggcagactacaccaccatgagggtctttccaactcgagcatttacaggtctgggatacttttacagtgagaggaaataaatga

SEQ ID NO: 854810 - DNA, 120 bp, Artificial Sequence
  ENSG00000226149_12 (sequence is synthesized)
catcatcacaatgaaaaaggagatcttactgttcttggaaggatctttaaccacagcattcgttttggcgacgctgtctgctagtttattgtaattcttcttcaggccatcgaggttctg

SEQ ID NO: 854811 - DNA, 120 bp, Artificial Sequence
  ENSG00000226149_13 (sequence is synthesized)
tgagggtatgaaaaacaaaacaaagggtgtggagttagtggcttaatccatgcttgacaaagcgaggctgtggctggctgacctcggacacatttacaaagggaaaaggctgaactttgt

SEQ ID NO: 854812 - DNA, 120 bp, Artificial Sequence
  ENSG00000226149_14 (sequence is synthesized)
ctcattcaggtgtagcaaatgaagcaaatttttttaggtaaattaaattttctcagggacttttgctatgaatacctgattagctcttaaagtagtgacgtgactattctaaatgttcat

SEQ ID NO: 854813 - DNA, 120 bp, Artificial Sequence
  ENSG00000226149_15 (sequence is synthesized)
tgtataagatcatattgtgatttgctgctgaacttattcacgagataaatttatccacatgagcttcatgaaaacgaggcttaagatttaatctgcatttccaaagcagggcaggggttg

SEQ ID NO: 854814 - DNA, 120 bp, Artificial Sequence
  ENSG00000226149_16 (sequence is synthesized)
gggtgggggttggagggaaactaacgtattttcattttaggatagagaaacattttcaggtatgttaggccatgcatttatacttgttttcagcattggaaattttctatatacttacta

SEQ ID NO: 854815 - DNA, 120 bp, Artificial Sequence
  ENSG00000226149_17 (sequence is synthesized)
ctgaaaaagggacatgaaaatctgaaaagttactcaggtttttaaacgttaaaaaagtaaaaaccaccgagattttaatattaactgtgttgtataaatatgtgcatttgtctcctgatc

SEQ ID NO: 854816 - DNA, 120 bp, Artificial Sequence
  ENSG00000226149_18 (sequence is synthesized)
ctaatttgtatattgtacctatagatgactactagtgtgtataggttagtggttaagatcataggctctgaaatcaaactgtggggtttaagtttcctctgtgccacttttaacaatggc

SEQ ID NO: 854817 - DNA, 120 bp, Artificial Sequence
  ENSG00000226149_19 (sequence is synthesized)
cttcagtatcctctgtctgtttctcacctgtaaagtggggataataacagtatcttaactgatgttaagtgttagtgctaacttatgttatacacagaagacaagttgtccttctgtgtc

SEQ ID NO: 854818 - DNA, 120 bp, Artificial Sequence
  ENSG00000226149_20 (sequence is synthesized)
agtaggttctgtatctgtatgaatacctaattagctcttaaagtagtgaagtgactattctgaatgttacctatgttatctatacttatgttatctatataaccaattgagatagatata

SEQ ID NO: 854819 - DNA, 120 bp, Artificial Sequence
  ENSG00000226149_21 (sequence is synthesized)
tatatatatatatatatatgaccaattgatgcaagcaaatgaagcaaatgtttttgctccaattggtatgaggattacatacacttaacataagtatattaagtactcaataagtgttta

SEQ ID NO: 854820 - DNA, 120 bp, Artificial Sequence
  ENSG00000226149_22 (sequence is synthesized)
taatctttgttgttattatatcatgctttaacaatataaaaatagtaaaagtagtatctttaaaataacgtgtgctttcaggaactaataccatgcaaaaatttccagcagttctaatag

SEQ ID NO: 854821 - DNA, 120 bp, Artificial Sequence
  ENSG00000226149_23 (sequence is synthesized)
gtagaaagatattacagacatggtttgaccactaatgtttttgaaagttggaatagttaaagaaattgaattttatcaagagagaatgcagtgggctatcacctattactgcaggtactt

SEQ ID NO: 854822 - DNA, 120 bp, Artificial Sequence
  ENSG00000226149_24 (sequence is synthesized)
gacaacattgcccacccattactggtatggaatataaccacaacacatgagctgtaaagagtgtagtgactgtgaccatctttgttgtattggtgataagaatgtaaattggcatagcct

SEQ ID NO: 854823 - DNA, 120 bp, Artificial Sequence
  ENSG00000226149_25 (sequence is synthesized)
gtggaagaaacaattcaggtatgtgtattgaaaaccttagacatattcatcttttggccttataatttcctaactacttatctattttaagaataactggaaataatgaaaaagcttgat

SEQ ID NO: 854824 - DNA, 120 bp, Artificial Sequence
  ENSG00000226149_26 (sequence is synthesized)
gcatagaggagctcatcagagtatagtttctaatagtgaaaaactggaaacactctcaatagcctaccatggtctattaaaagtagaataaattggaaaggcagagtgttccagagataa

SEQ ID NO: 854825 - DNA, 120 bp, Artificial Sequence
  ENSG00000226149_27 (sequence is synthesized)
ggagtcagactttggagtctgactcgctagaataaaattcttactctgccttttactagtggtgtgagtgggttggttgcttaagatagctaattcttattaactcgactaaaagtagaa

SEQ ID NO: 854826 - DNA, 120 bp, Artificial Sequence
  ENSG00000226149_28 (sequence is synthesized)
agactatattttacagagccgttatgagaattacatataatattgaatgaaaattgtttagccctgggctggtgaaagtactcattattatcattactacatagtacttatgccatttat

SEQ ID NO: 854827 - DNA, 120 bp, Artificial Sequence
  ENSG00000226149_29 (sequence is synthesized)
tgaacaaacattatcttttaaaactctgatacaaagtctttgatgtctgtgctgttaatatcctcatttgacagatgaggaaacagaaatagtctatggccaaatcaccctgaaagcatc

SEQ ID NO: 854828 - DNA, 120 bp, Artificial Sequence
  ENSG00000226149_30 (sequence is synthesized)
cgatcttttctgatctcaaaagctaagcagggttgggcccggttagtacttggatgggaaactgagaaatagattggacaggtagctttcccaaattcacacagatggtcggttacagtg

SEQ ID NO: 854829 - DNA, 120 bp, Artificial Sequence
  ENSG00000226149_31 (sequence is synthesized)
ctgggatttgaataccagcagtctgacttgagcccatgctctaatcaaggctatatgacctccaatactataaaatagttgtgtgtctctgtgtgtatatatacttaacataaaatcata

SEQ ID NO: 854830 - DNA, 90 bp, Artificial Sequence
  ENSG00000226149_32 (sequence is synthesized)
gtgtgtctctgtgtgtatatatacttaacataaaatcatattagacatacacatttatatgatgtttagatacagggagatggagtctcg

SEQ ID NO: 854831 - DNA, 85 bp, Artificial Sequence
  ENSG00000226149_33 (sequence is synthesized)
acaccgccatgccaggctatttttttgtattttagaagagacggggtttcaccgtggttgcccaggctggtctcgaactcctgag

SEQ ID NO: 854832 - DNA, 120 bp, Artificial Sequence
  ENSG00000226149_34 (sequence is synthesized)
ttagtggtgtattactagtttctaaaaacaggacaccaaattgtatacaaggtaggacatctactatgcagataaaagggcctggaaaccaacatggttgcctctgtcatggtattataa

SEQ ID NO: 854833 - DNA, 120 bp, Artificial Sequence
  ENSG00000226149_35 (sequence is synthesized)
gtgtcttttattcatgattctggatatttctgtgttttccaacatttcaactgaaaatgtactgttttgtaaacaaaattgaagatggaaatataggtaagtcattcaatgaagatgtaa

SEQ ID NO: 854834 - DNA, 120 bp, Artificial Sequence
  ENSG00000226149_36 (sequence is synthesized)
gaataggtttagataggttatatttctttcaattctaatatcagagtgtactagatatcctgaataatcttccttctgaaatgactcagaatactgggtaaaaattagaaagcaatgggg

SEQ ID NO: 854835 - DNA, 120 bp, Artificial Sequence
  ENSG00000226149_37 (sequence is synthesized)
ataatataaacacttacatgtgtcagaactggggtgggcgtaggaaaggctggggtgggaactggctcaggctggataactatttcagctggagctgctccatcttcatcttcacggagt

SEQ ID NO: 854836 - DNA, 120 bp, Artificial Sequence
  ENSG00000226149_38 (sequence is synthesized)
ttctgatgggcacagcgaccaatgtcagcatttttgaaggacacaggccttgcaaagtccatggggctaatagaatgtaataaataagatttttttattttcgtttttttgcttccttac

SEQ ID NO: 854837 - DNA, 120 bp, Artificial Sequence
  ENSG00000226149_39 (sequence is synthesized)
aattaagcccaatccccgcatgcctttttaagtccattagtgtgcttttctcagtctaagttgaagatcctcattgtttccctcctcccctgcatagctgtagacaatgtagatgcattg

SEQ ID NO: 854838 - DNA, 120 bp, Artificial Sequence
  ENSG00000226149_40 (sequence is synthesized)
ggacccctaatagcaagaaataaaaataaaaaattagtagtagtaatgaggagatccacttacacagagttaataacaagattccatatgcagccttcaaaaggaggaatatttctgagt

SEQ ID NO: 854839 - DNA, 120 bp, Artificial Sequence
  ENSG00000226149_41 (sequence is synthesized)
ggggaaggttgaaattcaggtggagcacccccaacgaaaagctttttaacttcgataggctgttcaactgtcaggttttgcatgtatcttctgttttcatccacttgaactgtaaagatg

SEQ ID NO: 854840 - DNA, 120 bp, Artificial Sequence
  ENSG00000226149_42 (sequence is synthesized)
ctggagtactgtgggttaccactggaggggtttgagcagagccatggcatatactgatctacgtgtatgtgtttctaagcaaaacttcttggaagaaaaggaaattcttagaagcaatta

SEQ ID NO: 854841 - DNA, 120 bp, Artificial Sequence
  ENSG00000226149_43 (sequence is synthesized)
gagtatcacacccatgctataccctttgattcattagcttgctctgtttttctgttattttgaaattacccaagtggaagcagaaaaactgccaggaaaatgtcacagccaccccttact

SEQ ID NO: 854842 - DNA, 120 bp, Artificial Sequence
  ENSG00000226149_44 (sequence is synthesized)
tagagtcagagtcatcacaattggggggtcttcattaagctacactttttaatggaacatcctagtgaggtttgagagtacagctttatggtctatattacattactaagccgattttat

SEQ ID NO: 854843 - DNA, 120 bp, Artificial Sequence
  ENSG00000226149_45 (sequence is synthesized)
acctatattttggtggagggtcctactcttctatcacccactactttgtatgggagtgttaaaatcacctgaagccttgctcaaatgctgattcctccatgaaacgtttcctgatatccc

SEQ ID NO: 854844 - DNA, 120 bp, Artificial Sequence
  ENSG00000226149_46 (sequence is synthesized)
ccaaacaaaattaatctttttttctaagtatctacagaactgtgctttttttgtctttaatcatttttacttgccttctttcaatttcttaccagttgataatatattcttgatagaaag

SEQ ID NO: 854845 - DNA, 120 bp, Artificial Sequence
  ENSG00000226149_47 (sequence is synthesized)
aactatgttacttatttctgtttcccatcataatctccacatattatgtgcttattagtttatttctaatgaacatacacgtatttctatgataccacgggactgaatattctatcttaa

SEQ ID NO: 854846 - DNA, 120 bp, Artificial Sequence
  ENSG00000226149_48 (sequence is synthesized)
agtacattaattgcagattttaaaaattattatgcagttttcattgtagagacctttcacttatttggttaattccttagtattttattttatttgtagctactgtaaatggaattactt

SEQ ID NO: 854847 - DNA, 120 bp, Artificial Sequence
  ENSG00000226149_49 (sequence is synthesized)
tcttgatttctttttctgattgtttgctgttggcatatagaaatgttactgatttttgtatgttgactttgtatcctgcagctttactgaatttatcagttctaatggttttttggtggg

SEQ ID NO: 854848 - DNA, 120 bp, Artificial Sequence
  ENSG00000226149_50 (sequence is synthesized)
agccctcaagaagcaggcagaagcagtgcttaataaaacggtattctcagatgagccaatgttatggaaaagagttgtaccaaactgatcactctaacatgtaacctcaaagtttaaagc

SEQ ID NO: 854849 - DNA, 120 bp, Artificial Sequence
  ENSG00000226149_51 (sequence is synthesized)
cattatggtgtatagtcctttgtttttaaggacatccaaggtgatgtttactatcaatcattgatttgcaacaggatggatactgttttaataaaacttctatcaccttcctttattaaa

SEQ ID NO: 854850 - DNA, 120 bp, Artificial Sequence
  ENSG00000226149_52 (sequence is synthesized)
aacgggcagccctcaagaagcaggcagaagcagtgcttaataaaacgagaggatgggatgagtcaggcccaaaagactattacttcagcttgtgcaactgggaaaatgatcttagaggaa

SEQ ID NO: 854851 - DNA, 120 bp, Artificial Sequence
  ENSG00000226149_53 (sequence is synthesized)
gggttaccactggaggggtttgagcagagccatggcatatactgattggaagcagaaaaactgccaggaaaatgtcacagccaccccttactgaacagcagaaacaccagcaaaacacca

SEQ ID NO: 854852 - DNA, 120 bp, Artificial Sequence
  ENSG00000266521_0 (sequence is synthesized)
ttcaataaataattgttaaaattagaacaacgtgattgcgaggtgagatgttaaattgacatcttgaaaagcagaaacttagtatgggcatccaaacactagaatcagcaccggattacg

SEQ ID NO: 854853 - DNA, 120 bp, Artificial Sequence
  ENSG00000266521_1 (sequence is synthesized)
gaagaaaagacacacacaccatacttttaaggactgtggaggattcaccaccacaccgggaagcaacagcctgggctccagagtcggacactacactcaccagactacagaggattctca

SEQ ID NO: 854854 - DNA, 120 bp, Artificial Sequence
  ENSG00000266521_2 (sequence is synthesized)
tgaagtttcctcatggtctgggaccctagctcttatcgtaacaagttgtttggcatgagacccagtcacaagggcccttcccgactggactcaaggaacacaaaaaggtcaacttgtgtt

SEQ ID NO: 854855 - DNA, 120 bp, Artificial Sequence
  ENSG00000266527_0 (sequence is synthesized)
agacactgtgctgggtgctggcaggacgagagtggtgaactaaaccaagtccttcctgtggagctcactgtctatggactgattcttccttcgtgtcctcatcatctgctcagtccaggg

SEQ ID NO: 854856 - DNA, 120 bp, Artificial Sequence
  ENSG00000266527_1 (sequence is synthesized)
atgcagtagacgctagttgctacctgaggggacatctgctctgggactcagagaatgataaagagatctccagaataaatgaatcactttcagagaaaagtaaaagaacaaaaacacaaa

SEQ ID NO: 854857 - DNA, 120 bp, Artificial Sequence
  ENSG00000266527_2 (sequence is synthesized)
aataaaaaacacacaaaagaagcaaaaaaatactacattctccccaaatttcacatcgtaagtggctggaagtgcaaacataaaggatgctagcaacatggccgcggcaagaggagcctc

SEQ ID NO: 854858 - DNA, 120 bp, Artificial Sequence
  ENSG00000266527_3 (sequence is synthesized)
tggagcaaggtcagcttctcccctgatttctggctttcagccaacaaggccaatggctcttccaaaccagctgctgctgctgagctccagaagaggggcctctcaacttccagaggccag

SEQ ID NO: 854859 - DNA, 120 bp, Artificial Sequence
  ENSG00000266527_4 (sequence is synthesized)
gaaggctcaccctcggagctctcagttttgttttttatactgcaagacagagagattcgaagtggaggagggaagccaacaggggcaggaggactctggagaaatctcaggcctccatca

SEQ ID NO: 854860 - DNA, 120 bp, Artificial Sequence
  ENSG00000266527_5 (sequence is synthesized)
tctggacctcacctgcctcctgcaggggcttcttggaggtggtgaaacccaagcaggaggcactgggcagccaaatctctagttcatgcctggactccctttcttctttagtgaaaaagg

SEQ ID NO: 854861 - DNA, 120 bp, Artificial Sequence
  ENSG00000266527_6 (sequence is synthesized)
aagctgacagggctggggagggaggatagtgataactcactctggagagtgagttagaaggacagggaggtatggtcacactccaactctctaggtccttctaataccagcatctaaggg

SEQ ID NO: 854862 - DNA, 120 bp, Artificial Sequence
  ENSG00000266527_7 (sequence is synthesized)
ccaagacgccagtctacattcctgactcactcccttcctccaccaaaacatactgaatgtttcctccataattctgccccagtgtgaataccccccagagacagggagtcccccgccagg

SEQ ID NO: 854863 - DNA, 120 bp, Artificial Sequence
  ENSG00000266527_8 (sequence is synthesized)
acagcttccctctctgcggcatcacagtgccaccgccggctctggcactatagctttccctccttcttcctgctgccccctctcagctcgatcagcactgttgggcagaaatttgccttt

SEQ ID NO: 854864 - DNA, 120 bp, Artificial Sequence
  ENSG00000266527_9 (sequence is synthesized)
gcctcctccacagggaccattctcaactgtggggcaggagtggcctctagtggtcatggggatcacagccatcatcaccccagctcgcaggcagagcccaggggccaagcacctactttg

SEQ ID NO: 854865 - DNA, 120 bp, Artificial Sequence
  ENSG00000266527_10 (sequence is synthesized)
ttcatgatccagtcagcatcttcaatggctcttttaataatctgctggattctctcagggttgtcttcatctgaatgaacccgaaaactctgcaagtttaagcataaagaaagatgacta

SEQ ID NO: 854866 - DNA, 120 bp, Artificial Sequence
  ENSG00000266527_11 (sequence is synthesized)
ggcaaaattcccaggacaggcagcttcagagcaccaatcacaggccagggacactgctgggcactttatacccagcagctctcttcatcctccatagactgttatgattatcccacacag

SEQ ID NO: 854867 - DNA, 120 bp, Artificial Sequence
  ENSG00000266527_12 (sequence is synthesized)
agatgaggaaacagaggctcacttgctgctgaacaatagcatttgaatcctagtctatgtgactgcaaagcatgtactcctgccaccaaggtaggtgcaaaaagactggcccccaagtta

SEQ ID NO: 854868 - DNA, 120 bp, Artificial Sequence
  ENSG00000266527_13 (sequence is synthesized)
ctgccaaatcaagctaggcccaaaggctatcaggcagtagagtccaaggggaaacttccatctctcttcctcagaagacgctgctttccccagggtgagatctctgcataggctttacag

SEQ ID NO: 854869 - DNA, 120 bp, Artificial Sequence
  ENSG00000266527_14 (sequence is synthesized)
cagggaggaagaagtaggacttctctcggcccagtgctaggagagctacacagggaagggaggggaggtagtagatagagtggcctcaggaaatccacccaggcccagtgcagagcatgg

SEQ ID NO: 854870 - DNA, 120 bp, Artificial Sequence
  ENSG00000266527_15 (sequence is synthesized)
tgcagagcatgggatactgtttgcttttgaccagatattcatccttgagaagcaacctaagattcaggttttgcttttcaaaaagaactggcaccaggcatggtggctcatgcctgtaat

SEQ ID NO: 854871 - DNA, 120 bp, Artificial Sequence
  ENSG00000153363_0 (sequence is synthesized)
gtgacgttccctacgcggtcgggcgttgggtttcgcggcgctcgccgcactggttgttcagcaccttcggtccggttgaggttgtcaagtcggaccaaacaggttgtttctctgcagttt

SEQ ID NO: 854872 - DNA, 120 bp, Artificial Sequence
  ENSG00000153363_1 (sequence is synthesized)
ccaacatggcagggaggtttaatagacatggataagaagtccactcacagaaatcctgaagatgccagggctggcaaatatgaaggtaaacacaaacgaaagaaaagaagaaagcaaaac

SEQ ID NO: 854873 - DNA, 120 bp, Artificial Sequence
  ENSG00000153363_2 (sequence is synthesized)
caaaaccagcaccgatcccgacatagatcagtgacgtctttttcttcagatgatcctatgtttccttcttcctcatcatcgtcttcaggaagccagacagattcaagtattgaagatgct

SEQ ID NO: 854874 - DNA, 120 bp, Artificial Sequence
  ENSG00000153363_3 (sequence is synthesized)
agagaaaacaaataaatgggaaaaaagaaaggacaaaatatgaaacaccaagaaaaagagaaggaaaaaaaggaggaaacaaccacatatgtcacctttccaaggaatataattcaatat

SEQ ID NO: 854875 - DNA, 120 bp, Artificial Sequence
  ENSG00000153363_4 (sequence is synthesized)
cagaatgatttggaaggaaaaaacctacaggaagctattgtagcctagtgaggaagataaatattaatacagccaatttatagatcagactaaagacaatgattggggcattgaaaagaa

SEQ ID NO: 854876 - DNA, 120 bp, Artificial Sequence
  ENSG00000153363_5 (sequence is synthesized)
cagatagaagaaatattgcaaagagggactgaaactgggctgacccttttgatttccaagctcagcgttttggtgtaaggcggccaaagaaggatgcggagcccagcactgtgaagccta

SEQ ID NO: 854877 - DNA, 120 bp, Artificial Sequence
  ENSG00000153363_6 (sequence is synthesized)
caaaaacattgatgcgctggcttggggatttgaatttgaacatctttcacactaagttcagactcatgaaaccaatcttcagatgctctgtaaaccacataataaagagtttggaaatta

SEQ ID NO: 854878 - DNA, 120 bp, Artificial Sequence
  ENSG00000153363_7 (sequence is synthesized)
ggaatttgaagagataaaagtcaaagattggttaacatggtagttaacatggtgctaagcttatagtgtcctttgctgcttttcaaatacttctcagaaaactatgcagacgggtaaaac

SEQ ID NO: 854879 - DNA, 120 bp, Artificial Sequence
  ENSG00000153363_8 (sequence is synthesized)
aaaccttataattacaattctttagattctttttaattttggtgttaacatagttataaaatagcctatgtgctttgaaataaatgcaagtaatagagacataaattaaatgaaaggtaa

SEQ ID NO: 854880 - DNA, 120 bp, Artificial Sequence
  ENSG00000153363_9 (sequence is synthesized)
gctacactcttttctctttatttaatttccctatgggtatcactcaagtatttgctgtacaaccttagatttttcctctgtgcacatggaaataaataaaataaatataaataaatatgt

SEQ ID NO: 854881 - DNA, 120 bp, Artificial Sequence
  ENSG00000153363_10 (sequence is synthesized)
ataattttatgctaacaaaaatagtctatcaatttgcttctctaaatttatttcatataatagtttatgaactatgtgtaacatatataaaacagacaatagtaaagcatcatgaaccta

SEQ ID NO: 854882 - DNA, 120 bp, Artificial Sequence
  ENSG00000153363_11 (sequence is synthesized)
cagacaatagtaaagcatcatgaacctatttaactagaacattaccaattatgattatctttcagtatttttcttcctccttctattcacttgccttcgcattaaaagtaatatcctaaa

SEQ ID NO: 854883 - DNA, 120 bp, Artificial Sequence
  ENSG00000153363_12 (sequence is synthesized)
agttgtggcaattctagcctactttttttttatattcaagtgtgttgtagggaaggaggagaataagtctgctttcttgaatattatgcctaattaattacgtataaaatacttttacca

SEQ ID NO: 854884 - DNA, 78 bp, Artificial Sequence
  ENSG00000153363_13 (sequence is synthesized)
aattaattacgtataaaatacttttaccaaagttctatgcaaggtagaagacttacagatggcatgaaaaagataaag

SEQ ID NO: 854885 - DNA, 79 bp, Artificial Sequence
  ENSG00000153363_14 (sequence is synthesized)
gtgccatgccaccacacccagctgattttgtatttctagtagagacatggtttcgctattttgtccaggctgctctcga

SEQ ID NO: 854886 - DNA, 89 bp, Artificial Sequence
  ENSG00000153363_15 (sequence is synthesized)
aggtccatgccaccacacccagctgattttgtatttctagtagagacatggtttcgctattttgttatctgttccccacggcatcccaa

SEQ ID NO: 854887 - DNA, 89 bp, Artificial Sequence
  ENSG00000153363_16 (sequence is synthesized)
agtgctgggattacaggcgtgaactaccgtgcttggcctctgtgtacttcttttttgttgttatacaggctggagtgcagtggcgccat

SEQ ID NO: 854888 - DNA, 120 bp, Artificial Sequence
  ENSG00000153363_17 (sequence is synthesized)
ctgggattacaggtgtgagccaccgtacctggcccatgtacttcttacttagtttttcttcccgcgtcttatgtttacatttgcaattatgtcttcttctttcaacaaatattacaggtt

SEQ ID NO: 854889 - DNA, 120 bp, Artificial Sequence
  ENSG00000153363_18 (sequence is synthesized)
ttgcaattatgtcttcttctttcaacaaatattacaggttttcataatctcaaatatttgtttttagagcatgatgtaatgttcctttgcattaggtacactgattgtgggtttccaaca

SEQ ID NO: 854890 - DNA, 120 bp, Artificial Sequence
  ENSG00000153363_19 (sequence is synthesized)
aaaagttttcaggtctaaaaatgatcacatcatgcagtatacccaggaatcaaacctgcacatctatcccctaagtctaaaaatgaaagttgaaaaaaataaaaattatataagaaaaaa

SEQ ID NO: 854891 - DNA, 76 bp, Artificial Sequence
  ENSG00000153363_20 (sequence is synthesized)
acgaaagatgagtatttagtactccatttgtgctgttttccttttgtggtatcattcagccttgtggcttcaaaca

SEQ ID NO: 854892 - DNA, 81 bp, Artificial Sequence
  ENSG00000153363_21 (sequence is synthesized)
ggagtttgaggccagcctggccgaaatggtgaaactctgtctctacaaacacacacacacacacacggtgaaactctgtct

SEQ ID NO: 854893 - DNA, 82 bp, Artificial Sequence
  ENSG00000153363_22 (sequence is synthesized)
gcagaggctgcgccagagcaagactctgtctacaaaaaacaacaaacagaaacagcaatttgccaggaaaactaatattcat

SEQ ID NO: 854894 - DNA, 120 bp, Artificial Sequence
  ENSG00000153363_23 (sequence is synthesized)
caaacagaaacagcaatttgccaggaaaactaatattcataattatgggaaaaccgtggtctcttcaaaagggcataataaaatgtagatattagacattatttcaaatcgttttttgtt

SEQ ID NO: 854895 - DNA, 120 bp, Artificial Sequence
  ENSG00000153363_24 (sequence is synthesized)
atttgtagattaattaaaacagtaaccatacctctggaagacagaataacagaagtagtttgactaaatggagtttgaagtagtgcattacttctctggatttgttcttaatttcaagct

SEQ ID NO: 854896 - DNA, 82 bp, Artificial Sequence
  ENSG00000153363_25 (sequence is synthesized)
ttaagaagaagagaagagagaaaacaaataaatgggaaaaaagaaagagtcttgtcctgttgctcaggctggagtgcaatga

SEQ ID NO: 854897 - DNA, 62 bp, Artificial Sequence
  ENSG00000153363_26 (sequence is synthesized)
caagcaattctcctgccacagcctcctaagtagctaggactacacggttggccaggctggtc

SEQ ID NO: 854898 - DNA, 120 bp, Artificial Sequence
  ENSG00000153363_27 (sequence is synthesized)
cgaaatcttatacattctagctatatttttatactcattaatcatcctcctttccccaccttcaactacccttctaagcctctggtaacgatcgttctggtatcaccatgagtttatttg

SEQ ID NO: 854899 - DNA, 120 bp, Artificial Sequence
  ENSG00000153363_28 (sequence is synthesized)
ttttcatttttagctcccacaaataggtgacaacatgtgaattttgtctttctgtgcctggcttttgtcacttaacaatgacctccatttccatcccttgttgcaagtgacagcatctca

SEQ ID NO: 854900 - DNA, 120 bp, Artificial Sequence
  ENSG00000153363_29 (sequence is synthesized)
ttttttttttttttttggctgaatagtgctccgttgtgtatttgtaccacattcatctgttgatggacgtttagattgcttccagatcttggctattgttgctgaattctttttctcagc

SEQ ID NO: 854901 - DNA, 60 bp, Artificial Sequence
  ENSG00000153363_30 (sequence is synthesized)
ttgtggcttgtggggcatcatggatcctaacaacgtgtgatgtctcccccggacgcccag

SEQ ID NO: 854902 - DNA, 120 bp, Artificial Sequence
  ENSG00000153363_31 (sequence is synthesized)
aaaagaaaggtgcggtgaaacatcaatcggcttggtccacagataagcgtgttcaactccccgacgagtggacaaaatatgaaacaccaagaaaaagagaaggaaaaaaaggaggaaaca

SEQ ID NO: 854903 - DNA, 120 bp, Artificial Sequence
  ENSG00000153363_32 (sequence is synthesized)
aatagtattattagcgttttaaagactatatgtttagagtttgaagtaaagctccagtgttaatttaacttacttttcaaggcttaacgtgttctcatctaaaaacaatgatgtccaaaa

SEQ ID NO: 854904 - DNA, 120 bp, Artificial Sequence
  ENSG00000153363_33 (sequence is synthesized)
gcggcgctcgccgcactggttgttcagcaccttcggtccggttgaggttgtcaagtcggaccaaacaggttgtttctctgcagtttccagtaagtgaccgttccagccggggctgtggct

SEQ ID NO: 854905 - DNA, 120 bp, Artificial Sequence
  ENSG00000153363_34 (sequence is synthesized)
tttttgctcacttaggtttatgattgaatgtgtatcccatctaactgtgtacttgatatttgcttttaaaacaaactcctgttagaagtaaatgttgaaagagagggctaggttgttttt

SEQ ID NO: 854906 - DNA, 120 bp, Artificial Sequence
  ENSG00000153363_35 (sequence is synthesized)
tttatattcattcagtcattgattcatttatttatttattcagggtcttggctgtgttacctaggctggagtgtgagagtatgatcatggctcactgcagcctagacctcttggattcaa

SEQ ID NO: 854907 - DNA, 120 bp, Artificial Sequence
  ENSG00000153363_36 (sequence is synthesized)
agctgggaccacaggtgcacaccaccatgtccagctaatttttagatttttttgtagagacatggtctttctgtgttgccccggctggtctcgtactcctggcttcaagcaatggcccca

SEQ ID NO: 854908 - DNA, 120 bp, Artificial Sequence
  ENSG00000153363_37 (sequence is synthesized)
gtactcctggcttcaagcaatggccccaccttggcctcccaaaatgaagattacaagtgtgagccactgtgcctaattgatttttttattggaaattttgatactgttacgttgtcactg

SEQ ID NO: 854909 - DNA, 120 bp, Artificial Sequence
  ENSG00000153363_38 (sequence is synthesized)
tgtcactgaggcagacaacttaaaaataatcttgagtatcattctgtgccgatgttagaatttaatatgctgttcgtaggccaggctcagtagctcacgcctgtaatctcagcactttgg

SEQ ID NO: 854910 - DNA, 120 bp, Artificial Sequence
  ENSG00000153363_39 (sequence is synthesized)
aagcaggaggatctcttgagcccccaggagtttgagacaagcctgggcagcataaagagacccccatctctaaaaaaaaaaaaatagaaaaattagccagacatgatgatgccaacctgt

SEQ ID NO: 854911 - DNA, 120 bp, Artificial Sequence
  ENSG00000153363_40 (sequence is synthesized)
gagcccaggaatttgaggctgcagtgaactatgattacaccactgtactccagccagggtgacagagcaagaccctatctctaaaactatttttaaaaataaaacaatatgttgttcata

SEQ ID NO: 854912 - DNA, 120 bp, Artificial Sequence
  ENSG00000153363_41 (sequence is synthesized)
ctaaaactatttttaaaaataaaacaatatgttgttcatattatcctaatgtagtgttttactgaatagaattccttaaaggattcttttccccaaggatattaactcaaggtaaattat

SEQ ID NO: 854913 - DNA, 120 bp, Artificial Sequence
  ENSG00000153363_42 (sequence is synthesized)
aataggattgcagataaattaagcatctttatctttgattacagagatatttagcatatgactatagataatttccccttcatattttcttgggcttctagtatttatgtatcaagaaaa

SEQ ID NO: 854914 - DNA, 120 bp, Artificial Sequence
  ENSG00000153363_43 (sequence is synthesized)
ttatttccttatgtttgaaatggtgacatttctgaaatgtaccagcagaggatacagggatttttgtttgtttttcattttcttatttactgaagaaataaaggcattttagtttataaa

SEQ ID NO: 854915 - DNA, 120 bp, Artificial Sequence
  ENSG00000153363_44 (sequence is synthesized)
ggaaagggaattccctgaccccttgaacttcccgggttaggtgatgcctcgccctgcttcggctcaagctcagtgcactgaacccactgtcctgcaccaactgtccagcactcccctgtg

SEQ ID NO: 854916 - DNA, 120 bp, Artificial Sequence
  ENSG00000153363_45 (sequence is synthesized)
tctggcaagagactgaggctgcttccactcatggcagaaggtgaaggggcgcctgcaactgcagatctcatggacaaaatatgaaacaccaagaaaaagagaaggaaaaaaaggaggaaa

SEQ ID NO: 854917 - DNA, 120 bp, Artificial Sequence
  ENSG00000153363_46 (sequence is synthesized)
atggcagaaggtgaaggggcgcctgcaactgcagatctcatggtgagagagaaggcaagagagagaggaagaggacaaaatatgaaacaccaagaaaaagagaaggaaaaaaaggaggaa

SEQ ID NO: 854918 - DNA, 120 bp, Artificial Sequence
  ENSG00000153363_47 (sequence is synthesized)
acgcttaggaaaatagaaaagaacctacatgattatcggggcaggtcccccgatatctggcgcccacgtggtctttcttttttcctaagtgcatgagggaacccgattccctttggtagg

SEQ ID NO: 854919 - DNA, 120 bp, Artificial Sequence
  ENSG00000153363_48 (sequence is synthesized)
gatctcatggtgagagagaaggcaagagagagaggaagaggtaccaggctctttcaacaaccagttctaggacaaaatatgaaacaccaagaaaaagagaaggaaaaaaaggaggaaaca

SEQ ID NO: 854920 - DNA, 120 bp, Artificial Sequence
  ENSG00000261997_0 (sequence is synthesized)
ttaaggctctaaaggttggttctagagctgttcttagtttctagatatgatgtagagtagaaccctgaattcagcatccagtcggttttagcagtaccctcaggtagtctccgaagagag

SEQ ID NO: 854921 - DNA, 120 bp, Artificial Sequence
  ENSG00000261997_1 (sequence is synthesized)
atggtttgataatgggtctcctagattttctaattgcatccatggattgtgtaacgaaaaccttaagtttgcctgtgtcatgcagagttctgagtggggtctagtgcctaagtgacagga

SEQ ID NO: 854922 - DNA, 120 bp, Artificial Sequence
  ENSG00000261997_2 (sequence is synthesized)
ctgtggaatttaattcacaagaatactattttgctttgctagatagcttagtgatttggccatttagagactgtcagtaataccaaatgatttaggagggcaaattacatttcagaatga

SEQ ID NO: 854923 - DNA, 120 bp, Artificial Sequence
  ENSG00000261997_3 (sequence is synthesized)
gttttgtgaaattttcttgagatttgcatgttttctgcctgtcttgaaaatatctgtttattaattatatttcatacacccccacttttaaaaccagttcagttatctctcactgtggcc

SEQ ID NO: 854924 - DNA, 120 bp, Artificial Sequence
  ENSG00000261997_4 (sequence is synthesized)
aaaaaaaaaaaaaaaagaaaacccacacttgttcttgggtttttcttagaggttcctggggaacaaaaactaatttaataacatttggaagtatcaagggaaacaaaatgaatttttttt

SEQ ID NO: 854925 - DNA, 120 bp, Artificial Sequence
  ENSG00000261997_5 (sequence is synthesized)
ttttttttttctcaagactactcagtgcctttgaaatgtctgacttacagaacctttttctctagatatctcccggaaccagtgttctatagaatacacttcaggaagccttatatcata

SEQ ID NO: 854926 - DNA, 120 bp, Artificial Sequence
  ENSG00000261997_6 (sequence is synthesized)
atatttctaaatactctgagcactgctcttgcttctttaatagctgctcaggtagtctaggcctgtttcacttttctaaaaaaacaagaaaactcatactttaaaaaagccatgctatct

SEQ ID NO: 854927 - DNA, 120 bp, Artificial Sequence
  ENSG00000261997_7 (sequence is synthesized)
tctctgcaagatattgtctcttcctctcaatgtacccctctgtagctaaaacaagatctagcaacacatgtagaaatgtatacaaagctgtcttttttgccatagcatgtcagtggtcaa

SEQ ID NO: 854928 - DNA, 120 bp, Artificial Sequence
  ENSG00000261997_8 (sequence is synthesized)
gtggtcaaactgcattacaacagaggtattcagattcctctttttttttttgtcatgaccattattaccacatttcctttctgtgtcatggctttctttttttttttctgtctttttttt

SEQ ID NO: 854929 - DNA, 120 bp, Artificial Sequence
  ENSG00000261997_9 (sequence is synthesized)
acgatatttgcattctccagccagttctgagacctgtttggatcatatttttctggcaaagaaaacaatgtattctttgttccataacttcacaaataaaatgactttcagctgcttgaa

SEQ ID NO: 854930 - DNA, 120 bp, Artificial Sequence
  ENSG00000261997_10 (sequence is synthesized)
aatagccgcgtcgacagagatttgatgaattagaatcgtagtgcagaacaagaggatgggaatttgtggacttcaaatttagtacaaatattcttattttaattatgtttactttaaatt

SEQ ID NO: 854931 - DNA, 120 bp, Artificial Sequence
  ENSG00000261997_11 (sequence is synthesized)
tatgactccccctttcacccaggtgactcctaaatactttatgatattttaatattttaatactcactgttggatttaactgaaaatgtatcccagcagcccttcaggcactaagtatac

SEQ ID NO: 854932 - DNA, 120 bp, Artificial Sequence
  ENSG00000261997_12 (sequence is synthesized)
cacaccctggcttgaagctctgtaagagctgggccatctctgaggctccagcttttccactacgtctgctgaggcccagcttgagattggtttgtggtctcagtacatttagttgctcca

SEQ ID NO: 854933 - DNA, 120 bp, Artificial Sequence
  ENSG00000261997_13 (sequence is synthesized)
gtttcaattgtcttggttgttctcaagtaacccccttttttctttttttttaaattgatggaaatccttgttactatcttattttaaacatgtttttagaacttcttgaatattaggtaa

SEQ ID NO: 854934 - DNA, 120 bp, Artificial Sequence
  ENSG00000261997_14 (sequence is synthesized)
acctaattcaagatatattattcaagaatatggtattaattttatggtttttcaaatgaactttgaatgaattatcaaagtgccgttttagacagtcttgcttttgtgagtcacatgaca

SEQ ID NO: 854935 - DNA, 120 bp, Artificial Sequence
  ENSG00000261997_15 (sequence is synthesized)
agtctaatatttaggaatattttcttaccacctcttcccagccctctctgcttcccaacatagagacatacagtatttttgaaaaggttattattttctcgactcttggatcttaaaaat

SEQ ID NO: 854936 - DNA, 120 bp, Artificial Sequence
  ENSG00000261997_16 (sequence is synthesized)
atagttagttctaaacctcatgtcctgtgtaattgttcttctggcatccttgaacaatgatgaagttgtctgtctacagaatggttctactaaaagttattctttgaattctaatgtggc

SEQ ID NO: 854937 - DNA, 120 bp, Artificial Sequence
  ENSG00000261997_17 (sequence is synthesized)
ataatgggtgttcttaaagtatcttttagtcatacttttattaaccagctgtttcacaagtatccctttataaggatatggcttagggcatagggaatgaaatagctagtaggaaacatt

SEQ ID NO: 854938 - DNA, 120 bp, Artificial Sequence
  ENSG00000261997_18 (sequence is synthesized)
acaaaatgtgacatgaattaagagtctgttagtttatctcatgagagagaatacatgctatgtcacactataaagcactaagtgggccgcagctagtttatgaatggaaacaagccattt

SEQ ID NO: 854939 - DNA, 120 bp, Artificial Sequence
  ENSG00000261997_19 (sequence is synthesized)
acactgactgtgcagtcagtttccttcataggctatatctcagtttgcattaaaagcgtgttgactttagaagccatttagtatatattatagataaataaaaattgtctgtagtgggca

SEQ ID NO: 854940 - DNA, 120 bp, Artificial Sequence
  ENSG00000261997_20 (sequence is synthesized)
tattagatatataataagtccccccttatctgtaggggatatgttccaagacccccagtgaatgcctgaaactgcaagaaataccaaaccctatatatactaacttttgtcctaaacaca

SEQ ID NO: 854941 - DNA, 120 bp, Artificial Sequence
  ENSG00000261997_21 (sequence is synthesized)
catacctctgataaaatgtattttataaaataggcacaataagagattaacagtgacaactaataataaaatagaacagttgtagcaatatagataagagttgaatgtgaatgtggtctc

SEQ ID NO: 854942 - DNA, 120 bp, Artificial Sequence
  ENSG00000261997_22 (sequence is synthesized)
tctctctctgtcaacatctcattgtactatattcatccctcttctccttgtgatgaagaaagaatagagaaggatagcatgaaatgttatcaccctactcagaatggcatgcaatttaaa

SEQ ID NO: 854943 - DNA, 120 bp, Artificial Sequence
  ENSG00000261997_23 (sequence is synthesized)
cttatgaattgtttatttccagaatttttcatgtaatgtgtttggaccatggttgactgttggtaactgaaaccacggaaagcaaaatcccagataagggagactattgtgttttcttta

SEQ ID NO: 854944 - DNA, 120 bp, Artificial Sequence
  ENSG00000261997_24 (sequence is synthesized)
ggaaaattcctttaaaagcttatagtgagcttatagtggctagcattaggcctaaaatactctgttgtgggcttttcatttccttaaagtaatagaaaggtttgtttttttaatttaaaa

SEQ ID NO: 854945 - DNA, 120 bp, Artificial Sequence
  ENSG00000261997_25 (sequence is synthesized)
agaatttctgatttagggaaagattgcaattaataatgagtattatgatcaacagctacatgtacatatcacttttaagatctttagagagctaattacttagggaagattcaaagacat

SEQ ID NO: 854946 - DNA, 120 bp, Artificial Sequence
  ENSG00000261997_26 (sequence is synthesized)
ttatatagtttatttaagtatccaaatgcactacaattatttgtagtttttaatctaaaatgagccttttagaaaacctcaatcatacaactacacacacacacacacaccctacatata

SEQ ID NO: 854947 - DNA, 120 bp, Artificial Sequence
  ENSG00000261997_27 (sequence is synthesized)
tacttgttctaacaaagctaatttcttctggaacttggtaaaattctggaatttgtgaatactaatagagaaataaaaagggtattaactagagtttttgttctaatcctgttactacct

SEQ ID NO: 854948 - DNA, 120 bp, Artificial Sequence
  ENSG00000261997_28 (sequence is synthesized)
acctgtatgtacttgagaaaattaaacctttctaagcctgcattctcactgacaaaaatggggataatgacagaaaatttatagagttttgaggagtaataaagttacttatgtgctggc

SEQ ID NO: 854949 - DNA, 120 bp, Artificial Sequence
  ENSG00000261997_29 (sequence is synthesized)
acatagtaagtgttcaataagcactaacttttactttctgtctcatctagatgtttctgttcttttgggaaggaagcagcaagcattgtttaaaaatatcttccttcttttgcatttttt

SEQ ID NO: 854950 - DNA, 120 bp, Artificial Sequence
  ENSG00000261997_30 (sequence is synthesized)
ctcttcgaagatttaaaagaagaattacacaaagaactagaactgcacatttgttaagattgtccttttaaaattattttctgttacaaggaaaaaataaaagattgattatagtgtcat

SEQ ID NO: 854951 - DNA, 120 bp, Artificial Sequence
  ENSG00000261996_0 (sequence is synthesized)
cgcaagagggagccgtggtttccggaactcctcccgcccctccgggcttttcctctgttaggcaggtggcgattcgctgtctttgcctgttatggccgctgccgtcgccctggagacagg

SEQ ID NO: 854952 - DNA, 120 bp, Artificial Sequence
  ENSG00000261996_1 (sequence is synthesized)
taaccctcttccatgactgttccttaaagtggtgcgctgtcccagtagaccatgctctagctttccaagctgctagaactgtcagtgtttctcagccttggcactattgacattttggga

SEQ ID NO: 854953 - DNA, 120 bp, Artificial Sequence
  ENSG00000261996_2 (sequence is synthesized)
ccagtgattcttcatcgttggcagaggggagggtgttgacctgtgcactgtaggatgtcaggtggcatccccggactctacccgctaggtgccagtagcacctaatgtgccacccacccc

SEQ ID NO: 854954 - DNA, 120 bp, Artificial Sequence
  ENSG00000261996_3 (sequence is synthesized)
ggttgccatatatcctctgggggacaaaatcacacttagttgagaaccactgtcccacattctacacacagaagccaaaaggatattttttaaatgtaaatggcatcatgtcgttcccct

SEQ ID NO: 854955 - DNA, 120 bp, Artificial Sequence
  ENSG00000261996_4 (sequence is synthesized)
gttggaaacccttcaatgttttcctgttgaccttagaataatctcaaattccttactgtggcttagaagaccttctgtggactggcccctgcttgcttttaactcctctcttccgttctg

SEQ ID NO: 854956 - DNA, 120 bp, Artificial Sequence
  ENSG00000261996_5 (sequence is synthesized)
cttccatgtctatataattgcttctctctcactccagccacactggccttctttctgttccttgaacattcaaagctggttcccatccaccctttgtatttgctgttcttctgcctagaa

SEQ ID NO: 854957 - DNA, 120 bp, Artificial Sequence
  ENSG00000261996_6 (sequence is synthesized)
tgcacctgttccagatcactgttcattcacacatatctcagattacatgttaactaatcagcaaggccttccctgaccattttatcaaaagaagccacttacttccattctctatcacat

SEQ ID NO: 854958 - DNA, 120 bp, Artificial Sequence
  ENSG00000281392_0 (sequence is synthesized)
gggtagagggcagcaaccgacttgtgcgaaaggagggaacgtgtgggtctgccagggtcctgcaggggggatgagaccctcgctccgctccggcgatcccttcgctctccaccctcggcc

SEQ ID NO: 854959 - DNA, 120 bp, Artificial Sequence
  ENSG00000281392_1 (sequence is synthesized)
agcccctcctgtcctccatcaggcctcgctgaggatacctcctgggttccaaagcgcgagttgaacctgagcttgacattcattccgtctcgtacaaaagccatgcctgcggggagaggg

SEQ ID NO: 854960 - DNA, 120 bp, Artificial Sequence
  ENSG00000281392_2 (sequence is synthesized)
ggagagggagaaaatttcctacaggagcctcaagactgcgtttcaggaagccctaggacccactgatcctgcagctgcgcctctcactcgcctcaggctttggtatcaggatgatgctgg

SEQ ID NO: 854961 - DNA, 87 bp, Artificial Sequence
  ENSG00000281392_3 (sequence is synthesized)
cctcataaaatgagatagagaggattccctgaggtatcagctgttccttgtatctctggtataattcggctgtgaatccatctggtc

SEQ ID NO: 854962 - DNA, 89 bp, Artificial Sequence
  ENSG00000281392_4 (sequence is synthesized)
aaaaccagctcttggattcattgattttttgaaggttctttgtgtctctatctccttcagttttgctctgatctttgttatttcttgcc

SEQ ID NO: 854963 - DNA, 61 bp, Artificial Sequence
  ENSG00000281392_5 (sequence is synthesized)
ttggggaagttctcctggataatatcctttagagtgttttccaacttgattccattctctt

SEQ ID NO: 854964 - DNA, 90 bp, Artificial Sequence
  ENSG00000281392_6 (sequence is synthesized)
ctttttttcaaggtttttaacttcttttccatgggtttgaacttcctcctttagctcagattagtttgatcatctgaagccttcttctct

SEQ ID NO: 854965 - DNA, 78 bp, Artificial Sequence
  ENSG00000281392_7 (sequence is synthesized)
ttgttgctgcctgatttttcctctggaaattttgtctcagaggagtaccccgccgtgtgaggtgtcagtctgccccta

SEQ ID NO: 854966 - DNA, 80 bp, Artificial Sequence
  ENSG00000281392_8 (sequence is synthesized)
tgcccctactggggggtgcctcccagttaagctacttgggggtcagggacccggtgctgggagaaccactactctcttca

SEQ ID NO: 854967 - DNA, 77 bp, Artificial Sequence
  ENSG00000281392_9 (sequence is synthesized)
tctcttcaaagctgtcagacagggatattcaagtcttcagaggtttctgctgccttttgtttgccctccttgagctg

SEQ ID NO: 854968 - DNA, 90 bp, Artificial Sequence
  ENSG00000281392_10 (sequence is synthesized)
gaggtggagtctacagaggcaggcagtcctccttgagctgcagtcagctccacccagttcgagcttctcggccagcgggcgcccctcccc

SEQ ID NO: 854969 - DNA, 87 bp, Artificial Sequence
  ENSG00000281392_11 (sequence is synthesized)
cttgctgccaccttgcagtttgatctcagtctgctgtgctagcaatgagcaaggctccgtgggctaggaccctctgagccaggcacc

SEQ ID NO: 854970 - DNA, 69 bp, Artificial Sequence
  ENSG00000281392_12 (sequence is synthesized)
tgcaattcccaggtgaggtgatgcctcaccctgctttggctcacactcggtgcactgcacccactgtcc

SEQ ID NO: 854971 - DNA, 120 bp, Artificial Sequence
  ENSG00000281392_13 (sequence is synthesized)
gagctgtagactggagctgctcctattcgaccatcttggctccaccctcactgccacctaacttttcaactggaaatgattactctgtaaagcaatgacataataaaatacaaatattaa

SEQ ID NO: 854972 - DNA, 120 bp, Artificial Sequence
  ENSG00000281392_14 (sequence is synthesized)
gaaaatagtctgacagaattctatctgccttttaagggataaatttgtacaattgaaattatatgctaatggattgatatcagtatttggcagttctcttaaatgtgaaaagctatttca

SEQ ID NO: 854973 - DNA, 120 bp, Artificial Sequence
  ENSG00000281392_15 (sequence is synthesized)
aagacaaaatctgtaaaatctcgtttcagatcagcattaacagatgagcaattatttatgatgagcacaactttgaacactgattacataaaatgttaataaaataattatcaaattgta

SEQ ID NO: 854974 - DNA, 120 bp, Artificial Sequence
  ENSG00000281392_16 (sequence is synthesized)
gcgcctctcactcgcctcagtcacaccatctatggcattattgttgtggcagcccaaactgatccagacatcctccaaattcattcttcacacatgggttctttttcctctgtcaatgga

SEQ ID NO: 854975 - DNA, 120 bp, Artificial Sequence
  ENSG00000281392_17 (sequence is synthesized)
agttaccagcaggctttggaggataagagtgctatgtcaggggataaactcaaggaagaaatggacatagctgttgagaagagatggggattttctcataagccatgctacttttttgac

SEQ ID NO: 854976 - DNA, 120 bp, Artificial Sequence
  ENSG00000281392_18 (sequence is synthesized)
gctgttgagaagagatggggattttctcataagccatgctacttttttgaccttagaacccaccacgatgaatctctgagtcggtctcatctcccagatcctcaactcaacttttctcag

SEQ ID NO: 854977 - DNA, 120 bp, Artificial Sequence
  ENSG00000281392_19 (sequence is synthesized)
actgtacttaagcacttttgtcaaagttggagtagagaaggtagggtgataagaaagagctccttttgctcttttccacatggattgtctcccttttgatggcctcacaagtccccagat

SEQ ID NO: 854978 - DNA, 120 bp, Artificial Sequence
  ENSG00000281392_20 (sequence is synthesized)
tttccttttgacattgtttcatacagtatttaaatctatttgtatacatgaaacttattttaatgcctgtctttctgaatccctgactccatccctatgtctctggtatgtttctatctg

SEQ ID NO: 854979 - DNA, 120 bp, Artificial Sequence
  ENSG00000281392_21 (sequence is synthesized)
tgattatcgactccatattaaaaatgggactgcttgcacttattgcagtacatgtgtcaaactgatccctcaaaacttcctgacaaaaaatagaccattctagttcttcactacctgttt

SEQ ID NO: 854980 - DNA, 120 bp, Artificial Sequence
  ENSG00000281392_22 (sequence is synthesized)
cttgatagacagatcaaaaaagtccctccatcctaagggtttctctctcatggcaaaacctttggtgagagacacacatcaatgtctgtcaatgaaaccactggaatattgtcccaatgt

SEQ ID NO: 854981 - DNA, 120 bp, Artificial Sequence
  ENSG00000281392_23 (sequence is synthesized)
gaatatatttccaattcaatctattctattgtccacagtaggcaaccagaattcccaaggaactgtagaaggggtgcctttttttttaagggataagaagtatatagacttgaatatcag

SEQ ID NO: 854982 - DNA, 120 bp, Artificial Sequence
  ENSG00000281392_24 (sequence is synthesized)
gcacaattgtgacagtgagaaagtcatgtaattacttggaaataagaggctaaagtttcagggttaaaccaaaattgggaatgagacagccatgttggagggggtccccagagaaactcc

SEQ ID NO: 854983 - DNA, 88 bp, Artificial Sequence
  ENSG00000281392_25 (sequence is synthesized)
atgagacagccatgttggagggggtccccagagaaactccaaccagcctacccactgaggtggagccttgggaagttcatgacatttg

SEQ ID NO: 854984 - DNA, 120 bp, Artificial Sequence
  ENSG00000281392_26 (sequence is synthesized)
tagcagggacgctggcctagtgagagtccctgtttcccccttttcttcattttcacccaataaaatcctgtctcactcaccattcaaattgtctgcaagcctgagttttcatggctgtgg

SEQ ID NO: 854985 - DNA, 120 bp, Artificial Sequence
  ENSG00000281392_27 (sequence is synthesized)
gctgaactaaggaaaagtcctgcaacatttttggcacccaacatggggctcaagaagcagtgagtgaaatgaggactcagaacctctcaccttctgaggacttctgagggttgggaatac

SEQ ID NO: 854986 - DNA, 120 bp, Artificial Sequence
  ENSG00000281392_28 (sequence is synthesized)
cttctgagggttgggaatacatacccccaaaccctgtggctccctggggttgggggaaaggccctttccttcctttttcaggacaggggagcaggggctccttgctccccctcccctcca

SEQ ID NO: 854987 - DNA, 120 bp, Artificial Sequence
  ENSG00000281392_29 (sequence is synthesized)
tgctggggctgggacacatggctcaagagtctcacacagccgggtggctggttcccatccagaagccactgcagcctttcccttccccacccaaggggttcagctccatcaggcagtaat

SEQ ID NO: 854988 - DNA, 120 bp, Artificial Sequence
  ENSG00000281392_30 (sequence is synthesized)
tatagttttttgtttttccttttagaagatgttttactaggccagccctgcacctccccccaatccacccaccaactatgactgtattctttgcaaagttgtggttgtgaaatcaagcct

SEQ ID NO: 854989 - DNA, 120 bp, Artificial Sequence
  ENSG00000281392_31 (sequence is synthesized)
ccatcttgttttacatctggggggtgtggccagttactgcctggcaaggatttgtttagcaaccctaccttaggggatgcccctctcaggttaagtaatctacatgttttcctagccctg

SEQ ID NO: 854990 - DNA, 120 bp, Artificial Sequence
  ENSG00000281392_32 (sequence is synthesized)
tctcttaaaaggccctacccagcaactgggttttcttctgcctgtctgtgtgtactatatgtgatgtctgtaaaaataactctaattaatctggcctaaagaaaagtgcttggatctaac

SEQ ID NO: 854991 - DNA, 120 bp, Artificial Sequence
  ENSG00000281392_33 (sequence is synthesized)
attttttaaagctaaaagctgtggtacctttcatttcacatgactttaatctttaagaaataaaaacagccctaaagactattcgtaaaatgcaggtcagatgcaaagtttgctaattgt

SEQ ID NO: 854992 - DNA, 120 bp, Artificial Sequence
  ENSG00000281392_34 (sequence is synthesized)
tttgaggttacaaactgctttttgggttttgagagctattttacttgtcagctacatcattggtagggtctggggacatatggaactaaccacacccttaattatgctggagtcaaatct

SEQ ID NO: 854993 - DNA, 120 bp, Artificial Sequence
  ENSG00000281392_35 (sequence is synthesized)
attatgctggagtcaaatcttggctgcacttatcacacaattaaggcaacttaccaagttttaccaaattgctagaagttaattgaaactactagaaatagatttacatgcaaggtgtgt

SEQ ID NO: 854994 - DNA, 120 bp, Artificial Sequence
  ENSG00000281392_36 (sequence is synthesized)
aaggcatggaaatgtaaacttttgcctagagttaaatgattgttttgagttaaattaggaaaaagctaaaggttcaaagaagtggtggaagaattgtggaaattaatcttgcagaagaag

SEQ ID NO: 854995 - DNA, 120 bp, Artificial Sequence
  ENSG00000281392_37 (sequence is synthesized)
aattaatcttgcagaagaaggtctctatgtaaatatttttgctaaattcaaaagggtattaaatgtttttttctgtaaatcgagcattgaaataaaaacacaacaagaaattcttaaaat

SEQ ID NO: 854996 - DNA, 86 bp, Artificial Sequence
  ENSG00000281392_38 (sequence is synthesized)
cgagcattgaaataaaaacacaacaagaaattcttaaaatgctaatctctttggcaaaatttataaaggtttataaaaggtttttg

SEQ ID NO: 854997 - DNA, 120 bp, Artificial Sequence
  ENSG00000281392_39 (sequence is synthesized)
atcaagtgttttaaaccttgaacatttaacagccttcccaaaatcaaacttcagttttaaaattgtcttcctcgacacctgggtttgtggaaagtccagagggcccctggaatgtccaga

SEQ ID NO: 854998 - DNA, 120 bp, Artificial Sequence
  ENSG00000281392_40 (sequence is synthesized)
gaaaaagaggtaaacagaattatttaacatatttaggtacatgggattgacaaaatgatcttctttaggttaagttatatcttggtgaagaatgccaatatatgttccaaaattgtatgg

SEQ ID NO: 854999 - DNA, 120 bp, Artificial Sequence
  ENSG00000281392_41 (sequence is synthesized)
agtttctaaaattctaatatctgagtatagctatcaatcataattaaggttttttgttaagttattgtaaatcacagagctaatcaaacttctctgtcaatcatgtttctaactgtaact

SEQ ID NO: 855000 - DNA, 120 bp, Artificial Sequence
  ENSG00000281392_42 (sequence is synthesized)
accctggatattttgctattcaaaaattgttgttttattttaatccttttcaaaagatggtttataataagctatagaactgtaacaggtgctctcaaatacaggtttctgataactttg

SEQ ID NO: 855001 - DNA, 120 bp, Artificial Sequence
  ENSG00000281392_43 (sequence is synthesized)
gagactgtgaaattggaataaagaaaaatatataggactcataaagagctgaaatattaatgaatacaagcaaaacaaaaactaaatggactaaacttagaaactgaagcaatcctttta

SEQ ID NO: 855002 - DNA, 120 bp, Artificial Sequence
  ENSG00000281392_44 (sequence is synthesized)
tgctgatccttgttttgtttttcagagtaaaggaaacttattttgaactattttcagactttaataattaagtaaggtatacactcctgtgattaaaatttagaacatgtttgtttctct

SEQ ID NO: 855003 - DNA, 78 bp, Artificial Sequence
  ENSG00000281392_45 (sequence is synthesized)
aatatctgtgagtattcttaacttatggcaatgtagttgtttgcatcaatgcaataaaaatccatttttcttttgcaa

SEQ ID NO: 855004 - DNA, 120 bp, Artificial Sequence
  ENSG00000281392_46 (sequence is synthesized)
agaaattagtagaagaaagaattttgctaaatttcttttcagaaagactttactcatttatcagcaataaatagtatctgttatgagttaaattgtgtctccaaaaagatatgctggggt

SEQ ID NO: 855005 - DNA, 120 bp, Artificial Sequence
  ENSG00000281392_47 (sequence is synthesized)
aatagccactgggaactttgaatgtaatcttatttggaaatagggtctttgctaatattatcaaattaagatgaagtcatatcaaattaagtatgactgtccttataagaggagaagaga

SEQ ID NO: 855006 - DNA, 120 bp, Artificial Sequence
  ENSG00000281392_48 (sequence is synthesized)
cacagacacagaggaaagactgccatatgaagatggggcaaggattggagttacattgctacaagccaaggaatgcctggcactaccagaagctggaggagacaagggaggattaatgtc

SEQ ID NO: 855007 - DNA, 120 bp, Artificial Sequence
  ENSG00000281392_49 (sequence is synthesized)
cactaccagaagctggaggagacaagggaggattaatgtcctttaggagcttcaaaggaaatatgtccctctcaacaacttgacttctaatgttgtgatggttaatactgagtgtcaact

SEQ ID NO: 855008 - DNA, 120 bp, Artificial Sequence
  ENSG00000281392_50 (sequence is synthesized)
atgtgaaaaagagagactggcctagactcccagcctacgtctttatcctgtgctagatgcatcctgtccttgaacatcagactcttaagtccttcaattttggaactcacactggctctc

SEQ ID NO: 855009 - DNA, 120 bp, Artificial Sequence
  ENSG00000281392_51 (sequence is synthesized)
ttagttctatccctctacagaatcctattagaatgtcaaactcttaaaaacattgttttttttttttttttttagagacggtcttgttctgtcacccaggtttgaatgcagtggcatgat

SEQ ID NO: 855010 - DNA, 120 bp, Artificial Sequence
  ENSG00000281392_52 (sequence is synthesized)
cataactaaatgcaacctcaaactccccagctcaagagatccttccacttcagcctcccgagtagctaggactacagtcatgcgccaccacagccagctaaatttatttttttgtaaaga

SEQ ID NO: 855011 - DNA, 120 bp, Artificial Sequence
  ENSG00000281392_53 (sequence is synthesized)
tgcgccaccacagccagctaaatttatttttttgtaaagacagtctttcaatgttgcccagactggtctcaaactctttgtcccaagtgactctcctgcctcgacctcccaaagtgttgg

SEQ ID NO: 855012 - DNA, 120 bp, Artificial Sequence
  ENSG00000281392_54 (sequence is synthesized)
tttacgcagttttaagccatccagcttgtgatacgttgttatgggagccctaggaaattaatacaccattattttcaaagtgctgctaatttataagacaacattggtttttaattgttc

SEQ ID NO: 855013 - DNA, 120 bp, Artificial Sequence
  ENSG00000281392_55 (sequence is synthesized)
tgattttcaaaaatatctgctgacttaaaatatgaagattgtattcaagtgttctgattttcattgaagttaaaaatttgtcttaaatactagacatttacttctatcaattttctcaca

SEQ ID NO: 855014 - DNA, 120 bp, Artificial Sequence
  ENSG00000281392_56 (sequence is synthesized)
atgtttttatacctttttctcagttattgtaacattagtgttctttttaatcaatatattatgaatgtcactttttatccatcacattaattacaaatgtttttctctagtttttggttt

SEQ ID NO: 855015 - DNA, 120 bp, Artificial Sequence
  ENSG00000281392_57 (sequence is synthesized)
aaagctgaaatgtgaccgcgtcccggtcccttcctgctctggggcgcgaagctgccaagaaaccggctgcggtctccaggaggggccaggaggcaaaatggaaggaagcgctggatctcc

SEQ ID NO: 855016 - DNA, 86 bp, Artificial Sequence
  ENSG00000250131_0 (sequence is synthesized)
agaggagggcgtggtccccagctagggcttcatccctgggcctgggcctacctaggtgaagacaggcatttttgttttcctgcccg

SEQ ID NO: 855017 - DNA, 120 bp, Artificial Sequence
  ENSG00000250131_1 (sequence is synthesized)
atgccctcatcctgtgcctttaaaaacccccgagaccctggcaggcagacgcacaagcagctggacattgagaggagcatataggcagagaatacaggggctgctggatgtcgaaaggaa

SEQ ID NO: 855018 - DNA, 120 bp, Artificial Sequence
  ENSG00000250131_2 (sequence is synthesized)
cgcaccagcataggagcacaccggcatgctggcaggccattgaccagcggaagaatgcagagtttgtcgcgggaggtcagagaagagtcaggccgccatacctgactccaggagaaaacc

SEQ ID NO: 855019 - DNA, 120 bp, Artificial Sequence
  ENSG00000250131_3 (sequence is synthesized)
gtctcccttctggttcccccgtctgccgagagctacttccactcaataaaactttccactcattcttcaagcccacgtgtgatccaattcttcccgtacaccaaggtctcgctgtgtttc

SEQ ID NO: 855020 - DNA, 120 bp, Artificial Sequence
  ENSG00000250131_4 (sequence is synthesized)
gatccaattcttcccgtacaccaaggtctcgctgtgtttcccaggctgggtgcagtggctattcaaaggtacaatgatagctcactgcagcctggaactcctggactcaagcgatcctcc

SEQ ID NO: 855021 - DNA, 120 bp, Artificial Sequence
  ENSG00000250131_5 (sequence is synthesized)
ctggcagctgaccgtcaaatcttatgaaggattaaaacataaagtttgcattaaaggtcaaaacagtcacaagcctgctcaaattcggaaagaggggacggaaatggaacctcttcatgg

SEQ ID NO: 855022 - DNA, 120 bp, Artificial Sequence
  ENSG00000250131_6 (sequence is synthesized)
cttgctctgttgccctggctggagtgcaatggtatgatcatagctcacagtagccttgaactcctgggcccaagccatcctcctacctcagcaaccagagtagctgggattacaggcgaa

SEQ ID NO: 855023 - DNA, 120 bp, Artificial Sequence
  ENSG00000250131_7 (sequence is synthesized)
tgggattacaggcgaatgccaccacacctggaattggaaaaatgaatgtaatttgacatatgtcttgagtctggttggcttctgaggaacttgtgtgcatctcatcagtatgcatcttaa

SEQ ID NO: 855024 - DNA, 120 bp, Artificial Sequence
  ENSG00000250131_8 (sequence is synthesized)
gaactgaaatgaccctacttcagcattgtgagaagacatgcattctcttcgtataaataatgtggatcttacatgtaaagtattataaagattagctgtttaacaacttaaataagcttg

SEQ ID NO: 855025 - DNA, 120 bp, Artificial Sequence
  ENSG00000250131_9 (sequence is synthesized)
gaataataaattaataacaatgttatgctaatacgtaactatgatatttgctgaacaaaataaatttgcctactttggaagcagattgggtggtttaatatatcagcaaaagagtgtttt

SEQ ID NO: 855026 - DNA, 120 bp, Artificial Sequence
  ENSG00000250131_10 (sequence is synthesized)
taaaaaatatcaaagttctgttaatcaaaacgtttattgtaggacagttagtaatgttttgtttgccaacttatattacaaagtctctgtcttaagtgtttccttgcaaataaaatgaca

SEQ ID NO: 855027 - DNA, 120 bp, Artificial Sequence
  ENSG00000250131_11 (sequence is synthesized)
atactgccttacattttattactttagagtttgcaaaatatcttcattataatatttcatttagtagacatgcctatgggaacattacttccagaattaaaaacattatttttgttttgg

SEQ ID NO: 855028 - DNA, 120 bp, Artificial Sequence
  ENSG00000250131_12 (sequence is synthesized)
tatatttttaaactacaaatgatagaaaggcaagtaaatgtaagtttttctctagttatttgttcaaatgctaatttaaaacatttgtacatttctaatacaaacattccttatttgaga

SEQ ID NO: 855029 - DNA, 120 bp, Artificial Sequence
  ENSG00000250131_13 (sequence is synthesized)
aaaaatggatttcttaaaaacaaaatgcattttaaagcagagagacagggcattgagctgaaaatggtggctggaagttgggatctgtaagagaagttgaatgtgccccgaggcataaag

SEQ ID NO: 855030 - DNA, 120 bp, Artificial Sequence
  ENSG00000250131_14 (sequence is synthesized)
ctgctaattttgttttattggattttactgtagctattaatatattttgctggagatttatgtgatcaatttatcttatggccagaactaattcccttagtatattttattagaatatgt

SEQ ID NO: 855031 - DNA, 120 bp, Artificial Sequence
  ENSG00000250131_15 (sequence is synthesized)
gactttttctaaatttagctttatttttcatattttccataaatggcaaagattctatgtttccagacatgttaagtattgcaagaattattggagcacctaaagataaataatatcaaa

SEQ ID NO: 855032 - DNA, 120 bp, Artificial Sequence
  ENSG00000250131_16 (sequence is synthesized)
atagtgtcattgtttcccttagtttctccttctcccccacaaataaaccaagaggtatttagttatactattgcatgtctctagctttattggattcttccatgaaagaaaaatggatta

SEQ ID NO: 855033 - DNA, 120 bp, Artificial Sequence
  ENSG00000250131_17 (sequence is synthesized)
catttttggttgtgtggccctcgttgccctattgcacttttgataatatttgcctgtgacaagtagttatttttcattaccacattcaatcatgggtaataaaatattttaataatggtg

SEQ ID NO: 855034 - DNA, 120 bp, Artificial Sequence
  ENSG00000250131_18 (sequence is synthesized)
agccggatagaaaccttatgcctcaggatcttgctttggaagtcacatagcatcacttcttctgttatctacaggtcaaaacagtcacaagcctgctcaaattcggaaagaggggacgga

SEQ ID NO: 855035 - DNA, 120 bp, Artificial Sequence
  ENSG00000250131_19 (sequence is synthesized)
aatggaacctcttcatgggaggaagtttttgctgaagcaccaaaatagaggcaaagttttgtagaggccaagtgctaccttattctcaaatggagttttagatcatccatgaattacttg

SEQ ID NO: 855036 - DNA, 120 bp, Artificial Sequence
  ENSG00000250131_20 (sequence is synthesized)
caaaagggacgtcctgaaactctgcaccactagaccatcgtacacctttaatgaattcttagatgcattttatatatgatgtatgtacataaaaatgaatgaattcattagaagacattt

SEQ ID NO: 855037 - DNA, 120 bp, Artificial Sequence
  ENSG00000250131_21 (sequence is synthesized)
taaaaatgggaatttccgtggacaaagagttttaggaaagttgagtatttcttttgaagctacgtgaggagagcttttggaaaagcactaaggaatcttgatgcgtatgcttcgtgcttc

SEQ ID NO: 855038 - DNA, 120 bp, Artificial Sequence
  ENSG00000250131_22 (sequence is synthesized)
tgtagacacacagttggcacctgactcagatataaaaaagtctcaaggttttattatcgctggcagagcaagaggagagatggcaagagtgagacactgcaacccacccactgatgttgg

SEQ ID NO: 855039 - DNA, 120 bp, Artificial Sequence
  ENSG00000250131_23 (sequence is synthesized)
ggcgaagatgccctaggccagacctataacacataaatagaaaggagctggacttgagggacttgattttgaacaggacactgtcaaaagcccccacctgggaaactgtactaatagccc

SEQ ID NO: 855040 - DNA, 120 bp, Artificial Sequence
  ENSG00000250131_24 (sequence is synthesized)
ccacctgggaaactgtactaatagaagagtcagcgtggggtggtgtgttagtttgttttgatgctgctgatgaagacatacccaagactaggcgatttacaagagaaagaagaggttgaa

SEQ ID NO: 855041 - DNA, 120 bp, Artificial Sequence
  ENSG00000250131_25 (sequence is synthesized)
tggggaagcctcacaatcatggcggaaggtgaggaggagcaagtcacatcttaacgtggatggcggcaggcaaagacacaaagaatgagagccaagtgaaacagatttccccttatcaaa

SEQ ID NO: 855042 - DNA, 120 bp, Artificial Sequence
  ENSG00000250131_26 (sequence is synthesized)
caaaccagcagatctcacgagacttattcactaccacgaggacagcatgggagaacccacccccacaatccaaccatctcccaccacgtccctcccagaacacgcgggaattatgggagt

SEQ ID NO: 855043 - DNA, 120 bp, Artificial Sequence
  ENSG00000250131_27 (sequence is synthesized)
ttcaagatgatatttgggtggggacatagagccaaacaatatcaggtggactgccagtaaaaaggggcgggcgtgtgttaatgctttggagaaggcattgtgtctctgataggaactaca

SEQ ID NO: 855044 - DNA, 120 bp, Artificial Sequence
  ENSG00000250131_28 (sequence is synthesized)
tacaggtgagagagagatcccagcgacagaaggtcgccaaggaatctgtgggagaggaaataagaatttgcctgtctgttcccagttgtttgagactggggagaagacgatgagaaaagt

SEQ ID NO: 855045 - DNA, 120 bp, Artificial Sequence
  ENSG00000250131_29 (sequence is synthesized)
tttaaattggatgagaggttgatactcagatattaggcagaaaggaacttttatacccctgaaaaatgagagttcttcttaataactaactagaaaaaaatgtcagatcggcctaatatt

SEQ ID NO: 855046 - DNA, 120 bp, Artificial Sequence
  ENSG00000250131_30 (sequence is synthesized)
tcatctggggataaataaggacagttcaaaattagaaagagcagtagtgaggaaaaaaaaatggtcactctctgcttttaacctgacaactcttattcagtcaatttaaatgttatacag

SEQ ID NO: 855047 - DNA, 120 bp, Artificial Sequence
  ENSG00000250131_31 (sequence is synthesized)
gttttagataaaatactaacaagtaaaacacctatgatagagttctgagtaaaatgtacagcattctgtacttcataaagaatataaactcaagtttattatatatattacatgttctct

SEQ ID NO: 855048 - DNA, 120 bp, Artificial Sequence
  ENSG00000250131_32 (sequence is synthesized)
ctatattctttctatataatctattatatgtgttttctctaatagtaattaaaaaaaccccacacatacaggtatctatagaaaaaattggatgctgacacacttacctaatgttaagac

SEQ ID NO: 855049 - DNA, 120 bp, Artificial Sequence
  ENSG00000250131_33 (sequence is synthesized)
aattgagaaaaggtgaaataagcagaagaccaagggatgcattgggaggaggagaaccaggaggaggaccacgtaatggaagccaagtgaagacagtgtttcccagtgctggtgagttaa

SEQ ID NO: 855050 - DNA, 120 bp, Artificial Sequence
  ENSG00000250131_34 (sequence is synthesized)
gtaagatgaagactcggacttgaccatgtagccatgtggagggtattgatgatttctggttccccagaagggacaatagaaataattacatatcgatagaggaatcctaaaattacactt

SEQ ID NO: 855051 - DNA, 120 bp, Artificial Sequence
  ENSG00000250131_35 (sequence is synthesized)
tgtgattttcctcaccttgagagctcttatatctctggcagtgtctaaatcttttatagatattgactcatttactcatccatataaactgtaaagtagaatcccttattatcctcactt

SEQ ID NO: 855052 - DNA, 120 bp, Artificial Sequence
  ENSG00000250131_36 (sequence is synthesized)
tagagatgtgaaaactgaaatcagagaagttaaataattgggccatgttattacatggccagaaagtagcagagctaagatttgatctcaattgttctgattttagagtccacagtctta

SEQ ID NO: 855053 - DNA, 120 bp, Artificial Sequence
  ENSG00000250131_37 (sequence is synthesized)
tccacagtcttaaacactgcactatatactagctatgaaataaaggaaagttaaacatgatttatatatgatcctaagtagtagaatttatataggatttttatatttttatgtgatcta

SEQ ID NO: 855054 - DNA, 120 bp, Artificial Sequence
  ENSG00000250131_38 (sequence is synthesized)
ttctaagtagtaggataaagcaaaaatggctgccatgtgatcatcaaagaatgctaagttcagagtgttttagtatcatatatttttttctaaatattttttcctttaataaagagttga

SEQ ID NO: 855055 - DNA, 81 bp, Artificial Sequence
  ENSG00000250131_39 (sequence is synthesized)
ctctacctcccaggtttgtcaggcatgtgccaccatgcctggttaattttttaaacttttagtagagacaaggtctcccta

SEQ ID NO: 855056 - DNA, 120 bp, Artificial Sequence
  ENSG00000250131_40 (sequence is synthesized)
gttaattttttaaacttttagtagagacaaggtctccctacgttgcccaggctggtctcaagctgctgaactcaagtaatcctcttgccttggtctccaaaggtgctgggattacaggtg

SEQ ID NO: 855057 - DNA, 120 bp, Artificial Sequence
  ENSG00000250131_41 (sequence is synthesized)
tgggccactgtgtccagccagcactggcttttaataagtgtcactgaaaagtaagtcggtaagaaacaaccctcatctccaggtggtagtaactgaaaatgaaagtaacagaaagtgaga

SEQ ID NO: 855058 - DNA, 120 bp, Artificial Sequence
  ENSG00000250131_42 (sequence is synthesized)
acatggggtgtgattcttgtagtctgtattttgctggtttttattagttttgagcctcaatttgaaccttttgtactggaatctaaagatgaagtttccctgatggcaaaattacaatcc

SEQ ID NO: 855059 - DNA, 120 bp, Artificial Sequence
  ENSG00000250131_43 (sequence is synthesized)
atcactcactaatgtcatttcttccatgagtcacatccatcctgaaggaaagtgcttgaactaggaacatgtacctttattacatgtaggagcaaagaccataatcctattatttacttc

SEQ ID NO: 855060 - DNA, 120 bp, Artificial Sequence
  ENSG00000250131_44 (sequence is synthesized)
acccccatctaatgcctcttagtaatagggatgtttattattttttaaaccagaagttcactttctcgtatccatgtaagtctgtctagttagattggagtaaactgaatccacttctgg

SEQ ID NO: 855061 - DNA, 120 bp, Artificial Sequence
  ENSG00000250131_45 (sequence is synthesized)
ccaactcaagatacaattgaaacttaattgaatacaaccatgcaccggtcataatggtattttggtcaaggatggattgcatatacaacagtggtaatataaggtaataatgaatggagt

SEQ ID NO: 855062 - DNA, 120 bp, Artificial Sequence
  ENSG00000250131_46 (sequence is synthesized)
tgaaaaattgctattgctaatgctgtcatagccattgtaatattgtagcacaagacattactcacatttctatagtgatgctggtgtaaacacacctattgcactgtcagtcatataaaa

SEQ ID NO: 855063 - DNA, 120 bp, Artificial Sequence
  ENSG00000250131_47 (sequence is synthesized)
gtatggcaatacaattatgtacagtacaaaacacttgataattctaataaatggttatgtatttattatacaaaactttttaccattatcttagagtgttctctttctacttagaaaaaa

SEQ ID NO: 855064 - DNA, 120 bp, Artificial Sequence
  ENSG00000250131_48 (sequence is synthesized)
gttaactctaaaatagcctcaggtaactgtaaacagcctgttaaatagcaagtccttcagtaggtattccagaagaaggcattgttattacaggagatgatagctccatgcgtgttggtg

SEQ ID NO: 855065 - DNA, 120 bp, Artificial Sequence
  ENSG00000267698_0 (sequence is synthesized)
gacagccgcgggaagacatgagaggctgctagaaggacttcccgcggccagcgccatcacctgcccacgccgcagggagccctgaccagagctccagacctctgggtccaactgccttat

SEQ ID NO: 855066 - DNA, 120 bp, Artificial Sequence
  ENSG00000267698_1 (sequence is synthesized)
ggatccctctccctgaatgtcacataggagaggggacaggggttggccacacacctggaaatggagttctctgatgcaatgtcctttggggtccggactgtggtgaaggttcgtccagct

SEQ ID NO: 855067 - DNA, 120 bp, Artificial Sequence
  ENSG00000267698_2 (sequence is synthesized)
gaaccgcagtgtgcccgtctggggagagaagggaggcgatggctaaggaaggaatgctgggaggccaacgtggagtgcccacacacgggcagcaagaaaagaagagagggcaatgcaacc

SEQ ID NO: 855068 - DNA, 120 bp, Artificial Sequence
  ENSG00000267698_3 (sequence is synthesized)
atggaggcagagactggagagatgtggccacaagccaagcactgcctgcagccaccaggaaccggaacaggcaaagaagagattctcccccagaacctccagaggagtacagccctgccg

SEQ ID NO: 855069 - DNA, 120 bp, Artificial Sequence
  ENSG00000267698_4 (sequence is synthesized)
acaccttggttttggcccaggaaagccgatttggactcctggcctctagaactgttagaaaataatttgtcttgttttaagccaccaagtttgttagagcagcatgggaaactaatagtg

SEQ ID NO: 855070 - DNA, 120 bp, Artificial Sequence
  ENSG00000250132_0 (sequence is synthesized)
acacgggcatcgccgaggaccccagcaatggacgtcgtgtctgtggtgatcccgccaggacgcggggagcgtgggcggaaattagtgtccacgttccgaccctgcgctgtgccaaacgct

SEQ ID NO: 855071 - DNA, 120 bp, Artificial Sequence
  ENSG00000250132_1 (sequence is synthesized)
gcttcgggagctgtttatttagcctccgacagctaagcgaatcggcgggcggctggggcctggtgcaacccgattttctcgtgcagactcgcagccggctttggttttgttttttgtttt

SEQ ID NO: 855072 - DNA, 120 bp, Artificial Sequence
  ENSG00000250132_2 (sequence is synthesized)
ctacagccattaatttaaggatgtagataagctatctctaaaccaagaaagatcgacatgcacttggatcattgcagtttctgggcctgctgtcatctcccccttcagtacttcccacat

SEQ ID NO: 855073 - DNA, 120 bp, Artificial Sequence
  ENSG00000250132_3 (sequence is synthesized)
atgactaccaactgttagacgatgtgctgctgccagaccagcctttcatttcttggacatccggctatttacccaggaaaagtcatcctttgactatttttcatgacctttctcatctga

SEQ ID NO: 855074 - DNA, 120 bp, Artificial Sequence
  ENSG00000250132_4 (sequence is synthesized)
cctccccgggctcccggctcggctgcctccctttccctcagcctcccgggagcgtgacgcggcggcccgggggcctccgggcgccttccggggcacgcgggatcgacatgcacttggatc

SEQ ID NO: 855075 - DNA, 120 bp, Artificial Sequence
  ENSG00000250132_5 (sequence is synthesized)
tgtttctgccttaaatctacttctgtctcagccaaattcattctcccaagaagacaaggatcgaggactgtggagccaactcagactcgccacggctaacaatgtttcctgggatcgcct

SEQ ID NO: 855076 - DNA, 120 bp, Artificial Sequence
  ENSG00000250132_6 (sequence is synthesized)
cagaggagaggctcatgcaatttgcaagtcatcatcaaaaagatgtcatttgttctgtttgtctactgcaggaagacagattaccctaaaatttagtggctgaaaacaactctattttat

SEQ ID NO: 855077 - DNA, 120 bp, Artificial Sequence
  ENSG00000250132_7 (sequence is synthesized)
cgtagcttacaattttgtggattgggaattagagcctgtctcatctgggcaactcttctgttccccatggcatcacctgaggtcactccatggtattcagctaccagacgaactcatctg

SEQ ID NO: 855078 - DNA, 120 bp, Artificial Sequence
  ENSG00000250132_8 (sequence is synthesized)
gagtatccaagtattcattcacgctcatatctggcaccttggcagggatgactggaagcctgggctcagctgggactgctgaccatagtacctacaaatggcctcttcagcatggcttct

SEQ ID NO: 855079 - DNA, 120 bp, Artificial Sequence
  ENSG00000250132_9 (sequence is synthesized)
taaatggctgctcggagctaccaagagacaggaagtagaagctgctagtttcttaagacccagaaatggtacaatttcattcctgccattggtcaaagcagtcacagagccttccaagag

SEQ ID NO: 855080 - DNA, 90 bp, Artificial Sequence
  ENSG00000250132_10 (sequence is synthesized)
tcctgccattggtcaaagcagtcacagagccttccaagaggaaacacagaccctcacttctcactgggaagtatgtcaaagagtttgggg

SEQ ID NO: 855081 - DNA, 63 bp, Artificial Sequence
  ENSG00000250132_11 (sequence is synthesized)
cagccctggggctgtctttaatccactacaacattgcaaagctgtgagccaggatgagaacgc

SEQ ID NO: 855082 - DNA, 120 bp, Artificial Sequence
  ENSG00000250132_12 (sequence is synthesized)
cactacaacattgcaaagctgtgagccaggatgagaacgccagaggtatgaatgtggattaaaagtccaagcactgaaactttcaatgtttagagaccagtgagagaaagaaccagcaac

SEQ ID NO: 855083 - DNA, 120 bp, Artificial Sequence
  ENSG00000250132_13 (sequence is synthesized)
agagactcagaactatatcatattctgctgataagccaataagatgataatgataactaagaattgacattggctttagtgatgtagacataattggggaccttgacaagagcagtttac

SEQ ID NO: 855084 - DNA, 120 bp, Artificial Sequence
  ENSG00000250132_14 (sequence is synthesized)
agaatttctgctataaatgggagcaggaggatgtatcaggagctaatgggagaaatgaggtcaacattatttcctatgtagctttctcttatgcccaaattccactggatatcatccact

SEQ ID NO: 855085 - DNA, 120 bp, Artificial Sequence
  ENSG00000250132_15 (sequence is synthesized)
tctggttacttctggtttgggatgtataggtgaaggaatagttttggatcctcctttattacctgttttatttgcataattggacaataactaaacttgctttaaatatctcttaaagca

SEQ ID NO: 855086 - DNA, 120 bp, Artificial Sequence
  ENSG00000250132_16 (sequence is synthesized)
ttttaaattcaaatttggagagaggaatatgagagtggtttttggtcattgtttagccatatacaatattgtcttaccttctgcatttgaagtttttgatacctgataaatgtttgtatt

SEQ ID NO: 855087 - DNA, 120 bp, Artificial Sequence
  ENSG00000250132_17 (sequence is synthesized)
gtgtagttgaacaagaatttgccacatgaaggtttacagttgtagttttatgttaagttctttacagtagtcccctctcatctttatcccccacttggaactatctacagtagttccagg

SEQ ID NO: 855088 - DNA, 120 bp, Artificial Sequence
  ENSG00000250132_18 (sequence is synthesized)
acccccctcccagtggatgattgaaaccatggatagtaccaaaccctatatacatattatgtttttcctatacatacatacctatgatgtttaatttctaaattaggcggagtaagagat

SEQ ID NO: 855089 - DNA, 120 bp, Artificial Sequence
  ENSG00000250132_19 (sequence is synthesized)
gaacaacaactaataatgtaatagaacagttgtaacaatatactataataagagctacatgaatgtggtttctccctctcaaaatgtgttactgtactcacctatctttggtccatggtt

SEQ ID NO: 855090 - DNA, 120 bp, Artificial Sequence
  ENSG00000250132_20 (sequence is synthesized)
gtctgtgggtgactgaaactgcatataaggcaggggactactgtaaccacaggtgttggaaggcagcatagcagagtagttagggtcaggactgcggaggaagactgcctaggttcatat

SEQ ID NO: 855091 - DNA, 120 bp, Artificial Sequence
  ENSG00000250132_21 (sequence is synthesized)
tatgatgtaaactctccatgcctcacttttcttatctaatgcggagataataatagtaactcatttgtaaagttattataagtattaaatgagaaaatacatgtaagacacttagagtat

SEQ ID NO: 855092 - DNA, 120 bp, Artificial Sequence
  ENSG00000250132_22 (sequence is synthesized)
cacaggtcatcacttacttagtatgtagtaagtatttgatgaggttagttactattcttattgagcagtgaatcagttaggaatgctttcggctgcaaggaggagaatactgatttacag

SEQ ID NO: 855093 - DNA, 120 bp, Artificial Sequence
  ENSG00000250132_23 (sequence is synthesized)
tggcctcagtgagaagcctgcatttctctcacagagcaggcactgcagaggtaggcagctgctaaaacaggttcctttctacagctccaggggtctgagttggccactcttcagttccct

SEQ ID NO: 855094 - DNA, 120 bp, Artificial Sequence
  ENSG00000250132_24 (sequence is synthesized)
cggacctcccctgttgtttgccacaccaccaatcatcacattctcaaaggcattcaaggcagaaagctgggaacaaggaagggcggagagtttctcttcaggagcctccctcttactaga

SEQ ID NO: 855095 - DNA, 120 bp, Artificial Sequence
  ENSG00000250132_25 (sequence is synthesized)
gaagaaaaaaacctgccttttatgggttcttttgtcttgtttttcatgactgtcttcatttgagaaagtcctcaggccaagaaatggaggtgctggcagttggagatcaggctgtccata

SEQ ID NO: 855096 - DNA, 120 bp, Artificial Sequence
  ENSG00000250132_26 (sequence is synthesized)
gcacactgatgtggcacaggcaaggaatatggctgaggcaccaatttgctgctactgctgtctaacaggcattggaagtcttatgtgttcaaaaataaacttctgatttctactcccaaa

SEQ ID NO: 855097 - DNA, 120 bp, Artificial Sequence
  ENSG00000250135_0 (sequence is synthesized)
agccacgagaaccaggagatctaccagaaggccttcgacctcattgagcactactttggtgtagaagacgatgatagcagcctggctccccaagtcgatgaaacgcaacagcagttcatc

SEQ ID NO: 855098 - DNA, 120 bp, Artificial Sequence
  ENSG00000250135_1 (sequence is synthesized)
ttccagcagcctgaggcccccatggagggcttccagctataatatctgcctccagggaggggaggggatgggaagcaccaccagccagcggaagagcagccctctggtgggcgggaaacc

SEQ ID NO: 855099 - DNA, 120 bp, Artificial Sequence
  ENSG00000250135_2 (sequence is synthesized)
ccccttccctggagggagcaccctctggacagacagaaccatctgaggctcacctttgggttttgtgacaagaaggggacgtgttgggtttttcttccttacactatattttggctgcac

SEQ ID NO: 855100 - DNA, 120 bp, Artificial Sequence
  ENSG00000250135_3 (sequence is synthesized)
acatgtctttaacccaggagcccaggggtagacaaaggaggactaagggcccctgggtagacagacacagcttgatttcagagcagacataggcgaagaaaacatggcattgagtgtgct

SEQ ID NO: 855101 - DNA, 120 bp, Artificial Sequence
  ENSG00000250135_4 (sequence is synthesized)
gagtccagacaaatgttatttatatacacatccaaatttgaagagaaaatgtatttctttaggtttcaaacactgtaatagatataaagcaaaaataaaaacctgttgcaaagttctaaa

SEQ ID NO: 855102 - DNA, 120 bp, Artificial Sequence
  ENSG00000250137_0 (sequence is synthesized)
gagtagactggctttgaataggaacatgcgcaggtggaggcttagtagtggctgtaagaaggaggacagccctaatttggagggtcatttgcatttgaaaatgctccttactaaattgtg

SEQ ID NO: 855103 - DNA, 120 bp, Artificial Sequence
  ENSG00000250137_1 (sequence is synthesized)
agttactcatttattcacataattaatgagtttctattagtgttaggcaccgttctagatgatggtataattagttaacaaaaacctcaaaactctcgccccccatggagcttacatttc

SEQ ID NO: 855104 - DNA, 120 bp, Artificial Sequence
  ENSG00000250137_2 (sequence is synthesized)
cagggagggagagagatgatacaacaataagaaaatacagagctaatgtcattctatattgtataattatgtaaaatcaagcctgagtatttgacagcttctcagataccacagatctgt

SEQ ID NO: 855105 - DNA, 69 bp, Artificial Sequence
  ENSG00000250137_3 (sequence is synthesized)
gtcttggacttactggtggttaacaaggggttatcaggccttcagccacagattgaaggctgcactgtc

SEQ ID NO: 855106 - DNA, 90 bp, Artificial Sequence
  ENSG00000250137_4 (sequence is synthesized)
cagcttttggagtcttggacttactggtggttaacaaggggttatcaggccttcagccacagattgaaggctgcactgtcagcttgtttc

SEQ ID NO: 855107 - DNA, 120 bp, Artificial Sequence
  ENSG00000267690_0 (sequence is synthesized)
gtcttatttcttaatatctgcaaccagctcagagccagggataagtcaagactccaccagcccatgtatggctgcccggctgcccccagccttgccctcagttcttccccgagggcatgt

SEQ ID NO: 855108 - DNA, 120 bp, Artificial Sequence
  ENSG00000267690_1 (sequence is synthesized)
cctgttgagagccggtttcacctgtgcagtgtggcctgatggcccagcacccaggagctctgcgcaccctgccgccatgggccatccgtccccagacctcttcccacagggtcactgtgg

SEQ ID NO: 855109 - DNA, 120 bp, Artificial Sequence
  ENSG00000267690_2 (sequence is synthesized)
tccaccgtcctgccctcggggaatctcagcctccctctcacaggtgcacacatggggagcagccaaggatttctgcagaaaaattcactccagaggtcagcagctagaagcacaaatgga

SEQ ID NO: 855110 - DNA, 120 bp, Artificial Sequence
  ENSG00000267690_3 (sequence is synthesized)
gagtgagtgagcacgagcgcctcgtggactcagccctcccaggcccagaaccaagcgcccatggacacccctacacgggcagcaagggctggaaccggcagcctggtggacatccgccct

SEQ ID NO: 855111 - DNA, 120 bp, Artificial Sequence
  ENSG00000267690_4 (sequence is synthesized)
gcagggctctccctcgcagagactgcagaagagggtgtgcagtgctcagcgcggaaggatgttctccctgcttttaaggagccgtgactattttgctcagcgtccctggcgtgcctttct

SEQ ID NO: 855112 - DNA, 120 bp, Artificial Sequence
  ENSG00000267690_5 (sequence is synthesized)
ctgtacaaaaaggagacttagaggcttccccatcccattaccacagctgggcggcttcttgcatgagggcaccttgctgaactaagtcaccccaagctaccctaggctccctgtgcactg

SEQ ID NO: 855113 - DNA, 120 bp, Artificial Sequence
  ENSG00000267690_6 (sequence is synthesized)
agatgctgagtcctgaggtgccttccagcaccagtgaatgggactaaagtcttctgcagtgtcgcgaccgttctgaagtgagtattctgtggtcatttgttaccctctgtgaagcccagg

SEQ ID NO: 855114 - DNA, 120 bp, Artificial Sequence
  ENSG00000267690_7 (sequence is synthesized)
aagcagggattcagggctgaccagggaccactttgttctctgcccatgcatggaaggtctgcacttgggccccaaagcctgagtaaagtttcaccgtgaacttcttccagcaggataaac

SEQ ID NO: 855115 - DNA, 120 bp, Artificial Sequence
  ENSG00000267690_8 (sequence is synthesized)
agtagggttcagtactgagggtctccagtttaaaccctgattccactacaaaataaatgctagactgggccacatatttaagctgtgttttccttatgcttaaaatggcagtaagattcc

SEQ ID NO: 855116 - DNA, 120 bp, Artificial Sequence
  ENSG00000267690_9 (sequence is synthesized)
acagaacgctcagagtggggcttggcagagacagggctagacaggggctgttatttagtgctggcatcttttattggtggcgatgttattttattttctatgattatgtaatttcctcct

SEQ ID NO: 855117 - DNA, 120 bp, Artificial Sequence
  ENSG00000267690_10 (sequence is synthesized)
tataatctcacccttgttgcttatcttaagagtgatgtttcaggagcaacagcatcaatgtagtgtttgatattctggacaatctaacacaagcaatttctaattcataatccactattt

SEQ ID NO: 855118 - DNA, 120 bp, Artificial Sequence
  ENSG00000267690_11 (sequence is synthesized)
gtatttgttgattatttgtttataataaagaaagcaatgctttgtcagttttccacaatctgccaccaacctcagatatgctttcatgaagctcatcttcaattaaggcccgtgtgcttt

SEQ ID NO: 855119 - DNA, 120 bp, Artificial Sequence
  ENSG00000267690_12 (sequence is synthesized)
atttttgtgaaaaatggagatgtgaagacattctgtgctctgctaggctgtgtcctgagaaccccccttttaaaaaggttctcagtattgtaggtgtcacttttttccattataaatcac

SEQ ID NO: 855120 - DNA, 120 bp, Artificial Sequence
  ENSG00000267690_13 (sequence is synthesized)
aaaatgtagtagccagttaacaagacacaggtgttgctcccctgaaagtgcctgcagaatggtgccgaggtcctctcctcacccatagctcttggcatgatttattcctgctgcacgcct

SEQ ID NO: 855121 - DNA, 120 bp, Artificial Sequence
  ENSG00000267690_14 (sequence is synthesized)
tccgggaggtccaccaggctcacgtctgtgtctgtggaggtgtgtgtgaacatgtgcacgtgagggtacatccagtcttctaccagctaatacgtcagagaccacataatgttaggctgg

SEQ ID NO: 855122 - DNA, 120 bp, Artificial Sequence
  ENSG00000267690_15 (sequence is synthesized)
aagagaccctaaaggttatataaaccaattcccttattttagagctgagaaatttcaggtgcaaagaagggagaggctataacatggtggcactagaataagactgccgggtttgaatcc

SEQ ID NO: 855123 - DNA, 120 bp, Artificial Sequence
  ENSG00000267690_16 (sequence is synthesized)
tggtgcaactacttattacctgtgtgatcttgggaaagtgacttaacctttctgggtcacagtttggatacctataaacggcagatattaacagtctctatttgtgtggatattttaaca

SEQ ID NO: 855124 - DNA, 120 bp, Artificial Sequence
  ENSG00000267690_17 (sequence is synthesized)
ataaaattaaatcattcacgtaaagaacttaaaagactctcagataggttgtggtgagctatgattgtaccactgcaccccagcctcctgtagcctgggcaaaggagcaagattgtctct

SEQ ID NO: 855125 - DNA, 120 bp, Artificial Sequence
  ENSG00000267696_0 (sequence is synthesized)
atgaacccatcggagatgcaaagaaaagcacctccgcggagacggagacaccgcaatcgagcaccgttgactcacaagatgaacaaaatggtgacgtcagaagaacagatgaagttgcca

SEQ ID NO: 855126 - DNA, 81 bp, Artificial Sequence
  ENSG00000267696_1 (sequence is synthesized)
tccaccaagaaagcagagccgccgacttgggcacaactaaagaagctgacgcagttagctacaaaatatctagagaacaca

SEQ ID NO: 855127 - DNA, 120 bp, Artificial Sequence
  ENSG00000267694_0 (sequence is synthesized)
ttgagagcagggcagcgcatggggagtgagtgtaaccacagttgacaacaccacctgcttttttgaggccagtgaagaagtccacaagtgcctgccttggttctgctgtgcttgcagctg

SEQ ID NO: 855128 - DNA, 120 bp, Artificial Sequence
  ENSG00000267694_1 (sequence is synthesized)
tcacgggatctgaagccagcccactgctttcacagaatgaagctccagctcatccacccagatgccaaggaccaggacaccctcaaccagtaacacacactctccttcttcaatgacgtt

SEQ ID NO: 855129 - DNA, 120 bp, Artificial Sequence
  ENSG00000267694_2 (sequence is synthesized)
tttcctcagtcaggccctggccacgaagacccctgcctaccgatcttctgtactagcccagcacgcgtggacacattcatctgcacgacagacatcatggggcaccttctgtgagcaggc

SEQ ID NO: 855130 - DNA, 120 bp, Artificial Sequence
  ENSG00000267694_3 (sequence is synthesized)
gctggggagacaaggccagcccgcctcagttcccacggtactcaagagacagcaagccaggccaccccagcatggtgaggtgggcactgtgttcaccaacaataaaggcggacaaaggtt

SEQ ID NO: 855131 - DNA, 120 bp, Artificial Sequence
  ENSG00000267695_0 (sequence is synthesized)
cctgaaaggccgtctaacgcctttcctcttggaaaagtcgcaggaacagaatcttgttctgttgcccaggctgctcttgaactcttggcttcaagagatcctcttgccttggcctccaaa

SEQ ID NO: 855132 - DNA, 120 bp, Artificial Sequence
  ENSG00000267695_1 (sequence is synthesized)
atgcccaccagtctgaagacaccaaaaggagaactgactcaatgcaagaatgcaatttctttagttccatgacgtcacccttcattcttcaaccaatcagtgatccttataccttggccc

SEQ ID NO: 855133 - DNA, 120 bp, Artificial Sequence
  ENSG00000267695_2 (sequence is synthesized)
actaaccatccaaaccccttaaaatccctagatcctaaactccttgaggaggtggatttgaggtttcctccagtctccttgtttggctgccttgtgattaaacctctttctctgctgcaa

SEQ ID NO: 855134 - DNA, 120 bp, Artificial Sequence
  ENSG00000282851_0 (sequence is synthesized)
agctcttgcatgaggcacctacaggcagaggattaattaggttttcagtttcagtttcccagaaaggaggtgggcttttttttcaccctgctttaaaagcccttgggcccttcccagctg

SEQ ID NO: 855135 - DNA, 120 bp, Artificial Sequence
  ENSG00000282851_1 (sequence is synthesized)
ggtgccagccaactgtggctgcctgggacactccatcttaagtccctgtgcctctgctgtgtgttactgagtgcctaggccgtgccagcctgtattcatctgtactatgacctgaagagg

SEQ ID NO: 855136 - DNA, 120 bp, Artificial Sequence
  ENSG00000282851_2 (sequence is synthesized)
cagaggccatcactgttggtccggtctccacctggggaaactgaggtgtctctgtggtgacgagcagggcttcatccagtgcctctgtccccaccgaggggactatgggagacatggagg

SEQ ID NO: 855137 - DNA, 120 bp, Artificial Sequence
  ENSG00000282851_3 (sequence is synthesized)
gtgtgtgagcaacaggtgagactggagccagctgaaaactgggagaccgacccagccaacaaacaatgtcggtctctgtcttggcacctgcaggaaacaagctcctacttccagaaaaag

SEQ ID NO: 855138 - DNA, 120 bp, Artificial Sequence
  ENSG00000282851_4 (sequence is synthesized)
tgctcctgggactccaggataccagatccttccctggcaccggttccaggaggacctcgttcttaggcagcatctgtgtctctgttttgtaagacacacagagtatccttaacccactgc

SEQ ID NO: 855139 - DNA, 120 bp, Artificial Sequence
  ENSG00000282851_5 (sequence is synthesized)
agatatttccctgggtccatggtcaatcaacaccacctttcagtctccagcctcttaaccagcccagggctgagtgttgtttatagtattaatatgtttctggctgggctcagtggctca

SEQ ID NO: 855140 - DNA, 69 bp, Artificial Sequence
  ENSG00000282851_6 (sequence is synthesized)
aggtaagtgagactccatctcaaaacaaagaaacaaacaaagtattaatatgttccccttgatcagtgg

SEQ ID NO: 855141 - DNA, 89 bp, Artificial Sequence
  ENSG00000282851_7 (sequence is synthesized)
ccagcctgggcaagaaagtgagactccatctcaaaacaaagaaacaaacaaagtattaatatgttccccttgatcagtggggtggtaga

SEQ ID NO: 855142 - DNA, 120 bp, Artificial Sequence
  ENSG00000282851_8 (sequence is synthesized)
tgggtgaactagcaaaaccctgcctgtactaaaaatacaaaaattaactgggcttggtggtgcgagcctgtaatcccagtggaggctgagacaggagaatccttttgtaatgcctgacct

SEQ ID NO: 855143 - DNA, 120 bp, Artificial Sequence
  ENSG00000282851_9 (sequence is synthesized)
tgtttttttactaaccctattttaaccttgtttttactaaccctatttttaaattttccctttttgtctccttaattacctagccttgtttcccatatgagtagactctcccttagctgg

SEQ ID NO: 855144 - DNA, 120 bp, Artificial Sequence
  ENSG00000282851_10 (sequence is synthesized)
gaaagcctgacgaacgccatctggccccttgatttacaagacattaagggctacttacccaacccccttcctcaaagagttaacctgcgtaagcagatcctcagcatttcaaaggagccc

SEQ ID NO: 855145 - DNA, 120 bp, Artificial Sequence
  ENSG00000282851_11 (sequence is synthesized)
aattagctgataaggtactggaacaaacaatgtacgaagttcccaggattttgctcaaaagcataacaacataaagccttgagtctgtgtctggcatagcatccatatctaactcttatg

SEQ ID NO: 855146 - DNA, 120 bp, Artificial Sequence
  ENSG00000282851_12 (sequence is synthesized)
ctcttatgaaggatttagagcccggcacctggttccgttgctttttttgtaaccatttgtcttttaaattgtttatttctctgtaaccatttgttttttgattcttgcatgtttttactt

SEQ ID NO: 855147 - DNA, 85 bp, Artificial Sequence
  ENSG00000282851_13 (sequence is synthesized)
acttctgtagaattattgcatttgagctccgctccccttccgaaccaaggtataaaagtagaaagtcaagccttctcttggctgc

SEQ ID NO: 855148 - DNA, 120 bp, Artificial Sequence
  ENSG00000282851_14 (sequence is synthesized)
caggcatctggacgcggtggtacatgcctgtaatcccaacacttaggcaggaggatcactcgagcccagaagatcaagactagtgtgagcaacaaaatccttccctggcaccggttccag

SEQ ID NO: 855149 - DNA, 120 bp, Artificial Sequence
  ENSG00000282851_15 (sequence is synthesized)
gaagtgctctgaccagcagctcttgcatgaggcacctacaggcagaggattaattaggttttcagtttcagtttcccagaaaggaggaaacaagctcctacttccagaaaaagtgctcct

SEQ ID NO: 855150 - DNA, 120 bp, Artificial Sequence
  ENSG00000282851_16 (sequence is synthesized)
caacagccatgcattcgggaaaggaacttcagtgttgtgtggctcacctccctgttaccctgttgccatgacagccctgataaaataactgggaaagttctctttcttattgtaagtcca

SEQ ID NO: 855151 - DNA, 120 bp, Artificial Sequence
  ENSG00000282851_17 (sequence is synthesized)
gaccagataccagaggaagataagatccctaaatcaccacaaactggaacagacgacctctagtcgactttagatcatcaatatataattataatgctaaaattccttctcttaaaagaa

SEQ ID NO: 855152 - DNA, 120 bp, Artificial Sequence
  ENSG00000282851_18 (sequence is synthesized)
aatctccattttgtgtagatgggttgtatgaagacaacccaggaattgaggctcatgaattgagcctgcgtgtctggagtcccaccctgcacatgctagcattcctctcccttcctgtac

SEQ ID NO: 855153 - DNA, 120 bp, Artificial Sequence
  ENSG00000282851_19 (sequence is synthesized)
ccaggggaagaaacaataaaacgttatgctttttactgttgagggagaaggggcagttagagtgagagcctctccttctccattcctggccagtgaataaaacctgattgccttttccga

SEQ ID NO: 855154 - DNA, 74 bp, Artificial Sequence
  ENSG00000282851_20 (sequence is synthesized)
tgtaatcccaacacttaggcaggaggatcactcgagcccagaagatcaagactagtgtgagcaacaaaatgggc

SEQ ID NO: 855155 - DNA, 120 bp, Artificial Sequence
  ENSG00000282851_21 (sequence is synthesized)
ccgagatcgcaccattgcactccagcgtgggctacagaacaagactctgtctcaaaaggaaaaaaaaaagaattcagaattcacctgtcgcctgctgctgcagtgaacagtgagtggcac

SEQ ID NO: 855156 - DNA, 120 bp, Artificial Sequence; identical to SEQ ID NO: 819151
  ENSG00000228890_0 (sequence is synthesized)

SEQ ID NO: 855157 - DNA, 120 bp, Artificial Sequence
  ENSG00000228890_1 (sequence is synthesized)
ttggaataccatctggtggaggttatttggatgctgaaacattttggcatgcttcccaatccactgcagactcatgaatgattcacagaaaaataaagaacactgagcaatacagcccaa

SEQ ID NO: 855158 - DNA, 120 bp, Artificial Sequence
  ENSG00000282859_0 (sequence is synthesized)
ctcagaaggagcaaaaagcagagcagaatctaataggctgcttgcatacctgtcactggattcgatgaaatcctgttgtttattatgcacatgtcacatacctcaaaaatcaagttcttg

SEQ ID NO: 855159 - DNA, 120 bp, Artificial Sequence
  ENSG00000282859_1 (sequence is synthesized)
ggagagggaatttaattggcctaacttgtatcacccgcccttgggccggtcccaccaatttgcatgtaattgggtacagaattaaggtagtccccaaagaaaaaaatggtgctattaaca

SEQ ID NO: 855160 - DNA, 120 bp, Artificial Sequence
  ENSG00000282859_2 (sequence is synthesized)
tgcagccttgttttaatatcaatttttttttctcgaagaattttactctttcaacaccaaggaaactcaagacaatagaaaactactggacaatagcaccaagtaatgtatttgtgtgtg

SEQ ID NO: 855161 - DNA, 120 bp, Artificial Sequence
  ENSG00000282859_3 (sequence is synthesized)
aagactcactaatttatgcaattatacctcaatctatgcagtatcttcctaaagattattaaaaaatcaaatgtattttaaagaagtttgccttttatttaaataaatactgtctaaact

SEQ ID NO: 855162 - DNA, 120 bp, Artificial Sequence
  ENSG00000256474_0 (sequence is synthesized)
acggagaagcccttgggagtttcattcttgatttcctcctggcagctgtgctgggtgaatagactacatacactggagcagagtccttcattcctgaatattcaggagggaatgcatgcc

SEQ ID NO: 855163 - DNA, 120 bp, Artificial Sequence
  ENSG00000256474_1 (sequence is synthesized)
agccagaaggagcagggagacaaatattttaaagaactgcttggaaaagaaaaattttatagtgtttggaatatcgcagcctctcatctgggagattcagccacctacttctgtgctttg

SEQ ID NO: 855164 - DNA, 120 bp, Artificial Sequence
  ENSG00000256473_0 (sequence is synthesized)
aagactacaggtttctccatggagcagcacagagggtgaacaaaggcagaaaagctgttcaatacacaagaaaataacacacacactgtttccacggtatctcacggcagacataacttc

SEQ ID NO: 855165 - DNA, 120 bp, Artificial Sequence
  ENSG00000256473_1 (sequence is synthesized)
aagaagcaaaagagtaagctgcacccttcttatttctggtctctagagctgggattcttgactaacgatggaaggggaagcagtgagatatgaaatggatatgagattaaagtttccagc

SEQ ID NO: 855166 - DNA, 120 bp, Artificial Sequence
  ENSG00000256473_2 (sequence is synthesized)
aggactgaattttaataactgaaaggactggaaagtgatgcagtctactcaagatattaagatatggaaaatagagatttaacagagcataattaaaagcagagtttggagaaaattaaa

SEQ ID NO: 855167 - DNA, 120 bp, Artificial Sequence
  ENSG00000273420_0 (sequence is synthesized)
ccactgctgaccgcagcacgcccctcacagaccgtgctgggcgatggcttcctccagcctgctccaggggctgcccccgaccccccagcaccgctcatggacacaggcagcaccagggcg

SEQ ID NO: 855168 - DNA, 120 bp, Artificial Sequence
  ENSG00000273420_1 (sequence is synthesized)
gccggagacaggccccccagtgcccccggccgtgcaccggaggtgggaccttcagggccacccttgccctcgggcctgcgagacccagagtgcaggcccgtggacaaggacagaaaggtc

SEQ ID NO: 855169 - DNA, 120 bp, Artificial Sequence
  ENSG00000273420_2 (sequence is synthesized)
ctgcagatgcacctcgggagccctgctcagcccaggacccgcacccccaggtctccactgccagcagcaccctgggcccccactcgccagagccactgggggtctgcaggaaccccccgc

SEQ ID NO: 855170 - DNA, 120 bp, Artificial Sequence
  ENSG00000273420_3 (sequence is synthesized)
ccccctgctccccaatgctggaggccagcgatgatgaggccctgttggtctgttgaccgctgggctcgctggtgaccgccacagccccgctttgtaaccagggaatacacagtcatttct

SEQ ID NO: 855171 - DNA, 120 bp, Artificial Sequence
  ENSG00000254900_0 (sequence is synthesized)
aaaggtcatgtcccatgtgcctagctgggagggacaggtcccctaatgccaaatatctggctgctactccactttgcagacagaaaactcagctttgtctgctctctcagacctctgtca

SEQ ID NO: 855172 - DNA, 120 bp, Artificial Sequence
  ENSG00000254900_1 (sequence is synthesized)
acctaggaaaagtgacacacactgaacaaacaccacatgagctgtgtgtttaagtcatgtggttgccttttgaaggagagggagctggatagaaaactggattgagccagacaactaccc

SEQ ID NO: 855173 - DNA, 120 bp, Artificial Sequence
  ENSG00000254900_2 (sequence is synthesized)
aaggaatactaaccagtaattaagtgaccatatgggtgtggagctcagcaataaggatgtgaattgaagccacccaagaagaccatgtactgtgaaaagataaggacaaggacagaaggc

SEQ ID NO: 855174 - DNA, 120 bp, Artificial Sequence
  ENSG00000254900_3 (sequence is synthesized)
tgaggaacatcaacattcaaatggtggacaacgctggatggaagaacctgaaaagaagactgaaaagtgaccaaagagtaggaggaaggcaagactttttctagaaaaagacgccaacag

SEQ ID NO: 855175 - DNA, 120 bp, Artificial Sequence
  ENSG00000259150_0 (sequence is synthesized)
agtcccggaacactctcggccctcttcagccactccctccccaacccacacgccatcaacctccagaccctctcgccgtggcttagaggtgtctctgacaacgtggcacactgggaaggc

SEQ ID NO: 855176 - DNA, 120 bp, Artificial Sequence
  ENSG00000259150_1 (sequence is synthesized)
cttctttcctgctaccaatacaaatgcattctgaatttgatatgtcattaaatgtaaaaatacagccaatttgaaacaagcaaatggaaattcccaggaaccaaaaacagaaagaaaaat

SEQ ID NO: 855177 - DNA, 120 bp, Artificial Sequence
  ENSG00000259150_2 (sequence is synthesized)
cagagctaccgcagtgctgtccctgcagacagaatttgggagaggtactcagagtcacctcctgtgagcctatgcaagccagctcctgcacaaccctggttttagtccagccttctgcag

SEQ ID NO: 855178 - DNA, 120 bp, Artificial Sequence
  ENSG00000259150_3 (sequence is synthesized)
aattccacattaaacaggatgaagaataggttgttagcagactgaggtacttggggcaacatttcgtacacaacaggagggagaaacgactccagaaaaacaatcagattttggtgaaac

SEQ ID NO: 855179 - DNA, 120 bp, Artificial Sequence
  ENSG00000259150_4 (sequence is synthesized)
tgatgtttgcaagtgtgagtgagccccatgtgctgaagcttcaggaacccctgagatggcacaagttctgccgtactgggcaacggatggtcttgaagcacacaagacactggaagacat

SEQ ID NO: 855180 - DNA, 120 bp, Artificial Sequence
  ENSG00000259150_5 (sequence is synthesized)
cggtgccaagcacgttgtgcaggttgtttcgttgattccgggcctggcctttgagatctgtggaggataccatgaactggctggctctgcatcctgcttgcaggcgctggcaagctggaa

SEQ ID NO: 855181 - DNA, 120 bp, Artificial Sequence
  ENSG00000259150_6 (sequence is synthesized)
cctgcttttctacgccacactgcagagggccctgaatgtgatctatgattgcaacaagcagccctgatgcggatccggagggcagggatgacgtgggggctgcctttctggttgacctgc

SEQ ID NO: 855182 - DNA, 120 bp, Artificial Sequence
  ENSG00000259150_7 (sequence is synthesized)
tggtaagcatggcctcatggatctatcaccaacagcacccagtcacttggggaggccgagtggcagggctggggcatccatcagggtttgattttgcttatgtggaccggcaggtgcagc

SEQ ID NO: 855183 - DNA, 120 bp, Artificial Sequence
  ENSG00000259150_8 (sequence is synthesized)
acagctgcattttagtgcagggcttcctgatcctgctgcacagctaacaccgttcttcccgaaggcagcagctcccccacggggctgtttccccagttctgggcatcagtcccagaggca

SEQ ID NO: 855184 - DNA, 120 bp, Artificial Sequence
  ENSG00000259150_9 (sequence is synthesized)
aagacgggagccatccactctgactctgccaacaattctgtgagcacccagttctctgtatgaaattcctttctgctttagataattaaaataacttttcttcccctgcaactgaactga

SEQ ID NO: 855185 - DNA, 120 bp, Artificial Sequence
  ENSG00000259150_10 (sequence is synthesized)
ttgtggtagaggagattttgccttgcaattttacatacttatgctacgtggaaggctgggtggcgtgacttcagaaaaatgtttcctcaggaaagagacacacagagagagagagaaaga

SEQ ID NO: 855186 - DNA, 120 bp, Artificial Sequence
  ENSG00000259150_11 (sequence is synthesized)
gagaaagagagaacccacctacctgttttgcaaaagtctcatgaatcatcccttcctgtggtcctgctccctgagatcctttcaccgctcacagtgggctacttctaagagcgtgcctgg

SEQ ID NO: 855187 - DNA, 120 bp, Artificial Sequence
  ENSG00000259150_12 (sequence is synthesized)
agccgtattaaattacacaaggcatgggaagaggcataatctgttgatgataaatcagaattaatgagagtttaacaagcctgctaaatactaagtcaatgtaaaaaatcaattgtaagc

SEQ ID NO: 855188 - DNA, 120 bp, Artificial Sequence
  ENSG00000259150_13 (sequence is synthesized)
ccatctatcagaaaaacactattagcaagcaaaatttacatttttactgcttaacatagcatcccaaatatcaagtacctagcaacaaatctaacgaaagatatgcaagacttatagaga

SEQ ID NO: 855189 - DNA, 120 bp, Artificial Sequence
  ENSG00000259150_14 (sequence is synthesized)
aaacagcaacagcaacaactttgtttagatacattagcgaagatctcattacatggagacatacactatgctcatggactggaagactccatatggaagatgccaattcacatctcagaa

SEQ ID NO: 855190 - DNA, 120 bp, Artificial Sequence
  ENSG00000259150_15 (sequence is synthesized)
tctcagcaggtgttgcaaagaacctgaaaatttgttttaaaaattcatgtcaaaatgcaaaggtcctacaattgccaaagaaaaatagggagggaggaccacctgatatcagcggtgatt

SEQ ID NO: 855191 - DNA, 120 bp, Artificial Sequence
  ENSG00000259150_16 (sequence is synthesized)
ataaaacaataataaatgtgataccttgccttaagtctggggatagacaaatagacgaggggcgcaggttggagaatccagaaactgacccatgaatacattgacacttgatatatgaca

SEQ ID NO: 855192 - DNA, 120 bp, Artificial Sequence
  ENSG00000259150_17 (sequence is synthesized)
gaaatggcccccaaagccatgggtgtctgggcatatagtatccatacagaaaaaatatgaactatcttcaataagagacataacactataaaagaaaatcattttaagaaaaaattgtac

SEQ ID NO: 855193 - DNA, 120 bp, Artificial Sequence
  ENSG00000259150_18 (sequence is synthesized)
tatgacctaagtagctgggcaggctgctcgccctgggaggggcagtccctgcagggtcagcagggccccagatgtcgaagcgtcagagtacagaaatcaaagatgtttggtgcagtgtgt

SEQ ID NO: 855194 - DNA, 120 bp, Artificial Sequence
  ENSG00000259150_19 (sequence is synthesized)
gtccaggtaaaggcccgcccaggtgtttgaatatggactcctcacatacttctgcagactccagctttgggttgacccatcggggagagggaacttagcatgaacccttgtataaaaatg

SEQ ID NO: 855195 - DNA, 120 bp, Artificial Sequence
  ENSG00000259150_20 (sequence is synthesized)
tccacatccaaggctgatggccggaggaggcagttaagagcaaaaggcaatggaccaaactacatcaaagatgggattataacaaaactttaaaagttggtttacaatgcagaaaattca

SEQ ID NO: 855196 - DNA, 120 bp, Artificial Sequence
  ENSG00000259150_21 (sequence is synthesized)
accttcattatgtggagacccatcttaataaaacaccaaaggcattaaacaaaataaatttgactacattaaaattaagaatttttgttaattaaaaaaacacctttaagagagtgaaaa

SEQ ID NO: 855197 - DNA, 120 bp, Artificial Sequence
  ENSG00000259150_22 (sequence is synthesized)
gctgggcgagtgcacgggggaacactgtgggctttgagggggtgtgtgccagtcacacaggagcggcattgctgccctcttcactgtatgcaggccactgtgctggcacagccatgcttc

SEQ ID NO: 855198 - DNA, 120 bp, Artificial Sequence
  ENSG00000259150_23 (sequence is synthesized)
cccctgttagacacaatggtgattcttagggttgacattgtggctgtatagttgctgagttcatctttgtgtctgatggaccgagtaatgctgccccatggaggagaaccatgggtttaa

SEQ ID NO: 855199 - DNA, 120 bp, Artificial Sequence
  ENSG00000259150_24 (sequence is synthesized)
agacttgaaaaaaataaaatatttactctacctttcttgttcagaaccatgccttagggtaggtaaatatttgattatgaaaggttctttgtgtggaataaatctaagtaataattgctg

SEQ ID NO: 855200 - DNA, 71 bp, Artificial Sequence
  ENSG00000259150_25 (sequence is synthesized)
aaggttctttgtgtggaataaatctaagtaataattgctgaagaaatgatatgattaagatatggccatct

SEQ ID NO: 855201 - DNA, 60 bp, Artificial Sequence
  ENSG00000259150_26 (sequence is synthesized)
ctctactaaaaatacaaaatttagccagacatgatggtgatggatgctgcagtgagctga

SEQ ID NO: 855202 - DNA, 120 bp, Artificial Sequence
  ENSG00000254902_0 (sequence is synthesized)
ctgaaacaggtaggtgacaccttttggaaccggaatcaatcattattcttgcgtgggttttccattttccctgaagcatcgcaccagcttttgcgcgatgcctcggcttaccattttgca

SEQ ID NO: 855203 - DNA, 120 bp, Artificial Sequence
  ENSG00000254902_1 (sequence is synthesized)
tctatcttaaggaattaggaggattcagaggagggtttctacgggcctctgctcacttttcacctctagggagactcaagtttccaagcattctttctgcaaagcacctgcctttgctac

SEQ ID NO: 855204 - DNA, 120 bp, Artificial Sequence
  ENSG00000254902_2 (sequence is synthesized)
acagattaaaaaatattccctgcataatggctttgtgcaaaaacaagggaaagaaaacagaaagaagaaaggaaaatgtcctatcagaaagtggtcctccatgtttgcagaaaacccagg

SEQ ID NO: 855205 - DNA, 120 bp, Artificial Sequence
  ENSG00000254902_3 (sequence is synthesized)
acccaccgggccctggtgggagcgggaagccgcctgccctgggagagggtgcccatcggtcaggatgcccggctgtctgggcaggctttggtgttgtggtggttgcacggcggctcgtcc

SEQ ID NO: 855206 - DNA, 120 bp, Artificial Sequence
  ENSG00000254902_4 (sequence is synthesized)
ttctgccgctccttctccatccaggtttccagcagctgctgcttgtcttgctcctcccgcatgaacagctccaccatgagcaccttctccttgtggatctgctggctgatgtccttgggg

SEQ ID NO: 855207 - DNA, 120 bp, Artificial Sequence
  ENSG00000254905_0 (sequence is synthesized)
gtagtgtgagtgtgaaggactggattcttgttgctttctcctgatgcccattccagggtttccccaggcaactaggaagaccatccatggtgaggcctgcaatctaggcttcttgctgat

SEQ ID NO: 855208 - DNA, 120 bp, Artificial Sequence
  ENSG00000254905_1 (sequence is synthesized)
cagtcagcaatggaaacctgttggtcagtgaggaaaccaaggcacagagcgggtgagtaacttggccaagttactttttatgggttaataagtgcaggagccaggatacaaaccccgaca

SEQ ID NO: 855209 - DNA, 120 bp, Artificial Sequence
  ENSG00000254905_2 (sequence is synthesized)
agctgcgctttgaactactaggctacagggctgtctcctaaaagtcaaagtagatcagatactgtagctgaatcccgttccccttctccctcctgtagtagcttacaacgcatgacagct

SEQ ID NO: 855210 - DNA, 120 bp, Artificial Sequence
  ENSG00000254905_3 (sequence is synthesized)
tctttgacttgacgaaagccaccatcagggcccctgccatcgacgtagtacatgaatcggagctcaggtgggtaggcagctctgctgaggcccgacagcagggggatggtgcagccctcg

SEQ ID NO: 855211 - DNA, 120 bp, Artificial Sequence
  ENSG00000254906_0 (sequence is synthesized)
tgcactagtcttgcctgtcctgatcttcctggggtgcgcgcactccttcagcgtgtcctggttttaaaagactaacccatccggatgggcctgaactcaagaagcaactattctaagcta

SEQ ID NO: 855212 - DNA, 120 bp, Artificial Sequence
  ENSG00000254906_1 (sequence is synthesized)
ggatagagctctttgaagaaggcggctgcaagccagtctccgaaccccaggggacttttgggcaagggagccggtggaagcagaaggaagaagatgcgctgagagtcctcacaactgcgt

SEQ ID NO: 855213 - DNA, 120 bp, Artificial Sequence
  ENSG00000254906_2 (sequence is synthesized)
ctccggaggcagaacgaagtggggacttcagacaatcaagcgtcatccttgctcccccctccccacacggaaccctgcgattatggcaagagaaaactggtttgagcttgagaaaatttc

SEQ ID NO: 855214 - DNA, 120 bp, Artificial Sequence
  ENSG00000254907_0 (sequence is synthesized)
acaagtggggagcgggaagtgcctgcctggtccgaatgcagggagtccgaggtcgcggtgccacctccctgtgagggtttccaggatagtgttactgtgctcttataagaaggaggaatg

SEQ ID NO: 855215 - DNA, 120 bp, Artificial Sequence
  ENSG00000254907_1 (sequence is synthesized)
tggaagagatcctgcagagacagaaatcagataacttacagattcttgaaaagaacattttctcatctgcatgcagagacatgatctcatcgcccagacaggagtgcggaggcatgactg

SEQ ID NO: 855216 - DNA, 120 bp, Artificial Sequence
  ENSG00000254907_2 (sequence is synthesized)
cagctgaccgtaacctcgagctcctgggctcaagtgagcctcccatctcagtgttgcaagtagctgggactactggtgtgttaccacactccgctaatttttttaaagttattttttata

SEQ ID NO: 855217 - DNA, 120 bp, Artificial Sequence
  ENSG00000254907_3 (sequence is synthesized)
ttacagacgtgagccaccatgcctggctcatttctgtcatatgtttacaaacatgcccattttctgaaccctccaatctgtatcactggggtaaggcaggatggggagctctcatagaac

SEQ ID NO: 855218 - DNA, 120 bp, Artificial Sequence
  ENSG00000254907_4 (sequence is synthesized)
atggggagctctcatagaacaaaagcaaaacccaaggaacttcaggatagctaccacctttgccaaggattgagccacctcaatcatatatcacctgattttgaaatctttgagcttttc

SEQ ID NO: 855219 - DNA, 120 bp, Artificial Sequence
  ENSG00000254907_5 (sequence is synthesized)
tgcattcagtttggctgttaagaaatctggaagttttcggcccaactggtgaaaactgtacaacaaacattccacataactgaactgtagcttgggttcttcattaccagcattctctcc

SEQ ID NO: 855220 - DNA, 120 bp, Artificial Sequence
  ENSG00000259153_0 (sequence is synthesized)
gcggcacctgtccgtttcctgggagagttcagcacctcccggcaggaagaggctccggcctcattgggtgcgtgagaagggaagggtggatcctaaaagaattcagaaaggcaagagacc

SEQ ID NO: 855221 - DNA, 120 bp, Artificial Sequence
  ENSG00000259153_1 (sequence is synthesized)
accttactgagcttcaaactggggctgggaacgctgccatgaattgggcttggtctgtctgaagggagccaccttttcgacaatccttagacttcttttgcctgttggaattacaccttg

SEQ ID NO: 855222 - DNA, 120 bp, Artificial Sequence
  ENSG00000259153_2 (sequence is synthesized)
gatcgtggcgaagtctatagaggtcagattaagaagaaccaaagcagaataaacgtagaacccgatgctgagttcacgagtgaggacgacctcttcctatatgctttgctataccctgcg

SEQ ID NO: 855223 - DNA, 120 bp, Artificial Sequence
  ENSG00000259153_3 (sequence is synthesized)
aggacgagataggaggcccataatgtttcttcttgctttaatcctgtcgtggcaacgttgacttccacctggttgcagagtgagcccatgggacagccctctgaaattatactgcttaca

SEQ ID NO: 855224 - DNA, 120 bp, Artificial Sequence
  ENSG00000259153_4 (sequence is synthesized)
accatgctgagtctgcaaggacttcgtccaagcctttccgtccaggacctcaaacagatccaatcacaagaagagagatttcaggaaagagaaaattattcctatcatcggggtttttga

SEQ ID NO: 855225 - DNA, 120 bp, Artificial Sequence
  ENSG00000259153_5 (sequence is synthesized)
ttgaagaacatgaaatgactgggaaaataatcatgttaagtggaaaaaaaaaagaaatctatctgttgtaattttcaaataatttttaaataaatttgaaaaattaagagaactatatat

SEQ ID NO: 855226 - DNA, 120 bp, Artificial Sequence
  ENSG00000259153_6 (sequence is synthesized)
tttgtttgccatggatgggtaggggctgcactgagcagcaccggtgttcttcatccggctgcacccccaacagagctctttcttccccagatcccttttacagttggattctccctcttg

SEQ ID NO: 855227 - DNA, 120 bp, Artificial Sequence
  ENSG00000259153_7 (sequence is synthesized)
gatctggctctgccttagtccgacctagagggatcagcttcgcccacgcccactctcacccggaacctttcatctcttattgaagccttttaggcccattgggatgttcattagaactct

SEQ ID NO: 855228 - DNA, 120 bp, Artificial Sequence
  ENSG00000259153_8 (sequence is synthesized)
cccattgggatgttcattagaactctgaaaactacagttctcccctttatgaggactgcaccacagctcgccctctcctgggttccgcctggttgcagagtgagcccatgggacagccct

SEQ ID NO: 855229 - DNA, 120 bp, Artificial Sequence
  ENSG00000259153_9 (sequence is synthesized)
tttttctttgtcctatactatttaatattttctaccattaaaatattctgattttctaattagaatagtacgttagacaaagaaggacaaatatcacatgaactctcactctcttatgga

SEQ ID NO: 855230 - DNA, 120 bp, Artificial Sequence
  ENSG00000259153_10 (sequence is synthesized)
acagatcttgtggaatctaaaaaagttgaactcatagaaaaagaggaaaatgatggttaccagttagaaaaaaggaataagttcaagagatctattgtacaccatggtcaatatagttaa

SEQ ID NO: 855231 - DNA, 120 bp, Artificial Sequence
  ENSG00000259153_11 (sequence is synthesized)
caatatattttatactttaaaattgctaaggtagtagattttaagtgttctcaccacacaaaaaaataagtatgtgaaaagcatatggtaattagcttgatttaaccacgccacagtgca

SEQ ID NO: 855232 - DNA, 120 bp, Artificial Sequence
  ENSG00000259153_12 (sequence is synthesized)
acagtgcatacatatgtcaaaacatcatgttgtatactataaatatatacactttttgtcaattttaaacaggttataaaaaaacatgttattgttgataattatgaaaaattttaatga

SEQ ID NO: 855233 - DNA, 120 bp, Artificial Sequence
  ENSG00000264151_0 (sequence is synthesized)
atggtgtcatagaatcctcttatgccaccagagtttcattatgttcctgctgatggcagaagtgcaaaagagtgaggagaagcccccagtgctcttaaagcctcagcctaggactgtcac

SEQ ID NO: 855234 - DNA, 120 bp, Artificial Sequence
  ENSG00000264151_1 (sequence is synthesized)
ctctgcttagcttactatcagtggggtgaggaaatatacatcaccttttgtggaaggaacgtcaaggtcatacagctaaagatgtggagacagggaaaggacggaaattgctttcatctt

SEQ ID NO: 855235 - DNA, 120 bp, Artificial Sequence
  ENSG00000264151_2 (sequence is synthesized)
tcaaagtaaagccatggagagaaggctggatcaaccagggtgttgagatattagagaaaatctcagtctttcaatgagagggacaattgaagaagtttcccaggctgcatcaactgcaac

SEQ ID NO: 855236 - DNA, 120 bp, Artificial Sequence
  ENSG00000264151_3 (sequence is synthesized)
gccattgtgtcacctgcagaagttagctgcacctcatgctgctgctgtccatgctgactgcagtcccctgggcatgtttacgttttgtctaagttcttagcactgattttttctggcatt

SEQ ID NO: 855237 - DNA, 120 bp, Artificial Sequence
  ENSG00000264151_4 (sequence is synthesized)
caggtttcacatctgtaaccgctcttgccagaggtagaagctttgttgagattgaggactatgctggacacacagtaattccattatcaccagattaattcgtaatgaatgaacacatga

SEQ ID NO: 855238 - DNA, 120 bp, Artificial Sequence
  ENSG00000264151_5 (sequence is synthesized)
cgctctgctctctctctgtctctctctctctttctctgtacatacacacacatatatacatcatacatatatttcccctagagatctattctgtcacttctcttactaccattcactccc

SEQ ID NO: 855239 - DNA, 120 bp, Artificial Sequence
  ENSG00000264151_6 (sequence is synthesized)
ttcccatttctgctggaatcctggatcaccagcctgcctctctcattcttgccaaagctccaccgcctgtgggtctccaccagcctttctcttcaggttgctcaagaccaaaattcagga

SEQ ID NO: 855240 - DNA, 120 bp, Artificial Sequence
  ENSG00000264151_7 (sequence is synthesized)
gctgtagcattcagcttggcaggctctagagagactgacctctgcagatggtttaaagggagaagctcaagggtccacagttcacagggctgccaatcaggcctgtgcagaaaactcaac

SEQ ID NO: 855241 - DNA, 120 bp, Artificial Sequence
  ENSG00000264151_8 (sequence is synthesized)
agtctaaaagaatatatgaagacagaacctcaacctagaagaaatggacaaattcccagacacatcaaggaattcctagacaaactatcaaaactgaatcatgattagatagaaaatctg

SEQ ID NO: 855242 - DNA, 120 bp, Artificial Sequence
  ENSG00000264151_9 (sequence is synthesized)
tataagtaaagagattaaagcagtaataaactctcccatcaaagaaaagctcaggacctgatggcttcactgctgaattctaccaaacgtttaaagaactaacaccaatgattctcaaac

SEQ ID NO: 855243 - DNA, 120 bp, Artificial Sequence
  ENSG00000264151_10 (sequence is synthesized)
tctttttaaaaattgaagatgagagaacacttccaaattcatatcacgaggccagcattaccctgataccaacgccagacaaagacactataagaaaaggcaattatggaccaatatccc

SEQ ID NO: 855244 - DNA, 120 bp, Artificial Sequence
  ENSG00000264151_11 (sequence is synthesized)
tgataaacatggatgtaaaaatcctcatcaaaatactagcaaatgaaattcaaccacaaatttaaaaaagcattcaccatgatcgagtgggatttatccctgggatgcaggaagtttcaa

SEQ ID NO: 855245 - DNA, 120 bp, Artificial Sequence
  ENSG00000264151_12 (sequence is synthesized)
catacacaaatccataaacatgatacaccacatcaacaagatgaaggacaaaatctttataatctcaatagatgcaggaaaagcatttaacagaattcagcaccctttcatgatttaaaa

SEQ ID NO: 855246 - DNA, 120 bp, Artificial Sequence
  ENSG00000264151_13 (sequence is synthesized)
aaactcaacaaaatatagaaggactgtaccccaacacaataaagaccagatatgacaaacccacagctaacattctcaacagtgaaaagttaaaagcttttcttctgagatcaggaacaa

SEQ ID NO: 855247 - DNA, 120 bp, Artificial Sequence
  ENSG00000264151_14 (sequence is synthesized)
gacaataatgctcactctctcgacttctgttcatcgtaacgttggaagttctagacagagcaattagacaaaaaaaaaaaaagagataaaaggcatccaaactgaaaaggaagaagttaa

SEQ ID NO: 855248 - DNA, 85 bp, Artificial Sequence
  ENSG00000264151_15 (sequence is synthesized)
aagagataaaaggcatccaaactgaaaaggaagaagttaaattgtccctgtttacagatatcatgatcttctgtacagaaaactc

SEQ ID NO: 855249 - DNA, 120 bp, Artificial Sequence
  ENSG00000264151_16 (sequence is synthesized)
aagaagaggaggaggaggaggaagaagaagaagagaacaactctaaagactccagcaaaaaaaaaaaaaaaaagcttttggaattaataaatgaattcagtaaagttgcaggatatataa

SEQ ID NO: 855250 - DNA, 120 bp, Artificial Sequence
  ENSG00000264151_17 (sequence is synthesized)
gaaaaatacaagacactgcctctacctctgcatctgtcctttgctttttgcttggaaactatcacatcaaatcacactgagatcaggagatgagatgaaggatcagctgaggaacagtca

SEQ ID NO: 855251 - DNA, 120 bp, Artificial Sequence
  ENSG00000264151_18 (sequence is synthesized)
tcccaacagtagtgcctggtaagacggtgaggctattcccactcccagcatcctctgttctcttctggaccaacccagttattcaatccctgagctttctcatgtggttctggtaaatcc

SEQ ID NO: 855252 - DNA, 120 bp, Artificial Sequence
  ENSG00000264151_19 (sequence is synthesized)
aactatcagtagaagaagcctggcttctttctctgctagtgttggcgtctccctgctttcttcctttcaaatgatggtattagatctgtctttctctactacgagctgcaatgcccctgt

SEQ ID NO: 855253 - DNA, 120 bp, Artificial Sequence
  ENSG00000264151_20 (sequence is synthesized)
tacagaaaaaaaagatttgaggagacagcttgaagcaccatggttgttttcttagaagttctctgtaaaatttttcatggtatatgatcttaaaaattaaaaacaaaatttactgaaaaa

SEQ ID NO: 855254 - DNA, 120 bp, Artificial Sequence
  ENSG00000264151_21 (sequence is synthesized)
cctctactactgtgcataaaacttgaagagttggaggccatgttcaccagcccagaagatatacgtacacttgggatttttgagttgtgtggtggacggaggggttagtcttaaacacta

SEQ ID NO: 855255 - DNA, 120 bp, Artificial Sequence
  ENSG00000264151_22 (sequence is synthesized)
ctgatgaacctatgtgattgctgcctgtttcccgccaaataacagggcagtcacggcttatcctttctggctccccttttaccaccttctcctggaatttacctgacctcctcttctcac

SEQ ID NO: 855256 - DNA, 120 bp, Artificial Sequence
  ENSG00000264151_23 (sequence is synthesized)
agctcattcctttgattctagtctaccagttgccacttctggtccatttgcatataacactggagaagtgttcctttatctttgtgaagcccttaacattcaaggagccactactgcttc

SEQ ID NO: 855257 - DNA, 120 bp, Artificial Sequence
  ENSG00000264151_24 (sequence is synthesized)
tatgctgctgaaaaatacaagacactgcctctacctctgcatctgtcctttgctttttgcttggaaactatcacatcaaatcacactgagatcagttcctactgagctctcactggcaaa

SEQ ID NO: 855258 - DNA, 120 bp, Artificial Sequence
  ENSG00000264151_25 (sequence is synthesized)
ctatcagtagaagaagcctggacaaaactgagttcaatgcttcacaattgctgcgctcttcttctccccagtggaaaaaaaaatgctctctgcaccacatggccgctggccgctgccaga

SEQ ID NO: 855259 - DNA, 120 bp, Artificial Sequence
  ENSG00000228271_0 (sequence is synthesized)
tgagagaaatggcacagggctgagagccatgaagtcactgggcataggtgaacggtgtgaccacaccaggccagggaagaaacacgtgcccagcctgccatctgccctcctgtcttggag

SEQ ID NO: 855260 - DNA, 120 bp, Artificial Sequence
  ENSG00000228271_1 (sequence is synthesized)
ccaggtctttccaccagcttccttcatcttttaacacttggtgaaaaggaatgacacgtcagtcaaagcccctggccggtgctcatggagcatctggcaggaggaagccccttcctggct

SEQ ID NO: 855261 - DNA, 120 bp, Artificial Sequence
  ENSG00000228271_2 (sequence is synthesized)
ggcctcccattcatcagtcagcgccgcaggctgggccagggacagctgtggaacctgagctgggaggcagctgtgaaaggcaagaaacaaggaaaggggacagaagtcacccggtcggtg

SEQ ID NO: 855262 - DNA, 120 bp, Artificial Sequence
  ENSG00000228271_3 (sequence is synthesized)
tcctccctgtccccaccaccatccctctggccctgatttacagctgggcagtcacgggacagattctggttaagcctcagaaacatacacccagcaaggggtttggattttctccttcct

SEQ ID NO: 855263 - DNA, 120 bp, Artificial Sequence
  ENSG00000228271_4 (sequence is synthesized)
accctccctcgagactcttccgtggaggaggaagagaagcagatccagcctggagaagccaggccccgaggccctctggcaccctgactccagcaccctggtctaacatgcagtaggaga

SEQ ID NO: 855264 - DNA, 120 bp, Artificial Sequence
  ENSG00000228271_5 (sequence is synthesized)
aatgaggtctggaagggtgaacaggcagccggccccccatgaggccttgacctcaggccccggctgggttggcaacagctcttcttggctcagacaggctcccttggaaacaaacctctg

SEQ ID NO: 855265 - DNA, 120 bp, Artificial Sequence
  ENSG00000228271_6 (sequence is synthesized)
ttactcacttctttcctctagttggctgacaagggagccgaagctgttggctcaaatctttttttttctttttaacctctcctccatttttttttctgctgctaaaaaatttgttttgca

SEQ ID NO: 855266 - DNA, 120 bp, Artificial Sequence
  ENSG00000228271_7 (sequence is synthesized)
cctggctccaatcagctaattttcaaacctttgatccattgatccattgggcagtctgggcttgcttggttcttggttcagtgacagacagcagagggtgagagaaatggcacagggctg

SEQ ID NO: 855267 - DNA, 120 bp, Artificial Sequence
  ENSG00000228271_8 (sequence is synthesized)
ggctgggccaggaagctgcatttgttggccaggatttgagatttctttcactgaggcctccggagagacattccaacggtgaacacagagcacaaactcaagaaataaaaccacatgtac

SEQ ID NO: 855268 - DNA, 120 bp, Artificial Sequence
  ENSG00000228271_9 (sequence is synthesized)
tgcctcaaaggcaacaaggcaggagggtgtaaaaaaccccagggggagatacaaaggctcaaagttctgcaacccacaccccttggaaagagagtagggtcagctcctctcccaccccaa

SEQ ID NO: 855269 - DNA, 120 bp, Artificial Sequence
  ENSG00000228271_10 (sequence is synthesized)
actcccagtttgaattttttaaaaaaacagccttataagcaaacatctgccactctccggcttctgaatgaaaggtgaagatcagaaaaaggaatctttgtgttttcattaggtatttta

SEQ ID NO: 855270 - DNA, 120 bp, Artificial Sequence
  ENSG00000228271_11 (sequence is synthesized)
gcaaatgcaatgaggacattcagatttgatttccctgttttgtacacacacataagtcggtgctaagaggattacttttcctggagctgcgtccttcctaaaggcccccgtcaaaagaga

SEQ ID NO: 855271 - DNA, 120 bp, Artificial Sequence
  ENSG00000228271_12 (sequence is synthesized)
tcacagactttgggataacgatggtcccggcactccattctcctcctgcccgggttccttaataaagctggagatgaacattagtgcttggttcagcagcatccgaaagggaaacggtgg

SEQ ID NO: 855272 - DNA, 120 bp, Artificial Sequence
  ENSG00000228271_13 (sequence is synthesized)
cctcctcgagccctcgatgccccatagaaaaatgtagcctttttgcctctgctccgatgaatggcttttcgagggttttcattaggaccgggtctgctggtgcagaaagcctcacagatg

SEQ ID NO: 855273 - DNA, 120 bp, Artificial Sequence
  ENSG00000228271_14 (sequence is synthesized)
ttgacattttttcatccctgggttaagatgtcttccataagcttttattcctcatttgttacttctttattatccgggaggttttgcctcctccctcttctcctttctctgaagagagca

SEQ ID NO: 855274 - DNA, 120 bp, Artificial Sequence
  ENSG00000228271_15 (sequence is synthesized)
gcggtagctgagcccgtcattatctcggcccttttctcctgcctccagaggcagcccgggactcgggtcccattgtggcaaacagcaggtagctgaggcaggccgggtcactccccagac

SEQ ID NO: 855275 - DNA, 120 bp, Artificial Sequence
  ENSG00000228271_16 (sequence is synthesized)
ccttttgtgcggccgtcccctcctccctgcagcttggttctggggatgtaaaaggtcaggagcagccaagcttccatacctgagcttttgtctggggctggaggcaaatgattttagaag

SEQ ID NO: 855276 - DNA, 120 bp, Artificial Sequence
  ENSG00000228271_17 (sequence is synthesized)
caatttcttggaaagcagcctggagactcccgtctccctcgttaaaatgcacagctgtactcctagcccactccttggggctgggggtgaggggacagggggattagctcagatcatctg

SEQ ID NO: 855277 - DNA, 120 bp, Artificial Sequence
  ENSG00000228271_18 (sequence is synthesized)
gatccaaaaatgccctgagaaaaaaactttctacccagaggatggttgagacaattcaaatagaagcctagagccctgagatgctaagcagtgttttgtgataaacagagtgtggtgttc

SEQ ID NO: 855278 - DNA, 120 bp, Artificial Sequence
  ENSG00000228272_0 (sequence is synthesized)
cgctcagtctgctcagtcgatgtgaggactgtgaggaagggttcccaacaggacagtccgaaggacacccaaatcctgagggctacagaataacagaaaggagctggaatcagcaccagg

SEQ ID NO: 855279 - DNA, 120 bp, Artificial Sequence
  ENSG00000228272_1 (sequence is synthesized)
agagcaggagagcgacctggctgtgatctcaggtcaagcccaaaatcacaaaagatagcatcttcccatgtccagatggactgctctatatgcctggtcctcacctgggtgacattttgt

SEQ ID NO: 855280 - DNA, 120 bp, Artificial Sequence
  ENSG00000228272_2 (sequence is synthesized)
ctatttatagccaggatgatagaatcacaagattttcaaggtttacaggtgatgggctgctctcaaaaggagctttgttgtgaaaacgtaccaaaagaaaatggatgagtgattctccag

SEQ ID NO: 855281 - DNA, 120 bp, Artificial Sequence
  ENSG00000228272_3 (sequence is synthesized)
tacgttgcttttcaatcctatgacatcctcacctctgccctatgggtagattctttgatgtctgaaaagtttctgtacataaagaggaacattcattactattgtttaatgccccatttg

SEQ ID NO: 855282 - DNA, 120 bp, Artificial Sequence
  ENSG00000228272_4 (sequence is synthesized)
ttaactgtgtgactttattaaaaaattatttttgaaggagtaaaccatcactattttaagtattcacatagtactttcaaaactaataaatatagacttggaataaaacaaattagattt

SEQ ID NO: 855283 - DNA, 120 bp, Artificial Sequence
  ENSG00000228275_0 (sequence is synthesized)
agcagacctgcaggatgacagatcgaaaacatggagactcaccgtttcgcagcatcgaaatgggctgcaagcgggacatatgtcttggaaagcgggcggcgagtgggagagacgacggag

SEQ ID NO: 855284 - DNA, 120 bp, Artificial Sequence
  ENSG00000228275_1 (sequence is synthesized)
gcgcctcagtacccgcgacggtctcggccctacgccctcaagcaccccgactttatggaatcttccaggtactgacctgcagggattcgggacaatttccttctcctcttcctttttccc

SEQ ID NO: 855285 - DNA, 120 bp, Artificial Sequence
  ENSG00000228275_2 (sequence is synthesized)
gccggcccgccctcagggcagtggggagctggtactcagacgggaacaacgaccaggacaagaaggacttctgcacacgtcagctcttggtcacgtgagggctacgtcatccaccaactc

SEQ ID NO: 855286 - DNA, 120 bp, Artificial Sequence
  ENSG00000228275_3 (sequence is synthesized)
gggtccccaatttcccctcccaccagcagtgcggcagaagagggcccgcccccctcctttccctcccccacaccaggccttattactctttcttcttcgataatctcatcaccttgtagt

SEQ ID NO: 855287 - DNA, 120 bp, Artificial Sequence
  ENSG00000228274_0 (sequence is synthesized)
cgggcgtcggggcttcggcgggcattagcagcagctgagaggcctgtgagaggttctggggcgccaccgcagtcattctgttcagcgggtatagggctcctctaggcccagtgggttgct

SEQ ID NO: 855288 - DNA, 120 bp, Artificial Sequence
  ENSG00000228274_1 (sequence is synthesized)
ggatttttaacagccacaagaaaccaacactaatgcagtgtgagcccctcagctggtctgtactgggcactgattaatgcctacttggtatgagacacttccaagccatgagccggctct

SEQ ID NO: 855289 - DNA, 120 bp, Artificial Sequence
  ENSG00000228274_2 (sequence is synthesized)
acccctcttcctggaatgccttcatctaacctctattcctgccattatccttccacattcagctcagatatcccttcctctgggaagctctcccgacttgacagaaataacttctccctc

SEQ ID NO: 855290 - DNA, 120 bp, Artificial Sequence
  ENSG00000228274_3 (sequence is synthesized)
gtgtgctgtgcagatcctgtgcagactccaactgggtccttatgtaattatgcttacggtcggtccacctgcctctacactgtgagggcaggaactgtgtcttgttccttgcgtgtggct

SEQ ID NO: 855291 - DNA, 120 bp, Artificial Sequence
  ENSG00000228274_4 (sequence is synthesized)
ttggatgcaaagcaacgtacctggccaaactggcattgaggagatatctgttggattaagtgactcgaggtggagcctccccaaaaggagaagctaggcctctcttccccatcacctgcc

SEQ ID NO: 855292 - DNA, 120 bp, Artificial Sequence
  ENSG00000228274_5 (sequence is synthesized)
atgtctaataagatgtccactttcagccgcaagagattgttctcttcctccaactgctggttccgcctgcgaaggcgctgaacctccctccggtccacaccgccactaacccctgtctct

SEQ ID NO: 855293 - DNA, 120 bp, Artificial Sequence
  ENSG00000228274_6 (sequence is synthesized)
ggaggaaggacagaaccagttaaagggggatttcctcctacaatcttgtttgacaaaatggcaggaagtgcagctcacctgctatccactggccattttcaaacttcaggctttgccctg

SEQ ID NO: 855294 - DNA, 120 bp, Artificial Sequence
  ENSG00000228274_7 (sequence is synthesized)
ccaggttcatagtcggggatccgtattccaagcccagctccacctcccgggttgatcgatccaactgtgggcgagatgctatgtgacaacttcagcaggcccggaacacgccttcatccc

SEQ ID NO: 855295 - DNA, 120 bp, Artificial Sequence
  ENSG00000228274_8 (sequence is synthesized)
agctcctcttccgccaacaatatgaccccaacaactcatttctctaatcattacttggcacctttaatgatttttttaaagccataaaatcaaatgatgtacaggaaaagtttaattgtg

SEQ ID NO: 855296 - DNA, 120 bp, Artificial Sequence
  ENSG00000228274_9 (sequence is synthesized)
tgtgagataaaaaatatactgttttatacattagatgttttccagaaaagctatatatactgaaatttataaattgaattattttatacctacttgacacttaatagtttaagcaatcct

SEQ ID NO: 855297 - DNA, 120 bp, Artificial Sequence
  ENSG00000228274_10 (sequence is synthesized)
taaactgttaatcaagtgaaaaattctttttaaatgtaatagtcccccaagttatcatttgcttaatatggagctacatatgttgtggaaaagacataaaattctaacaattaggaggaa

SEQ ID NO: 855298 - DNA, 120 bp, Artificial Sequence
  ENSG00000228274_11 (sequence is synthesized)
ggggcttcggcgggcattagcagcagctgagaggcctgtgagaggttctggggcgccaccgcagtcattctgttcagcgggtataggctcagatatcccttcctctgggaagctctcccg

SEQ ID NO: 855299 - DNA, 73 bp, Artificial Sequence
  ENSG00000228274_12 (sequence is synthesized)
cagcctccgcctcccgggttcaagtgatcctcccatctcggcctctggggttttttttgagacggagtctcac

SEQ ID NO: 855300 - DNA, 120 bp, Artificial Sequence
  ENSG00000228274_13 (sequence is synthesized)
caggcatgagccactgcgcctggcctagatattcatttctacaactcactgagcacccaccccgattcgggactcggtactgggtatccagggatgcgtatgaccagctctgccctcaat

SEQ ID NO: 855301 - DNA, 120 bp, Artificial Sequence
  ENSG00000228274_14 (sequence is synthesized)
ctcaacacagggagaccttcaggttcttggataaacaagctctgacgatcattcccaaacaagagttcaaaaatgttttccgcaatagcaatgatatggacggaaaggatgccctcctgc

SEQ ID NO: 855302 - DNA, 120 bp, Artificial Sequence
  ENSG00000228274_15 (sequence is synthesized)
actgatgcctctggaggaccacactttccattcagagacacgctcagcactcaactcatgctgcacacccggccgaccccagtaccgacactcacagaatgcaggttggagagagatgcc

SEQ ID NO: 855303 - DNA, 120 bp, Artificial Sequence
  ENSG00000228274_16 (sequence is synthesized)
gacttccgaggaggtgtcttcttcggactgaacgtattcccaaagaaaggcatctttggcctgatgaaagcaaagccagtgctcccttctcctagggtcagaaaaagtcaggggtacaag

SEQ ID NO: 855304 - DNA, 120 bp, Artificial Sequence
  ENSG00000228274_17 (sequence is synthesized)
cagctggatcactgaccttatgccattgtcttcaaatcttgaagacatacattttatcatgtggctactaacgatcctggtgctatggtttgaatgtccccaccaaaactcatgttgaaa

SEQ ID NO: 855305 - DNA, 120 bp, Artificial Sequence
  ENSG00000228274_18 (sequence is synthesized)
ttgaattgccattgtttaacagtataaggggtgactgggccatgtgagctctgctctcatgaatggattaatgccattgtcatggagtaggttagttttctctggcgtgggctcctggca

SEQ ID NO: 855306 - DNA, 120 bp, Artificial Sequence
  ENSG00000228274_19 (sequence is synthesized)
aaaggatgagttctgctgccatgctgtctgtctcatgcacttgctcaccatgtgagccttctgcctcacacaggatgaccctcaccagatacttgcaccatgctcttggacttcccagtc

SEQ ID NO: 855307 - DNA, 120 bp, Artificial Sequence
  ENSG00000228274_20 (sequence is synthesized)
agcgggtccggcagccctggccttatccgggcgtcggggcttcggcgggcattagcagcagctgagaggcctgtgagaggttctggggcgccaccgcagtcattctgttcagcgggtata

SEQ ID NO: 855308 - DNA, 120 bp, Artificial Sequence
  ENSG00000228274_21 (sequence is synthesized)
ggactttcattcatgggactgtccctgattcccagccatcacggggaggctctaccttcaagtgttatccagaatcagaccacctcacctcatctactgtggcctccctgggatgggcct

SEQ ID NO: 855309 - DNA, 120 bp, Artificial Sequence
  ENSG00000228274_22 (sequence is synthesized)
ggcctccttcagtctgttctcaccacaaagccaccagaaggatccttttatttttattgattgattgattgatacggggtctgactctgtcagcaggctggagtgcaatggcacgatctc

SEQ ID NO: 855310 - DNA, 89 bp, Artificial Sequence
  ENSG00000228274_23 (sequence is synthesized)
ctgactctgtcagcaggctggagtgcaatggcacgatctcacctcactgcaacctctgcttcttggactcaagcaatcctcccaccact

SEQ ID NO: 855311 - DNA, 120 bp, Artificial Sequence
  ENSG00000228274_24 (sequence is synthesized)
atggagtttcaccattttgcccaggatggtctcaaactgttaagctcaagcaatctacccacctcagcttcccacagtgctgggattacagatatgggccaccacgcccagcgcctttta

SEQ ID NO: 855312 - DNA, 120 bp, Artificial Sequence
  ENSG00000228274_25 (sequence is synthesized)
aaagtgcagttggatcatagcatttatctgctcataacaatggcttttgcttccccgctcactcaaaagaaattccttcttcactgcagaactgcccctcctaccacaggatgtttaggg

SEQ ID NO: 855313 - DNA, 120 bp, Artificial Sequence
  ENSG00000228274_26 (sequence is synthesized)
ttcctggctgcaacccccaaaggtcctaatggtgctggtcatggggggatccacaccattgtgacaacgaaatatgcccacatgatgcccaaggcttcagtcctggccccacccttccac

SEQ ID NO: 855314 - DNA, 120 bp, Artificial Sequence
  ENSG00000228274_27 (sequence is synthesized)
cttgaaagagtgtcatgcaaatgaggtgtccagcatcgggaggtgtccagcatcaggaatattaataaagggtccccagtgataccggccgaggcataagcaaactccactgctcctatt

SEQ ID NO: 855315 - DNA, 120 bp, Artificial Sequence
  ENSG00000228274_28 (sequence is synthesized)
atctgcacctgaagatttacaccttgcatatatgtggatccttttccaatttcttctgtattaaacattctctcctgtatcagaaagtcaggttatgggttggagctacaaatctgccct

SEQ ID NO: 855316 - DNA, 120 bp, Artificial Sequence
  ENSG00000228274_29 (sequence is synthesized)
tcgatccatcccccccatagagtgctttgctggccgtaaggatggactgcagacagcagctccctttgaggccgcccccagctcctctctttcatagcgggctgtgtgaatcaagctcca

SEQ ID NO: 855317 - DNA, 120 bp, Artificial Sequence
  ENSG00000228274_30 (sequence is synthesized)
gcacttctactgtgtgatcctagatcagtgtctgaacctcccagagtttccttctctgcagatggatgtgccgatagcccctgctacacagggctgagctgaaggggaaatgagacagtg

SEQ ID NO: 855318 - DNA, 120 bp, Artificial Sequence
  ENSG00000228274_31 (sequence is synthesized)
agagcaaagggagcctggtgccaggcatgtaccgggcattcagaagtggctaaccatggtagcctgtccctagtctaaagccctgggcaccatgcccccacctccaccccctcagttcct

SEQ ID NO: 855319 - DNA, 120 bp, Artificial Sequence
  ENSG00000228274_32 (sequence is synthesized)
tcccgcttgacttcaggagctggattccctcctcttgccagaaaagtccagctcatactgcctacggcacaaattctcacaccaaccattaggttcctgccaggtcctggccagtcccaa

SEQ ID NO: 855320 - DNA, 120 bp, Artificial Sequence
  ENSG00000228274_33 (sequence is synthesized)
caccatgaagcaggagggcaggcgaattttgagcagagagactgtttctgtttggcatcagcctctgccaatgcccaggaaagctggaatgctctcctacaagagtgacagttccccaca

SEQ ID NO: 855321 - DNA, 120 bp, Artificial Sequence
  ENSG00000228277_0 (sequence is synthesized)
atacatgtggagattaagacccataataacaatgacaacactttcataacagttcatctgtgttaacatacaaattctcgcagcaacactccagggcgctttatgtgtggatctttttta

SEQ ID NO: 855322 - DNA, 120 bp, Artificial Sequence
  ENSG00000228277_1 (sequence is synthesized)
gtctgcatattaaccctacaagttggaaatggctcctctcaaacactggagatagagcagcccaaatgtatctgctactgtggtgccttccataatgcaaaactctctgaggagctgaga

SEQ ID NO: 855323 - DNA, 120 bp, Artificial Sequence
  ENSG00000228277_2 (sequence is synthesized)
cagaggcctgccaattcttaatctcactataggctgaagagctgctcacatagaatacttgtagtgacttccattttcaccagtttagatcagtggacagagagatgctgaattactgct

SEQ ID NO: 855324 - DNA, 120 bp, Artificial Sequence
  ENSG00000228277_3 (sequence is synthesized)
caagaagtatagatccacatgccttcaacttcagaatcttaaattagaggcgaatgttgagtctactaaactgtatagtctgtaaaggcaggaactgtatttatctcagtcatatttaat

SEQ ID NO: 855325 - DNA, 120 bp, Artificial Sequence
  ENSG00000239407_0 (sequence is synthesized)
gcagatggctgaaattctgatccgatgtggctggttaatgcatgatctgaaaacccctgcactggtgattttgggacagatctagaatataccaataaatatattaacataccaagtagt

SEQ ID NO: 855326 - DNA, 120 bp, Artificial Sequence
  ENSG00000239407_1 (sequence is synthesized)
agagttctataatggtggtacaatggtgccccctcgtgacagaagcttgaactacagcttgaacatcgtgtgacatgatgaatgaatttattgagccccaggaagaaggaaaattaaaga

SEQ ID NO: 855327 - DNA, 120 bp, Artificial Sequence
  ENSG00000239407_2 (sequence is synthesized)
agagcaaagaataatagctggacagaagatgggggtcattgaacctatatcctagttgccagaccagtaaactgaccatgggacctgggggaggcagcagatgaccgaaaacctggagtg

SEQ ID NO: 855328 - DNA, 120 bp, Artificial Sequence
  ENSG00000239407_3 (sequence is synthesized)
cttgaactacagcttgaacatcgagatgaaaatatactgtctacgttgttcaacacaatagctaatggcaactgtggcagttgaacacccgaaacgtgatgaatgtgactgaggaactga

SEQ ID NO: 855329 - DNA, 120 bp, Artificial Sequence
  ENSG00000239407_4 (sequence is synthesized)
tccaggaatagccattaggcaaacaactttttgctaccctggtgttaccgatttctgaactcaacaggtgaattcaaagatatgcctgtctttccagcatggggagctggatttgggtca

SEQ ID NO: 855330 - DNA, 120 bp, Artificial Sequence
  ENSG00000239407_5 (sequence is synthesized)
gctcaggcgcatgatgttgaacagctcttatgagcttctgatagtgcccaggaagtacagaaacaactgtctacaaatctttgaactcaaggcatatcacagggacatttgctttcttca

SEQ ID NO: 855331 - DNA, 120 bp, Artificial Sequence
  ENSG00000239407_6 (sequence is synthesized)
actagatatctgttttctcataaagagaaacaatgagaaatggtttttcacaatgcctcgttagccctgaggctcagccatcccctagtgctgtgtcccaacatttaaaggccgttgaag

SEQ ID NO: 855332 - DNA, 120 bp, Artificial Sequence
  ENSG00000284848_0 (sequence is synthesized)
cacagtacatcaccttcatgagcgcatcagtgaacaccagtctaaggaagacatctctgaacgtaattttggagattttgatgagttccattgaaacaaggaggaatgtgatgtccagta

SEQ ID NO: 855333 - DNA, 120 bp, Artificial Sequence
  ENSG00000284848_1 (sequence is synthesized)
tcagttctgcagacccaaggacaaagaaaattctgtgataaactcatccagtgtgactgtaatgtgggtatctatttgatacctccaagtaactgtttattcttgtgccagttgagtaga

SEQ ID NO: 855334 - DNA, 120 bp, Artificial Sequence
  ENSG00000284848_2 (sequence is synthesized)
tggtacgggccagttggtgttgattagtgaaccacggacaaagggcatatgtcacatgagttgctcctggataaagtcacccagtcacttcctgatgaatatcctgcataaactccaaag

SEQ ID NO: 855335 - DNA, 120 bp, Artificial Sequence
  ENSG00000284848_3 (sequence is synthesized)
acaaaagagagttaaggttgtttttctcaccttagaccaggcagtgatagaagaactgggggaagagataattgtatttatcttggtgagggtgacaaatcatggcaaatgagcaaaatg

SEQ ID NO: 855336 - DNA, 120 bp, Artificial Sequence
  ENSG00000284848_4 (sequence is synthesized)
aaaaaggtttgcagatttcaacaaacttctaaaagatcagcttacagtcatgtatacatctcttcctttgtttctagtttatttgcatctcattactatgttctcggtttaggatacaag

SEQ ID NO: 855337 - DNA, 120 bp, Artificial Sequence
  ENSG00000284848_5 (sequence is synthesized)
aagactcctactggattcctgctagtgatgggagaaaattatcattctgtgagttgtcaataaatgtttaaccacagttcaccttttttggattttaagatgtctgcgccactaggacgc

SEQ ID NO: 855338 - DNA, 120 bp, Artificial Sequence
  ENSG00000284848_6 (sequence is synthesized)
tcagaaaaattaccctccaaatgctacttggaggaggattcagtaccaccctgagaaggcaaccagctacaaccttggttgtagtttcggttgcagaaagagcgtgaagtgtgcaactca

SEQ ID NO: 855339 - DNA, 120 bp, Artificial Sequence
  ENSG00000284848_7 (sequence is synthesized)
tgtctgtcttcattttaataggctagttaatctgtagccagagatgattaaggaggtcattaaaggaaaacaagctgcccaccatgctgatgcctggttgttcagatcgttgaggtggtg

SEQ ID NO: 855340 - DNA, 120 bp, Artificial Sequence
  ENSG00000284848_8 (sequence is synthesized)
tagagatgacgcacactggctcagtttacccacatttggatctacggacctgcaagtcctctgtcatgacacaccagccctgggatatcacataagctacaggtcagacgctgctttcca

SEQ ID NO: 855341 - DNA, 120 bp, Artificial Sequence
  ENSG00000284848_9 (sequence is synthesized)
gacagaattatggagaagacaaccatcattttggccctgctggaaattttccatgctcttcattcgttctcctgtatttcctaacgccaataaaagaggagatccctgaggacacgcctc

SEQ ID NO: 855342 - DNA, 120 bp, Artificial Sequence
  ENSG00000284848_10 (sequence is synthesized)
tctttaatatctgctttccttgcaaagataagccaaagaccaatgtatgtcgtatctgcccccttcagcctttgggacacaattttgataaaccttcctctatttcacattaacagaaaa

SEQ ID NO: 855343 - DNA, 120 bp, Artificial Sequence
  ENSG00000284848_11 (sequence is synthesized)
agtccagtcatgtggctagcaggaaaatgcagggggcttggtgaaaatttgctctaggtcccagacttggcaaatgatacaagatttaactcacacagtccggcttccaagcccacactc

SEQ ID NO: 855344 - DNA, 120 bp, Artificial Sequence
  ENSG00000284848_12 (sequence is synthesized)
agtgggcaagcactgtgggctgcagacaccaagctccaccatgattccccctccactctcagaggctccatccagctggcaggctcacagcactgcagcccagcatctgaagtggtactg

SEQ ID NO: 855345 - DNA, 120 bp, Artificial Sequence
  ENSG00000284848_13 (sequence is synthesized)
tccctaggctgatgactgtcacatttttagtggggccaaaactttcctccaagattcagatgtgtgtcaccaactagagagcaggcttggaatttaaaaataaagttttcagtaagttga

SEQ ID NO: 855346 - DNA, 120 bp, Artificial Sequence
  ENSG00000284848_14 (sequence is synthesized)
gtcactactacaagaggcaaagcattaggatacaagacaccggactttcaaatcaacaattgtttcaaaagactcctactggattcctgctagtgatgggagaaaattatcattctatga

SEQ ID NO: 855347 - DNA, 120 bp, Artificial Sequence
  ENSG00000284848_15 (sequence is synthesized)
aaagaatatgtctaagatcctgttaacagcagaacttagactgctagccctgctggaaattttccatgctcttcattcgttctcctgtatttcctaacgccaataaaagaggagatccct

SEQ ID NO: 855348 - DNA, 120 bp, Artificial Sequence
  ENSG00000284848_16 (sequence is synthesized)
agctgctatggccaccgtggaatctggaatctggcagaaagttctactgccaggctcacatcatttttattggccagagcccagtcacatgaccccaacttaactgcaagggatgctggg

SEQ ID NO: 855349 - DNA, 120 bp, Artificial Sequence
  ENSG00000284848_17 (sequence is synthesized)
gccatcacccagattaaagacctgccctctcatccggtaattattatactcccttttctcaattaagcatcttcatccatggattgttcattttatgggtagatatgactccttagagta

SEQ ID NO: 855350 - DNA, 120 bp, Artificial Sequence
  ENSG00000284848_18 (sequence is synthesized)
tctggcttgtagaatgtctgtctctggaaatttggagagctgggagcaggagatgtgatcgtggttcacaactgcagctggtttgggttgagttctctcagtaccaatacaaggcggatc

SEQ ID NO: 855351 - DNA, 120 bp, Artificial Sequence
  ENSG00000284848_19 (sequence is synthesized)
gaaatcagcaaaatcaacaccaaagtcactactacaagaggcaaagcattaggtgaacacagcaagaagagaattgacattgtcttggtggctaatcatgaagcacatggttttgttgtt

SEQ ID NO: 855352 - DNA, 120 bp, Artificial Sequence
  ENSG00000284848_20 (sequence is synthesized)
ctactaattggcttgtcactctgtcctcagatgtcaacattggtttatcacatcatattcctcctgacacatctccttccctcagaaggatgagtccattagttatgcaccaactatcag

SEQ ID NO: 855353 - DNA, 120 bp, Artificial Sequence
  ENSG00000284848_21 (sequence is synthesized)
aaacttttgcattgctggagttgaagaacaagtttttcacttgtgtcaggtgatgaagacaaagtgttgattttttgttcagagatagaagaaaacaattctgagatacagtgagaagct

SEQ ID NO: 855354 - DNA, 120 bp, Artificial Sequence
  ENSG00000284848_22 (sequence is synthesized)
cggaagaagtaacccagtatctaagcaaagagagggatgtggctgggaattgctggaacagactgagaaacacctgaattttaattaagcaccattactgaaaatcacaacactactatt

SEQ ID NO: 855355 - DNA, 80 bp, Artificial Sequence
  ENSG00000284848_23 (sequence is synthesized)
gcaccattactgaaaatcacaacactactattttgtggaaaatagttgagttacatgtgtttaaaaatatatatatatgt

SEQ ID NO: 855356 - DNA, 120 bp, Artificial Sequence
  ENSG00000284848_24 (sequence is synthesized)
aaccaaagttgtgggttataatgaaagactactttattttgttgctcaaattgatgcaactctagccgttatatatgtatgtaaacatatatgtatatatagtttgttttagaaaaaaat

SEQ ID NO: 855357 - DNA, 120 bp, Artificial Sequence
  ENSG00000284848_25 (sequence is synthesized)
tacatttacagaaaactttcaaaaaatcttagggagagttcccatgtacttctcttggctatgacactttctcagactttcctttttcatgataacctttacagttttgaggagagcact

SEQ ID NO: 855358 - DNA, 120 bp, Artificial Sequence
  ENSG00000284848_26 (sequence is synthesized)
ggctatgaatttgtagaatttccctcaattgggttttgtctgattttttaaataattagatgagggttatgtgttttggggaggaagccctcagaggtaaagtccattcttaacattgca

SEQ ID NO: 855359 - DNA, 120 bp, Artificial Sequence
  ENSG00000284848_27 (sequence is synthesized)
tcactgatgtcatgtcaagggtgcacatcaccatgagttatccctgttgagggtaatctcgatcttctgatgagccagtgtcttgcaagcttctccactgtaaaattactcttttccttt

SEQ ID NO: 855360 - DNA, 120 bp, Artificial Sequence
  ENSG00000284848_28 (sequence is synthesized)
atttccatactctactcttgggaatgaagttgccatatacagcccagccttgacaaggctggggatggttatactcccagcctttgagggcagaattctcccataagctatttggaatcc

SEQ ID NO: 855361 - DNA, 120 bp, Artificial Sequence
  ENSG00000284848_29 (sequence is synthesized)
atgggaaattatttattctcacaatttacttattcaatcatgtatttatattagtatggacacatggatatttatgttgtgggttacaatgaaagactactttattttgttgctcaaatt

SEQ ID NO: 855362 - DNA, 120 bp, Artificial Sequence
  ENSG00000284848_30 (sequence is synthesized)
gttccaactctagccattgagatttcttttagttagttcctgtgttgcttccatataacctcactttacatctttttcttaatttttgaacactttctttcatgccctgcaagaggcccc

SEQ ID NO: 855363 - DNA, 120 bp, Artificial Sequence
  ENSG00000284848_31 (sequence is synthesized)
aggttcattctatatctctcctgacctggtcatataatcaggcatttctccaaggaatcatttttcattttactggagaatgacattagaaagcaacctttgagcactaggtgtgttcat

SEQ ID NO: 855364 - DNA, 120 bp, Artificial Sequence
  ENSG00000284848_32 (sequence is synthesized)
tgttgtcaatatcattgcttcttggcctctcgactgacagagcatataaatctacatgtgtatactaacctgtgcacatatacatatctataaatatcttagatttatttgtatttatat

SEQ ID NO: 855365 - DNA, 120 bp, Artificial Sequence
  ENSG00000284848_33 (sequence is synthesized)
taagataagcatgaatacatgctgatatctccaactctaatccattactacgcaaatcactctgttctctttcccttcattatctgtaaccgtccatgccaacactgagaatcctgcatc

SEQ ID NO: 855366 - DNA, 120 bp, Artificial Sequence
  ENSG00000284848_34 (sequence is synthesized)
tcagcatcttccctttgcttattttttcaattcctatacatctatatactgtgatcataattttaaaccagcacttcatatggaagatacatttatcaaccaaggtatagtgcttacgta

SEQ ID NO: 855367 - DNA, 120 bp, Artificial Sequence
  ENSG00000284848_35 (sequence is synthesized)
caggtttttatgcctatagacttacagattccactaactttcaacttccaccccactcagtgaggtggtttcatgtattttcaatacagttacatgttctttctccgctttctccatttc

SEQ ID NO: 855368 - DNA, 120 bp, Artificial Sequence
  ENSG00000284848_36 (sequence is synthesized)
ttcttgggtttctccaaatctttacatgatttttaacatttttatatgtgaacattaactctttgtgctgttgagtcctatagattttgatgaatgttacatatccaccattacaatatc

SEQ ID NO: 855369 - DNA, 120 bp, Artificial Sequence
  ENSG00000284848_37 (sequence is synthesized)
atatccaccattacaatatcatgcagaatagctttatggccatcaactattccctgtgcttccactctctccttctttttcaaactcttgcaaccactgatttttttttttttttttttt

SEQ ID NO: 855370 - DNA, 120 bp, Artificial Sequence
  ENSG00000284848_38 (sequence is synthesized)
gcgtgagccactgcgcccggccgatatttttaactgtcatcataattttgtcttttccagaatgtcacataaatggaataatagattttgtagcctattttatattggatttctttcact

SEQ ID NO: 855371 - DNA, 120 bp, Artificial Sequence
  ENSG00000284848_39 (sequence is synthesized)
ctttcacttagcaatatacattttagttttgcccacgtgtttcaagatgtaccatatgtctgatatctcatgtgtttctctccgtggataatattctgttgcatggcatggatgtacagc

SEQ ID NO: 855372 - DNA, 120 bp, Artificial Sequence
  ENSG00000284848_40 (sequence is synthesized)
aacttatttatccattcacctagtgtatggttccttctggtttttagcaattattcataatcatctaaaaacactcacttttccatagacataaaatttcaaatcagttgaaatgtgctt

SEQ ID NO: 855373 - DNA, 120 bp, Artificial Sequence
  ENSG00000284848_41 (sequence is synthesized)
gtttttatatgttaatacctaggaatttgcttgtttttatatgttaataatatatcttgttttgtaagaaactgtcaaattttctttgaaatggctatactgttttgcatttccactagg

SEQ ID NO: 855374 - DNA, 120 bp, Artificial Sequence
  ENSG00000284848_42 (sequence is synthesized)
ttgatatcaaagcaaaaggctcattcatttacttgcatttgtggttgggagcatttcccgaagagaggtggggaattggtgatgggaaagcacaagtcaggctggatgcccggccctggg

SEQ ID NO: 855375 - DNA, 120 bp, Artificial Sequence
  ENSG00000284848_43 (sequence is synthesized)
cactctcatgcctcttctggagcccttcagtttggatcatcgccctttcccacatgccacattgtttgtccaccctgatagcctctgtcatgacacaccagccctgggatatcacataag

SEQ ID NO: 855376 - DNA, 120 bp, Artificial Sequence
  ENSG00000284848_44 (sequence is synthesized)
agaagacaaccatcattttggttcagccaacccatattgcacatttaaagccattagttgttcccacctctaataggagctatagatagtggatttcaagagagtaccaaggttgctact

SEQ ID NO: 855377 - DNA, 120 bp, Artificial Sequence
  ENSG00000284848_45 (sequence is synthesized)
ggaagagagatgaggcagcacttccaggggatccttcaatcaacctatgattcttaatacttgaattaaaaggagaatggtcattaaacagaaactgctgctaaaagtgacaagcaactt

SEQ ID NO: 855378 - DNA, 120 bp, Artificial Sequence
  ENSG00000284848_46 (sequence is synthesized)
agcaatacacattaggagcaaagattataatttatgcagcatattttcatatacaggcaaatctgagatagaaggaaaaacaaatggcttggaataaaacaaaatccttaaaatgtgtaa

SEQ ID NO: 855379 - DNA, 120 bp, Artificial Sequence
  ENSG00000284848_47 (sequence is synthesized)
cctctcatccgcaaaacggggagtgtctgctggggaaatctctaagatgaaagccactttgtcaccttcttccttcctgcttgggacacacatgtaatgcttggcactgctccccctatc

SEQ ID NO: 855380 - DNA, 120 bp, Artificial Sequence
  ENSG00000284848_48 (sequence is synthesized)
ttgtcaccatgagatgacagccaagaggagaaaaagccaaaacagagaggatgacagtgaagaaagaggaaaagtggttaaacctcacatgacatcatggaaacctgaacaaaggcacag

SEQ ID NO: 855381 - DNA, 120 bp, Artificial Sequence
  ENSG00000284848_49 (sequence is synthesized)
gcagacccaaggacaaagaaaattctgtgataaactcatccagtgtgactgtaatgatacaagacaccggactttcaaatcaacaattgtttcaaaagactcctactggattcctgctag

SEQ ID NO: 855382 - DNA, 120 bp, Artificial Sequence
  ENSG00000284848_50 (sequence is synthesized)
ctaaagggaaagccactctcctgagatccttgtgtcaacagatgacagagggggtactcgaacccaagtcctgtgactcacccatgcctgcaaagtctcttcttggatacctttcctgtt

SEQ ID NO: 855383 - DNA, 120 bp, Artificial Sequence
  ENSG00000284848_51 (sequence is synthesized)
ttctttattttttctttttctattctttactgttgtttgtgtttgtttgtttgttttttaagcagggtctcactctatcacccaagctggagtgcagtggcagaatcacagctcactgca

SEQ ID NO: 855384 - DNA, 79 bp, Artificial Sequence
  ENSG00000284848_52 (sequence is synthesized)
ctgggactgcaggcatgcaccaccatgtctcgctaatttttgtagagacggttgagtgatctacctgccttggcctccc

SEQ ID NO: 855385 - DNA, 120 bp, Artificial Sequence
  ENSG00000284848_53 (sequence is synthesized)
cttcttgttttgtttaggtgctgacatcttaactaaaggactaccttagcaaaaaatgtctctcttctctcaggggtcccatcctcctaactcggccctccttaatctcaagcctgcaac

SEQ ID NO: 855386 - DNA, 120 bp, Artificial Sequence
  ENSG00000284848_54 (sequence is synthesized)
taagaaacattcatggcatatatagagcttggtactatcctgttgtcaagcacccactgtgagtctcggagcgtacccctgtggttaagtgcggaccactgtagtgtgcactaacagcgt

SEQ ID NO: 855387 - DNA, 120 bp, Artificial Sequence
  ENSG00000284848_55 (sequence is synthesized)
ccagaaactatgtttcaaggattgagaaatgctcctgagaattcagaaacgtttgcaaatcctccacactctagagacggtcttgctctgttgtccaagctggagtgcagtggctccatc

SEQ ID NO: 855388 - DNA, 120 bp, Artificial Sequence
  ENSG00000284848_56 (sequence is synthesized)
atggcttactgcagccttgaactcctgggctgatgtgatcctcctgcatcagcctcccaggaggcttccctttctcttcgagctcatattatctgctccgatctctgaatattttgaacc

SEQ ID NO: 855389 - DNA, 120 bp, Artificial Sequence
  ENSG00000284848_57 (sequence is synthesized)
agccaattgaaagcctagccctctctctcacatggtgactcaagggatctgatgcgttccctcttgtagcttcatcatagtcaacacatggcttctaaagtcattgcaaaagaagaagag

SEQ ID NO: 855390 - DNA, 120 bp, Artificial Sequence
  ENSG00000284848_58 (sequence is synthesized)
tgtgagaaggaatctctccctgctcgtggatttcctctcttccagatgcccatctcttcagcatagaaagtccttatctctgaagtgaaacacaccagtctgctgtcttttggtgggaac

SEQ ID NO: 855391 - DNA, 120 bp, Artificial Sequence
  ENSG00000284848_59 (sequence is synthesized)
taaccacatggccctgtccacatgcacagggtctgcaaatgaagcccttggacggtcagtgacgaccctgaattatagaagagacacacaagtagctgccaatcatccagatttctctgc

SEQ ID NO: 855392 - DNA, 120 bp, Artificial Sequence
  ENSG00000284848_60 (sequence is synthesized)
cttgctatgtgagcctgtattgttgactggtgatgcttatgattttcaaggagaacaaactgtatacatctttccctaggactttaattgctcaacacctgggtttatattgaggccaga

SEQ ID NO: 855393 - DNA, 120 bp, Artificial Sequence
  ENSG00000284848_61 (sequence is synthesized)
tgctcaacacctgggtttatattgaggccagagtgaatgacagtagctattaatcaagtagctggcaaactgcagaagctgaattggtccagatgtgcctttcgccttccaccatgattg

SEQ ID NO: 855394 - DNA, 120 bp, Artificial Sequence
  ENSG00000284848_62 (sequence is synthesized)
tcctgttgctctgcatcttttccaggaattggtttttgtattagttccctaaaactactataaggcagtaccacagactgcatggtttagaacagcagggatttatcttccgacgttctg

SEQ ID NO: 855395 - DNA, 120 bp, Artificial Sequence
  ENSG00000284848_63 (sequence is synthesized)
gggtccaggtatctgacatcaagatgtcaacagaaccatgctccctctgaaagcattagaaagaacccaagccatgcttctctcccagtttcaggtagcttcgggcatccctttgcttgc

SEQ ID NO: 855396 - DNA, 120 bp, Artificial Sequence
  ENSG00000284848_64 (sequence is synthesized)
agatgtgtcactccagtcctgactccatcatatgcttactggtcattggtatgtcttttttaatgaagtgtctgttcagattgcttacccacgttttaactagtttttgcccgtattttt

SEQ ID NO: 855397 - DNA, 120 bp, Artificial Sequence
  ENSG00000284848_65 (sequence is synthesized)
ccacgttttaactagtttttgcccgtattttttggcaaaaaggaatgaattaatggcattcacagcaacctgcatggaactagaactagagactattattctaagtgaagtagctcagga

SEQ ID NO: 855398 - DNA, 120 bp, Artificial Sequence
  ENSG00000284848_66 (sequence is synthesized)
tgacacagtggactttggggactcagggaaaagggtgggaagagggtgagggataaaagatgacgaattgggtgcagtgtatactgttcaggtgatgggtgcatcaaaatctcacaaatc

SEQ ID NO: 855399 - DNA, 89 bp, Artificial Sequence
  ENSG00000284848_67 (sequence is synthesized)
agagggtgagggataaaagatgacgaattgggtgcagtgtatactgttcaggtgatgggtgcatcaaaatctcacaaatcatcaccaaa

SEQ ID NO: 855400 - DNA, 120 bp, Artificial Sequence
  ENSG00000284848_68 (sequence is synthesized)
tttaaatgtcatctatctatctatatatatattcaataagtatttttaaatattttgtgtcccagtctgtgacttgtctttttattttctaaacagtgtcttgttgcacagaagtttcta

SEQ ID NO: 855401 - DNA, 120 bp, Artificial Sequence
  ENSG00000250056_0 (sequence is synthesized)
aaagatggggcggcgcggccggggctcgccagcaccagccctggaaccccatgggggacctcgacaacagcgcctttgcggcgtgggcccctttctgcagctcctccacccgcgcgctgt

SEQ ID NO: 855402 - DNA, 120 bp, Artificial Sequence
  ENSG00000250056_1 (sequence is synthesized)
cggctccgggacactggggctttgaagggcgccagttcccagccgcacctgcacgcctaggagggcgcaggccgcgtgtccctgtgggaggaaggccccggcaacctgcaaagacctcac

SEQ ID NO: 855403 - DNA, 120 bp, Artificial Sequence
  ENSG00000250056_2 (sequence is synthesized)
gtcacagaaacttgcggcgtttgcccccgatgcgcgcgtcaggtgctccgtcccttccaggtggcagaggagagggaagggtcgcgcctggtgggggcctgagagccaccgggctgcggt

SEQ ID NO: 855404 - DNA, 120 bp, Artificial Sequence
  ENSG00000250056_3 (sequence is synthesized)
gcgcgagtgtggacaccgccccgccttctgcgtctacagccctgggttctgggacctttggaaaccgctttggacgaagctgagcatctctttccccacgctgacctcccccatagactc

SEQ ID NO: 855405 - DNA, 120 bp, Artificial Sequence
  ENSG00000250056_4 (sequence is synthesized)
cggatgggagtaaatgaggctcctgggaaatccagaaactctagagaagcttgtttgccaaaccttgctttgggcggtggagacagaatatcatgtcccagatcagcgtgtggtgactgt

SEQ ID NO: 855406 - DNA, 120 bp, Artificial Sequence
  ENSG00000250056_5 (sequence is synthesized)
ggaggcatttacacacagcacactccagctctgccactgggccggctgaggtggctgcggtacacggcgcccatcctgagccccaggttcctcacatgtcaacagcatgaaaagtgcctc

SEQ ID NO: 855407 - DNA, 120 bp, Artificial Sequence
  ENSG00000250056_6 (sequence is synthesized)
taagacatccacaggtgtgcagtgttaaagcagtgatttggaggttatacttcctattgctgtctttctaatcattactcaaccatgtgaacagacgtattgaagtggtggagcagataa

SEQ ID NO: 855408 - DNA, 120 bp, Artificial Sequence
  ENSG00000250056_7 (sequence is synthesized)
ggaggtcttcaggtctggagctgtccaggagctgagacagtctcagctggtagctgggacactcttggggagttcccccagctgaagaaagtctccctgccgaagtcatgatctttccca

SEQ ID NO: 855409 - DNA, 120 bp, Artificial Sequence
  ENSG00000250056_8 (sequence is synthesized)
gggcagcccacaccccacatctaacggctggttgatgttggaggtgcggtgtcaactctcaccccaactctgccacgtcatgcagctccagagcaccccgtgggacccgctggggcctgt

SEQ ID NO: 855410 - DNA, 120 bp, Artificial Sequence
  ENSG00000250056_9 (sequence is synthesized)
catgcctgcgacacagccccatgtctccttcagccccatccacccaaccctgcttctttcactcagctgcagggaatgatccaaacttcctgcacgcaaatctctagcgcagagtgtttc

SEQ ID NO: 855411 - DNA, 120 bp, Artificial Sequence
  ENSG00000250056_10 (sequence is synthesized)
agattgatttgtctaacaagttctaacacacaccataatatacaaatgggcagggccgatcgtgaaaggtgatcagttttatgaagaggcttatctgtgtgctggttctggtaatatccc

SEQ ID NO: 855412 - DNA, 120 bp, Artificial Sequence
  ENSG00000250056_11 (sequence is synthesized)
attagtacattctctggaccctttatattgtagttgtttaaaatgggttgaaatttcagagatcttgatactggaaaatgtcatttgttgtaaccaaaatccacctggaaaagcatacca

SEQ ID NO: 855413 - DNA, 120 bp, Artificial Sequence
  ENSG00000250056_12 (sequence is synthesized)
cagatatttcaattttaattgtaaagtgaagttgttctcttgacaccaacaattatcttataaataacctaatgacctaatcagaacacaaatttgcatcaattgccgggtgcttggata

SEQ ID NO: 855414 - DNA, 120 bp, Artificial Sequence
  ENSG00000250056_13 (sequence is synthesized)
cttggagtgcagggccaatgttttctagtttttattagtttttcataaggtagtttaaaataatctttgatgctgaagtttggcattgaggatgtgagaggtaggtagtagaaattcgtg

SEQ ID NO: 855415 - DNA, 120 bp, Artificial Sequence
  ENSG00000250056_14 (sequence is synthesized)
tttgacattaaaaagcagtcagttatgcaattctgtgtttcccgctgcaaccagctccagggtgccctgacactgacagctcagcagaagggcacgaggtacctcctccccagaccaata

SEQ ID NO: 855416 - DNA, 120 bp, Artificial Sequence
  ENSG00000250056_15 (sequence is synthesized)
aaaggaaattagaacaagaacacatgaactatgtgatgctccttggttctcagggctgtgattcagtgactatgttagtttctgctagtattgaagattttgcagcaggcaaatatgtga

SEQ ID NO: 855417 - DNA, 120 bp, Artificial Sequence
  ENSG00000250056_16 (sequence is synthesized)
gcaaagatgacatttaagttctatatgcttcacccaccttatctttggatcccccagtcaaaaagttttattcactagcaaatagataaataaatgattatcagtaaatgtgctgtctta

SEQ ID NO: 855418 - DNA, 120 bp, Artificial Sequence
  ENSG00000250056_17 (sequence is synthesized)
tcagtaaatgtgctgtcttagcacctcgcaccccaaccagcccccaccttgaaacactagctgtcaggtgccgttctcagtgcactgcacatatgttggggtgatcagacccaacaccag

SEQ ID NO: 855419 - DNA, 120 bp, Artificial Sequence
  ENSG00000250056_18 (sequence is synthesized)
tggcagagtcaaaggattgagaaaaagtttgagaagtaaagtggggccaggggaccatcgcgatcatggaggctgcaaaggccccgagctctgggagcccacgctatttattggtaatcc

SEQ ID NO: 855420 - DNA, 120 bp, Artificial Sequence
  ENSG00000250056_19 (sequence is synthesized)
atccaacagagaaggaggtggccagaatgtgggggtcaaaagggcgtgttgcatcaagcacatgatttatagctgtgatggtttagcatttgctctacttgagataatggagagcaggtt

SEQ ID NO: 855421 - DNA, 74 bp, Artificial Sequence
  ENSG00000250056_20 (sequence is synthesized)
agccagcaagcctagacacattccggagccacaagccctggattctatccaagccacgagggattttatgccct

SEQ ID NO: 855422 - DNA, 120 bp, Artificial Sequence
  ENSG00000250056_21 (sequence is synthesized)
taagacatccacaggtgtgcagtgttaaagcaggcagcgcctcagcttggttagctcccttaaggactgcggctcccttaggacaaggctctgtccctcagagcactgagtgcgatctca

SEQ ID NO: 855423 - DNA, 120 bp, Artificial Sequence
  ENSG00000250056_22 (sequence is synthesized)
tgctggcatcttagagacattgtattcaccaggattctgccatgattgccacctctggagacgtcacagccagcacagccatgaccagggatgaacttggccattgtccagcagcaccat

SEQ ID NO: 855424 - DNA, 120 bp, Artificial Sequence
  ENSG00000250056_23 (sequence is synthesized)
gggaggaccagctgctgtaagtgaaggtcatcatccatctgatttgctggctttttgcaactactgcggtggaagtcttagagtagccaccttctctgtactcagaccttcacttcgcca

SEQ ID NO: 855425 - DNA, 120 bp, Artificial Sequence
  ENSG00000250056_24 (sequence is synthesized)
gatgtcagcacagcagtgtcagcagcttcgtcaaacacaaacaccaccacctctctggatcagaagcacatggaaagcccaccttgcaagaagacccagctattccaaaagtacccatat

SEQ ID NO: 855426 - DNA, 120 bp, Artificial Sequence
  ENSG00000250056_25 (sequence is synthesized)
ccctgtagcatcctcttagctgaatgtctctactccttaaacttgtaccactttgaagagtaaaaatttaaattcattcatattatcattttttagtttttagtataagtggagctgttt

SEQ ID NO: 855427 - DNA, 120 bp, Artificial Sequence
  ENSG00000250056_26 (sequence is synthesized)
tggatgtggggtgtctaacatacacagcaaatactttgtcccagtgtgtcactttttaaaaaaattcttataatgtctttcatctttaaaaaattattaagctattgtgagcttttatgc

SEQ ID NO: 855428 - DNA, 120 bp, Artificial Sequence
  ENSG00000250056_27 (sequence is synthesized)
cttttcagtttattttcttacatagataattatatgaagtgcaaataggggcagtgttagtctcatcttcccaaggctgcacctcagatgtggaatgttgacagcaacatctgttacctt

SEQ ID NO: 855429 - DNA, 79 bp, Artificial Sequence
  ENSG00000250056_28 (sequence is synthesized)
acctcagatgtggaatgttgacagcaacatctgttaccttgtttctgtttttaggattttagcgttaaggccaggcata

SEQ ID NO: 855430 - DNA, 120 bp, Artificial Sequence
  ENSG00000250056_29 (sequence is synthesized)
gccaacatggagaaaccctctctatttttaaatacatttaaaatgttaacaattaaaacaaaatattttaccgttagtatgatgcttgatacaggatttctggtacatacgccttatcaa

SEQ ID NO: 855431 - DNA, 120 bp, Artificial Sequence
  ENSG00000250056_30 (sequence is synthesized)
tttctggtacatacgccttatcaaattaaataagtttccttttactcttgtttattgttattttttaaaataaggaatgaatcttggattttagtgtatcaataattatattttattctt

SEQ ID NO: 855432 - DNA, 120 bp, Artificial Sequence
  ENSG00000250056_31 (sequence is synthesized)
tccttatgtcatattaaagatgtaaattcatatatattttatcatacaaatgattaataaatgtataagcatgtcattatatgagagtatacttccttatgtttcatgaatgcatcgtga

SEQ ID NO: 855433 - DNA, 120 bp, Artificial Sequence
  ENSG00000250056_32 (sequence is synthesized)
caggctcatttttttaatcactgctcgatttgtgccactgatgttttatgaggcctatttatgtcggcgatggtaagagtgttagtgtttcctctgtgggtaccttcatctaccgtgagt

SEQ ID NO: 855434 - DNA, 120 bp, Artificial Sequence
  ENSG00000250056_33 (sequence is synthesized)
ctcctggatatgctagcatcacagaatggcaggcggaaatttccagctttttctatagaatgagtttaacacagaaaatagatctttcttgaaaatgtggtaacacttacctggaaacct

SEQ ID NO: 855435 - DNA, 120 bp, Artificial Sequence
  ENSG00000250056_34 (sequence is synthesized)
ccctggcctagtgcctcttttcttggggctaaagggtatgaaaatgggtagatctccaaatgccttttccatttttctatgaatattattcctactcaggcttttctcttcttggaacaa

SEQ ID NO: 855436 - DNA, 120 bp, Artificial Sequence
  ENSG00000250056_35 (sequence is synthesized)
tgctgctaacttgtgcctacttggctatttctacttcatgtatattttcaaatccattggtgtgcaagtggacttagtatgttcttgcaagcgtaagagtctccattagtgtaatgacct

SEQ ID NO: 855437 - DNA, 120 bp, Artificial Sequence
  ENSG00000250056_36 (sequence is synthesized)
tctctctttctgttttccttgagcaattaacatatatttgtcttattttattggtcttctcaaaagaatatgcttttgagttattgatcacctgtaccatgtgttctatcacactattct

SEQ ID NO: 855438 - DNA, 120 bp, Artificial Sequence
  ENSG00000250056_37 (sequence is synthesized)
gcacctgggaggctggcgctgcctaagcgggtcaggcaagtcctcgccttggaggggagagtccttagtgattttccctggctctgctcccaccgacgagacggactcaggaggggcgaa

SEQ ID NO: 855439 - DNA, 120 bp, Artificial Sequence
  ENSG00000250056_38 (sequence is synthesized)
cattgtattcaccaggtaagatggattcacatctgctgggtgcacgaacacttcctccttccttgccaccagccagcatcacaaccagcctggccaggctcccgtcccagcccagcctag

SEQ ID NO: 855440 - DNA, 120 bp, Artificial Sequence
  ENSG00000250056_39 (sequence is synthesized)
cagctaaccccagctccatcccccagcaagcccctctgcctgcacctcagcttcttcatggaagacgagtcaggtcatgatgccaccagggagcgtgtttccatgttgaactgagacact

SEQ ID NO: 855441 - DNA, 120 bp, Artificial Sequence
  ENSG00000250056_40 (sequence is synthesized)
aagcccttgacaaatgttggccaagaaaaaaaaggggctccaagaggggagctgtggctcaggtagaagacggtgaatgagcattgcctgaatcagagttagctactctggttacacagg

SEQ ID NO: 855442 - DNA, 120 bp, Artificial Sequence
  ENSG00000250056_41 (sequence is synthesized)
tgtccccggcaggttggtcaaaagcccttccctgagtcccgtgataagtgtggggagggaggcaaatcaaagacccctacacacctcctgcatggatggccagagcgctggtcccacctc

SEQ ID NO: 855443 - DNA, 120 bp, Artificial Sequence
  ENSG00000250056_42 (sequence is synthesized)
cttccttccaaactgcaaccccgatcagcacagcagagaagtctcctgtggcagggaccagtaattcagtgcttcccctggagagtctgggattgcacagaacaccagaggctggggatt

SEQ ID NO: 855444 - DNA, 120 bp, Artificial Sequence
  ENSG00000250056_43 (sequence is synthesized)
tatttgttcaccaacattcattcaacaaacacttactgaggccaacactgggaatggagacgaacttccctgtcctcatggagcttgctttcaaaagggaaggaggcagacagtaaacaa

SEQ ID NO: 855445 - DNA, 120 bp, Artificial Sequence
  ENSG00000250056_44 (sequence is synthesized)
aacaagcaagtcaatatacagcatgatgcagaaaaggtgtgatgccaccctcttgcctgagtttataacaagcagatgatgttgtcctaagaattaatttcagccggtgaaagagtacag

SEQ ID NO: 855446 - DNA, 120 bp, Artificial Sequence
  ENSG00000250056_45 (sequence is synthesized)
atataacaataagaaattaagggttcgggaaggagaggggccaccctgtgctcacccccacacagccctgcaggaaaacccagtgaacggtgcccaggtgcctggctgactcctgggccg

SEQ ID NO: 855447 - DNA, 120 bp, Artificial Sequence
  ENSG00000250056_46 (sequence is synthesized)
ggaggggacatggagggacagtggccatcaggctctttgtggacactggggattaactactgctcgttctcagctcactggtgtccagcccatcaataacctcatcaataacctaacttt

SEQ ID NO: 855448 - DNA, 120 bp, Artificial Sequence
  ENSG00000250056_47 (sequence is synthesized)
ggtcaattaggttggagtccgaaggtgactgatttgcggcaaggttttctctcttcctctgtaaagtggagtccttcatcattcatcgcaagtagacaactcgcttcctaatgcctctgc

SEQ ID NO: 855449 - DNA, 120 bp, Artificial Sequence
  ENSG00000250056_48 (sequence is synthesized)
tcgaatggaggcctttccccgccatccgcataagacgatgggacactgcagagcgtctggattcctacaagtgaaagtggcttcatgtagaacattaaacattcccataactaaatcgaa

SEQ ID NO: 855450 - DNA, 120 bp, Artificial Sequence
  ENSG00000250056_49 (sequence is synthesized)
acaggtgtgcagtgttaaagcaggtgagtgtcctagtgtagacttagcggagtggggctagggctgcgggtagtgggtgttccgcccccggcttgctacccagtcctccctgtccctcag

SEQ ID NO: 855451 - DNA, 120 bp, Artificial Sequence
  ENSG00000250056_50 (sequence is synthesized)
atctggccccaaccctcaggcagacccgtgtcttctcttccaccccctccctcctcctccctggcactcagccttgctcttctactctaccctccctccccaggcagcgcctcagcttgg

SEQ ID NO: 855452 - DNA, 120 bp, Artificial Sequence
  ENSG00000250056_51 (sequence is synthesized)
ttaaggagccaggcgctgcagctctttggtacgtgacctcaaatagattcatgcgtccttctgctgacacggtggcagaggagagggaagggtcgcgcctggtgggggcctgagagccac

SEQ ID NO: 855453 - DNA, 120 bp, Artificial Sequence
  ENSG00000226935_0 (sequence is synthesized)
taataacatctaccaaacagtttacattgtgctaaacaacttatgcacattatttctttgattctttttaacacatggttgtgggctgaatggtgtctcccaagaagtcatatgccggga

SEQ ID NO: 855454 - DNA, 120 bp, Artificial Sequence
  ENSG00000226935_1 (sequence is synthesized)
tcctgtcccatagtgcctcacaacgtgacattgtttggagttagggttgttgaagatgtcattagtcaagatgaggtcatacttgagtgaggtgggtttctaatccaatgtgactggtgt

SEQ ID NO: 855455 - DNA, 120 bp, Artificial Sequence
  ENSG00000226935_2 (sequence is synthesized)
ctgtgaaaaggggaaatgtggacacaggtccacatataaggagaacaccatgtgaagatgaaggtagaaattacagtgatgtgtctacaagccaaggaacaccaaagattgacagaaaat

SEQ ID NO: 855456 - DNA, 120 bp, Artificial Sequence
  ENSG00000226935_3 (sequence is synthesized)
ctccctcagagccttcagaagaaagcaatcctgctggcaccttcatcttggactttgagcctctagaactgtgaggcaatacatttctgttgtttaagccacccagtttgtggcattttg

SEQ ID NO: 855457 - DNA, 120 bp, Artificial Sequence
  ENSG00000226935_4 (sequence is synthesized)
ttacagcagcactggaatcctaatggatgctgtattagataaatattttaggcttaggaagaagagaactgtagacatgcagcagccatcttgtggatatgagggaagagccaaatagac

SEQ ID NO: 855458 - DNA, 120 bp, Artificial Sequence
  ENSG00000226935_5 (sequence is synthesized)
tacaaatcggttaacacagagaactaaaattgtggagctactgaatgaaccagctatggaattgtctgtgtgtgggcattcagatggacataccggataaaattctggactggtaagagt

SEQ ID NO: 855459 - DNA, 120 bp, Artificial Sequence
  ENSG00000226935_6 (sequence is synthesized)
gtggggaaattgccagtcttaagcagtgctgatggaggtgtgaattggtaaaacaatttgaaaagtaagttgctagtttttataaaatttttaaaaataaatgtattctctgacccagta

SEQ ID NO: 855460 - DNA, 120 bp, Artificial Sequence
  ENSG00000226938_0 (sequence is synthesized)
agaggacagatgaggaaaccaaggcttgggaggagaagcggcgcatcctgtggcacacagtaggtgtgacacaagacagctgactctggcttccaggctcttcccacagatctgcagagc

SEQ ID NO: 855461 - DNA, 120 bp, Artificial Sequence
  ENSG00000226938_1 (sequence is synthesized)
ccaggactaggtcctctccgccggccctgcagctgcgttctctgcctctgctctgtggactgatgcctcacacgagctccctggcctctggcttctgcctccccatgccctctcttgtga

SEQ ID NO: 855462 - DNA, 120 bp, Artificial Sequence
  ENSG00000226938_2 (sequence is synthesized)
acagtccatcagggctgggaggaaagcaggatgaaaccagttcccagcgaagcagcattcgccagcatttacttcatacctccctttaatcaactcacttttctctaaaagctttaaaaa

SEQ ID NO: 855463 - DNA, 120 bp, Artificial Sequence
  ENSG00000226939_0 (sequence is synthesized)
tttttatatcgtaattgctctccagagctttatacaaggaaatgcaatgagtcaatatacttactgagattgcagaagagactgaacactgcgctaggctctgaagagaaagatgaaaaa

SEQ ID NO: 855464 - DNA, 120 bp, Artificial Sequence
  ENSG00000226939_1 (sequence is synthesized)
gaagaaagtgctcctgagtatatgactacttgtacttgctagcactgaggcaagtacaaactctaggcatcaggcttttggtctcactcttagcgaatttgaacactggcttttttgttg

SEQ ID NO: 855465 - DNA, 120 bp, Artificial Sequence
  ENSG00000226939_2 (sequence is synthesized)
aagcaccaacttatacttcacagagctaagaaacagcatttcgccatgtcacgcaggctggtcttcaactcctggactcaagctatccacgggcctcggcctcccaaagtgctaggatta

SEQ ID NO: 855466 - DNA, 120 bp, Artificial Sequence
  ENSG00000226939_3 (sequence is synthesized)
agtttttagtctcatcaaaccaactcacccaaatgtcccttggtgacaaaaagttttctgaaagattaagtaatctttgtttcccaagcctgacaaaataaaaagttttctgtctctctc

SEQ ID NO: 855467 - DNA, 120 bp, Artificial Sequence
  ENSG00000284846_0 (sequence is synthesized)
acttgatgccattttgggccccatgactcgtgaatccagctctttctgttcttaatgtttgggtctctcgacgcatctaattcaggttctggggatttgaatggagacatctttgagggg

SEQ ID NO: 855468 - DNA, 120 bp, Artificial Sequence
  ENSG00000284846_1 (sequence is synthesized)
ctatgattctgctcctcagcaactttgagactgtggaaattcctgttacttaccccactttcacacaatgaagttcttggtgtcagcagtatttccaccatagaattagctgcagatgaa

SEQ ID NO: 855469 - DNA, 120 bp, Artificial Sequence
  ENSG00000284846_2 (sequence is synthesized)
gaaaatggacaccgtgtgttataaccatgctctcaagcccactttataatatgttccctggtgggtgaagttattatcaagtacggaccatcatgagtacttttcagtggagaactatga

SEQ ID NO: 855470 - DNA, 120 bp, Artificial Sequence
  ENSG00000284846_3 (sequence is synthesized)
cttcaaaagcactatgttgaagaggtattgattttggaaaactattaaatgtatgatgatggagccatcacacctgtgagaagcggtgaatgtgctcaacagaaattgcatgtctagaag

SEQ ID NO: 855471 - DNA, 120 bp, Artificial Sequence
  ENSG00000284846_4 (sequence is synthesized)
gaagagcacagctggagtcaggggaggagaaagagaaagaggaagccatggtaccagtcacgatgctgttgccttccctctgccggaccacagtgcctgttaggaggctcgggctgcaca

SEQ ID NO: 855472 - DNA, 120 bp, Artificial Sequence
  ENSG00000284846_5 (sequence is synthesized)
tcctatcaatgcctacccttaaggcttagacccctgccttctgggcccatccccattaagagcattttgtttgcagaaggataactttcagatttttccttttctttttggaagtgacaa

SEQ ID NO: 855473 - DNA, 120 bp, Artificial Sequence
  ENSG00000284846_6 (sequence is synthesized)
attttgcaatactaaatagttcccctttaatcattcatgtcagacactattcacatttcttaaaaatttataagatgattctgatctgtcagaaaaaaagcctctttaaaattcagatta

SEQ ID NO: 855474 - DNA, 120 bp, Artificial Sequence
  ENSG00000284846_7 (sequence is synthesized)
acttgctgcttgttctccatgttaatgtgttttccatcagtcactgctgtcacaaaactatttgtacaaggcttaatatgcagaaagtcgttttatagttttacatgtgggaaatgtttt

SEQ ID NO: 855475 - DNA, 120 bp, Artificial Sequence
  ENSG00000284846_8 (sequence is synthesized)
tctacactcccccaatcttaaaaatgctgtctgtcaacctcttctatttgttatgctatcctttatctttgatcctccttagtctctttcttcttaagaggctgctgaccactgctgtgg

SEQ ID NO: 855476 - DNA, 120 bp, Artificial Sequence
  ENSG00000284846_9 (sequence is synthesized)
gaaatgaggcagcagtatatccagtggttaagagcatgactttggaatcagacctggtctgtgcctcagtgtgacctcttcctagctatgtgaccttgagcaagtcaaaatcatctgagc

SEQ ID NO: 855477 - DNA, 120 bp, Artificial Sequence
  ENSG00000284846_10 (sequence is synthesized)
ttcagtttccccaactactaaatggagcaacagtacttacccctgaggcaacatcaaggtgaagcccctaggatggctgatactaactgctttttaagttctagctacacacacatacac

SEQ ID NO: 855478 - DNA, 120 bp, Artificial Sequence
  ENSG00000284846_11 (sequence is synthesized)
atgcacacacacatacacacagagaatatatgtcattgacatagtggcaaaactactgtttgtccattattttcagggaagaatgagttaagagccatttctattactcccaggtacaac

SEQ ID NO: 855479 - DNA, 120 bp, Artificial Sequence
  ENSG00000284846_12 (sequence is synthesized)
tgaaataaaagcttaaaagaagatggagattggagatggaagtttatcttcatctatggaactggaaatacactagctttgtagaaattatgggtattgaataaaaatttatcaagacaa

SEQ ID NO: 855480 - DNA, 120 bp, Artificial Sequence
  ENSG00000237532_0 (sequence is synthesized)
tcacagagcctatggtgggagtgagacaaatgggttgacaggtgcccacatggttgccaggcacatttcagagagcaggtgtatgctgctcaggcagccaaagggcctcacctggccaag

SEQ ID NO: 855481 - DNA, 120 bp, Artificial Sequence
  ENSG00000237532_1 (sequence is synthesized)
ggcaggcactctgaagtgcttccccaaaccctgttgtccactttcctggacttgagtaatggtgctactagtggctttatttgatcttcattaaatttgggaattgttcttaccaactca

SEQ ID NO: 855482 - DNA, 120 bp, Artificial Sequence
  ENSG00000237530_0 (sequence is synthesized)
aaatcactgcctagctagtgtcagggtttgtgtggtagaggagctctcttgtggtttaaattacaacagtctgtgggtggggagggtgtggaccactgaagttctctcaccccttcccag

SEQ ID NO: 855483 - DNA, 120 bp, Artificial Sequence
  ENSG00000237530_1 (sequence is synthesized)
cttcaggctcctggctgatcacaattgttctcctagatgtgctattcaagagatccatgtagccaccactgagaacttcagaccagaagagacaagcagagatactgcaacgcactcatc

SEQ ID NO: 855484 - DNA, 120 bp, Artificial Sequence
  ENSG00000237530_2 (sequence is synthesized)
cagagcagaggaaccctattttgagtttacctataggaccttataacaggcaaacatatgatgtcttcatagtattagaaataatgaaatgaaggactatatcagtgacctcctgaaagg

SEQ ID NO: 855485 - DNA, 120 bp, Artificial Sequence
  ENSG00000237530_3 (sequence is synthesized)
catccttcctgaccagtccaggtggctgtgctcctgcagtctcctccctggtctcgcacactttgacttccttactcaggaggcattgtgaagtctccccgcgatgccactccacctcct

SEQ ID NO: 855486 - DNA, 120 bp, Artificial Sequence
  ENSG00000237530_4 (sequence is synthesized)
tggcatcagtcctctgtgggcaaaggctgaagatgacaggcatgtgagaatataggcagacacactccctgccatgtgcagaaagccagtctgcagtgagagcaaagatgagaggtggag

SEQ ID NO: 855487 - DNA, 120 bp, Artificial Sequence
  ENSG00000237530_5 (sequence is synthesized)
aaacaggcctggtggcgtctgagacactgcttctagttgttctgaggcttggctgccccttgcctttcccatgcatggtttggttcttaaacagtttgttgtatttccggaaccatcaag

SEQ ID NO: 855488 - DNA, 120 bp, Artificial Sequence
  ENSG00000237530_6 (sequence is synthesized)
tgtccctttttgtgtaaggttgtccaagttggctttgaacatttgcaaccaaaagaggtctgactcatttagaaatcctgggcaaatcgccctcgcagttcctccatttcctgatttata

SEQ ID NO: 855489 - DNA, 120 bp, Artificial Sequence
  ENSG00000237530_7 (sequence is synthesized)
aaatgatgcggaaaccatcatgagggagtggataaggggactgtgaactgttcgctggagttaaggcctccagccccatcccaaagccagcactgcttgagcctcagaggagagatccat

SEQ ID NO: 855490 - DNA, 120 bp, Artificial Sequence
  ENSG00000237530_8 (sequence is synthesized)
ggggttattagggtttaagagaatgaggtcattggggtttattaaaccatcaagggagagaactaagaggggaccctgagatgcccagtaaggcaaatatttggagataagtttcatttc

SEQ ID NO: 855491 - DNA, 120 bp, Artificial Sequence
  ENSG00000237530_9 (sequence is synthesized)
acccctacttggcctccacaaggcctgcacacttaaatattggtttgagagaattctgaagtcagagtggcagaccatgctggtcacacccaatggcccgatcctgctacaggaacacaa

SEQ ID NO: 855492 - DNA, 120 bp, Artificial Sequence
  ENSG00000237530_10 (sequence is synthesized)
tttcactcatgagtgggacaccccctgactctggctacaggggaagagcacggttccatgccatttccctttgccagtgattgtttcggtgatgaatgtgtaagccatttctggccaatg

SEQ ID NO: 855493 - DNA, 120 bp, Artificial Sequence
  ENSG00000237530_11 (sequence is synthesized)
ggatataagggcgtttaatctcacccctctcttgtaaggagaggaggaacttccttcttcactccagcctgcctccacacatggttctgtgaagatgtaacatttggtttgtgacagcca

SEQ ID NO: 855494 - DNA, 120 bp, Artificial Sequence
  ENSG00000237530_12 (sequence is synthesized)
tcttgtgaccacaaagaaaaaccgcaataagccttggcatcaccacggggctgaattaacccacccaggggcccctgacctctagacttctcgttatgagaaatgataaatcctattatt

SEQ ID NO: 855495 - DNA, 120 bp, Artificial Sequence
  ENSG00000237531_0 (sequence is synthesized)
cttccctcctctttgtcaaccgcatgtacagtaagaaaagcagacaagatggcgccgatcaactggaaatcccatttgcttaagattagggtggggcgaccagccttccccacgcactct

SEQ ID NO: 855496 - DNA, 120 bp, Artificial Sequence
  ENSG00000237531_1 (sequence is synthesized)
atggatgtcatgccggatggaaccaatctttgagccctacgtaaatgaaacaccgccttcaccagcctgcctataaagtctgcagagtccttgtccacacatctcatcacacacgtgcgc

SEQ ID NO: 855497 - DNA, 120 bp, Artificial Sequence
  ENSG00000237531_2 (sequence is synthesized)
ctgtctctttctcttatttcccaaaactccgttgtgtttctgatttgttcacatcgctttcggcaaaaggaaaacacaatggtaagtggggtttataaatctatcttcgttatcaaggga

SEQ ID NO: 855498 - DNA, 120 bp, Artificial Sequence
  ENSG00000237531_3 (sequence is synthesized)
agattgaaacggcatggagacaaatgaaattaactgtgcacgggacacaccgtcaacaaaacgctaataagtgcagaaagactgtttagcaggaaacatgtccaaaaaaaaaaaagaaaa

SEQ ID NO: 855499 - DNA, 120 bp, Artificial Sequence
  ENSG00000280543_0 (sequence is synthesized)
tacatatctacttattggaagtgggactgtcattgtcccagttactgatgaggaaattaggcacagagaagtcaaatgacttgcttaagatctcaaatccaggaactgcagaagtgagat

SEQ ID NO: 855500 - DNA, 120 bp, Artificial Sequence
  ENSG00000280543_1 (sequence is synthesized)
ttgaacccatttccaactccaaggcctgtatagtaattcactattccagaatactcctgtagcaacctggccattcgctgctgagccaatgccccctctctttccacaaactcttctcct

SEQ ID NO: 855501 - DNA, 120 bp, Artificial Sequence
  ENSG00000280543_2 (sequence is synthesized)
gtagcttcgaagctatggtaggtgaccaggagtcttggccacacttcttccattgcctgcccaggaggtatctccaactttctcttacacacatctgtatgatacactaagacctttttc

SEQ ID NO: 855502 - DNA, 120 bp, Artificial Sequence
  ENSG00000280543_3 (sequence is synthesized)
caaattgcacagagagagaaaaagggattgagttgcttccatatttttgctgctcattgtcctcttttcagtactattttattttcagaattttttctagccacacttttcttctcaagc

SEQ ID NO: 855503 - DNA, 120 bp, Artificial Sequence
  ENSG00000280543_4 (sequence is synthesized)
acagcaggtagcctttgcatagctatgagagtgacaggattcttgtcaaccagaccatagacgcctacccagccaggtgtaagaaggtccgctgtgggcagagaagttgatgagccagca

SEQ ID NO: 855504 - DNA, 120 bp, Artificial Sequence
  ENSG00000280543_5 (sequence is synthesized)
gagaagttgatgagccagcacggtcagtcctgtctttcgctagcagggactattgactgctctgtgccagacattttgttaaaaagtggtgttatcggcctggcgcagtggctcacgcct

SEQ ID NO: 855505 - DNA, 120 bp, Artificial Sequence
  ENSG00000280543_6 (sequence is synthesized)
agagctgtgaataataatacccttgtgtcaggcttcctgtggtctagcactgtgtcccgtactttatagtttatttcctttaatactcatgcccatctagggtagtaggtaccatggttg

SEQ ID NO: 855506 - DNA, 120 bp, Artificial Sequence
  ENSG00000280543_7 (sequence is synthesized)
ttcccagttgatatatgacggaatcgaggcttagcagaataagaagtcacccaaactcatacccactggtcagcagtacagctagaattcaaagccacacttgtctaggtccaaaatctg

SEQ ID NO: 855507 - DNA, 120 bp, Artificial Sequence
  ENSG00000280543_8 (sequence is synthesized)
cacccctaattaaccactcctggtaagaagctggttataagggctggtcaagtcagctatggaagaattctcagaaagtgactctaaaggtgttctttgaaggttgtgtaggaattcacc

SEQ ID NO: 855508 - DNA, 120 bp, Artificial Sequence
  ENSG00000280543_9 (sequence is synthesized)
aaaactggaaggagacaggccttccttgcagggaaaaggaacgtaaggggcaaagttacagagacataaaaactcacaccatctttggaaaaaggagactcattttgagaagccaaagag

SEQ ID NO: 855509 - DNA, 120 bp, Artificial Sequence
  ENSG00000280543_10 (sequence is synthesized)
taaggttaagtgagaactctggacatttgggcctgtgggtattgggcagcagcccctgacatgatgactcgtctgtgtgacagcagaatgaatgaccacagcagagccagagggcctttg

SEQ ID NO: 855510 - DNA, 120 bp, Artificial Sequence
  ENSG00000280543_11 (sequence is synthesized)
cagccctgttggtctcaaatttactcatgtatagcacatgcaacctgcattaataatcacttctttggaatgttttctacctggaaagggaattagtggatgtaacagttcattccccaa

SEQ ID NO: 855511 - DNA, 120 bp, Artificial Sequence
  ENSG00000280543_12 (sequence is synthesized)
acataaaattttccttgacgttttgattgttataactcatttaagtgggaaagtataagatttgatatctagccctgaagactcatcattgagcacagtgctagaaagaaatgcctacca

SEQ ID NO: 855512 - DNA, 120 bp, Artificial Sequence
  ENSG00000247081_0 (sequence is synthesized)
acacttccccatggaaacagaagtagatacaggcaggggcaggaacaggagcagagcagaagcccaaagagacagtttaggggacataaaacagcaaaaatggatttaaaggaaagccca

SEQ ID NO: 855513 - DNA, 120 bp, Artificial Sequence
  ENSG00000247081_1 (sequence is synthesized)
gtcattcacacttagaagaattcctggactaacaattctaagccaaggcagctgcggcaacgttgaggcagaatcaaaacctggggaaagaccttaggtattcagaacaaaacaatcagc

SEQ ID NO: 855514 - DNA, 120 bp, Artificial Sequence
  ENSG00000247081_2 (sequence is synthesized)
aggcgggtctgcggcattctaagaacagacactggcaggaacaaaggttacagaagtgaatgactctaagaatcaagcaagacatggagtggcagaaaattaaattctgaatccctaaaa

SEQ ID NO: 855515 - DNA, 120 bp, Artificial Sequence
  ENSG00000247081_3 (sequence is synthesized)
gacatgatgcaaagatgacctcctctcccaaggacatgtcctcatcctgcgctgaccgtgtgtggtcatttcagaaaaagcgaacaatggagaacctgcttgaatgatacttagacctgg

SEQ ID NO: 855516 - DNA, 120 bp, Artificial Sequence
  ENSG00000247081_4 (sequence is synthesized)
gacaactgaaaggagttgcacttatacaattcggtgcagtggagtcccctgggaggagccccagtcacacgggaagagacagtcacagctgtaataaatgatggctagcatgtatcaagc

SEQ ID NO: 855517 - DNA, 120 bp, Artificial Sequence
  ENSG00000247081_5 (sequence is synthesized)
actggccgagtcctcagcatacattacattacagaattcagtgtgcacctcaacactctgggggtgtattttataggagaactgtggcacaaagaggggttttgcaatcccaagaagagt

SEQ ID NO: 855518 - DNA, 120 bp, Artificial Sequence
  ENSG00000247081_6 (sequence is synthesized)
cagcgtttgaattttgaatttatgtgcaaaagagacaaatatggctaaagggcatgggcacactctctctgggtccccgtgttaacgattttagtagcttctatttaaatggtgctcttt

SEQ ID NO: 855519 - DNA, 120 bp, Artificial Sequence
  ENSG00000247081_7 (sequence is synthesized)
ctctaagaagatcattgggtattttctgaaagcttacataatggctggaagccccctgcctctgcaaaggaacacctgattcagaaaagtaaacaccataacagcaacccattcatcagc

SEQ ID NO: 855520 - DNA, 120 bp, Artificial Sequence
  ENSG00000247081_8 (sequence is synthesized)
tgcccagactcacaaccaagcagacatgcagcgactttccaaaaaccctcatttctggcattacagcctgtggcaataacagagttaaggaaaggtaagtgaaactcagagagacacagt

SEQ ID NO: 855521 - DNA, 120 bp, Artificial Sequence
  ENSG00000247081_9 (sequence is synthesized)
gagataattattcctcacgcctgttagaagaacattccaccgtctcagaagaagccctgtctgaatctgattcagctgagaaaacaactcaggccatggtagctgcacccaactctctaa

SEQ ID NO: 855522 - DNA, 120 bp, Artificial Sequence
  ENSG00000247081_10 (sequence is synthesized)
atcaacagtgacctgtgctgaagggattaaggcatcccaacattcctcagagcccaaggcaaggagaatcccttatgaagatgaaattgatcttcaagcaccctctaccttactctgcgt

SEQ ID NO: 855523 - DNA, 120 bp, Artificial Sequence
  ENSG00000247081_11 (sequence is synthesized)
gatgccatattcttcctgaatcccacccaactcaagagcatgatttgcataataaaatctctaatactttgatgaacaaatgttatccaagatactttaaaaactgccttcacggtgaga

SEQ ID NO: 855524 - DNA, 120 bp, Artificial Sequence
  ENSG00000247081_12 (sequence is synthesized)
aatgaacttaattccattaattcattgtctgttcgttattctagaaacattatttgagtgttcagcatgtgctgagctatttagagatgtttctgagggctaggactagtaactgcaaat

SEQ ID NO: 855525 - DNA, 120 bp, Artificial Sequence
  ENSG00000247081_13 (sequence is synthesized)
cctatgcttttttttctctcttccacactgccttggggattaaagacagtggctcttaaatctggctgtgcttcaaaatcatctaggacaggagtgggcattggaacacagacacgctca

SEQ ID NO: 855526 - DNA, 120 bp, Artificial Sequence
  ENSG00000247081_14 (sequence is synthesized)
ttcatttatatattgtctatagctgctttggcattaaaaacagagaagttgagtagttgcaaaagaaatcacgtggcccacaaagcctgaaatatttaccctctgtccctttacagaaaa

SEQ ID NO: 855527 - DNA, 120 bp, Artificial Sequence
  ENSG00000247081_15 (sequence is synthesized)
agtttgctaacctctgatctaggacctctggaccagcagcatcagcatcacttggaagcctgtcaaacatgcagaatctcaggtccaccccagacccacgaaatttcactctccactgac

SEQ ID NO: 855528 - DNA, 120 bp, Artificial Sequence
  ENSG00000247081_16 (sequence is synthesized)
ctagagaacatggagacactgcaggttttctagctgcactcccactaccaaatcagaagtgcctggggtgggacgtttgtttgagattccccaggtgaatctgatatgcagccactaggg

SEQ ID NO: 855529 - DNA, 120 bp, Artificial Sequence
  ENSG00000247081_17 (sequence is synthesized)
aagcagaaagatgagtaaggtgattactgccaggtcttcctatgggacggcagcaccagattctccagctgctaggagagttagccgctaaaggatcacagctgagtgcctctccaggca

SEQ ID NO: 855530 - DNA, 120 bp, Artificial Sequence
  ENSG00000247081_18 (sequence is synthesized)
ccttacccaaggtcacacctacttgctaggggaagactgcatccagcgcctggccgatacagggtaaaaaggcccagtcttctcaattgctgaatggccatcccagctccagagctcccc

SEQ ID NO: 855531 - DNA, 120 bp, Artificial Sequence
  ENSG00000247081_19 (sequence is synthesized)
agggcatcagctgaagcccctattacaacagccattccactcctccctctgccctggactgtgcccctcaccctattagagaaactgggatgctgactgaattattattacattagagaa

SEQ ID NO: 855532 - DNA, 120 bp, Artificial Sequence
  ENSG00000247081_20 (sequence is synthesized)
ttaagaagttttcattaatttttaggtgtgatgatggtatcatggttatatattagtttgaagtatatgaaattgctaatattacactatttcaacctacaaaaataacaaaatggtcca

SEQ ID NO: 855533 - DNA, 120 bp, Artificial Sequence
  ENSG00000247081_21 (sequence is synthesized)
atctaatatctttttggtccaatctaatagatatggtccaatctaatatcttttttaaagagtcccagtttattagagattcatactgaagtattcatggatgaagttacatgacttgtg

SEQ ID NO: 855534 - DNA, 120 bp, Artificial Sequence
  ENSG00000247081_22 (sequence is synthesized)
gaatttgcttcaaaaatgtttaattggcgaagtggaatggaggcagagatgaaacaagctttgcaatatgttgataattgttgaagctgatgatgggtacatggaggtttattatactat

SEQ ID NO: 855535 - DNA, 120 bp, Artificial Sequence
  ENSG00000247081_23 (sequence is synthesized)
tctccatatatattatatatatatatatatatagcttgagataggtaagaggcccacatcacaggtggtgttactagagctctctccagtaagggtttacctcagagtctgtttcttggc

SEQ ID NO: 855536 - DNA, 120 bp, Artificial Sequence
  ENSG00000247081_24 (sequence is synthesized)
tctgtctttaagagtatacagtataatagcagagataagtcacaatcataaataagaaaactcaaaagggagtaagtgtcctaaatggtgtgtgctatcagggaacacataactgaagca

SEQ ID NO: 855537 - DNA, 120 bp, Artificial Sequence
  ENSG00000247081_25 (sequence is synthesized)
gaagggcaggagcagcaggcttttggggtgacaggtgggctgtgggatcaggtgggatgccctttgaggcacctgatcccattgccccacccatcaccccaaaggttgtatggagaggct

SEQ ID NO: 855538 - DNA, 120 bp, Artificial Sequence
  ENSG00000247081_26 (sequence is synthesized)
ggagagaaagccttgaattccatactaagacatttgtattcagtagatagtgggaaatcatgaaaggctttgagtggaagaataacacaataatgatcccagctgtacttgggagtattt

SEQ ID NO: 855539 - DNA, 120 bp, Artificial Sequence
  ENSG00000247081_27 (sequence is synthesized)
acctggcaataatgtgaaggggattggagtgggagtgactgggggtgtgaagactagtccaaaagttgttgcaaatgtctaggtgaaaggcggtgaggacagaagctagcaatccatgaa

SEQ ID NO: 855540 - DNA, 120 bp, Artificial Sequence
  ENSG00000247081_28 (sequence is synthesized)
ggggctggtgtacaggaaagaccacagggctcagaatgagacagacctgagttccaaaccccaccccactgctcacagcccgtgtacatttagacaagccatcccaccgctctgactacc

SEQ ID NO: 855541 - DNA, 120 bp, Artificial Sequence
  ENSG00000247081_29 (sequence is synthesized)
cccttctgtaaaatggaaataacagagttagctaataaatctgcaaagcccggcacatgctgagcacccaattaatggaagccacaccatgaggtcgtagctgtgttcgtttgtgcttgt

SEQ ID NO: 855542 - DNA, 120 bp, Artificial Sequence
  ENSG00000247081_30 (sequence is synthesized)
acatcatcacttatcaccccagcaagaaagtgtgagcctgactgctatgaagactgcccttgaaaagtgattcttggaggtaatcgtttaatgaggcctcggtttcaaacatgccagttg

SEQ ID NO: 855543 - DNA, 120 bp, Artificial Sequence
  ENSG00000247081_31 (sequence is synthesized)
tttattgaggtgcttaagcctgaatcattcctcttaggaagggtgcacaggcggtctctgcttccattgtaaccgctgccatgccctgttgtcatggtgaccagtttcccaaactgccct

SEQ ID NO: 855544 - DNA, 120 bp, Artificial Sequence
  ENSG00000247081_32 (sequence is synthesized)
gctattttctgcaagcctttccagtttcttaacgccctaaagtccacaagccctagagacagcagcaggttgggttttttgaacttccacagaaaacactgtcaactctttaaatttgcc

SEQ ID NO: 855545 - DNA, 120 bp, Artificial Sequence
  ENSG00000247081_33 (sequence is synthesized)
agttggctgcgagctgcttctccaacagaagctcccagcctgagcagcagtgtgaccctgcacagcagacacccacaaatgttcccactaactggaaattggtgccatggaatattagct

SEQ ID NO: 855546 - DNA, 120 bp, Artificial Sequence
  ENSG00000247081_34 (sequence is synthesized)
ggcacatcagtctctggctggcattaatcttgcaggaaaataaggcagaagacaagggaatgtccaccatgcatttcacgtacacagcacagtctgaagttaaaagaccattctaaaaga

SEQ ID NO: 855547 - DNA, 120 bp, Artificial Sequence
  ENSG00000247081_35 (sequence is synthesized)
ttaaagtttaaggtattgcattatttttaaaaattatttcaatattagcatatgtggtttttccagagaatgttcaccttatgaacttacttgaaacatgaaaatattaaaaacaatatt

SEQ ID NO: 855548 - DNA, 120 bp, Artificial Sequence
  ENSG00000247081_36 (sequence is synthesized)
gggagatggaaccctgagcagcccatgtacatggaagatctttattgcagagatcttcaaaccaggaaactgaggctaaagagtttagtattctgccaaggccagctaatagttacagag

SEQ ID NO: 855549 - DNA, 120 bp, Artificial Sequence
  ENSG00000247081_37 (sequence is synthesized)
catggttccaaattcagagctgtcggaagcttaagcccatgtgatgaaccacgaatgtgattttacctcatttaagccttgcagcaaactctgccaactagtgtgcatttactcctgcct

SEQ ID NO: 855550 - DNA, 120 bp, Artificial Sequence
  ENSG00000247081_38 (sequence is synthesized)
ctccatgcctgaaggaaggaatgaagaggtctctgctgtccatctgagccagtgactgggctgtctctaccaggccagaatttggggcaggcaagattttcagcatccctaaaatcacac

SEQ ID NO: 855551 - DNA, 120 bp, Artificial Sequence
  ENSG00000247081_39 (sequence is synthesized)
taagaagataaacatggaaacagcttggagctgccctacccatagtgaggtggtactgactggaagacagcttaaacgatttggagaaaagtggaatacattaatctcagaaaactctac

SEQ ID NO: 855552 - DNA, 120 bp, Artificial Sequence
  ENSG00000247081_40 (sequence is synthesized)
cacctgtagaaagagagctaaaatggagacaaccacaggcagtctaagatacgctgaactactacagaaaataatgcagcatgaaggaatgctggaaggtatggggtcagagcaagctga

SEQ ID NO: 855553 - DNA, 120 bp, Artificial Sequence
  ENSG00000247081_41 (sequence is synthesized)
tggagggtccttcatttccaagccacgagtacagcaggatgtaaggcttagttcataagaacatctcctgaaagacaatctctataaaaactgtttcaatagaaagaatgcaagatgtaa

SEQ ID NO: 855554 - DNA, 120 bp, Artificial Sequence
  ENSG00000247081_42 (sequence is synthesized)
ctgtttaataataggactgatattttaaaaaacaaatgaacgtaatagaagactagatggatgtgcttctcaaagtcctctctgtgggaggcttcatcctcactctagatgtgttgcctg

SEQ ID NO: 855555 - DNA, 120 bp, Artificial Sequence
  ENSG00000247081_43 (sequence is synthesized)
tagcagctgttattgattacccgcccatagcctatccatacttactcatcattcctttacctaccagtggcatcctattggaagcacctgcgactttcttagggctttctcttggccaag

SEQ ID NO: 855556 - DNA, 120 bp, Artificial Sequence
  ENSG00000247081_44 (sequence is synthesized)
cattggaaggccagcagtattgaaaagttaatagtcttggaagcactggccctcaactaatgacaaagaaaaaatataagataaattccccagcttccttgcctcctgaatgggtcaagt

SEQ ID NO: 855557 - DNA, 120 bp, Artificial Sequence
  ENSG00000247081_45 (sequence is synthesized)
ctgtggtgtgttctacccgtttttcagaggtcccatgttttaaaccctagctgctcaaggcaatttcctgatcattgatgtactctctattggctaatttttagataatatggaatatgc

SEQ ID NO: 855558 - DNA, 120 bp, Artificial Sequence
  ENSG00000247081_46 (sequence is synthesized)
gagttcaattctgtataagtgtggacatacacacatcaaaagaaatatggaacaaaagatactaaatgtttatagtggttatttctgggtgttgaaattttaagtgattttccttttctt

SEQ ID NO: 855559 - DNA, 120 bp, Artificial Sequence
  ENSG00000247081_47 (sequence is synthesized)
ctttgtaattgtctctatttttcagttttttcaatataccctgtatttcttttaaaatcagaacaaaccaccataagttattttaaaaggcttataaagctgatgaatattttgtctttg

SEQ ID NO: 855560 - DNA, 120 bp, Artificial Sequence
  ENSG00000247081_48 (sequence is synthesized)
tttcctttgtgttgccatagtctgagggagtagttctcaagtgtagtctctggaccagcagcatcaacattacctgggaacttgttagaaatgcaaattctcagaggatgcctaggacct

SEQ ID NO: 855561 - DNA, 120 bp, Artificial Sequence
  ENSG00000247081_49 (sequence is synthesized)
tctgaataagaaaccctcggggttgggggtgaaggggacagcaatcggcattttaagaagctctccaggtgatttttatgcacattgaagtttgtgaaccactggtctaaagataacttt

SEQ ID NO: 855562 - DNA, 120 bp, Artificial Sequence
  ENSG00000247081_50 (sequence is synthesized)
tattacacctacctgttagtccccactaaagctccctgggtggggtccaaaaatttcagtcatgtaaaatgcaggattgcatttttgtggggttggcaaactgattgggatgagcctgct

SEQ ID NO: 855563 - DNA, 120 bp, Artificial Sequence
  ENSG00000247081_51 (sequence is synthesized)
gagtaagatgaaagctcattacagttgtcttatgtctgaattcattgtagggcaaattatgttggggtttcatcataaatatattggtctgcagagtttatatattctgtattgaaatct

SEQ ID NO: 855564 - DNA, 120 bp, Artificial Sequence
  ENSG00000247081_52 (sequence is synthesized)
atggtgcatttaataggcagaaggctagactaatttaaatctaatctgatgatcacggagactgcttgacacctgtgatgtttcacaggcttggagaaagttttgttttctttatacctt

SEQ ID NO: 855565 - DNA, 120 bp, Artificial Sequence
  ENSG00000247081_53 (sequence is synthesized)
tattttctacttgcctggtggcttcatttccttagtttgatttttcttccataattcttctctctttcccccaattatgcaaagatagtggatttcaatattttgtggaaaaaactacca

SEQ ID NO: 855566 - DNA, 120 bp, Artificial Sequence
  ENSG00000247081_54 (sequence is synthesized)
tcccttggatttgagaggcccctcctcagtttcccccatggagcttttgttttccagtgtgttacattagttgtttgtgaatctgtcttctcccccaccaaatggaggccctaaatgcca

SEQ ID NO: 855567 - DNA, 120 bp, Artificial Sequence
  ENSG00000247081_55 (sequence is synthesized)
tgtgagcagggacagtgacttatacctccttgcatgcttggttcttagcacagggcctggcagagacagcaagaactcaaaacatattggtgaatgagtgaatgatgatgctgtaattca

SEQ ID NO: 855568 - DNA, 120 bp, Artificial Sequence
  ENSG00000247081_56 (sequence is synthesized)
agacacacattcatttatttagcattaaaatgttttacatagcaaatattaatacaagaaatgcatgccaggaacttaacctacattcattttaatatgtgaagaataggaatatgtgta

SEQ ID NO: 855569 - DNA, 120 bp, Artificial Sequence
  ENSG00000247081_57 (sequence is synthesized)
ctgcgccgcccggcctcactccgcggcccgccaggacccggccccggtgaacgggctcggggtgccgaggtccggctgcggggccgggaagccacctccaccttgccgtctgttacgacc

SEQ ID NO: 855570 - DNA, 120 bp, Artificial Sequence
  ENSG00000247081_58 (sequence is synthesized)
ccttgccgtctgttacgacccccgaggcgcaaggctgagccccatctcgctatccgggtccggaggggttcaccttagaaggattttttgaagctcttggcgctggctctaaaagaaccc

SEQ ID NO: 855571 - DNA, 120 bp, Artificial Sequence
  ENSG00000247081_59 (sequence is synthesized)
acttccttgcggatttcaggagtcaagaatccttaaacggagccaatttgctttgtaaagccaattgcccaagtgacttgagttcgaaaggagatacttcctggacaactgctataaaaa

SEQ ID NO: 855572 - DNA, 120 bp, Artificial Sequence
  ENSG00000247081_60 (sequence is synthesized)
tattaattcggggagcctggtcaccaactggatgctcaggggagatggaaccctgagcagcccatgtacatggaagatctttattgcagagatcttcaaaccagatggctcgcagagatt

SEQ ID NO: 855573 - DNA, 120 bp, Artificial Sequence
  ENSG00000247081_61 (sequence is synthesized)
gaggaacttgcccaaggctacgcagcttgatcttctaagggtgtgaggatacaggcgtcaaagaccccgtgctgagacagctccataacaacatgcagatatttggcaatgagggttcag

SEQ ID NO: 855574 - DNA, 120 bp, Artificial Sequence
  ENSG00000247081_62 (sequence is synthesized)
aagaggacttgctgtggagaagagagaaaagagatgggaagactctgtgaatgaatagagaacactctgcaagcatcccagttcctttggttgccctgcagtctgcaggtaccaggagaa

SEQ ID NO: 855575 - DNA, 120 bp, Artificial Sequence
  ENSG00000247081_63 (sequence is synthesized)
caaggcagtgtcttcaaatctgtgctttctaaaacaaagaaataaccttgatgaaacaaattttccccagaggaaggggagagcccacagtgagctggtaaagaagatgcctggagcagg

SEQ ID NO: 855576 - DNA, 120 bp, Artificial Sequence
  ENSG00000247081_64 (sequence is synthesized)
agctggtaaagaagatgcctggagcaggcagcatcctcaaatggaagagatggtgtcttgctatgttgcccaagctggtcttaaattcctggcatcaagtgatcctcctgcctcagcctc

SEQ ID NO: 855577 - DNA, 120 bp, Artificial Sequence
  ENSG00000247081_65 (sequence is synthesized)
aatactgtcatgggactgcattagaaattggttaatatttttcaagatgagcttaaaaattaaaatgaataaaagtttcttagttcaattaattataataactggcatttatttgccatt

SEQ ID NO: 855578 - DNA, 120 bp, Artificial Sequence
  ENSG00000247081_66 (sequence is synthesized)
ttcccattaacaaagtgcttttaaatctttgtcttgattctgctcaaattctgtcaacatattgagaacgtttgattatgtactttagacttttgttgatatgtcattcaatcacggttg

SEQ ID NO: 855579 - DNA, 120 bp, Artificial Sequence
  ENSG00000247081_67 (sequence is synthesized)
gttgctgaataatttataatcattaatgacaatgctattatttcatatttgtaacataccaatcttttaaagacaaattttttatgtaattcagtcacagttgctgaataatttataatc

SEQ ID NO: 855580 - DNA, 120 bp, Artificial Sequence
  ENSG00000247081_68 (sequence is synthesized)
gctcatctgccaagcaggggtaatctgaccccatgaggttgccacaagtattcaattagttttattttacagttagaacagtggctggctgaagaagtaaaatatacaagtatttgttat

SEQ ID NO: 855581 - DNA, 120 bp, Artificial Sequence
  ENSG00000247081_69 (sequence is synthesized)
gcaaaaacaaataagtcataaatctccatcttataggtaagaaaatgcattctggtttttgttctgttgctgacaaactatgggacttcaggcaaggctgtgaaactcttgggtcttgat

SEQ ID NO: 855582 - DNA, 120 bp, Artificial Sequence
  ENSG00000247081_70 (sequence is synthesized)
tgcctcctaaaaacctcagcgtttgtactcaatgattatttggatcctttttcagctccaagcttcttccaatgaatggaacataatttctttgtagcttttccttcaccttactcccct

SEQ ID NO: 855583 - DNA, 120 bp, Artificial Sequence
  ENSG00000247081_71 (sequence is synthesized)
tgtgctcataatctagggattttaacagaaggggagtttgtaaaggaacaggggcattttgggttgtcttgatgacaaggggaccatactgcatttggtaggagcgtgaagggatgctta

SEQ ID NO: 855584 - DNA, 120 bp, Artificial Sequence
  ENSG00000247081_72 (sequence is synthesized)
gtgtttagcaacgcttgctgcagtcccacccaagatgccaatggctctcctgtagaaaatacagtcagcttcagaacgctggtagaaatcatgatgtaacacagaaatgcaaagggaagg

SEQ ID NO: 855585 - DNA, 120 bp, Artificial Sequence
  ENSG00000247081_73 (sequence is synthesized)
ttttctgtcaaagttgtggagccacccagccatgaaaccatgcaaactgtggccagactgctatgcttccatattatcatgcagctaaacagtcacacaattatgcagctatgcaaccac

SEQ ID NO: 855586 - DNA, 120 bp, Artificial Sequence
  ENSG00000247081_74 (sequence is synthesized)
acagctggatgtccatggagccatgccccaaatcccacagttttgaaaccaagcaatagcctatcacattcttcaaatgcaagacagataccaaagttagtgtgttcctacttgtcagtc

SEQ ID NO: 855587 - DNA, 120 bp, Artificial Sequence
  ENSG00000247081_75 (sequence is synthesized)
tcagacaacagtaatggcaagcctttttaggggacaggtaatgagcaagacccaattcctgactccaagaaacactcatctggggaagggcagacctgtgcacatgtgcacaaggctgac

SEQ ID NO: 855588 - DNA, 120 bp, Artificial Sequence
  ENSG00000247081_76 (sequence is synthesized)
catacagcagtggaaatagcaatgagaagaaaaggcgtatggggaaaacagagattcgttccacttggggagggcctagggaggctttgcagaggggtggcttttgggttagatttgtac

SEQ ID NO: 855589 - DNA, 120 bp, Artificial Sequence
  ENSG00000247081_77 (sequence is synthesized)
aatgagtaagggtgaaggtaaaatgttccatcggaggaagttgcaagactaaatacatagagaaggaaggaaagggcaggcctagtgaggactcaatagtgtggtattggtaggaataga

SEQ ID NO: 855590 - DNA, 120 bp, Artificial Sequence
  ENSG00000247081_78 (sequence is synthesized)
agactcagacctgatggctgaaggcctggaatgccatgccaagaatttcatcatttgtctagtaggaaatagtggtcatgaaatattattgggcacaagagtgacacgatcacatccatc

SEQ ID NO: 855591 - DNA, 120 bp, Artificial Sequence
  ENSG00000247081_79 (sequence is synthesized)
ctccagaaagactctttggcaggaatgtgagaaatgaactgaagaaaagtcagaagtaaacgagaggtttagaggttccagtgcagacacacaatcctatccctgcttccgttgacactg

SEQ ID NO: 855592 - DNA, 120 bp, Artificial Sequence
  ENSG00000247081_80 (sequence is synthesized)
tttcccccagttactttcacctcactctgtgcctcaatcacattaagcccattcctgtctcagggcctttgcactactgggggcccctcctggagcactctatcccctaatgctcacaaa

SEQ ID NO: 855593 - DNA, 120 bp, Artificial Sequence
  ENSG00000247081_81 (sequence is synthesized)
gcagctcctgctcttcactcacaagttagctccttcctcaaagacccctcgccttaccacccaatctgctaggcttccccatctccagtcactctctattttattatcttggttttcttc

SEQ ID NO: 855594 - DNA, 120 bp, Artificial Sequence
  ENSG00000247081_82 (sequence is synthesized)
acggtgcttaccaatgtctgaaattgccttggttatttctttctctacccatcaccattagctcaaacccaaatgtaagctctgagagaagaatcttggtcttgtccactgctccagccc

SEQ ID NO: 855595 - DNA, 120 bp, Artificial Sequence
  ENSG00000247081_83 (sequence is synthesized)
cagcatctaaaacagcactcactctagggtgggtgctgaagaatatttgtgggaaggaaggaaggaaggattttctgtgtgataaatacacaaaattcaactgagcttgtgattttgtaa

SEQ ID NO: 855596 - DNA, 120 bp, Artificial Sequence
  ENSG00000247081_84 (sequence is synthesized)
gagacacacatggagcaataggggaggaagggaatgactgcctagccaccaagatgcccccacattcaggaagggcagtggtaggtgatttgaaggggagcattaatgagggcctgaact

SEQ ID NO: 855597 - DNA, 120 bp, Artificial Sequence
  ENSG00000247081_85 (sequence is synthesized)
agggcagcagttgggcctggaaagaaaggaacaattcactgcaaccattcatttcagagacagactgtagaagttggtgcctgattagatgtgcagagaaagataggaataagacaaaaa

SEQ ID NO: 855598 - DNA, 120 bp, Artificial Sequence
  ENSG00000247081_86 (sequence is synthesized)
taaccccaaagtcttacacctgaacaaccagagatgattctgatgaacagagagggatggcaccatagggtgggcaggtgtgagggacaagaggttaatttggtttggggcaagttgaat

SEQ ID NO: 855599 - DNA, 120 bp, Artificial Sequence
  ENSG00000247081_87 (sequence is synthesized)
ttgaggaacttggctgacagtatttggatgccttgtgatggttggaaatgtggtctggaatcaagagcagatatggcggggagcagccactgggaggataacgtcagcagcaggtgagtc

SEQ ID NO: 855600 - DNA, 120 bp, Artificial Sequence
  ENSG00000247081_88 (sequence is synthesized)
ttctgggagagcctgctggataagagaagagaactgggcaagggcgtgaagagacgtgggtagagcatgggacaaatcatgaaagaggaactaaaaaagaggacgaggcagagaagacat

SEQ ID NO: 855601 - DNA, 120 bp, Artificial Sequence
  ENSG00000247081_89 (sequence is synthesized)
aatcagaggtggaagggaaatggtggtgtagggaaactgagggagaaggtccatttccaaaatgtggagtaagggtaggcagaggagattggccaggtcagtggtgctgaaagctgcaga

SEQ ID NO: 855602 - DNA, 120 bp, Artificial Sequence
  ENSG00000247081_90 (sequence is synthesized)
aagggacatgggcgctgactctccatttacaaggtaattggtactctttgtgataagagtttcagtagattaataggaatggaaattccctgtaacatgtgcaggaatctatctggaccc

SEQ ID NO: 855603 - DNA, 120 bp, Artificial Sequence
  ENSG00000247081_91 (sequence is synthesized)
atttgcttctccccagtgagacttgggggaacagggactgatgcaaatatgctaatgctcaaaaggtttgctatgctacagttgtaacgtcctttgtttctgaccctggagtctcgtgtc

SEQ ID NO: 855604 - DNA, 120 bp, Artificial Sequence
  ENSG00000247081_92 (sequence is synthesized)
ttaccagtattcaagaaactgtgacgggctaacttgtagggtaaaatctcaggtcctttatagttattattaaaactaccatgcttttctagaaacttgccattcctccattaagaagtg

SEQ ID NO: 855605 - DNA, 120 bp, Artificial Sequence
  ENSG00000247081_93 (sequence is synthesized)
gagtctgattcccctccttttaaatctgggcaggcttgtgactcatttataaccaatagaatacaggagaaataaactgtataatttccgagactaggacataaaaggcaatgcagcttc

SEQ ID NO: 855606 - DNA, 120 bp, Artificial Sequence
  ENSG00000247081_94 (sequence is synthesized)
taccttgctaactggggcttgcactggagttctgagcagttatgcaaacatgctgactgccctgggccaccatgctgtgaggaagcccaaactagcccttgcagaaagagcatatggaga

SEQ ID NO: 855607 - DNA, 120 bp, Artificial Sequence
  ENSG00000247081_95 (sequence is synthesized)
agtgctgggactgtaccgagagagatgcccaaccagtcccagctgttccatctgacagcaaaaccccagcaattttattcaacaaataacttcaggtttttgcttttcaactttttgctt

SEQ ID NO: 855608 - DNA, 120 bp, Artificial Sequence
  ENSG00000247081_96 (sequence is synthesized)
ttagactttttgcttttcaaaatatctcagtcaccttcaaaggatgaagatttacaactagtgaatatggtcaaaagaacaggcccaagctgggcatggtggctcattcctgtaatccca

SEQ ID NO: 855609 - DNA, 120 bp, Artificial Sequence
  ENSG00000247081_97 (sequence is synthesized)
aggcccaagctgggcatggtggctcattcctgtaatcccaacacttccggaggccaaggtgggagaattgcttcagcccaggagttggagaccagcatgggcaacatggcaaaaccccat

SEQ ID NO: 855610 - DNA, 84 bp, Artificial Sequence
  ENSG00000247081_98 (sequence is synthesized)
ctaaaaactgcttgagactaggagatcaaggctgcagtgaaccttgatcgtatcactgtgcttcagcctgggtgacagagcaaa

SEQ ID NO: 855611 - DNA, 120 bp, Artificial Sequence
  ENSG00000247081_99 (sequence is synthesized)
aatatgcctgcccaattctagcatgcagtattaggaagcccactgttgctgtgcacctaagcccaggttttccagtatcagctcttttagtaataaagttggcattgtagtttctagcta

SEQ ID NO: 855612 - DNA, 120 bp, Artificial Sequence
  ENSG00000247081_100 (sequence is synthesized)
ctttgctttcctgtatagccaggtctgttatcagacccttatcttgggaggcatcgtgccagagcctggggcaagaaagggctgctatccaggaatgcaggtgaaattatagctattagc

SEQ ID NO: 855613 - DNA, 120 bp, Artificial Sequence
  ENSG00000247081_101 (sequence is synthesized)
cctgtcttagagtgtgaggaaaatgtgcccccctacccctggctaagtttgggttcccatgtcataaactgcctccctctctgatagctctgcataaacatcccaggaactcaaagtaac

SEQ ID NO: 855614 - DNA, 120 bp, Artificial Sequence
  ENSG00000247081_102 (sequence is synthesized)
atttgatttcccaaagagaacatttgcatttgtaactgtcagaaataggagagatcatcaaagctaaatgaattgggctataaacagtttgaaatatgtctttaaattttaaaaaacata

SEQ ID NO: 855615 - DNA, 120 bp, Artificial Sequence
  ENSG00000247081_103 (sequence is synthesized)
ttttttgtttgttttggggagagaggatcatttagactcaacaacaaaacagaaaactgtgagtgccattttgagacaagacctacctggtccttccccctcatactttctgctaccccg

SEQ ID NO: 855616 - DNA, 120 bp, Artificial Sequence
  ENSG00000247081_104 (sequence is synthesized)
agaggtgcctcccttccttgaaacttcttcacctttgcttcaagagcaccacagagcagattcttcaaggcagagatatacaagaatccctgtggaaaacctcatgaactcaaggtcatg

SEQ ID NO: 855617 - DNA, 120 bp, Artificial Sequence
  ENSG00000247081_105 (sequence is synthesized)
acccagggcttggcagtttctgtcctagaaatcagaacacgcagctcatgcatcaccgagaaggtggtcagcctaagaagtggttccccactctttgttctaagatattcctctctcaga

SEQ ID NO: 855618 - DNA, 120 bp, Artificial Sequence
  ENSG00000247081_106 (sequence is synthesized)
gttttggagttttaaatgtgtggtcctgagagggagaggagagcaagagaatctcaagatagatttggaagattagggtaagacagtgagggtactagaagtgctttcccaagtgagtcc

SEQ ID NO: 855619 - DNA, 120 bp, Artificial Sequence
  ENSG00000247081_107 (sequence is synthesized)
ccagaagggagggaaaatatccatggagaaggggcagtgtggttggtcctggctaaagggcctgaacagcagaggctattgcagccctgcatagcacagggcaatggaataacttcatag

SEQ ID NO: 855620 - DNA, 120 bp, Artificial Sequence
  ENSG00000247081_108 (sequence is synthesized)
gcccccaaactgcatggaagcagatagggtcttagaagcacggggttgctttcctggacctggtgtggcttggaagccacaaaatgtttcctgtgcacctacaagagtgtaagaaaacca

SEQ ID NO: 855621 - DNA, 120 bp, Artificial Sequence
  ENSG00000247081_109 (sequence is synthesized)
tggaatgagtcatcatgcagaccaaagtctacctcagtggatggcagtgtggatggatagggacagatgtccggatactgtctgtcgtgtgcactcccaccccagccttttggtattcct

SEQ ID NO: 855622 - DNA, 120 bp, Artificial Sequence
  ENSG00000247081_110 (sequence is synthesized)
ggtacaaagatataactcttaggaaaaacagaaaccctaaataggctgagattaagtttctttcacctggaagaatgaagactatggtagattttgagttataaaactcaaatttttgca

SEQ ID NO: 855623 - DNA, 120 bp, Artificial Sequence
  ENSG00000247081_111 (sequence is synthesized)
tttcttgaacacctaagtctatggactgatattagcaccagctgcagaaataagcacagttctcaccacttttcaatttgaatgcagaaggagccttgtctggccatagctctgccctct

SEQ ID NO: 855624 - DNA, 120 bp, Artificial Sequence
  ENSG00000247081_112 (sequence is synthesized)
acagtggaaaacataactttagtggaatttagagatctttgagtaaagacagaagaatagcaaagtctgttatttaccacctcactttttttgtacaaatatttgaaagcattttcgcat

SEQ ID NO: 855625 - DNA, 120 bp, Artificial Sequence
  ENSG00000247081_113 (sequence is synthesized)
tatacaatacaatttgtttctattttgaggcaaacacatctgttagaggaattattgcatttcttccccctagaaagctgtctccttaatctttccacaaagtcttgagaatgttagctt

SEQ ID NO: 855626 - DNA, 120 bp, Artificial Sequence
  ENSG00000247081_114 (sequence is synthesized)
ctttttctacattgttggaaatcacagcgtggtgttcctcctgacggcactcccaccttcatcattctgtgcttacagtttcaccacattccattgttctaatgaggtgactgagtggaa

SEQ ID NO: 855627 - DNA, 120 bp, Artificial Sequence
  ENSG00000247081_115 (sequence is synthesized)
gctgaggttagaagataaaacttagaacaggagcagcccttggctcctttcccttggagggtgcttcaaaagaggtgaagttttcaaagatagaacttcagggagagggttttgtgttcc

SEQ ID NO: 855628 - DNA, 120 bp, Artificial Sequence
  ENSG00000247081_116 (sequence is synthesized)
ggcttcgaagtggcaattctttcctgagttgtcacctggactatcttaccatatttcctggttgaatgattcctctaaatcttatcttagcctggccaaatatccctggtccctttgata

SEQ ID NO: 855629 - DNA, 120 bp, Artificial Sequence
  ENSG00000247081_117 (sequence is synthesized)
tctaagttttctggccaagaagcaaattcctgtagttccaaatcagtagctcaagttcctgggtcagactacccgcaggccctcaagttgctgtctggttgtcgtctaaaaagttgatgt

SEQ ID NO: 855630 - DNA, 120 bp, Artificial Sequence
  ENSG00000247081_118 (sequence is synthesized)
cacaggccagttgatatcaaagagtcctgggtttaaaaactgactcaggacttctaattgtaaggccttacacaagttatgtgacaattcttaacctaagtttcctcagctataaagtgg

SEQ ID NO: 855631 - DNA, 120 bp, Artificial Sequence
  ENSG00000247081_119 (sequence is synthesized)
ggattatagcaatatcccacaatacctctgacaatgaaataatgtgtatatattgcttggcaccggatatggtttggatctgtatccccatccaaatctcatgttgaaatgtaatctgtt

SEQ ID NO: 855632 - DNA, 120 bp, Artificial Sequence
  ENSG00000247081_120 (sequence is synthesized)
atgttggaggtgggacctggtgggaggtgattgaatcatgggggtggtttctaatggtttatcactgtctccctagagctgttctcatgatagagttctcgtgagatctggttgtctaaa

SEQ ID NO: 855633 - DNA, 120 bp, Artificial Sequence
  ENSG00000247081_121 (sequence is synthesized)
tctcgtgagatctggttgtctaaaagtgtgtggcacctccccaccccacttttcctcctgctccagcaatgttcaatgtgcctgcttcctgttcaccttctgccatgattgtaagtttcc

SEQ ID NO: 855634 - DNA, 120 bp, Artificial Sequence
  ENSG00000247081_122 (sequence is synthesized)
taaacctcttttctttataaattgcccagcctcaggtattctttatagcagtacaagaaccaatacagcacctaataggcattcaacaaatagtaattccctgctccttctgcctaagca

SEQ ID NO: 855635 - DNA, 120 bp, Artificial Sequence
  ENSG00000247081_123 (sequence is synthesized)
gtaattccctgctccttctgcctaagcagacatgcatgggtttgtgtatctaaactgtaggactttacaaagactaaaatggaattttttgaggcatttcactataatcaataaaataaa

SEQ ID NO: 855636 - DNA, 120 bp, Artificial Sequence
  ENSG00000247081_124 (sequence is synthesized)
agatcttcaaaccaggtaagccctgccagcttttgtccctccactcctttctccaatccagagttccttgctgccaaaggaagaatttgtgggaagaggaaactcttctctctcgttgct

SEQ ID NO: 855637 - DNA, 120 bp, Artificial Sequence
  ENSG00000247081_125 (sequence is synthesized)
attcggggagcctggtcaccaactggatgctcaggggagatggaaccctgagcagcccatgtacatggaagatctttattgcagagatcttcaaaccagagatatacaagaatccctgtg

SEQ ID NO: 855638 - DNA, 61 bp, Artificial Sequence
  ENSG00000247081_126 (sequence is synthesized)
tattcctctctcagaaaccacgtctgttttcaactttttttttttttagacagtctcactc

SEQ ID NO: 855639 - DNA, 120 bp, Artificial Sequence
  ENSG00000205930_0 (sequence is synthesized)
gttgtccctcagacggcgctgctgcagtgcgtcttcgcacttacgcggagcggtaatgtgaggaagcctcccgccaaacagatgagggaggaggaggaggggagaggccagagagagaag

SEQ ID NO: 855640 - DNA, 120 bp, Artificial Sequence
  ENSG00000205930_1 (sequence is synthesized)
cggctttcgggaaggaaagtgtgatctagtgctgatccttttagaggcagccgtggaagaggaaaagagatcagaagagaaaaggatattggtttgcggaacatgtgggacaagaagttc

SEQ ID NO: 855641 - DNA, 120 bp, Artificial Sequence
  ENSG00000205930_2 (sequence is synthesized)
ccagaagaatttgtgagcaacttcccgacagtaaggccctggctagacctcaggatggtccctgcctcctggacattaggaagcccaaaggccagaacaaaaacacatgcctagtggggg

SEQ ID NO: 855642 - DNA, 120 bp, Artificial Sequence
  ENSG00000205930_3 (sequence is synthesized)
ggctgccacagaaatgctagttggaaattttcctccttcagtctatcatgaatttcttttttctcttttgagatgaagtcgcccgggctgcagttcagtggtgcaatctcagctcactgc

SEQ ID NO: 855643 - DNA, 120 bp, Artificial Sequence
  ENSG00000205930_4 (sequence is synthesized)
cctcccaggttccaacgattgtcttgtctcagcctcctgagtagctgagattataagcacgcaccatcatacccgactaatttttgtatttatagtagaaatggggttttgccatgttgg

SEQ ID NO: 855644 - DNA, 79 bp, Artificial Sequence
  ENSG00000205930_5 (sequence is synthesized)
tgtaccgtgattattagttcaaggttctctttcactggggtaaagaccttaagagagcagtttttgggctttatattct

SEQ ID NO: 855645 - DNA, 120 bp, Artificial Sequence
  ENSG00000205930_6 (sequence is synthesized)
gtaaagaccttaagagagcagtttttgggctttatattctcaatttcccgcacagtgcctagcacatagcaaggactcaacaaatttcattgaatgaatgaaaaaacatagtttaccaaa

SEQ ID NO: 855646 - DNA, 120 bp, Artificial Sequence
  ENSG00000205930_7 (sequence is synthesized)
aaactttgacctgaggccttaaattccacaacctcatcatctaccacctttggtgctttcagaatcatgactctcaatgttgaagaatgggctactgcatggaaggtgctgatcctttta

SEQ ID NO: 855647 - DNA, 120 bp, Artificial Sequence
  ENSG00000205930_8 (sequence is synthesized)
aatagtcctctccaaactttgacctgaggtgtgactattgaatgaccctctatttggatttggattacacaaagtttaacgttttttggaaaaatcctacctaggtaatgtgtagttctc

SEQ ID NO: 855648 - DNA, 120 bp, Artificial Sequence
  ENSG00000205930_9 (sequence is synthesized)
actgttggacttcatttctgagcttctggtagtgaagtggtaccatgtgattgagttctggccaatggaatatggtggaagattccacgaaggaaccgacggccctagaagatggcagaa

SEQ ID NO: 855649 - DNA, 120 bp, Artificial Sequence
  ENSG00000205930_10 (sequence is synthesized)
ggcattagtctgtgatgtaagggaggaacagatctcaattactctaagccactgatatcttgaagtttgtcaaagcagctagcctaccctgctagctgggtacaatacagcaggtgctaa

SEQ ID NO: 855650 - DNA, 120 bp, Artificial Sequence
  ENSG00000205930_11 (sequence is synthesized)
tattgctttgcaacttaggatttttacatcctcttttctcaaaagaaaatgagaaatcaacatttagaggacatttattggatgccaggcaaatggcctaagtcatggggaagcaaaaat

SEQ ID NO: 855651 - DNA, 120 bp, Artificial Sequence
  ENSG00000205930_12 (sequence is synthesized)
gaagaagatatcatccatgccctcaagggacttgaagtgtgcccagagaacttggaatgtactctgggaacaaacaactgggcaactaattataagacaatgtgattggtagttcttaaa

SEQ ID NO: 855652 - DNA, 68 bp, Artificial Sequence
  ENSG00000205930_13 (sequence is synthesized)
ggcaactaattataagacaatgtgattggtagttcttaaagatgcagatggaggccaggcacatctga

SEQ ID NO: 855653 - DNA, 120 bp, Artificial Sequence
  ENSG00000205930_14 (sequence is synthesized)
gagtcttcggcacatatgatgtcctctattgatgtttgctgaatagatgaggatgccaaaagagggaggagataccaaaagagggaaagaaggacacccagaagacaaatggtgctcacc

SEQ ID NO: 855654 - DNA, 120 bp, Artificial Sequence
  ENSG00000205930_15 (sequence is synthesized)
ttgagcctcgaggtctttaggaaaacggtgactctggagcacagccctggatccctgatggcaggtggatgaatctgctccccacctggatgctgctagtcctttctccaggctccgtga

SEQ ID NO: 855655 - DNA, 120 bp, Artificial Sequence
  ENSG00000205930_16 (sequence is synthesized)
ctgaaaatgtgctttacttggcaaaagctgtttctcctcagaactctagaaatcagatcttggcccacctctttcaggctgcacaggaagtgttgtactgacatctgcttctggtgaggc

SEQ ID NO: 855656 - DNA, 120 bp, Artificial Sequence
  ENSG00000205930_17 (sequence is synthesized)
ctcaggaagcttccactggtggcggaaggtgaagaggaagccagcatttgcaagaaaaatctgaagttaagttttgcttatgtttgcaatcaagcaaggtttaggtcacttaagaggcct

SEQ ID NO: 855657 - DNA, 120 bp, Artificial Sequence
  ENSG00000205930_18 (sequence is synthesized)
aacttgttttgtctgctcagagattcttcaggcctgacctccactttaatttacttgaagagcatcgaatatgaatctgcagaatttcagtgaaactatagaggaagaatggaggaggtg

SEQ ID NO: 855658 - DNA, 120 bp, Artificial Sequence
  ENSG00000205930_19 (sequence is synthesized)
cgggctggttcctaacgagcaagaagaaacctggaggacactttggtttcatcaagcaacacttgccaccaggaaggcgttgagtgccaattccacacccaatacccccagagaggctag

SEQ ID NO: 855659 - DNA, 120 bp, Artificial Sequence
  ENSG00000205930_20 (sequence is synthesized)
aggactcaatcaaagtcacataaggggaagaaccagttagtgacagagtccatttccaccatttgaagccgcatttgtgacccttcaccagctgcttccttgagcttggtgaacacatgg

SEQ ID NO: 855660 - DNA, 120 bp, Artificial Sequence
  ENSG00000205930_21 (sequence is synthesized)
cctcgctgtcttctctgcgtcactgggactatcttctgtgatcactgaagatgatggttgtgaataatggtggcatcaggaaagtgcggtggcggccacttactgggagttactgggagc

SEQ ID NO: 855661 - DNA, 120 bp, Artificial Sequence
  ENSG00000205930_22 (sequence is synthesized)
ttactgtgtgccaggcatggtgctaaacccctgcttgtgttgtccacgtggcaggaattatcatcatttcacagattaacagacgtaggtgcaaaaggctaagccatttgcccaggtcac

SEQ ID NO: 855662 - DNA, 120 bp, Artificial Sequence
  ENSG00000205930_23 (sequence is synthesized)
aaacaattgttggggctggaaatgaggcctcctgtgtgactcacatccatgcatttacctgccagctcctctccccagggctctgcttctgtaactctcagttggcaggtggagaccctc

SEQ ID NO: 855663 - DNA, 75 bp, Artificial Sequence
  ENSG00000205930_24 (sequence is synthesized)
ctctgcttctgtaactctcagttggcaggtggagaccctccctaaatgattgatagccaggtttcctttgaaaag

SEQ ID NO: 855664 - DNA, 120 bp, Artificial Sequence
  ENSG00000205930_25 (sequence is synthesized)
caggtgggaggtaattgaatcatgggggctgtaaccctcatgctgttctcgcggtagtgagttctcccgagatctgatggttttataaggggcgtttccccccttgctcggcacttctcc

SEQ ID NO: 855665 - DNA, 80 bp, Artificial Sequence
  ENSG00000205930_26 (sequence is synthesized)
tgtatgtgtttgtcatggagacacatggggtatccattcccacaagcatttatcatttgtgttacaaacaatccaattac

SEQ ID NO: 855666 - DNA, 120 bp, Artificial Sequence
  ENSG00000205930_27 (sequence is synthesized)
acaattcagttattggctatggtcacccctggtaagtttaatcactcagttatggacctttctccattgtaaaggtcctacttgtagttaataagtaatctgtggaatgatgataatttt

SEQ ID NO: 855667 - DNA, 120 bp, Artificial Sequence
  ENSG00000205930_28 (sequence is synthesized)
agactgtgtaaatattcctcagaatttcaaccaatcattttagcatccattaatgattcttttcagaattcatgattactatagcatttgcaaaatggtaatttggtattactctctatt

SEQ ID NO: 855668 - DNA, 120 bp, Artificial Sequence
  ENSG00000205930_29 (sequence is synthesized)
actccttctaaatttattagttgccaatgttctgtaaatcagactttctcttcttctttcccactttttatttttttactttttttagtgacagtacagactcatggagtctttttcaaa

SEQ ID NO: 855669 - DNA, 120 bp, Artificial Sequence
  ENSG00000205930_30 (sequence is synthesized)
tcaatatgctaaaatccatttctgtaattgatcgttttgatgttcatattgtccctaatttggccagtagaactgtctgcgatgggttctgcattctcttgctacatctccatcaacttt

SEQ ID NO: 855670 - DNA, 120 bp, Artificial Sequence
  ENSG00000205930_31 (sequence is synthesized)
ttgaccttatcttactttctgtcacagtaagatgtttcaagctcactttatgtttttgtttctccagacccctggaatcagccatttcttcaaaaccctattttttgtttgtttgtttgt

SEQ ID NO: 855671 - DNA, 120 bp, Artificial Sequence
  ENSG00000205930_32 (sequence is synthesized)
tttaatggggaatggtgttgagaaaccacaatttaggtgtcaggtgtgttctttgccacaggggtgtcattgcttctaggctttctcagaggataaagctaagacatatgtcttaaaaag

SEQ ID NO: 855672 - DNA, 85 bp, Artificial Sequence
  ENSG00000205930_33 (sequence is synthesized)
ttaaaaagcatgagtttggaacaagggaggattgcttgagcctacgagttcgagacctgcctgggcaacatagtgagaccttgtc

SEQ ID NO: 855673 - DNA, 120 bp, Artificial Sequence
  ENSG00000205930_34 (sequence is synthesized)
acagagcaacaccctgtctcaaaaaaaaagaaaaaaaaagtgatgagtttgcactgatacctttaattccaatccaacatcccaggcttctgctccttccctcacttcatatttcctacc

SEQ ID NO: 855674 - DNA, 120 bp, Artificial Sequence
  ENSG00000205930_35 (sequence is synthesized)
ttccctcacttcatatttcctaccattacaactctggatggacctccaaaaatttgagtgtatttactcttttgcacaatcctacaaagtggttttagaattgttgtaccaatattatca

SEQ ID NO: 855675 - DNA, 120 bp, Artificial Sequence
  ENSG00000205930_36 (sequence is synthesized)
ccaccaacaagcctactaaagtttataatttctttgcatttttaaaaactaacagtgttttatttctttcataaaaaatcttaaatgtggcaaaatgttcatatttgtcaattctggatg

SEQ ID NO: 855676 - DNA, 120 bp, Artificial Sequence
  ENSG00000205930_37 (sequence is synthesized)
ataattacatgagtgttagtcatattattcattcttttctttttaaaaaattcttattgaagtatagaatgcatacagaaaagtgcatttattgtacatgaagagctaaatgaattttta

SEQ ID NO: 855677 - DNA, 120 bp, Artificial Sequence
  ENSG00000205930_38 (sequence is synthesized)
ctaactggcatatgtgtatgtgtgtgtgtggggtgcttctctatgtagatatacaaaaatataaatgttgttttctagcttgtgtaaattttaagacacattcctaaattgtacttcaaa

SEQ ID NO: 855678 - DNA, 120 bp, Artificial Sequence
  ENSG00000205930_39 (sequence is synthesized)
gtgactgtaccagtttattctcttaaatagagactatttgcctacaggcatgacaaaatggaatatcaaataactttactttttgccaatctagtggatgaaatattagtttcctgttgc

SEQ ID NO: 855679 - DNA, 120 bp, Artificial Sequence
  ENSG00000205930_40 (sequence is synthesized)
atttctctgggtagaggtaatttttttgttgttcagttattggctacttgttttcatcttaaagtgaattgcatgcttatttcatcgtttttctattagattgttagtctctttgttttc

SEQ ID NO: 855680 - DNA, 120 bp, Artificial Sequence
  ENSG00000205930_41 (sequence is synthesized)
tactttaatactatctaatttaacattatgagatttgtcttggggtaagactgtaactttaagcagtaagcacttgttccagcatcatttgtttatttatgtaaaaatgggctgggcatg

SEQ ID NO: 855681 - DNA, 120 bp, Artificial Sequence
  ENSG00000205930_42 (sequence is synthesized)
ggcaagactcagtctctccaaaattgcaaaattagccagacgtggtggtgtgcacctgtagtcccaactactcaagaggcctaggtggaaggaccgcttgagcccaggaggcagaggttg

SEQ ID NO: 855682 - DNA, 120 bp, Artificial Sequence
  ENSG00000205930_43 (sequence is synthesized)
agtgagaccttgtctcaaaaaaataaaaataaaatatgtatgtagaaatgctcttattgggttttctctattatgaaagtgattttgtgtgttttaaattttatttgtataaacttatgg

SEQ ID NO: 855683 - DNA, 120 bp, Artificial Sequence
  ENSG00000205930_44 (sequence is synthesized)
ttgtgtgttttaaattttatttgtataaacttatggggcataagtgcaattttgttacatggatatattacataatggtgaagtcagggtttttcgtgtgtccatcactggaataatgta

SEQ ID NO: 855684 - DNA, 120 bp, Artificial Sequence
  ENSG00000205930_45 (sequence is synthesized)
ccttgtgtccattaagtaatttctcatcatctactccctgctctttcaagtcttgattatatgtttattcaaaaaataaatatatctcccagtaaataaatatttctcccagataggtag

SEQ ID NO: 855685 - DNA, 120 bp, Artificial Sequence
  ENSG00000205930_46 (sequence is synthesized)
aaaataagaattgcccccataccatcaccacatatgatactgtttttagtgtgcgtcctagtctgttttttattttttgttgttgttttgtgtgtgtgtgcttctaacaccctcaattga

SEQ ID NO: 855686 - DNA, 120 bp, Artificial Sequence
  ENSG00000205930_47 (sequence is synthesized)
cttaatttccctttccattttttttaatgattttactattagcaagtacttttttttttttttttagtttaggatctgtctttgaggcatccttcctgctgtatttgtctatctatggtg

SEQ ID NO: 855687 - DNA, 120 bp, Artificial Sequence
  ENSG00000205930_48 (sequence is synthesized)
ccatttatattgtcttacaattgtctttaggagaaatgtactctctgtagagccagctctccctcattgctttcctagagtctgggtaggataaacatgaccttgtgcaacattttgagt

SEQ ID NO: 855688 - DNA, 88 bp, Artificial Sequence
  ENSG00000205930_49 (sequence is synthesized)
tctgggtaggataaacatgaccttgtgcaacattttgagttgtgactctgtattagtttgttctcacactgctaataaagacacacat

SEQ ID NO: 855689 - DNA, 120 bp, Artificial Sequence
  ENSG00000205930_50 (sequence is synthesized)
tcatggctgaaggtgaatgaggagcaaagtcacgtcttatatggtggcaggcaagagtgtgtgtgcaggggaactccccttaataaaaccatcagatcttataagaactcactatcatga

SEQ ID NO: 855690 - DNA, 86 bp, Artificial Sequence
  ENSG00000205930_51 (sequence is synthesized)
cagatcttataagaactcccatgattcaattacctctcaccaggtacctcccacaacctgtgggaattgtgggagctacaattcaa

SEQ ID NO: 855691 - DNA, 120 bp, Artificial Sequence
  ENSG00000205930_52 (sequence is synthesized)
ccatatcagactctgttaaatgaaaaagcctccgtacatcattattcttgtaacaaatcacatccaatttacaagtgttctgtaaattctggagaaacagaggccctgaagttattcgtg

SEQ ID NO: 855692 - DNA, 120 bp, Artificial Sequence
  ENSG00000205930_53 (sequence is synthesized)
agcaagtctgggaaatggaaatggaggttccaattcctgtttttactaatttaatgtgtataaaatgttatctatatcttttcttcattcctttgttccttcctttcttttgagggactt

SEQ ID NO: 855693 - DNA, 120 bp, Artificial Sequence
  ENSG00000205930_54 (sequence is synthesized)
tcataggttcattcaagagttttaacccctaactcatttttctcacaaggccttaaattccacaacctcatcatctaccacctttggtgctttcagaatcatgactctcaatgttgaaga

SEQ ID NO: 855694 - DNA, 120 bp, Artificial Sequence
  ENSG00000205930_55 (sequence is synthesized)
atgggctactgcatggaaggtgggtgcaaacccctaaaatttccacccctggttctggaaagtgagaaattggggatttcaatactgcaagccatccttcacattctaaactcattgtct

SEQ ID NO: 855695 - DNA, 120 bp, Artificial Sequence
  ENSG00000205930_56 (sequence is synthesized)
ttacttagttccgtcagcatttctttcttccagtcagtggggtattggcatggacttgtactggctcataagagctgattggtaagttttcaggaatttgcaagctggttgttaagcaca

SEQ ID NO: 855696 - DNA, 120 bp, Artificial Sequence
  ENSG00000205930_57 (sequence is synthesized)
taagcacagtcattattgaaagcaaattatgtaaacttacaattaaataaattatatcaaaaccaaaaataataaatactcagaacttatcacttcctaattattttacttcactttact

SEQ ID NO: 855697 - DNA, 120 bp, Artificial Sequence
  ENSG00000205930_58 (sequence is synthesized)
tgcttttggggttagttgtgcctgttgtataggtagggtggaaatactatataatgctgccctattgtatgtcttttctcaactccatgttctcttggtagcatgaaattgggttatggt

SEQ ID NO: 855698 - DNA, 120 bp, Artificial Sequence
  ENSG00000205930_59 (sequence is synthesized)
ggcagtatttacaccactacatatcagagtgtgatttatgattttgttgagtgtgatggagaaaatgttaacgatgcagattaaacttaaaagtgtgtcatgtccatagcccttacattg

SEQ ID NO: 855699 - DNA, 120 bp, Artificial Sequence
  ENSG00000205930_60 (sequence is synthesized)
tgaatagtccccatacatgagaaaatattcctccagtatttgaaaactattatttgattcagcaaagaagttgctttcatcactgactagcaagtgacattctcacatatatctttgttg

SEQ ID NO: 855700 - DNA, 120 bp, Artificial Sequence
  ENSG00000205930_61 (sequence is synthesized)
tttaactttcctcttacttctaacataaatgaaaatctcaaccaatatttataccaaaactatacatgctcatcagttgcaaccctaggttggctttgtgtacaagagtttggcaaaaat

SEQ ID NO: 855701 - DNA, 120 bp, Artificial Sequence
  ENSG00000205930_62 (sequence is synthesized)
caaagcattctttgagaactaatgatgtacaaagagtatataataaagagtaatctatagtttattatcatttgtaaattgtgtgctacacattctttacatccgtaaaattgaaataaa

SEQ ID NO: 855702 - DNA, 120 bp, Artificial Sequence
  ENSG00000205930_63 (sequence is synthesized)
aaaaaataaaaaaataaacaaaataaactgctcacttatttgaaaaattaaggaaggatttcaggcatggcttgatccagctactcaaaaaaggttgtcagaaatgtctgtccgttcttc

SEQ ID NO: 855703 - DNA, 120 bp, Artificial Sequence
  ENSG00000205930_64 (sequence is synthesized)
cgttcttcatttattctttctcatttgtgggctttgttcccagataagatcactccttctggggacaagatggtcactagtagatccaggtttactttctatcagctgagcaacctctca

SEQ ID NO: 855704 - DNA, 120 bp, Artificial Sequence
  ENSG00000205930_65 (sequence is synthesized)
tccaggtttactttctatcagctgagcaacctctcaagaaaaaataaataaataaataaacctctctttaaatagcaccaggctgctgggtgtggtggctcatacctgtaaccccagcac

SEQ ID NO: 855705 - DNA, 120 bp, Artificial Sequence
  ENSG00000205930_66 (sequence is synthesized)
cagaaggatcacttgagtctgagaattcggtgttgtttaagccaccctgttgtggtatctgctatggctgcacaggcagaaatagggacacaagtgcaggttcagggcaaggtgtgtgag

SEQ ID NO: 855706 - DNA, 120 bp, Artificial Sequence
  ENSG00000205930_67 (sequence is synthesized)
cacactcagtccctggcctcggagtctctctggatggcttcttgcctagggtgactgacagagggagggatgatatgcaaaggcacctgttctcctcatgacctaaccccaattcttact

SEQ ID NO: 855707 - DNA, 120 bp, Artificial Sequence
  ENSG00000205930_68 (sequence is synthesized)
ccacgggttcatgacagcctattctgctggagactgtgtcttaaaacttcctcccctagtttctctcaagtacccctcgtgagctgtgatttcactgggctttgaactcttaggccattt

SEQ ID NO: 855708 - DNA, 120 bp, Artificial Sequence
  ENSG00000205930_69 (sequence is synthesized)
gaggctgcagtgagctatgattgtatcactgcactccagcctagatgacagaacgagaccccatctctaatgaataaataaatatggctgggcacaatggctcaggcctgtaatcccagc

SEQ ID NO: 855709 - DNA, 120 bp, Artificial Sequence
  ENSG00000205930_70 (sequence is synthesized)
aatatggctgggcacaatggctcaggcctgtaatcccagcatttggaagaccaagacaggcagatcgcttcagctcaggagttcgagatcattctggccaacaaggcgaaaccctgtctc

SEQ ID NO: 855710 - DNA, 60 bp, Artificial Sequence
  ENSG00000205930_71 (sequence is synthesized)
atacaaaaattagccaggcagggtggcatgtgcctttaatcccagctaaattgtgccact

SEQ ID NO: 855711 - DNA, 120 bp, Artificial Sequence
  ENSG00000205930_72 (sequence is synthesized)
gcaaccaaaaaataaaataataataataatgaaataaataaccaaataagtaaataaataaatattaggaggcaaaaatacattggactcctgagtcgtacactcagcttgggagccaat

SEQ ID NO: 855712 - DNA, 120 bp, Artificial Sequence
  ENSG00000205930_73 (sequence is synthesized)
gaatgggatcagccccactgcaaagagtggactgagagggtagaaggatggttctgcaaagggaaatcaggaggcgctatcagaaaagggccaggtaggcagtcagaaaggtgggtgccc

SEQ ID NO: 855713 - DNA, 120 bp, Artificial Sequence
  ENSG00000205930_74 (sequence is synthesized)
acaagacccatgggatgagcatgggtgagcattgcaactctactcctctcagtctcagcaaacactaaagcaccactttgataaaatgccctctaagagtgcagatatatgtctgacttt

SEQ ID NO: 855714 - DNA, 120 bp, Artificial Sequence
  ENSG00000205930_75 (sequence is synthesized)
gtgggatatattcagattttcaaattggctcctttactggagggcccctcgattttaccacccaagaatcttcaaggatttttgcagggacacactttgggtactgcatttgtgagcaat

SEQ ID NO: 855715 - DNA, 120 bp, Artificial Sequence
  ENSG00000205930_76 (sequence is synthesized)
agccctgcttacctctccaagtcctggcttcacagtgtgttccttggggtgcccgggccctagctttcttctggctttaaccccagagccataactcagatctatacttgagactgcttc

SEQ ID NO: 855716 - DNA, 120 bp, Artificial Sequence
  ENSG00000205930_77 (sequence is synthesized)
ttgccagggcatcttctcagcttctgactcttgagcctttcacaattttcttctcttgagtctttcccctaattgcatttccactttaaaaataaaaatcacagccaggcatggtggttc

SEQ ID NO: 855717 - DNA, 120 bp, Artificial Sequence
  ENSG00000205930_78 (sequence is synthesized)
caggcagcttatgatgccaatttgtcccatggaaagaaaaatgtactgtatttcactgtgctgaatgcaactgccaatcaagatagtctgcagcctacctgtggaccttaatgatttcac

SEQ ID NO: 855718 - DNA, 120 bp, Artificial Sequence
  ENSG00000205930_79 (sequence is synthesized)
atgttctgcggaagaatttctcccccacctccaatgactatggcattccttgggaaagttagcttggtatttacttttccccagcaggtcccaagctgaccaaaaaaataaataaaaata

SEQ ID NO: 855719 - DNA, 120 bp, Artificial Sequence
  ENSG00000205930_80 (sequence is synthesized)
aaaaataaaatcaacaacaacaacaacaacaacaaaaacacaaaacaacaatcagttagccaggctgtttcaatggcccaataagttccatgatagcaagaattctatgaataataatgg

SEQ ID NO: 855720 - DNA, 120 bp, Artificial Sequence
  ENSG00000205930_81 (sequence is synthesized)
gacatggaatcccatgcagcctcgcggagagctcagccaaatcacccggaaattctgcttcatcacagccctttctcttgccataaaactgcttgggctctgtctttgcttccacatcat

SEQ ID NO: 855721 - DNA, 120 bp, Artificial Sequence
  ENSG00000205930_82 (sequence is synthesized)
cgtcagctccatcctagaggcctcttcacagcaccagatgaagtccacacctccttttgtaggacgttcaagcaacacaggccagagtaaggatcaaagtaaaagtcatcctaaattcac

SEQ ID NO: 855722 - DNA, 120 bp, Artificial Sequence
  ENSG00000205930_83 (sequence is synthesized)
cactgagagataccactgccggtaaacaggagactgctttttcggatgtctacgcatttatacatcttgcccagtaacaatgctcataaacgagctctcgaggcagttttgttaggctcc

SEQ ID NO: 855723 - DNA, 120 bp, Artificial Sequence
  ENSG00000205930_84 (sequence is synthesized)
aacacatagaagccaactccagcctttaaacacgtaggagatcctcagctatttgtatgtgtaaaatgaaggaagaccaatgcctgctttccctccctctcaatccagtcaagaaactat

SEQ ID NO: 855724 - DNA, 120 bp, Artificial Sequence
  ENSG00000205930_85 (sequence is synthesized)
gtagtcaagacttacatagttccaggaacaggaaactcactctacagccttgtgaagaaactgattccatctttggacacttctttataataaaccccaaatctctctccttagaactca

SEQ ID NO: 855725 - DNA, 120 bp, Artificial Sequence
  ENSG00000205930_86 (sequence is synthesized)
tacctagtgactccatttgcttctcttgaggtcatcaatatcaaatctgccttcctcatgacagcctttcaaatattaacagacactgtcatatgtttcaaatattaaaaaatactgtca

SEQ ID NO: 855726 - DNA, 120 bp, Artificial Sequence
  ENSG00000205930_87 (sequence is synthesized)
cacggggtttaatttctctgtctctttaaaagttgaatggacactgcttccatttccctttgtgatcaatagagtgggctcatatttgtaatttctacactcatcaaattatgtcagtag

SEQ ID NO: 855727 - DNA, 120 bp, Artificial Sequence
  ENSG00000205930_88 (sequence is synthesized)
gacataatttcttgatggccacttaatcctgtaagtgatttgctcaacacctttgattttaattaagtggttcctgagaattgttaaaacagcaagctgtgaatggaaaatagattcagg

SEQ ID NO: 855728 - DNA, 120 bp, Artificial Sequence
  ENSG00000205930_89 (sequence is synthesized)
aatttaaatcacactgaatccctggacatgagctctatgagggtagagaattttgtctgttttgtacactgctgtctcaacaatagctggcacttactaggcattgagtaaatatttacg

SEQ ID NO: 855729 - DNA, 120 bp, Artificial Sequence
  ENSG00000205930_90 (sequence is synthesized)
gaataaatgaacgagagaatctaataagaaagaatgacaacagctgatatacttggatgcagaaaaaaagaatggaataactttgaatagtttaatgtcaaagtggatcccttttctcac

SEQ ID NO: 855730 - DNA, 120 bp, Artificial Sequence
  ENSG00000205930_91 (sequence is synthesized)
tttgcaaccttaatgagctactgctgtcttacttgagaacaccagagggcgctcaagagaggaggaggcgactggcgactatcaagagctgaagttggaaatatggaatcctcccaagcc

SEQ ID NO: 855731 - DNA, 120 bp, Artificial Sequence
  ENSG00000205930_92 (sequence is synthesized)
gctcagaaagtttgaagacacagggggcagggacccagacttatggaagtctccgcctcaggctgaagagaatacataatgaaaagctgcattttctgggtacatgcacacatttggagc

SEQ ID NO: 855732 - DNA, 120 bp, Artificial Sequence
  ENSG00000205930_93 (sequence is synthesized)
tccagcctgggcaataagagtgaaactcatctcaaaagagaaaaaaaaaagatgcagatggagtggtggtaagggagaaacggaaagactctcaaaggatgtgctctttgggccaggcag

SEQ ID NO: 855733 - DNA, 120 bp, Artificial Sequence
  ENSG00000205930_94 (sequence is synthesized)
gtgctctttgggccaggcagagaagaggttcgggttaggaagggcgaggcagtgcagatataagagtcattggcgcagatgtcagaatgactaaagtccttagtatgtttagagcaggta

SEQ ID NO: 855734 - DNA, 120 bp, Artificial Sequence
  ENSG00000205930_95 (sequence is synthesized)
taagacatctggaggtccatgaggctggggatgtaggcaggaagacagggttagacaggaccttgctggtcaagctaaggggtttggactttatgctggcagttacttggtctccaaact

SEQ ID NO: 855735 - DNA, 120 bp, Artificial Sequence
  ENSG00000205930_96 (sequence is synthesized)
cttctgatcatcaccccatcaataaatgattttaaaaccctccccaatagatgtatctgttaatttataaaggccattcacatattaccatgcttacatatcatctgtattatcaacaat

SEQ ID NO: 855736 - DNA, 120 bp, Artificial Sequence
  ENSG00000205682_0 (sequence is synthesized)
ggtgcataataaagccatgtcccacctgcctacggccccccgagtgttgtttcaactacctgccatccattcacccactccccttggaccccagctcaggttggaacctgataattggcg

SEQ ID NO: 855737 - DNA, 120 bp, Artificial Sequence
  ENSG00000205682_1 (sequence is synthesized)
tagtcaacaggattccgaggtgagtgagtcctcagcccctgatggtcctgggtcagctatgtggtctcagcatgggttgtgttaccttgtggcagccttcctgctcagatgggccccggt

SEQ ID NO: 855738 - DNA, 120 bp, Artificial Sequence
  ENSG00000205682_2 (sequence is synthesized)
gaaaacacgggtgatggtggacgggtctcccatgaccatggagaaggcgctgaagcactttgaagcacagagcactgaaaaggagcgagcctttgccggcagagttggatgggcgttttt

SEQ ID NO: 855739 - DNA, 120 bp, Artificial Sequence
  ENSG00000205682_3 (sequence is synthesized)
gactgtgctacaggaagtgcacactcagtccctgagggatacagctcaggtaagggacctccagggtcaagcagagcgcctggagatccggacatacagcttgaaacgagaattagggcc

SEQ ID NO: 855740 - DNA, 120 bp, Artificial Sequence
  ENSG00000205682_4 (sequence is synthesized)
tgccactagtgtgggcctgggccagccatcccagtcagagacccccgccaggtctgataccaaggaggaagaacctccactgcaggctcacccagtggtccgtcagaaaatagagcagga

SEQ ID NO: 855741 - DNA, 120 bp, Artificial Sequence
  ENSG00000205682_5 (sequence is synthesized)
acagccactggggccccagggcgtgggggttcagggacctcctactgtggtggagcacatgtcatacagtgcctataccccaactgacttgcataaattaggtaaacagtgtcagcagtg

SEQ ID NO: 855742 - DNA, 120 bp, Artificial Sequence
  ENSG00000205682_6 (sequence is synthesized)
catgggggaacccctatctacctggatgctttgccttttggatgagggagctgatggtattgtctgctctgcctctgaaatggaaaagttggcctccattatgacccatccctccaacag

SEQ ID NO: 855743 - DNA, 120 bp, Artificial Sequence
  ENSG00000205682_7 (sequence is synthesized)
cgattgcaggtgagcaggcggttaacacaggggcgaggcgaccacaccctgactgaatggctgatggctgtcatagaatggtatggaacaatgccagagaaataccaaaaactgtgagta

SEQ ID NO: 855744 - DNA, 120 bp, Artificial Sequence
  ENSG00000205682_8 (sequence is synthesized)
aaatgggtatgtggcaagttttgtttgatttaaatacctgagggccatatgttgaatgctttccctcccacatgagggaacttgtgttgagctctgcacccctgagtgctttcggctctc

SEQ ID NO: 855745 - DNA, 120 bp, Artificial Sequence
  ENSG00000205682_9 (sequence is synthesized)
tggccactgtccttactctgtacatggggcactgcatacatgagatgactactgccatggtggccctcagagaagcagagggccattggcaggaccagggactttgtgccataaaaaagg

SEQ ID NO: 855746 - DNA, 120 bp, Artificial Sequence
  ENSG00000205682_10 (sequence is synthesized)
ggaaggtaccccttccacaggggccacctcgtgggacaaaaaaccgccccagtgggtgacctgcacacagatgggaattgacttgatttgggctggggttgaccgagataaaactgatag

SEQ ID NO: 855747 - DNA, 120 bp, Artificial Sequence
  ENSG00000205682_11 (sequence is synthesized)
gcaacccagtgaagtgctgttaactttgtggaggcaattgtccccagagcagcaattccagaaaatgcccaagacggggcaggatgatgttgctcgacccagttccaccaggatgctcca

SEQ ID NO: 855748 - DNA, 120 bp, Artificial Sequence
  ENSG00000205682_12 (sequence is synthesized)
gctcaaagactacttgaaggatctgcaccacccttccagcagcagctatggacggcttgccctgccacatacacttagcttctatggagaactggacatggctagagacttggggtccca

SEQ ID NO: 855749 - DNA, 63 bp, Artificial Sequence
  ENSG00000205682_13 (sequence is synthesized)
tctatggagaactggacatggctagagacttggggtcccatgggcgatgcctggaatgtgaaa

SEQ ID NO: 855750 - DNA, 79 bp, Artificial Sequence
  ENSG00000205682_14 (sequence is synthesized)
tacgctttcctttggggcaaatattttattattctagggttcatcatgataaaaatatgtgaagaaactaaccaatgaa

SEQ ID NO: 855751 - DNA, 120 bp, Artificial Sequence
  ENSG00000205682_15 (sequence is synthesized)
ttcatcatgataaaaatatgtgaagaaactaaccaatgaatattttatggaaaccaaaatattttaaaaatactgattagaaaatcgaatctaccatcatatagtgatattattttgctc

SEQ ID NO: 855752 - DNA, 120 bp, Artificial Sequence
  ENSG00000250957_0 (sequence is synthesized)
tgtggatctgaaaagaattttctcatctaaaccagagcttcagtctcccaggatcgtgaatgtctgagaataagcagatgcagcccttttcacagaagggcaaggtccgcagctcctcgg

SEQ ID NO: 855753 - DNA, 120 bp, Artificial Sequence
  ENSG00000250957_1 (sequence is synthesized)
catcatggcattatttattcatcatgagagccgcgagtgaacatgtaccctgcagaaaaatcaaatcagtgttcggtttctcgagcagctgcgtttggcagagaaaaagcatttggatct

SEQ ID NO: 855754 - DNA, 120 bp, Artificial Sequence
  ENSG00000250957_2 (sequence is synthesized)
aactttggtaactggacaattataggcgttattaaattggagatgcaaatgagtaaccatgttttcttccgagtttgttctatttcacttgtagtgcttaaattaaaaccagctcagcat

SEQ ID NO: 855755 - DNA, 120 bp, Artificial Sequence
  ENSG00000250957_3 (sequence is synthesized)
ttgtaaaagctgattcctgaaagcttagaaaagttctgtgcttgtctatataccagtagtttcactaaaaacatttacatattagttaaccccaaaggaccaaatttgcatttattcatg

SEQ ID NO: 855756 - DNA, 120 bp, Artificial Sequence
  ENSG00000250957_4 (sequence is synthesized)
ttgctcacaggtggagattcagatagaaaaaaacacacaagcttagaaatgttaataagtatctctatgcattataaaaatacctacagataatttaaagcctgagtaatttgtttatat

SEQ ID NO: 855757 - DNA, 120 bp, Artificial Sequence
  ENSG00000250957_5 (sequence is synthesized)
atttcccgatttgtggaatagactaatattacatcatagtccgagaactttttataaattgcctagtttttaatttcaattcttccatttacaaactctgggaccttgaacaaattattt

SEQ ID NO: 855758 - DNA, 120 bp, Artificial Sequence
  ENSG00000250957_6 (sequence is synthesized)
tacctcagtctcctcactataaaatggagacaataatagtggtacctcttaagttgttgaaagcgttaaacaaatcagtacatgttaaataaattaatatacatgcttaggataatgcct

SEQ ID NO: 855759 - DNA, 120 bp, Artificial Sequence
  ENSG00000250957_7 (sequence is synthesized)
gacagtaattgcaattctgtagatgtgtgtgcatatgtatagattgaatgtagttttatcaaacagtaaattggcatataataataatccctcattatctgtctacctttccctccatat

SEQ ID NO: 855760 - DNA, 120 bp, Artificial Sequence
  ENSG00000250957_8 (sequence is synthesized)
ttcagttcaatagaattattgttttattcactttgtagtccacaacgcttatcgatttgtgttgctgcaacatgctagtgtacattttataataaatattgtggcttttagactgttcaa

SEQ ID NO: 855761 - DNA, 120 bp, Artificial Sequence
  ENSG00000250955_0 (sequence is synthesized)
aatcatctctccattcaggaactcagcacagctgctaccatgaggagactgcgaggctccacattttcattttgcgctgggcctcacaagtgatgtagccagtgctacagaggccattgg

SEQ ID NO: 855762 - DNA, 120 bp, Artificial Sequence
  ENSG00000250955_1 (sequence is synthesized)
gaatcaaaagatgaactttcaggctgtatttggcagatgcatgggcccagtggtgaactctaatgggtaccaaaagcagcattcactagaagatggcctccaggaacccttcagcaacaa

SEQ ID NO: 855763 - DNA, 120 bp, Artificial Sequence
  ENSG00000250955_2 (sequence is synthesized)
cagaagatctggcaacattgggccaccttatgttcacctggcaacaatcagctgaaccaagaaatcactgagccctttaaacctcccagctcactaccgtccagcatcttcagtccctat

SEQ ID NO: 855764 - DNA, 120 bp, Artificial Sequence
  ENSG00000250955_3 (sequence is synthesized)
gacattgtatctgccctctttcactcatttggatatccagtggtccctgaaggcatctgaattggtgacctctgtaccaaagatgtgagaaacagtcattaaatatgcagcaacctggaa

SEQ ID NO: 855765 - DNA, 120 bp, Artificial Sequence
  ENSG00000250954_0 (sequence is synthesized)
gtaagaagagccatacgcctcccgccatgattctgagacctccacagcgatgtggaactgtcctgtttctgctgggaggacaatttgagctaactggaaaggggattgtgagaaccatta

SEQ ID NO: 855766 - DNA, 120 bp, Artificial Sequence
  ENSG00000250954_1 (sequence is synthesized)
ctgggagtacagaaagaaaagcaagaggcagttttgcaatttggagtgagaaccagccccctacacccaaggctaagctcctaccatttcagaaattgagagatgggggtgctatcttcc

SEQ ID NO: 855767 - DNA, 120 bp, Artificial Sequence
  ENSG00000250954_2 (sequence is synthesized)
ttgatgattgcacttcagagagatggttccaggtcattgaaaaagatattccttgaccttaaagctgtgccgaataatatttcattttctggatatacctcactttatctacttgctaca

SEQ ID NO: 855768 - DNA, 120 bp, Artificial Sequence
  ENSG00000250954_3 (sequence is synthesized)
gaagggcatcctgcttactttaaagttttggcaattaggaataaagctgctataagcatccagtcctgcaggttgaaaaatccaagatcatggcactggcaggttttgtgtctgctgagg

SEQ ID NO: 855769 - DNA, 120 bp, Artificial Sequence
  ENSG00000250954_4 (sequence is synthesized)
gcctgatcttcacttccaagatggtggctcgagtgctgccttctccaggatacaggaatactgttcctcacatggaagaagtgaaagatcaatgaatccactcttgcaagccaatttttg

SEQ ID NO: 855770 - DNA, 90 bp, Artificial Sequence
  ENSG00000250954_5 (sequence is synthesized)
gtttgtttgtagaggttggagtgcagtggcacaatctcttctccctgcgacctccacttccctgctcaagtgatcctcccacctcagcct

SEQ ID NO: 855771 - DNA, 120 bp, Artificial Sequence
  ENSG00000250954_6 (sequence is synthesized)
gcctcccaaataactggaactacaagcgatgactaccaaaaaatgtctaatttgtttgtttgtttgtttttgctagagactggcttttgctatgtcagccaggctggtctcgaactccca

SEQ ID NO: 855772 - DNA, 120 bp, Artificial Sequence
  ENSG00000250954_7 (sequence is synthesized)
ggctcagcctatccacctgcctgggtctcccaaagagcttggattatagacatgacccactgcatccagccacaagcccattttataatggcattattccattcatgaggtcagagccct

SEQ ID NO: 855773 - DNA, 120 bp, Artificial Sequence
  ENSG00000250954_8 (sequence is synthesized)
tgtgacctgaactcttatccttaggccacaaattctaatgctgttgcattaggaattaactttctgacacatgaattttaaggaagacaaaaacattcaaactacagcagattttattct

SEQ ID NO: 855774 - DNA, 120 bp, Artificial Sequence
  ENSG00000250954_9 (sequence is synthesized)
atatgtaattgttcaagaaagtgaattactgtacatgaatataaggagttttttcactaagaactctcaaaatagtaaaaacagaggaataaaaacagaacaagggtaactgagactaaa

SEQ ID NO: 855775 - DNA, 120 bp, Artificial Sequence
  ENSG00000250954_10 (sequence is synthesized)
caagacaccttcaaagaagccacaatagttcagagaactaaaacatggattcaagatttatggaaacttaaaaaaaagagcttgacaattttataaagactgaataggaatataattaat

SEQ ID NO: 855776 - DNA, 120 bp, Artificial Sequence
  ENSG00000250954_11 (sequence is synthesized)
ccaagaatttcctttatggcctgaaaggtgacataataataatacaaacaaacacttatgcagcatttattatgaacagtgcttttcaagatcatttaattctgtcaacaattctgtgta

SEQ ID NO: 855777 - DNA, 120 bp, Artificial Sequence
  ENSG00000250954_12 (sequence is synthesized)
gcaaataatatgattttttttatagaagagaataggggtgacaagggaagcatggtggctgattattaacattacactggaatcttccacagagtaaaatattgtgtgtaaacaagcaaa

SEQ ID NO: 855778 - DNA, 120 bp, Artificial Sequence
  ENSG00000250954_13 (sequence is synthesized)
gatatttgagttacagatttaattcaatactttagtgttgcatgatatcttaatgaaggaaacccaaaattctgtaatcaagaaagataaattttaatgcttcatagatagatttattat

SEQ ID NO: 855779 - DNA, 120 bp, Artificial Sequence
  ENSG00000250954_14 (sequence is synthesized)
tcaaaagattaatacaacaatatgttggccaaatacagcccccattgcaaagtagtattaacaaatacgtgcagaaaactaacactttacccacatacattgatttagattttttccaga

SEQ ID NO: 855780 - DNA, 120 bp, Artificial Sequence
  ENSG00000250954_15 (sequence is synthesized)
aagtttaatttcatataaatattttaccactttatattaggttgctccaaaagtaattctggtttttgctaataggtatgaattttcagtcgaatatttgcaaggaatactagattctgc

SEQ ID NO: 855781 - DNA, 120 bp, Artificial Sequence
  ENSG00000250954_16 (sequence is synthesized)
aactaatgctttatagggaaaatagtcactaacatagaagaacaaaaactctattttaaagttagcccatatgtctgactcttcaaaaaaatttttactactgcactgacaggtgaaatt

SEQ ID NO: 855782 - DNA, 120 bp, Artificial Sequence
  ENSG00000250954_17 (sequence is synthesized)
tctttcgtgctggggggatgtaggggaaagaatcacaaagtttttacagatttatttcctttccagattctatttgcaaagcaaggcttacaaaagttttttaatatagatttaagtttt

SEQ ID NO: 855783 - DNA, 120 bp, Artificial Sequence
  ENSG00000250954_18 (sequence is synthesized)
ccatgatagtgggaaagttttcaagatagctctataaacataatctcctaaatctgatgagtctctgctagacatgaaaaaaaatacattgtctttcacatctttctgtgctaagaattt

SEQ ID NO: 855784 - DNA, 120 bp, Artificial Sequence
  ENSG00000250954_19 (sequence is synthesized)
aggctgcaaagaaaatttaaaggcgaaattcttatgtgaacttatttattctatataattattagacttcattttgtctaatcattattgatcatttaataaaatcagttggggataaaa

SEQ ID NO: 855785 - DNA, 120 bp, Artificial Sequence
  ENSG00000250954_20 (sequence is synthesized)
attttctcttgctgccgcaatgtaagaagagccatacgcctcccgccatgattctgagacctccacagcgatgtggaacttgccgaataatatttcattttctggatatacctcacttta

SEQ ID NO: 855786 - DNA, 120 bp, Artificial Sequence
  ENSG00000250954_21 (sequence is synthesized)
tctacttgctacagaagggcatcctgcttactttaaagttttggcaattaggaataaagctgctataagcatccagggaagttttgtggccttgaggaagatgaagtcagcaatgagatg

SEQ ID NO: 855787 - DNA, 120 bp, Artificial Sequence
  ENSG00000250954_22 (sequence is synthesized)
aacctacagaaacctttctcctcatcttactaggaccttctatagcataagacaaagaagaatacatgtttaaaagaaatgcaacacatgggtgctgcctgcaaatcagaaagaagataa

SEQ ID NO: 855788 - DNA, 120 bp, Artificial Sequence
  ENSG00000250954_23 (sequence is synthesized)
agccaattcacaaaggagcaccagtgccttagaaagctgtttgctagaaagctcttcaataactagacttttctatattgaacctgtagacaatgagataagacaacagaattttgatgt

SEQ ID NO: 855789 - DNA, 120 bp, Artificial Sequence
  ENSG00000250954_24 (sequence is synthesized)
gccaaggaagtacaacaacctcactgtaggctgttatgataatgtgtacttacctcttcttaattctttctcactatagagtgatagcagaaaagagaggaagatacctggaagatatac

SEQ ID NO: 855790 - DNA, 120 bp, Artificial Sequence
  ENSG00000250954_25 (sequence is synthesized)
aactccagtgttatcctgagctactaggagaagcgttaaaaataaacctgatttgatcttaaaaaacaagcaaataaaaacagacaatgggacactttttcttaataataattgagactt

SEQ ID NO: 855791 - DNA, 120 bp, Artificial Sequence
  ENSG00000250954_26 (sequence is synthesized)
accctatggaaaatgtagattttaatacattaaatttgttagcaggtatagttgattagatagatcaacagatagataaagataaatattttttatgcaccataaatgcacgcaaacata

SEQ ID NO: 855792 - DNA, 120 bp, Artificial Sequence
  ENSG00000250954_27 (sequence is synthesized)
tacacatgcatatttgggatatcacagcaatagtatgcatcttagtctagtttgggctgctataacaaaatatgtgggacagggtaatttatgaagaacagaaatttatttctcatagtt

SEQ ID NO: 855793 - DNA, 120 bp, Artificial Sequence
  ENSG00000250954_28 (sequence is synthesized)
ctggaggctgggcagtttagaatcaaggctccagcatttgttgtctggtgagggctgctgtctgcttctaagatggtgctttgttgctgtgtcctaacatggccaaaggcagaaaagcaa

SEQ ID NO: 855794 - DNA, 120 bp, Artificial Sequence
  ENSG00000250954_29 (sequence is synthesized)
aaagggcctagctagttccctccagcccttatataaggcctctcatgccattaatgagggttctgctctcatgacataatcacctcttaaaagccctgtctcttaatactgttaccttga

SEQ ID NO: 855795 - DNA, 120 bp, Artificial Sequence
  ENSG00000250954_30 (sequence is synthesized)
ggattaagttttaacatgaattttgggagcacattcaaccatagcagtgtgagagggaaggttaaatgtcttagttaatgttgatttctgtaacaaataaaatctttaaaataataataa

SEQ ID NO: 855796 - DNA, 120 bp, Artificial Sequence
  ENSG00000255357_0 (sequence is synthesized)
acggcagctggccaatcaaggtgttcgtatgcagcgaaggaagtaaccaatcaattttttaatttccttctgtaaacgggagtgaatcggggtggatttgaaatctcattagtcaaaagc

SEQ ID NO: 855797 - DNA, 120 bp, Artificial Sequence
  ENSG00000255357_1 (sequence is synthesized)
atactgttggcattgaatctgtgccaaaaatgccagccatcaagggagaaagcacaagctaagaaggtgaagtaattgaaagcgcccctttcttttcactctgatctgaaattacaacag

SEQ ID NO: 855798 - DNA, 120 bp, Artificial Sequence
  ENSG00000255357_2 (sequence is synthesized)
gtgtgttgctcaagctgtgaagagccaagttacagaagaggtagaggaaatatgacagggctcaaacaacggctgctgaattataatatttctgaaggccctaaagtatgctctttcttc

SEQ ID NO: 855799 - DNA, 120 bp, Artificial Sequence
  ENSG00000255357_3 (sequence is synthesized)
cctcacccccttgcccctgagccagtcagggatgagactggcagagcactactactacatcccttctgctttctgtcataaacctggaacactctagcatgattaaagagattcaaacaa

SEQ ID NO: 855800 - DNA, 120 bp, Artificial Sequence
  ENSG00000255357_4 (sequence is synthesized)
cgtatgcagcgaaggaagtaaccaatcaattttttaatttccttctgtaaacgggagtgaatcggggtggatttgaaatctcattagtcaaaacttgccttgttgatccaaaatgaacct

SEQ ID NO: 855801 - DNA, 120 bp, Artificial Sequence
  ENSG00000255357_5 (sequence is synthesized)
atcttcatttgttttctcatggcttccagaagagtctgcattaatacattatcatgttttttgggggtgtagctaaattctgtcttcttaaaaaatagataaataaaaaataaccttcaa

SEQ ID NO: 855802 - DNA, 120 bp, Artificial Sequence
  ENSG00000250958_0 (sequence is synthesized)
aggtttcagaagaaaaagcacaacagtgttaagtgctgctgaaggtaatgctagcaattaatacctggctgtcattctggagttccttttctctcttccatccaaggtcaagattttcct

SEQ ID NO: 855803 - DNA, 120 bp, Artificial Sequence
  ENSG00000250958_1 (sequence is synthesized)
aacatataacacaaggctgtgcctaaagtgaatgactgattcttcaatgagggaagaagacacagaagctaaaaacaagatgcatttgtcattgaagaaaaacatcttacaaaggaagtt

SEQ ID NO: 855804 - DNA, 120 bp, Artificial Sequence
  ENSG00000250958_2 (sequence is synthesized)
attccaaaggcatcacagggtttagctgctaatgcaataaagtggtttttgtcttggaagcacgcaacatcatgaataacattgtcatctagaaacaatgagccaataggcaccattttg

SEQ ID NO: 855805 - DNA, 120 bp, Artificial Sequence
  ENSG00000250958_3 (sequence is synthesized)
tgttgtaaccgagcaggcttgcttgattgtggatgcagatatgcccaccctacgtaagttgacattttgtacagactagaagaaatgtgtggtatgagatcaataaagaagtaactaaaa

SEQ ID NO: 855806 - DNA, 120 bp, Artificial Sequence
  ENSG00000255351_0 (sequence is synthesized)
atggctccttccgaaagatcatacttgccagcatacaacccaatctccacatatccaaactataatcgtacatctgatagtctacaagtagctcaggacctttgaagtatcgggaagcaa

SEQ ID NO: 855807 - DNA, 120 bp, Artificial Sequence
  ENSG00000255351_1 (sequence is synthesized)
ctcggacattatattcttggccaggatgataaaactcagccaaaccccagtctattagtcgtagctttctgtgctcatgatcaatcatgacattatggggcttgacatctctgtgcataa

SEQ ID NO: 855808 - DNA, 120 bp, Artificial Sequence
  ENSG00000255351_2 (sequence is synthesized)
caaaaaccaaggcgggggttcgtgacacagggtcttttacaatgtctgccagtgtgatgatgttggcggacaaagctggacttgatgtttggagatctggcagtcactgtgttcagaagc

SEQ ID NO: 855809 - DNA, 120 bp, Artificial Sequence
  ENSG00000255351_3 (sequence is synthesized)
agcttgggggtaagaccttgtttcagacctgttttcttcacactgtggtggaagcggcagcggctgtggccgctctcccttctgctcacacagacaatatggcggcgatggagtggggag

SEQ ID NO: 855810 - DNA, 120 bp, Artificial Sequence
  ENSG00000249396_0 (sequence is synthesized)
aggggtgaataaggcggaagctgaggggacagtcacagccaggacaggaatgtcacccccagctggcagacagcactctgagcagccaggcctgggatcctctgacctgcccacttcagg

SEQ ID NO: 855811 - DNA, 120 bp, Artificial Sequence
  ENSG00000249396_1 (sequence is synthesized)
aggccagtgtggtcactgccaccccacggtctggggaccctggactccaaacttgtaagtgctagagtgggcagctggaggccatctgggcactttaaaacacaggtactcgggaacaaa

SEQ ID NO: 855812 - DNA, 120 bp, Artificial Sequence
  ENSG00000249396_2 (sequence is synthesized)
cctctgatggggtgggtggggtgagggatgggggaccttgggtcccaggccctctgtgattttctgatgaacttccttctgtgggagcgctggctcagggagctcctggcctctcctcct

SEQ ID NO: 855813 - DNA, 120 bp, Artificial Sequence
  ENSG00000249396_3 (sequence is synthesized)
ctaccacttcctccgccacccgcctccacctgctcccggcctgatgtccgcagggtcatgtgtgcagtagtcccacgtccaggctcactgcagaggcagccctcttcagacaggaggcag

SEQ ID NO: 855814 - DNA, 120 bp, Artificial Sequence
  ENSG00000249396_4 (sequence is synthesized)
aagagagggcccccgcaagttagcttttactttaatattattatgtcattatgtgtattattattgtcatcaacatctttttattctgcaaatactaatttcatatcccatatgggcagg

SEQ ID NO: 855815 - DNA, 120 bp, Artificial Sequence
  ENSG00000249396_5 (sequence is synthesized)
ctctgtgcaaggtaaattactaagttttgttaatgaagtcaaacaaagtcatgggttctataagaagacaactattttaaaatatggcataaatgacattatatagttaagatagtataa

SEQ ID NO: 855816 - DNA, 120 bp, Artificial Sequence
  ENSG00000249396_6 (sequence is synthesized)
agacacgacttggaacaagcaaacgtgggaacaaggcaaggagaacgtgtagcttccttttggagtgctcatactaattgctgatgaaacatttctgcactcggcagggaatcagtccac

SEQ ID NO: 855817 - DNA, 120 bp, Artificial Sequence
  ENSG00000249396_7 (sequence is synthesized)
agcccccctctgattaaaatgcgacccagcttggactctgagagcaaatgtcccagcgaccctgggaagaagtgatgcaatcctctctttgcgctgtttatcatttctgagaagcaatga

SEQ ID NO: 855818 - DNA, 120 bp, Artificial Sequence
  ENSG00000249396_8 (sequence is synthesized)
ggcccacagtctctactggaggagtggggccggccatcgtgggcaggggaggtggagaccccttgaagctgatctgtattgcagggtgtggagtagggctgggggttcctgggcctctaa

SEQ ID NO: 855819 - DNA, 120 bp, Artificial Sequence
  ENSG00000249396_9 (sequence is synthesized)
tctttaaaatccagcaagaaggtagtgtactgtgagccaggcccatcattctctttcctccctgaaaccatcgatgagtcttcccctaagggctggaggggagggtcccctttctttgac

SEQ ID NO: 855820 - DNA, 120 bp, Artificial Sequence
  ENSG00000249396_10 (sequence is synthesized)
ttcccttgcagttcctctgatgctgaagagtagggcttgcagggactctgcctcctgcagggagcagccactgtttccagggaccctcacagaagaggagctaatttcacactttgggac

SEQ ID NO: 855821 - DNA, 120 bp, Artificial Sequence
  ENSG00000249396_11 (sequence is synthesized)
tccatagaagccagcttcctggcagtttgaagtgtgcttctcacacatcttccaccagcttgtttgtctgcctatatctgaggatcctttaaagcgattgaaacaaaattaagggcagaa

SEQ ID NO: 855822 - DNA, 120 bp, Artificial Sequence
  ENSG00000249396_12 (sequence is synthesized)
tgaatctttggtgatgaaagtgagaatctgggagagatgtgaaaactggaagagaaacaggaagtacctccaggattcacctaaatagatgctgcggtttctatcaaaccacaggccacc

SEQ ID NO: 855823 - DNA, 120 bp, Artificial Sequence
  ENSG00000249396_13 (sequence is synthesized)
ccagcatctcagtggcttctataggttgtcctgaaagagccatgaggccagggcccttgatggattcccagataccagctgctcctccagacaccaattccaccctccacctttctgtgt

SEQ ID NO: 855824 - DNA, 120 bp, Artificial Sequence
  ENSG00000249396_14 (sequence is synthesized)
ccgtcccagaccaaggcagcccaggtaaggagccatgagtaggaggtttcccagtgggtagaggtgccagactcagcagctagaaatatagaatgctgggttaaatgtaaatttcagatc

SEQ ID NO: 855825 - DNA, 120 bp, Artificial Sequence
  ENSG00000249396_15 (sequence is synthesized)
aatgataattttttgggtaagtgtatcccatgcagcatttgaaatacaatttaatcaaatttaactagatgtcctgcatgttgtaggaaactctctaggaggtgtgtctccaggatagag

SEQ ID NO: 855826 - DNA, 120 bp, Artificial Sequence
  ENSG00000249396_16 (sequence is synthesized)
ggccagtggagaatggcagcccacactgttatgggatgaagtgtgtcccccaaaatcaacatgttgaagctctaacccccagaaccccggaataaaactatatttggagttaagatcttt

SEQ ID NO: 855827 - DNA, 120 bp, Artificial Sequence
  ENSG00000249396_17 (sequence is synthesized)
gaaggcggccacctgcaagccaaggagaggggcctcaggagaaaccagccctgctgacaccctgagctccttgcaattccagcctcctagactgtgagaaaatacacttgtgttatttaa

SEQ ID NO: 855828 - DNA, 120 bp, Artificial Sequence
  ENSG00000225359_0 (sequence is synthesized)
ctctgatttgaaccacccactccttctaaaaagtctgcctccccaagagactcacagcagcttgccctggacaagaccaaaaaagacaatggatgtggtccgccttgggagtccccaagg

SEQ ID NO: 855829 - DNA, 120 bp, Artificial Sequence
  ENSG00000225359_1 (sequence is synthesized)
gctgtgcaacaaagtcaagtcaccgtccacccttcagctctgagctagaatctcagcagacacatctgggccaggtccacaaggacaaggactgtggctggcttcactaaccacggtagt

SEQ ID NO: 855830 - DNA, 120 bp, Artificial Sequence
  ENSG00000225359_2 (sequence is synthesized)
aatgaatgaggtagtgaatgaagcaggaggccataaacgctgagggtgtacacctgcctccctcccgcatctcctacccaccctatgaggagggaggggaggcagcaggagagctgggct

SEQ ID NO: 855831 - DNA, 120 bp, Artificial Sequence
  ENSG00000225359_3 (sequence is synthesized)
acctggggtagagtccaggttctgctacttactaggtaacctgtgcctctgcgtcctccgctgtaaaacggggtctgtggggttgtcctgagaattaaatgagttaacatttgtaaagta

SEQ ID NO: 855832 - DNA, 120 bp, Artificial Sequence
  ENSG00000276603_0 (sequence is synthesized)
tgtcccatttcatcgccgaatgttgggagactggggtctgtcctcggaaagaaacagcctttctgtttataggtttggatcgtctatccctttcagggaactggtgtgttggggacggct

SEQ ID NO: 855833 - DNA, 120 bp, Artificial Sequence
  ENSG00000276603_1 (sequence is synthesized)
agctgggaccaaaaaaaagttccagcttaagtgctaatgccaagtgttagatcttgtttgcttgtttgttttaaatcagagactaattaatgtcaagcaaatctgttaaaagatttgatc

SEQ ID NO: 855834 - DNA, 120 bp, Artificial Sequence
  ENSG00000276603_2 (sequence is synthesized)
acgggaagcctggtcggtttccagtgaccaggtcaattccatatctgaaattagtcttgttagagttgctgccaaaaacagtttaacctttaatctgtaatatgttgtttcaaagaggaa

SEQ ID NO: 855835 - DNA, 120 bp, Artificial Sequence
  ENSG00000225350_0 (sequence is synthesized)
ggcaggaatcacctattgttcgtctgtaaactccaatgagaaacatacagtctggtgtatgggaggtcatcaaaacaagtgtggaggtataagctaagactgacaactgcctcccaagtt

SEQ ID NO: 855836 - DNA, 120 bp, Artificial Sequence
  ENSG00000225350_1 (sequence is synthesized)
tgtcttcacaatggagagactgtcacagcctaaaaagacacgtgactctgagcatcagtttactggctgcccactcaatgattcagactcctccattctttgtgtggaagagaactggcc

SEQ ID NO: 855837 - DNA, 120 bp, Artificial Sequence
  ENSG00000225350_2 (sequence is synthesized)
ttccgggagcctgaggccaagtgagagaaccttctgaaagccgtcactgcatggggagcctggacttaccctttgccttgttggagctgtttgtctatttccgtctcgaagttctctata

SEQ ID NO: 855838 - DNA, 120 bp, Artificial Sequence
  ENSG00000282033_0 (sequence is synthesized)
tgcgccgccgccgccgccgctcttagggttccgtctgctcatcagacaacagatatttattgaatgttctttgtcatgcgtcttcaagatgtgccctggccattcatgcaagtttcaagg

SEQ ID NO: 855839 - DNA, 120 bp, Artificial Sequence
  ENSG00000282033_1 (sequence is synthesized)
actctgaatctgttgagaaaaagaggttacgttccaattctgctttagttccaacccaaatgctgagaaacactccatggaatttaattacagggcgataactgtgatcttaccaagatt

SEQ ID NO: 855840 - DNA, 120 bp, Artificial Sequence
  ENSG00000282033_2 (sequence is synthesized)
tatgaacaggaagatccttggtgattgtagtcagtcaaagggtggctttgacatagcacctatctgttagggcaaatactgccagggaaaaggtgacatttggaatcatctgggattgga

SEQ ID NO: 855841 - DNA, 120 bp, Artificial Sequence
  ENSG00000282033_3 (sequence is synthesized)
gaatcttgggaccccaaactcactatgccaaagggaaagttaagcgtgggagactgagtcaggcaaaaactgccttccttttgttcccaaatagatggctgtaatttcacatgcttgcgt

SEQ ID NO: 855842 - DNA, 120 bp, Artificial Sequence
  ENSG00000282033_4 (sequence is synthesized)
tatgtgaaatgtggattcattgagtgctaatcagagccccacaagaatgaaagcacttgccttgctgcctaccctccctcctcttttttcttcccctcctgcttgctcttttccctttaa

SEQ ID NO: 855843 - DNA, 120 bp, Artificial Sequence
  ENSG00000282033_5 (sequence is synthesized)
ataatgaagttcccaaaaccctctttggaaaaagcataggtcacaaatcctattataacttgcatttctttttcctgggtacattctcaacctgggcaaaataaacctctaatcaacgaa

SEQ ID NO: 855844 - DNA, 120 bp, Artificial Sequence
  ENSG00000268475_0 (sequence is synthesized)
tcagagtggggagtgcatgtttttcaaaaacaaaaagtaggcaaaaacagtccaccaccccatctttcctgcccaggcccctggctgggggaggccaaggagtggcttaagttgtccagc

SEQ ID NO: 855845 - DNA, 120 bp, Artificial Sequence
  ENSG00000268475_1 (sequence is synthesized)
ggttgaatgggacgtcgaggaagtcccagagcagcaggtcactgtagcgacggctctcccaggccactagtgagtctaggtcaggccccgcctcacccaccggagaccctagcaggaaga

SEQ ID NO: 855846 - DNA, 120 bp, Artificial Sequence
  ENSG00000244063_0 (sequence is synthesized)
gagcaatatacctagctctcattcattatttcccttgctgatattcttgcatagcttttagtttatgcatttgtcccaaataaacctagaaaaagccacttgtcgtaggacaagatgagc

SEQ ID NO: 855847 - DNA, 120 bp, Artificial Sequence
  ENSG00000244063_1 (sequence is synthesized)
taaggtacttcctggttgaacggtagggctctggagtcagaagtcttgaatttgaatcccagccctgaaatgtatcagctgtgtgcccttaggccagatatacttttattgcacaacatg

SEQ ID NO: 855848 - DNA, 120 bp, Artificial Sequence
  ENSG00000244063_2 (sequence is synthesized)
tattacgtacaagaatatcacaagatttggaaatgttagtcctagaagagtttgacacaacgcaatgataagacagtatgaaaaatggagctatgaataaaaaagaatccataagtcccc

SEQ ID NO: 855849 - DNA, 120 bp, Artificial Sequence
  ENSG00000268471_0 (sequence is synthesized)
gaagtggggatcggcgagcgggtgggtgcgcctcgggccgcgggactcgcagccgccaccgccgctgccgcctctacggccgcgtcagaactgaagagaggaaggggaggagccgagtcg

SEQ ID NO: 855850 - DNA, 120 bp, Artificial Sequence
  ENSG00000268471_1 (sequence is synthesized)
agcctaagctgccgcccgatcttacccctgacccgagggcggcctggagagcttggtctgtagcggtttccttcggggcaggtggggactgctcctttgggaggaaggaggaggcccagg

SEQ ID NO: 855851 - DNA, 120 bp, Artificial Sequence
  ENSG00000268471_2 (sequence is synthesized)
ccgcgtcttcaggcagctgcgcgcaccacccgaaggtgaggcatttggccccaaacagaccctcgaaaagccggactgatcgaggagttaccctacagcctgatctgcacctgctccagg

SEQ ID NO: 855852 - DNA, 120 bp, Artificial Sequence
  ENSG00000268471_3 (sequence is synthesized)
gagagagcgccccacccttcccgtggcgtggggtgagacccagcgttggataacgtgtggtcgggccgagcaaatgtttgatgaatgaatgaatgaatgaatgcctctctcacgtggcac

SEQ ID NO: 855853 - DNA, 120 bp, Artificial Sequence
  ENSG00000268471_4 (sequence is synthesized)
tcgtgaagctcagaggatatggtggaagtgcaagcgctttgtaaactgcagtgcattgtaaaaatgagttgtaatacattcctcccctccccctagccatgaaaggaaacaggggtgcgg

SEQ ID NO: 855854 - DNA, 120 bp, Artificial Sequence
  ENSG00000268471_5 (sequence is synthesized)
cttgagtacagagtcacaacctgagtctttagtggaaaaggagacgaaatgccgagcaagggaagggacccatcctcgcgcagattgttagggcggcgggaagggaggattggaagggag

SEQ ID NO: 855855 - DNA, 120 bp, Artificial Sequence
  ENSG00000268471_6 (sequence is synthesized)
ccatcctctgggagattgctgaaggatttttgactgtcaggggaagaatttaatagtccctcacttttacgaatggttctttcttacggtttggagctttcgagagcttctggtcttggt

SEQ ID NO: 855856 - DNA, 120 bp, Artificial Sequence
  ENSG00000268471_7 (sequence is synthesized)
tcatcagtgtacgttgtcatcaagaaatgttggcctgtttcaggtctgactcaaaggttattttctttctaaaataagtgttattactattatgcagcttttcctacagatgttatcctg

SEQ ID NO: 855857 - DNA, 120 bp, Artificial Sequence
  ENSG00000268471_8 (sequence is synthesized)
gaaaggaaagttaagtagaaactcatgaagtttaaagtgtagttctctaggaaaacaaatttaagataaaaggaccagaatcctcagaaatctgtcttcagtgaatagtatgagaaaaag

SEQ ID NO: 855858 - DNA, 120 bp, Artificial Sequence
  ENSG00000268471_9 (sequence is synthesized)
attaaagcagcagcaatgatgaaagcagattccacaattctgtccctggaccctagtacactctacctccttgggaagcagtagtaatggattttacaagtctttccacctggaggaggg

SEQ ID NO: 855859 - DNA, 120 bp, Artificial Sequence
  ENSG00000268471_10 (sequence is synthesized)
ggtaaggtaggagcaagtgtattatagacaaatgtgggaagctctgggtttctcccactactgccactaccatctgcaaacagtaaactaaggaaacttttaactgggtaaatccaaggg

SEQ ID NO: 855860 - DNA, 120 bp, Artificial Sequence
  ENSG00000268471_11 (sequence is synthesized)
ctcgtgttcattaaaatgctgcgggaaaggtggtgagaggggcaaaggaggatgtggcaaaaccaaggagagactcacagactagcacctgaccctactgcccttgacctgaagttccaa

SEQ ID NO: 855861 - DNA, 120 bp, Artificial Sequence
  ENSG00000268471_12 (sequence is synthesized)
gagccaggttaaatatcctgcttaaattaccctggatttttctgtctttacgtgaccaatcccctgctacagccttccaaataagactcacaggtaatcagaccaacaagtgatggtctc

SEQ ID NO: 855862 - DNA, 120 bp, Artificial Sequence
  ENSG00000268471_13 (sequence is synthesized)
acatggctacaaaataaatattttttgtttttccccctcttcctatcttacaacaggggaatggtggaaattaaaggagtaaaacacacagatttaggggattttgtgaagctaaacacc

SEQ ID NO: 855863 - DNA, 120 bp, Artificial Sequence
  ENSG00000268471_14 (sequence is synthesized)
tcagagagtttaacctttgtaggctttgaaggaaaagagtgcaaacatcagagttctgcagcccagcagagaacacctccagttaagtgtgtaccacatagggtttttcagcagcgtgat

SEQ ID NO: 855864 - DNA, 120 bp, Artificial Sequence
  ENSG00000268471_15 (sequence is synthesized)
cttctgttttcattgtcagtggctccaccttacaacctcagtgctgaggaacagaagggcactcaggagagcctgagccacttacttagaaagtatttaataacagcacactaagcttac

SEQ ID NO: 855865 - DNA, 120 bp, Artificial Sequence
  ENSG00000268471_16 (sequence is synthesized)
tgggctagatacccacctcagcacccagcttgataacaggaggaaacagctggaactggagactggagagaaggaagttcatacatttccaacttggtctgcatctctttagttccttgt

SEQ ID NO: 855866 - DNA, 120 bp, Artificial Sequence
  ENSG00000268471_17 (sequence is synthesized)
attgcttattaatccagaggagaaaacagctagttaattaaaaattccaaaaaatctgaagttttagctaatagttacttccctggttcatcaatttaagataaggatctaaatactgtg

SEQ ID NO: 855867 - DNA, 120 bp, Artificial Sequence
  ENSG00000268471_18 (sequence is synthesized)
ttaaaatatagaaaaacggagactcttataaggtttttgacctctacacttgaaagtgagctcttacaagaaactaatcagtgtttcgttattccatatcagtggcttttactgtcaaag

SEQ ID NO: 855868 - DNA, 120 bp, Artificial Sequence
  ENSG00000268471_19 (sequence is synthesized)
ttactgtcaaagattgtgtaagctaaattatctggcaaaattttgctttccagaaatactatctatattaattttaacatttttattgtgaaatatagtttaaatacataaagcaattat

SEQ ID NO: 855869 - DNA, 120 bp, Artificial Sequence
  ENSG00000268471_20 (sequence is synthesized)
attataaaggaaaccaccatgtaaccaatcaaccaggtcaagaaatggaatatttccagcaactcagaagttcccctccctgccatgaccttcccgaacacaactctttccctccctcct

SEQ ID NO: 855870 - DNA, 120 bp, Artificial Sequence
  ENSG00000268471_21 (sequence is synthesized)
aagtgtagtcattattctaacatttgtgataatcatttccctgcttttctttgtcgctttgtcgcaagcatgcatccctaaacaatatattgtttagtctcactctttcttttgaacttt

SEQ ID NO: 855871 - DNA, 120 bp, Artificial Sequence
  ENSG00000268471_22 (sequence is synthesized)
atgtaactggaacaatataatatgtaatctgttgttcttgctgcttttgctcaacattgtttttaattcatatgttgttcaggttgttcctatagctgtaatttgtgcattttcattgct

SEQ ID NO: 855872 - DNA, 120 bp, Artificial Sequence
  ENSG00000268471_23 (sequence is synthesized)
gcatattacagtgtcccattataacaatatgtgacaatatgtttagccattctattgctgatggacatctgggttgtttccagtttaggattgttataaatgctaatgtgaacattcttc

SEQ ID NO: 855873 - DNA, 120 bp, Artificial Sequence
  ENSG00000268471_24 (sequence is synthesized)
atatatgtattccatcacatctacgtcagtttctgtataacatatacctgggagtgtaatatgtatcataaacttgaataaataatgccaagttcttttctagagggttacacagtcaca

SEQ ID NO: 855874 - DNA, 120 bp, Artificial Sequence
  ENSG00000255829_0 (sequence is synthesized)
cgctttggattcaagagcaaacttgaattacagaaactcaagtctgaggaatggtggaccttgtatgccatagaaatatccagctgccatgctgtgagctgctttattaagatgcccaag

SEQ ID NO: 855875 - DNA, 120 bp, Artificial Sequence
  ENSG00000255829_1 (sequence is synthesized)
gatgatgacagcaccagctaacaccttgatgacagccttatgagataccctgagccaaaggtacccagctaagtcatgtttggattactaatcaacagaaacgttgggaaaataaatgtt

SEQ ID NO: 855876 - DNA, 120 bp, Artificial Sequence
  ENSG00000255829_2 (sequence is synthesized)
caacagaaacgttgggaaaataaatgtttttgttttaagctgttaaattttgggctagatagataactaatatgttgtataactacaatacaggattatttttatctattatataaattt

SEQ ID NO: 855877 - DNA, 120 bp, Artificial Sequence
  ENSG00000255829_3 (sequence is synthesized)
tagtggttcaaccactaaaacattcccgctttggattcaagagcaaacttgaattacagaaactcaagtctgaggaatggtggaccttgtatgccatagaaatatctgccatgctgtgag

SEQ ID NO: 855878 - DNA, 120 bp, Artificial Sequence
  ENSG00000255825_0 (sequence is synthesized)
agcctgtcaagggcatagtcctttgtggctgatgcttacagctgatcagaacccaggacactagcacttactatcaaggttatagggaggctgatgcttacagctgatcagaacccagga

SEQ ID NO: 855879 - DNA, 120 bp, Artificial Sequence
  ENSG00000255825_1 (sequence is synthesized)
aggctgatgcttacagctgatcagaatccaggacactagcactcactatcaaggttatagggaggtggcagagaaaagaagttcagcgagagtggtgcctcttttcaaaatggtatgaca

SEQ ID NO: 855880 - DNA, 120 bp, Artificial Sequence
  ENSG00000255825_2 (sequence is synthesized)
gtccctaggttctctggctcctgtttctggattcagtgctgtgagggcctctcaccatcatgtggtctgtgtgaaccaaccatcagggcagtttaggtactgcagggtgttggggcccca

SEQ ID NO: 855881 - DNA, 120 bp, Artificial Sequence
  ENSG00000287122_0 (sequence is synthesized)
accacggctcgcctcgctgcgggagggtggcatcaacggagactgcagtgcaccagagtgcccccacatcacccaaccaaccagcagagatcctccttcccaagaaacagataaagaaac

SEQ ID NO: 855882 - DNA, 85 bp, Artificial Sequence
  ENSG00000287122_1 (sequence is synthesized)
ccagcagagatcctccttcccaagaaacagataaagaaactgaggcccaggaaggctaagagtcctgccaggattattcaccttt

SEQ ID NO: 855883 - DNA, 76 bp, Artificial Sequence
  ENSG00000287122_2 (sequence is synthesized)
tagccaaaacctagtgccttggattgggggagaaaacatgcagccattcctctctctctgctggctagaggggatt

SEQ ID NO: 855884 - DNA, 67 bp, Artificial Sequence
  ENSG00000287122_3 (sequence is synthesized)
caaatgctgtttaggggacccagtcaaatttgatgtccctttgagccagattcagtgctgggagtcc

SEQ ID NO: 855885 - DNA, 75 bp, Artificial Sequence
  ENSG00000287122_4 (sequence is synthesized)
gacttggttaattgctaattgcttaggcaagtaatttaatttttgttgcgtcagattcctcagctacaaaatgca

SEQ ID NO: 855886 - DNA, 61 bp, Artificial Sequence
  ENSG00000287122_5 (sequence is synthesized)
gggaaaatggagattctaagcacgatgtccatttcacagaaagataccaatttggtggctt

SEQ ID NO: 855887 - DNA, 120 bp, Artificial Sequence
  ENSG00000287122_6 (sequence is synthesized)
tctatacttaccacttagtgagcatggtatccactcaggggcctctgtgggcatctgtctcctctgcagcatctttcctccccactgctgggtctgcacatgaccccctccttgggttag

SEQ ID NO: 855888 - DNA, 120 bp, Artificial Sequence
  ENSG00000287123_0 (sequence is synthesized)
accccctccaaattctactcagacttcaccaccctggcccctggggtacaagcgtggttcaggctaagccagagtccctcgctgagatgttacctctaaagccatcagccaggagaggaa

SEQ ID NO: 855889 - DNA, 120 bp, Artificial Sequence
  ENSG00000287123_1 (sequence is synthesized)
aagtggcttccattggttacaaggttgtaaggggagaactaggagtgccccaaggccatattctggccttagtgggcagccagcttgagagaaagaaagagaaaaccatgctgaagaaag

SEQ ID NO: 855890 - DNA, 120 bp, Artificial Sequence
  ENSG00000287123_2 (sequence is synthesized)
ccaggcagggacagatggacagatagagtttaagtcgctggcctgccagggctccccagggccagctctagtgtggcactttcctcagagcagttacatgagacaatatagtccctccct

SEQ ID NO: 855891 - DNA, 120 bp, Artificial Sequence
  ENSG00000287123_3 (sequence is synthesized)
tttccttttagctagggtgggtcctgtccccacctgtgtaggcagaggagccctgagcaatgagcacactgcacttattcagcggcagctgaagtgattcaggaggatggccttgaaggt

SEQ ID NO: 855892 - DNA, 120 bp, Artificial Sequence
  ENSG00000287123_4 (sequence is synthesized)
attcaggaggatggccttgaaggttgtggaggagagagagcatccagggcgaagacgacgacgtgaaagaaggctctaggggctgggcattgtgactcacgcctgtaatcccagcagttt

SEQ ID NO: 855893 - DNA, 120 bp, Artificial Sequence
  ENSG00000287123_5 (sequence is synthesized)
aaacccctgcctgaaatggacaacttctctgactgatctatttctaggacttctttagaaattcatggttctctcagttatatttctgtgaatccacttttttttggaaccaacaaggac

SEQ ID NO: 855894 - DNA, 120 bp, Artificial Sequence
  ENSG00000287123_6 (sequence is synthesized)
cctgcctatatcagtaaggaatttatttggctacaaataggagaaaaccagaaccacaatgattgacactgatttgcatgaccctggggctggcacagctgctcatcaggcatccaggct

SEQ ID NO: 855895 - DNA, 120 bp, Artificial Sequence
  ENSG00000287123_7 (sequence is synthesized)
ctgtacttcctggtctcacatccatgttccaggcaggaggagggaggaaggacaaaaggcatggcactcccccaactccttttttaaaaatcaggaaaacaagctttgccagaagcgtca

SEQ ID NO: 855896 - DNA, 120 bp, Artificial Sequence
  ENSG00000287123_8 (sequence is synthesized)
ctaggctgaacttgactatttctcacagtccatgtggtgtcacacgcgcacctctagctaaaagatgcctgtggaaaagagggttgtgtgagtgaagatgagaagccaacagcgtctgct

SEQ ID NO: 855897 - DNA, 120 bp, Artificial Sequence
  ENSG00000287123_9 (sequence is synthesized)
ctgctgaagaaatagaacaatggagttctcatgagtgcattgcgtgtgtgatggcatttgtagtgcaatcagagggaggaggggatgtcattcctattcttgacaggaaatcactacaca

SEQ ID NO: 855898 - DNA, 120 bp, Artificial Sequence
  ENSG00000287123_10 (sequence is synthesized)
gatttgcctcacctgaaaatgtgacagaagccagtcagcaacgtcgtgacagagcctggacttcttcgtgcttgtctccacatatccagccaccttgaggaagaggatgatcccacaggc

SEQ ID NO: 855899 - DNA, 120 bp, Artificial Sequence
  ENSG00000287123_11 (sequence is synthesized)
gctggccatgttactagccactttctaacttccaaataagacgggaaagaacattccagaccaggggagcccacccccaactcttggaggagagcttcaatttttcccagagactctgaa

SEQ ID NO: 855900 - DNA, 120 bp, Artificial Sequence
  ENSG00000287123_12 (sequence is synthesized)
atgactccatcaaggagttgagtagctcacaagggaccaaagctgctacgccagaagatggagacagtctcaaccagatgctcatgccctgagggcaggacgcaagccctgggctgaggc

SEQ ID NO: 855901 - DNA, 120 bp, Artificial Sequence
  ENSG00000287123_13 (sequence is synthesized)
ccagtgaggatctcacattaaggggagggaggaggagggctgggtcagggagggacccttcgaggggttggctgttgggggagcaagcgcattaacaaaggtattggtctttgacaatct

SEQ ID NO: 855902 - DNA, 120 bp, Artificial Sequence
  ENSG00000287120_0 (sequence is synthesized)
aagactgagaacctctgaaaagagaaagacagtattttcaataagaggaatcatggttggacagtgactcaactgaattctctctttagctgtcttctcttgcaccctatatacttgcag

SEQ ID NO: 855903 - DNA, 120 bp, Artificial Sequence
  ENSG00000287120_1 (sequence is synthesized)
ctccatgaattgaggggtttggtctcgtttctgacagtatctgagagtccagtccaatgcctagctgagttatgtctcgactgccatgaatgagacagtgtgaagaacagaaaccaatgc

SEQ ID NO: 855904 - DNA, 120 bp, Artificial Sequence
  ENSG00000287120_2 (sequence is synthesized)
aatgaacagccctggaagccgccagcgatggcttgtctgacaacagaaagaggcaggtttctctcctgagccttgcacagacgatgctggcccaaatccttcctgataaacatcaaatgg

SEQ ID NO: 855905 - DNA, 120 bp, Artificial Sequence
  ENSG00000287120_3 (sequence is synthesized)
agacaaccagctacaagcaattcctccaacaacagaataaatattggcacaccaagaaataatctactgatgggaatagaggccctgaaaatcatcccacagtgagtcaatcccaagttc

SEQ ID NO: 855906 - DNA, 120 bp, Artificial Sequence
  ENSG00000287120_4 (sequence is synthesized)
gcagcaaatcctcattttgacagaatcaggaagatgttgaagaggaactcaatcagctactgatgactccactgattatgggctttctcaagctgcctttatgaagaacaggaagacaag

SEQ ID NO: 855907 - DNA, 120 bp, Artificial Sequence
  ENSG00000287120_5 (sequence is synthesized)
atggtcggctcttatccctgaagaggaacttgatcctgatggaaacatcctaatggaaaatgtgggttgggatgggagcccgtgatgaagtggcagcttggcctcaccacaagtcattcc

SEQ ID NO: 855908 - DNA, 120 bp, Artificial Sequence
  ENSG00000287120_6 (sequence is synthesized)
agtgacatgcgtcacagtgccttccagctccaaattttcagaaatagttttgcatatggaaaaatatgaggtgacataaaatggtaacaaaggttctacatttctattgactcttcaacc

SEQ ID NO: 855909 - DNA, 120 bp, Artificial Sequence
  ENSG00000287120_7 (sequence is synthesized)
acatgtcaattagggccaatatttagaacatactggatcttctgaaagcgtgagaaaggaaggtgcatttccttgctctccttgcaaaatatacatagctacgcatttgatttttattgg

SEQ ID NO: 855910 - DNA, 120 bp, Artificial Sequence
  ENSG00000287120_8 (sequence is synthesized)
ttgggaatgtaatcaacagaatattttaataaaaaatgtgaaagcaggcagaaaattttcatatacaacatatatatataatatatatatgtagaaaatgtactttattatcagccattt

SEQ ID NO: 855911 - DNA, 120 bp, Artificial Sequence
  ENSG00000287120_9 (sequence is synthesized)
catggactctaaatgttatgagtttaattaaataaagatgagttttaaaaataaagaaatgtacacattcagcattttaaaaactatacttctaaaaactcttatttatagagatgtccc

SEQ ID NO: 855912 - DNA, 120 bp, Artificial Sequence
  ENSG00000287120_10 (sequence is synthesized)
ttaacatgcaagatatataataagcacttaggataggctggcaatggcaaaatatatattagtcctaagtaactaatacatatgtacctatacatactaactctcaaatgaaatgataaa

SEQ ID NO: 855913 - DNA, 120 bp, Artificial Sequence
  ENSG00000287120_11 (sequence is synthesized)
gactctaattgtagcaaccaaaagatctttccttgtttgaagattgattgaagagaatcctgacttatgtttctgtttatatgaaaagtaacaatgaagaaagagaagcagaagaaaaag

SEQ ID NO: 855914 - DNA, 120 bp, Artificial Sequence
  ENSG00000287120_12 (sequence is synthesized)
tgcattcaaaatgctatagcaatcatgaggctctcaccttgcagttaaaaaaactccagcaaagttgagcttattaagggacaaaatggaaaatttgatgacaggtctgaaactcagaga

SEQ ID NO: 855915 - DNA, 120 bp, Artificial Sequence
  ENSG00000287120_13 (sequence is synthesized)
cagctgctgggaagggaagaaagacatttgttgagtgccgacaatgtgtcaggtataaagctgcatcatttaatgctcattctgaatgttagacagattatctcctcaatatcacagagg

SEQ ID NO: 855916 - DNA, 120 bp, Artificial Sequence
  ENSG00000287120_14 (sequence is synthesized)
ttaaatcagacgttggctaactacagctgagcagcaaaattcagccaaccacctgtttttgcaaattaagttttattggccctcagccatcctcattcatttacatattgtctctgactg

SEQ ID NO: 855917 - DNA, 120 bp, Artificial Sequence
  ENSG00000287120_15 (sequence is synthesized)
ctttcactatgtggcagtggagttgagtatttgagacaagacagtgcagcccccaaaacctaaagtatttatttaatctggacttgtactgaaaagctgtttaatcatgggtgaaatgaa

SEQ ID NO: 855918 - DNA, 120 bp, Artificial Sequence
  ENSG00000287120_16 (sequence is synthesized)
tcctttggagacagaagacatcttttccattggaataaaaagcacgaatttggtagacttaattccaacctaaaaatgctcagaacaggaataccaactgattaattttttaaaagtaca

SEQ ID NO: 855919 - DNA, 120 bp, Artificial Sequence
  ENSG00000287120_17 (sequence is synthesized)
atgaaataatgtatgatcattaaattatatcactgattttcttttcttttttatttttaattgaaagtaaaaattgtatatatggtgtacaacatgttctaacagatacatacattgtgg

SEQ ID NO: 855920 - DNA, 120 bp, Artificial Sequence
  ENSG00000287120_18 (sequence is synthesized)
aatggctaaatcaagccatgtaacatatgctttacctggcataagtattatttgtttgtgatgagaatgtttaaaatctaatctcttagcaattttcaagtatacaatatatttttatta

SEQ ID NO: 855921 - DNA, 120 bp, Artificial Sequence
  ENSG00000287120_19 (sequence is synthesized)
gctgtaatcaccatgttgtacaatagatctcttgaacttcttcctcctgtctaactaaaacattgtaccctttgactcacatctctccagtctccctgcccctctccccacagaccctgg

SEQ ID NO: 855922 - DNA, 83 bp, Artificial Sequence
  ENSG00000287120_20 (sequence is synthesized)
atctctccagtctccctgcccctctccccacagaccctggtaactatcattttactctctgcttcgatgagttcaactttctt

SEQ ID NO: 855923 - DNA, 72 bp, Artificial Sequence
  ENSG00000287120_21 (sequence is synthesized)
ggtcaagttcaactttctaaaattccacatataagtgagattatacaatatttgtccttgtgtgtcttgctt

SEQ ID NO: 855924 - DNA, 120 bp, Artificial Sequence
  ENSG00000287120_22 (sequence is synthesized)
aagtgagattatacaatatttgtccttgtgtgtcttgctttttcattgaacatattatcttccaggttcattcatgttacaaatgatagaatttccttctttttaaggataaatagtatt

SEQ ID NO: 855925 - DNA, 120 bp, Artificial Sequence
  ENSG00000287120_23 (sequence is synthesized)
ccattatatatgtacgtactacattttctttctccatttattcattgatggacatttaggtcgattcaatatcttgtctgatctgaataatgctgcgatgaatgtggaaatgcagatatc

SEQ ID NO: 855926 - DNA, 120 bp, Artificial Sequence
  ENSG00000287120_24 (sequence is synthesized)
tctttgacatacaaaaaaccactgatctccttggatagctcaaaaactgactgaagacaattcaagaaaagagttctaaaaatattttgagcaggccaggcgaggtggctcacatctgta

SEQ ID NO: 855927 - DNA, 120 bp, Artificial Sequence
  ENSG00000287121_0 (sequence is synthesized)
atattggtgtgcagaacagagaacagaagacagctgataagtccaagaactggggaaaggctaagtgaattctaatccctctagatgatgaaattccctgctgccaaccaacacgctggt

SEQ ID NO: 855928 - DNA, 120 bp, Artificial Sequence
  ENSG00000287121_1 (sequence is synthesized)
aagagaagactaagtgttgggggaaatgctcaagatggagtcaatgaaaaaagattggggctaggccagaccgatggctgatgacgttctatgacacatcatctacaacaagaactgaag

SEQ ID NO: 855929 - DNA, 120 bp, Artificial Sequence
  ENSG00000287121_2 (sequence is synthesized)
tactatctggaactatgtgagtcagatagaatcagggagtatgtgcggagccacagaaaggccgtgatggataacagcacagaacaagcttcaaaaacccacagctgaggttgttaagtg

SEQ ID NO: 855930 - DNA, 120 bp, Artificial Sequence
  ENSG00000287121_3 (sequence is synthesized)
gacagggctctgttgacgtctgccctggcagacctgtgggacatggctaaccggacggctggacacgagccttctgctatctgcaggggagaaacctgaagagcagcaacttggctttag

SEQ ID NO: 855931 - DNA, 120 bp, Artificial Sequence
  ENSG00000287121_4 (sequence is synthesized)
gcttgtcacttttactctggctacaggatacggtggtgaggagagtgccgtggctctgggcatgtgacagcaggggacctgttcaccccacgagcctgtgtcctctaaagcactgttgtc

SEQ ID NO: 855932 - DNA, 120 bp, Artificial Sequence
  ENSG00000287126_0 (sequence is synthesized)
gtcttcagtgcaggttgcaggcgggaaccggcctcgtcccagccctgggcctgggagagagaaggaggccgaagaaaaccaacttcggcaacctccggagacaggacgtttaaaaaaggc

SEQ ID NO: 855933 - DNA, 120 bp, Artificial Sequence
  ENSG00000287126_1 (sequence is synthesized)
aaaaaaaaaaaaaaaaattagccagtcatggtggtgcgcgcctgcagtcccagctaccccggaggccgacgcgggaggatcgctggagccgaaaggtcgaggctgccgtgagccgaggtt

SEQ ID NO: 855934 - DNA, 120 bp, Artificial Sequence
  ENSG00000287126_2 (sequence is synthesized)
gcaccactgcactccagcctgggcgacagcgcaagaccctgtctaaaaataaatttaaaaaaaattgcgaggccttcattctatgctagtactgtactaggtgctaattattaagtaaaa

SEQ ID NO: 855935 - DNA, 120 bp, Artificial Sequence
  ENSG00000287126_3 (sequence is synthesized)
ccgactgaactcttgccctcatggagcttacagttcagtggagaagacattacctaaagcagtatgactaaatatataatgacatattgtaataacttacataacagtacaatgagaggg

SEQ ID NO: 855936 - DNA, 120 bp, Artificial Sequence
  ENSG00000287126_4 (sequence is synthesized)
tggggagggattatttatgctttaagaagtcgggaatcctggaacggaatgacattagactgagacacggaagagccgcaggatctattgctggggaagagcattccagacagggaggaa

SEQ ID NO: 855937 - DNA, 120 bp, Artificial Sequence
  ENSG00000287126_5 (sequence is synthesized)
ctcgtgccgaatgatcccgctgtggacagggaatttaatctgagcttcggtttcctcttctgtcaaatgtcatgcaagagttactttcagccgtggtccaggcactgtgaaaaatgcaga

SEQ ID NO: 855938 - DNA, 120 bp, Artificial Sequence
  ENSG00000287126_6 (sequence is synthesized)
agccacactaggtgccctctctcaggattcccaaccacctttaccaagcagagatggtattcatcccacatttttaatgctagatatgctcccgcccggtgcttctctaataatgttttt

SEQ ID NO: 855939 - DNA, 120 bp, Artificial Sequence
  ENSG00000287126_7 (sequence is synthesized)
taaaaggttgagagcagaattttaataggcaaaagaaagagaagagctctctgctgcagacaggagtcctggagaaatgggttgccctcttttttctttttctttttttgagacagtctc

SEQ ID NO: 855940 - DNA, 120 bp, Artificial Sequence
  ENSG00000287126_8 (sequence is synthesized)
tctttttttgagacagtctctcactgtcacccaggctggaattcagtggcgcattcgtacctcgctgcagcctcaacctcctaggctcaatcgatcctcccacctcagcctcccgagtag

SEQ ID NO: 855941 - DNA, 120 bp, Artificial Sequence
  ENSG00000287126_9 (sequence is synthesized)
ccatttttctattgagatttggtcttctccaccacccaccacagatttttgtaattagaggtcatttttccaaacaaatgattcttaaggtcctgctgtctctgaatattatttttatag

SEQ ID NO: 855942 - DNA, 120 bp, Artificial Sequence
  ENSG00000287126_10 (sequence is synthesized)
aacaagcataagtataattggatcaatcatctaacctttcagatcctcaacttagtcttccattaatgagaggattaaatccattagttaaatgttctctaagaatcagtgtgtctccaa

SEQ ID NO: 855943 - DNA, 120 bp, Artificial Sequence
  ENSG00000287126_11 (sequence is synthesized)
cttcagtgtacaaacagcgggtcacccagggatcgcagtgggacgcagacgctgattccgcagttgtggacttggtggaggtgggcgctgtctcagtccatctgggccgctatacagagt

SEQ ID NO: 855944 - DNA, 120 bp, Artificial Sequence
  ENSG00000287126_12 (sequence is synthesized)
gccacagacagagtggcttacggacaacagatgctcatttctcactctctggagactggaagcccaagatcaaggtggcagaaaatgccgtgtctgaagaggaactgtttccttgttcac

SEQ ID NO: 855945 - DNA, 120 bp, Artificial Sequence
  ENSG00000287126_13 (sequence is synthesized)
agcctcttctcactgtgtccttgcagaagggctgagggagctctccaggggcctccttcataagggcactcatgccatcgtgggactccactctcacgacctcatcaccacccaaagacc

SEQ ID NO: 855946 - DNA, 120 bp, Artificial Sequence
  ENSG00000287126_14 (sequence is synthesized)
caatgctgatgatactggtccagggaccacacttcgagtagcaacaaaccagatagccacaaagaggaattaatagatgtagcattaaggaagaaagattccttccagtgccaaggaaac

SEQ ID NO: 855947 - DNA, 120 bp, Artificial Sequence
  ENSG00000287126_15 (sequence is synthesized)
tcatcacagtacctccaataccgtgtcatcctggagggaccacaagaccctggatagttggcccaggacagaatactgctgggggtttggagggtggcagttaaaaagccaagatctgtt

SEQ ID NO: 855948 - DNA, 63 bp, Artificial Sequence
  ENSG00000287126_16 (sequence is synthesized)
gggggtttggagggtggcagttaaaaagccaagatctgtttacctgttaaaatatatattctt

SEQ ID NO: 855949 - DNA, 66 bp, Artificial Sequence
  ENSG00000287126_17 (sequence is synthesized)
tgattctcctgcctcagcctgccgagcgcctgcgattgcaggcacgctgttggccgggctggtctc

SEQ ID NO: 855950 - DNA, 120 bp, Artificial Sequence
  ENSG00000287127_0 (sequence is synthesized)
cagggccattttcccacggagtaagaaccagaacgccagctgccccagcggcgctcgcaccatccacccttgaaattgccgtagaagagtgaaacctctaaccaacggaggaaaattctg

SEQ ID NO: 855951 - DNA, 120 bp, Artificial Sequence
  ENSG00000287127_1 (sequence is synthesized)
gaaagtgaatacattgctctttatgtttcctaacctggggaaactacgtggagagaggcagggggagcagcagtcagcttcacggctctggccatagtccaccaagtagcccagtcacgg

SEQ ID NO: 855952 - DNA, 120 bp, Artificial Sequence
  ENSG00000287127_2 (sequence is synthesized)
atcgttgggcggatgagcagctaggcttcatcaaccttgctccagagcagggtgtccgcactgaaggaacaagcctcaaacttgaaaggatctccttcccaggataactgattggaaagt

SEQ ID NO: 855953 - DNA, 120 bp, Artificial Sequence
  ENSG00000287127_3 (sequence is synthesized)
gttcagacaaaatgtacgaaaattaaattcgccaactgcccaagattactcattcttatactattttattaaagatcattgctgatgagaattatactgattcaatattgaataataatc

SEQ ID NO: 855954 - DNA, 120 bp, Artificial Sequence
  ENSG00000287127_4 (sequence is synthesized)
cagccaccataaaagagaagaaagtaataaaacacagaaaaggtcaatacagattatacttcagctaaattatcccagtaaagagaagatttcaggcaaacaccttctccatgctttcag

SEQ ID NO: 855955 - DNA, 120 bp, Artificial Sequence
  ENSG00000287127_5 (sequence is synthesized)
agaaattaatgggaaaatggactgttaaaaaaaaaaaaaggagctcaaggaagtgataattactcaaacacataacaaatgaactgacagaactctgcaaagaatttttttaaagaatcc

SEQ ID NO: 855956 - DNA, 120 bp, Artificial Sequence
  ENSG00000287127_6 (sequence is synthesized)
actgcaaaaattaaaattaccttggaagcagcaagaaataggatactgatggaaaaaaaaattgtcaaggatttatggaacagtcctaagaaaatctaacaaaacaaaataaaacaaaaa

SEQ ID NO: 855957 - DNA, 120 bp, Artificial Sequence
  ENSG00000287127_7 (sequence is synthesized)
ccaccaaagaaatgtcattaattagacagatgatgatagctatggaagacagaaaaatgattcaatagaagcatagcataatttatttcagtaaataaataaaacaagtaaagaaagaaa

SEQ ID NO: 855958 - DNA, 120 bp, Artificial Sequence
  ENSG00000287124_0 (sequence is synthesized)
gtgtaatgcataagaaaagcagctattttggatattttacttttcagttatttagacatcacagtcatagacacaactgaacttgattgagttcattggttaaccacattcttggaagga

SEQ ID NO: 855959 - DNA, 120 bp, Artificial Sequence
  ENSG00000287124_1 (sequence is synthesized)
tgccgttgaatatcaaggaaagaatttgtcaacggtttaaatgtttactaatcacagatctctggatttttgtgtaggagatacccatggaatgagtaaatctcaaaaaagtggctttga

SEQ ID NO: 855960 - DNA, 120 bp, Artificial Sequence
  ENSG00000287124_2 (sequence is synthesized)
acatttttagagatgtgacaagagacaaaggaaaaggactttaatgctctatgggtggcaatttataggaaggcaaatgaccttcagataaactctggcagaggcaagggcctccagcca

SEQ ID NO: 855961 - DNA, 120 bp, Artificial Sequence
  ENSG00000287124_3 (sequence is synthesized)
gctaatgtgatggacacggtatctggagagtcctgcatttcaaaacttactctaaggaagactgctttgattttcaaagtctctagtctacagagagattgagctctggctgcaagacac

SEQ ID NO: 855962 - DNA, 120 bp, Artificial Sequence
  ENSG00000287125_0 (sequence is synthesized)
gaacatactctggttggttcctaaaagagaggacacttgaaggaaatcggagttcaactgcagctgataaagcccagctccttgcagccaatcggcaaggccacggccaacccacagacc

SEQ ID NO: 855963 - DNA, 120 bp, Artificial Sequence
  ENSG00000287125_1 (sequence is synthesized)
cgtgagtgaggaatcagtgctcgctgttgaaggcacgtgaggaccgcagaagtgatgtgatgtgacttcagagactaggtcatcacaggcgatacagcttccacctggttttctggagat

SEQ ID NO: 855964 - DNA, 120 bp, Artificial Sequence
  ENSG00000287125_2 (sequence is synthesized)
gctcttgcttggatgtcagctgccatgctgtgaggaagcccaagccgcccagggagaggttctcgtggagaaaaacaagagcccagaaccaacttggcagccacgtgcagcctcagcacc

SEQ ID NO: 855965 - DNA, 120 bp, Artificial Sequence
  ENSG00000287125_3 (sequence is synthesized)
cggcataggcccagctcagtaaatctctgctcaatgaatacatgaacaatttgtcccaccagctccagaggtatcacagagaggcaggtagggctgccgatttgggcctctgtctcccac

SEQ ID NO: 855966 - DNA, 120 bp, Artificial Sequence
  ENSG00000287125_4 (sequence is synthesized)
ctcctcaccctctccctgggaagaactctatttcctcgccgctcccagcagtgagctgcatctggaaggcccagggtccggccccagcctgggcacgagctgtgtttccaagtctgtcct

SEQ ID NO: 855967 - DNA, 120 bp, Artificial Sequence
  ENSG00000287125_5 (sequence is synthesized)
gtccggccaaactgcagcggccaacaagatggagcagcggtcctcccgctggcaggggaaggagcatccatcaattaccttggctggccggagccgcggcgtggcgggccagcccggccc

SEQ ID NO: 855968 - DNA, 120 bp, Artificial Sequence
  ENSG00000287125_6 (sequence is synthesized)
catccatcaagcgtcctggctgctggcaggggctgtctactaattacttaacacgccgcgtcgtgctgaggctggcgccgtggcagggggctcacggtgcagtgtacacaggtctgacca

SEQ ID NO: 855969 - DNA, 120 bp, Artificial Sequence
  ENSG00000287125_7 (sequence is synthesized)
taaatgtttaacgaacccagtgggaggtggggacgcaagctaggccccgtggccaggaaggacgcccctgagagctgtctccaccgggcccccacagccgacccggcttggcggtggagg

SEQ ID NO: 855970 - DNA, 120 bp, Artificial Sequence
  ENSG00000287125_8 (sequence is synthesized)
cgggcacgtccaggtgcttgtcgttcaggacgggggcctcgtcgtggctgctgctgctgctgctgacacacatttgaaagcctgagaagccaggcgtggagcacacacgcacgtacacac

SEQ ID NO: 855971 - DNA, 120 bp, Artificial Sequence
  ENSG00000287125_9 (sequence is synthesized)
gacagagagacaggcatcagtggccgccgggaaccgcgggcgccaccctcccttcactatcacctgggtcctgacgcctcgcagcaaggagcgcagctgtccccgcatcacagatgaaaa

SEQ ID NO: 855972 - DNA, 120 bp, Artificial Sequence
  ENSG00000287125_10 (sequence is synthesized)
ccggcgtctcaggaatgaaaaaggagcccttgtcacatctcacagaaccatgagtcgggaaacagattttgggaaatgctgatcataggctagttggcctctgggtccagttgtcagcct

SEQ ID NO: 855973 - DNA, 120 bp, Artificial Sequence
  ENSG00000287125_11 (sequence is synthesized)
ttaccatgtggcccagccagctgcagcctcattcccggccaccagcccccactctccacagcgctccagcctccactctccaaagtgctcacacttccccagactccctaggctcctggg

SEQ ID NO: 855974 - DNA, 120 bp, Artificial Sequence
  ENSG00000287125_12 (sequence is synthesized)
gccccttcgtgcctttgcatatgctgctccccccgcctgggatgctctttcttcctctgcctgagtaacaagctcctgcttatccttcaaagcccagtgcaacgggctcttccttgggaa

SEQ ID NO: 855975 - DNA, 120 bp, Artificial Sequence
  ENSG00000287125_13 (sequence is synthesized)
aggtgtcccagcagatctggctgctccctcttttgcccatctgcactcactcattcatcaatgaatgacatgatttatttttacttctgcctctctttgctgtgaacacctggaggacag

SEQ ID NO: 855976 - DNA, 120 bp, Artificial Sequence
  ENSG00000287125_14 (sequence is synthesized)
gaggacagtctctatttcattcatctgtgtttcccttgagcctagcgcatgctcgagacagagtaagtaggagtgctttaaatttcaaatgccagccgggcgcggtggctcatgcctgta

SEQ ID NO: 855977 - DNA, 120 bp, Artificial Sequence
  ENSG00000287129_0 (sequence is synthesized)
ggccacagtaagagtatttatgccataaatattttaaaaatgctacaaattaggctttttcattttgtgatgagagctagttgttaaataaacatttaccagcacatcattataccaaac

SEQ ID NO: 855978 - DNA, 120 bp, Artificial Sequence
  ENSG00000287129_1 (sequence is synthesized)
tgtataataatataaagaggaaaaaatagagcaggtgaacagaaaaatggaccaaaaaataaaaaaaggttagaaaaaaaagaactataaaaggttaatgaaatagagattgataaacta

SEQ ID NO: 855979 - DNA, 120 bp, Artificial Sequence
  ENSG00000287129_2 (sequence is synthesized)
tatgatagttcttgtccatcaggcataagcagaaatgttggccatttgggaaaagcttcagttttatcagatatacattcatactttgaggcggctggcaagatggcggaatagaaacag

SEQ ID NO: 855980 - DNA, 88 bp, Artificial Sequence
  ENSG00000287129_3 (sequence is synthesized)
ctttgttcttgagagtttgaagcttacattgtctaaaaagttgggattcaaagtgacagttgatcctgactcacacgtcaaaataatt

SEQ ID NO: 855981 - DNA, 120 bp, Artificial Sequence
  ENSG00000287129_4 (sequence is synthesized)
caaagtgacagttgatcctgactcacacgtcaaaataattcaagagatttccttaagctctatcgtgctttaaaatcaacatgcctgggaatgtaaattagtatcgtcattagagaaaac

SEQ ID NO: 855982 - DNA, 120 bp, Artificial Sequence
  ENSG00000270522_0 (sequence is synthesized)
atcctaaccccaggtgacatgttgcctttttttcctccttggaggctactttttctcaaagttacccacttcccaggtaagaatgccggcctcctctttgttaggattcaacttagctgt

SEQ ID NO: 855983 - DNA, 120 bp, Artificial Sequence
  ENSG00000270522_1 (sequence is synthesized)
cttagagtcaggctcgtccaagaaccgctcccaccacctccccacacacacccacatcccccgatcctccatcccaactacattgtaatacttcagaaataaatgtttaaagcacattta

SEQ ID NO: 855984 - DNA, 120 bp, Artificial Sequence
  ENSG00000278737_0 (sequence is synthesized)
agaatcatgagggctgcagaggacgctgctgggacaagacctcctctaggggggtcctgtatcccatgcctattactggcctgctggggccagcctgtcttctgacagctgtgtctccca

SEQ ID NO: 855985 - DNA, 120 bp, Artificial Sequence
  ENSG00000278737_1 (sequence is synthesized)
ccagcacagttaatttgctgccgttcctgggatgtgacagcaacttgaagcaaagcaattaggatgaaaaagaggccccagctccttgaggccaaaggaaaataaacagagcagccctgt

SEQ ID NO: 855986 - DNA, 120 bp, Artificial Sequence
  ENSG00000278737_2 (sequence is synthesized)
gccattcttcaagggatgattagcatttctaatcccagcttcctcccttcccttgaaagaaaagtgaccggtgagcggctgctcttttcagatcccactcttcccaaggtggactgcaaa

SEQ ID NO: 855987 - DNA, 120 bp, Artificial Sequence
  ENSG00000278737_3 (sequence is synthesized)
cttgacagctcgtcacctccacagaaaagtcttccctggccacctgccacagccctgccagaaatgatactcctgtcctctgaaatctgagagcctttctctgtacctttcctatggagt

SEQ ID NO: 855988 - DNA, 120 bp, Artificial Sequence
  ENSG00000278737_4 (sequence is synthesized)
ttccttgattgactgatcaattcattaatgcattctttcaacaaacatccgttgagtgccattcattcattcaacaaatatttcttaagtccctactaaataaatcatctcttaagctgc

SEQ ID NO: 855989 - DNA, 120 bp, Artificial Sequence
  ENSG00000278730_0 (sequence is synthesized)
ggagcagtccgtcttcaaggtccagataacatgagaaatgaagcttctcacatcgttgttggggatgacggactgtagttgatgggttagcggaatttcaaactgatcacctggggatga

SEQ ID NO: 855990 - DNA, 120 bp, Artificial Sequence
  ENSG00000278730_1 (sequence is synthesized)
gagcaatgggtaactgaagcttttgggctcgggggacaggtcagtgcccacgttgttgtattcccattttgtctcagtttgtttaacagttggctctaagttgaatgcagtcctagtggg

SEQ ID NO: 855991 - DNA, 120 bp, Artificial Sequence
  ENSG00000278730_2 (sequence is synthesized)
aatctgcctcaggaagatgattgtagtttgtgttttcagagatggtgccttctggcatagtagtgttttccataaaaacgttttcttcagaggcatttcttgcagttgtgttttttacag

SEQ ID NO: 855992 - DNA, 120 bp, Artificial Sequence
  ENSG00000278730_3 (sequence is synthesized)
tagtgttttctataaaacattctgaaggagcaaatacttctggaaaagggttttcttgaggactcaggtctcctgaggatgaaaaagccccttgtgaaggggaatttatgaggctcttca

SEQ ID NO: 855993 - DNA, 120 bp, Artificial Sequence
  ENSG00000278730_4 (sequence is synthesized)
ctgcagagaacggcggcctctttgcgagcatcagtctattgagataacttttctttctcaattttctaatctttttggccttgggtgttctgtgggccacacgggagtgagttttatgaa

SEQ ID NO: 855994 - DNA, 120 bp, Artificial Sequence
  ENSG00000278730_5 (sequence is synthesized)
agtggtatttttttctggaatgtactactcgtttagcagccttcatattttttaactctagcctttgcattttctaaaattaaaatggtgtaggctaagtctttcaatctgtctatgacc

SEQ ID NO: 855995 - DNA, 120 bp, Artificial Sequence
  ENSG00000278730_6 (sequence is synthesized)
tgaggtagggcttttgcagttgtggaaggcagaaggcatgcccatggagaagggtttcagcaaagaggagactgttggcttctgctcttgggtgaatgaaggcttggtgtagacggcgtt

SEQ ID NO: 855996 - DNA, 120 bp, Artificial Sequence
  ENSG00000278730_7 (sequence is synthesized)
tcccgctacgttctcgggcccctgcactatgtgaggctattccagctcccttggggctggactcccgagccttttttctttggcagcattctccccaaatgcctgggcaccctgttccct

SEQ ID NO: 855997 - DNA, 120 bp, Artificial Sequence
  ENSG00000278730_8 (sequence is synthesized)
cctgatactctgctttcccaccgctttgaagggccttttctggatgctccttgggcccatgaggactctgttcactctctgcaggtttttgcctacactttgaacctttgccaggctgtt

SEQ ID NO: 855998 - DNA, 120 bp, Artificial Sequence
  ENSG00000278730_9 (sequence is synthesized)
ttcctgtggttggacagtttctaatttcttttcaaatatttggcatttaaatttgttacctagaaggctggactgcataagcatggcagttttttcttcccttttaacttcatcgatttt

SEQ ID NO: 855999 - DNA, 120 bp, Artificial Sequence
  ENSG00000278730_10 (sequence is synthesized)
tttcttgtatttctgcatctaacatcttttctagcaaatacacctttctcaatttattttcataagttgaattgttggatgcaggttgaaacaaggggctctttgtattgtttttcaaaa

SEQ ID NO: 856000 - DNA, 120 bp, Artificial Sequence
  ENSG00000278730_11 (sequence is synthesized)
caggagcttatctccatcttgcacatttgaaaaaagcagtttaatgaatggtaacaacattgattccgcatctagatttcctgctgagaaataaggcaagatgtaatttagcgcagtgat

SEQ ID NO: 856001 - DNA, 120 bp, Artificial Sequence
  ENSG00000278730_12 (sequence is synthesized)
agactgacaagttgatgccactgctgtctgaggctgcctccggctcagtagtcagctcaatgctcatgtgcttcttctgggcttgtaacaccttcatgaacactctttctggattcccta

SEQ ID NO: 856002 - DNA, 120 bp, Artificial Sequence
  ENSG00000278730_13 (sequence is synthesized)
cagatgcttcttcacctgtcaaaaaaaagagactgctttgatcatgaaagataatggaacggcatgcatcagtccacagctgtatgccccagtcacacaaagtaggagtcagcaaacatt

SEQ ID NO: 856003 - DNA, 120 bp, Artificial Sequence
  ENSG00000278730_14 (sequence is synthesized)
agagtgccattcagagaggagaaacacacacccaagcctaaatctatgaaatggcaacaacaaaaggaggaaaagacatcttttgaaaatatggctacttacttggaacattcctagtgt

SEQ ID NO: 856004 - DNA, 120 bp, Artificial Sequence
  ENSG00000278730_15 (sequence is synthesized)
gacatagagtaactctgcttaggattatttcgttgatccccaggggccaattgcccagtgctcagtcaaagcccaaggtggaagacaagtgcttccctgatgagctgtcctctctgcaga

SEQ ID NO: 856005 - DNA, 120 bp, Artificial Sequence
  ENSG00000278730_16 (sequence is synthesized)
ctgctccgtaccctgtgctgtcctgcctcagatgcagagagagcacaagcctccctcctcatcctcagtgtgcctgtgttcttactaccatcacagctgaatgcaatgaaaggctatcct

SEQ ID NO: 856006 - DNA, 120 bp, Artificial Sequence
  ENSG00000278730_17 (sequence is synthesized)
ctgagaggagcagggtggagatgctaaagtggaggccccctcccattgctgatagatcctcatctggcatgcactccacccacccaccccattctctgctaccacatatcgtagccccat

SEQ ID NO: 856007 - DNA, 120 bp, Artificial Sequence
  ENSG00000278730_18 (sequence is synthesized)
taaagaagaagtgacatggaaaaaacactgtgcccaccctagtccttttcttaaatttgggcagagatccagggtataggttaagagatttttaatttgccagatggtatgcctatgttg

SEQ ID NO: 856008 - DNA, 120 bp, Artificial Sequence
  ENSG00000278730_19 (sequence is synthesized)
ttaaatatacaatgaatctatggtatgatagcagtttctggataaacattacttgaggtcctaaaatgcagaagggaaaaagcagcttttgtcagatgcttactttgctttcatttcatc

SEQ ID NO: 856009 - DNA, 120 bp, Artificial Sequence
  ENSG00000278730_20 (sequence is synthesized)
tctaatattttggatggggaaccatccaaagcttctggccgcatgaaggtcaagtgtgccagtgtgcagctgggtttcttttccagaattaaaagtattttgggtggtgctgagggtcag

SEQ ID NO: 856010 - DNA, 120 bp, Artificial Sequence
  ENSG00000278730_21 (sequence is synthesized)
aggaagaagtaaaaattgtgagaaaggagaaacatgggcttggggagaacccagaattggggacagaagacctggcactaagctatagcacttagcacctctgatcttgtttttcctcgt

SEQ ID NO: 856011 - DNA, 120 bp, Artificial Sequence
  ENSG00000278730_22 (sequence is synthesized)
ccgtaaaaggagattaacaatgcttttctgcccacctcttggggagaagggaataatttagttggtaaaaaaaaaacttttgaataataagcaactctgtctttatataagtagccaagc

SEQ ID NO: 856012 - DNA, 120 bp, Artificial Sequence
  ENSG00000278730_23 (sequence is synthesized)
attattaattatccaccccatatcactggtagatacctgtattcaagctatgtggacataaaagcagtcacattttagaagtcatgaagttggtgctaataaacctaatctacagaaaaa

SEQ ID NO: 856013 - DNA, 120 bp, Artificial Sequence
  ENSG00000278733_0 (sequence is synthesized)
aaaagggaacaggtgaggagccggacttaaaacttgttaagaatcaaacataaaaaattatgtcagacacaattacatattcttagatctagtttaactgcaactaacaatatagttgtt

SEQ ID NO: 856014 - DNA, 120 bp, Artificial Sequence
  ENSG00000278733_1 (sequence is synthesized)
acatatatatatgctttgaaagtgattatcatggacactgtagttgcaatcccaacatttattccactcttcccacattgtgcatagtacacctaagaaattgaggtgaaattaacctca

SEQ ID NO: 856015 - DNA, 120 bp, Artificial Sequence
  ENSG00000278733_2 (sequence is synthesized)
gcaaattggcaccaattacaggactttagccccaaaattgtgggctgtggctcctttctctcccttgataaatgagaaagcatgtggttcttgttactgagggcagtcatcttgtaacca

SEQ ID NO: 856016 - DNA, 120 bp, Artificial Sequence
  ENSG00000278733_3 (sequence is synthesized)
agaaaataaaaaagctggaaccctgatcaaataagcaaagatttataactttgtatataagaagaaggacataaacagtaaactgtgaaggttttaaataaacacttttctgcctccttc

SEQ ID NO: 856017 - DNA, 120 bp, Artificial Sequence
  ENSG00000233945_0 (sequence is synthesized)
ggcccccagattcctcctcctgtttgtgagctcctaaggtgaccctttggctcctgagcaaccatgacacccttggctacaccaaagctcattgaaaatcattacagatggactccatga

SEQ ID NO: 856018 - DNA, 120 bp, Artificial Sequence
  ENSG00000233945_1 (sequence is synthesized)
accagtgtttagaaagcgctgctatatgtttttaggaatacatagggaatttggtaggaagattactctgcctcaggcatattcggagtctcatgggggtatctgtgaagaagacgagca

SEQ ID NO: 856019 - DNA, 120 bp, Artificial Sequence
  ENSG00000233945_2 (sequence is synthesized)
ctcttctgagggtaagaaatcagcaaaaactccaaatcagcaaaggaaacagacttaaaatacatgctcatttccaaaaggtctgactccattcttctttttgccaatttttagatccca

SEQ ID NO: 856020 - DNA, 120 bp, Artificial Sequence
  ENSG00000233945_3 (sequence is synthesized)
tataatcttggatagaaaaatgatctatactgcatcagaatcatggaacctattggcaaagggcattctgtcccttcaattgtagcttcaacctcattgtctaataaataataactacca

SEQ ID NO: 856021 - DNA, 120 bp, Artificial Sequence
  ENSG00000233942_0 (sequence is synthesized)
aacactatgctttcttaggcaggtactattattatctgctttttttaacagatgaagaaaccgagccacacagaggttaaataacttgcccaagggtgcacaactactagtagtattgag

SEQ ID NO: 856022 - DNA, 120 bp, Artificial Sequence
  ENSG00000233942_1 (sequence is synthesized)
tctatacgcttaagtattgtgctattccatttcttactgaatacaaagcaaaaaaacataaggatcagaggaggagtgtgagtgtcctcatactcacagcaaaaggagggaattcaggag

SEQ ID NO: 856023 - DNA, 120 bp, Artificial Sequence
  ENSG00000233942_2 (sequence is synthesized)
acagaaccaacagatggggaacaatggtcagggactccaggcctgatttaagccaatgccgccctgtggtctttacccacgaatggtgtggaaaatgagagcagggaagaggatttactc

SEQ ID NO: 856024 - DNA, 120 bp, Artificial Sequence
  ENSG00000233942_3 (sequence is synthesized)
actggctgtggagttaggtcagaagggggatggaaagaaggaaccggatggctttggggacatttcttaatctttaggcttcaccttccttaactgaaaataaagccataagttacctcc

SEQ ID NO: 856025 - DNA, 120 bp, Artificial Sequence
  ENSG00000233941_0 (sequence is synthesized)
atcataagggtaaaactcaaatttttacatatttatgtggttggggtgtgaaaagttttttaatggagagttgacattgtcctagaaaattcttccgtatgtggcttttaaatgtatgat

SEQ ID NO: 856026 - DNA, 120 bp, Artificial Sequence
  ENSG00000233941_1 (sequence is synthesized)
ggcaggcagatcacttgaagtcaggactcaagtgacttgtccgcctcagcctcccaccaaagtgttgagattacaggggtgagcccctgcacctgacccatagcagtttttcatttaaaa

SEQ ID NO: 856027 - DNA, 120 bp, Artificial Sequence
  ENSG00000233941_2 (sequence is synthesized)
aaattattgtatactgttccatgatatgaatatgccacaattcatttatccattattgtggatggacattaggttgtttccagtttggggctattatgaataaaattgatatgaaccttc

SEQ ID NO: 856028 - DNA, 120 bp, Artificial Sequence
  ENSG00000232010_0 (sequence is synthesized)
caggaagcgagatgcgacgtccaggtcttccttgttcagcaccagattgtccacgaacatccagaagaagggcctggggctgcctggcttgggccgtgcgtactgcaggagccggtggaa

SEQ ID NO: 856029 - DNA, 120 bp, Artificial Sequence
  ENSG00000232010_1 (sequence is synthesized)
ctggaacagcagcaatgaagccctgcccagtgctggggccacagaggtgcatggacccctcctcccccaggcaggcctagagtggggaagagacagacaggcaaccccgagggaggagct

SEQ ID NO: 856030 - DNA, 120 bp, Artificial Sequence
  ENSG00000232010_2 (sequence is synthesized)
aagctccagaggacacgtgagctgcagtgatgtgggcacgctgggggctgcatggggtcagcgggaggcttgggggcacagggaagcctgcagtgatggggactcttactctgttgctct

SEQ ID NO: 856031 - DNA, 120 bp, Artificial Sequence
  ENSG00000232010_3 (sequence is synthesized)
cttactctgatgaggggtgcatgggtgtggagctagctcagaactcatccagtcggacacactgaatgcgtgcaacttactgtatgtcagtggtgcctcgataaagctgtttttgaaaaa

SEQ ID NO: 856032 - DNA, 120 bp, Artificial Sequence
  ENSG00000232019_0 (sequence is synthesized)
ccggaggctgccatggcgggtgggcagcttgacttctcctcccggccagttgtcgagcgcctcaccaggcctcgccctgcagcctcgctctccctggcgctgcgcggcctaggggactgg

SEQ ID NO: 856033 - DNA, 120 bp, Artificial Sequence
  ENSG00000232019_1 (sequence is synthesized)
gcaggctctgacctggggcgttctggccgcgcgagccgcgggatggggcccccggccccggaggaggcgccgctgctgtgtcccttggtggagagggcgctgccagccctgcgcggtttc

SEQ ID NO: 856034 - DNA, 120 bp, Artificial Sequence
  ENSG00000232019_2 (sequence is synthesized)
gagggcgctgccagccctgcgcggtttccagccaggaagcttcgggaagcctggacgtctgctcactggagatgacacgtgcgtggggtgttgggaaggaggtgacttcgcctgtgatgg

SEQ ID NO: 856035 - DNA, 120 bp, Artificial Sequence
  ENSG00000232019_3 (sequence is synthesized)
catcaacagccctgatccagatgcagaggccaggatgtgggcccagccctgtgccagaaggctggctggaataaagggatgggcaggctggcatgggggcacccgctgcccctgcctggg

SEQ ID NO: 856036 - DNA, 120 bp, Artificial Sequence
  ENSG00000232019_4 (sequence is synthesized)
tgttgctgtgtattcccgccggccaggggccactgccaggaccacccctcccttttcatatcccgattcttaagttctgctattgtggtattgtggtcgaaaaaaaagaaccgcttggct

SEQ ID NO: 856037 - DNA, 120 bp, Artificial Sequence
  ENSG00000232019_5 (sequence is synthesized)
gtttttgaactgcctggaacctaagatcctgaattttttttcccccccaagggggaaagtctatatggaaaacatttattttaaaatacaggatgaagtgaattaaaagatttaaatgca

SEQ ID NO: 856038 - DNA, 120 bp, Artificial Sequence
  ENSG00000287786_0 (sequence is synthesized)
taaaaaaatgaccctttaatgttttgtatctcatttttgaattgagagacgtggctacctttcagggcacagtaagaaggcagcctcctgcgaaccaggaagaggggcctcaccatgaac

SEQ ID NO: 856039 - DNA, 120 bp, Artificial Sequence
  ENSG00000287786_1 (sequence is synthesized)
caagttgtctggcaccatgatctcagacttccagcctccagaacggtgtaataattttaaactgtgaaaacatcacaccaactcaaatgggctgcaaacccaatattaaccctggtagac

SEQ ID NO: 856040 - DNA, 120 bp, Artificial Sequence
  ENSG00000287786_2 (sequence is synthesized)
cccactgcagggacctgggctgccaggtgaacactcagctttgtgcagggcttgggggacagcctctcctgtcatctccagtgaaatgcactctgagaatgcaagacaagtcactcccaa

SEQ ID NO: 856041 - DNA, 120 bp, Artificial Sequence
  ENSG00000287786_3 (sequence is synthesized)
aaacggaatcacaaatgcggtatgcaaatcgtcacaacagaatattttcacaaccacaacaaagtccattaatactcaagatgccacagctgttcagattgcaactgtcaccctatactt

SEQ ID NO: 856042 - DNA, 120 bp, Artificial Sequence
  ENSG00000287786_4 (sequence is synthesized)
ttcgttttgaaagttgaattcatcagagcaacctcactgtcctcactgactgaccttataactggtaaatgttgtcagtttaaagtcataagataaatgtgagaataaaccatcacttct

SEQ ID NO: 856043 - DNA, 120 bp, Artificial Sequence
  ENSG00000287786_5 (sequence is synthesized)
tgtatcacactgtcctgtgagtatcatcccttctcaataggcagaaaccaggtgcccagcacatagcagacactccacaaatgccctagggaaggaagaaccgctcccaggcaccacagc

SEQ ID NO: 856044 - DNA, 120 bp, Artificial Sequence
  ENSG00000287786_6 (sequence is synthesized)
caggaagggggcatgcctcgaacacacgcctccctactcccagcccactgctggttttcagactctgccgccttccctcctttcctagaaatgacaatacagcccacactcagcatcaca

SEQ ID NO: 856045 - DNA, 120 bp, Artificial Sequence
  ENSG00000287786_7 (sequence is synthesized)
aggagggagagagggcaaggcaagtgcagtataagagccagggtgccttccctcttcctcaagaaaatactagaagccaagcacaccctccaccctgagcgccagtgtgggatgggtgct

SEQ ID NO: 856046 - DNA, 120 bp, Artificial Sequence
  ENSG00000287786_8 (sequence is synthesized)
atatggacgggaagagctgctgtctgcactctaggaaacaagggtcccccgcgctcacctgtagattcagcaagagagcaggggtgattgtgcctatcgaagggaagcaaccaattgtca

SEQ ID NO: 856047 - DNA, 120 bp, Artificial Sequence
  ENSG00000287786_9 (sequence is synthesized)
actattttagaaacagccaaacagaatgcataactacaggataagtggagtgatggttaatattgagtgtcaactcgattggacagaaggatagaaagtattgttcctgagtgtgtctgt

SEQ ID NO: 856048 - DNA, 120 bp, Artificial Sequence
  ENSG00000287786_10 (sequence is synthesized)
gaggatcttaccaaaggagattcacatttcagtcagtggactgggagaggcagacctgccctcggtgtgggtgggcaccatctcatcagctgccagcacagctagaataaagaaggcaga

SEQ ID NO: 856049 - DNA, 120 bp, Artificial Sequence
  ENSG00000287787_0 (sequence is synthesized)
gaacaaaacagcccctgctatcagagagctccagtctggttgggaaggcctgttcttcatgcatgaatggagaagatggttagtcatcctgcagtggtttagtgagcacctgctgttctc

SEQ ID NO: 856050 - DNA, 120 bp, Artificial Sequence
  ENSG00000287787_1 (sequence is synthesized)
agtgaaggctactgcacgcaggcctcttctcacggacctcaacgaacgctgagctgctcttctctttgaattccaaagagacatctaaaggaagccctcagctctgaagaccacctagct

SEQ ID NO: 856051 - DNA, 120 bp, Artificial Sequence
  ENSG00000287787_2 (sequence is synthesized)
ggaatctcagagggagagctggggacaggaaaggatgactactcccaccattctgtggacaccgagtccagcctccgggaggacgctgagggaaccttttgggacagccagggcagagaa

SEQ ID NO: 856052 - DNA, 120 bp, Artificial Sequence
  ENSG00000287787_3 (sequence is synthesized)
cgccttttacttcttaaggctctggatcaaaacagagaagcttctgttttggagcctggcaatcctcgaacatcagtgtgcattttaagccataaagcgcaatactgattacaaacagga

SEQ ID NO: 856053 - DNA, 120 bp, Artificial Sequence
  ENSG00000287787_4 (sequence is synthesized)
accttctcatctatttattaaaactgaccccagaaagattttcaacagggaagcctggctttatgttgtgtatagccacaaagaagaacatatatttttaaaacacattgcctggggaag

SEQ ID NO: 856054 - DNA, 120 bp, Artificial Sequence
  ENSG00000287787_5 (sequence is synthesized)
gctctcgctctgtcagtggttcttgaattctgcaagacagctgtttccttcctttcagtctgaatcagagaggtttgcagcaaaagccattttggagagaccaggtcaagttcagccttc

SEQ ID NO: 856055 - DNA, 120 bp, Artificial Sequence
  ENSG00000287787_6 (sequence is synthesized)
tcagatccaattttgccactaccatgacccacaggagaaattcctcccagcttgggactgtgctatctcggatgacgtgacagcgacaagccatttagagtgtgacttggggcttttcag

SEQ ID NO: 856056 - DNA, 120 bp, Artificial Sequence
  ENSG00000287787_7 (sequence is synthesized)
aagcgcagatgcacgggaggtctgcattcaggtagtgacaggtcacaaggacagccgtggaggctccaaaattggcctgggaattgggattcagttccacaggatggggcggggcctgag

SEQ ID NO: 856057 - DNA, 120 bp, Artificial Sequence
  ENSG00000287787_8 (sequence is synthesized)
tctctgcatttctgacaggctctgaggggctgctgcagctgctggtctcagccggttttgcactagcgaagctctcgacccaggccgcccacaggaaacagaatgccagccagatacagg

SEQ ID NO: 856058 - DNA, 120 bp, Artificial Sequence
  ENSG00000287784_0 (sequence is synthesized)
agactgatgccgtgagaccagactgaaggtggaggaggcagcatggaaatggagaccagtcagaaggctgagagtctaggcaaggaagtgagactcccctgagcgcaccaggctgcatgc

SEQ ID NO: 856059 - DNA, 120 bp, Artificial Sequence
  ENSG00000287784_1 (sequence is synthesized)
agctcaggccacgtggagaagccatggagaatgagacacaccctggaggagagcatggccaagaagcaccagataagtgacgaagaagcttctcagaggcggctctcccggctccagctc

SEQ ID NO: 856060 - DNA, 120 bp, Artificial Sequence
  ENSG00000287784_2 (sequence is synthesized)
cccaatggccatcatgtggagtcaagaagaaccgttctgttgagccctctccaaattcctgacccacaaaattgtgagcaaactaaaacagctaattgaagtccctatgttttggagcac

SEQ ID NO: 856061 - DNA, 120 bp, Artificial Sequence
  ENSG00000287784_3 (sequence is synthesized)
tttgttatacagcagtggataactgcaacatgacccaacagccagcaagatcttttaaaaatggaaaccaaacaatgccactcctcaacttcaagctctccagtggcttcttattacaaa

SEQ ID NO: 856062 - DNA, 120 bp, Artificial Sequence
  ENSG00000287784_4 (sequence is synthesized)
atctggacttttcaccatggcctgcagggctctggacagtctgggccctgtccccattgccactcccttcctccctgggctccatccacactgtcctcaaccctccagcacagtaagtgc

SEQ ID NO: 856063 - DNA, 120 bp, Artificial Sequence
  ENSG00000287784_5 (sequence is synthesized)
ctgctaagatgtcatctcctccactttacacccatctgggtgcctgttaacaagaaaacaggaaataacaagggttgatgaagatgtggagaagttgaaatcccgatacattttatatga

SEQ ID NO: 856064 - DNA, 120 bp, Artificial Sequence
  ENSG00000287784_6 (sequence is synthesized)
tacatgtactataaaatgatacactttatagtaagatggcactgttctgctgcggaaaacagtatggtgttttctaaaaaaattaaacagaattactgtatgacctggcaatttctcttc

SEQ ID NO: 856065 - DNA, 120 bp, Artificial Sequence
  ENSG00000287784_7 (sequence is synthesized)
tgggtaaatactcaaaagaattgaaaccagaatctcacagagataattgtatgcccatattcgtagcagtattattcacaggagctaaggggtgggagcaacccaagtgtccatgacaga

SEQ ID NO: 856066 - DNA, 120 bp, Artificial Sequence
  ENSG00000287784_8 (sequence is synthesized)
tgaatggatgagcacatgtggtctatccacacaatgggtattactgagccttcaaaaggaagacaattctgcacatgctacaacttggatgaaccttgaggacattatgctgagcgatat

SEQ ID NO: 856067 - DNA, 120 bp, Artificial Sequence
  ENSG00000287784_9 (sequence is synthesized)
aagccagtaaaaaaaggaaaatactgtatgactccacctatatgaggtactagtatagtcacattcctagagacacaaagtagaatggtgggtgccagaagaggagggaatggggagtta

SEQ ID NO: 856068 - DNA, 120 bp, Artificial Sequence
  ENSG00000287784_10 (sequence is synthesized)
gtgtttagtggggacagagtttcaggtttgcaagatgaaaaaagatagagacacatggtggtaatggctgcacaacaatgtgaatgtgcttaatgccactgaacttaaaaatggttaaga

SEQ ID NO: 856069 - DNA, 120 bp, Artificial Sequence
  ENSG00000287780_0 (sequence is synthesized)
tgggggaccacgcgccgtcccaacaggctggaagggtgccgccacgactggcccctccaggaccatatttccctttaaatgctgaaaatttagtgtggaattgatatgtactgtatgcat

SEQ ID NO: 856070 - DNA, 120 bp, Artificial Sequence
  ENSG00000287780_1 (sequence is synthesized)
aaaccacacgctggatgtctaagactggtgagcaagtcttgacatctggaggagtttccaccatccaagaaggaaaaggcaaaggtccacatgggaagctggaggtgaatgggagagaca

SEQ ID NO: 856071 - DNA, 120 bp, Artificial Sequence
  ENSG00000287780_2 (sequence is synthesized)
gaggctgctcagataggggctttggtttcctgtctgcctgtcagagcaggaggaggtgggccttgcagcaccttgcatctgcgtcacttcatttgtaagaagatggctggaatggtgaaa

SEQ ID NO: 856072 - DNA, 120 bp, Artificial Sequence
  ENSG00000287780_3 (sequence is synthesized)
ctgaacctgtgtgatgttgtagaaagaagattgtctagggtgtcaaagcagacagatgccagtttgtgctcatcctttaccagactggtgcctacagtgagtcacacttgttaagtacag

SEQ ID NO: 856073 - DNA, 120 bp, Artificial Sequence
  ENSG00000287780_4 (sequence is synthesized)
tgtggtaagtaagaattcaggttccagagtcagactgcagctccagttcctgaactgtgtaatttgggagagacactcagcttttctgagcctccttatcctcatccgtaaaatgaggac

SEQ ID NO: 856074 - DNA, 120 bp, Artificial Sequence
  ENSG00000287780_5 (sequence is synthesized)
aattactagcattgctggaggattaaacaaaataataaatagaaggcacttacttagcacaggtcctggcacatggtaaacatttaataaacagtgtctattactatgttttaactgtta

SEQ ID NO: 856075 - DNA, 120 bp, Artificial Sequence
  ENSG00000287781_0 (sequence is synthesized)
tttcaatccttcctccccaaaatgcttgactccacagtgaacgctctcccctctcccagcccttctgcagttcatgtgaatccccaaaccttcctctctacaaacagttcacattcccag

SEQ ID NO: 856076 - DNA, 120 bp, Artificial Sequence
  ENSG00000287781_1 (sequence is synthesized)
gtaaaccccagggtaaattctcattctgtaagctaacatccacttttaaccccttagttatttgcagttcttccatccctaaagccactccacaataaacccctatccatgctccctaaa

SEQ ID NO: 856077 - DNA, 120 bp, Artificial Sequence
  ENSG00000287781_2 (sequence is synthesized)
tgactacactccacagcaaatcctaatcctctcgtgcccacagcccaatcacatgccagagtaacaccgatcctcaaatacgacacatccttcacacaccgtgataaactccaatcctcc

SEQ ID NO: 856078 - DNA, 120 bp, Artificial Sequence
  ENSG00000287781_3 (sequence is synthesized)
gaccaacagccacttcttactccttcgtaatccctagtaatatctcctacaaccacttcacacagtgattccaatgctccctccctatatacatctcattccacactaaatccttgttct

SEQ ID NO: 856079 - DNA, 120 bp, Artificial Sequence
  ENSG00000287781_4 (sequence is synthesized)
ctctccacataaccacttcacatgccacgagaagccccattccttcaatttccctaaattctccaaaggattttgataattgaacaaatattttataataacatcgtggagagatgttaa

SEQ ID NO: 856080 - DNA, 120 bp, Artificial Sequence
  ENSG00000287781_5 (sequence is synthesized)
ctaaggatttacagtgaaagaagtgtcaccttttctgcataaggatatactttgccacgctattcatactgctgaaaactggatgaatcttaactaacattgactactgtgttaggatta

SEQ ID NO: 856081 - DNA, 120 bp, Artificial Sequence
  ENSG00000287781_6 (sequence is synthesized)
gtcattgctgactgtgccagcctgcagcctcataatcagagccttgtcaccaagcatggctgcctcagtgactggaatggaaatgaaaataaagcaagtgttattttcctcatcctgaag

SEQ ID NO: 856082 - DNA, 120 bp, Artificial Sequence
  ENSG00000287781_7 (sequence is synthesized)
caacagagaactgcatcaggcttaccaacatgaacgtgggtaagaaggagttttgaagtccagcaaagattttatagctagtgaggctggctggaagcagggtcgatctggtctgatgtg

SEQ ID NO: 856083 - DNA, 120 bp, Artificial Sequence
  ENSG00000287781_8 (sequence is synthesized)
ttgcaagatgtgaacttattaaggcatcacagaggcaactcccagcgggggtggaggagagcagcagggatggaaaggaagaagactctcaagataggatgctccaaaggatgattggaa

SEQ ID NO: 856084 - DNA, 120 bp, Artificial Sequence
  ENSG00000287781_9 (sequence is synthesized)
gagaagggtgatgtctggaagcgataagcctcagatgtttgtttgcaccttactggaaagccatgtaaattaatggaaacttcctggcaaaatagcttgacttgtagcaacttcacaacc

SEQ ID NO: 856085 - DNA, 120 bp, Artificial Sequence
  ENSG00000287781_10 (sequence is synthesized)
aacttcacaaccataacaatccagaggtgaggtttgcccgcaccctattcatttcaatcccgaaggcaattttccccttggccagagagaagctcaagaacaaaaaaccaaacaccgcat

SEQ ID NO: 856086 - DNA, 120 bp, Artificial Sequence
  ENSG00000287788_0 (sequence is synthesized)
ataattcaaagtgacacatttgtatttgtagaaatatgcacaacatttacacaacaaattatgatgattttataagataggcgagaaagggaatgttatgacgtcatcagtctgtgcagt

SEQ ID NO: 856087 - DNA, 120 bp, Artificial Sequence
  ENSG00000287788_1 (sequence is synthesized)
caagaaggaagtaggcagaaacagctagcattacactggaggcaagtgagcaaccttctggactctttgttatgtttgcatgataacctccaaggtagaggaattttaaaaatgggaaac

SEQ ID NO: 856088 - DNA, 120 bp, Artificial Sequence
  ENSG00000287788_2 (sequence is synthesized)
caagcctgagcccagtttccagggcattcagaatgatttcttcttagtctgtctgcctccaaggctatgtacttcgttgctggaatctgctatcccatttggtttgcttaaaggacactc

SEQ ID NO: 856089 - DNA, 120 bp, Artificial Sequence
  ENSG00000287788_3 (sequence is synthesized)
agtgcccaacagtgtgtggcattatgggtagtgataagagctgctattcttcatgattaatatgattgtctgtctactatgctaagcacttcacacgcattattttaatgcatgcctcca

SEQ ID NO: 856090 - DNA, 120 bp, Artificial Sequence
  ENSG00000287788_4 (sequence is synthesized)
aagtagcttattttgcaaggtagaagttatccctacttacagatgaagaaatgaagacacaaggaagttaattatcttggtcaaatcacactgctagtaaggagtacttagaggtcgcac

SEQ ID NO: 856091 - DNA, 120 bp, Artificial Sequence
  ENSG00000287788_5 (sequence is synthesized)
ttgaatctagacctgtttaacttcaaatcccatgcatttcactacagtaatggtaataacacatcataatggtgaaatagacccatgattagctgtaaaacatgacttgtttgaaaattg

SEQ ID NO: 856092 - DNA, 120 bp, Artificial Sequence
  ENSG00000287788_6 (sequence is synthesized)
gcctccctgctttctcttccccactcagaggatactcacatacagtgtttgcaatccctcactttcactcactgctctctccatgctgtctctcccccttttcccaagtcataccagggt

SEQ ID NO: 856093 - DNA, 120 bp, Artificial Sequence
  ENSG00000287788_7 (sequence is synthesized)
cagggttacttgatttcagacttgatgccagttgcctccaggtgttgggtgtgacttcaaggaatagaatactaagtgcttaatgaaataggtgccattgtcttctggtctgccaaaaaa

SEQ ID NO: 856094 - DNA, 120 bp, Artificial Sequence
  ENSG00000287788_8 (sequence is synthesized)
ccaaacgggtggttaaatttgttgccttatcttgaatgggattatgtggggaaagataaatgcatcaatgaggaatcaatgtttccaaatatgatggagaagttttatagtctgaaaatt

SEQ ID NO: 856095 - DNA, 120 bp, Artificial Sequence
  ENSG00000287788_9 (sequence is synthesized)
tctcttttcctctcataggtgtacccatgtgtgggtgtgtccatgtggtgtgcctgccttgctccagaataagcctccataggttcccatggcagtggacatgtttggtaaacttgtaag

SEQ ID NO: 856096 - DNA, 120 bp, Artificial Sequence
  ENSG00000287788_10 (sequence is synthesized)
gtgacaaggaaaattgatcaagttacgttaagaggaaaaaaggcattccaggccaccatatccttagtcacgtaggctactaccaggtcacttctatagagggagaatgccgagccaatt

SEQ ID NO: 856097 - DNA, 120 bp, Artificial Sequence
  ENSG00000287788_11 (sequence is synthesized)
tgtctgcatcatttctatggcatgaatcaaagttgtatttgtgtccatcagaatagagactttatgctggaggaaaatcacccatgagccccagggaaggcagtgatttgacacaatgat

SEQ ID NO: 856098 - DNA, 120 bp, Artificial Sequence
  ENSG00000287788_12 (sequence is synthesized)
gttgaaagtcaagagtgctcagcatgaaatgccccagcgatgacagcaggattaaccatcagtgtgaagacagaatgggtgtgcctgttgatgaaaggcgcttggacacagaggcagccc

SEQ ID NO: 856099 - DNA, 120 bp, Artificial Sequence
  ENSG00000287788_13 (sequence is synthesized)
ttccctggctcttctgaggatgtctgctggatggagaacagtcagaacacctatggatctgaagcttaaccaaagtggagattgagcagctgtgggaagtcataagtaaatcacatttac

SEQ ID NO: 856100 - DNA, 120 bp, Artificial Sequence
  ENSG00000287788_14 (sequence is synthesized)
aactcagctggttgtacagatgcagtttggaaaatttggaagctggttttatatattgtatcattctcttttgagaaaagttggatatttctgcttggagtgtgtcaatggattccaaag

SEQ ID NO: 856101 - DNA, 120 bp, Artificial Sequence
  ENSG00000287788_15 (sequence is synthesized)
tgaatttgaaaaaaaaaatctagaaatgataggaagtggtatgctcttcatcaccatcatcattttcttatgagagcacttaaatgtatatattttgaagaaatttcagtagatacaccc

SEQ ID NO: 856102 - DNA, 120 bp, Artificial Sequence
  ENSG00000287788_16 (sequence is synthesized)
acagtcatttcaggttgatgaaccatgctcttgaagcctcagcgcaattgccagagcactaagatggagaaacaatagacgttttctttggaaagaacaattaaaggtgattgatcacaa

SEQ ID NO: 856103 - DNA, 120 bp, Artificial Sequence
  ENSG00000287789_0 (sequence is synthesized)
gagggaggaggtactaccatcctcgctcacagtcatccatcttcgcagtaagttatccccgcttgggcgaggtttcaaacgtttttcagatgtaccaatggcgtattcttgctcgagaac

SEQ ID NO: 856104 - DNA, 120 bp, Artificial Sequence
  ENSG00000287789_1 (sequence is synthesized)
aatgaagatgaggctcctttaaaaagcttcagaaacttcggtctatggcaaagggcaagagggacggcgaagataatggggaatatatgagtgtgtacagggaacagaagctgtatctgc

SEQ ID NO: 856105 - DNA, 120 bp, Artificial Sequence
  ENSG00000287789_2 (sequence is synthesized)
aatgccaggaactttgaaagtcacctagaatgatttgctcggcctgaaaagcattcttccatttcgttaacagagaaaagtggagaaagcagcattgtctggagacactggagaagcggg

SEQ ID NO: 856106 - DNA, 120 bp, Artificial Sequence
  ENSG00000287789_3 (sequence is synthesized)
tatcattttaatacaagacagatttccctggcagagttgacctgagaaatgtctttattccagactgatggttcctaacacaaaaaccaaaaatctgatgagaatactaatatataaatt

SEQ ID NO: 856107 - DNA, 120 bp, Artificial Sequence
  ENSG00000287789_4 (sequence is synthesized)
ataagtcacaagttgtatctgggacagggatggtaggacagactaagaaaaggaaaatttgaagaggattgaaaaacaacccagcaaaatacaacaattaagaaaactaagccaccactg

SEQ ID NO: 856108 - DNA, 120 bp, Artificial Sequence
  ENSG00000287789_5 (sequence is synthesized)
ttttatatctgtcctgtattttaattccttagcttataggtttaattcatcacttcttgtcaggtctcaggtgaggcaaagttaagatacagtcataacttctctttaactttgataaat

SEQ ID NO: 856109 - DNA, 120 bp, Artificial Sequence
  ENSG00000287789_6 (sequence is synthesized)
gaagaaacagcattctaggaaagtcctggaggaggttaaagggagactgatttgaagtctcagcatctaatcctgaaggctaacaaaaaagttatgtccacaattatgactttgtactgt

SEQ ID NO: 856110 - DNA, 120 bp, Artificial Sequence
  ENSG00000287789_7 (sequence is synthesized)
gaaatacacaatacactttataatgcaaaactttggtgggtggaaaaggactctagaaggacaggtatacattgtattaaacagaaaataacttgcaaagcataaaaaataaaaataaaa

SEQ ID NO: 856111 - DNA, 120 bp, Artificial Sequence
  ENSG00000287789_8 (sequence is synthesized)
gcaacagcaattgttttctacctgtcagcatctggtcaatctgtcagattgttcagtaaccagaattataacagatgcaatattttctgtggggaattacaccaccatggaagctattgc

SEQ ID NO: 856112 - DNA, 120 bp, Artificial Sequence
  ENSG00000287789_9 (sequence is synthesized)
tcctgaagttttgcccatttccacctgaaatatttttttagccttacttgattacaacattagcactctctttcataacgtacaccagcaggtactacaattaacatgcacagatgttag

SEQ ID NO: 856113 - DNA, 120 bp, Artificial Sequence
  ENSG00000287789_10 (sequence is synthesized)
caaaataaaaaaaacaacaatcccccagttggcattagtaacctaagaagaagcaaaccactctataaatgcctgtattcttctgaaacactgaaccagaggctgatcttttgtccattt

SEQ ID NO: 856114 - DNA, 120 bp, Artificial Sequence
  ENSG00000287789_11 (sequence is synthesized)
aattccaaaatttgtactccaagaatagaggagaactcccaaatgctctcaaattctccaacacattttatgatgcaactgcacaaatgacgataacaccaacatcattttgtggagtgc

SEQ ID NO: 856115 - DNA, 120 bp, Artificial Sequence
  ENSG00000287789_12 (sequence is synthesized)
tggctttgtgctttatgtacgtcatctcactgaatccccacaaccaccctctcattcaggcaggcagtactacttctgttcccattttcaaataaagacacccaggcctaggagaggtta

SEQ ID NO: 856116 - DNA, 120 bp, Artificial Sequence
  ENSG00000287789_13 (sequence is synthesized)
acagatcaaggtcaacaagtagctaagctaagatttgatccggagtctttttttcctcctaaagctctcaactcattgtaaccactgtgccacactgtctgccacagttggggatgccaa

SEQ ID NO: 856117 - DNA, 120 bp, Artificial Sequence
  ENSG00000287789_14 (sequence is synthesized)
agaaaaatgtgatttgcagtcttcatttttcagaatcttctggaactgccctcttgactcatccattttacaaagctcatcagactgaaaggctcagaacacttgcagacattctcattc

SEQ ID NO: 856118 - DNA, 120 bp, Artificial Sequence
  ENSG00000287789_15 (sequence is synthesized)
tttggaaatgccacaaccactcagtcagtggaatgggacagcaccatcaatgggattgcgaaggcacaaatttccctgtgaatgctggcgccgcctctctttggtgtttcttctagccac

SEQ ID NO: 856119 - DNA, 120 bp, Artificial Sequence
  ENSG00000287789_16 (sequence is synthesized)
aaacggacacgttatcacttactgtggttgcattcgactcagcagccagatgcaggggagtttttacttggttaactgtccctccaacatctgtgtctacagaagatactacagggcagg

SEQ ID NO: 856120 - DNA, 120 bp, Artificial Sequence
  ENSG00000287789_17 (sequence is synthesized)
cgtgtgctcatccttgtcccttctccctcctccaaccaaacacacaaaaagttttccaatctctagggcaacaccattaagatatcctttccttgctgtgctatgagtttacaagaaata

SEQ ID NO: 856121 - DNA, 120 bp, Artificial Sequence
  ENSG00000287789_18 (sequence is synthesized)
actttctaacaataagccaagaagatggatgttgtaaaactgcatttcaaataaggcaattcctttttaaaaaagattcaagggtttcacgcttctttcttccttccatcaacacaattt

SEQ ID NO: 856122 - DNA, 120 bp, Artificial Sequence
  ENSG00000287789_19 (sequence is synthesized)
gtttatgtatgagttggatctttcttccttcggaagagaaaagtgctgataaactatcatgtgtagacacacaacgcaaaaacttggttgccttttgctatttaaacagagacaaattat

SEQ ID NO: 856123 - DNA, 120 bp, Artificial Sequence
  ENSG00000287789_20 (sequence is synthesized)
ttcccaatataccacttaccagacagatgcaaagatgtgggcaaaccagtcatcagaattaacagagtgattttgcttgcactacatattctgatttgtatgactcttatttttagccat

SEQ ID NO: 856124 - DNA, 120 bp, Artificial Sequence
  ENSG00000253376_0 (sequence is synthesized)
gagcgtgatccttgtacttgtatgaaaaaagttaactgtgaaacagcctcaggcaggtcctccaggcagtatccagaggaaggcattgctatcacagagatgacagctccatgcctgtta

SEQ ID NO: 856125 - DNA, 85 bp, Artificial Sequence
  ENSG00000253376_1 (sequence is synthesized)
tggcctatgataatggatctcaatatgttggccaagctggtctcgaaatcctagcctcaagcaatcctctagcctcggcctccaa

SEQ ID NO: 856126 - DNA, 120 bp, Artificial Sequence
  ENSG00000253376_2 (sequence is synthesized)
aaatcctagcctcaagcaatcctctagcctcggcctccaaaagcggtggaattacaggcatgggacaccatgccttgcctttaccttttctacatttagatatgtttggacacaaaaatg

SEQ ID NO: 856127 - DNA, 120 bp, Artificial Sequence
  ENSG00000253376_3 (sequence is synthesized)
ataggagcaataggttatactacagctataggctataggcctaggtgtgtagtgtggctttgccatttgggtttgtgtaagtgcattctatgatgtttgcacaataaccacaaaatcact

SEQ ID NO: 856128 - DNA, 120 bp, Artificial Sequence
  ENSG00000253376_4 (sequence is synthesized)
aaatgatgcatttcggagactgtatccccaccattgagtgatgcatgactttgtgtgtgtgtgtgcgtgtgtgtgtatatgtgtatatatctcacttattaggcataaaaatgttacaaa

SEQ ID NO: 856129 - DNA, 120 bp, Artificial Sequence
  ENSG00000253376_5 (sequence is synthesized)
tttagatgctatagataacagtatatctgatactgtatattactacagatgctgtggggattagaaagataagaatgtcatgaccaactttttataccactaaatatgaaaataggtgta

SEQ ID NO: 856130 - DNA, 90 bp, Artificial Sequence
  ENSG00000253376_6 (sequence is synthesized)
cagtgctgttctctagttttaaaaacaggagttcctctgcacaagcactttttgcctgctaccgtccacgtaaggtgtgatttgctcctc

SEQ ID NO: 856131 - DNA, 120 bp, Artificial Sequence
  ENSG00000253376_7 (sequence is synthesized)
tatacaaattcctagagaaatatgttaccaaatccgactaatatatgaatgcaatttaccacattaagaaataaagaaagcaaagttttatgatcatcttataagcttcagaaaaatcac

SEQ ID NO: 856132 - DNA, 120 bp, Artificial Sequence
  ENSG00000253376_8 (sequence is synthesized)
tggtcacattcaacaatcattcagtatacaaacttacagcaaattagaaatggaaaagaactttcaaaacctgatgaatgacatctacagaaacctacagcaatatcatactcagtgata

SEQ ID NO: 856133 - DNA, 120 bp, Artificial Sequence
  ENSG00000253376_9 (sequence is synthesized)
agattttaaaatgaggaacaagctgaggatagccaccatcactacttctaatagacattattctgaaacttttatttattgtcataagacaagaaggcagaaataaagccatggagaaga

SEQ ID NO: 856134 - DNA, 120 bp, Artificial Sequence
  ENSG00000253376_10 (sequence is synthesized)
aaagaaacccattgtctttatttgcagatggcatgattatctacatagaaaaccccaaatctatgaataaatgattagtataagagtgtttaacaatgttctcagatgaaagaacaatat

SEQ ID NO: 856135 - DNA, 120 bp, Artificial Sequence
  ENSG00000253376_11 (sequence is synthesized)
acgaaagtcagttgcattttaatttgtcagcaataaacacaatttttaaaagctaacacttaaaatagcaaccacaaaaaggatacataggaacacaactaaaaagagctgtgcaagaaa

SEQ ID NO: 856136 - DNA, 120 bp, Artificial Sequence
  ENSG00000253377_0 (sequence is synthesized)
gggatgatgggtgagctaccaaggctaacattttcccgaggacattgagttagggaagtggcctctccttgagggaaggagccagatgacttctcagagaacaacaaccatattcaaaat

SEQ ID NO: 856137 - DNA, 120 bp, Artificial Sequence
  ENSG00000253377_1 (sequence is synthesized)
ctacagcaaaagaagtactaagaggaaagtttatagtgataagcacctacataacaaaaaacttcaaataaacaacctaatgaggcatcttaaggaatgagaaaagagcaaactgaatac

SEQ ID NO: 856138 - DNA, 120 bp, Artificial Sequence
  ENSG00000253377_2 (sequence is synthesized)
ttttgaacagatgaacaacattgacaaaccttcaggcagactaagaaaaaaaagagcaaaaaacccaaataaataaaattagagatgaaagaggagacattgcagctgatttcacagaaa

SEQ ID NO: 856139 - DNA, 120 bp, Artificial Sequence
  ENSG00000253377_3 (sequence is synthesized)
cacagaaattcaaagtatcattacaggctgctatgaacaactatatgccaataaatgggaaaacctggaagaaatggataaatttctagaaaaatacaacctaccaagattgaaccatga

SEQ ID NO: 856140 - DNA, 120 bp, Artificial Sequence
  ENSG00000253377_4 (sequence is synthesized)
gacattaaaaaagagctaaaccctattcaaattattccaaaaaacttattctacaaggcgagtattacactaataccaaaaccagacaaagatgcataaaaaaagaaaacaatatgccaa

SEQ ID NO: 856141 - DNA, 120 bp, Artificial Sequence
  ENSG00000253377_5 (sequence is synthesized)
tatcccttatgaacattgatgcaaaaatcctcaacaaaatactagtaaaccaaatttaacagtacaataaaatgatcattcatcatgaccaagttggatttatccctgggatgtaagaat

SEQ ID NO: 856142 - DNA, 80 bp, Artificial Sequence
  ENSG00000253377_6 (sequence is synthesized)
catcatgaccaagttggatttatccctgggatgtaagaatggctcaacatatgcaaatcaatcaatgtcatacgtcatag

SEQ ID NO: 856143 - DNA, 120 bp, Artificial Sequence
  ENSG00000253377_7 (sequence is synthesized)
aaaccctaaaaaaattggatctagaaggaacataccttagcacaataaaagccatttacaacagactcatagctagtataatactgaatgaggaaaaactaaaagcttttcctttaagat

SEQ ID NO: 856144 - DNA, 120 bp, Artificial Sequence
  ENSG00000253377_8 (sequence is synthesized)
cgagaacatgacaaggatgcccactttcaccactgttatttaatgtagtactggaagtcctagctggaccaaccagacaagagcaagaaataaaggaaatccaaattggaaaggaagaag

SEQ ID NO: 856145 - DNA, 120 bp, Artificial Sequence
  ENSG00000253377_9 (sequence is synthesized)
tcaaattatctttgtttgcagatgctatgatcttatatttggaaaagcctagagattccacaagagaactattagaactgatagacaaattcagtaaatttgaaggatacaaaatcaaca

SEQ ID NO: 856146 - DNA, 120 bp, Artificial Sequence
  ENSG00000253377_10 (sequence is synthesized)
tacgaaaatcagtagcatttccatatgacaacagtgaatctgaaaaagaaatcaggaaattaatcatatttacaatagccaaaaacaaaataaaatacctaaaaattaaccaaagaagtc

SEQ ID NO: 856147 - DNA, 120 bp, Artificial Sequence
  ENSG00000253377_11 (sequence is synthesized)
ttcttcttgtctgcatctgatatccaggacattattccacaggaaaaggttaacaggaaatcaagatcggcccgatgctggggatgccttggtgaaaaaattagagcaacccaaaggaag

SEQ ID NO: 856148 - DNA, 120 bp, Artificial Sequence
  ENSG00000253377_12 (sequence is synthesized)
tcttgaaagaggaatcagacaaatacacagggctaagaggaggattgtaagtgattcagaagcaaagcttattgatcacgaagcatgacagtggaagaatttcctgaaaatggaaggaga

SEQ ID NO: 856149 - DNA, 120 bp, Artificial Sequence
  ENSG00000253377_13 (sequence is synthesized)
agatggtttcacagcaaagctactaatctgaaacagtaaaagcaacaaacaaatgcccactccccttagctgaccagaacacaatccttgtgaaatataaaaacaattaggtacatgtaa

SEQ ID NO: 856150 - DNA, 120 bp, Artificial Sequence
  ENSG00000253374_0 (sequence is synthesized)
gcacgcactgccttggtgaccaaggaaggcaccccacggctatggggaaattagcctgagacttagctttcattatcactgtctcccagggtgtgcttgtcgaagagatattctgccgag

SEQ ID NO: 856151 - DNA, 120 bp, Artificial Sequence
  ENSG00000253374_1 (sequence is synthesized)
ccagattcgggcgctcccatcttgcgcaagttggtcacgtggtcactcaattctttgatggctttcacctgctcattcagggcactaatatacacatgatgatacttaattctctcagaa

SEQ ID NO: 856152 - DNA, 120 bp, Artificial Sequence
  ENSG00000253374_2 (sequence is synthesized)
aacctttggcaaagacactttctacatcttgaaggcaaggaatctgaatcttgaagagattaaatgaattgtccaaagtcacgtgggggtttgggagaaggaaaatcatgaacacacatt

SEQ ID NO: 856153 - DNA, 120 bp, Artificial Sequence
  ENSG00000253374_3 (sequence is synthesized)
gggaaggtgacctgggaaaccatctgaaagggagcaggatggattctataaaatatagagtgttcaatgaaaacaacctgatgctcctcccagtaccatcacatttttctagctgcatat

SEQ ID NO: 856154 - DNA, 120 bp, Artificial Sequence
  ENSG00000253374_4 (sequence is synthesized)
ccttaggcatgaggctgaagccaggaaatgacccaacattgagggtaatctgggcactgaaggcactacaattcccaggatttttcaagaaaatgtcgaatgtgctgccacatatgtcgg

SEQ ID NO: 856155 - DNA, 120 bp, Artificial Sequence
  ENSG00000253374_5 (sequence is synthesized)
atgcacatggatcccctcccacaaggaaaatcacgattgaagatcacctccttgaagatgtcgtattgggagcggtgtttttccctgttgctgacaggttagacttgcacaggcgtcagt

SEQ ID NO: 856156 - DNA, 120 bp, Artificial Sequence
  ENSG00000253374_6 (sequence is synthesized)
actgaggtgtgagacggagcccatgtatggcttctatctctgcactgtggctgctccgttcatgtgtcagtcacatcagctcagagactgcctaatgtcaactggcctagtcattttgtc

SEQ ID NO: 856157 - DNA, 61 bp, Artificial Sequence
  ENSG00000288156_0 (sequence is synthesized)
tggtcttgaactcctgacctcgggttccgtgtgatctcatttctatgaaatgtccaggaca

SEQ ID NO: 856158 - DNA, 120 bp, Artificial Sequence
  ENSG00000288156_1 (sequence is synthesized)
cccgtccgtgtgatctcatttctatgaaatgtccaggacaggcccatccacagacagggagatgacatttgatctcagaccctgttgtaggtggaactgtgttcccgcaaatgttcaagg

SEQ ID NO: 856159 - DNA, 60 bp, Artificial Sequence
  ENSG00000288156_2 (sequence is synthesized)
ggaacccccgtctcaactaaaaatacaaaagttagcctggcgtggtggcgcgcatctata

SEQ ID NO: 856160 - DNA, 120 bp, Artificial Sequence
  ENSG00000288156_3 (sequence is synthesized)
aaatacaaaagttagcctggcgtggtggcgcgcatctatagtcctaactaggggaatctggggtgggaggatcgcttgatcccaggagttgaggcttcagtgagctgtgatcgtgccact

SEQ ID NO: 856161 - DNA, 120 bp, Artificial Sequence
  ENSG00000288156_4 (sequence is synthesized)
gcgctctagccactgggcaacagagtgagactgtctcaagggaaaaaaaaaggtatgttcacgtcctgccctccgtgcctgctgtgcacgggacctcatttggaatcagggtctttacag

SEQ ID NO: 856162 - DNA, 120 bp, Artificial Sequence
  ENSG00000288156_5 (sequence is synthesized)
atgtgctcagggctagatgagactgcagtggattacagtgagccttttccaacgactcctgtccttacaacaagagggagacttggacacacacctagccctatacaggggaaatagagc

SEQ ID NO: 856163 - DNA, 120 bp, Artificial Sequence
  ENSG00000288156_6 (sequence is synthesized)
cgtgtgaacacggaggcagaggctagggtgacacagccacaagccggggattgctgagagccccaggaagccgggagaggcaggaaggacgcgccccgggagcttccagagggcccccgg

SEQ ID NO: 856164 - DNA, 120 bp, Artificial Sequence
  ENSG00000288156_7 (sequence is synthesized)
ccgtgttctggcaggaaacaggccgacccaaaagttgaacagagcccatggttttctggaggaagggtgtgtgggctgggggaacagccacggcagaggccccgaggtgtggcgggagtc

SEQ ID NO: 856165 - DNA, 120 bp, Artificial Sequence
  ENSG00000288156_8 (sequence is synthesized)
tggtgaagctaaaggagagagtggaggggggcggggagctgggttaggaggggcctctgggtggggggcagatgacatggagccgtggtggcccagaggaacaggcgccaatgctccgtg

SEQ ID NO: 856166 - DNA, 120 bp, Artificial Sequence
  ENSG00000288156_9 (sequence is synthesized)
ggtcctggtagctgtgcctcctgggctgtttccgtctctcctgggagcctgctgcacccttaccagctcttcttggctgcagccaagattctgggggctggggtggcgggtggaggtggg

SEQ ID NO: 856167 - DNA, 120 bp, Artificial Sequence
  ENSG00000288156_10 (sequence is synthesized)
gttggagggagcgggaggaagcagccagaactaccaggcggcattgcccagcttcttctgcttggccgcctcccccgccagccggccggctatttttggcatcttggcagctgagccccc

SEQ ID NO: 856168 - DNA, 120 bp, Artificial Sequence
  ENSG00000288156_11 (sequence is synthesized)
ctcggcatccccccaggccccgtggcccaaaccaggttgtgcgtctcctcacggttcccactggccttcgatcctcatttgctaaatatctgcgaaggcagctcccgcctccccagtgcc

SEQ ID NO: 856169 - DNA, 120 bp, Artificial Sequence
  ENSG00000288156_12 (sequence is synthesized)
tacgcgaatttaatcccagagcgaacagacgcggagccccgggagactgcttcatgtcagagatgaattgtacgtaagtgaggacagggtttgtatcttgcagctgtaattcattaagat

SEQ ID NO: 856170 - DNA, 120 bp, Artificial Sequence
  ENSG00000288156_13 (sequence is synthesized)
gaggtcacgcaggagcagggagagccctaattcaatgactggcatccttataagagggaaatctggacacagagacacaggcaacggccaagtcacaacacaggcagagactggagtgat

SEQ ID NO: 856171 - DNA, 120 bp, Artificial Sequence
  ENSG00000288156_14 (sequence is synthesized)
tcatccacaagtcaagtgacaccagggatggccagctaccaccggaagctggaagagtcagaaagggtctccccaaaagcccccaaaggaagctggacctgcttgagcttcgacttccag

SEQ ID NO: 856172 - DNA, 77 bp, Artificial Sequence
  ENSG00000288156_15 (sequence is synthesized)
ccccaaaggaagctggacctgcttgagcttcgacttccagactccagaactgtgagagcagcagctcctcttgcctg

SEQ ID NO: 856173 - DNA, 77 bp, Artificial Sequence
  ENSG00000288156_16 (sequence is synthesized)
cagcctatagccgggcgtggtgatgggcgcctgtaatcccagctccttgtgaggctgagggaggagaatcgcttgaa

SEQ ID NO: 856174 - DNA, 64 bp, Artificial Sequence
  ENSG00000288156_17 (sequence is synthesized)
gcagggggaaactccgtctcaataaatacataaataaataaggtgaaacgccaaactgaattct

SEQ ID NO: 856175 - DNA, 120 bp, Artificial Sequence
  ENSG00000253373_0 (sequence is synthesized)
gagaaaacaacaaaaaaaggataactaacaaaagccccattctccagctcttgccccggccagcgcttcagcacgccttgtctcacccctgaaggaagagcttcatccctttccagtgaa

SEQ ID NO: 856176 - DNA, 120 bp, Artificial Sequence
  ENSG00000253373_1 (sequence is synthesized)
aaccacttttcctataaagagcagatgcatgagaacaaacccatttgaaaggaacactttggcttcatggttctcatagaattctaatgaggaatgggtcattttctggcactaggtaag

SEQ ID NO: 856177 - DNA, 120 bp, Artificial Sequence
  ENSG00000253373_2 (sequence is synthesized)
tgattctgacataacctggacctgtataatcatatgattagagcatttagggagaaaatgtatcacagaaaatgatagtaataataatttatcagtaataaagtaaatatgcatagagaa

SEQ ID NO: 856178 - DNA, 120 bp, Artificial Sequence
  ENSG00000278192_0 (sequence is synthesized)
ggctgcacatgttactgtgtgttggggtaagaaacatacatgggcacagttggtcagatatgagaccacagggatttgtgaggcatgcccttagtattcatgattatggtttttgctttg

SEQ ID NO: 856179 - DNA, 61 bp, Artificial Sequence
  ENSG00000278192_1 (sequence is synthesized)
ttgtgaggagatccactggcctcagcctcccaaggtgctagggttataggcatgagccacc

SEQ ID NO: 856180 - DNA, 120 bp, Artificial Sequence
  ENSG00000278192_2 (sequence is synthesized)
tcagcctcccaaggtgctagggttataggcatgagccaccgcacccggccatttatatatggcatgagccactgtgccatacctaaaatcagctgctgcagaactaaaatgagcagattg

SEQ ID NO: 856181 - DNA, 120 bp, Artificial Sequence
  ENSG00000278192_3 (sequence is synthesized)
caattgtggccaacaccattttttacccaaaaccattttcccatcttccttgctaacagaacttgatttgggctgaatcaatgtgtccagatcagtgatagatctacactggtctatgcc

SEQ ID NO: 856182 - DNA, 120 bp, Artificial Sequence
  ENSG00000278192_4 (sequence is synthesized)
aattatgacaatcttattccctaactgatcagcttcctttgtaggttggcggggccggggaggggccatgggatccaattctgaccaatgaggcctaaggggaagtatgctttggagatt

SEQ ID NO: 856183 - DNA, 120 bp, Artificial Sequence
  ENSG00000278192_5 (sequence is synthesized)
tctgggaaagatttttctatcctaacaaaagggaaagtcagctgacgtcacccttcaccttcctattcttcctgccttgaatgtggatgtgactttttgttatgtaagaaaaataaatga

SEQ ID NO: 856184 - DNA, 120 bp, Artificial Sequence
  ENSG00000278192_6 (sequence is synthesized)
atgtatttaagccattgttaggtagggtttctgtacctcatagctgaacgcatttctaactgatagtggtgagcaatgaacaagtgaattttacagtaatggagcagagggtcaagttga

SEQ ID NO: 856185 - DNA, 120 bp, Artificial Sequence
  ENSG00000278192_7 (sequence is synthesized)
tagcttgactaattgaatgactggaagcccaattggtagataaatataaagagtgtcagaaggaggagaggtcagagcacatagataagttttatttgggtgactctaagacctcagtca

SEQ ID NO: 856186 - DNA, 120 bp, Artificial Sequence
  ENSG00000278192_8 (sequence is synthesized)
tgcctgacataatgggattctgtgacgcatgtgtgtggacctttgcaatggagctgctcagaacatcgttggaacccccctttggaaattctcagcaaagcctgattcaccttctctgta

SEQ ID NO: 856187 - DNA, 120 bp, Artificial Sequence
  ENSG00000278192_9 (sequence is synthesized)
atttcctcactgtcgatgatttttcagtactttcatggggggttgatttttggaaatatctgagactaagtaaggtgcattatgagattaggataaataaaatatttgggtgagtgattt

SEQ ID NO: 856188 - DNA, 120 bp, Artificial Sequence
  ENSG00000278192_10 (sequence is synthesized)
aataaataaacataatcctgataattgtagagtgtgtgtgtgtgtgtgtgtgtgtgcgcacgcgtgtatcagaaactcctcctgaaagcaattccagaacatgaattacaaacatgtttt

SEQ ID NO: 856189 - DNA, 120 bp, Artificial Sequence
  ENSG00000278192_11 (sequence is synthesized)
taacactggaagcatcatttgcaaaaatatttcacttaactaagtaattttgctgaagactgacttttgccaaataatcttttttatctctcttaaaagttggcaatccaaacattctct

SEQ ID NO: 856190 - DNA, 120 bp, Artificial Sequence
  ENSG00000278192_12 (sequence is synthesized)
caagtaaaacaagcaagtattctccatgttctcaatactcctccctcagaaatggtctcagagttctcatcttgggtcctttatcagatttactttatgaaattgaatataatttctgca

SEQ ID NO: 856191 - DNA, 120 bp, Artificial Sequence
  ENSG00000278192_13 (sequence is synthesized)
gcaataaaatggaaataatagcatttgcctccctcctaaagaaatgtggtgaacaagagttggtcagcaacacctagaatctggagtatctctcatgggttccataaatagttggcataa

SEQ ID NO: 856192 - DNA, 120 bp, Artificial Sequence
  ENSG00000278192_14 (sequence is synthesized)
tggcataattaataattgctagtaaagagattgtgttattaatatattactgaggattaataatcatgtattataatctttccagaaatgacaaaatgtcatcactattaaaatcttctt

SEQ ID NO: 856193 - DNA, 120 bp, Artificial Sequence
  ENSG00000234675_0 (sequence is synthesized)
tcacaggaagaggcttggtggctacagaaagacagaaagatgcctgacctgcttccagctgcttcagcccccccactgtcccatctccagacacgtcaaactgcaactggatgacagaca

SEQ ID NO: 856194 - DNA, 120 bp, Artificial Sequence
  ENSG00000234675_1 (sequence is synthesized)
tcggcctaggaacacctaacaccacgtgatgtttaatcctacagcaaaccatcgacactttcagcttgaatgatcatgtatcacttagttttcaagtttaattcaagtgcatctacctct

SEQ ID NO: 856195 - DNA, 120 bp, Artificial Sequence
  ENSG00000234675_2 (sequence is synthesized)
tctccactgttgacaccagaaaactcccttccatatgcccttgtggaactcactatacttcgttcaacaaacgttcagtgactacctgctatgtgtccagaataaattaagaatacagtt

SEQ ID NO: 856196 - DNA, 120 bp, Artificial Sequence
  ENSG00000205106_0 (sequence is synthesized)
gttcccggcccgcggacgcttagagaggggagcttcggagttatggggggacccacccttccatttaataactgagaaagccacgggaggggacttgctgggctcacagccagtgatccc

SEQ ID NO: 856197 - DNA, 120 bp, Artificial Sequence
  ENSG00000205106_1 (sequence is synthesized)
tgccctgtttccttatggggactgcggtcagaaatggggagtggggcagaaactgtcactgtcacggtcctgtttagagaggaaggtcggagaaaccagtgccgtggaaggctctggggc

SEQ ID NO: 856198 - DNA, 120 bp, Artificial Sequence
  ENSG00000205106_2 (sequence is synthesized)
ggaaacttcgtcagagcagggacgtgagggtgaactgctcacccgggcaccgctggcgaccggaacccagctccctccgggctccgggagaggcggcctcagctgtgtgctggtgctgcc

SEQ ID NO: 856199 - DNA, 120 bp, Artificial Sequence
  ENSG00000205106_3 (sequence is synthesized)
ctccagcggcgctgggtccccatggcacctggctttctcctgctccccaggggccttttcttctcccgcccacctgtcaccagccgccagggcaagtctctgtgtgactctagggtgaag

SEQ ID NO: 856200 - DNA, 120 bp, Artificial Sequence
  ENSG00000205106_4 (sequence is synthesized)
gtggagggaccttgcctccgaggattcatcccacccggattccgatgagtgagggaccctctctggcacctggtgtttgaatggccagcctcacagttaataaagacaagtttggtatca

SEQ ID NO: 856201 - DNA, 120 bp, Artificial Sequence
  ENSG00000257467_0 (sequence is synthesized)
gatccaacttgaatgcttcctgattaaatatatacaggagtgatttcagaggaatttaagttttggatcattcttttgagaaagaaagaaaagtacccttttaaaagagcgtactttcaa

SEQ ID NO: 856202 - DNA, 120 bp, Artificial Sequence
  ENSG00000257467_1 (sequence is synthesized)
cataaagacgacgaggataaaggcatttatgatgaactacttccacataatgaataattgaacaaaggagagaattgtgagagtgagaaaaagtgagacaaagaagaaaaactataaatc

SEQ ID NO: 856203 - DNA, 120 bp, Artificial Sequence
  ENSG00000257467_2 (sequence is synthesized)
agcaaaatacagtgccaagagctctggaccacaaatcagaagacctgagccctaattcctttccagtcattggatttgttcgtcgcttgccaaaatagcagcgaactctctgtcaaactg

SEQ ID NO: 856204 - DNA, 120 bp, Artificial Sequence
  ENSG00000257467_3 (sequence is synthesized)
cttgtgttacaactcaaaagagtaatactctgaaaaaagaaaaaaaaagatggcgctgaaaataaacatgttcagcagccattgtgattcaacttacccagatgtgcttttcatgagatg

SEQ ID NO: 856205 - DNA, 120 bp, Artificial Sequence
  ENSG00000257467_4 (sequence is synthesized)
gagaaggacggatggaaaagaaaagcacacaaatgttaatggatacagttcaatccaaagaaaaccatggaataaaacaagagcattatttaagatgtgagaaagctcaggtatgagaaa

SEQ ID NO: 856206 - DNA, 120 bp, Artificial Sequence
  ENSG00000257467_5 (sequence is synthesized)
gacatggtgccattttgtatttcatcatgacacacatactcactgcgtcgaaaagcatagtcaggctgagggtagttctaatagttgaccaataagtctatgtcttgagtatgagccact

SEQ ID NO: 856207 - DNA, 120 bp, Artificial Sequence
  ENSG00000257467_6 (sequence is synthesized)
gtgtgatttcttaagcattttgtcttgtgattgattttttaaatatagtaattttaaagacacggttgaaagaagcagctgatcgctaatatctgatggctaatatgctaaatttccctg

SEQ ID NO: 856208 - DNA, 120 bp, Artificial Sequence
  ENSG00000257467_7 (sequence is synthesized)
agcaaaatacaggcatttttcattcagtgcaagaaaaaatacaaagcgtgtttctagatctatctaagtctatttttaaaactaaaatgggctttaatgtttctttattatttatttact

SEQ ID NO: 856209 - DNA, 120 bp, Artificial Sequence
  ENSG00000257467_8 (sequence is synthesized)
ttcacagagaaaggattatttgaggacaccaagaggtgaccatcagcaagcccaggagagaggcctcagaagaaaccagacctgctgattccttgatcttgaacttctagcctccggaac

SEQ ID NO: 856210 - DNA, 120 bp, Artificial Sequence
  ENSG00000257467_9 (sequence is synthesized)
cttggtctggaacttctagtgtgtaaaagtgtgagacaacacatttctgttgtttaagacacacaatctgtggtactttgatacagcagccctgacaaactaatacatggggtgtctcat

SEQ ID NO: 856211 - DNA, 120 bp, Artificial Sequence
  ENSG00000257467_10 (sequence is synthesized)
ttgcctgaaggctagtgaggaggcccagagggaagcagaggaatccatgggaggcaagcagtggtaaagaagaaaggcagcacctctactttcttctgccactgccactcctgagacaac

SEQ ID NO: 856212 - DNA, 120 bp, Artificial Sequence
  ENSG00000257467_11 (sequence is synthesized)
atacaggtggctcttgaacaacacaggtttgaactgcatcattccacttatacacagactttcttctgccactgccactcctgagacaacatgaccaatctctccccttcctcctcctca

SEQ ID NO: 856213 - DNA, 120 bp, Artificial Sequence
  ENSG00000257467_12 (sequence is synthesized)
tttcttttctctagcttactttattgtacgaatggagcatatatgtgtacatataaaacacataatacatgcttatcaactatttgtgttatcagtaaggcttccagtcaacagtaggct

SEQ ID NO: 856214 - DNA, 120 bp, Artificial Sequence
  ENSG00000257467_13 (sequence is synthesized)
cagtaaggcttccagtcaacagtaggctcttagtagttaagtcttgggagagccaaaaattctagctgattttttgactgtgtgtggggggtcagcacccttaactcctatcttattcaa

SEQ ID NO: 856215 - DNA, 120 bp, Artificial Sequence
  ENSG00000257467_14 (sequence is synthesized)
ggggctattgtattctaaattgtcttttagcttgagtcataatccaggtatagtgaaaaacatttgtgtctatttaaaaataatataggtaagaattttaaaaattatatatttttccta

SEQ ID NO: 856216 - DNA, 120 bp, Artificial Sequence
  ENSG00000287241_0 (sequence is synthesized)
ggggacgttccactgcacaaggacagcgagggtgctagttggggaacgcatagccaccgatcccaggcgccgggccaagtcgcccgctgaacgtcttctactggaggcgaattcgggcgc

SEQ ID NO: 856217 - DNA, 120 bp, Artificial Sequence
  ENSG00000287241_1 (sequence is synthesized)
agcgacggggggcaggggcaactaagttatccggttaagaaacgtgcactcgcactggactctgctaactgctgacgacggactccgcttcttgcctgagagggaggaagcacgaacgtt

SEQ ID NO: 856218 - DNA, 120 bp, Artificial Sequence
  ENSG00000287241_2 (sequence is synthesized)
ctgtatgtaacgaaatgaggacgactgtttcaaagctactcaaatattgttgtgttaaagagtatttacactgatctcattgtatcatttagcttcaaagctcaaaattctgctttactt

SEQ ID NO: 856219 - DNA, 120 bp, Artificial Sequence
  ENSG00000287241_3 (sequence is synthesized)
agataagagcttgaagtccaaatctacacaagtcagaacctatgcaagaaaagcaccatcggtagaaatgaatacactttgaatgccatggaccaccctgtcttcagagcatgtctgttt

SEQ ID NO: 856220 - DNA, 120 bp, Artificial Sequence
  ENSG00000287241_4 (sequence is synthesized)
gctgacatagttggctccctcatagccctttaaaaaattgtcacgtaaaaatgtgggcgttgctgaaggtttttattaaaacattagaagtctatgtgacattatttattattgttattt

SEQ ID NO: 856221 - DNA, 120 bp, Artificial Sequence
  ENSG00000287241_5 (sequence is synthesized)
gaattcctctaagaaaattaagctatctgttaggacttagggccatggtggaggcaaggtttctggaaaagtattaacacggtgaaagtattaataaagggaaacagatcaactctgggc

SEQ ID NO: 856222 - DNA, 120 bp, Artificial Sequence
  ENSG00000287241_6 (sequence is synthesized)
ccctcagctcactactgctcagaggctcatttctgcctttgttccccctttctattactctattgtttaacagcttaccccctcatagtccatccgtttgattataacacaaggttttca

SEQ ID NO: 856223 - DNA, 61 bp, Artificial Sequence
  ENSG00000287241_7 (sequence is synthesized)
cctcatagtccatccgtttgattataacacaaggttttcatgtttcaccgtgttagtcagt

SEQ ID NO: 856224 - DNA, 120 bp, Artificial Sequence
  ENSG00000287241_8 (sequence is synthesized)
aatagtttccaaatatgaaatgctggtaaatgttgaatctcatatagctacattttaaataactaaaactgtgtaaaattggccagaaatgatataaaacctgaatgactaattaaaata

SEQ ID NO: 856225 - DNA, 120 bp, Artificial Sequence
  ENSG00000287241_9 (sequence is synthesized)
agtcctctttagtggtttacataaaatacagctcatcataatattgtcaggacagaatagcaaatggaaagataatttttttggttattcaaatactaaattttcaatacacaacaatgt

SEQ ID NO: 856226 - DNA, 120 bp, Artificial Sequence
  ENSG00000287241_10 (sequence is synthesized)
agtaagcaagtggaagaggaaatgtatttatcccttggatatctattgatacattgttatttgaaatgctaatacacacccatgtgtgcacacaaattgctcttttagacaactatttct

SEQ ID NO: 856227 - DNA, 120 bp, Artificial Sequence
  ENSG00000287241_11 (sequence is synthesized)
caaactcctttttccaataacaatagtcaaggtggacagtagagagaatggcagcagcacattttgaggatagacctagaagcctgttgccagggaccctattgcaggctctgctagtac

SEQ ID NO: 856228 - DNA, 120 bp, Artificial Sequence
  ENSG00000287241_12 (sequence is synthesized)
taggtatgtataccacttggctgtgggccaacatattgcacctctcaaagtctctatctttctatctgtgaaaagagactgttggattagatacctcagagccaaagtctataatttcaa

SEQ ID NO: 856229 - DNA, 120 bp, Artificial Sequence
  ENSG00000287241_13 (sequence is synthesized)
gagaaatgctgaggaccacaatactatttaataacatattgtggccaacaggcatacttatttttgtgtaacctcccccaaatggtctcatatttatcagttttgtgtacttgaaaaaat

SEQ ID NO: 856230 - DNA, 120 bp, Artificial Sequence
  ENSG00000287241_14 (sequence is synthesized)
aataactgacacaaacagattgacagcacgagatataaaaatcaccaatacctggagcttcttttcatttatttacttttgtatctgtaacaatgacgtcgggtgtttggttctggctca

SEQ ID NO: 856231 - DNA, 120 bp, Artificial Sequence
  ENSG00000287241_15 (sequence is synthesized)
gatgtgccacaggcccccagagtctctttgaagatgttgtcctgcaaaacaagactagaactctcccattttatggcttaatactagaaatcaagagaccttgggtgattttttaaaaaa

SEQ ID NO: 856232 - DNA, 120 bp, Artificial Sequence
  ENSG00000287241_16 (sequence is synthesized)
ccaaaaccacctgaggcatgattgggatactcacatttagatgtacttctaaaaggagaactttggattcatagagcatcatgccaaggaaaacctaccactgggggtacagagcaagcc

SEQ ID NO: 856233 - DNA, 120 bp, Artificial Sequence
  ENSG00000287241_17 (sequence is synthesized)
agaagcagccgtaggagagtcccccaaacctttgaatattctttggactactggagaaagatctaatttttctgttgatttctcttcaattgtgtgggatgtgtaatctggagagaaata

SEQ ID NO: 856234 - DNA, 120 bp, Artificial Sequence
  ENSG00000287241_18 (sequence is synthesized)
gggtatataccactgaaaatcacaatttaaaatacagccttgttaaaaatcaggttgggctttgccatttttgctgcattcattgcaaacattttaaatgcagtaatggtacattaatca

SEQ ID NO: 856235 - DNA, 120 bp, Artificial Sequence
  ENSG00000287241_19 (sequence is synthesized)
ggtaggaacaattctctactgtcatattgtactgttgtattagtttgttttcacattgctgataaagacatacgtgagactgggcaatttacaacagaaagaggtttattggacttacag

SEQ ID NO: 856236 - DNA, 120 bp, Artificial Sequence
  ENSG00000287241_20 (sequence is synthesized)
acttacagttccgcatggttaggtaggcttcacaatcatggcagaaagcaaggagcatcaagtcaggtcttacatggatggcagcaggcaaaaaaagagagcttgtgcaggaaaactccc

SEQ ID NO: 856237 - DNA, 120 bp, Artificial Sequence
  ENSG00000287241_21 (sequence is synthesized)
taaccatcagatctcatgagacgtattcattatcacgagaacagtatggggaaactgccctcatgattcaattacctcccacttggtccctcctacaacatgtgggaattatgggagtac

SEQ ID NO: 856238 - DNA, 120 bp, Artificial Sequence
  ENSG00000287241_22 (sequence is synthesized)
tggggacacagagccaaaccatattgactgtcaaccctttcaatggattattcctaaagaccctgccctgtctgttccctccattccagcccatatgcaggctttctgaaatatcgttac

SEQ ID NO: 856239 - DNA, 120 bp, Artificial Sequence
  ENSG00000287241_23 (sequence is synthesized)
gctttctgaaatatcgttaccactttacagatctttgcccaattttgaactcagcattgatcaagtctttttttttccaccagactattcttattttccaagaactcacctcattttcct

SEQ ID NO: 856240 - DNA, 120 bp, Artificial Sequence
  ENSG00000287241_24 (sequence is synthesized)
ctagtatttacatatactctcacatttgctataactaaaaattcagatacttgggaaattttagtttctcagtatgcacccacttctaaatcactgtgattcagttggtcctacctccaa

SEQ ID NO: 856241 - DNA, 120 bp, Artificial Sequence
  ENSG00000287241_25 (sequence is synthesized)
ttcctatagctttcaccaacttgtatcttttccttaaataacctatctctgtttttccttcagttgaaaattctcagctgatttttattatttaagccatcttaaattaatatagtgaag

SEQ ID NO: 856242 - DNA, 120 bp, Artificial Sequence
  ENSG00000225214_0 (sequence is synthesized)
acctgtctgaggatgaagctggtcgaagtggtgctgccatcggatcttttcaacctgctcctccgggttgtggtgcctcgggccacctggactcgacacacgggggccagagagaagccg

SEQ ID NO: 856243 - DNA, 120 bp, Artificial Sequence
  ENSG00000225214_1 (sequence is synthesized)
gttgaagaagcagccacaatctggaacatactggctctgaagagacaagaagctagagagctacaggaagttcatgatgcctcttaagcttctgcttagatgtaggcatctgttgcatct

SEQ ID NO: 856244 - DNA, 120 bp, Artificial Sequence
  ENSG00000225214_2 (sequence is synthesized)
catagacatacaaccaattccaaaatcactgaatgaggacataatactccagaagtcaagtgcatgggcaaatacaaacagtcctcttacagaaaaatgggagagtaaaaaactgcaaac

SEQ ID NO: 856245 - DNA, 120 bp, Artificial Sequence
  ENSG00000225214_3 (sequence is synthesized)
aacaatacaatcttccacccgaaggataacttgcttaaaacagacaactataaaatataatcacctctatctttcatcttcattctgccattttgggtggttgtcataaattatgcagtt

SEQ ID NO: 856246 - DNA, 120 bp, Artificial Sequence
  ENSG00000287240_0 (sequence is synthesized)
gggggcctttggaggaaggcagaaggttctagtgcaaggaggtgaacccctttccctctcacctccccccatccccatccctacccaccccccaacacacacacacacacggccatggct

SEQ ID NO: 856247 - DNA, 120 bp, Artificial Sequence
  ENSG00000287240_1 (sequence is synthesized)
gggacagttagcaagtccttcctccagcctggtcagacccagagcaggaagagcgctgtgacagagtcccctcccagagccatgcctcagcaggctattcccaggctgctcacaaaggcc

SEQ ID NO: 856248 - DNA, 120 bp, Artificial Sequence
  ENSG00000287240_2 (sequence is synthesized)
ccatgaagaaccagggcaggaatccatttgccatgtgcccccattttctagacacggacactgagtcccaaaaggtgatgtgacaagctggctaagagccaggccttctgcattcacagc

SEQ ID NO: 856249 - DNA, 120 bp, Artificial Sequence
  ENSG00000287240_3 (sequence is synthesized)
ttgaaaagggatgctcccgaccatgagtggtcacatgacccaagcctagccaatcagattcacagggagggtttgggacaagctgggtaccctaatttccaccaatgagagtcaggcctg

SEQ ID NO: 856250 - DNA, 120 bp, Artificial Sequence
  ENSG00000287240_4 (sequence is synthesized)
ggagttttgctggaacccttggttctgagaaggccagcttcttgaaaaatgcccctggagtgttcttgggttgctgaaaagcaggccctgagaggaggccaggaggacaagggatattgg

SEQ ID NO: 856251 - DNA, 120 bp, Artificial Sequence
  ENSG00000287240_5 (sequence is synthesized)
gggtgattcctgtgaaagataaaaggtggaggaagcagaactgggaagaaaagccttcagcccctgacatgaatctgacggcagctatcacagcgagacttgacctttgtacatcaaagg

SEQ ID NO: 856252 - DNA, 120 bp, Artificial Sequence
  ENSG00000287240_6 (sequence is synthesized)
aggcttctttacaccccgcacagcttggaaggagtcagtgagcagaactaggcccagccgctgcctttggtttgtcttcctctgaaggaaaaatacgccagcaaagacaacgttctataa

SEQ ID NO: 856253 - DNA, 120 bp, Artificial Sequence
  ENSG00000287870_0 (sequence is synthesized)
aacctctgcatagtaggaattcccaaaggaggcaagagagaaaaaggcctagaagacatatttaacaaaacaatggtgaaaatttcccaaagatggagaaagaggacaccattcagatac

SEQ ID NO: 856254 - DNA, 120 bp, Artificial Sequence
  ENSG00000287870_1 (sequence is synthesized)
aggaatcttggaggtcatcaatcaaattaaacccaaagaggaaatccctaaggcatatcacaatcaaattagcaaaaatcagagacaacaaaaatactcagtgcagcaaaagaaaagaaa

SEQ ID NO: 856255 - DNA, 120 bp, Artificial Sequence
  ENSG00000287870_2 (sequence is synthesized)
aatattacattaaacaaagcaccaatacagctttcactggatttcacagcagaaatcctacaggccaggtgagaatgggaagcttgaaagtgctgaaagaaaaaaaaaaactgtcaacca

SEQ ID NO: 856256 - DNA, 120 bp, Artificial Sequence
  ENSG00000287870_3 (sequence is synthesized)
agaataatgtgcccagcaaagctattaaaacaagaagagagataaagactttctcagacaaacaaaaactgagggaatttgtcagcaccagacctgtgttacaagacatgctaaagagag

SEQ ID NO: 856257 - DNA, 120 bp, Artificial Sequence
  ENSG00000287870_4 (sequence is synthesized)
ttcttcaatctgaaagaaatggatgctaatgtgtaacaagaaacaatctgcaggtatgaaactcattggtaaaagaaagaaaacagaccaattcagaacacatcaatagtgaaattagga

SEQ ID NO: 856258 - DNA, 120 bp, Artificial Sequence
  ENSG00000287870_5 (sequence is synthesized)
attccatccaacagctgcagaatacacatttttctcaacagcacatagaagattatccaggatagatcatatgttaggtcccaaaacaagtcttgacacattctttaaaaatccaaatca

SEQ ID NO: 856259 - DNA, 120 bp, Artificial Sequence
  ENSG00000287870_6 (sequence is synthesized)
tatcaagtgcatttcttaccacaattattccaattattctaccattctggaataaaactagaaaccagttttaaaaaaaggaacactggaaattgtacaaactcatggaaatgaaacaac

SEQ ID NO: 856260 - DNA, 120 bp, Artificial Sequence
  ENSG00000287870_7 (sequence is synthesized)
atactcctgaacactgaatgggtcaacgaagaaattaaaaaggaaatttaaaattatcttcagacaaatgaaaatggaaacatgacatactaaagcctatgtaatatatcaaagcagttc

SEQ ID NO: 856261 - DNA, 120 bp, Artificial Sequence
  ENSG00000287870_8 (sequence is synthesized)
taagagcagttctgtagcaataaatgcctacatcaaaaaagtagaaagacttcaaataaacaacctaaagatcacctcaaggaactagacaagcaaaaacaaacaacactcataattcag

SEQ ID NO: 856262 - DNA, 120 bp, Artificial Sequence
  ENSG00000287870_9 (sequence is synthesized)
ataaagtatctatctgaacaatacaaaagattgaagtagcaaaaattgcatttttgaaataataaatgaaattaacaaaactttagctagaccaaagaaaagagagaggactcaaataaa

SEQ ID NO: 856263 - DNA, 120 bp, Artificial Sequence
  ENSG00000287871_0 (sequence is synthesized)
gctgtggaaaagtttctgagaagggagagaaatggagggaagtgagacatgactaagatgtaggtaaaaaggaataaaggttttccctgctcaaaactctcatgaagaaattaatggaga

SEQ ID NO: 856264 - DNA, 120 bp, Artificial Sequence
  ENSG00000287871_1 (sequence is synthesized)
aggaaagcacaaagcatgcttgaaagaaagcaagagtcttcttataagtatcacctcccatggagtgataagaagtcaaactcatccatcatgtcagtgggaagagaaggtataaatgat

SEQ ID NO: 856265 - DNA, 120 bp, Artificial Sequence
  ENSG00000287871_2 (sequence is synthesized)
agaagagatccaagtttatcaggaaaggataaagggcagcttacaatttggatcaaaacggcaaattttgatacatctgcctacgctgtccctcacagcaagcctggagacattagaaaa

SEQ ID NO: 856266 - DNA, 120 bp, Artificial Sequence
  ENSG00000287871_3 (sequence is synthesized)
gagaagaacagagctagggcctaagagacccgaatagggcctgagcccagctggggtgggaaaactgtagcagtttggagctacaccctttgccttctgacagagcaccctgggcatgag

SEQ ID NO: 856267 - DNA, 120 bp, Artificial Sequence
  ENSG00000287871_4 (sequence is synthesized)
ctgattgatgccccacacgctcacacccccatggatgttctcacatggtatgtgagcacactggttgttgttgctggccaggtaaacactcagaatagtgagttatacaaataagtacag

SEQ ID NO: 856268 - DNA, 120 bp, Artificial Sequence
  ENSG00000287871_5 (sequence is synthesized)
ggatatgatattacctgaaggtccaccttgtacatgttcctggtgtgagagcagtagcgttacccagatgcaggaagacaatgacagaacaaggccatgaaaaggatggctacacacaga

SEQ ID NO: 856269 - DNA, 120 bp, Artificial Sequence
  ENSG00000287871_6 (sequence is synthesized)
gcagcttttgtatagctataccatttatcttggacctggcaattgagactaaagaaaggtgttatcagacaaaagtagtgctttgggaagtaggaagaagacaccttgggtgcaaaaaaa

SEQ ID NO: 856270 - DNA, 120 bp, Artificial Sequence
  ENSG00000287872_0 (sequence is synthesized)
gaacctcaagccaggcattctcagtgtcttgttctgaggaagggaaatgcagagcagctgccaggccaggtctgtctttagccctctgcttccctctattcacataggggaagctgtacc

SEQ ID NO: 856271 - DNA, 120 bp, Artificial Sequence
  ENSG00000287872_1 (sequence is synthesized)
agagccctggcttatgatctgaaggaaacaatactgtcactgagataggattgatggggcattttcctcctggaagtgctgatccatgaatcatttccaagcaaaccacccatggcatcc

SEQ ID NO: 856272 - DNA, 120 bp, Artificial Sequence
  ENSG00000287872_2 (sequence is synthesized)
ccattccctctactctctcctcctcccttctttcttatatcctaccacccccagctgacatctagcctaggcctctaactctgtccacccctgggcttgaccccacactggacagcttct

SEQ ID NO: 856273 - DNA, 120 bp, Artificial Sequence
  ENSG00000287872_3 (sequence is synthesized)
ctggccacagctagaatagccatgagttgcacctgcgggccctcccaccacacttactgctctgtcacctccttctcatttccccagaggggctgcagtggggtgagagccctgcattag

SEQ ID NO: 856274 - DNA, 120 bp, Artificial Sequence
  ENSG00000287872_4 (sequence is synthesized)
aaagccaaagggcctgggtctgaatctgaactttaccaatcaccgggcaggaaattcaagtcatgcatgtaaaccccttagcacagtgcccggcacacagagcagttcttacgtgtcaga

SEQ ID NO: 856275 - DNA, 120 bp, Artificial Sequence
  ENSG00000287872_5 (sequence is synthesized)
atgggtttctctccctcctccttccctcttcatctatctgggatagtgaggcagccccttccttaaggggcacaggaagtacccgcaggattgtgaacctggttatgtctgcaaatgcca

SEQ ID NO: 856276 - DNA, 120 bp, Artificial Sequence
  ENSG00000287872_6 (sequence is synthesized)
ccccaaggccactttcctcctctccccaaccattgcaggatccacagcaggctgcattaggggttccagatgcagccaaggacggagagcctactcaggaggaggaaggagtgagaataa

SEQ ID NO: 856277 - DNA, 120 bp, Artificial Sequence
  ENSG00000287872_7 (sequence is synthesized)
aaggacgtgggtctgaggggaccagggaaaagacacagaagtcaagagaagcggttcttctgatcaacccgctggaggagaagggagatggtgctggtggccttgagaatcaagggctga

SEQ ID NO: 856278 - DNA, 120 bp, Artificial Sequence
  ENSG00000287872_8 (sequence is synthesized)
gaacccaggcttgatgcagagagcttggtgaggagtcagcagccaactaaactggctgcttgaatcctacagctggtgacagtggaactggatatggtgtgcatgtatgtgattctcaga

SEQ ID NO: 856279 - DNA, 120 bp, Artificial Sequence
  ENSG00000287872_9 (sequence is synthesized)
aaccagcaaaggagacggtgcattccagggagacgctgagggtgtcacccaatagggatctacagctgttgattttcagatgtgctccacagaccccctgggggttccatggacgccacc

SEQ ID NO: 856280 - DNA, 120 bp, Artificial Sequence
  ENSG00000287872_10 (sequence is synthesized)
aggagcagtcgactacttttgggcccaggtttgagggtcgtgaaacagggcaattccactttgacaacttttacactggaacatccatgttaggtttcttctggagaaagcactttggct

SEQ ID NO: 856281 - DNA, 120 bp, Artificial Sequence
  ENSG00000287872_11 (sequence is synthesized)
aaatcagtcagaatggcccggaactaggtagcctccatgtgtgcctatttcaggaaagagcagacatcactcagctttccatatggaagggggtcgagatggcttaagctgacacaggga

SEQ ID NO: 856282 - DNA, 120 bp, Artificial Sequence
  ENSG00000287872_12 (sequence is synthesized)
aacgaggaggacaggatcttgtctgtgcagccaggcctcccgggaacctaggggaagaagagtcaccaggcgccagtgttgggagtgcagcatggccaagttgctgggaggcgaaagtga

SEQ ID NO: 856283 - DNA, 120 bp, Artificial Sequence
  ENSG00000287872_13 (sequence is synthesized)
gccagaggactcagcagcagaagctgagcacacggcttcagtctagtgacttcacaactctctccacctccgcctcccccgggggtgcttctcttttctccccctttctctcttccaact

SEQ ID NO: 856284 - DNA, 120 bp, Artificial Sequence
  ENSG00000287872_14 (sequence is synthesized)
ggctaattatcactagacttccccattcaaattcctgggaaacatggccagggcctgtcatcagctttccttggtctttttacttgtggcacaatcctgtggctcagaatgcaaccaatc

SEQ ID NO: 856285 - DNA, 120 bp, Artificial Sequence
  ENSG00000287872_15 (sequence is synthesized)
ccgtgccaggagaaccctggggctcccaaccccagcagaggctgtagaggtgccacagattcccttggaagggcagcaggtgatataagcaactgggatgtcctgtctgtgaggcttccc

SEQ ID NO: 856286 - DNA, 120 bp, Artificial Sequence
  ENSG00000287872_16 (sequence is synthesized)
aggcatcgtgactgacctgcctgaaggcctggctggcattgtgctggcctacctaggacattcaactgtttgcttgccaggctctcaaggccttcttcctcttgatgcagttccaacaat

SEQ ID NO: 856287 - DNA, 120 bp, Artificial Sequence
  ENSG00000287872_17 (sequence is synthesized)
gtccctacctaccacagcctatttcacatgcagatgctggtgcacacaccccctcagccgctggttggtaggatccataagtgatggtgcgggactacattattattttatcttatataa

SEQ ID NO: 856288 - DNA, 120 bp, Artificial Sequence
  ENSG00000287872_18 (sequence is synthesized)
tcatgcaccccataatgacattttggtcaacaatgaagtatatacacaatggtagtcccatgagatcataatggagctaaaaaatccctatcatctagtgatgccatagccattataaca

SEQ ID NO: 856289 - DNA, 120 bp, Artificial Sequence
  ENSG00000287872_19 (sequence is synthesized)
aaaatccctatcatctagtgatgccatagccattataacatcgcagtccaacacattaccttgtctatgtttggattcacaaatacttgcctttgtgttataattgcctacagtattcag

SEQ ID NO: 856290 - DNA, 120 bp, Artificial Sequence
  ENSG00000287872_20 (sequence is synthesized)
ggcctatatagcaataggaccatatagcctaggggtacagcaggctataccatcaaggtttgtctaagtacgtgctatgatgtttgtacaatgatgaaattgcctaaggacgcatttctc

SEQ ID NO: 856291 - DNA, 81 bp, Artificial Sequence
  ENSG00000287872_21 (sequence is synthesized)
tgtttgtacaatgatgaaattgcctaaggacgcatttctcggaatgtatccccattatttaattttatttaatttaattta

SEQ ID NO: 856292 - DNA, 77 bp, Artificial Sequence
  ENSG00000287872_22 (sequence is synthesized)
tggccgtatccccattgttaagtgatgcatgactatatgattctgattaccaaagtaatatatgttggatgtgcaaa

SEQ ID NO: 856293 - DNA, 120 bp, Artificial Sequence
  ENSG00000287872_23 (sequence is synthesized)
tgattctgattaccaaagtaatatatgttggatgtgcaaaagtaaaactgtatagaaaaaaattatgtagaaagaaaaagtgctccctaattaaacccatagtcgataaattcaacaggt

SEQ ID NO: 856294 - DNA, 120 bp, Artificial Sequence
  ENSG00000287872_24 (sequence is synthesized)
tgctccctaattaaacccatagtcgataaattcaacaggtttgtgaatgtatcttcagagtttttctagacatttacttacttattatttttcagaggtggggtctcactatgttgccca

SEQ ID NO: 856295 - DNA, 120 bp, Artificial Sequence
  ENSG00000287872_25 (sequence is synthesized)
acacaaccagcctcgaactccaggcctcaggtgatcctcctaccgcagtctcctgagtagctgggactgtaggcatgcaccactgcacccagcttctaggcatttaacaatgtgtgcata

SEQ ID NO: 856296 - DNA, 120 bp, Artificial Sequence
  ENSG00000287873_0 (sequence is synthesized)
cttctggcggaggagaactgtcattctgaggggctggggtagggaaagctcttcaagtgcgaatttccccattttaggcctctctcctggcccccggcacatttttttacctttttcttc

SEQ ID NO: 856297 - DNA, 120 bp, Artificial Sequence
  ENSG00000287873_1 (sequence is synthesized)
ttccgtaaacttcctgccagtgactagcttccggtatgaaatcaagctctgcgtgagagctgtaaaaccagaaaaatgtggaaatggacaggagggctgttgtccaaaaatgcaaaggaa

SEQ ID NO: 856298 - DNA, 120 bp, Artificial Sequence
  ENSG00000287873_2 (sequence is synthesized)
atctgacgtcccaccctgaagaaaaatatcacaaggcccaaaagcaaggcgtctctgatgagtcacctatgacacccaattgaaatagcatcgccttggccgggtgctctggtttccaca

SEQ ID NO: 856299 - DNA, 120 bp, Artificial Sequence
  ENSG00000287873_3 (sequence is synthesized)
tggttacagcggctgcttaggatcttcaactcccactggtgccttgcttttctagcacacccagagaacacctgttcctcacgtgaacattacaaggggatccaagatgctttacttttt

SEQ ID NO: 856300 - DNA, 120 bp, Artificial Sequence
  ENSG00000287873_4 (sequence is synthesized)
gctcttgggaaatggaggggatacaatactaagtattccggaatttcctttgaaaaaataccggaatgccctgagcccggagccagggatgattactgaagccctggctctttagtcact

SEQ ID NO: 856301 - DNA, 120 bp, Artificial Sequence
  ENSG00000287873_5 (sequence is synthesized)
atatgtgagaactgacataagacctttcaacccctgagcgcttagatccttcatctgtaacgtgaagtaatagtaatccgtactccatggatttcataggctgcaaccttttggaaagaa

SEQ ID NO: 856302 - DNA, 120 bp, Artificial Sequence
  ENSG00000287873_6 (sequence is synthesized)
aatcaaaattttactgttgacgaatttttatttactcatcttgtgtttctaacatctaacggggtgcctggcacattatagatgtttcatattttaaaaataaatgtaaggtgcaaatga

SEQ ID NO: 856303 - DNA, 120 bp, Artificial Sequence
  ENSG00000287875_0 (sequence is synthesized)
gcagcggcccgcggagcctcacacaggccgcagccggttcctttcagcggcctgtccacgccccggagacgcccaggggaaggagagggcgcggctacatggggaatgggagctgtgtta

SEQ ID NO: 856304 - DNA, 120 bp, Artificial Sequence
  ENSG00000287875_1 (sequence is synthesized)
ctacctccaccctggcccgccagcgtctggacgaagaaccgccgccagaccagtttgggcctggtatctgtcatgttggtatcttattgctacaaaaagtctgtctcgtcagtccaaagt

SEQ ID NO: 856305 - DNA, 120 bp, Artificial Sequence
  ENSG00000287875_2 (sequence is synthesized)
taacatccctgcagtaaccaaaaacatgagctggataaggaggagaagaggagctggccgaatgatttttaagcagaagctgaatgttcaataagaatagagttgacaccttcagaggag

SEQ ID NO: 856306 - DNA, 120 bp, Artificial Sequence
  ENSG00000287875_3 (sequence is synthesized)
aagtaagaaatagttttcctgtgtgtcatgtaagtcatgtttttaggcttacctttcatgcaattgcaacaacatcctctaagggtcttgaacgaaccttctattccccaaatattcctg

SEQ ID NO: 856307 - DNA, 120 bp, Artificial Sequence
  ENSG00000287875_4 (sequence is synthesized)
tctcagatgtgctccatcactttgtctctcctactgtgaaccttttggttggtatctactgttgacacatagcttacctaatgaactaggtggaagtatctggctaatgttgctagctgc

SEQ ID NO: 856308 - DNA, 120 bp, Artificial Sequence
  ENSG00000287875_5 (sequence is synthesized)
cttcttccacacagctctatctctgacattctgtagcttgcaaggcatcaaaatggacctggattttctgcagcccttaagacacttaaaccaagttgtggtccacacagaagcaaaggc

SEQ ID NO: 856309 - DNA, 120 bp, Artificial Sequence
  ENSG00000287875_6 (sequence is synthesized)
ttctcttgtcgctttgggtcacaatttctcttactgctttactacttccactacaggggctaacaaatgttttaatgtaaacagtgtatttaggttttcctctaagtctcactgccaatt

SEQ ID NO: 856310 - DNA, 120 bp, Artificial Sequence
  ENSG00000287875_7 (sequence is synthesized)
tcaggacctaagcatgcagttgggagctagtggacacgacaagtgaaagatattatgttatattcagatttatttttctttagatatcataaaagtaattggacaaacctagtcttcctg

SEQ ID NO: 856311 - DNA, 120 bp, Artificial Sequence
  ENSG00000287875_8 (sequence is synthesized)
acttccccttctgttacctgttatattgagttatctcactgaagactccttgttatttcaggcaaatacactcagatgtctgtggatctagaaatgagtgaaaaatatagattccagctg

SEQ ID NO: 856312 - DNA, 120 bp, Artificial Sequence
  ENSG00000287876_0 (sequence is synthesized)
actttacttcagctccttttcagaacgagtgcagattcagagaagaaggtggagcaagatggcagaataattgtccctccaataaggacatcaagttaacgactacctacacagaaaaac

SEQ ID NO: 856313 - DNA, 120 bp, Artificial Sequence
  ENSG00000287876_1 (sequence is synthesized)
agcttcataagaacgaaaatcagaactaattcgactgttgatgcccatcggacaaatactatcaggaacacagtgacatggacctgtgcagtgaagccagcaaattgtgcttgagatgga

SEQ ID NO: 856314 - DNA, 120 bp, Artificial Sequence
  ENSG00000287876_2 (sequence is synthesized)
actttacctcccaaagcaactgcaggcctccctattctctgagacacagcaatatggaaattaggcaaatcaatgactgtacaatggcctctaagtgtccaagttaaaggaagaattaca

SEQ ID NO: 856315 - DNA, 120 bp, Artificial Sequence
  ENSG00000287876_3 (sequence is synthesized)
tgtctctccctataaatcaaaaactagaaatgattaagtttagtgaggatggcatgtcaaaaatcaagacagactggaagctacaactcttgtgcaaacatttgctgtattgtgaatgca

SEQ ID NO: 856316 - DNA, 120 bp, Artificial Sequence
  ENSG00000287876_4 (sequence is synthesized)
aaataaaattcttgaagaaaattaaaagtgttactccagaaaacaactaagtgataagaatgtgaaacaacctttttaatgatataaagaaagtcttagtggtctagctagaagagcaaa

SEQ ID NO: 856317 - DNA, 120 bp, Artificial Sequence
  ENSG00000287876_5 (sequence is synthesized)
gcaggcatgacatgtctttaagccaaagcttagtgtagagcatggccctaacgctcatccattctgtgaaggttaagagaggtaaagaagctgcacaagaaaagttggaagctagaataa

SEQ ID NO: 856318 - DNA, 120 bp, Artificial Sequence
  ENSG00000287876_6 (sequence is synthesized)
gttaatttatgaggtttaaggaaagacgctctttccctaacatagatgtacaagtaaaaccagtaagtgctgatttagaagctgcagcaaattatccagaagctccagctaatataattc

SEQ ID NO: 856319 - DNA, 120 bp, Artificial Sequence
  ENSG00000287876_7 (sequence is synthesized)
atgaaggtgctttcagtaaacaacagattttcagtctagatgaaacagttttctattggaaaaagatgtcgtttaggacttttattgctaaagaggagaagtcaatgcccagcttcaaag

SEQ ID NO: 856320 - DNA, 120 bp, Artificial Sequence
  ENSG00000287876_8 (sequence is synthesized)
gccaattctcatttaccaccttaacattctagggtgcttaagcattatgctaaatctattctgcctgtgctgtatcaatggaaaaacaaagcctggatggcagcacaactgtttagatca

SEQ ID NO: 856321 - DNA, 120 bp, Artificial Sequence
  ENSG00000287876_9 (sequence is synthesized)
tggtttactaaatattttaagctcattgttgagacctactgctcaggaaaaaacaaacaaaaaaagattcgtttctaaatgcccattgacaatggcacttggttactcaagaaccgtgct

SEQ ID NO: 856322 - DNA, 120 bp, Artificial Sequence
  ENSG00000287876_10 (sequence is synthesized)
gaagatgtaaagagattaatgttgtttccatgcctgctaacataacatccactctgcagcctgtggttcaaagagtaattttgactttcaagtcatattatttaagaaatatatttcata

SEQ ID NO: 856323 - DNA, 120 bp, Artificial Sequence
  ENSG00000287876_11 (sequence is synthesized)
agcctgtagttaccatagatagtgatttctctgataaatctgggggaaaaaaactttgaaaatcttctcgagaagattcaccctttcagatgccattaagagcatgtgtatgtcatagga

SEQ ID NO: 856324 - DNA, 120 bp, Artificial Sequence
  ENSG00000287876_12 (sequence is synthesized)
gatcaaaataccaacattcagaggagtttggaagaagttgattccaacccgcatgatgactttgggggctctcaagacttaagtgaagaaagtagcagcagatgtggtagaaatagcaag

SEQ ID NO: 856325 - DNA, 120 bp, Artificial Sequence
  ENSG00000287876_13 (sequence is synthesized)
agaactagaattagagatggagtgtgaagatgtgactgaattgttgcaatctcatggtagaacttgaacaaatgaggagttgcttctcatagataagcaaagaaaatgattatttgagat

SEQ ID NO: 856326 - DNA, 120 bp, Artificial Sequence
  ENSG00000287876_14 (sequence is synthesized)
tgaaatgacaacaaagaatttagaatattccataaagttagttgataaaggagtggcagagtttgaaaggactgacttcaattttgcagaaagttctgtgtctaagatgctagcaaacag

SEQ ID NO: 856327 - DNA, 120 bp, Artificial Sequence
  ENSG00000287876_15 (sequence is synthesized)
tgcagaaagttctgtgtctaagatgctagcaaacagcatagcatgctacaaagaaatctctcatgaaaggaagaatgaattcttgtgcaaactttatagttgtcttattttagtaaattg

SEQ ID NO: 856328 - DNA, 120 bp, Artificial Sequence
  ENSG00000287876_16 (sequence is synthesized)
tctcagccaccccagcctttggcaaccactaccttgatcagtcagcagacatcaacatggagaaaagacagtttacccacaactctctggaagctaagatgattgttagtattttttagc

SEQ ID NO: 856329 - DNA, 120 bp, Artificial Sequence
  ENSG00000287877_0 (sequence is synthesized)
gtgcacacacagcttctctcaggaaccaagagtcactgcctcccctcctctccttcccatctcaagggtgctggaaataaatttgatgcgtatccagttcggtatatggaactggtgagg

SEQ ID NO: 856330 - DNA, 120 bp, Artificial Sequence
  ENSG00000287877_1 (sequence is synthesized)
ccattcttcctcaaagaacgtgaaaaagcaagcataatcttgtgattactcttggagagagaggtagcactgggaaaaaagatgatgcagcaagaagcctctcaccagatgccagcacct

SEQ ID NO: 856331 - DNA, 120 bp, Artificial Sequence
  ENSG00000287877_2 (sequence is synthesized)
tgatattggacttcccaggctccagaaccacaaagtaaatacagctcttcaaggaacaacctgcagtcatcagggacaggagcgtctccatgaaggaaacctcacaggcctttctgctga

SEQ ID NO: 856332 - DNA, 120 bp, Artificial Sequence
  ENSG00000287877_3 (sequence is synthesized)
aaaccttgcaactccttggagagggcagccctggcagaaactcagacaaagcaaaccctacaggggagtgaattgattataattttagcacagatttcacagcccaggatcccccactgt

SEQ ID NO: 856333 - DNA, 120 bp, Artificial Sequence
  ENSG00000287877_4 (sequence is synthesized)
ttgttgcaggataggaagtccagactgttttttatctgcctattcccaggttatcaaaatgattcattatggccaattcctgagagattgatctagaaaccagaatgccaatatgtgagt

SEQ ID NO: 856334 - DNA, 120 bp, Artificial Sequence
  ENSG00000287877_5 (sequence is synthesized)
ggataatgtgacctagagctgaagaaatactggtatctgttgtacaatcaatactacactttcctagaagtcaggccttttgaaaaatttattttttggacaacattcttaatttttcta

SEQ ID NO: 856335 - DNA, 120 bp, Artificial Sequence
  ENSG00000287877_6 (sequence is synthesized)
tcaaagacagtgttaattaagcacagggtttactagtctctataaagttagtagaccattagttgaaattgcaggctaatccagccagtagagtaaaaacaaataaaaattagtttattg

SEQ ID NO: 856336 - DNA, 120 bp, Artificial Sequence
  ENSG00000287877_7 (sequence is synthesized)
ttgatgtaaattaaaaaatgttctagtcaatataaatgtttattctttcccacaaaaaaaccttttttttctgattcatgaaaatgttttgatagtaatgatttctttttaaataaatca

SEQ ID NO: 856337 - DNA, 120 bp, Artificial Sequence
  ENSG00000287877_8 (sequence is synthesized)
cgtgcacataatcccattgtctttcaaatcaaatgcatggaattttgctagccatttactgtgcatcaagaaattactcagaaaaaaaggcagcggtttgtttgaaaagctgagaatcat

SEQ ID NO: 856338 - DNA, 120 bp, Artificial Sequence
  ENSG00000287877_9 (sequence is synthesized)
taactttagttgccattatcaattaaaagggcaacagtgattagcagagatctcttggtcttagcactaaattgatgggcctggtaatatgaaacctggttttgcttaactctgagcgtg

SEQ ID NO: 856339 - DNA, 120 bp, Artificial Sequence
  ENSG00000287877_10 (sequence is synthesized)
taaatatcaatttctctccatgagttacatttccactgtgaaatctaaagttggattttcaatgcagaactaattaagatgttacagacaccaagttaatttgatatgtctgaaagcata

SEQ ID NO: 856340 - DNA, 120 bp, Artificial Sequence
  ENSG00000287877_11 (sequence is synthesized)
aaaagggattattttaaaggtggttcagtgaacaccccaagatgatgtatgtgagtatttctccttgcacatgtcacagaggtgctactttaaggtactgggaagtttttcaaaagacac

SEQ ID NO: 856341 - DNA, 120 bp, Artificial Sequence
  ENSG00000287878_0 (sequence is synthesized)
gatgcaatgtgagaagaatataaaatttgcatgaatttttaagatgaaatacggaaacttcaaagacattttcagcctgactgctttcagctatgcccccagattcccccagagggacgc

SEQ ID NO: 856342 - DNA, 120 bp, Artificial Sequence
  ENSG00000287878_1 (sequence is synthesized)
tgtcgcttgcctttgctgacaggcgacttgctagaaaagtctgggaagctctggtctacagaagtaggtaacaccggccaagaaccgcacttgcagcagctgtcggatggattaggcagc

SEQ ID NO: 856343 - DNA, 120 bp, Artificial Sequence
  ENSG00000287878_2 (sequence is synthesized)
acagacagcagcagggtgtgtgatcccaggggacagaagcatctctcagcaagcagccatcttctgcagactctgggatttttcaagagtgagcacactggctacaaaggagtcttccta

SEQ ID NO: 856344 - DNA, 120 bp, Artificial Sequence
  ENSG00000287878_3 (sequence is synthesized)
cgtgaggcctttgtcaaaggaagggctacaaagtgaccattcagctcctggggttgagagcaaagggccatgctaagcaggaaggtgttcacaaataccaccatggattagctggctgca

SEQ ID NO: 856345 - DNA, 120 bp, Artificial Sequence
  ENSG00000287878_4 (sequence is synthesized)
ggggacacctacagtgcatcatgtcaccgggagtaaggacctgtgcccacatactgagaagggaggaaaagccttccagtcagtctaagaacacaggtaacttaaccagcttcaacaaga

SEQ ID NO: 856346 - DNA, 120 bp, Artificial Sequence
  ENSG00000287878_5 (sequence is synthesized)
gcccaaagtcttttgccctgagcagcaaacagagggatccaagctccaccccctctgctctcccactacaggactggagagaacatgggaccaagcaaccctcaaactggatggtggcgg

SEQ ID NO: 856347 - DNA, 120 bp, Artificial Sequence
  ENSG00000287878_6 (sequence is synthesized)
agctgaacaacgcttcagaggtcacctgtccacatcccagcggctcagacctctgcctaggagggtgggagctcagcaacatttcacttccttagttggatgcggctcagggccctcttc

SEQ ID NO: 856348 - DNA, 120 bp, Artificial Sequence
  ENSG00000287878_7 (sequence is synthesized)
acagcacccagagctgcagttcctaccggctcccaactcccccgatgccctgctgatggccaactcagagcaggtgtcttttagctagtcctttctggaagggggtacaagaatactcac

SEQ ID NO: 856349 - DNA, 120 bp, Artificial Sequence
  ENSG00000287878_8 (sequence is synthesized)
agctgcctagtgccatgacagagcctacaggctctcggacaaatgactaaggccaagtccttaaccacagctacagtttactgagcattcgtgaaaaggggtgggtgactcagaaattgg

SEQ ID NO: 856350 - DNA, 120 bp, Artificial Sequence
  ENSG00000287878_9 (sequence is synthesized)
ttcatggaccaccacgtaacctccaacgggagtaaagcacacagcttctacctataactgaaaaaagaggctctcatctgaccctggatgtgagaaaggaagcagcgtgtcatcctggga

SEQ ID NO: 856351 - DNA, 120 bp, Artificial Sequence
  ENSG00000287878_10 (sequence is synthesized)
ggtgctgtcagccattttgccaccatcagggaagctggccagagaacaaagctaacatgcaggaggcaatgggaacaaactacggggaaatagagctggaaccttgatcaggctgcacct

SEQ ID NO: 856352 - DNA, 120 bp, Artificial Sequence
  ENSG00000287878_11 (sequence is synthesized)
gaagactgattttccactaggcttttccatatacagttgttccttattattcctttttgttgcagggaattggttccaggattgccacccacttaccaccccaccaataccaagtccttg

SEQ ID NO: 856353 - DNA, 120 bp, Artificial Sequence
  ENSG00000287878_12 (sequence is synthesized)
gatgctcaagtcccttacataaaatgtagtagcacagctgatccttgaacacacgcatgaactgcacaggtccactcatatgcagattatctcctgcctctgctgccctacacagcaaga

SEQ ID NO: 856354 - DNA, 120 bp, Artificial Sequence
  ENSG00000287878_13 (sequence is synthesized)
cagcccctccctctattttttcctcagcatgaagacctttattatgatccacttctactgaacacacaggaaatataggttcccttccttatgattttcttaacattttatttttctcta

SEQ ID NO: 856355 - DNA, 120 bp, Artificial Sequence
  ENSG00000287878_14 (sequence is synthesized)
gcttacctaaaaatacagtatataacagatatacaaaacatgtgttaactgactttatgttattggtaaggcttctagtcaacagcaggctatctgtagcttttggggagtcagagttat

SEQ ID NO: 856356 - DNA, 120 bp, Artificial Sequence
  ENSG00000287878_15 (sequence is synthesized)
gctatctgtagcttttggggagtcagagttatacccagatttcaactgcatgtgtaggggacagccctaatccctgcattgttcaagagtcacttgtatttgcatataacctatgcacat

SEQ ID NO: 856357 - DNA, 120 bp, Artificial Sequence
  ENSG00000287878_16 (sequence is synthesized)
tgatacagtgtcagtgctctgtacatggttgttacactgcatgttcacatctgtattactttctattgtttatgttatcttgaatgttttcaatctggttggctgatcatggatgtggaa

SEQ ID NO: 856358 - DNA, 120 bp, Artificial Sequence
  ENSG00000287879_0 (sequence is synthesized)
actgcagcatcagtaatgctcaaaaggtggaaaccacccaaatgtccacccccaataagtaggtgacaaaatgcagatgatagaatattcctcagccacacaaaggagtgaggcgctgac

SEQ ID NO: 856359 - DNA, 120 bp, Artificial Sequence
  ENSG00000287879_1 (sequence is synthesized)
gcacgctacgaagcaggcgggcctccggaacaacgctgggtggcagaggccaggcgtgaagaccctgagtggcacggagttcccggaagctttactccagggacagcccagcatcaagct

SEQ ID NO: 856360 - DNA, 120 bp, Artificial Sequence
  ENSG00000287879_2 (sequence is synthesized)
catggcttcaggggacggctccctcgtggtgggggcaggcgcagacccaagggctttcggtgtctccagggcggggctgctccctggctgccgctcctcccttactcaggcggagcaggg

SEQ ID NO: 856361 - DNA, 120 bp, Artificial Sequence
  ENSG00000287879_3 (sequence is synthesized)
gccacagagctcttgacagcactgagctcaccagtgataaagcacttcggacagccgtgaaggcagactggcgttgggactttggagagcttgtgggcaccctgtggaacccgttatctt

SEQ ID NO: 856362 - DNA, 120 bp, Artificial Sequence
  ENSG00000287879_4 (sequence is synthesized)
cagatgttgactggctgactctgggtgcaggttcaagctgggcaccctgtcctcatgggctatgcgttcctaaccacagacagctaaacgagcagggagccccactggcccacacgagcc

SEQ ID NO: 856363 - DNA, 120 bp, Artificial Sequence
  ENSG00000287879_5 (sequence is synthesized)
tggaactggccctgcagaagacgagacgagcctgcctctgacctgggaacgcctctctcctctccagccggcatcggccaggctcatattgggccgtccctccagccctggctgcttttt

SEQ ID NO: 856364 - DNA, 120 bp, Artificial Sequence
  ENSG00000287879_6 (sequence is synthesized)
caggtcaggcttcttgggcagcccgagtaggaccacccagcatcgccgcacacagcagcctcaggcctcaccgacataggccgggtggtctgtggagatgacaggactgcctttcttttt

SEQ ID NO: 856365 - DNA, 89 bp, Artificial Sequence
  ENSG00000287879_7 (sequence is synthesized)
ctcagcctcccgagtaggtgggactacagaggcacgccaccatgcccggctactattttttattatttttctagagacagggatctcca

SEQ ID NO: 856366 - DNA, 120 bp, Artificial Sequence
  ENSG00000287879_8 (sequence is synthesized)
ccccccaaagcgctggacttacaggcacgaggccatgctggccaaggactggctttcgagcaaagctcttcagctggatctgatggagacaacacagtgaaggggtgggttgcccctcca

SEQ ID NO: 856367 - DNA, 86 bp, Artificial Sequence
  ENSG00000287879_9 (sequence is synthesized)
agtataaagaaacaaaaagggggcccaggggaccggcgttcagcatacggatccacactggcaccggcctctgagttcccttagta

SEQ ID NO: 856368 - DNA, 120 bp, Artificial Sequence
  ENSG00000287879_10 (sequence is synthesized)
tatttattgatcattatcgggcgtggcagcaggataataggataatagtggagagaaggtcagaaggtaaaaacgtgaacaaatgtctctgcatcataaacaacgtaaagaaaaaagtgc

SEQ ID NO: 856369 - DNA, 85 bp, Artificial Sequence
  ENSG00000287879_11 (sequence is synthesized)
tttcattgcccagggactcaaagaggcgttctttcctcttttactaatcctctcagcaaagaccctttacgggtgtcgggctggg

SEQ ID NO: 856370 - DNA, 84 bp, Artificial Sequence
  ENSG00000287879_12 (sequence is synthesized)
agaggtccctgcagccttccgcagtgttttgtgtctctgagtacttgagattagggagtggtagctgccttcaagcatttgttt

SEQ ID NO: 856371 - DNA, 120 bp, Artificial Sequence
  ENSG00000287879_13 (sequence is synthesized)
cagaacaaaatggccctctgctcaaattctacaatgccaatatggactgcgggtcttcaaagtggtctcctctaccttaggaacacagcaagaaaatgatgtgcattctcgatttcacag

SEQ ID NO: 856372 - DNA, 120 bp, Artificial Sequence
  ENSG00000287879_14 (sequence is synthesized)
ctactggaggagtcatcggccagatcggcctagcagttgtttctttttgacccgataaaattatgtttagaatagctctcagttttcctgctcatgtttggcttaggataaatgtagaaa

SEQ ID NO: 856373 - DNA, 120 bp, Artificial Sequence
  ENSG00000287879_15 (sequence is synthesized)
ttgtgccttcctcagcatatgctgcctgggtggcgcatgaactgacaaaagagaaactgccgagtactagcccaggatgaataattgaccatgggaatctaaatattaaagaatattaat

SEQ ID NO: 856374 - DNA, 120 bp, Artificial Sequence
  ENSG00000287879_16 (sequence is synthesized)
gtgtattctgaagttacagaaattagccagtctttccctggtgtgaggacagacaattgggaagaaaacagtctgggtaagactgaaatagctaattacgtgagcgaagatgcagactac

SEQ ID NO: 856375 - DNA, 120 bp, Artificial Sequence
  ENSG00000287879_17 (sequence is synthesized)
aagagcagaatgtagacatgaaacaaagctttaaattagaaaaccaacgttttattttggatagctgaaaacgtcccagtccaacccagtgtagggtgcagctgtctttatgaagcatgg

SEQ ID NO: 856376 - DNA, 120 bp, Artificial Sequence
  ENSG00000176984_0 (sequence is synthesized)
aagcgcatcgagggagcccgctcaagctgaagcgctgcacgagctgtgtcttccttctctccgccgcgaatgcgggcaggatgcgagcaaaagacccggcaaagagggcgccgagggggc

SEQ ID NO: 856377 - DNA, 120 bp, Artificial Sequence
  ENSG00000176984_1 (sequence is synthesized)
gcagccggggcgctgggcggacccagaggggacatggagaggaacgcggaaggtgccctctgcggtgggcattactatttccaccatcctcatgatggatctggaatccacgggggtccc

SEQ ID NO: 856378 - DNA, 120 bp, Artificial Sequence
  ENSG00000176984_2 (sequence is synthesized)
ctgcccaggatcgtgcagcctgtggaaggcagcaggcgccgggatgccgaatggattgaatgagcttctcggggattccctgagcttggtgaacgcagagcccaccctgacggtcaggcc

SEQ ID NO: 856379 - DNA, 120 bp, Artificial Sequence
  ENSG00000176984_3 (sequence is synthesized)
taaccccaccgccaataacagagcagccctaggtggaagtgggctgcctgtgcctggcactgggagcggcagaggcggctgccgctgtggaagtagcgcccgcagtgccaagctcctgtg

SEQ ID NO: 856380 - DNA, 120 bp, Artificial Sequence
  ENSG00000176984_4 (sequence is synthesized)
cctgggaggacgcgggcactgggcgacctgcagtcggggctgcccccaggcagggctccctggctttctcacagcgcggctcgcgggaaacgacgctgccctatggcacagtgaagtaag

SEQ ID NO: 856381 - DNA, 120 bp, Artificial Sequence
  ENSG00000176984_5 (sequence is synthesized)
gcgatggctgctctcagccagaggcggggctgggggagggggccagagatgccccgggagcccctggaccctctggagggtcgggtgggggaggggagatctctgtcttgaccacgcact

SEQ ID NO: 856382 - DNA, 120 bp, Artificial Sequence
  ENSG00000176984_6 (sequence is synthesized)
tgtaacccattcttggcacaccgggataccttgcctgcaggtagtgctctgctctcggggagagggcacaacctctaatcctctgaccgaggctctctgcctctcacaagaagcccccaa

SEQ ID NO: 856383 - DNA, 120 bp, Artificial Sequence
  ENSG00000176984_7 (sequence is synthesized)
cacactggttttcctcacagcctgccccaactgctcatcggaacctgcagcccccttccctgccccaactgtccctctgcggaccccattaccctactttctgtcgagcccaactgccct

SEQ ID NO: 856384 - DNA, 120 bp, Artificial Sequence
  ENSG00000176984_8 (sequence is synthesized)
ggctatggagtcagattgcctgggttcaaatcctggctctgccatcttctgactgtgtgaccttgggccagtttctttatttctgtgcctcagttttctcgtctgtaaaattgacgggat

SEQ ID NO: 856385 - DNA, 120 bp, Artificial Sequence
  ENSG00000176984_9 (sequence is synthesized)
ggtggcatctgtctcacagagtggctgtgagggtagcgggcacactgccacaggcacgatgaacgtcagctcttgttgccaacctccccccacaacacacacagcttagtaactctaccc

SEQ ID NO: 856386 - DNA, 120 bp, Artificial Sequence
  ENSG00000176984_10 (sequence is synthesized)
tcacccaacacataacacctagcttgtccctcataatgagctctcagcctaaatcagtgccctcagcaaacctgtggtgcagggcacgtgttagggtagacaagatcctggggaagactc

SEQ ID NO: 856387 - DNA, 120 bp, Artificial Sequence
  ENSG00000176984_11 (sequence is synthesized)
actgactccaccgaggcagcactggctgcagctgggattggcccagacatttaagagccgaggactaagcaatgcctgcattgcctgctatgtgcatatgtccagcaggacggcagtgtc

SEQ ID NO: 856388 - DNA, 120 bp, Artificial Sequence
  ENSG00000176984_12 (sequence is synthesized)
aggccactggccagtggggaccagcctctgagctggtcatccgaacaccctaggaaagagtccaccccgtccttcatgttctatcactgcttggcctagctaagccaagcacctgggccc

SEQ ID NO: 856389 - DNA, 120 bp, Artificial Sequence
  ENSG00000176984_13 (sequence is synthesized)
aagccccaccgtggagatggcggctggagcagtgtccgaggtcacagatggaggaatgtgacctccagcccaatctcgactctgctctttgccagttcagtcttgcccaagtcacttggg

SEQ ID NO: 856390 - DNA, 120 bp, Artificial Sequence
  ENSG00000176984_14 (sequence is synthesized)
ctctttgccagttcagtcttgcccaagtcacttgggttctccaagcctatgatctcctctttaaaatggaagggagagctgggcatggcggttcatgcctgtaatcccagtactttggga

SEQ ID NO: 856391 - DNA, 120 bp, Artificial Sequence
  ENSG00000176984_15 (sequence is synthesized)
aagaccagcctgagtaacatgatgagacccccatctctacaaaaaaacaaaaaacactttggtttttgtttgtttgtttgtttttgtttttgtttttaattagcagggcatgatggtgtg

SEQ ID NO: 856392 - DNA, 120 bp, Artificial Sequence
  ENSG00000259456_0 (sequence is synthesized)
ggcgcggcgggcgcagcagagcggcgggcggcggcggcgtcgtcgagcgcagacaatacaagcgcctcggaccgagtccccgaacctgccctagccaaaatggcggccgagaaagagcgg

SEQ ID NO: 856393 - DNA, 73 bp, Artificial Sequence
  ENSG00000259456_1 (sequence is synthesized)
cgaacctgccctagccaaaatggcggccgagaaagagcggaagtgacggtctcactctgttgtccaacctccc

SEQ ID NO: 856394 - DNA, 120 bp, Artificial Sequence
  ENSG00000259456_2 (sequence is synthesized)
gcttttgtatactggagatataaccaaaaaaggtctaaggtgactttacgcagagattgaaggatgagcagcagatggtcatcaaggagcatggaaacagcatttcaggcaaaggaaaat

SEQ ID NO: 856395 - DNA, 120 bp, Artificial Sequence
  ENSG00000259456_3 (sequence is synthesized)
ggaactctgtgaactcagaagcatgctatggcatggaaagcaaaaaggaaggagcacaaggcagaggtcagaaagggaggcaggggccaacaaacacataggggcttgagggacaaggga

SEQ ID NO: 856396 - DNA, 120 bp, Artificial Sequence
  ENSG00000259456_4 (sequence is synthesized)
aataatctgattctgtttttatgtatctagcttaaactcagaacagcttccaaaatcttattcacagaggttttgtggtcttttgggctaagaatttaattatattgcctacaaacaaat

SEQ ID NO: 856397 - DNA, 120 bp, Artificial Sequence
  ENSG00000259456_5 (sequence is synthesized)
ataactgtgtatattttactaacatttaactaaattcttatcttactgtattaacatttccatgtttaatgatagctagcatgcctgtattaatgcatgtattggaaatgattcagcatt

SEQ ID NO: 856398 - DNA, 120 bp, Artificial Sequence
  ENSG00000259456_6 (sequence is synthesized)
tcactatttggtgtggtatttgtattaggactgggttatttttattatgcttaagaggtttccttctattcttaaagttttaactagaaaatggtagtaaataatatctcctttagcatc

SEQ ID NO: 856399 - DNA, 120 bp, Artificial Sequence
  ENSG00000259456_7 (sequence is synthesized)
tacagacttaaccacactactttgttaacataatgaatgaattataagtgattaccaataatgagccattctggcattcctggaataaacccttttgttcacggtgttttattctaataa

SEQ ID NO: 856400 - DNA, 120 bp, Artificial Sequence
  ENSG00000285780_0 (sequence is synthesized)
gcagcatgctgagaacagcaggactgtcaccaggctctggaaatgaggcagtcatggacatggagggaactggaagccattatcctcagcaaacgaacacaggaacagaaaaccaaacac

SEQ ID NO: 856401 - DNA, 120 bp, Artificial Sequence
  ENSG00000285780_1 (sequence is synthesized)
cttataagtgggagctgaatgatgagaagagcatttttacaagggaaagaatgaattttcaagtttacacaaacagcaaagtgagcacctccatgtttatagaacatcaattctctcttg

SEQ ID NO: 856402 - DNA, 120 bp, Artificial Sequence
  ENSG00000285780_2 (sequence is synthesized)
aattctctcttgtgtttcaccgtgctgtgcaataagatttgtatctgaagagttataatatgataaaataaaactggatagaagtgggttctctttttgacctaatttggcctgtccttc

SEQ ID NO: 856403 - DNA, 120 bp, Artificial Sequence
  ENSG00000285780_3 (sequence is synthesized)
agttactttgcttctgctctcatttcactatgtggcaatgcatatgtaaaatgtcatcattggttgggaaatgcatattgagattaaaagagttgtcgcattttagaattggttgtttat

SEQ ID NO: 856404 - DNA, 120 bp, Artificial Sequence
  ENSG00000285780_4 (sequence is synthesized)
gtcagaaaattagccagaagttttctacgaagtaaaaatacgtaattcagtttttcttcccttataatattattagtagtttactccattttgttactttctatgttcaggtgctctatt

SEQ ID NO: 856405 - DNA, 120 bp, Artificial Sequence
  ENSG00000285780_5 (sequence is synthesized)
tcccaccatattccctcaccagcccccaccagataaatgtcagaaagaatgaaacattatgtttttcctctgtttcaggaagctacctacttagaattccatgacgtttcagttacacaa

SEQ ID NO: 856406 - DNA, 120 bp, Artificial Sequence
  ENSG00000285780_6 (sequence is synthesized)
gggcttgaatcttcaaaaaacctaataccactaatcagtttaaacttttttcactttgctgttgattctaattcatcaacaataaattctttccattacccataatgatagttaaaactt

SEQ ID NO: 856407 - DNA, 120 bp, Artificial Sequence
  ENSG00000285780_7 (sequence is synthesized)
gttcatgccctgttactgcacctaaaagcaaactccttaaacctgcacttccaagagtagttatttgtattgattggatccatgataattattttgcctggcttctcctgtatcaaataa

SEQ ID NO: 856408 - DNA, 120 bp, Artificial Sequence
  ENSG00000285782_0 (sequence is synthesized)
acagaagaaagaactctgcacagaaaatacattcaatattctaagttaagaagaaaaagtttgaggaaaaatataaaggccttaaaccccttattacttcagttcaacaaggaatcaaga

SEQ ID NO: 856409 - DNA, 120 bp, Artificial Sequence
  ENSG00000285782_1 (sequence is synthesized)
gtaaagttcttcaaagaattaattgaagacaccctgggaagaggggactgaggacttaattctgattctgatgggaatttgatccatgaaaggattgcagaactgaatcccaacagacag

SEQ ID NO: 856410 - DNA, 120 bp, Artificial Sequence
  ENSG00000285782_2 (sequence is synthesized)
attctgttgatcatgataatgttttgcttccagcagaaagactgagggattggagacaaaggcgctagaatgctggagaagcacttttgcagaaatgctggtgagaagcaccaaatgcta

SEQ ID NO: 856411 - DNA, 89 bp, Artificial Sequence
  ENSG00000285782_3 (sequence is synthesized)
agagctagagctttgctactgcttttcggggccagcctttctgaaccagaaaaaaaggtatatgggtaccaacacgaggtctaactagg

SEQ ID NO: 856412 - DNA, 120 bp, Artificial Sequence
  ENSG00000285782_4 (sequence is synthesized)
aaaaaaaggtatatgggtaccaacacgaggtctaactaggagtcaggaaagataggaaagatgtctatgtggcaaatgagcattctattgtttgaaaacatcttcagtgccataatgaga

SEQ ID NO: 856413 - DNA, 120 bp, Artificial Sequence
  ENSG00000285782_5 (sequence is synthesized)
actcaggacaaacctggatcaaacagcagcaggatatgataagaacttctgcagggacggacacatttatacagtattcattagtaaaaaaaaaatcagtcatcagtgaagagaaataaa

SEQ ID NO: 856414 - DNA, 120 bp, Artificial Sequence
  ENSG00000231098_0 (sequence is synthesized)
aggaaaaacagagaatgtagctttcaggattcacagcagaaatactgtaaatgtgagtgtgttccatttgcatgtgtttaagcaatgttgaaggaagacgtcacagacagatgaagctca

SEQ ID NO: 856415 - DNA, 120 bp, Artificial Sequence
  ENSG00000231098_1 (sequence is synthesized)
acctcgttgcttgtctggcagtcggacaaggataatctaggtactcgaggtttggaaggcagaagtgaagcagaaggcagaagtgaagcagaaggcatcagattgttcctctggcaagtg

SEQ ID NO: 856416 - DNA, 120 bp, Artificial Sequence
  ENSG00000231098_2 (sequence is synthesized)
ggcttttgcagatgtgccattttacagtggcttccacttgttttccttgacaacttccttgagtgactgacccagccccaatgtgcctatctcctgtgaaaaataaaccatcagattggg

SEQ ID NO: 856417 - DNA, 120 bp, Artificial Sequence
  ENSG00000285784_0 (sequence is synthesized)
gagggagcgaagcggcgagcgggctgcaggccgagcagggccatgcggcggtagtggcggcagacaggacagagccctggcaggagaggcacagcacgtcagggtctggctctgtcatat

SEQ ID NO: 856418 - DNA, 78 bp, Artificial Sequence
  ENSG00000285784_1 (sequence is synthesized)
gctctgtcatatcacctgccggattgaagtgattctcccatctcagcttcccagtagagacgggatttcaccgtgtta

SEQ ID NO: 856419 - DNA, 90 bp, Artificial Sequence
  ENSG00000285784_2 (sequence is synthesized)
tctcgtgatccgcccaccgtggactcccgaagtgaatgatattgtgtccggaattggtgggctcctggtctcactgacttcaagaatgaa

SEQ ID NO: 856420 - DNA, 90 bp, Artificial Sequence
  ENSG00000285784_3 (sequence is synthesized)
acttgcagtaaagaccctctgaagaatcatctgaaagggcatttgaaagtccgtaaacaaatagtctcggtctgtcgcccaggctggagt

SEQ ID NO: 856421 - DNA, 120 bp, Artificial Sequence
  ENSG00000285784_4 (sequence is synthesized)
atccaaccgcctcagcctcccaaagtgaagacatattcttaatatttttcaggcctcattgcttgccactaatgagaactgggggtcataatctaatacaagaaagagtgagaagactag

SEQ ID NO: 856422 - DNA, 120 bp, Artificial Sequence
  ENSG00000285784_5 (sequence is synthesized)
tacaagaaagagtgagaagactagtggtaacaaattaaaataccatgagatatcttctgtgaaaaacaaatcatgaattgtgtacatttgtgaaacataaaataaataaataattaccaa

SEQ ID NO: 856423 - DNA, 120 bp, Artificial Sequence
  ENSG00000285785_0 (sequence is synthesized)
gtggtcgttgtttttgtcagttttggggaaaatgagctgtcttctcactcaaattggaactgttggctatagagataaagtaatcctggagatttgggagggtcatctgttgtagagaat

SEQ ID NO: 856424 - DNA, 120 bp, Artificial Sequence
  ENSG00000285785_1 (sequence is synthesized)
gacaccaaccagaagcagaatgaggaaagttggagactgagtactgttgccatgatttgaacccttcgatctagccatgcctgaagatttctcactgtctcgtcttttcagttacagaag

SEQ ID NO: 856425 - DNA, 120 bp, Artificial Sequence
  ENSG00000285785_2 (sequence is synthesized)
cctcaacttggcttctcacacttgcaaaaaggagtcctagctgatacaggggtacaggcccctaacccagtcctcccatcaagagatggagtttatttcccctgtccttgaattcatgct

SEQ ID NO: 856426 - DNA, 120 bp, Artificial Sequence
  ENSG00000285785_3 (sequence is synthesized)
attgctttggctgatggaatggaggtaaaagtgacactgagccagttccgaggccaggattcacacttctacgcattctctgggaactctgccaccaccaagggaacaagcctaggctag

SEQ ID NO: 856427 - DNA, 120 bp, Artificial Sequence
  ENSG00000285785_4 (sequence is synthesized)
cccgctagatacagagagattcatgactcagtcactgccatcgctgcagccaaaagccagccaatcaccaaacatatgagtgaagccatccaagaccagccagcccccagccaacctgcc

SEQ ID NO: 856428 - DNA, 120 bp, Artificial Sequence
  ENSG00000285785_5 (sequence is synthesized)
agctggcaagagaggcgtgagccagccatgccataaacagcctagtctagcccagaccagaagaaaccacaattgttccatagatgacctgtgaggaataagaactgtttgctttaataa

SEQ ID NO: 856429 - DNA, 120 bp, Artificial Sequence
  ENSG00000285786_0 (sequence is synthesized)
gcataggatggggtactggcagcacagatgacttgtagttagagacctgcccacaccttccacctgacctgcacctgaggctaagatgccaagtagttggggaaatatgtcagtgcactg

SEQ ID NO: 856430 - DNA, 120 bp, Artificial Sequence
  ENSG00000285786_1 (sequence is synthesized)
tttagggcagatgttggtccaaggagaggggtctgggtacaccctcccagcaccagaacgaggcccaggactgggggaggattctgagcacagcctgtccagggaccattctcctagctc

SEQ ID NO: 856431 - DNA, 120 bp, Artificial Sequence
  ENSG00000285786_2 (sequence is synthesized)
ctagctgcccaaccaacccctcatggacccatgccaaactggatgaagagaggagcctgtaatgaatggaaaagaacagtgatgaacagaactgagtgttagagatgctgaaagagatca

SEQ ID NO: 856432 - DNA, 120 bp, Artificial Sequence
  ENSG00000285786_3 (sequence is synthesized)
agttacctggtcactctgcctccttgcctaataaacagggcttgaggctggtggctttggccccttaaagcccactccacttgccatgcttcatatgcctagagcgctaaaccaatgttt

SEQ ID NO: 856433 - DNA, 120 bp, Artificial Sequence
  ENSG00000285786_4 (sequence is synthesized)
ggttagttcggagctcagtccctctcatactggatctcttccagctcacactcactctcatcttcctggccaggactcagcaatacatttagccagttcttaactcaacctattagtctt

SEQ ID NO: 856434 - DNA, 120 bp, Artificial Sequence
  ENSG00000285786_5 (sequence is synthesized)
gaatctactggagtcctcgtgcctctgcctggaggaaagtgtgcaggaggaaggaacatattattttccagctcaaagacgctctgggcagagaagtgactgggccttcataaggtactc

SEQ ID NO: 856435 - DNA, 120 bp, Artificial Sequence
  ENSG00000285786_6 (sequence is synthesized)
aatggaggccaacctgcaatcaggagggtgatgcctgatcctaaccagtgagtactgggatggtcaggagcactcaaatctgtgttagctcaggtacatcagaaagtggagcctgaggca

SEQ ID NO: 856436 - DNA, 120 bp, Artificial Sequence
  ENSG00000285786_7 (sequence is synthesized)
cagacccttcactcaggggctgcaagcccagggcaatgacagtgtagagaaaatgggaagggagacagggaccaatgtgatatgcagggtcaaaatgctggccatctccttgcaacaagc

SEQ ID NO: 856437 - DNA, 120 bp, Artificial Sequence
  ENSG00000285786_8 (sequence is synthesized)
aacagagcacagcctgaagtgcagcagacagggcttcctagcactcaggacttctctagaaagcttgcaaggcttgcacagcacaaagccatccacaagagaaagaggagggaaaacgta

SEQ ID NO: 856438 - DNA, 120 bp, Artificial Sequence
  ENSG00000285786_9 (sequence is synthesized)
tcctcttaggtcccctccagactctcatttaccactggctaagtgtcccccataagaaggtaactcccctgcattctcaggttgcattggcgtggtcctttagcagtcacacagaaatcc

SEQ ID NO: 856439 - DNA, 120 bp, Artificial Sequence
  ENSG00000285786_10 (sequence is synthesized)
cagtcccaggggtcaatatgtgacatcttagctgagtccagggcataagaggcaactcagtgtaggtggagccaagagtcccaaacagacctgagaggcacgcaagtctgtgtccaatcc

SEQ ID NO: 856440 - DNA, 120 bp, Artificial Sequence
  ENSG00000285786_11 (sequence is synthesized)
aggaatcagtgattcacccctggggtcctggcagtgtaagaagagcctggagggaaagcagctcccattccagaatgcctcccgagggtagcagcattttcacatctgcacttttctcat

SEQ ID NO: 856441 - DNA, 120 bp, Artificial Sequence
  ENSG00000285786_12 (sequence is synthesized)
gaaagggcgaggaagaagaaacagaactctctgcggaaacacccaccatgccccatccagtgttgtgtggctgccttgcaccattctctcctttgagagaattaaaattctctttgaaat

SEQ ID NO: 856442 - DNA, 120 bp, Artificial Sequence
  ENSG00000285786_13 (sequence is synthesized)
taaaaatgatgtttactggaaacttctgctgttcagaagcaaaacatgtccattgttgaaaaaccaaaaacctccactgatgttgccatccagaaacaatcaccgcagacactttggtgt

SEQ ID NO: 856443 - DNA, 120 bp, Artificial Sequence
  ENSG00000285786_14 (sequence is synthesized)
atgtatttttagaacttcctctctctctctctttcatcctctctaaccaaacttggataatattatgtgcacatatattgaatttcttttcaatacattaaataagcttctacagcctca

SEQ ID NO: 856444 - DNA, 120 bp, Artificial Sequence
  ENSG00000285788_0 (sequence is synthesized)
agttcacttttgggagctgactgcagttgcagaagatggctgaagagaccgaggcctttcacactgaaggtgggagctgaaagttgaagagttgaagcccttttgcccttctcagaatga

SEQ ID NO: 856445 - DNA, 120 bp, Artificial Sequence
  ENSG00000285788_1 (sequence is synthesized)
ctacacttaaagtgagcttcctcaccaccaagtaccagaacaaatggtgggcctggaaaggcaattctgctctgaggaacgtgaaacaagcataaaccgaatgtgatggcagagctgtca

SEQ ID NO: 856446 - DNA, 120 bp, Artificial Sequence
  ENSG00000285788_2 (sequence is synthesized)
ccacaggcagcctttcctgaggagaagaaggagcttctctaattgtcacatgagtagaaaatgttgaagagacctgcctctttcagaggaagggtaaacagaattctaaccacattttaa

SEQ ID NO: 856447 - DNA, 120 bp, Artificial Sequence
  ENSG00000285788_3 (sequence is synthesized)
aacacctcttccctctgcttattgaagtaggatactcagcaacaattcaaaagattgaggtttacatgcactgatgaggaacgacctccaagcttcattgttcagaaagtttcacgtcca

SEQ ID NO: 856448 - DNA, 120 bp, Artificial Sequence
  ENSG00000285788_4 (sequence is synthesized)
ccatacagtcagctctacaagggcaagcctgcctgattcaccagccgtattcacagaactatgctggaaaagcaattgtgggataactaagtttggatcaataaatgaatgtgtaaaaga

SEQ ID NO: 856449 - DNA, 120 bp, Artificial Sequence
  ENSG00000231092_0 (sequence is synthesized)
tagttcagcactttccactgctggttgacagcctgccaccgtttaaagatgcggtacaccgagggtccttcatggatgatgagacctgaggcagcagggagaggagaaacagaggccaaa

SEQ ID NO: 856450 - DNA, 120 bp, Artificial Sequence
  ENSG00000231092_1 (sequence is synthesized)
gagacctgaggcagcagggagaggagaaacagaggccaaatgagaggaagtgggtcacggccaggagaccacagtctctctgaatctatgcaagggtctctctctgttgcccaggctgga

SEQ ID NO: 856451 - DNA, 90 bp, Artificial Sequence
  ENSG00000231092_2 (sequence is synthesized)
tgggacttctgcattttttatagatacagggttttgccatgttgcagactgatctcaactcctgaactcaagcgatcctcttgcctcagc

SEQ ID NO: 856452 - DNA, 120 bp, Artificial Sequence
  ENSG00000231092_3 (sequence is synthesized)
catgaaccactgagcccagctgcctttcacacttctactgtgcattagaatcacccaaagagcttgttaagacagattcccaggctgcaatcttggaggcctactggcttagtagctctg

SEQ ID NO: 856453 - DNA, 120 bp, Artificial Sequence
  ENSG00000231092_4 (sequence is synthesized)
ggctgaggcctgagaatatgcattcctaagaaacctcaggtgaggctgatgctgcctgtgtgtggactgctaggctaggacatggtttttattcctcatagaaggttctaaattttgatc

SEQ ID NO: 856454 - DNA, 120 bp, Artificial Sequence
  ENSG00000231092_5 (sequence is synthesized)
acaaaacttattataagtaattttaaaaagtaatctacttccagatgtcatagacatggaaatgggaagaaacggaagaaataaatacttcctctcctagacccaaagacctttgtgccc

SEQ ID NO: 856455 - DNA, 120 bp, Artificial Sequence
  ENSG00000231090_0 (sequence is synthesized)
tgactgaaaaggcagagtgtcatttgaggatgcgagtagtataatcatacttttttgcatggaagaaagcaatttcccagtcctcctgactcataccagggaagcctcctgtgtccatat

SEQ ID NO: 856456 - DNA, 120 bp, Artificial Sequence
  ENSG00000231090_1 (sequence is synthesized)
acaatgaaggctcagggacttctaactcctggtggactggctgattgagccctggaagtgtactttctccttcatttccctcctgactctcgctgggagagttgtagactcctgggaaac

SEQ ID NO: 856457 - DNA, 120 bp, Artificial Sequence
  ENSG00000231090_2 (sequence is synthesized)
ccaaagaaagtgccactgcctcctcctcctcagtggatgccaccaagccccgaggaggacaaccttttccttaatctccttgaaacccaggcaaactttgacaaaaggaaaggtgtttcc

SEQ ID NO: 856458 - DNA, 120 bp, Artificial Sequence
  ENSG00000231090_3 (sequence is synthesized)
agtgtgttgttaactgaaccttggttgcttggcagtatgcagttcttgtctaatttaccccaaggaaatgtctgtgtgatgtatttttaatttgctgaagaaggataagtgttcaaacct

SEQ ID NO: 856459 - DNA, 120 bp, Artificial Sequence
  ENSG00000231090_4 (sequence is synthesized)
ttgtacatttatgctgaaattaatttttcaaagtccacataacttcagtgctgtgggatagtccttaagaacagaaattatgaccaaccataataaatgacacatttttgtgaaatgtca

SEQ ID NO: 856460 - DNA, 120 bp, Artificial Sequence
  ENSG00000231090_5 (sequence is synthesized)
taaaaggtcatgaaagagccgactgaatcagatggcacgttaaaagactcatcaacggtggcaggtttatagaacatgacagaggaagctgtgcttagctgagaagaggaagcagagaag

SEQ ID NO: 856461 - DNA, 120 bp, Artificial Sequence
  ENSG00000231090_6 (sequence is synthesized)
gaagcagagaaaaacaaagtctgtgataaaaactggaaaggagccacaaaaggccacaaaaaacaaggaagtccattttggaaccggatcctggagtgactgaaaaggcagagtgtcatt

SEQ ID NO: 856462 - DNA, 120 bp, Artificial Sequence
  ENSG00000231090_7 (sequence is synthesized)
tgaggatgcgagtagtataatcatacttttttgcatggaagaaagcaagtgtcttgaggcatccatcatcctggaagaagactatgatttataacagaaggaatgcaaaaagaaagaaca

SEQ ID NO: 856463 - DNA, 120 bp, Artificial Sequence
  ENSG00000231090_8 (sequence is synthesized)
agttaatatttctcttttggcatgtcaaatagaattattcagcaagacaataaccttgcaagccaggcgttgtcttgaaaaaccatttccaaatttctttaatccttccctttggctttt

SEQ ID NO: 856464 - DNA, 120 bp, Artificial Sequence
  ENSG00000231090_9 (sequence is synthesized)
caacaatgcagcctgattgaaccagtttatggagttctccctaagtgcagagaaaatacccatatcctttattagggtatctctaagaaactgaagtatggagggcatgatgcaggggaa

SEQ ID NO: 856465 - DNA, 120 bp, Artificial Sequence
  ENSG00000231090_10 (sequence is synthesized)
atctgtcattttggggccctttgtgatagagagaaagagagagaaagaggaagaagaagatgagagaatcagttttgatcatgtattctcccagctttggcccagaaaatagggaggcct

SEQ ID NO: 856466 - DNA, 120 bp, Artificial Sequence
  ENSG00000231090_11 (sequence is synthesized)
attggatgagtggggatatcaccaagggcagaggaagcttttgtccttcttcctgcttgagactctgcagaatagactgtcatcctggggtgtgaccacatccacatggcagtgtggtat

SEQ ID NO: 856467 - DNA, 120 bp, Artificial Sequence
  ENSG00000231090_12 (sequence is synthesized)
gacctggcagagggagtccttgacacttagttttcctgagccattcttatttccagtgaggcacagatggacccagaaaatggtgggagtttggctggggagtattaccaatgggagtca

SEQ ID NO: 856468 - DNA, 120 bp, Artificial Sequence
  ENSG00000231090_13 (sequence is synthesized)
aatgggaaggagtctagacccaatagatgagtccaaaaagctgcagagagcgagagctagcaaggcagtcccctgggctctgatctgctgaggaaaacctaggctgtaagttactcttgt

SEQ ID NO: 856469 - DNA, 120 bp, Artificial Sequence
  ENSG00000231090_14 (sequence is synthesized)
acagacacagacttcagctgtgaatcccagtagggtaagatgcacgcaggtggatcagggacttccacctaaccctgcctagaagagtaagaggaatctgaccttttgcctgccgcgaag

SEQ ID NO: 856470 - DNA, 120 bp, Artificial Sequence
  ENSG00000231090_15 (sequence is synthesized)
gtgttcaagctccacctgtccctcttcatatgcagatgtcatcttggaggggagctagaagactgatgtgtttgagaaactaagcctttatttcccctcagaggggaccattctttgaag

SEQ ID NO: 856471 - DNA, 120 bp, Artificial Sequence
  ENSG00000231090_16 (sequence is synthesized)
ggaccatttaaattatcgtgtaatacgaaggttcaaactttattagatattaaaacaatcagtttgtccttttgaatggcttttggctatttccaaaattcaaatccgttagaagacaaa

SEQ ID NO: 856472 - DNA, 120 bp, Artificial Sequence
  ENSG00000231090_17 (sequence is synthesized)
gattagacatactgaaatgcttctaaaaatattctaactggtgaatatatgagaaaagaattaacctcattaattatccactcgaatgtaaactaaaacactattctatacttccttctt

SEQ ID NO: 856473 - DNA, 120 bp, Artificial Sequence
  ENSG00000231090_18 (sequence is synthesized)
tgaaattcataaacgttggaaaaaaatacagaaaatctactagttagtaggaaaaaagttgtagacagaacaaaggggccacatgctcttggtcaatctgagttttgatggaagttaaat

SEQ ID NO: 856474 - DNA, 120 bp, Artificial Sequence
  ENSG00000231090_19 (sequence is synthesized)
gttgctgccctggcataacactaacatttattaagcactttgtctgtgcctggtgctgttttaagaaatttaggtgcattatttcactaaaccttgtcaatagccttatgaaatatatgc

SEQ ID NO: 856475 - DNA, 120 bp, Artificial Sequence
  ENSG00000231090_20 (sequence is synthesized)
tatcatggcctctttttatcaatggggaaactgagccacagaaaaaataaataccttgtacaattagaaaatggcaatttgctgggtgcgagggctcacgcctgtaatcctagcactttg

SEQ ID NO: 856476 - DNA, 120 bp, Artificial Sequence
  ENSG00000235535_0 (sequence is synthesized)
aaatctgagacagccttggtctgagggagcaaagacagagaattcacgtgctgcccaggcatagccacatagcaggtggacatccctggacacttttctgacaaagcacgcaatgtgggg

SEQ ID NO: 856477 - DNA, 120 bp, Artificial Sequence
  ENSG00000235535_1 (sequence is synthesized)
acaacacagaaatccaagaaaggcaagaccaatttcaaggcactaaataagtggactgagacaagaagtacacagatacttcccagaacaaacttggttctaaggaagttccagactaaa

SEQ ID NO: 856478 - DNA, 120 bp, Artificial Sequence
  ENSG00000235535_2 (sequence is synthesized)
tatgttaacgaagtcataggcagcacatctgcaagccctgacaaagcccatgatctcagcattgcctgataatatagactccccgagctgctcagggttagcagccttcaagctttcaga

SEQ ID NO: 856479 - DNA, 120 bp, Artificial Sequence
  ENSG00000235535_3 (sequence is synthesized)
gaagacactgacaaaggcttgtgatcctcaaaccttgttattttattcaccacagcctattactaggttctgggatgaactgtcaaattacattgctctttaaataaaataacaggagct

SEQ ID NO: 856480 - DNA, 120 bp, Artificial Sequence
  ENSG00000235535_4 (sequence is synthesized)
agaactctgaacattttggaaggaccccaatcctgcaaacaatgaatggcaataaatcctgggactggaaaggggcttctcaaccccaaggcaaccataaagtcctatacaaagaaagat

SEQ ID NO: 856481 - DNA, 120 bp, Artificial Sequence
  ENSG00000235535_5 (sequence is synthesized)
acagacagagaaggcagatgcgtagagagacagagattcaatgagaaaataaggaaggaagaaagaaagaaaacaaaaacgttctcagcactacaacttctgccttgttctgttccagaa

SEQ ID NO: 856482 - DNA, 120 bp, Artificial Sequence
  ENSG00000235535_6 (sequence is synthesized)
cagtatgagctcagtactttttcagactctcaattttctacaactaataatttgctctttcagttagtggcaaaggcttaacgacaaaggttcatctttaatattagagaggcactttta

SEQ ID NO: 856483 - DNA, 120 bp, Artificial Sequence
  ENSG00000235535_7 (sequence is synthesized)
aaatttatgatgctaagccttttgttctggatatggtatgttgcacaggtctagggactgggatttcagatgtctattccgtacccttattcttttatttattaaatcttttagtgtgta

SEQ ID NO: 856484 - DNA, 120 bp, Artificial Sequence
  ENSG00000235535_8 (sequence is synthesized)
ccagccaggaactgattggctagtagtccttgaggaactgaatctcaccaacaaccatatagtgaacttgcaaatggtgcttcctcagttgaaactaaagatgagactgaagtcctagtt

SEQ ID NO: 856485 - DNA, 120 bp, Artificial Sequence
  ENSG00000235535_9 (sequence is synthesized)
tttgtttgccaccttgtaagattgtgaaacagaggcctgagctaagccatgcccagattcttgatccacagaaactgtgagataataaatgtgcattgatttaagcctcagattttgtgg

SEQ ID NO: 856486 - DNA, 120 bp, Artificial Sequence
  ENSG00000235535_10 (sequence is synthesized)
taatgctttacaaagcaataagtaactaatgcagtattcaacaaattttttgaaaaaaaaaagatgcttgaagacctgtatttaattatttttgtgaagaatactcaatgtatactgact

SEQ ID NO: 856487 - DNA, 120 bp, Artificial Sequence
  ENSG00000235535_11 (sequence is synthesized)
gcacctgggtttttagtcttaaccaaatcatataccagttttatgacctggcaaaaatgtttttctctctctctagaggtcactttcttcatctgttaaacgaggtaattaatttagatg

SEQ ID NO: 856488 - DNA, 120 bp, Artificial Sequence
  ENSG00000235535_12 (sequence is synthesized)
atctttaaaatgtccactagatttcatacatctatcacatatgatttcatgtatatgtaatgaaaacaaattttatatatatacaaaatttattttcacttgcatttatgaaacaggaga

SEQ ID NO: 856489 - DNA, 120 bp, Artificial Sequence
  ENSG00000235535_13 (sequence is synthesized)
cacttgcatttatgaaacaggagaaacaaaataaaattacatttatttattttaatttaatcttgaaagtaaattcatgttatcttctaaaaatgtttcagtttacaattcatccatatt

SEQ ID NO: 856490 - DNA, 120 bp, Artificial Sequence
  ENSG00000235535_14 (sequence is synthesized)
aaatctgagacagccttggtctgagggagcaaagacagagaattcacgtgctgcccaggcatagccacatagcaggtggacatccctggacacttttctggctttggtatcagaatgatg

SEQ ID NO: 856491 - DNA, 120 bp, Artificial Sequence
  ENSG00000235535_15 (sequence is synthesized)
ccccaatcctgcaaacaatgaatggcaataaatcctgggactggaaagatttcctgagtactaaccaaagtgacctcatttgcaattccctatctatgtctgggaaacagatagatttgg

SEQ ID NO: 856492 - DNA, 120 bp, Artificial Sequence
  ENSG00000235535_16 (sequence is synthesized)
tataaagataatactgaagactgtggaattcggcagtcttggatttgaatctcctgtctgctgctttgtgccaccttggcaaaccacttaagctctttgtgtctcaattctttcatctgt

SEQ ID NO: 856493 - DNA, 120 bp, Artificial Sequence
  ENSG00000235535_17 (sequence is synthesized)
agacagccttggtctgagggagcaaagacagagaattcacgtgctgcccaggcatagccacatagcaggtggacatccctggacacttttctgtcatacactgtgagagtcatgaataag

SEQ ID NO: 856494 - DNA, 120 bp, Artificial Sequence
  ENSG00000235535_18 (sequence is synthesized)
aatgcagattaatgtcctttaataacatttttatgaattagacctttaagctgtcattatgagacttactttattcatgctgaatttcatttaaaatgtcaacttctcaagattctacat

SEQ ID NO: 856495 - DNA, 120 bp, Artificial Sequence
  ENSG00000235535_19 (sequence is synthesized)
agaaacaactgctatggacatttgctctgtgctacaattgccaaagctctttcaggtatctttttaaaaaaattctatgctttgcacaactggtttctgaaaatggattttatggaaact

SEQ ID NO: 856496 - DNA, 120 bp, Artificial Sequence
  ENSG00000235535_20 (sequence is synthesized)
aaagaaaagtgcttttatggaaaaaaacaaaaggccagcatacagagaattaagaagccagtccatgagctgaaccaagcaatgataccatacaacatactttcatcccaaacactggca

SEQ ID NO: 856497 - DNA, 120 bp, Artificial Sequence
  ENSG00000235535_21 (sequence is synthesized)
ccctaaaagcagtgattttccaaaagaacaagtacctcttcactcaccctcagctcccatggaggaggactcagccatagaagtaattatatacagatggccaactctgcatcaataggc

SEQ ID NO: 856498 - DNA, 120 bp, Artificial Sequence
  ENSG00000235535_22 (sequence is synthesized)
tttgcatagaattagaagacaaagtgcttttgggtcccaaaagacagtgaagctttatttggtgactttcatactgacttcactctacttactggtgatgatggtaggtgaaacgttatt

SEQ ID NO: 856499 - DNA, 120 bp, Artificial Sequence
  ENSG00000235535_23 (sequence is synthesized)
tcttcaaaaatatcaccttgtggtggaagagagaaagaatatccatgcttcttttatctacagtgaaggtgaagagcaacataaacttcagaggttgcagtaagtctggatgccacatca

SEQ ID NO: 856500 - DNA, 120 bp, Artificial Sequence
  ENSG00000235535_24 (sequence is synthesized)
aacttaggtctgttgtttcaaggtaaaataagaataataacatctgtgttggctgggatgttgtgagtgtttgtggagataatagtacaaatgaaattactgagggacaatggtgaagat

SEQ ID NO: 856501 - DNA, 120 bp, Artificial Sequence
  ENSG00000235535_25 (sequence is synthesized)
agggccatatcatggagcttacactagtgatggaaggagatgggagatacaaaagcaagtcaatatttcagatttcgtaaatgaatggcaagcatagagcagtgaggcagagaatgactg

SEQ ID NO: 856502 - DNA, 120 bp, Artificial Sequence
  ENSG00000235535_26 (sequence is synthesized)
gagaaagagactatgttaaactggatagtaaaggaagagcaggaccccactaaactatatggagttttgtgcaaatcacatgaacacacgtagaacattttaggctgctcatgtgacttt

SEQ ID NO: 856503 - DNA, 120 bp, Artificial Sequence
  ENSG00000235535_27 (sequence is synthesized)
ggatttgtcctaagggcaatagtaagcctttgaactgctttagcatgataggattttaaaagatcactggctgctgtgtgaacaaaaataatgttgtaaagaaaaggatattagctgtat

SEQ ID NO: 856504 - DNA, 120 bp, Artificial Sequence
  ENSG00000235535_28 (sequence is synthesized)
cagatcagctggagactactgaaataacccaagctggcttggactacataggagtagtgtaaactcattcattcatgcaagaaatacttactgagtgcctactcagtaccagaccctttt

SEQ ID NO: 856505 - DNA, 120 bp, Artificial Sequence
  ENSG00000235535_29 (sequence is synthesized)
ctaggacatggagttatagcagtgaacaatatagaaaaaaatccccgaattcatggagactccagtgagcagagacaaaaaaatagcaactaaataagttaaaaggaattgagtacccta

SEQ ID NO: 856506 - DNA, 120 bp, Artificial Sequence
  ENSG00000235535_30 (sequence is synthesized)
taaaagtttatcagggaaatgttataaggaatgactttcggagtaatgggtagtgatcttaaatgtatggtcaatgaaaatcagaagttgtagagaagtggataaattcacagtacgttt

SEQ ID NO: 856507 - DNA, 120 bp, Artificial Sequence
  ENSG00000235535_31 (sequence is synthesized)
taaagtagacctaataagacttaatgaatttgatgtggcaagtgagaaaaatacatcaaggatgatgacttttataatttgacttgagtatctgggaacaaacaagtacagtgccataat

SEQ ID NO: 856508 - DNA, 120 bp, Artificial Sequence
  ENSG00000235535_32 (sequence is synthesized)
aagggcagaaaattttccattcactcagcaacttatgaactcatttgcttagtctttattgcctcttgcattatgtagttttcactttgctggagtacttgtatagaagatcaccagtga

SEQ ID NO: 856509 - DNA, 120 bp, Artificial Sequence
  ENSG00000235535_33 (sequence is synthesized)
agaagccagagatggtttatttggtcatcccaataatacatcttattgttaattaactctcaagggttttttttcacaattttagaaaaggtttaagcaaatgaattatttaacatgaat

SEQ ID NO: 856510 - DNA, 120 bp, Artificial Sequence
  ENSG00000235535_34 (sequence is synthesized)
tggctatgtgaccctactataaggtgtttaaaacaccaacagcttaaacttcttagatcaaaggacatcctccaggccaaaatgtttccactggaacggtttctttgcttcctgattaaa

SEQ ID NO: 856511 - DNA, 120 bp, Artificial Sequence
  ENSG00000235535_35 (sequence is synthesized)
agcttccctaatatatttccacgtgttattacatattttcgtattcactttgatggaaagcaagaatagcagccaaatacatatttcatgcattcttttgattaaaaatgataaaggtaa

SEQ ID NO: 856512 - DNA, 120 bp, Artificial Sequence
  ENSG00000235535_36 (sequence is synthesized)
aaatctgagacagccttggtctgagggagcaaagacagagaattcacgtgctgcccaggcatagccacatagcaggtggacatccctggacacttttctgagtggcagagattggcctgg

SEQ ID NO: 856513 - DNA, 120 bp, Artificial Sequence
  ENSG00000235535_37 (sequence is synthesized)
acataagctgaagataagttcaattacacgagtgattattagagttgtcccattgttatctacagaggggtgtggagcacgagagaaagcacaggctttggtatcagaatgatgctggcc

SEQ ID NO: 856514 - DNA, 120 bp, Artificial Sequence
  ENSG00000235535_38 (sequence is synthesized)
tggcaataaatcctgggactggaaaggtcttccaagaaacaaaaggaaatttacctatttcttaaacagaacaaaacccattatatcttgtaattaccatgtgacagcattggacaattt

SEQ ID NO: 856515 - DNA, 120 bp, Artificial Sequence
  ENSG00000235535_39 (sequence is synthesized)
taaacatgtaaggcactttatggaaacttcatgatcttttttttcttatattaagcattttctatttcatcaacataggaactgtttcatcattactcatcaatcgttcctaacaatgct

SEQ ID NO: 856516 - DNA, 120 bp, Artificial Sequence
  ENSG00000235535_40 (sequence is synthesized)
taaaactaaaacaatgaagaagcagaataatgaaattgcctagaaagatgatgcaactgtaaaatatatcattattgccccatcatcactatgattgtttatagtgttgactgaagtatt

SEQ ID NO: 856517 - DNA, 120 bp, Artificial Sequence
  ENSG00000235535_41 (sequence is synthesized)
acatcatcattcaagaagatataaaagaagcctggagacatctttttttttttgagacaccatttttacagcctactttgtttcactgaacacagtttataattcagaattattttttcc

SEQ ID NO: 856518 - DNA, 120 bp, Artificial Sequence
  ENSG00000235535_42 (sequence is synthesized)
atccataacttcaaatagaagaaaagtgacagaggaagatatttcaaaattattaaatgaatcagaagatgaatgcagaaagacagagagcagtaagctagactctaatgattagggtaa

SEQ ID NO: 856519 - DNA, 120 bp, Artificial Sequence
  ENSG00000235535_43 (sequence is synthesized)
agtcttcataagacaatgaattttcttaaactatagaatcaatgagtgaacaatgcatttcaaagagaaaaaaggaaatatactatagtagttccctcttatccataaaaaatgtattcc

SEQ ID NO: 856520 - DNA, 120 bp, Artificial Sequence
  ENSG00000235535_44 (sequence is synthesized)
aagatatccagtagatacctgaaacaatgaataatgctgaattctatgtatgctgtgttttcttgatctgaaaaccgagatacctaataagtgtctcacagacaggtagcttagagagcg

SEQ ID NO: 856521 - DNA, 120 bp, Artificial Sequence
  ENSG00000235535_45 (sequence is synthesized)
tggatacatcggacaaagggatgattcacatacttggtggaatagagcgtgataacatgacatgctactcagaatggtgtccaatttaaaacttgtgagttgtttatttcaggaattttc

SEQ ID NO: 856522 - DNA, 120 bp, Artificial Sequence
  ENSG00000235535_46 (sequence is synthesized)
catttgatattttcagactgtggttgactgtgggttactgaaactgcaaatagcaaaatcatggataagaggacacgactgtattctcatctagttagccctttaacaggaaggaattta

SEQ ID NO: 856523 - DNA, 120 bp, Artificial Sequence
  ENSG00000235535_47 (sequence is synthesized)
tcctgttatattttgtgacaagaacctgaaccatttcattttgctaaaagagcatgtcacagtactctttctttataaaattcatgtgccaaaatctgtggtttctaactgcacaaatgc

SEQ ID NO: 856524 - DNA, 120 bp, Artificial Sequence
  ENSG00000235535_48 (sequence is synthesized)
taaagaaagagaaaggcaggcatccaaaagaaatggacaatgtgaatttaaaaataattgaatgcattattgtaatctatgtttgtaaatacaaaaatgaaaacctgcccaggcacagtg

SEQ ID NO: 856525 - DNA, 120 bp, Artificial Sequence
  ENSG00000235535_49 (sequence is synthesized)
tgggactggaaaggtatgaggacctccaagtaaccattgagttaaaattcctttacattaaaaacacacaatatatgaaatcattacaaatccctgtgtcaatttgttctttcaggttca

SEQ ID NO: 856526 - DNA, 120 bp, Artificial Sequence
  ENSG00000235535_50 (sequence is synthesized)
tagaaggcatttgtaaatctatgactaaaagtaaagtgagaagatgtgagtttaataaggaaatgatagtcaagtttattaaagcaataatattacttatgtattggtataagtttccta

SEQ ID NO: 856527 - DNA, 120 bp, Artificial Sequence
  ENSG00000235535_51 (sequence is synthesized)
acatgtgattgtgctaaggttgtgtgttaatagggacaccttgaccttcatgcttccttactatcacttgcttctgtcttgtacttttggaccacttagggatggaaagaggagacccta

SEQ ID NO: 856528 - DNA, 120 bp, Artificial Sequence
  ENSG00000235535_52 (sequence is synthesized)
gagatatggggtgctaaccactcctccctttcccaaccccatctattaaaaataattgaattgccactcatataataatcagagatgttcaaatttgcctattaaacaaagacctctcca

SEQ ID NO: 856529 - DNA, 120 bp, Artificial Sequence
  ENSG00000235535_53 (sequence is synthesized)
actgggaataatctgaagaagttcaggagtttgtgtgaggtgggcaggcacaggatgtttttacttcaaacagacatccttataccttccatttgtgtgttgctaaatgtcaccactgta

SEQ ID NO: 856530 - DNA, 120 bp, Artificial Sequence
  ENSG00000235535_54 (sequence is synthesized)
catgactcttcctagttgtgtgaccttgggcaatgtgctatggcacaccgaatttcattttcctcatttgaaaagtggagctaataaaatctacctcacgcttgtaatcccagcactttg

SEQ ID NO: 856531 - DNA, 120 bp, Artificial Sequence
  ENSG00000230322_0 (sequence is synthesized)
attcgaagatcagtcgggccagccccagtgtaaccctcactgcagcctgaccaagacgaggctgaaacagcaagagcatctaacccacacaaaagctgctcttgtgaaacttaagagttt

SEQ ID NO: 856532 - DNA, 120 bp, Artificial Sequence
  ENSG00000230322_1 (sequence is synthesized)
actgtatcctagctctgtggagagcacatcacctcatcacacagcaacactacaaggactgcctccactttaagatgtgattaagtaacatgcccaaggcccgtagcaaagaagcagtag

SEQ ID NO: 856533 - DNA, 120 bp, Artificial Sequence
  ENSG00000230322_2 (sequence is synthesized)
agccagaaattaaatttagggttctccaatttcagaagccatgttcttaactctctgtggtattgctcaccatctacagaccaaacagatgaaccctgaataaaacacacttttccaaag

SEQ ID NO: 856534 - DNA, 120 bp, Artificial Sequence
  ENSG00000230323_0 (sequence is synthesized)
aacagctctgtgtctggaatgagccctcctagaattcagtaccataaaactgaagacatgtaaatctgctcatgtaaatcctccactgcatagccttttgtgtggagcatttatccggac

SEQ ID NO: 856535 - DNA, 120 bp, Artificial Sequence
  ENSG00000230323_1 (sequence is synthesized)
aggaattgactgacagaaggaggacctcatttgggcagaatggctcccaaaacccagttgtgtctctgggtgtgtaagcccagcagcaggcagtgtgtcatcgctgtgtcagttctatgg

SEQ ID NO: 856536 - DNA, 120 bp, Artificial Sequence
  ENSG00000230323_2 (sequence is synthesized)
tgtgatgtgcggaactggtactggaatgtagacatcaaggctggttcttcggctctcccaaaggccaaagatatctatttaaatatcatttaaataaacccctttattgcttaaatcatc

SEQ ID NO: 856537 - DNA, 120 bp, Artificial Sequence
  ENSG00000230323_3 (sequence is synthesized)
actgatatcatatggaaatgccagctcagaagatgtggtgagctttgataattcaggaattgactgacagaaggaggacctcatttgggcagaacttcacaaaccctaaggattcatctc

SEQ ID NO: 856538 - DNA, 120 bp, Artificial Sequence
  ENSG00000230323_4 (sequence is synthesized)
gaaaagaaaagaaaagaaaaaaaaagtcacagccaccaatagcataatggggaggaagggacttagaaaagcaagcatatctggtgaagattgttaatagctgaaataacagtgatgata

SEQ ID NO: 856539 - DNA, 120 bp, Artificial Sequence
  ENSG00000230323_5 (sequence is synthesized)
atagctgaaataacagtgatgataatgattatgatgatgactaacatttactatgtatttgctgtgtggcaggcttgatattcctgctcaacctcattttacagaggtatctctggtcat

SEQ ID NO: 856540 - DNA, 120 bp, Artificial Sequence
  ENSG00000230323_6 (sequence is synthesized)
gcggagaagacaggtaaagaataaagttaccaagaagaggttagttcgagtcgaactttcatgcttgtcagagaccgagaataacaaccctagtagacaggaagcatcattgtctccaat

SEQ ID NO: 856541 - DNA, 120 bp, Artificial Sequence
  ENSG00000230323_7 (sequence is synthesized)
ttgcagaagagaaaactcagacatagaatttaattcacttgctcaggatcacacactaagtggtaaagctgagattcgaacctaagtattttggctccagagctcattgtatcatggaga

SEQ ID NO: 856542 - DNA, 120 bp, Artificial Sequence
  ENSG00000230323_8 (sequence is synthesized)
actgctacagacatgcatgggcagttggcattgaggatatgatataaacattctatcttccctgtgagatcttcagtaaaatcaatatttatcatcagttcttctaatgcaatggcctct

SEQ ID NO: 856543 - DNA, 120 bp, Artificial Sequence
  ENSG00000230323_9 (sequence is synthesized)
ggcctctttctggtgcctgggaagagagactgcatcctgccttaaggtggaccagggataaaaataggctgatatggtttggctgtgtcttcaaccaaatctcatcttgaattgtagctc

SEQ ID NO: 856544 - DNA, 120 bp, Artificial Sequence
  ENSG00000230323_10 (sequence is synthesized)
gagataattgaatcatgggagtggtttccctcatcctgttctcatggtagtgaataaatcacacaagatctgatggttttataaggagtttccacttttgcttggctctcgttctctgta

SEQ ID NO: 856545 - DNA, 88 bp, Artificial Sequence
  ENSG00000230323_11 (sequence is synthesized)
ctgatatcatatggaaatgccagctcagaagatgtggtgagctttgataattcaggaattgactgacagaaggaggacctcatttggg

SEQ ID NO: 856546 - DNA, 120 bp, Artificial Sequence
  ENSG00000230324_0 (sequence is synthesized)
ctcagttctttagaacagctaaaactgcatccaatcactgtctcttgtaccaatctaaaatcagtgcccagaagactcaaattttactggaaaacaaaagggaagccaagtgtcctgaga

SEQ ID NO: 856547 - DNA, 120 bp, Artificial Sequence
  ENSG00000230324_1 (sequence is synthesized)
ctgctaaattccaccaaccaccagacagctctctacaacaaagagttaattggcagctgtgagacttgaggcaggtatcacggatgtgtctaaaggaaacgttaagcttctgatgtttct

SEQ ID NO: 856548 - DNA, 120 bp, Artificial Sequence
  ENSG00000230324_2 (sequence is synthesized)
ccctaatcctcggagcaacgttctcaaatcagactcctctcatcccagatgacccaagaatgcttgctatttcatctctttctaagagaacttctgatccaattccaatctggtaaatag

SEQ ID NO: 856549 - DNA, 120 bp, Artificial Sequence
  ENSG00000230324_3 (sequence is synthesized)
ataagaaaattgagactcatagcctctcttactcagctgtttacccatggaggcaggaaccaagacagttctgcacagccgtctatccccaggatctaacccctggctgccacataagca

SEQ ID NO: 856550 - DNA, 120 bp, Artificial Sequence
  ENSG00000230324_4 (sequence is synthesized)
tcctggtggccttatggaactgacaaacactaatcaacacaactagtgtgcctggtgctatgctaggaggcgacagaagaaaaagacacaagacctgccttcagtagctcataatggaga

SEQ ID NO: 856551 - DNA, 120 bp, Artificial Sequence
  ENSG00000230324_5 (sequence is synthesized)
agacagttgtacatacaatttgacatgatggatggtgtggctgggacatatatgtgacactggtgatgggtgccaggaagacagacccagtgctcaggtcattagagggtctggtgggcc

SEQ ID NO: 856552 - DNA, 120 bp, Artificial Sequence
  ENSG00000230324_6 (sequence is synthesized)
agacattgatcaaaatagatcaatggatagatctcaatgtccaacaaccttccccccttcacacccacttctccacgttgacccttcctcagctcagatcttcaggaaggctgccccaaa

SEQ ID NO: 856553 - DNA, 120 bp, Artificial Sequence
  ENSG00000230324_7 (sequence is synthesized)
gctttgctgctgcccctgacaagatatatcaggatgtccaaaactaaccacctagaaactgtgtcctttggaaggcctccctccttgtccagactgggctacttgcagttatagttcatt

SEQ ID NO: 856554 - DNA, 120 bp, Artificial Sequence
  ENSG00000230324_8 (sequence is synthesized)
tgcactttaggatagtcagtgtccactactatattcaaggctctgagaagtcctgaagaaaaggaagctggatcattttgcttaacactgtgtcctacaggctcctttgtatacagaaca

SEQ ID NO: 856555 - DNA, 120 bp, Artificial Sequence
  ENSG00000230324_9 (sequence is synthesized)
ctagctaacaccttcctctatctctaatgctttctgatctatgccctccacaagaagacctatgcctggtctggactagccacagttttcctaaggacgacagtatgaggtgagtcacaa

SEQ ID NO: 856556 - DNA, 120 bp, Artificial Sequence
  ENSG00000230324_10 (sequence is synthesized)
agtgcccaacattatcaccaatagtatgtctaagtaatttttaatttaatgtccagatgctgtcagtcctgagagcaaaatgcaacttgataaaggacagctctgatggggaccacataa

SEQ ID NO: 856557 - DNA, 120 bp, Artificial Sequence
  ENSG00000230324_11 (sequence is synthesized)
aaaaggctgcccaagttcaacagaatagtgagaagaaacggagacctatttgaaagatcaaagattgatgctcttattagatttggggaggaaaacagtgaaattcatgtttgattgaaa

SEQ ID NO: 856558 - DNA, 120 bp, Artificial Sequence
  ENSG00000230325_0 (sequence is synthesized)
acacgctgcttctaaaacagctcacacctggctgctcacacagagggcccagaaacactgggtggcacgaggaagctcctccaggattcagaatgaacccagttccattggtggttaact

SEQ ID NO: 856559 - DNA, 120 bp, Artificial Sequence
  ENSG00000230325_1 (sequence is synthesized)
aagaactacttgtctaagaaagtctccacacacatgaccaaatggtaaccgaaagcacccaaaacactagcagtgcttccaaacttcttttgagttcctgatttgattaagcaccaggaa

SEQ ID NO: 856560 - DNA, 120 bp, Artificial Sequence
  ENSG00000230325_2 (sequence is synthesized)
acaaacaggcagtcataagtatatgtgcgtgtgcttgtgtgcgcctctgcatacatgtgagacatctgggttcgaaggtcgcctggaagcccaggcacaggtgccctggagattgtgaac

SEQ ID NO: 856561 - DNA, 120 bp, Artificial Sequence
  ENSG00000230325_3 (sequence is synthesized)
ccaggttaaagatctgcctgcgagctccccacaacactgtccctggagaccacccatgtggcagacactcaaaatctgttgtatttgctaaataaattaatatggacaagttacccaaca

SEQ ID NO: 856562 - DNA, 120 bp, Artificial Sequence
  ENSG00000273172_0 (sequence is synthesized)
ggcgggggaacgggtgactgtcgcggggccaggggtaggtgacagtggtcaagggtgtcaattctggagccggtctgccaagcctcagggccagcctctgcttctttctagttatgagac

SEQ ID NO: 856563 - DNA, 120 bp, Artificial Sequence
  ENSG00000273172_1 (sequence is synthesized)
cttctttctagttatgagaccttggccatttgcttaacccttactgacgtaacacaccctattttactgtaataattatatgtttatttcaatgtgccatagagagacgtaatcagcaca

SEQ ID NO: 856564 - DNA, 120 bp, Artificial Sequence
  ENSG00000273172_2 (sequence is synthesized)
tcaattcccatcattgatattattgttaggacaaagctaacctgggtatttaagggatttttaagtaagtctgtttaaagaaaagtactaagtaaataatagtgcaggttccagttggga

SEQ ID NO: 856565 - DNA, 120 bp, Artificial Sequence
  ENSG00000273172_3 (sequence is synthesized)
agctgattcataagtgatgaaagttaagcacagaccttggcagtgtggagggagagagcctggttcttctgccgagccctgggcagccttctggtgtcccaggatagaagaaagactcac

SEQ ID NO: 856566 - DNA, 120 bp, Artificial Sequence
  ENSG00000273172_4 (sequence is synthesized)
aagtccggtacgcttaggaggaggcacacctgacttttgactctacgtctgcctactccctgacctatgctctttctagaaagtggacacttgcccagataacaccacttctatccactt

SEQ ID NO: 856567 - DNA, 120 bp, Artificial Sequence
  ENSG00000273172_5 (sequence is synthesized)
ctatccctcggggaggccctaccccatttcagctgggctcagagctgggcaaattcagacctagagtggatttcaactctgccacctgccaaagggtagaccccaacatgccatgtgttt

SEQ ID NO: 856568 - DNA, 120 bp, Artificial Sequence
  ENSG00000273172_6 (sequence is synthesized)
ctccagtgggcatccttgggttccctggctccatgcttaggaggctgggccctccacctgacttcttcaaagccctccccaagagccagctcctgcagagccaagagccatgagccgatc

SEQ ID NO: 856569 - DNA, 120 bp, Artificial Sequence
  ENSG00000273172_7 (sequence is synthesized)
ctccaaaaaccagacccataggacaagaggccaggagagagcggccagctctcggtgaacacaggtacagggccttggcaggctcagcagtcaggacgtccaggtctcatctccagtctg

SEQ ID NO: 856570 - DNA, 120 bp, Artificial Sequence
  ENSG00000273172_8 (sequence is synthesized)
cctcttgctagtcacttgacctcccgcagcctcagtttccccatctgtaagatgatgacgacaccctccagctccttagtaaaggaatgataaaatgacagttcagcgtctgtattttaa

SEQ ID NO: 856571 - DNA, 120 bp, Artificial Sequence
  ENSG00000273176_0 (sequence is synthesized)
ggtcatagcccttagtccttgggacctcactgtgactgcacacctaccctgggtgacagcctctctgggctgttgtctccttgtcccggtcacagtctcctttgagaatttgacaaaagc

SEQ ID NO: 856572 - DNA, 120 bp, Artificial Sequence
  ENSG00000273176_1 (sequence is synthesized)
cagcgatacaattttgcttataacctcagggagtttctggggtccctgaagtacaaccgtggaccccaagctaagaatctcaaaggcctttcccagcgttgtgattctaatctcttcagc

SEQ ID NO: 856573 - DNA, 120 bp, Artificial Sequence
  ENSG00000273176_2 (sequence is synthesized)
cttcctggctgtgtgtggtgtgtctgctgacacctacacactagatacctatctatgggttatgaccttttcttctggcatgtactccaaaaatacaataaccatggccttagtagtctg

SEQ ID NO: 856574 - DNA, 120 bp, Artificial Sequence
  ENSG00000273177_0 (sequence is synthesized)
cataagcaagaatatgaaacctttcatttgacaatagaagttaaaacattttgtgttcccatagtaaatattgtgattgggaagaactatttgactccttgagaagattatagagttttt

SEQ ID NO: 856575 - DNA, 120 bp, Artificial Sequence
  ENSG00000273177_1 (sequence is synthesized)
ccagggtaaatgtattctggaaataatatttcatggaagatactccccctttattctaagcactgccaaaaatgatttgatgctgaatgtaacattcagggcaaaataataagatcaaaa

SEQ ID NO: 856576 - DNA, 120 bp, Artificial Sequence
  ENSG00000273177_2 (sequence is synthesized)
ggggtgtattatagttatattaagctagtctgatcctttgaaatctgtgtaaaaggcctgacaaagcagtaatttttacatatggaaatgtatttataataaaagcatacggataataaa

SEQ ID NO: 856577 - DNA, 120 bp, Artificial Sequence
  ENSG00000273174_0 (sequence is synthesized)
actccactcccatgggaaatacccaacagaatcagacaggaaaccccaaagtgccactgaaaagcaattgagagccccactttggtacacctgatgggagcggagagttagagaggcagg

SEQ ID NO: 856578 - DNA, 120 bp, Artificial Sequence
  ENSG00000273174_1 (sequence is synthesized)
aaataacctccactccagggtagaagtagacaggagatgggatggaaggtttctgcatgctgggactagctcaggtcaaagtccagaactccagaaaacaaggcctgcccccagctcaga

SEQ ID NO: 856579 - DNA, 120 bp, Artificial Sequence
  ENSG00000273174_2 (sequence is synthesized)
tttccactgctctagcctggaactggttgggctggggcaggggacatgttggtctgagtatagattttgtcagaaaacccaggcaccactcccttgcctttgcggggtgattctaaaatt

SEQ ID NO: 856580 - DNA, 120 bp, Artificial Sequence
  ENSG00000273174_3 (sequence is synthesized)
ggactgtggtaagggttgcacaactcctcaagtttattaaaatcattaaaatgtaaacttacaacctgtgggttttatggtatgtaaattatacctcaataaagctgtctaatatctgca

SEQ ID NO: 856581 - DNA, 120 bp, Artificial Sequence
  ENSG00000273175_0 (sequence is synthesized)
aaatggaggaaaaggaaaccgcctttcagttcaaccgactcactgcatgatatattggcctttctgggtctttggtggctatactcgtttggcttttctccttcccagcttggaggctgc

SEQ ID NO: 856582 - DNA, 120 bp, Artificial Sequence
  ENSG00000273175_1 (sequence is synthesized)
tttatccaaatgctttcttcagtcctcaacttggcgtttcaacccgaatccgccttttcttccatcttagatctgccttcttatgtgtttctccagctcttcgtttaaaactccttcaaa

SEQ ID NO: 856583 - DNA, 120 bp, Artificial Sequence
  ENSG00000273175_2 (sequence is synthesized)
ctcttttcctcataataccgtatttggtttaatttgtgtaagtcctgccttgcgaattggattttaagttcgagaagggcaagggcagaaccgttcttttgtctgttccacaccccgggt

SEQ ID NO: 856584 - DNA, 120 bp, Artificial Sequence
  ENSG00000273175_3 (sequence is synthesized)
gcggggcctgggaagtagaggctttgcttactactccatactgcaaaccttagtgtacctgcctttgcagggcagctattctcatgctcttaataaccctgaataaacctcagaattgca

SEQ ID NO: 856585 - DNA, 120 bp, Artificial Sequence
  ENSG00000248943_0 (sequence is synthesized)
gcttcaagaggaaagcagctttgtacatcatcgtggacgagagtaaagtcaagtacgttctgcatatgtgtgagcggacccgcatgcacctggggcacctcaaggcaatcctggtctgaa

SEQ ID NO: 856586 - DNA, 120 bp, Artificial Sequence
  ENSG00000248943_1 (sequence is synthesized)
aacattaaatgaaaaatccacagataaacaactgacaagttttaacttgctgtgctgttccaagtagtgtggtgggagctcctgtcatccccctctactcaaggcccacccaggacgtga

SEQ ID NO: 856587 - DNA, 120 bp, Artificial Sequence
  ENSG00000248943_2 (sequence is synthesized)
gagatatcacggtgtttgtgttcaaagaaatcttgttttacttaatggccccaaagtgcaaaagtactgatgctggcaattcaaaaatgccaaagagaagccataaagtgttccttttaa

SEQ ID NO: 856588 - DNA, 120 bp, Artificial Sequence
  ENSG00000248943_3 (sequence is synthesized)
gtgaaaaggtgaaagttaatcatagggcatgcatgtgtagaaacaaagataatctatattggatttagtactatctgtggtttcaggcatcctctgaagatcttgaaatgtatcccctat

SEQ ID NO: 856589 - DNA, 120 bp, Artificial Sequence
  ENSG00000248943_4 (sequence is synthesized)
ggataaaggaggactactatattctcaatggattttgcaagaagaaaattaatcattcacaaaatattttaaccttagaatttaaataaatgtgtatattctctacaagttaaacacaaa

SEQ ID NO: 856590 - DNA, 120 bp, Artificial Sequence
  ENSG00000232740_0 (sequence is synthesized)
gtgcaccaacatatgtataatgtaagcatcaaaaggagaggaaagagacaaaatcaaaaatatatttgaataaataatggctaaaaacatatgcattttgaaaaatatcattaatcttca

SEQ ID NO: 856591 - DNA, 120 bp, Artificial Sequence
  ENSG00000232740_1 (sequence is synthesized)
catccaaaaagctcaataaactctaaggaggaaatgcaacgagctcttcagctggacatactgtagtcaaaatgttgaaagaaaaaatcgtgtgaaagcagcaaaagaggaaaacactca

SEQ ID NO: 856592 - DNA, 120 bp, Artificial Sequence
  ENSG00000232740_2 (sequence is synthesized)
ctgcttccattgcccgtgaatccctaacagaatggtgccaggctccaccaggagaccttcctgagtcccatctgaaagcctccacctgaatgcgtccctcattttaatgacccagccagg

SEQ ID NO: 856593 - DNA, 120 bp, Artificial Sequence
  ENSG00000232740_3 (sequence is synthesized)
ctacctctgaagagaagggcagttctcagcagcctgaggggtgctggtagagacataccaaaagtgttgttggtgccacctttttgcaagagatgaagagaaagttcccctgcaggcact

SEQ ID NO: 856594 - DNA, 120 bp, Artificial Sequence
  ENSG00000248949_0 (sequence is synthesized)
gtcatgctcagcaaagggctgctctcctggggagagatgcacgggacagcctggtttccctggttcctccaccataggctgctttggggcgggaaataacaagagctggcggatgcagcc

SEQ ID NO: 856595 - DNA, 120 bp, Artificial Sequence
  ENSG00000248949_1 (sequence is synthesized)
tcacctcgctagagccaggcattgttctgcaccgttctggagatgctgttctgcatttgctaaggtggccacgcggttttcttcctgactttgctagcgtgagctccaggaaggcgggcc

SEQ ID NO: 856596 - DNA, 120 bp, Artificial Sequence
  ENSG00000248949_2 (sequence is synthesized)
ggcttcctcatctggaaaatgggtccatctcggtgatctgggctggagacctcggactcagggcagtgccagctgggccccaagtggaggtgacagctggggaccagaaggggctaccgc

SEQ ID NO: 856597 - DNA, 120 bp, Artificial Sequence
  ENSG00000248949_3 (sequence is synthesized)
atagccggggagtgaggggctggtgctggccaaggcgcctctgactgacctctgctctctcgccaagtacccaggagatgtcccagaaagaacggcagctccactgagatcttgaacctc

SEQ ID NO: 856598 - DNA, 120 bp, Artificial Sequence
  ENSG00000274995_0 (sequence is synthesized)
tctttttcttgatttctttgcagagcctggctttagagtaacactttgccattcactagctgtgtgaccttgggcaaattcttcaacctctctgagtcttggtgtttcttctgtaaaata

SEQ ID NO: 856599 - DNA, 120 bp, Artificial Sequence
  ENSG00000274995_1 (sequence is synthesized)
agggttgtaaaatagtggaccgtttgcctggttcttgtgaaaaccaagagattatatgccaggtgctgagtactgtgctagggacatgttgggtgcttgataagggatgggggttattct

SEQ ID NO: 856600 - DNA, 120 bp, Artificial Sequence
  ENSG00000274995_2 (sequence is synthesized)
gttgagtgaatgatctttgcttgcttttcttcctcccacactttggttggggaaactgaggccaccctgaagttcccacctacacctcatgactttctgagatccctggagggtggctta

SEQ ID NO: 856601 - DNA, 120 bp, Artificial Sequence
  ENSG00000274995_3 (sequence is synthesized)
ggaaatgtctttggagatttgggaacacactggatacatcagttggtgagccagggaaattagcaggaacgagctcatttcgatagcaatgagctgagtctccctccagctgccagacat

SEQ ID NO: 856602 - DNA, 120 bp, Artificial Sequence
  ENSG00000274995_4 (sequence is synthesized)
ttacgaggctggctgggtgccggcggccggaggcctccaatggccctcatccctctgccttccggctggaaataattcgtgtttaaaaaataacaataataaaaaaaaaatctccatctt

SEQ ID NO: 856603 - DNA, 120 bp, Artificial Sequence
  ENSG00000274996_0 (sequence is synthesized)
gcaaagcatatgcaaatcacccagaagagagacacaacaccgctggaatgtcacaagaaaccttggagatcagccagcccacgccccctcatttcacaggcactgcttcccagccaaatc

SEQ ID NO: 856604 - DNA, 120 bp, Artificial Sequence
  ENSG00000274996_1 (sequence is synthesized)
cgaagccttcatctccgctactcagagcttggaatgaaagaaggggaagcgagtacagccctcaaacccgctgacggccagatttttattatctttgctcgaatgggccctaggaagcca

SEQ ID NO: 856605 - DNA, 120 bp, Artificial Sequence
  ENSG00000274996_2 (sequence is synthesized)
acaacctgtcccccaccccccacaaatcctagagtccagagcctcagctaccaggagactcaccctcagcagcttgtgcccaagcaggggtccctaggtcaggaaaccaggcttaaagct

SEQ ID NO: 856606 - DNA, 120 bp, Artificial Sequence
  ENSG00000274996_3 (sequence is synthesized)
agacctaagtctgctgggcctctgaggcagtctgtgtccctctctgggcctcaaggacataaatgaagaaagaaaacagatttccttgccagggcttggaggagataaatgcttgagatt

SEQ ID NO: 856607 - DNA, 120 bp, Artificial Sequence
  ENSG00000257086_0 (sequence is synthesized)
cagtggtacactccagtcccagtagggctcaggcaggagggccagggctgggcatgggcccccaaccacaggaggtcaggaccataagccccctgaagaggctctgagcagggcaaagga

SEQ ID NO: 856608 - DNA, 120 bp, Artificial Sequence
  ENSG00000257086_1 (sequence is synthesized)
ggagcccaacatcctgggttggagtttggatgcagccccagctgtgtgaccccggggccaatcccaatccatctctgaaccccacccgctgcagagggcttccccccacaacatccaaag

SEQ ID NO: 856609 - DNA, 120 bp, Artificial Sequence
  ENSG00000257086_2 (sequence is synthesized)
agtgtctttgaggggctggagcagaaacattgcctctcagatccaagaccctgtttggggtggcacaagccttctgaggaaatgcaggcacagaggaagacattcattctttcaaaatca

SEQ ID NO: 856610 - DNA, 120 bp, Artificial Sequence
  ENSG00000257086_3 (sequence is synthesized)
tgcagcggcctactacgagtgtgacatagttctaggtgctggagttcagcgggagccaggagcccagtccacgtgtcggtccgtgcggaggagcccgttcgctcctcgctggccgagggc

SEQ ID NO: 856611 - DNA, 120 bp, Artificial Sequence
  ENSG00000257086_4 (sequence is synthesized)
tggaggacctggacatcggggaccgcagcgtctcctcaccagactccctgtctgcacacgatgtccactcccctgcattctcagatagcccctattctcagatggcctcaatgaggacag

SEQ ID NO: 856612 - DNA, 120 bp, Artificial Sequence
  ENSG00000257086_5 (sequence is synthesized)
aatgaggaagggtccaatgaagactagggtcctggcgtgagcgcaaatcgtcgtcctgagcgcttagaacgcctgggtttgggactggaaggttgcgtttggggagtacggacagctagg

SEQ ID NO: 856613 - DNA, 120 bp, Artificial Sequence
  ENSG00000257086_6 (sequence is synthesized)
ccaccccctgccgaatagaccctcccctacccctgcccgggggcggagtaggggagaggggcctgtagaggggctggccctttaagggggtgtggtcggggggcggaggaagagcgagac

SEQ ID NO: 856614 - DNA, 120 bp, Artificial Sequence
  ENSG00000274993_0 (sequence is synthesized)
aatgaggaggagggagactgagggggctgcctttccttggggactggggaactcatgccctgcccccacccgcagggctccaggggtgaggaaactgaggctcgttactgacttgcccaa

SEQ ID NO: 856615 - DNA, 120 bp, Artificial Sequence
  ENSG00000274993_1 (sequence is synthesized)
gattccacagtggaagagcctggacgtgaactgcgtctccaggtctcgaaccatttcctgtcctggtcccaggacctaggtggggccgccgcgcggtcagacagagccggcccgcctggg

SEQ ID NO: 856616 - DNA, 80 bp, Artificial Sequence
  ENSG00000274993_2 (sequence is synthesized)
cgctcaccggcctcggcgctggccgccccaccatccggagcgcaccgcccggacgcccagcgccagcagcagcagcacca

SEQ ID NO: 856617 - DNA, 120 bp, Artificial Sequence
  ENSG00000274993_3 (sequence is synthesized)
gcagcgcggcgccggccgtcaggcccccgaccagcgccctccagtggacggccacctcgcagcgcgggccagagaaccagtgcgtgtcggtggagtagcagctgcgggagatcgcaggaa

SEQ ID NO: 856618 - DNA, 120 bp, Artificial Sequence
  ENSG00000274993_4 (sequence is synthesized)
cgcactggccctggtgacagtcgatggcgttgtccacccccgacgtgcatttggtgacacagcggagccgggtggcctccaccaaggggaagtagaactcttcatagcccgtgggagcgg

SEQ ID NO: 856619 - DNA, 120 bp, Artificial Sequence
  ENSG00000274993_5 (sequence is synthesized)
cgcggcggcagatggctgggggttggggagggggatgcacagagacaaggacctcatccattctattcaggggcctgataacggtgcctctgaatatgcgcgaggaggattccatttccg

SEQ ID NO: 856620 - DNA, 120 bp, Artificial Sequence
  ENSG00000274993_6 (sequence is synthesized)
aggtgggatgctgtggggtagaccctgggattcgatgaggggaggccacccgcagcaccctcaccctctcctcgtggcccctgctgtcctcaggtggaagccactaaccagcgccaggaa

SEQ ID NO: 856621 - DNA, 120 bp, Artificial Sequence
  ENSG00000274993_7 (sequence is synthesized)
gggccgccctgggccacatgacttgcctcccccaaaggtctctccctgcccacaggcttcaatgggcaaatgtccctggtagcccggatcatagccgcgggagaccactcagccctttac

SEQ ID NO: 856622 - DNA, 120 bp, Artificial Sequence
  ENSG00000274993_8 (sequence is synthesized)
cagggctgcggaaacacaggcacagatggaatgggcggggcagatcaaggggttaaggtcaaggggttagcgccaggaggcaggataggcacagggagggcagtgagggctctctccgtc

SEQ ID NO: 856623 - DNA, 120 bp, Artificial Sequence
  ENSG00000274993_9 (sequence is synthesized)
tgggagagccctctcccagacggagagagccacaggcgaagactcctgttgcctgcctcatctcccctgaataatccgaggtcttcagccatccgggaaatgctgaccatgacaatcagg

SEQ ID NO: 856624 - DNA, 120 bp, Artificial Sequence
  ENSG00000274993_10 (sequence is synthesized)
gggtctctttcccagtaccgaggtcacggggagaccctccctagccccacccttgacaccgttgtgtgtggacttattccccttctcccaacctgccagaggtaccacagggctggcacc

SEQ ID NO: 856625 - DNA, 120 bp, Artificial Sequence
  ENSG00000274993_11 (sequence is synthesized)
tgagcccagtggccccctggctgagctggagtgggctggggtgacacctcaggccctggcccctccctccagcctgggctcactctgggagtcctggcagctgttcacatcctggctggc

SEQ ID NO: 856626 - DNA, 120 bp, Artificial Sequence
  ENSG00000274993_12 (sequence is synthesized)
gttctgcagcccctccttcagcgtggtcttcacctgctcatactcgctctccagctgggggctgaagggcatctccagcaggaccagagacaaagtcttgctgtcacccaggctggagtg

SEQ ID NO: 856627 - DNA, 120 bp, Artificial Sequence
  ENSG00000274993_13 (sequence is synthesized)
gctcactgcagcctccaactcctgggctaaagtgatcctttctcctcagcctcccaagtatcagggactacaggtgatccacccgcctagcctacccaaagtgctaggattgcaagtgtg

SEQ ID NO: 856628 - DNA, 120 bp, Artificial Sequence
  ENSG00000274993_14 (sequence is synthesized)
taggattgcaagtgtgagccaccacatctggcctgacgttctcttcttgttgcatcaagccatcatccaccgggcgcccctagacgtgcgttctctccctctctctctttctctctctct

SEQ ID NO: 856629 - DNA, 120 bp, Artificial Sequence
  ENSG00000274993_15 (sequence is synthesized)
ctttctaatgctgacccactcagtagagcaggggccagccagagggggacaaagtcatcaatccaggcaccaccttcccacatgtccctgcaacttctctccttccagtgtgctgaagaa

SEQ ID NO: 856630 - DNA, 120 bp, Artificial Sequence
  ENSG00000274993_16 (sequence is synthesized)
gagaggtgccacccctcctccagataaatggccccagaaaacgatccgaaaaaatacccagggagtgattccttatgtaccccctccacccctctttataaaatctgatgattacaaaag

SEQ ID NO: 856631 - DNA, 120 bp, Artificial Sequence
  ENSG00000274993_17 (sequence is synthesized)
agaacgaggggccggggctctaccctaggtgagggggcgggattccaccttagatcaagtgggcagggctccaccctagaaggagggggcggggttcaaccctagaacgaggaggcgggg

SEQ ID NO: 856632 - DNA, 120 bp, Artificial Sequence
  ENSG00000274993_18 (sequence is synthesized)
ccccaccctagaatgagtgggcggggttctctcccagaattaggggacaggactcaaccccatcaaaggagcagagctccagggcagggctccactgtagggcaacggggatgggcttgg

SEQ ID NO: 856633 - DNA, 120 bp, Artificial Sequence
  ENSG00000274993_19 (sequence is synthesized)
agcggcactctggggacgaggctccactgtaggcccagggcgcggagccggggcggagcatggggcagggcttcatcctagaatgagtgggaggggctcggctgatgccgatggtgagcg

SEQ ID NO: 856634 - DNA, 120 bp, Artificial Sequence
  ENSG00000243574_0 (sequence is synthesized)
agaatgactctggcagtagtgtggagggtggactggaaggagtatttgctgaaggatcatctgaactctgcttagaataaagaaataagagattcactcttttgtgaggttgctggatgt

SEQ ID NO: 856635 - DNA, 120 bp, Artificial Sequence
  ENSG00000243574_1 (sequence is synthesized)
tgaacacagtggtctgcagcacagatcagatgcccattcttctcgctgccctgtgaggcaacacaggtcagcctgctgcttctgtaccacagctcctcagatattcaaagaaaggggcta

SEQ ID NO: 856636 - DNA, 120 bp, Artificial Sequence
  ENSG00000243574_2 (sequence is synthesized)
tgttctccctcagtctggaagctgcttaggggagtattttatgggagtaaagtcattcccagaagaatgaaaatgtgccatcatgaagaaggaacaactttttgttctcttcctggatgt

SEQ ID NO: 856637 - DNA, 120 bp, Artificial Sequence
  ENSG00000243574_3 (sequence is synthesized)
tggggtaaagagagttaaagataccccaaagcacaaaagtctacaatcctgagtgagaaaaaaagaatataccattatgatagagatagggggttggaagcaagttagtataatggaaca

SEQ ID NO: 856638 - DNA, 120 bp, Artificial Sequence
  ENSG00000243574_4 (sequence is synthesized)
tctctgtctcagaagaagggagagaacattctataaaactcattttgcccgtgactcaactggctgagaagcacttttgaagtagaaaacgggaactcaccaggtttccagtgctcactt

SEQ ID NO: 856639 - DNA, 120 bp, Artificial Sequence
  ENSG00000243574_5 (sequence is synthesized)
ggttgtgttgtgctgtgcccaaagtgttgcttcttctatgacctgaatcaagtgttctgcattattccaatgtcagacctgccagagggcaaattaccaaatcaacagtctccttggatg

SEQ ID NO: 856640 - DNA, 120 bp, Artificial Sequence
  ENSG00000243574_6 (sequence is synthesized)
ataaatctcgagctcttcagcagaacagcaaaccagctgctattctctgagctgcctcatggaagggcccaactggcaagcaactgagacaagcaatcgtcagagaagaatggatgtacc

SEQ ID NO: 856641 - DNA, 120 bp, Artificial Sequence
  ENSG00000243574_7 (sequence is synthesized)
ccatccaaagtcctgcaatgaacttgaatgatcctgcaatctcagaattgaaagaatcctatcaaaaacaaagaacttatgagcacatactgtacagtagaacttgagatgactgcagct

SEQ ID NO: 856642 - DNA, 120 bp, Artificial Sequence
  ENSG00000243574_8 (sequence is synthesized)
cttgtctgcaccttgaagatttgcaagagtccctgaactggaagaccgcactaagctatgctcagtttcctaacccactgtaactgtaagataataaatgttattcttttaagcttctaa

SEQ ID NO: 856643 - DNA, 120 bp, Artificial Sequence
  ENSG00000243572_0 (sequence is synthesized)
ctcttagaagcccaagcacagagttcggagaaatgtgagcacctgtatgaagagaagatgggtacaaaggaatgagtgggggttcctcttcaccatccctaaaactgtggcagtatttag

SEQ ID NO: 856644 - DNA, 120 bp, Artificial Sequence
  ENSG00000243572_1 (sequence is synthesized)
ccctgttacagtgtaagtcgtacttctttgtccttttctggaaatcacgaatgtgaatgtcatttgcagcatgcattcgtgcagtggatggaagttctccagggaccaggctttcttcaa

SEQ ID NO: 856645 - DNA, 120 bp, Artificial Sequence
  ENSG00000243572_2 (sequence is synthesized)
ggcaatggggagccacggaaatctttgaagcagaggagtgtcctattcagaactcttctattaaatgattattgtgcagcagggtggaagctggattaacaggagaaacactggagacaa

SEQ ID NO: 856646 - DNA, 120 bp, Artificial Sequence
  ENSG00000248492_0 (sequence is synthesized)
gagacctaccaagaaccatgtggttgctgttaatgaccaactacaacaaaatgggcaaccccaggcagtggtgagaatgtgggcttgaattctgtctctgtcccttaccaatggcacaac

SEQ ID NO: 856647 - DNA, 120 bp, Artificial Sequence
  ENSG00000248492_1 (sequence is synthesized)
catgagcaagttaccaaacgactctgtaatgccaggcccctaatctgcccagtggaggaaatactccaactcctagaagtaatatgagaattaagactgcacaaggagctgacccacagg

SEQ ID NO: 856648 - DNA, 120 bp, Artificial Sequence
  ENSG00000248492_2 (sequence is synthesized)
ataaagacagcagctgttccttccctttcccccaacatgtatttccccagatgccatcctacatgttcacattgaagagataagcctctcagaaggaagataaccatagaaagttgaaaa

SEQ ID NO: 856649 - DNA, 120 bp, Artificial Sequence
  ENSG00000248492_3 (sequence is synthesized)
atgaggcccaaggatgtggccaggaggccgagcatcagcagctgggagactcttgctgtgaaaggaacctgggaagcctctgccacgtgcacagctgtgtaaggagaaggatctctctat

SEQ ID NO: 856650 - DNA, 120 bp, Artificial Sequence
  ENSG00000248492_4 (sequence is synthesized)
gttttcagggctgacctgcagcagagacacctacatataagcataaacttgagaaagcaatgagcacccaggggagacggggctgccgcttgggcttgctacttaccagtgctgtgtgaa

SEQ ID NO: 856651 - DNA, 120 bp, Artificial Sequence
  ENSG00000248492_5 (sequence is synthesized)
ctttaagatgtgcctgtagcttatatttatctggagttgagtagtcacagccatcggtgggacacttcagcaagatgttactgtgtttctgaattacgtggcgtttaaggcagtttttgg

SEQ ID NO: 856652 - DNA, 120 bp, Artificial Sequence
  ENSG00000248492_6 (sequence is synthesized)
tgatggaagaataatgacactgagagcaataatacagatgttcccgggtgtgggtgcggacatgcatatcaaaatgcacttggtaccaaaaaagtttgcctaaaaaaatattttcacatg

SEQ ID NO: 856653 - DNA, 120 bp, Artificial Sequence
  ENSG00000248491_0 (sequence is synthesized)
gggggagcctgggaatggtggggttcagtttgggactggcaatccagtgcataaaggacaccctagaagtctcgtgttgcacctcgggggaccctgctggggcccaaaagccagggcttg

SEQ ID NO: 856654 - DNA, 120 bp, Artificial Sequence
  ENSG00000248491_1 (sequence is synthesized)
gatcttcctctgatagttctacttcattctgtcaaagatccaattcccgaaagagtttttttcatcatcttcaaacatccagccctcagtgtattggatgatacctgccaatactggaaa

SEQ ID NO: 856655 - DNA, 120 bp, Artificial Sequence
  ENSG00000248491_2 (sequence is synthesized)
ggccatgtgaccacacaccaagaagctagctgtctgccagccaggaagagagccctgaccagtaatcaaattggctgaagacttgatcttggactccttgtctccagaaatgaactcaga

SEQ ID NO: 856656 - DNA, 120 bp, Artificial Sequence
  ENSG00000248491_3 (sequence is synthesized)
agaccaaaaacagcactaccgaattgctccctctcctcccctgcatcttatgtagcctgacttctcacctctgaagccccaaacatactgtagccaacagacgtttaacctgtacaggaa

SEQ ID NO: 856657 - DNA, 120 bp, Artificial Sequence
  ENSG00000248491_4 (sequence is synthesized)
ggaactatcaggtgaactctactttggaaagtgtggtggccagagaagaattattgcttcctttactttgtggccttggtaagagcttacgagtggaacctcaaaagtaagtgccagatg

SEQ ID NO: 856658 - DNA, 120 bp, Artificial Sequence
  ENSG00000248491_5 (sequence is synthesized)
gctgtagaagagatgtacttggggtctactgttgtccagaaattctagaagaaatgcctttgaaatcaatcctttgcaagctggaccttggatagcccgggtcaccactgcatggtggga

SEQ ID NO: 856659 - DNA, 120 bp, Artificial Sequence
  ENSG00000248491_6 (sequence is synthesized)
ggaaacctatttttccacagttgtcattggactaatccttgtagtacaaataagcttgactcagtggaggcagaataaagcccagaaaacatgcttttttacatcacatgccctcgatta

SEQ ID NO: 856660 - DNA, 120 bp, Artificial Sequence
  ENSG00000248491_7 (sequence is synthesized)
cctctgggtgcaggacttaatccattagttaagtgaaaaactctggaggacaggagagacatgccgaggctaagggaccagtcctcgtctgtgaaggctggagcaaacctggcagggccc

SEQ ID NO: 856661 - DNA, 120 bp, Artificial Sequence
  ENSG00000248491_8 (sequence is synthesized)
tgtatctgaagactgacactagtcccgaagagcaggactattgggattgcaagtagcataagctgtaattgaaagcaaattgattgaaatgaaataaattgatataaagattaggttaaa

SEQ ID NO: 856662 - DNA, 120 bp, Artificial Sequence
  ENSG00000248491_9 (sequence is synthesized)
tgctgtagtatcctaggggtctactccagtccctggttacctcgaattttccagtccctggatgtctcaccagtgaaggttgtgaaacagcaaaaatggcagcctgcaccctcctctggg

SEQ ID NO: 856663 - DNA, 120 bp, Artificial Sequence
  ENSG00000248491_10 (sequence is synthesized)
agctccatcccaagaagatgttggcacttcttaggaaggagccatccatgtctgaagagaagaaatgataattaacttcatcatgtggaaagctttagaaggaagtatcttgtccttctg

SEQ ID NO: 856664 - DNA, 120 bp, Artificial Sequence
  ENSG00000248491_11 (sequence is synthesized)
tccaaacccgcctcctccttaccacccccaataaaaataaaagccaaacaaataaaacattagcagtagctctgagtttcttcctttcactttttctctctcttcatgccttttctcctc

SEQ ID NO: 856665 - DNA, 120 bp, Artificial Sequence
  ENSG00000248491_12 (sequence is synthesized)
cattccttccttctttcaaatcatttttactagtttaagagaataattcaatctatatttagaaatcagacttaaaacttcaaaaattatactgaaatagcttccccttaaagggtgaaa

SEQ ID NO: 856666 - DNA, 120 bp, Artificial Sequence
  ENSG00000248491_13 (sequence is synthesized)
cagtcatgataaaaataacaaccgatagaataaaataatataaaattagctgagtttatagtttcttttacacctccataatttatgtggatttggaaatacagacagtatactgaaaac

SEQ ID NO: 856667 - DNA, 120 bp, Artificial Sequence
  ENSG00000248491_14 (sequence is synthesized)
actttctgacataacctccccatttcatggatgaaaaaccctaaagctctcataagtaaagtgatttacttcaggacacaaactagttgatttagtttggatgtttgtcccctccaaatc

SEQ ID NO: 856668 - DNA, 120 bp, Artificial Sequence
  ENSG00000248491_15 (sequence is synthesized)
gaggtggggcctggtgggaggtgtttgtgtcatggggcagatccattatccttatgagctgcttggtgctatccttgtgatagtgagtgagttctcatgaaatctggttgtttaaaaatt

SEQ ID NO: 856669 - DNA, 120 bp, Artificial Sequence
  ENSG00000248491_16 (sequence is synthesized)
aatctggttgtttaaaaatttgtggcacctccccaccagccttgctcctgctcttgcggtgtgatatgcctgctgcctcttcaccttacaccgtgattataagcttcctgaggcctcacc

SEQ ID NO: 856670 - DNA, 120 bp, Artificial Sequence
  ENSG00000248491_17 (sequence is synthesized)
agaagcagttcttctatcaggattttaagagggcaggcagaactttaaagcaaaggaaattgcttgtttttgtgaaattaaccagtctgttatcaaggcggaggacaagatacgaatgct

SEQ ID NO: 856671 - DNA, 120 bp, Artificial Sequence
  ENSG00000248491_18 (sequence is synthesized)
aatcattgtgaagaaactcattacggaattttctccaatacataggcaaaagaagtggctgttatcattttgcactataaccagacatataatgctgttgctccacatccacgtcagagg

SEQ ID NO: 856672 - DNA, 120 bp, Artificial Sequence
  ENSG00000248491_19 (sequence is synthesized)
agctgagggctcgcggggtgcgggggagcctgggaatggtggggttcagtttgggactggcaatccagtgcataaaggacaccctagaagtctcgtgttgcacctcgggggaccctgctg

SEQ ID NO: 856673 - DNA, 78 bp, Artificial Sequence
  ENSG00000248491_20 (sequence is synthesized)
ccctagaagtctcgtgttgcacctcgggggaccctgctggggcccaaaagccaggctgaactctcgaacttctagcta

SEQ ID NO: 856674 - DNA, 120 bp, Artificial Sequence
  ENSG00000248490_0 (sequence is synthesized)
agttcaaactagttgagaccactgacccttcaactgggtctgcatgggtgcctgagaggtggccttttgatatcagagggtcaaaaactccaccctcaagatcatgctaatgttgccatt

SEQ ID NO: 856675 - DNA, 120 bp, Artificial Sequence
  ENSG00000248490_1 (sequence is synthesized)
ttctgtacatatgtcctgtgaactgttcgtccacctcatctcttggtgacctagtgtgtaaatcttttctcttttgcagaatctatgtcacagtgattgatttactgcatatgagcagaa

SEQ ID NO: 856676 - DNA, 120 bp, Artificial Sequence
  ENSG00000248490_2 (sequence is synthesized)
tgaacctggacctggccagtatcattaagctgtgtttcccctgaagttatgtgaaaagcatttgtggatttaacagagttaagggtctcacttcatcacctagactggagtacagtagca

SEQ ID NO: 856677 - DNA, 120 bp, Artificial Sequence
  ENSG00000248490_3 (sequence is synthesized)
tgggttccagtgatcctcccccttcagcctctcagcagagagagaaagaaagcagagctctttgaagcagagaaagaaagcagaaagcagagatctttgaaggcttaagaaaccataagg

SEQ ID NO: 856678 - DNA, 120 bp, Artificial Sequence
  ENSG00000248490_4 (sequence is synthesized)
agttttggagagtcaatgcatgatgatctctgaagattctactgaaatctaatcaatatgtcctcactgccatcaattcaaaagaacttgctaagaaggctctagaggcttgtactctca

SEQ ID NO: 856679 - DNA, 120 bp, Artificial Sequence
  ENSG00000248490_5 (sequence is synthesized)
gatagtgaaagtgagatgatgtgtagtgaaagtcatatataggttgtaaattgcaatatggaattcccaaatgctgaattcattttatctcttcggaaataaaaacctgttaaagactca

SEQ ID NO: 856680 - DNA, 120 bp, Artificial Sequence
  ENSG00000248494_0 (sequence is synthesized)
aactctgtgccttttgagagttgaaggcttaaaacaacaacaaccaccacaacaaaactattcacctttttatccaatagaaactaagctgggaaaaccaagacatagtgaatctgagaa

SEQ ID NO: 856681 - DNA, 120 bp, Artificial Sequence
  ENSG00000248494_1 (sequence is synthesized)
gggacacttcctggacacattcagcttcttacccattattcagaaggagaagtagaaacctgtagaagtagccctggggagggtagtttctgataaaggatgtctccatttggaaattaa

SEQ ID NO: 856682 - DNA, 120 bp, Artificial Sequence
  ENSG00000248494_2 (sequence is synthesized)
caggtctaagctacctctttgcacctgggaactctgtgccttttgagagttgaaggcttaaaacaacaacaaccaccacaacaaaactattcacctttttatccaatagaaactaaggct

SEQ ID NO: 856683 - DNA, 81 bp, Artificial Sequence
  ENSG00000248494_3 (sequence is synthesized)
aacccatgtatcacatagcaagagcaggagcaagagaggcgcggggagaggttttaaaccacgtcttgcaagaactcacta

SEQ ID NO: 856684 - DNA, 120 bp, Artificial Sequence
  ENSG00000248494_4 (sequence is synthesized)
aagaactcactattgcgaggacagtaccttggggatggtgctaaatcattcatgagaaatctgcccccatgatctaatcacctcccaccaggccccaactccgacactggagattacatt

SEQ ID NO: 856685 - DNA, 120 bp, Artificial Sequence
  ENSG00000248494_5 (sequence is synthesized)
catgagatttgggtggggacaaatatccagactatatcggggctgtaccagcaattgactcctgacatctgttctgactggtcagagtctgttctgataggttggtgcctctactgatta

SEQ ID NO: 856686 - DNA, 120 bp, Artificial Sequence
  ENSG00000248494_6 (sequence is synthesized)
attattaaatattttatgctataccaattattaaatattttgaaaaccacctactgttacatgggctatcatattgcctagaatatttggtgatggtttcataaatggaaagcaattgat

SEQ ID NO: 856687 - DNA, 120 bp, Artificial Sequence
  ENSG00000175728_0 (sequence is synthesized)
acttgtccttgtgagtttctgacatggtcctcctctgtctcttcctcgccagcttggctgccacccctcgggctggggtcactggggcatggcccaccagcggcctctccattctggccc

SEQ ID NO: 856688 - DNA, 120 bp, Artificial Sequence
  ENSG00000175728_1 (sequence is synthesized)
agctccagccgtcctgtgagctcaggtggactcagctttccaggtcatcttggagggatctggtcatgaccacatcactctggagtctggcttatttccagcatttttcccaggagacta

SEQ ID NO: 856689 - DNA, 120 bp, Artificial Sequence
  ENSG00000175728_2 (sequence is synthesized)
caactcaggagcagctggatgagatggaagagatccccagagagagccagtgtgggaggcaggacttccatgccctctcctgtcccaccgcctccccaagagacagagtcttgctctgtt

SEQ ID NO: 856690 - DNA, 120 bp, Artificial Sequence
  ENSG00000175728_3 (sequence is synthesized)
tcggccaattatttatttattgtccgtctctccagtgaaatggtcctgaaaattaggtatcatgttttgtttaactctttatccttatccttaatgttagacactgttttatttgactca

SEQ ID NO: 856691 - DNA, 120 bp, Artificial Sequence
  ENSG00000175728_4 (sequence is synthesized)
ataaagacttcttgaatgactgaataaaccagtgagggaaaagggggtgtcaggatggggagatcctgacattgagctttagcctgaaccttgaaggtgtttgttcagattggtgcctgg

SEQ ID NO: 856692 - DNA, 120 bp, Artificial Sequence
  ENSG00000175728_5 (sequence is synthesized)
gaatagaagtgatgcccaactttctgccagatgtagatcttagactcccacagaggggactgtctgtatcaaggtctccaggtggtccagaggatagcattgcgtataaaaaagcccaat

SEQ ID NO: 856693 - DNA, 120 bp, Artificial Sequence
  ENSG00000175728_6 (sequence is synthesized)
gacaacaactctgtgagcctctgggctttcctgttgggatcaacagaggggaaattgtgacctttttttgttttgacatgttattaggtcatagtatgatgctgtgaaaagagatgagtt

SEQ ID NO: 856694 - DNA, 120 bp, Artificial Sequence
  ENSG00000175728_7 (sequence is synthesized)
taggctcaagcaacaaataaacctcctttgaattctgactcaacaagctaatagcttgtaaaatcaggtgaattatttaacctctctgagcctattttatagggctgttgtgaggattaa

SEQ ID NO: 856695 - DNA, 120 bp, Artificial Sequence
  ENSG00000175728_8 (sequence is synthesized)
atgaataatccatgttaaatgctctgctcagtgtttggtacctagaaagaactgcctaattgttgctgttgttgttgctgttaatattattagttgtcccagctctctaataacaaatga

SEQ ID NO: 856696 - DNA, 120 bp, Artificial Sequence
  ENSG00000175728_9 (sequence is synthesized)
tttgagtaggctgcttcctttagctgtaagattatcatctttttgggacaagatgacctctgcagtctctccagctctaggattcaatgatcaggggactttgagatcacccccatgctg

SEQ ID NO: 856697 - DNA, 120 bp, Artificial Sequence
  ENSG00000175728_10 (sequence is synthesized)
gaactctttgaagcatttccatgggaaaggaaagaatcacttctctttgcagccatgctcaaacggattgtcctggaagataagcaaagatgacacatgtaggagaggaaagtccagttc

SEQ ID NO: 856698 - DNA, 120 bp, Artificial Sequence
  ENSG00000175728_11 (sequence is synthesized)
agtctggctcagaccctcctggaatctggtacttttgggtgggacaggagacagatgttccatgacagccaacatcgtgtacttcagactttctgggaatgatggcaggagaggaaccag

SEQ ID NO: 856699 - DNA, 120 bp, Artificial Sequence
  ENSG00000175728_12 (sequence is synthesized)
aagagcaggatgacttgaatttattttcttggaaagactattttgttggcaagacttatccctggcctcataaatggaccagaggctaatggactaggaagaactgctcttgagccgctc

SEQ ID NO: 856700 - DNA, 120 bp, Artificial Sequence
  ENSG00000175728_13 (sequence is synthesized)
gccttcccctgaggtcgcaggctgcctttctgcccctttggtgatctgccattaatctgatacatgtgtaatttgaatccatttggatgaaattgtagaggaggaaaagaagagaatgca

SEQ ID NO: 856701 - DNA, 120 bp, Artificial Sequence
  ENSG00000175728_14 (sequence is synthesized)
gaaaggaacaatgatgctaagtagcatggacaaagaacagaggcatcttgtgcaatagataggcctctatccaactgaatgacagaaaccctaaattacagtagtttaatcaaagttaag

SEQ ID NO: 856702 - DNA, 120 bp, Artificial Sequence
  ENSG00000175728_15 (sequence is synthesized)
atttattggtatctcacattaaattgtagggaggcagatgagagttgcaattgtgactctgcaatcatttgtgactgcccttgttctataccactcctctgccctcttcaatatttctat

SEQ ID NO: 856703 - DNA, 120 bp, Artificial Sequence
  ENSG00000175728_16 (sequence is synthesized)
tttgtggcccaagacagtggctccaatttttgtcattacatctgcattctagccagctagaaaaagaaagaaaggggaggggaagtgcatgtgccttctctttaaggacacttcccagaa

SEQ ID NO: 856704 - DNA, 120 bp, Artificial Sequence
  ENSG00000175728_17 (sequence is synthesized)
attgaacacattgcttcaacttatatcccactggccagtacttagtcacgtggctacatctagctgtagagacactggaaaatatgtctttattccaagtggctgtgtggtcagctaatt

SEQ ID NO: 856705 - DNA, 120 bp, Artificial Sequence
  ENSG00000175728_18 (sequence is synthesized)
tttatatagttctattattttttaaaaaggcaagaacaggtatcagaagacaattagcagtctctgcctcccttggaaacaagagtggatattacagattgatgtcataaaaattgccac

SEQ ID NO: 856706 - DNA, 120 bp, Artificial Sequence
  ENSG00000175728_19 (sequence is synthesized)
agtcagccttgggtgtaatctctagatccaggcagcaagggccgattggaattttattccgaccagatgctagctgggcaatgctgggcacattgtttaatctccctgaacttcagcttt

SEQ ID NO: 856707 - DNA, 120 bp, Artificial Sequence
  ENSG00000175728_20 (sequence is synthesized)
ctcttctgtaaataatagtaataacaaagacttccaagaattgtaaacagaacaaaatgagtgatgtgtgtagagtgcttcgtgccctttttgtatgtagtcatgggccgcagtagatat

SEQ ID NO: 856708 - DNA, 120 bp, Artificial Sequence
  ENSG00000175728_21 (sequence is synthesized)
tgaggatcactctatttgttctggatgcacagcctccctgaggatgctcttttcctcgggatgctcttttcctcgggatttctagtatcatcattcttgtgactactatccacacccttc

SEQ ID NO: 856709 - DNA, 120 bp, Artificial Sequence
  ENSG00000175728_22 (sequence is synthesized)
agaaaagccatcattttctcctggattaatctctttcttgaattttgaattcccctaaaagccaaaacctccattctgtcagggcagaacagagccccaatgtttctaaagaaataactt

SEQ ID NO: 856710 - DNA, 120 bp, Artificial Sequence
  ENSG00000175728_23 (sequence is synthesized)
acaaccagaaagtatcagtaaattcccttttccatgttgcttcattctctcaagcatgcatgaaatttagccttaataagtggttattgtccacttactaataactgcttatgaaaacca

SEQ ID NO: 856711 - DNA, 120 bp, Artificial Sequence
  ENSG00000175728_24 (sequence is synthesized)
tgcctggggtctgcggtacaggcatacagccccaagaacagctccaacctccccttcaccttctcctccacctgctacctaacagccaaagtctgtgcttctccaagaggactgtaggaa

SEQ ID NO: 856712 - DNA, 120 bp, Artificial Sequence
  ENSG00000175728_25 (sequence is synthesized)
ccgttatcattgcaggaaaggagcctgtctaggctgcttcttccaactccatcccagtaatgaacttgaccctaagatgcaaggcgtctaatcccttgaacccgcttgaacccgcttgaa

SEQ ID NO: 856713 - DNA, 120 bp, Artificial Sequence
  ENSG00000175728_26 (sequence is synthesized)
catatctgctggactgatgtcttctgcaggttgcagatcctgaccatgggctgcatgtgctgccggatggaggcagggccatgccctgagtgttttcttcacatggcaccagtagcgttg

SEQ ID NO: 856714 - DNA, 120 bp, Artificial Sequence
  ENSG00000175728_27 (sequence is synthesized)
tgtgtgatttctgataaaattgtagaatagctaatgacatttgacatttgttcagagttttgcagttcacaaaacattttcatatgtcagtaaaaatagcgaggataatactaaccatgt

SEQ ID NO: 856715 - DNA, 120 bp, Artificial Sequence
  ENSG00000231638_0 (sequence is synthesized)
cagccttcatgaagagcccatggcaactctgtgggaatccttccagcagcccgcttatggctggagacagaggtgtggcttctatctaagcttttccctctgactcagtccaggaggcaa

SEQ ID NO: 856716 - DNA, 120 bp, Artificial Sequence
  ENSG00000231638_1 (sequence is synthesized)
ctgtcttgggaagcaaatgataacagcatctgggagattctcttctggatggactagcagggaatcaggacatgaactcagtggactaactgcaccgagactcacctggtcattacttga

SEQ ID NO: 856717 - DNA, 120 bp, Artificial Sequence
  ENSG00000231638_2 (sequence is synthesized)
aggtcattacttaaacctccatgaatctcctgatgaactccctcagaaggtggaaggagcacctgacaccgacccgagatcagcagcagctacgcccacgctgtgggcagttaagaggca

SEQ ID NO: 856718 - DNA, 120 bp, Artificial Sequence
  ENSG00000231638_3 (sequence is synthesized)
gccagtggtaccagtcgtgagcgatcagatttgaggactcaggattctggtttcctgagtgtcatggacctgcgggctgcagaaatgacagcgacaggtcttcaggcaggtgccacagca

SEQ ID NO: 856719 - DNA, 120 bp, Artificial Sequence
  ENSG00000231638_4 (sequence is synthesized)
cccacacactgccagcattttgtgcaaaatacccaaagccacatcaccagatctgggctctcctagcttccctttgctaaaatgctggccaaagagcttaacgagccactcaggggcaca

SEQ ID NO: 856720 - DNA, 120 bp, Artificial Sequence
  ENSG00000231638_5 (sequence is synthesized)
agataggtgaaacctgcatgttttgtttgttaaactatttgccacatggcacaagaaaataacaaaaaataaacaaaaggaataactgcagcatcatggttttgttaagatgtcccaaag

SEQ ID NO: 856721 - DNA, 120 bp, Artificial Sequence
  ENSG00000231638_6 (sequence is synthesized)
ctgatcagggcttcctgttgaaatctaaatgagactcttcctaggtggcttacattcagtcagctgtggctctgtgcaaagaaaaccagtttcccttgctcagaaatttggagccactga

SEQ ID NO: 856722 - DNA, 120 bp, Artificial Sequence
  ENSG00000231638_7 (sequence is synthesized)
taagagaagaaaagtgtgattccacatggagggtcatgatacaatctgatctctgaccccgtggaggtgaaggggcttgttctgcatgccaggctgaggactctcgggactgaggcattc

SEQ ID NO: 856723 - DNA, 120 bp, Artificial Sequence
  ENSG00000231638_8 (sequence is synthesized)
agagtcgcagctttaaatcataagggttccctgcccatttcatcacaagtcagcagcatccaaagagtggcgttgaagaaaatctcatcaccgtgggctcagtttagattgctagtcggc

SEQ ID NO: 856724 - DNA, 120 bp, Artificial Sequence
  ENSG00000231638_9 (sequence is synthesized)
tcagaaagctacctgcaattgcgtttccaggatgcaccacaaatactctccacatgagggagaacatcagtggatgaaactcagcatgcttagtgcggggccaagtcctctaacaaagga

SEQ ID NO: 856725 - DNA, 120 bp, Artificial Sequence
  ENSG00000231638_10 (sequence is synthesized)
cacagcggttaacctgcatttcgaggacaggcactgtcaagccctcatcagggatccatccagagaactttggtaattcttgcaaaatccctgtatcacacaatttccttccttaatgtg

SEQ ID NO: 856726 - DNA, 120 bp, Artificial Sequence
  ENSG00000231638_11 (sequence is synthesized)
atgaagtgtaacggacacatctataaagcttcttcagtcctgcaatgcatagatgagcagaaggccacaaagccaggtcatagcactctctaccatcagaatggagcctgcctgaatgtg

SEQ ID NO: 856727 - DNA, 120 bp, Artificial Sequence
  ENSG00000231638_12 (sequence is synthesized)
ccacggtgacttgtctgctctgctccatcatccacttattcacaagttctggggcaacaaagggcacgttttgtttcatcttgtgccaaaccctcgatgtgtactcactcactctacctc

SEQ ID NO: 856728 - DNA, 120 bp, Artificial Sequence
  ENSG00000231638_13 (sequence is synthesized)
atctcaagaacttcagggctgggagtgcatttggagagaaggcatgtgcaatatctggaagccttagcacaggtgggttatactgatgctctatagccaaactataggaacttgggttct

SEQ ID NO: 856729 - DNA, 120 bp, Artificial Sequence
  ENSG00000231638_14 (sequence is synthesized)
aaggccagcaggcccaggtgtcaccccaatggctcccttcaacagcagcataaataagtcatgtcagaagaactcacattagccatctccaggactcatttccctctcaacagcaggagc

SEQ ID NO: 856730 - DNA, 120 bp, Artificial Sequence
  ENSG00000231638_15 (sequence is synthesized)
tcctgcagtcagaacagcggtaattttcaaatcaggcatgtggtgatgcagcaggaaagtgcctgcatcccaggtgtcccagcagctttctggagacctctaatacccacatctgcacca

SEQ ID NO: 856731 - DNA, 120 bp, Artificial Sequence
  ENSG00000231638_16 (sequence is synthesized)
caaaactgcacagcattgagtgataccaatcttcttatacatataggtaagtggtaatagaatgcctcaacagcagaccacccaggaaccaaagacatactggattttcaagtcagaaga

SEQ ID NO: 856732 - DNA, 120 bp, Artificial Sequence
  ENSG00000231638_17 (sequence is synthesized)
atgcttagagatcatctgacccaatagccatattttacagtaagatgcagaagccagtgtccacagtgctaaagccactggtccaaggtgaaagaatttcaaacccataaatacctccaa

SEQ ID NO: 856733 - DNA, 120 bp, Artificial Sequence
  ENSG00000231638_18 (sequence is synthesized)
gaagcttccactgggaccctatgattttagtaaaattatcaacattcatgacctatgtctactgatcttagcgtcttctcagtaggcaattattctttctcacatcaatttgcagttgct

SEQ ID NO: 856734 - DNA, 120 bp, Artificial Sequence
  ENSG00000231638_19 (sequence is synthesized)
atattatcagcatccttggtaaatccatcttgtgttctgggtgaagactaacagattcttccttcttggactctgtcattcactctcatccctcataacatctggccactgctctaaaca

SEQ ID NO: 856735 - DNA, 120 bp, Artificial Sequence
  ENSG00000231638_20 (sequence is synthesized)
cagtggcctttgagaaatgctgctgaattctgactaagaaagaggagaactttcaaatacaagaaagtgaacattatagagcttaccactcaagatggttttctacaaatgcggacatgg

SEQ ID NO: 856736 - DNA, 120 bp, Artificial Sequence
  ENSG00000231638_21 (sequence is synthesized)
ggctgatctgcaccgtgtaagtatcatttgccgagtactcaaagagtccatagtaagggttgaagagctcctgagacagaaggaagaagaactcccgcgaggggccactgtagtccaggc

SEQ ID NO: 856737 - DNA, 120 bp, Artificial Sequence
  ENSG00000231638_22 (sequence is synthesized)
tgcaaagaaagcagaggtccaggaagctcattctgtgcccggaggtggggggacctgtttgcacccagattctagtgtgccctttcagagttgggtgctggggaaagcagagagcagcct

SEQ ID NO: 856738 - DNA, 120 bp, Artificial Sequence
  ENSG00000231638_23 (sequence is synthesized)
ctgctctttggagtgaatgccaatggcagcatcaatttgctgtagaaaatgaggatgcagtaattggtttggagatgtttcttaaccagatgtccatgaataaactcttatggcagcttt

SEQ ID NO: 856739 - DNA, 120 bp, Artificial Sequence
  ENSG00000231636_0 (sequence is synthesized)
agacggcgaccgcggggtgctgcaggcttcggcgcggcgcattatcgggctgtgccgaaccccccgggccgccctgggatcgcgggcccacgtgaggtcggggtcggggcggctgtacag

SEQ ID NO: 856740 - DNA, 120 bp, Artificial Sequence
  ENSG00000231636_1 (sequence is synthesized)
cgcttactctcggaaatcttgggttccccagggccggggaagggtcttctgcctggtctggggcccctcccccgacactgtggatgtctaggtgtcccgggtggggtcaaggagtgaccc

SEQ ID NO: 856741 - DNA, 120 bp, Artificial Sequence
  ENSG00000231636_2 (sequence is synthesized)
cacgggttcccccatctttgtccctatccagctcacaccttcgcctgtcttttgcatgtgttttttccacaaccttttgttcaccgggtttttaacaacagaaataaacctaacccccaa

SEQ ID NO: 856742 - DNA, 120 bp, Artificial Sequence
  ENSG00000231633_0 (sequence is synthesized)
atttttttctgaattccctttgtaaatctgactttttgagaaaaaagtttctcccaaaagcacatcctctgatttaccaagatgacgatcctttctaagatatgtgtttgccatgaagtt

SEQ ID NO: 856743 - DNA, 120 bp, Artificial Sequence
  ENSG00000231633_1 (sequence is synthesized)
ttctgcatagaatggatccatttctgtaagatgttcttgcttctcttccccactttctctatcatgtagttttgctccctttaccaagttggaagttcttctcttgtcaatgggatcaga

SEQ ID NO: 856744 - DNA, 120 bp, Artificial Sequence
  ENSG00000231633_2 (sequence is synthesized)
ataccttgctatcccttcagctagtgactctatttgtgttggttgtgtatgacttaaccctgatattctcatgtctatctctgtttggaatccactttgccttttaatgtcagaggaatc

SEQ ID NO: 856745 - DNA, 120 bp, Artificial Sequence
  ENSG00000231633_3 (sequence is synthesized)
tggagtgaaggaagttgtatttggaaatgtatcagccacattttcaccttgccacattgctttcagtttggtttttaaattggattcaagtttcttcctatgttttgtagtaaactgccc

SEQ ID NO: 856746 - DNA, 120 bp, Artificial Sequence
  ENSG00000231633_4 (sequence is synthesized)
actgattttatgtatctgtgaaattggtggtttcttttccttcatagttaaacatttgggattcaatataattttcctttctgataactgtattgtgtttatctggtttttagagtcaga

SEQ ID NO: 856747 - DNA, 120 bp, Artificial Sequence
  ENSG00000231633_5 (sequence is synthesized)
taaaacaggcatgaagaaatctaaaggacccaggaaagttgcagctacattttcttgtacctcttccttttcctctgtaatatgaccatccagattttgtcggcgtgttctgttagatag

SEQ ID NO: 856748 - DNA, 120 bp, Artificial Sequence
  ENSG00000231633_6 (sequence is synthesized)
aatgcacctcgctgctgtattgtataagagtttatcaatcattgatttggatgttgtactcttagcatattcagtggcactgagtaatgcctctcctatacttgtgtaccattgcttccc

SEQ ID NO: 856749 - DNA, 120 bp, Artificial Sequence
  ENSG00000231633_7 (sequence is synthesized)
tttcatcttgtacttaaaacggtgttgctttttctttctgtggttttctgtagaatatcttatgatattaaacaactgcaaaattcgtagttgctttgccttcaaagttacacatttggg

SEQ ID NO: 856750 - DNA, 120 bp, Artificial Sequence
  ENSG00000231633_8 (sequence is synthesized)
taatgtatagctccggctttcatattcagatgacatgaggctggagaaatctaaaggttttaagactgtttgtaagtttttttgattccatgcagttttctcagaaatagaactatccca

SEQ ID NO: 856751 - DNA, 120 bp, Artificial Sequence
  ENSG00000231633_9 (sequence is synthesized)
tttccttctaggattttcatcccaaggggtatcacgtggtattgaaccaatctttgatttccctgttttgggaaatgaagtctttagaccttccatacattttattccttcttgcatatg

SEQ ID NO: 856752 - DNA, 120 bp, Artificial Sequence
  ENSG00000231633_10 (sequence is synthesized)
aggactttgtttcatcatgtatccagaaataggctctaaaacagtttctctaaagtgtgtttcttgctttgttttttgcactatgtgagacaaattccaagatctgccttcgggactctt

SEQ ID NO: 856753 - DNA, 120 bp, Artificial Sequence
  ENSG00000231633_11 (sequence is synthesized)
cggttcagatcctgatttgcaagggtcaggatctttcatttgatgtgtactgaaacggaggtgttgactatagcatggaactgattctgttaacattttttgaatatttttatcttccct

SEQ ID NO: 856754 - DNA, 120 bp, Artificial Sequence
  ENSG00000231633_12 (sequence is synthesized)
ttcatgttgtacattcatgttcattgcattactagatccactttccatgtcagtcaaattggccttctgtgcctccccaccatgtggtgatttctgtaactccaggacagttgcttgtag

SEQ ID NO: 856755 - DNA, 120 bp, Artificial Sequence
  ENSG00000231633_13 (sequence is synthesized)
atctttattaaactctgccttttcccctttacctgaattgtgctgttcccccatacatttcctatcagttggtacaccacgttttattgcaccagttaaaacttcaccatttactgagtc

SEQ ID NO: 856756 - DNA, 120 bp, Artificial Sequence
  ENSG00000231633_14 (sequence is synthesized)
ctctgattttagaggaagaagttttgaatttactgtacatattgtgccattttgggtctggaggcatttctttgtctcctctctttgtattggctctgcaggctgaagttgctgtgggac

SEQ ID NO: 856757 - DNA, 120 bp, Artificial Sequence
  ENSG00000231633_15 (sequence is synthesized)
atcttgtttggtaacaaacagaattttcctacttccttggttttctaatttgtgaaagtcaagatccttcccctgacctgaacggaacatgaaatgttgcaggtgctgtggaattacttt

SEQ ID NO: 856758 - DNA, 120 bp, Artificial Sequence
  ENSG00000231630_0 (sequence is synthesized)
tgagacgcagcccttggccccagcttcccatgggcagggagccagccgagcccctcagaggcgttccccaaggctctgcagatgcggcccaggaagatgcaggaaaagaaggacagccca

SEQ ID NO: 856759 - DNA, 120 bp, Artificial Sequence
  ENSG00000231630_1 (sequence is synthesized)
cttagtgcccaaggctccaggttaagaggagccacgtgagccacgatggtcatcaccagatgctgggtgccgtgctcgaagccaggaccggctgaggctttcgggggttgcatgttttgc

SEQ ID NO: 856760 - DNA, 120 bp, Artificial Sequence
  ENSG00000231630_2 (sequence is synthesized)
atgcatcagtgaaggagacatttgtgacccactactggggcaggtggtttcactttcccaccattatgtccagaattggtaggttcttggtctcactaacctcaagaatgaagccgtgga

SEQ ID NO: 856761 - DNA, 120 bp, Artificial Sequence
  ENSG00000231492_0 (sequence is synthesized)
gtgtttgacagccaggtcttggaaaggaaggccaacatgccctgggctgatcagactccatcatgttgactcctgggaggcacatttttgagaaacaattaggaaccaggaagcattctg

SEQ ID NO: 856762 - DNA, 120 bp, Artificial Sequence
  ENSG00000231492_1 (sequence is synthesized)
aggaggaaagccaggataaagaagactcagataaaaaagtcatcccaccaggtctggatgcagtgtgactgtatcagtcagcttttgctgggttatgccaagtaacaaacaggattcagg

SEQ ID NO: 856763 - DNA, 120 bp, Artificial Sequence
  ENSG00000231492_2 (sequence is synthesized)
gcctctgctcagaagtggcttatatccctctgttcacattttattggccacagagaatcacatgatcaaatatgtcttcagacttgatgggcttagggagataccatgctcccacaggga

SEQ ID NO: 856764 - DNA, 120 bp, Artificial Sequence
  ENSG00000231492_3 (sequence is synthesized)
ggggtggtaactatttggccagcacagagtagataccaacagttattaaactgtttgttgaatgaatgaatagatgaattctctgatcctggaaggatttaaataaagaatggatgacca

SEQ ID NO: 856765 - DNA, 120 bp, Artificial Sequence
  ENSG00000231492_4 (sequence is synthesized)
actcagataaaaaagtcatcccaccagttttggtatcagggtaatactggcctcagactgagttgaacatgtactctgggggaagctagctgccatggaaggagtgacactattctgtga

SEQ ID NO: 856766 - DNA, 120 bp, Artificial Sequence
  ENSG00000231492_5 (sequence is synthesized)
tttgactccaactgtatgagaggccccaggtgagatctgcccagctgagccctgtcagctcatattcagtgaactctgaatgtgagaggtaatatgaaattgttgtcattagttaccaca

SEQ ID NO: 856767 - DNA, 120 bp, Artificial Sequence
  ENSG00000237670_0 (sequence is synthesized)
gatgtgtttgactcccctttcatcatgattgcaagtttcctgaggcttcccaagccatgctgaacttatgcctcagccatggaaatgggccactcctagttcaagcttcttgcagaatat

SEQ ID NO: 856768 - DNA, 120 bp, Artificial Sequence
  ENSG00000188365_0 (sequence is synthesized)
aaaatcggcgagctccgccgagcgggcggggcaaggccgaggtggcagctcctgagagaccccaaggaagaggggagcatcgagggctactctggaaattgcaaaaatccgaaactgcaa

SEQ ID NO: 856769 - DNA, 120 bp, Artificial Sequence
  ENSG00000188365_1 (sequence is synthesized)
ttcgaacaggaggtggatttttttttttttttaagtcgagacttgggacgccaagcacaaaagccagggacagcccgggaaggagggaccaggtgtcctggggcggccgccgggcaggtc

SEQ ID NO: 856770 - DNA, 120 bp, Artificial Sequence
  ENSG00000188365_2 (sequence is synthesized)
tggaggtccccgagtctccttcccacccctctggctgcagcggccgcggactgactggagggagagtctcccgccccggcgcagcgcccgcccgggtaccgtccccaccgcgcctgggca

SEQ ID NO: 856771 - DNA, 120 bp, Artificial Sequence
  ENSG00000188365_3 (sequence is synthesized)
cttctcggccacctcctccagcagctcgatgctctggttaccagattcgcgtttactttggaaaaatctaagatcgccacatccgaggatacatgtcttaaggaggcgatgagcttcccg

SEQ ID NO: 856772 - DNA, 120 bp, Artificial Sequence
  ENSG00000188365_4 (sequence is synthesized)
tgatttttttttgtaagagattctttgggtagctttctttaaaagccagcgcctcgtagtatgcccaggcgccccagtttggggaagtcggggtgaagccccctggaacaccctcacact

SEQ ID NO: 856773 - DNA, 120 bp, Artificial Sequence
  ENSG00000188365_5 (sequence is synthesized)
ggcaaagaagctgcctcggctatctgcgggctccgctgcgttctccttacttttctccccctcttaaatggagttaaaatggctgaattccggcttttaattaaaaacagcctataatcg

SEQ ID NO: 856774 - DNA, 120 bp, Artificial Sequence
  ENSG00000287671_0 (sequence is synthesized)
atcctctaccctgagtagatactctgcatttttactgtgcaatgctttcaggactgtgcctctgtggtcacccctgtcgtccagctccgttatggccatgggaaccagaacctggcatgt

SEQ ID NO: 856775 - DNA, 120 bp, Artificial Sequence
  ENSG00000287671_1 (sequence is synthesized)
tccagcacctcattctgcagttagaaatcaacaaaacctcccaaatgggagaggagggcctaaaacccttgggaaatttcctttgcgagattttcatgagacttggaatgtcctgaagtt

SEQ ID NO: 856776 - DNA, 120 bp, Artificial Sequence
  ENSG00000287671_2 (sequence is synthesized)
taatatgtgaaggtatttgaatgacacatagaactccgtgtaagacaggtgtagccaaaagagaaaaccattcatgtcaacagtctccctcgtgctctttcagagaccctctgaattata

SEQ ID NO: 856777 - DNA, 120 bp, Artificial Sequence
  ENSG00000287671_3 (sequence is synthesized)
gcacccagaggccctggatgtcttgggagcggatgagccccatgcacaggcaggagagtggcgcattctctgggtaacgaagtatcctatagctagaagattagaaacaattctacatga

SEQ ID NO: 856778 - DNA, 120 bp, Artificial Sequence
  ENSG00000287671_4 (sequence is synthesized)
aacatttgaaagtatcttttgatcagtttatttatttctgaagacatagatttcctttgggaaacagtagcccagagaaaggtctccacaaccaaaaagcactgtgaattgttagttgca

SEQ ID NO: 856779 - DNA, 120 bp, Artificial Sequence
  ENSG00000287671_5 (sequence is synthesized)
ttttgcctggtcacgtgagtgaatttcctcctggattgcattgaatctgcactgttttggagactggcagatccgtcgttgataaagccacatgtgcagggtcatcatcagttgatgtac

SEQ ID NO: 856780 - DNA, 120 bp, Artificial Sequence
  ENSG00000287671_6 (sequence is synthesized)
ttccatcctagctgatactgttgatttttccctgccaggaagcttcctgacacagcctgcaccccagtggacttcccaaagcaagttgagtctgacttcgcacccctgacatcagaatca

SEQ ID NO: 856781 - DNA, 120 bp, Artificial Sequence
  ENSG00000287671_7 (sequence is synthesized)
aatactgatgtacctgaaggaaccctgggtaccaaacatgctcaagtgaatgaatggtgtccaggacaaagcccagcagggtgtatgaagaaagggcttcagcagaaacagaggctgaag

SEQ ID NO: 856782 - DNA, 120 bp, Artificial Sequence
  ENSG00000287671_8 (sequence is synthesized)
cctgcgtgctgggggccgagaggccagaggagaatgtgatgagacatagaattggtagtgcaggaagttggaagatcaagtaccgtgatgttggtgctggctgcttgtgttaaactgcct

SEQ ID NO: 856783 - DNA, 120 bp, Artificial Sequence
  ENSG00000287671_9 (sequence is synthesized)
aggttttaatctacggtaattttcgcccacctgtggggctcccctggtgccccagctgtgatggggtaactgaactgccaccagggccaagctgtcagtggcccaggatctggcgcttgg

SEQ ID NO: 856784 - DNA, 120 bp, Artificial Sequence
  ENSG00000287671_10 (sequence is synthesized)
aagagttctgagaagcacccctggatcaaatgaggagaaacagacttcatccatacctattcccattgtatttaaagaagtgaatattctcagggatttccacagttttaaaagtgtctt

SEQ ID NO: 856785 - DNA, 120 bp, Artificial Sequence
  ENSG00000287671_11 (sequence is synthesized)
tcaattaaaacatttaaaataaaataaggttgaggtaacaaccaagttacacttcttccagcagcacccagacagcgagagccctcagattttagaattttagaagagaagattgtggcc

SEQ ID NO: 856786 - DNA, 120 bp, Artificial Sequence
  ENSG00000287671_12 (sequence is synthesized)
atgtctggaattcaaagaagaaccagtgagaagagctagatagaactgatggatgctgaaacatctaatattaaaatagaagggcaaccctaaatgataatataaaattacaatattaat

SEQ ID NO: 856787 - DNA, 120 bp, Artificial Sequence
  ENSG00000287671_13 (sequence is synthesized)
ggtagagtaattaaggaagccattaatgttgaattatgtatgtgtatgttaaacctataaattaaaatatcatgaacattataccatctgtgctggtttcagtaatgctgttataaaata

SEQ ID NO: 856788 - DNA, 120 bp, Artificial Sequence
  ENSG00000287671_14 (sequence is synthesized)
tgctgggattacaggtgtagccactgtgcccagcctgtggcaatttcttaaaataagacaatgatgaaatttgccacattgatcgacccttcctttcactaaagatttctctgtagcatg

SEQ ID NO: 856789 - DNA, 120 bp, Artificial Sequence
  ENSG00000287671_15 (sequence is synthesized)
cgatgctgtttgatagcatttgacccaaagaagaacttctttcaaaatttgagtcaatcctcttaaatcctgctgctgctttatcaacaaagtttatgtaatattccaaatcctttgttg

SEQ ID NO: 856790 - DNA, 120 bp, Artificial Sequence
  ENSG00000287671_16 (sequence is synthesized)
tcatttcaaaatgttcacagcatcttcagcagaagcagattctatcacaagaaaccactgcctttgctcatccatcagaagcaactcttcatcagttaatcatgagattgcagcaattca

SEQ ID NO: 856791 - DNA, 120 bp, Artificial Sequence
  ENSG00000287671_17 (sequence is synthesized)
gtcttatcttcaggctctgcttttaattctaagttctcttgcaatttccactacatcagaagtaacctccactgaagtcttgaacccttcaaagtcatccatgcgggatggaatccactt

SEQ ID NO: 856792 - DNA, 120 bp, Artificial Sequence
  ENSG00000287671_18 (sequence is synthesized)
cttccaaactcctgttaatgttgacattttgaccttcttccatgaatcatgaatgtttttaacaaaatctagaacagagactcctttccagtaggttttcaatttactttgcctggatcc

SEQ ID NO: 856793 - DNA, 120 bp, Artificial Sequence
  ENSG00000287671_19 (sequence is synthesized)
attagaggaatcactatctatagcagctatagccttatgaaatatatttcttaaatgataaggcctgaaaatctaaaactaccccttgatccacgggctgcagaatggatgtgtgttagc

SEQ ID NO: 856794 - DNA, 120 bp, Artificial Sequence
  ENSG00000287671_20 (sequence is synthesized)
aggcatgaaaacaacattaatctccttctatatctccatcagagcttctgagtgactacgtgcattgtcaataagcagcaatattttgaaaagaatcttttttttctgagcaataggtct

SEQ ID NO: 856795 - DNA, 120 bp, Artificial Sequence
  ENSG00000287671_21 (sequence is synthesized)
caatcacaggcttaaagtgttcagtaaaccatactgtaaacagatgagctgtcatccaggccctgtcgcattcataaagcacaggcagagttaatttagcttaattcttaagggccctag

SEQ ID NO: 856796 - DNA, 83 bp, Artificial Sequence
  ENSG00000287671_22 (sequence is synthesized)
ttgtcctttgaaacttggaagccaggcattgacttgtcctttctagctatgaaagtcctaggtagcatcttgtttcaatagaa

SEQ ID NO: 856797 - DNA, 120 bp, Artificial Sequence
  ENSG00000287671_23 (sequence is synthesized)
tagctatgaaagtcctaggtagcatcttgtttcaatagaagactgtttcatctaaattgaaaatgtgttgttcagtgtagccacctttatcaatgatgttatctagatcttctggagaac

SEQ ID NO: 856798 - DNA, 120 bp, Artificial Sequence
  ENSG00000287671_24 (sequence is synthesized)
ttgctgcaacttctacattggcacttgctgctttacctggcacttttatgttatggagacagcttctttctttcagtctcatgaacaacctctgttagacttcaacttctcttctgcagc

SEQ ID NO: 856799 - DNA, 120 bp, Artificial Sequence
  ENSG00000287671_25 (sequence is synthesized)
ttcctcatctctcagggttcatggaattgaagagagttagggtcttgctctggatgaggctttgacccacagctggttccacacccctaaaactttctccagctcagcaataaggttgct

SEQ ID NO: 856800 - DNA, 120 bp, Artificial Sequence
  ENSG00000287671_26 (sequence is synthesized)
ttgctttcttatcattcttgtgttcactgagtagcacttctcatttctttcaaaaacttttttttttgcattcacaacttggctaaatgtttagcacaagaggtcaaacttttggcctat

SEQ ID NO: 856801 - DNA, 120 bp, Artificial Sequence
  ENSG00000287671_27 (sequence is synthesized)
cttggcttccaacatgccttcctcactaagcttaatcattcctagcttttgatttaaagtgagagctgtgtgactcttcctttcccctgatcgcttagaggccattgtagggttattaac

SEQ ID NO: 856802 - DNA, 120 bp, Artificial Sequence
  ENSG00000287671_28 (sequence is synthesized)
tggcctaatttcaatattgctgcatctcagggaatagggaggcctgaggagagggagagagatggggaatggcgattgatggagcagtcaacacacaacatttattgattaaatttgcca

SEQ ID NO: 856803 - DNA, 88 bp, Artificial Sequence
  ENSG00000287671_29 (sequence is synthesized)
ggagcagtcaacacacaacatttattgattaaatttgccatcttatatggacttggttcatgcctcaattacaataggaacatgaata

SEQ ID NO: 856804 - DNA, 120 bp, Artificial Sequence
  ENSG00000287671_30 (sequence is synthesized)
agtgtgacacagaggcaggaagtgagcacatgctgttggaaaaacaacgacagatttgcttgatgcatgattaccacaaaccttcaatttgtagaaagcacaatatctgcgttaactcct

SEQ ID NO: 856805 - DNA, 120 bp, Artificial Sequence
  ENSG00000287671_31 (sequence is synthesized)
gtttctctggaatagtctcgtaaacttcaggttctttgtcaatgagagactgcttggaggctaagcctgctctgaggggctgcagctaccctgcccctggcagtgtctttgactgcaagg

SEQ ID NO: 856806 - DNA, 120 bp, Artificial Sequence
  ENSG00000287671_32 (sequence is synthesized)
cgtggataaagccggagatttttcgatggagcagaggccagctgggtggttgcactgactcgtgataaccctggtggcagtgctggaggccggtgaggtggtgaagggcatggcgcttcg

SEQ ID NO: 856807 - DNA, 120 bp, Artificial Sequence
  ENSG00000287671_33 (sequence is synthesized)
gacatgggcccttcctacgtgcaggacctcctggggtgcagaggctaatttcatcttgtatggatgatgttcctcttcctccgtcaccagataccagattttatcttcagatctggctcc

SEQ ID NO: 856808 - DNA, 120 bp, Artificial Sequence
  ENSG00000287671_34 (sequence is synthesized)
cataagagtcatgtcatctgcgctgtttttgattttgttctgagcttcccactgtgccctatggctggtgtttccccagtccatggctgtgattacatctccgatacacaaattagctac

SEQ ID NO: 856809 - DNA, 120 bp, Artificial Sequence
  ENSG00000287671_35 (sequence is synthesized)
agcagccttgcttctgggggtgacctggaaatggagaggatgcttgaagtccttgctccccatgatgcagaagccccatggtcccgggccctgagggactgtctactgggtgatcgtggc

SEQ ID NO: 856810 - DNA, 120 bp, Artificial Sequence
  ENSG00000287671_36 (sequence is synthesized)
atggggacaggcttgcaggacaagaacactggtcataccaagagaacctgctctgaaaattgaattttccacaagcctagctgctgaaaaggcccgttgtaacctgaggaccagtttaag

SEQ ID NO: 856811 - DNA, 120 bp, Artificial Sequence
  ENSG00000287671_37 (sequence is synthesized)
ctcatattttctcaaacacactgccctgactcgaagactaaccttacctccagctgtcactcaccagtcagagctcgccagctcccagaagcttctccagagccaatgtgctttctttcc

SEQ ID NO: 856812 - DNA, 120 bp, Artificial Sequence
  ENSG00000287671_38 (sequence is synthesized)
aaacaatacctaacatttctctaataaaactctcaccttttttaaaaaaaaacttttattttaggtttgaaggtgcatgttcaggtttgttatcagtttacataggtgaactcgtgtcat

SEQ ID NO: 856813 - DNA, 120 bp, Artificial Sequence
  ENSG00000287671_39 (sequence is synthesized)
tcaggtttgttatcagtttacataggtgaactcgtgtcatgggcatttgttgtacagaattttttcatcacccaggtattaaacccagtacccactagttatcttttctgctcctctccc

SEQ ID NO: 856814 - DNA, 79 bp, Artificial Sequence
  ENSG00000287671_40 (sequence is synthesized)
tctgcctagtttgctaaggataatggcctcccactccatccatgttcctgaaaaagatgatctcattttttatggctgc

SEQ ID NO: 856815 - DNA, 120 bp, Artificial Sequence
  ENSG00000287671_41 (sequence is synthesized)
atggctgcatagtgttccatggtgtatatatgccacatgttctttatctaatctgtcattgatggtcatttaagttgattccatgtcttcgctattgtgaacagtgctgcaatgaatatt

SEQ ID NO: 856816 - DNA, 120 bp, Artificial Sequence
  ENSG00000287671_42 (sequence is synthesized)
tcgctattgtgaacagtgctgcaatgaatatttgtgtgcatgtgtttttaaagtacaatgatttatattcctctgggtatataaattccaaatgggattgctgagtcaaatggtagctct

SEQ ID NO: 856817 - DNA, 120 bp, Artificial Sequence
  ENSG00000287671_43 (sequence is synthesized)
aagcgttccctttcctccagcatctgtcattttgtgactttttaataataaccattctgacttgtgtgagaagatatctcattgtggttttgttttgcgtttctctaatgatcagtgata

SEQ ID NO: 856818 - DNA, 120 bp, Artificial Sequence
  ENSG00000287671_44 (sequence is synthesized)
ttgagcttttttttcatatgcttgttggccatatgtatgtcttcttttgaaaagtgtctcttcatgtcctttgcccagtttttaatggggttgtttttctcttgtaaatttctttaagtt

SEQ ID NO: 856819 - DNA, 88 bp, Artificial Sequence
  ENSG00000287671_45 (sequence is synthesized)
ttctgtttactttgttgatggcttcttttgctctgcagaggctcttaagtttaattagattccatctgtcaaattttgcttttgttgc

SEQ ID NO: 856820 - DNA, 75 bp, Artificial Sequence
  ENSG00000287671_46 (sequence is synthesized)
actttgttgatggcttcttttgctctgcagaggctcttaagtttaattagattccatctgtcaattttgtccgtt

SEQ ID NO: 856821 - DNA, 120 bp, Artificial Sequence
  ENSG00000287671_47 (sequence is synthesized)
tttttacagttttgggttttgcattttagtctttaatccagcagtccacaacctttttggcaccagggactgactctgtggaagacaatgttcccacagagagcagtaggcagggagatg

SEQ ID NO: 856822 - DNA, 120 bp, Artificial Sequence
  ENSG00000287671_48 (sequence is synthesized)
atcatcaggtattagttagattctcaaaaggagtgcacaacctagatccctcacatgtgcatttcacgatagggtttgcactcttatgagaatctaatgctgctgctgatctgatgggag

SEQ ID NO: 856823 - DNA, 120 bp, Artificial Sequence
  ENSG00000287671_49 (sequence is synthesized)
tctaatgctgctgctgatctgatgggaggtggagctcaggtggtaatgcttgcttaccagccactcacctcctgctgcacggcctggtccctaacaagccacagaatggtaccagtccat

SEQ ID NO: 856824 - DNA, 78 bp, Artificial Sequence
  ENSG00000287671_50 (sequence is synthesized)
ggcctggtccctaacaagccacagaatggtaccagtccattgcccaggggttggggacctctaaggggtccagtttca

SEQ ID NO: 856825 - DNA, 69 bp, Artificial Sequence
  ENSG00000287671_51 (sequence is synthesized)
cagctatcccagcaccatttattgaatagagaatcagtacgcggccttatttctgggttctctattctg

SEQ ID NO: 856826 - DNA, 70 bp, Artificial Sequence
  ENSG00000287671_52 (sequence is synthesized)
ttccattggtctatatgcctgtttttgtcccggtaccatgctgttttgattactgtagccctgtaatacg

SEQ ID NO: 856827 - DNA, 120 bp, Artificial Sequence
  ENSG00000287671_53 (sequence is synthesized)
gttccatatgaattttaaaataaaaactctcaactttctctttgttcttggaacacactgaagaccacccgatctgtgagtatgccccactttgccattcttgcctcctaaataatcagt

SEQ ID NO: 856828 - DNA, 120 bp, Artificial Sequence
  ENSG00000287671_54 (sequence is synthesized)
gttaagtttagagagtcatctctatattttatttgacttcagcaatgtaaactgtgagtcagagctgcagtggtggaggctgcaaccttggcagcgggaaggtcagttcacagggtttct

SEQ ID NO: 856829 - DNA, 120 bp, Artificial Sequence
  ENSG00000287671_55 (sequence is synthesized)
cggcatgctcctcctgtgtccccaccgtctataggtgccctccatcatacatgtgcccttggcttgtagactggcctgatctttccagaactatttttggtcatgcctcatgcatgagct

SEQ ID NO: 856830 - DNA, 120 bp, Artificial Sequence
  ENSG00000287671_56 (sequence is synthesized)
tgtgcctgagcacaatgatgtgaaaattaatttagtcatatcttgtccaaactaaaaacattgaaccattttaaaggaaagcagcttcccaatgttgccatatattgttttaaaataatt

SEQ ID NO: 856831 - DNA, 120 bp, Artificial Sequence
  ENSG00000287671_57 (sequence is synthesized)
gtaaaaagtagttgctcacgtaacagcactgggcctgccattgaccttgcacgagatgcctcacacacatctgagaggctgttactgtggacgcagtcctcagtgctgctgctgcatggg

SEQ ID NO: 856832 - DNA, 120 bp, Artificial Sequence
  ENSG00000287671_58 (sequence is synthesized)
accctgcttcagaggagctctgcaacagcaaaagtgccaagcagatcgaagaggacacagcaggaccatgtggggccctcctcccagtggactgtgcctctgtggtcacccctgtcgtcc

SEQ ID NO: 856833 - DNA, 120 bp, Artificial Sequence
  ENSG00000287671_59 (sequence is synthesized)
tatgttagactttgataaaatatgaaatttaaacaacattttaataaaatgctaagtttcccagtaatatttatatgaagttatttgagatactgtttgttcaacaaataatgtgacagt

SEQ ID NO: 856834 - DNA, 120 bp, Artificial Sequence
  ENSG00000287671_60 (sequence is synthesized)
caaataatgtgacagtgtctagtgttggcactgtttgattaagtggtggaaaaataaaacatttgcaaggaaatgggttatttcaagttatattttaatgtccttttatttccacataat

SEQ ID NO: 856835 - DNA, 64 bp, Artificial Sequence
  ENSG00000287671_61 (sequence is synthesized)
aaaatctttaaggatcgcttgagcccagaagttcacgactagcttgggcaacataatgagactc

SEQ ID NO: 856836 - DNA, 120 bp, Artificial Sequence
  ENSG00000259855_0 (sequence is synthesized)
gtgcattctgggtgtccacatatttgttgttgctttaggaagaggagctgggaggttggagtcgccacacatgttgaaagatgtggcaaaaaacaaacaaacaaaacacctcatagagag

SEQ ID NO: 856837 - DNA, 120 bp, Artificial Sequence
  ENSG00000259855_1 (sequence is synthesized)
aaatcctgactttgtgcacaagaaaagggagtgaagtgtgtggggtttttaaagtggtggtgggggggcattaggagatacccagaagctctcaagattccaaacagtctgcttttcttt

SEQ ID NO: 856838 - DNA, 120 bp, Artificial Sequence
  ENSG00000259855_2 (sequence is synthesized)
atctcaacctgccaatggagaaatatctcaaaaagtcaagaattgaagccattactcagagacagcatcctatggcatggtgatccaaaacaagtacacctctaccttttccctttcagc

SEQ ID NO: 856839 - DNA, 120 bp, Artificial Sequence
  ENSG00000259855_3 (sequence is synthesized)
cccaaaccccaaaacactggagaatattggggcaggcaaggcccgtgaataggtgagcagagctggaagaagagactcctgcccctggtgggcctcaggctatttgtggaatgatgtttg

SEQ ID NO: 856840 - DNA, 120 bp, Artificial Sequence
  ENSG00000259854_0 (sequence is synthesized)
attagcagcgtgagaacagactaatacagtacactacaatttagacttctagtgactatacctggagccccctgttctccacctctctctcacaggtacacacacaaccatccacttatt

SEQ ID NO: 856841 - DNA, 120 bp, Artificial Sequence
  ENSG00000259854_1 (sequence is synthesized)
caggtacacacacaaccatccacttattgaagaggatgagcaagggcacagcctcaagcccactgcctgtgtttgaattctgagtggtttgctaactatgtagatttgggcaaatcactt

SEQ ID NO: 856842 - DNA, 120 bp, Artificial Sequence
  ENSG00000259854_2 (sequence is synthesized)
aaaactcgttttcttgtctgaaaaattgatagtaaaggtgcttaccttgcgggctattgcaaaggacaaaataaagtctagtatgtgtatttgttcgtcactgcatttccagagcctaga

SEQ ID NO: 856843 - DNA, 120 bp, Artificial Sequence
  ENSG00000259854_3 (sequence is synthesized)
acagggcctggtgtgcagtaggtgcacaatgcgtgtccgtggaaccagcagcaggccctctacctgcctgccagtgcaggcactggtcagtcaccatgacaaagctgatctgcctgcccc

SEQ ID NO: 856844 - DNA, 120 bp, Artificial Sequence
  ENSG00000259854_4 (sequence is synthesized)
tcacacacttgctccccaatcccttcacttggtgacagccttccccgacacccttgggcgcccggcccctgggacgcctgtggagctgttggggagaaggaaatctgaggcccccacatc

SEQ ID NO: 856845 - DNA, 120 bp, Artificial Sequence
  ENSG00000259854_5 (sequence is synthesized)
ctgacccaggaccagctggccttgcggattccagaactttctgaagcagccagccggccaccagccaggaagcggaaggtgcagaaatagaaacgcacagagaggcaattgctccttttg

SEQ ID NO: 856846 - DNA, 120 bp, Artificial Sequence
  ENSG00000259854_6 (sequence is synthesized)
ccctgcaaggaagggaagccgggggagaggggccaggagaggaagctgaggggcagaggagaggatggggaggccaaggacggcgggatggggttccagagcttgccggacctcggcccc

SEQ ID NO: 856847 - DNA, 120 bp, Artificial Sequence
  ENSG00000259854_7 (sequence is synthesized)
cgcctgctcccatgtccagtgccctgggtcagggctgtggggagcagctttcaacaccttcattttcctgacaagatcccaaaatgaggagctctgatttgctctgaatgcgacttgaag

SEQ ID NO: 856848 - DNA, 120 bp, Artificial Sequence
  ENSG00000259854_8 (sequence is synthesized)
ccaggccccggggaaagtatttgtggcaactttcaagggttgatgctgtggctggcagcagaggtggggggcaggaggggggtgctcacaatggtcgttggctgactgactgactgaatg

SEQ ID NO: 856849 - DNA, 120 bp, Artificial Sequence
  ENSG00000259854_9 (sequence is synthesized)
aatgaatgaatgagtgagtgagttgtggccagccctataccccagcagagccactgggcttgaggacaggaccctgcctgctggccacgtacctagacagccacagacagaaaacacgct

SEQ ID NO: 856850 - DNA, 120 bp, Artificial Sequence
  ENSG00000259854_10 (sequence is synthesized)
aatgagatctggccccagctcagctctgctgcatcccaggtcatccgaggatgtcactggccttctcagcctcacaccccttcctcccagtctgggagtatagcaggaggccccccaaaa

SEQ ID NO: 856851 - DNA, 120 bp, Artificial Sequence
  ENSG00000259854_11 (sequence is synthesized)
gtgtcctctagtccagactcccccactgcagccagcctacattctagagctgacatgggccaagaccaggaaggaagggccaccttccctgaaggacactgactcctcaacccctgtgct

SEQ ID NO: 856852 - DNA, 120 bp, Artificial Sequence
  ENSG00000259854_12 (sequence is synthesized)
cagccgaccttgcgaagttggaaacacactgccctcctaggctgagctgagcccttcccagctcgcagcccagcgggtccctgaggtcccatagagggggctggcagtggcttcttccag

SEQ ID NO: 856853 - DNA, 120 bp, Artificial Sequence
  ENSG00000259854_13 (sequence is synthesized)
gcagggccccaatgcccaccacccaccttggaaggtctggctggaggggtctctgaggacagggaccatgacaaggttccccttgcctcccccatgctatggccctggccctcctgcaga

SEQ ID NO: 856854 - DNA, 120 bp, Artificial Sequence
  ENSG00000259854_14 (sequence is synthesized)
gcccacggtcctggcaggggccacacaggatccctgcacccgtggcccaaccacaggctcggccaccatgcacacggcacaagcatctgctccctggccttcctgacaggcagcgggcgc

SEQ ID NO: 856855 - DNA, 120 bp, Artificial Sequence
  ENSG00000259854_15 (sequence is synthesized)
cctggcactggcgggcgggcaggcggcgtgtgcaggttggggccgcccaggggcaggagtgcaggcctgcagttgacaaggcctggtttcctgctctcactctggggaggaagaggaaga

SEQ ID NO: 856856 - DNA, 120 bp, Artificial Sequence
  ENSG00000259854_16 (sequence is synthesized)
tgacaagcaaaccagtgcttgtcaaggagtcatctaaacacgcactcagaggccacttccaaagaccgccctgaggcagtccagggtccatcgccgaccaccctccccaaaaaagaatga

SEQ ID NO: 856857 - DNA, 120 bp, Artificial Sequence
  ENSG00000259854_17 (sequence is synthesized)
catcagccaggtgacagcagcaggcaggtacagatggggtcctctagggatggcagattgccagggagcctggtcacccttccctaagggtcaactcagtttctcagccatggaccaagg

SEQ ID NO: 856858 - DNA, 120 bp, Artificial Sequence
  ENSG00000259854_18 (sequence is synthesized)
tgcccctttgtcctgtgaactttgagaagcagagggcccttctctttggagtctgagagaagcccaggagaagaaggaatgaaaccctgcacatctcatcttcttaaaatgcagattcag

SEQ ID NO: 856859 - DNA, 120 bp, Artificial Sequence
  ENSG00000259854_19 (sequence is synthesized)
gcctgtttttccaagtccatcaccaaacacaaggtctttccaaattaggtgctgagctgagctcatattcccaaaatgcacactcccctccttttttttttttttttgcttgggaatgct

SEQ ID NO: 856860 - DNA, 120 bp, Artificial Sequence
  ENSG00000287676_0 (sequence is synthesized)
caatggcaattcctggaggcaccaggagttatgagcagtcaacactctttctttgctcctgagaaaattgagtgccctctttggtcctgaaagcagctctgggcagcactccacagcatc

SEQ ID NO: 856861 - DNA, 120 bp, Artificial Sequence
  ENSG00000287676_1 (sequence is synthesized)
cactacagacttagtgagttcaccctggctctcccacttacagattgcagctttcagttgcgaccttaggaatgagctcacaattggaagcaaatctgtcttctgtttctactgttaaag

SEQ ID NO: 856862 - DNA, 120 bp, Artificial Sequence
  ENSG00000287676_2 (sequence is synthesized)
ttaaatatttcaataagactgattgaattcttagtaaatagaatacttcctctgttcagttttgctctgttgaatgctggaagtttggtgagtctgacccactacacgtatctcagatga

SEQ ID NO: 856863 - DNA, 120 bp, Artificial Sequence
  ENSG00000287676_3 (sequence is synthesized)
tttaaaaacaaaggcaggccatttggttttgatgctgtgtctgttttgggcagtgtctcagattgaaatcctgtgaataaaaagtggttctgaaaagttattcttagccacttaggtata

SEQ ID NO: 856864 - DNA, 120 bp, Artificial Sequence
  ENSG00000287676_4 (sequence is synthesized)
ggctcttagtcttgagaaatgggtaaggcttctgaatgtctgatttagtcatacaaatcatcatttggcatatctcttttgtggatttttattggtattgattcaaaaacattttcaaaa

SEQ ID NO: 856865 - DNA, 120 bp, Artificial Sequence
  ENSG00000240006_0 (sequence is synthesized)
gaacgccggcccgctctgtgccaccctctccccaagcccccgggaggaggcctcgccaccatgcccagagcagcacagtgagtcagagatgaagctcttgtcccacctgccccaaccctc

SEQ ID NO: 856866 - DNA, 120 bp, Artificial Sequence
  ENSG00000240006_1 (sequence is synthesized)
cgagagagtggatcaggcttcaggatagcccagcactgaggacatctaaaacagtcttcatttatttatttattgttcatagtgtccaaaagttggaattaaagtgaatggctgaatcaa

SEQ ID NO: 856867 - DNA, 120 bp, Artificial Sequence
  ENSG00000265688_0 (sequence is synthesized)
atgcgcaacccgcgcgccgtcgtccctggcaacactggctgctctagcgcctggcggggtctcacgggcgggcctgggcgcacggccaaagcgccaggtctccacccccagcccccggcg

SEQ ID NO: 856868 - DNA, 120 bp, Artificial Sequence
  ENSG00000265688_1 (sequence is synthesized)
tcctgcagccggagcctgcctcgcctggctcctgcgcccgccgtccagggcccctgtccaagctcgcggacgccggcggcgttttccagctcgagtgctcagcctagggcaggctctgcg

SEQ ID NO: 856869 - DNA, 120 bp, Artificial Sequence
  ENSG00000265688_2 (sequence is synthesized)
tagggcaggctctgcgtgcgccccctcgagtgccggcctgggccctgccaggcagaggcgctcttgcgtcaggacggcgccgccggggccccgcgattccaactcgggggtcccggagcg

SEQ ID NO: 856870 - DNA, 120 bp, Artificial Sequence
  ENSG00000265688_3 (sequence is synthesized)
gcctggcagctcccagcagcgaggggcgatccccgcccgcgcagcagaccccgagctgcccaggcccttcctgcgccacgtgtacccagagctccgcccgggggagacttcgctgcttgt

SEQ ID NO: 856871 - DNA, 120 bp, Artificial Sequence
  ENSG00000265688_4 (sequence is synthesized)
tggagatgcccagcggtagggggcgaggactcgggaggaagataaacgggggatcccgtgtctggactttctcctccaccctcttcccttcgcagctgtgaatcctgggaggggaagggt

SEQ ID NO: 856872 - DNA, 120 bp, Artificial Sequence
  ENSG00000265688_5 (sequence is synthesized)
ggccgccccgccagcagagagctgaaggtgttccgtggtcagtgagggctggcactggctctgcacgaagatctcctcacctccccagcggctcctggccagctccccacggagagccca

SEQ ID NO: 856873 - DNA, 120 bp, Artificial Sequence
  ENSG00000265688_6 (sequence is synthesized)
ggacacttgtccctggacacagtggtgcagccatgcttgggccaaaccatgaggccaccagaaccgcgaaaggctactgtactgagagggatactgcgagagaggcccacaggtttccaa

SEQ ID NO: 856874 - DNA, 120 bp, Artificial Sequence
  ENSG00000265688_7 (sequence is synthesized)
gctcacttcccgtcacagctggatgcctcctcccgcaggcacctcccgggcatcctcccgccccaggctgcaccttctgtgggactggcccccgcaggcacctcccgggcaccctcccgc

SEQ ID NO: 856875 - DNA, 120 bp, Artificial Sequence
  ENSG00000265688_8 (sequence is synthesized)
cccaggctgcagcttctgtgggactgagccccgcaggcacctccccggcatcctcccgccccaggctgcaccttctgtgggactgagccccgcaggcacttccccggcatcctcccgccc

SEQ ID NO: 856876 - DNA, 120 bp, Artificial Sequence
  ENSG00000265688_9 (sequence is synthesized)
caggctgcagcttctgtgggactgaccttaagaccccatcggttcctcctgagagcagcagatctcagccagatgctgccgggagggaggtgctagcgtccacacccagacgggtccagt

SEQ ID NO: 856877 - DNA, 120 bp, Artificial Sequence
  ENSG00000265688_10 (sequence is synthesized)
ccagccctgctctccctggtctccaggcagggccctcccagggtggacattgcccatctctgcctggccaggggctgctgacccactggttccagagtctgagcctgtcctgcacaagta

SEQ ID NO: 856878 - DNA, 120 bp, Artificial Sequence
  ENSG00000265688_11 (sequence is synthesized)
ccatggacaggggtcagccgggcactgaagaggcgtggcagaattgggcagggcaagggccccagctggcaagctggagtcagggcaattccaaccaagaaactgcggcaggccgggtgc

SEQ ID NO: 856879 - DNA, 120 bp, Artificial Sequence
  ENSG00000265688_12 (sequence is synthesized)
aagcctataatcccagcactttgggaggcagtgggagaatcgcttgagcccgggagtttgagaccagcattggtaacatagagaccctatcgctacaagaaaaaaaaaaaaaaaaagctg

SEQ ID NO: 856880 - DNA, 120 bp, Artificial Sequence
  ENSG00000265688_13 (sequence is synthesized)
aaaaaaaaaaaagctgggcatggtggtgcacacctgttgtcccagctattcaggaggctgacgtgggaggattgcttgtgcccaggggttgcaggctgcagtgagctgtgatcataccac

SEQ ID NO: 856881 - DNA, 120 bp, Artificial Sequence
  ENSG00000265688_14 (sequence is synthesized)
agcctgggcgacagagaacctctctaaaaaaaaaggaaaatgaaaaataaatgggggcagaagctgagccaagcagaggcgggcagctcctcctccagggcccacctggcctgctgggga

SEQ ID NO: 856882 - DNA, 120 bp, Artificial Sequence
  ENSG00000249722_0 (sequence is synthesized)
cagtcccagcttgttgggctacttcatgagacactgcatggatgtgcccgacacagcagttaccatcactgaccacagcaacttgctcttcccgggctagagcttttgcatccctctttc

SEQ ID NO: 856883 - DNA, 120 bp, Artificial Sequence
  ENSG00000249722_1 (sequence is synthesized)
ctgaagaggccagctgaagatcggaacttaagagaagtcagaggctcctgctgaaaaaggccaccgtgtggtgtgtgtttgctggtgggagattaggaggatggtgcacagaaccatcaa

SEQ ID NO: 856884 - DNA, 120 bp, Artificial Sequence
  ENSG00000249722_2 (sequence is synthesized)
gccaaaggacaagaggaagatggggttccctgcgaaatccctttcctttccaagaaggcaataaaatcctgtagtggttcattttaaccatcaggagcctctgccacataatgacatcca

SEQ ID NO: 856885 - DNA, 120 bp, Artificial Sequence
  ENSG00000249722_3 (sequence is synthesized)
tgtctgcataaggataagatacggtgggtcccagggattgaggggatggtgttcatttcaaaatcttgcttcttcttgttctgataccatgtgtacaatacagaaaaccaatcatagtgt

SEQ ID NO: 856886 - DNA, 120 bp, Artificial Sequence
  ENSG00000249727_0 (sequence is synthesized)
ctcatatgcgccaagaacctcaaatttaaaattgggatttttttttacttaaaaaaaaaatctgactaccctcaaatatacaaatgattctagtcttccctgatttctaaaaggtcctga

SEQ ID NO: 856887 - DNA, 120 bp, Artificial Sequence
  ENSG00000249727_1 (sequence is synthesized)
taccaaacatgaacctgcattttcatccatctttgcaaccagtattgatagagtggctactgtgacttgcactaagctgggtgggcatgctttaggcacccagggaagcaaggcatggtc

SEQ ID NO: 856888 - DNA, 120 bp, Artificial Sequence
  ENSG00000249727_2 (sequence is synthesized)
tctcacctcaaggagcccacccacttccaggagaaacaggtctgtccacttgaaactgccctggtgtgatgcatggcttgctggaggcatggagaagtgggaaaattctaaggtgattcg

SEQ ID NO: 856889 - DNA, 120 bp, Artificial Sequence
  ENSG00000249727_3 (sequence is synthesized)
ctcagagaatggttcatataaggaagaataagtaccccgatatgggtggataatttctcacaagagacatgacttgagcaaagatacacaaacataaaaagtagctttgccacttcattc

SEQ ID NO: 856890 - DNA, 120 bp, Artificial Sequence
  ENSG00000249727_4 (sequence is synthesized)
ttgggcccacgctgaagaaccagtctttttctgaaacattgctaagaatgtggcagaaggaagagatatggcagaacttcatcatggccctgacaaactctgctctgaaaaccttcatga

SEQ ID NO: 856891 - DNA, 120 bp, Artificial Sequence
  ENSG00000249727_5 (sequence is synthesized)
tggtgctgaaaactgactccccctgagagttccttggctaaatgagtcacttggccaagcctgacatcctcagagtgggaaaacaatcttcccaaaataagggcaccataaattacatag

SEQ ID NO: 856892 - DNA, 120 bp, Artificial Sequence
  ENSG00000249727_6 (sequence is synthesized)
ccaaacctcatgtcagtagaatggcaggtaaaatcctcccacaagaaggagcagcatatatttggaaataaaaaatgcagtccactacatctcaatcattacagcctcagaggctgaaaa

SEQ ID NO: 856893 - DNA, 120 bp, Artificial Sequence
  ENSG00000249725_0 (sequence is synthesized)
gcccacctagcaatctcagacattgttcatcacattgtccctatcagagatggcatcgcacaaaattcagagtttctgggaacatgttaaacctgtcacagcaatggttctggctacagc

SEQ ID NO: 856894 - DNA, 120 bp, Artificial Sequence
  ENSG00000249725_1 (sequence is synthesized)
gaaaaatgttttgaaagcctcaaaaaaagtttgtttgctgtcattaaaccagtggttctcaagcctagctggatggctgaagagcaggaagaagaggagaggttggtcttgctgtcttag

SEQ ID NO: 856895 - DNA, 120 bp, Artificial Sequence
  ENSG00000249725_2 (sequence is synthesized)
gggtggcagaagcagaagataatccatgcataaatggacctgcacagtccaaagctgtgttcttcaagggtcaactgtatatttatttaaatttacataaagagatcatattctacataa

SEQ ID NO: 856896 - DNA, 120 bp, Artificial Sequence
  ENSG00000275223_0 (sequence is synthesized)
ggcctctgaggtgctacatcccaaggaggccatgggaggctttaattcggggtgagggggtggccggtgggttgagtgccctttccatgttcctgaacgccctggtgttgccaggtcctt

SEQ ID NO: 856897 - DNA, 120 bp, Artificial Sequence
  ENSG00000275223_1 (sequence is synthesized)
actgggctgaggcctggctacaaggcaactcagatggcaccagttcagggtgggcattcccatctgggactccaggcagggtcttccctgcggtttctccctggcagcccctgtgggaga

SEQ ID NO: 856898 - DNA, 120 bp, Artificial Sequence
  ENSG00000275223_2 (sequence is synthesized)
cagtttcttccaccagcctggctccctgggccacctgcacagaggtccctgctggcaccctggccagtccagtgccaggccgtcctcccgccaccccgcttcccagatctctgggagctc

SEQ ID NO: 856899 - DNA, 120 bp, Artificial Sequence
  ENSG00000275223_3 (sequence is synthesized)
ccgcttcccagatctctgggagctcctagaaagtgctgccaccatctgaaccacatggggctctgagcaggcttgaggcttgttcgggtgtagttgtgtgtgcctgtaattccagctact

SEQ ID NO: 856900 - DNA, 120 bp, Artificial Sequence
  ENSG00000275223_4 (sequence is synthesized)
caggaggcggaggttgcagtgagccaaggactacaggcgcacactaccacgcccagctaatttttgtagagatgggggtttcgccatgttgcccaggctgggcagtgtgtcttgttagag

SEQ ID NO: 856901 - DNA, 120 bp, Artificial Sequence
  ENSG00000275223_5 (sequence is synthesized)
agagaagacagctgaggaggacatcgccctgctttacgtcctgtgttgtaaaggcttcttttgtcctccacaaaaactgtagcaacaaatcctcaaaactaaaaaaacttccctctgcca

SEQ ID NO: 856902 - DNA, 120 bp, Artificial Sequence
  ENSG00000275226_0 (sequence is synthesized)
gttagtttggaaagaatagaagaaggaatagatgttcaccaagaccagtagttctcaaacaggtcgagttgtttccttgatgaatcccaatgtgtctaccgagatgttccagttgaagat

SEQ ID NO: 856903 - DNA, 120 bp, Artificial Sequence
  ENSG00000275226_1 (sequence is synthesized)
ctagtaattaaaggtctctttacaccagagctaagatcacgaataaaggagcagctttgggtttgcagagattacacaggaatgtatgtttctggcaggtcatttgccatctttgcaagg

SEQ ID NO: 856904 - DNA, 120 bp, Artificial Sequence
  ENSG00000275226_2 (sequence is synthesized)
agtgtacatggatgtcatcattacaaaggatgtgagaggaaaaatttattcaagaagcacttattaaaatttcttccactgtgctggatccttaatttacatacttgtttgtagattctg

SEQ ID NO: 856905 - DNA, 120 bp, Artificial Sequence
  ENSG00000275226_3 (sequence is synthesized)
tttctctttaagtattttttaaaaattcatatggaatatttcttataatcccaagtttattgttgttatggtcaaccactaattacttgaagaatgtaatataaaattgtttatcgttta

SEQ ID NO: 856906 - DNA, 120 bp, Artificial Sequence
  ENSG00000275226_4 (sequence is synthesized)
tgaagtctcttagttaccttttgatacagtttggctgtgtactcacccaagtctcatcttgaattgtagctctcataatccccacgtgttgtgggagggacctgatgggaggtaattgaa

SEQ ID NO: 856907 - DNA, 70 bp, Artificial Sequence
  ENSG00000275226_5 (sequence is synthesized)
ctctcttgcttgctgccatgtaaatgtgcctttgttcctccttcaccttctgggatgattatggggcctc

SEQ ID NO: 856908 - DNA, 120 bp, Artificial Sequence
  ENSG00000275226_6 (sequence is synthesized)
tactctcttgcttgctgccatgtaaatgtgcctttgttcctccttcaccttctgggatgattatggggcctccttagccatggggactgtgccattaaacctctttttctttataaatta

SEQ ID NO: 856909 - DNA, 120 bp, Artificial Sequence
  ENSG00000275226_7 (sequence is synthesized)
aaaatggattaatacagtaaattggtactggtagagtggggtactgctattaagatatctgaaaatgtggaagcaacattggaactgggtaacaggcagaggttagaacaatttggaggg

SEQ ID NO: 856910 - DNA, 120 bp, Artificial Sequence
  ENSG00000275226_8 (sequence is synthesized)
tggaacttcctagagacttgttgaattgctttcactataatgctgatagtaatatggacaataaaatccaggctaaggtggtctcagattgagatgaggaatttgttggaaactggagta

SEQ ID NO: 856911 - DNA, 84 bp, Artificial Sequence
  ENSG00000275226_9 (sequence is synthesized)
gtaatatggacaataaaatccaggctaaggtggtctcagattgagatgaggaatttgttggatgtactgcattttacccccacc

SEQ ID NO: 856912 - DNA, 120 bp, Artificial Sequence
  ENSG00000275226_10 (sequence is synthesized)
gaaatttctaagcagcaaagtgttcaagaagtaacagtgcataaaagtttggaaaatatgcagcttgacaatgtggtagaacaaaaagcccattttctggggagaaattcaagccactgc

SEQ ID NO: 856913 - DNA, 120 bp, Artificial Sequence
  ENSG00000275226_11 (sequence is synthesized)
ggagaaattcaagccactgcagaaatttgcacaagtaatgaggaaccaaagggtaatccccaagacaatgggtaaaatgtctccagggcatatgagagaccttcacagcagcccctccca

SEQ ID NO: 856914 - DNA, 86 bp, Artificial Sequence
  ENSG00000275226_12 (sequence is synthesized)
catatgtcagggacctgggaggaaaaaatggttttgtgggcctggttcagggcttccttcctgtgtgcagcctagggacttggtgc

SEQ ID NO: 856915 - DNA, 120 bp, Artificial Sequence
  ENSG00000275226_13 (sequence is synthesized)
ttctgtgagcgcacagaagttgagaactgagttttgggaacctctgcctagttttcagaggatgtatggaaatacctggatgtcgaggcagaggtgtactgcaggggtggagccctcatg

SEQ ID NO: 856916 - DNA, 120 bp, Artificial Sequence
  ENSG00000275226_14 (sequence is synthesized)
ctgctagggcagtgcagaagggaaatgtagggtgggagcctccacacagtgtccctattggggtacttccttgtggagctgtgagaagaaggccaccatcctccagatcccggaatggta

SEQ ID NO: 856917 - DNA, 120 bp, Artificial Sequence
  ENSG00000275226_15 (sequence is synthesized)
catcctccagatcccggaatggtagatccattgaaagcttgaactgtgcacctaaagaagccacagacactcaatgccagcccaggaaagcggccaggagggaggctgtaccctgcaaag

SEQ ID NO: 856918 - DNA, 71 bp, Artificial Sequence
  ENSG00000275226_16 (sequence is synthesized)
taccctgcaaagccacaggggcagagctgtccgaggctgtgggagcccacctcctgtatcagcatgacctg

SEQ ID NO: 856919 - DNA, 120 bp, Artificial Sequence
  ENSG00000275226_17 (sequence is synthesized)
gggtcctgcagcccctttgttttaattaatttctcctgtttagaatggctgtatttacccaatgcctgtacccctattttatctaggaagtaactaacttgctcttgatttaacaggctc

SEQ ID NO: 856920 - DNA, 79 bp, Artificial Sequence
  ENSG00000275226_18 (sequence is synthesized)
acaggctcatatagacttttgagtaaatgctgaaatgagataacactttgggggactgttgggaaggcatggttggttt

SEQ ID NO: 856921 - DNA, 76 bp, Artificial Sequence
  ENSG00000275226_19 (sequence is synthesized)
tggtttggttcccatgtatcctaggagggacccgatgggaggtaattgaatcataggagtgggttttcccctcctg

SEQ ID NO: 856922 - DNA, 120 bp, Artificial Sequence
  ENSG00000275226_20 (sequence is synthesized)
gggaggtaattgaatcataggagtgggttttcccctcctgtcctcatgatactgaataagtctcatgagacctgatggttttataaagagtagttcctctaaacatgttctcttccctgc

SEQ ID NO: 856923 - DNA, 120 bp, Artificial Sequence
  ENSG00000275226_21 (sequence is synthesized)
ctctaaacatgttctcttccctgccaccatgtaagatgtgcctttgctactccttcaccttctgtgataattttgaggcctccctagccatggggactgtgagtccattaaacctctttt

SEQ ID NO: 856924 - DNA, 120 bp, Artificial Sequence
  ENSG00000275226_22 (sequence is synthesized)
gtatttcttcataggagtaaaaaaatagactaatacactctttatctttcagacttttctatatttttataactttttgtgagacttcataaaagtttagaaaatgcattagtgaattgt

SEQ ID NO: 856925 - DNA, 120 bp, Artificial Sequence
  ENSG00000275226_23 (sequence is synthesized)
gttattgctaaaagtgaaagtcatctagcattcttattcacatatggcctagtttttcaagagtttttcagaacttaggttggctagaaaatcaccagtcttttctcattatattgtaga

SEQ ID NO: 856926 - DNA, 120 bp, Artificial Sequence
  ENSG00000275226_24 (sequence is synthesized)
aatttcatcagtgagtattatcagatgttgtataagaccttacaaagaccccacagaagtaaaggcaataatcctatatgtaaaaaaacaaattgataacaaaaacaaaaaacaaaacaa

SEQ ID NO: 856927 - DNA, 120 bp, Artificial Sequence
  ENSG00000275226_25 (sequence is synthesized)
gacaaactaaaaagtactgaaacttcaagaaatgtttttccaataattgaaaataaatagctgtttggatgaatataaaaataaatctcaataaattaaattcagctgccatttttgaat

SEQ ID NO: 856928 - DNA, 120 bp, Artificial Sequence
  ENSG00000275226_26 (sequence is synthesized)
aattaattggtatatgttggattatgtgtgcatattgtgtaacaatgatactggctgtaagatagctcatattgggttctttttctgctacctataatagatttgtgagtgtcttacaac

SEQ ID NO: 856929 - DNA, 120 bp, Artificial Sequence
  ENSG00000267905_0 (sequence is synthesized)
cttgggctgaaccgacagctgggggaccccacagcaccgtgacttgcccaaagcctggcagagcagagcagcccctgccgcctgcacgccggacgccagggcccacttaccatacacacc

SEQ ID NO: 856930 - DNA, 120 bp, Artificial Sequence
  ENSG00000267905_1 (sequence is synthesized)
ttccacacccagcccctgggaagagctctttgagtctgaagagaaggcagaggagaagttggtttgctgaagtccagaagaggctctgagggagagatggggttttgccatgttggccag

SEQ ID NO: 856931 - DNA, 120 bp, Artificial Sequence
  ENSG00000267905_2 (sequence is synthesized)
gggaagagctctttgagtctgaagagaaggcagaggagaagttggtttgctgaagtccagaagaggctctgagggacactccctcatggaatccagccgccacactgcgaggatcagcag

SEQ ID NO: 856932 - DNA, 120 bp, Artificial Sequence
  ENSG00000275228_0 (sequence is synthesized)
tcttatatggctttttctttattttaaatgaatttggcattagagggtataatgtgacacaatattttttaaaaagaaaaaaactcgtacttggagctggaagatatggatgcatatcct

SEQ ID NO: 856933 - DNA, 120 bp, Artificial Sequence
  ENSG00000275228_1 (sequence is synthesized)
agctctttaggagccatatgacattaacaaatcccttaatatcagtggtgtggctgtcagatggatgtgccggccatctgacttcttatctaacatcacattcccttcctaccaacatca

SEQ ID NO: 856934 - DNA, 120 bp, Artificial Sequence
  ENSG00000275228_2 (sequence is synthesized)
tataaggaataaatttactttactttgaatgtttctgtcttgtatttccaactaaataaagatatcctcaagagctatagtctttgaacttctatgtcccatgctgcacctaacaatatg

SEQ ID NO: 856935 - DNA, 120 bp, Artificial Sequence
  ENSG00000275228_3 (sequence is synthesized)
cttcattatacacagcgggcatttaattgagcctgcttacatcattcctctctggtgaggagagtttctctagattcagaaagaaacttccagaagatcaggagaaaggagcagagtgaa

SEQ ID NO: 856936 - DNA, 120 bp, Artificial Sequence
  ENSG00000261191_0 (sequence is synthesized)
gagcatcgtaaacattatttcaagaggtttccgaaaaggatctctaaaattatcagagaattcacaattcaagagtacctaacgaagaagaagggaaattaatccttcatatggctcaag

SEQ ID NO: 856937 - DNA, 120 bp, Artificial Sequence
  ENSG00000261191_1 (sequence is synthesized)
tgttcacaagaaatgtggttgccagctaaagaggagaggagaaagattctgtgcaactgaaaggtctaccttaaacatcacagtccaacattcaacagtaccacagtgcatctacaatgt

SEQ ID NO: 856938 - DNA, 120 bp, Artificial Sequence
  ENSG00000261191_2 (sequence is synthesized)
tccaagtctagaacagcaacagccatgctgcagcaatgtggaaacagacctgaagaaaaaactagcactgtgaggatggcagacggaagatggaaagagcttgggtccttgaggacactg

SEQ ID NO: 856939 - DNA, 120 bp, Artificial Sequence
  ENSG00000261191_3 (sequence is synthesized)
tggaactgctgaagagaccatggaattgagctgaccagcctccattcttattctgtgtaattatacatgtctatttttttaaatctccaaaccaaagaaataaaactcttcccaggcttc

SEQ ID NO: 856940 - DNA, 120 bp, Artificial Sequence
  ENSG00000236078_0 (sequence is synthesized)
tggtcagctcttcactgactccctccactgcagatctggaagtgtgggtgctgtactcagacaggaatgtcatcaagccgaagagcaccttctactggagttcagatgaggtcaggaagt

SEQ ID NO: 856941 - DNA, 120 bp, Artificial Sequence
  ENSG00000236078_1 (sequence is synthesized)
ggctaagaagagatccatgaagattaacattcagtgctcaatttctgaaggaaacagggagtgaaaggccgtggaagaaaacagggctgccacgaacatgctcttggctgtttgaaaaga

SEQ ID NO: 856942 - DNA, 120 bp, Artificial Sequence
  ENSG00000236078_2 (sequence is synthesized)
tccagcgcagcttgaacttcaaaaataactccattcactatggttgcagttgggcttggggaatttctcacaatcaaaagcagctgcttcatctcatttagccattaggctgagctccac

SEQ ID NO: 856943 - DNA, 120 bp, Artificial Sequence
  ENSG00000236078_3 (sequence is synthesized)
aggctcgctgcaggatcttagagcctacaaggccctgctaagagtagccgcgttttccagcatgcagtagatcagcgagtgtttacatttgtgtttggaatgctcatgagtcctttgggg

SEQ ID NO: 856944 - DNA, 120 bp, Artificial Sequence
  ENSG00000236078_4 (sequence is synthesized)
gaaagagagtgaagcacatgtgctccataggactgccacggccacccctctcattcacttttccattcagcgctgagactaagtttaactcatttttcttttgttgtgaaaagagaatgc

SEQ ID NO: 856945 - DNA, 120 bp, Artificial Sequence
  ENSG00000236078_5 (sequence is synthesized)
tgtgaaaagagaatgcacacaaaaattcaaatgttaccaaatcgatatcagcttcattcctgaagccagcgagcccacgagcccaccgggaagaacgaacaactccagacgtgccgcctt

SEQ ID NO: 856946 - DNA, 120 bp, Artificial Sequence
  ENSG00000236078_6 (sequence is synthesized)
tcattcttgaagtcagtgaaaccaagaatccaccaattccggacacactatcacccatgaagagtagttactgtaacattgtagcacactgcattactcaggtgtttgtggggttgctga

SEQ ID NO: 856947 - DNA, 120 bp, Artificial Sequence
  ENSG00000236078_7 (sequence is synthesized)
ggtgtttgtggggttgctgatgtgaacaaacctgcatggccagttgcataaaagtatagcacacacgattatgtacagcccataatacgtgatagtgataataaatgactgttactggtt

SEQ ID NO: 856948 - DNA, 120 bp, Artificial Sequence
  ENSG00000236078_8 (sequence is synthesized)
ccagtccatcctctctgaggttataacctctgattgtgccaggcatcattctagaatgtctgagcatatgcaaatgagtgtgcatgatgtacattatatatatatatattttagaaacag

SEQ ID NO: 856949 - DNA, 120 bp, Artificial Sequence
  ENSG00000236078_9 (sequence is synthesized)
gtgttaatcagctcaattagactcccttccttatcacacggacagagggctttctgtatcctggggtttcttgtcttggtgtaccggaagaattggatcatgggtgggcttggagaatga

SEQ ID NO: 856950 - DNA, 120 bp, Artificial Sequence
  ENSG00000236078_10 (sequence is synthesized)
gatgggggagccagaagggagatggtttttgcctgcagtcaggccacttggccgccccagctctcctctgactgctccagccaaactccgcctcattctgccagtcgatggccagcatgt

SEQ ID NO: 856951 - DNA, 120 bp, Artificial Sequence
  ENSG00000236078_11 (sequence is synthesized)
actccgcctcattctgccagtcgatggccagcatgtcggcatctgttgatgtgctcttctgctggcatgctccctcgacgttctctcaatatccggccgcctgtgtcttcttctgctgat

SEQ ID NO: 856952 - DNA, 120 bp, Artificial Sequence
  ENSG00000236078_12 (sequence is synthesized)
atggaatctggctgaggtggaggtgtgtgactttgaggactaggtccaaagaaggcattgtggtttccatcttgactgctctttcccttggatagctgactcttagggaagccacatgcc

SEQ ID NO: 856953 - DNA, 120 bp, Artificial Sequence
  ENSG00000236078_13 (sequence is synthesized)
acaccatgagcagctctgcggagagacccatgcagcaaggaaatgaggcttccagtcaagagctgcatgactgaatgaacttgttaccaaaacaccaggggtttggtccaggtccttctg

SEQ ID NO: 856954 - DNA, 120 bp, Artificial Sequence
  ENSG00000236078_14 (sequence is synthesized)
tcaccgcatggaaagctcatcactgagatgacaagtattgccaaggaaggatttaatcaggtgctgcaaccgaggagatgggagctcagtctcaaatccatcttgctgacctactaaaac

SEQ ID NO: 856955 - DNA, 120 bp, Artificial Sequence
  ENSG00000236078_15 (sequence is synthesized)
gagggatttgtatagcagggaagaaatgaaacaatgtgtaagaaaacagcaactagggaggggcacggaagcaatcatgatgaatgagggggcagcatctcattgtctgaatgcggtgat

SEQ ID NO: 856956 - DNA, 86 bp, Artificial Sequence
  ENSG00000236078_16 (sequence is synthesized)
caccatgcctgagccttccccctcctccgtggattcctgtgcagccggagcctccccgacgagcgccaccccctgctccatggcgc

SEQ ID NO: 856957 - DNA, 78 bp, Artificial Sequence
  ENSG00000236078_17 (sequence is synthesized)
gtgcagccggagcctccccgagcctaagggctgaagagtgcgggcgcaaggcaccgggactggcaggcagctccacct

SEQ ID NO: 856958 - DNA, 70 bp, Artificial Sequence
  ENSG00000236078_18 (sequence is synthesized)
agagaacctttgcgtggatactctgtatctaactaatctgatagggacgtggagaacctttatatctagc

SEQ ID NO: 856959 - DNA, 67 bp, Artificial Sequence
  ENSG00000236078_19 (sequence is synthesized)
aggctgccggagccagcagtggcaacccactggggtctccttccacactgtggaaacacactgctct

SEQ ID NO: 856960 - DNA, 120 bp, Artificial Sequence
  ENSG00000233008_0 (sequence is synthesized)
ggaaacatgtattttatcctgggctgaggccagctggggttggaaaggcagtctccaatgatttgacatttccctgatacctcctggaggaaatactcaggttcctagaggggagtgtgt

SEQ ID NO: 856961 - DNA, 120 bp, Artificial Sequence
  ENSG00000233008_1 (sequence is synthesized)
tctggtctgacagttcatgtctattttcaaggcaccattacctatggcaggtgatgaagtactctgtaagttttgacattgtgaaatgtggaatgattcaaaagggtcttgccctcatag

SEQ ID NO: 856962 - DNA, 120 bp, Artificial Sequence
  ENSG00000233008_2 (sequence is synthesized)
actgagaagactgtactccttgtgagtctttacaggtctctacttcatgtgtacacatgtatagacatagaaaaccatgcacatgcatgtacacatgctctctcacacacacagacacac

SEQ ID NO: 856963 - DNA, 120 bp, Artificial Sequence
  ENSG00000233008_3 (sequence is synthesized)
tgctgattttttaactttgtactttttaaaaaggcttttattttggtgctttgtaatagggataaaattttgaaaatactgtgctacgtattttattaccccttaaatcttattctcttg

SEQ ID NO: 856964 - DNA, 120 bp, Artificial Sequence
  ENSG00000233008_4 (sequence is synthesized)
aaactttttacctctaaggctgagcatgaatcatatgacgtctgggaaggtgtgggctgggggatgcaacacccagggcaaagaaatccaaactattgttgctatggatggaatgtttgt

SEQ ID NO: 856965 - DNA, 120 bp, Artificial Sequence
  ENSG00000233008_5 (sequence is synthesized)
gttcctccaaaattcattctattgaaactctgatccccagtgtgatgccctttggagatggggtttttggaaggtaattaggacatgagggtggaatcctcatgaaaggattagtgccct

SEQ ID NO: 856966 - DNA, 120 bp, Artificial Sequence
  ENSG00000233008_6 (sequence is synthesized)
cctagggagagctagaaaggagcctccttccattctatttctctgtctttgccatgtgagttacaatgagaagagagccatctgcaaactccaggaagaggccctcactaggaatcgaaa

SEQ ID NO: 856967 - DNA, 120 bp, Artificial Sequence
  ENSG00000233008_7 (sequence is synthesized)
tgctggctctttgatcttggactttacagcctccagaaccatgagaaacaaatgtttgttgtctaagccacccaatgtatggtaatttcttgtgccagcctgagctgattaagacaatga

SEQ ID NO: 856968 - DNA, 120 bp, Artificial Sequence
  ENSG00000233008_8 (sequence is synthesized)
aagggaagccctagttatgaaggaagagaaaatagaaagattgtgccctctgtcatgtgcgatggtagaaagagaaaagaaagatgtaaggaaatgacatgttctgagctctaatctaga

SEQ ID NO: 856969 - DNA, 120 bp, Artificial Sequence
  ENSG00000233008_9 (sequence is synthesized)
aaaaaatttgggaggttaccaaatggaggtcacagacttcaatgcagcttcaagtttgagtattgagacccaattttggagtcattctccaagggagatggcctggttctccaagaactt

SEQ ID NO: 856970 - DNA, 120 bp, Artificial Sequence
  ENSG00000233008_10 (sequence is synthesized)
cattaattacagctgttcatttcaaaggtgaacacagtaggatgtccagctagggcaccttcaaagcctagaccagtcagcctaacatagacaactgcctaggtaccagcatgagaccaa

SEQ ID NO: 856971 - DNA, 120 bp, Artificial Sequence
  ENSG00000233008_11 (sequence is synthesized)
aatcatgaagactgtaacttatcccctgcactcaaacatcatttagtgaaagaagaggagaaaggagaaacagttccattagggagtgaactgtgagttgactaaaaaattatcccaaag

SEQ ID NO: 856972 - DNA, 120 bp, Artificial Sequence
  ENSG00000233008_12 (sequence is synthesized)
aggctatgtaacccagaggagctgaaacatcatcaataggcaaatttaaagttaaagcctgttgctccccaccctttactcccatcagccacccagcagggtggaagcttgtgagaaaga

SEQ ID NO: 856973 - DNA, 120 bp, Artificial Sequence
  ENSG00000233008_13 (sequence is synthesized)
ttttatcacttgtagaaaataacgaagctcccctttctctgcacatctggtgtgttaatggtgaccctaccaacataagtaatacctgcagcacagttttggaatccctgctgggacaaa

SEQ ID NO: 856974 - DNA, 120 bp, Artificial Sequence
  ENSG00000233008_14 (sequence is synthesized)
tgtcatttcctgggtctgtcattttctgggcccaggaaaagcatcactaggtaaaacttattaatgcaactggaagtcttgcttctttaacttcaacagccttccaagtttggttgatgc

SEQ ID NO: 856975 - DNA, 120 bp, Artificial Sequence
  ENSG00000233008_15 (sequence is synthesized)
ttgttcaaagaatgaaaaatgccttttggcctatgtttccctgtgcagctaaagatcctaattgtgccattacaagctgatacataaatctgtgccaagattctcataatattatatctg

SEQ ID NO: 856976 - DNA, 120 bp, Artificial Sequence
  ENSG00000233008_16 (sequence is synthesized)
caaatgagatcttgaaggtattgttctccctttcacctgatgacagaacagaatgcttcatttaaaaatggcaaagaaggatgattgagttcaattcagcctgatgtttgggtttgtata

SEQ ID NO: 856977 - DNA, 120 bp, Artificial Sequence
  ENSG00000233008_17 (sequence is synthesized)
ttttagggcaaatgaactcagaagacagaacagtttgaatgcatcaggaaaacaggctgaaacatctggaaaaatccctttgagattgaaagcatatgatgcacaacaaagccaacaaca

SEQ ID NO: 856978 - DNA, 120 bp, Artificial Sequence
  ENSG00000233008_18 (sequence is synthesized)
aagtctcaatcttaatgcttttactatttcttgattgcagtgaagcagagttgccagccatctatggatcctaactaaattggtccttgtaatactcggtattatttgccaagatattga

SEQ ID NO: 856979 - DNA, 120 bp, Artificial Sequence
  ENSG00000233008_19 (sequence is synthesized)
aaaacctctaaacagtgagaaggtctgcatacactggggaacttccggtgactgctgggatgctggcattggtcttttctttccctgggggcaaaaactgaccttggattttttatcttt

SEQ ID NO: 856980 - DNA, 120 bp, Artificial Sequence
  ENSG00000233008_20 (sequence is synthesized)
tgggggaaaatatcacaccttttacaaataaccaggttttcttttctttcttctgatttgggttattttgtgttatcaaacagtcttgggctggcttaaaagtcatttatctgtccattt

SEQ ID NO: 856981 - DNA, 120 bp, Artificial Sequence
  ENSG00000233008_21 (sequence is synthesized)
atatgtttatatacttaagtatttatctaatcattcatgtaatatttcgatgcctcacatgtgctagatattgtgcaaggtgcctgggatggtgaattgactaaagcagatgctgcgtgt

SEQ ID NO: 856982 - DNA, 120 bp, Artificial Sequence
  ENSG00000233008_22 (sequence is synthesized)
actttcacagaactttaggtctatcgtgttgcattaagttgaggagaaaattatactatttattgtatagagggttgttcttatttccataaaaaatgataaaaatatttttgccaaaga

SEQ ID NO: 856983 - DNA, 120 bp, Artificial Sequence
  ENSG00000233008_23 (sequence is synthesized)
ccggcctgtgcgcagttcccgtgccctaggagttggcggcggggcccagccgagaatcttcttcccttctggtctgactaggaaagccagagggagatggtgaaggagacacagagagag

SEQ ID NO: 856984 - DNA, 120 bp, Artificial Sequence
  ENSG00000233008_24 (sequence is synthesized)
ttggaatcagttcctttctcaggaacctgaccatcaggcctcccagaaagtatcgagaaactgaaacatctcagatcatggcatctggacaatgagacacacctgctgcctgttgaccaa

SEQ ID NO: 856985 - DNA, 120 bp, Artificial Sequence
  ENSG00000233008_25 (sequence is synthesized)
ctccccttgcttaccccttcgtaactccccactatgtaaaccctttattttagttagcttagacttgtctcccatctctcagctgacatcatctgtaataaagcctttgatccctggcaa

SEQ ID NO: 856986 - DNA, 120 bp, Artificial Sequence
  ENSG00000233008_26 (sequence is synthesized)
accgttgctcagagtccaggccggttaggaccagagcctaccccgggtggcatggtgatgatccagattcaggagacatgtctgagaaaggatcgttcagactttttgacctattttaca

SEQ ID NO: 856987 - DNA, 120 bp, Artificial Sequence
  ENSG00000233008_27 (sequence is synthesized)
tgaggaataaaggatagagaatcttcttcccttctggtctgactaggaaagccagagggagatggtgaaggagacacagagagagtaaaagaacagaccatgcccagcctctccactgca

SEQ ID NO: 856988 - DNA, 120 bp, Artificial Sequence
  ENSG00000233008_28 (sequence is synthesized)
ggagcttggaatcaggactgtgagcttcatggagacaagaaactgtgctttttttctccttcctgtgaatgaatcccattgcagctttgattgtggttgaatcacctatggaagccatgc

SEQ ID NO: 856989 - DNA, 120 bp, Artificial Sequence
  ENSG00000233008_29 (sequence is synthesized)
atcttcagcatgtagcacataatggacactcagcaaatgacaactgaatgagcaaactaattactctgaccttgagcagtgacttgtgtgacctctggcaattggttcaccatctgaatc

SEQ ID NO: 856990 - DNA, 120 bp, Artificial Sequence
  ENSG00000233008_30 (sequence is synthesized)
cctcagctagatacctccctctaatgctgctcctccatcgacaggcattcctcagcggtcagttgtttcccagccagagcccgcactggcactgatgtctgctattatcactggagaggc

SEQ ID NO: 856991 - DNA, 120 bp, Artificial Sequence
  ENSG00000233008_31 (sequence is synthesized)
cccgggacttcacttgatgctatcccactgggatgactgagaagaagtaggagaaaatcaagcaaaagcgtgggctcgtctaagtgtttcctcatctgtttcttggtatcttccttgctt

SEQ ID NO: 856992 - DNA, 120 bp, Artificial Sequence
  ENSG00000233008_32 (sequence is synthesized)
ccctgcttctcccagccccagacttccttgtcttctctcttccatccagaaagacacacatgccccttctaagtatcactttagggctgaagtccaaagtcttctcttagctgaaattca

SEQ ID NO: 856993 - DNA, 120 bp, Artificial Sequence
  ENSG00000233008_33 (sequence is synthesized)
ctgtgcacttgccacttggcagagactgcaaacagctcagtgcgtgttttcatagtcagcattaaaataataattgccacaacactattaaagttttcctcattgttgtaactgttggca

SEQ ID NO: 856994 - DNA, 120 bp, Artificial Sequence
  ENSG00000233008_34 (sequence is synthesized)
tcagcagttcctgactgtcaacttcactatgtggttttttttaaagttgtcccccacccctctctaacaggtcctccaattcacaaaaacattcaggtcagttgttgagtaactgaatct

SEQ ID NO: 856995 - DNA, 120 bp, Artificial Sequence
  ENSG00000233008_35 (sequence is synthesized)
ttccaagtaattaacaggtagaattaccaggtagcaggcagtgtttgcttgtaatccgtcaatagtagttgcagtggggctaattgtcatcttgagtggccctgcaaccacatctaatta

SEQ ID NO: 856996 - DNA, 120 bp, Artificial Sequence
  ENSG00000233008_36 (sequence is synthesized)
aaagtgtcaacagagagttatttctgtcttttgttcccactgctaggttgtacgtgtttacttcagaaatccaggctcaaagtaagacagatatttggaacatgtgaatatacaggaaaa

SEQ ID NO: 856997 - DNA, 120 bp, Artificial Sequence
  ENSG00000233008_37 (sequence is synthesized)
acattccccagcaactcaaagtacgtaaaagcatttaggcctcattcctctgtccacctgacttttttggtttgtattagtttatatattcaaggcagatatacagtatctgataaatgc

SEQ ID NO: 856998 - DNA, 120 bp, Artificial Sequence
  ENSG00000233008_38 (sequence is synthesized)
aagagggacatgatgccttttcctaagcagcaaagttatactttgccaacttgactgggagctgggctgaagggacaaaggcaggagtcttttaagactcactaacacttacctagtaat

SEQ ID NO: 856999 - DNA, 82 bp, Artificial Sequence
  ENSG00000233008_39 (sequence is synthesized)
gcaggagtcttttaagactcactaacacttacctagtaatggcagtggctgccactacagctaggtttcttgcctttgattc

SEQ ID NO: 857000 - DNA, 120 bp, Artificial Sequence
  ENSG00000233008_40 (sequence is synthesized)
ttcactgaactgttttccagttcaaggtaggtagatctgccaaaactaaaaagcctagattgcatatagaacatgcctggatttacagagcaaggatgcaggaacatatttttccatcag

SEQ ID NO: 857001 - DNA, 120 bp, Artificial Sequence
  ENSG00000233008_41 (sequence is synthesized)
cagagtctgggtcttggctaacttaaagttttgtgactgttcttgggatcagccctgggtgaagcctctgtgaggtccagctgactacttcattctcataaatactttctttgaaatctc

SEQ ID NO: 857002 - DNA, 120 bp, Artificial Sequence
  ENSG00000233008_42 (sequence is synthesized)
aggagttggcggcggggcccagccgaggtataagttccacagcttcacccttgtcggtgtgatatgggcgtgaaagaagacataaaacaggcttcccgagtagaacctgccaccccgggc

SEQ ID NO: 857003 - DNA, 120 bp, Artificial Sequence
  ENSG00000233008_43 (sequence is synthesized)
tatttgccaagatattgaaaaacctctaaacagtgagaaggaagaagacaaagatgactgcaattactgcttccattccacattgtactagaagtctggccagcgatttaaggtaagaaa

SEQ ID NO: 857004 - DNA, 120 bp, Artificial Sequence
  ENSG00000233008_44 (sequence is synthesized)
gagaaacaaaaggcagctatattgaaagagaagaagtaacactgacttacttcaaaggcaacataattatttatctagaaaatcagatgaaatttgatctagtaaaaacactactataac

SEQ ID NO: 857005 - DNA, 120 bp, Artificial Sequence
  ENSG00000233008_45 (sequence is synthesized)
taagaacctgttggccagtatacaagatactatctcagtatacaaaattaattttgcttctgtgtagtagaaacaatcagagactaaaataaaaggtatagtttataataggataaaaat

SEQ ID NO: 857006 - DNA, 120 bp, Artificial Sequence
  ENSG00000233008_46 (sequence is synthesized)
atgaaacctttaggaataaatttgacaaaattatgcaaaacctgtacattgaaaactactaatggcgtccaggaaatgctacccccaaatatggcatcttgtcacttcagaaagtaataa

SEQ ID NO: 857007 - DNA, 120 bp, Artificial Sequence
  ENSG00000233008_47 (sequence is synthesized)
aacctaggaggatcactctctgaccttctccagctcttctcccctgaagcaagtcataaggtcttcattcaagaggaaagaaaaatccttactctgaagacacggaaacacagagaagac

SEQ ID NO: 857008 - DNA, 120 bp, Artificial Sequence
  ENSG00000233008_48 (sequence is synthesized)
tgaacaaactggcctttctaagttcccccaagtttattactattagatcacaccctcattgtccaataatatttctcctctgctatccacttcttcatcaaacttagcataaaatcctct

SEQ ID NO: 857009 - DNA, 120 bp, Artificial Sequence
  ENSG00000233008_49 (sequence is synthesized)
ttctttgattcttcatttctgaaagctcctatgttatataaaacttatattaagtaaatttgtatgcttttaccttcttaatgtgtcttttgttttaagggccttagccatgaacctagt

SEQ ID NO: 857010 - DNA, 120 bp, Artificial Sequence
  ENSG00000233008_50 (sequence is synthesized)
gatgggtgaggaaaagctgtttctttttgcccatcctacaaactattcctgagagaaatttaaaaggacttaactaagtagagatacatgccttattcatgtgttggaagactcaatatt

SEQ ID NO: 857011 - DNA, 120 bp, Artificial Sequence
  ENSG00000233008_51 (sequence is synthesized)
tctaacatgtcagttgtccaaataatggaattcaaataaaaatttcagtaggttattttgtaaaaattggcaaccagactttaaaattcatatggaaatgtaagggacctagattagcca

SEQ ID NO: 857012 - DNA, 120 bp, Artificial Sequence
  ENSG00000233008_52 (sequence is synthesized)
aaacaaaaccaaagttgaaaacaagaatgaagatggtgaactaacactacttgatttcaaattattataaagctatagtaatcacggcagtattatattgcataaatatagagaaacaga

SEQ ID NO: 857013 - DNA, 120 bp, Artificial Sequence
  ENSG00000233008_53 (sequence is synthesized)
tcagaatagggagctcagaaatagactcacaaatatatgaacaagtgatttttgatgaaggcacaagagcaattcagtggagaaaagtcttttcaagaaataatgtgtagaaaaattggc

SEQ ID NO: 857014 - DNA, 120 bp, Artificial Sequence
  ENSG00000233008_54 (sequence is synthesized)
taccttgcatactttgcaccatatacagatattaactcaaaatagattctggacctaaatgtaaaacttcaaacttaggagaaaatctctgaagtctctgtgaccttgggttaggtagag

SEQ ID NO: 857015 - DNA, 120 bp, Artificial Sequence
  ENSG00000233008_55 (sequence is synthesized)
ttcttagatatagcaccaaaagcttgatttatgaaacaacaaattgataagttgaacttcattaacattaaaaagttctgctcttaaaaaacaatataaagaaaagaagaaagcaagcca

SEQ ID NO: 857016 - DNA, 120 bp, Artificial Sequence
  ENSG00000233008_56 (sequence is synthesized)
cgtactggaagaaagtatttctaactcacatatctgatgaaagacttgtatccctaatatatataaacagtctcaaaactcaataataaaaaactcaaacaacaaaattaaaatatgggc

SEQ ID NO: 857017 - DNA, 120 bp, Artificial Sequence
  ENSG00000233008_57 (sequence is synthesized)
cgagactgtctcaaaaaaaaaaaaaaagtgcacaaaagatttgaacaaacatcccacaaaggatataaaaatgacaaataagcataggaaaagatgctcaacaccattgttaattaggga

SEQ ID NO: 857018 - DNA, 120 bp, Artificial Sequence
  ENSG00000233008_58 (sequence is synthesized)
cattgttaattagggaaatgcaaattaaatccacaatgaatacttagaaccagttcctgagatggagatttgcatacaagaactttattggggagcactctcaggaactgcaccagtagg

SEQ ID NO: 857019 - DNA, 120 bp, Artificial Sequence
  ENSG00000233008_59 (sequence is synthesized)
gaagtgaggaagcagaaatgggtggagagagtagttgaactctggtacggttgcaacacacttattagaatagccaaaatttttaaaaaattgacaacaccaagtgtttgggaggatgtg

SEQ ID NO: 857020 - DNA, 120 bp, Artificial Sequence
  ENSG00000233008_60 (sequence is synthesized)
gagaaactggagctctcagatactcttagtggtattatcaaaaggcacaatccatttgctaagcagtttggcagtctcttggaaatttaaacatactcctgtctactagcctcttagaaa

SEQ ID NO: 857021 - DNA, 120 bp, Artificial Sequence
  ENSG00000233008_61 (sequence is synthesized)
cttatagaagctattttatggcgaaaacgaggaaacaaatgtccattaatagtgaaggataggcaaatttgtgcatatccatacaatggaatattacccagctgtgaaaaattatgaact

SEQ ID NO: 857022 - DNA, 120 bp, Artificial Sequence
  ENSG00000233008_62 (sequence is synthesized)
agtgataaatgcaaatacatgaacaaatctcaaattaatactgattgaaagaagccagagacgaaaaagtacatactgtatgattgtatttatataaaactcaagaaaatgcaaactaat

SEQ ID NO: 857023 - DNA, 120 bp, Artificial Sequence
  ENSG00000233008_63 (sequence is synthesized)
ctatagtgagaaaaagcagatcagtggttgcctcgtaagagaaatgggagaaagtgttgagggagaggaaggagagattacaacgggactcaaggacaagtttcatgtttgcagatgatg

SEQ ID NO: 857024 - DNA, 120 bp, Artificial Sequence
  ENSG00000233008_64 (sequence is synthesized)
gatatgtttactgtcttgacatgtatacatatatcaaaacttctcaaattgcatactttagatttgtgcagtttatcatctgtcttttatacttcagtaaagacgaaaagaaaaaaaaaa

SEQ ID NO: 857025 - DNA, 120 bp, Artificial Sequence
  ENSG00000233008_65 (sequence is synthesized)
ggaggcagaaggctaagatcaaggcaccagcaagtttggtgtctcgtgagggctgctgtctgcttccaagatggcgccttgttgttgcatccttgggaggggatggggagaaaaaaacaa

SEQ ID NO: 857026 - DNA, 120 bp, Artificial Sequence
  ENSG00000233008_66 (sequence is synthesized)
aaagaggcctaggctggttgcccctagcccttttataaggcactaatccattcatgatgaggggaaagccctcatgacttaatcatctcgcaaaagtaacacattttaataccattacaa

SEQ ID NO: 857027 - DNA, 120 bp, Artificial Sequence
  ENSG00000233008_67 (sequence is synthesized)
tggggattaggtttctacatgaattctggaggggacatattcaaaccatagcactccactttctactttcccttttcctattctctgtctccctctctcccctgccccatctcggtcact

SEQ ID NO: 857028 - DNA, 120 bp, Artificial Sequence
  ENSG00000233008_68 (sequence is synthesized)
ggggtttgtatgcatgtatacatatatgcaaaatatctaagtattttgaccggtgttaaacactgaccatggattctcctggaacctttattcaactcagtttattcttttgtaaatcac

SEQ ID NO: 857029 - DNA, 120 bp, Artificial Sequence
  ENSG00000233008_69 (sequence is synthesized)
agtcaccattcattccataaattgccagtgtacaattcaatgaatgtggacaatgtgaacacacatataacacaactcactcaagatttagagagtcccttgtgctcctttgtaggcaat

SEQ ID NO: 857030 - DNA, 120 bp, Artificial Sequence
  ENSG00000233008_70 (sequence is synthesized)
ctccaaccccatggcaattactgttctgatttttaacacctagatttgttctgcctttttctggactttatataaatggaataataaactatatggggatttttgctcaacattaatgtt

SEQ ID NO: 857031 - DNA, 120 bp, Artificial Sequence
  ENSG00000233008_71 (sequence is synthesized)
ttttaagatttatccagttgttgcttatatcaataattcattctttttgttattgctaaatagcaacctattgtatgactattccacagttgttttttgtttttaatctattctcctgtt

SEQ ID NO: 857032 - DNA, 120 bp, Artificial Sequence
  ENSG00000233008_72 (sequence is synthesized)
gatagacattcagttttttccctgttttggctactatgaataaggctgctatgaaccttcttgttggcatatgattttatttcttttgggtaactatttagaagaggaatttctaggtaa

SEQ ID NO: 857033 - DNA, 120 bp, Artificial Sequence
  ENSG00000233008_73 (sequence is synthesized)
caggatagacacatgtttataagaaactgccagttttcgaaagtggttgtaccattattatactcccgccagcagtgtttaagttctagctgctgcacattgtcaccagcatatggtggc

SEQ ID NO: 857034 - DNA, 120 bp, Artificial Sequence
  ENSG00000233008_74 (sequence is synthesized)
gtattttacatgttaagaactgatgttgtatatcaatagaaaagaaaaaaaaaaacagaattcctcaattgtttttgcttctgttaactgtcaaggaaactaatcttcaaaccacataga

SEQ ID NO: 857035 - DNA, 120 bp, Artificial Sequence
  ENSG00000233008_75 (sequence is synthesized)
ctagaactgaaattatacaaggaaaatagagcccaggatgacagagattctgagaagacctagacagttgaaatgatgttgggtctcctagcacagatgtcttatactctggagactact

SEQ ID NO: 857036 - DNA, 120 bp, Artificial Sequence
  ENSG00000233008_76 (sequence is synthesized)
cttcccatgaacaggggacatgctaggaatccagagagagactggcaaaataggagctacggaaactaaacagaatacatgagagcttaccagaaatctactcccacatgtggagaaatc

SEQ ID NO: 857037 - DNA, 120 bp, Artificial Sequence
  ENSG00000233008_77 (sequence is synthesized)
agatggacattgaaggccccccaatacaaaggagatagcaaattctaattccattcagactctggtggtgccaagaggccctgtgaattggtagagcagggcatggcaacagtatgtaac

SEQ ID NO: 857038 - DNA, 120 bp, Artificial Sequence
  ENSG00000233008_78 (sequence is synthesized)
tgataggtcatattactgcataaagttagtaacaggaatattacaagcaaaatttaatctctggttggcaataaaaagaagagttcactacctctagcagcagggattcatgccagggct

SEQ ID NO: 857039 - DNA, 120 bp, Artificial Sequence
  ENSG00000233008_79 (sequence is synthesized)
tagttccagtgaaaaattatatgcctagattatttatcactcaggttaaaagaaattagatgcaagggtagtcaggtgtatactagcacatattccaacatatatggtcagtgttagaat

SEQ ID NO: 857040 - DNA, 120 bp, Artificial Sequence
  ENSG00000233008_80 (sequence is synthesized)
aaggggctaaaggtaagagctcctttagatattcaggacacaaaatttgttacagatcacaggatgtgggagctatgaactcactggttggcagggataggactccactattattgcccc

SEQ ID NO: 857041 - DNA, 120 bp, Artificial Sequence
  ENSG00000233008_81 (sequence is synthesized)
agggtctattcaagactgatccttcccataactggataccgttttgccacatcttaggcagagaacttcttgagaaatcatagaggaatcaaaagactgagataaatgccagtttgattt

SEQ ID NO: 857042 - DNA, 120 bp, Artificial Sequence
  ENSG00000233008_82 (sequence is synthesized)
ttcaaaaatggaaaaagtacgtttattgaaccaaagattcattcattgtaacatttattgagtgccctcggggtgccaggcactgttgcaggactctcaggacacaagacaattatggtt

SEQ ID NO: 857043 - DNA, 120 bp, Artificial Sequence
  ENSG00000233008_83 (sequence is synthesized)
ccctgctgtcatggagttttcaatatactaaactcaaaggtaaactctggaaattgatgtcaattccaggcaaaattgtaggatagccattgaatgactggatggatttactgaaaacaa

SEQ ID NO: 857044 - DNA, 120 bp, Artificial Sequence
  ENSG00000233008_84 (sequence is synthesized)
gacatattaatctatttttttctttgccaaagctattttacaggaagatcttagaactatattatttttatttttacttttgccagctgtatcatgataagcttgaattgaagaaataca

SEQ ID NO: 857045 - DNA, 120 bp, Artificial Sequence
  ENSG00000233008_85 (sequence is synthesized)
aaggctgtatggaggtaaaatttggtagtgtaataacaagttgaacaacaatatccaagcatttctgattaattaatcagtattaatctggttgcatatcagataataaacatattgcta

SEQ ID NO: 857046 - DNA, 120 bp, Artificial Sequence
  ENSG00000233008_86 (sequence is synthesized)
gatcaattctgaaaggtaggaaaaaaaaggaaatcatggcatatttggattttcagaagttatgtggaaggctaggaattaatatggtatattgatttctcagtaattttacctgattag

SEQ ID NO: 857047 - DNA, 120 bp, Artificial Sequence
  ENSG00000233008_87 (sequence is synthesized)
taaagagagtatcaatcattttattgtatatgttctcttagagctggatagcaaacaacatcttagacctggataggaaagtaccacctttgatctgactaggagagtattatcttagac

SEQ ID NO: 857048 - DNA, 120 bp, Artificial Sequence
  ENSG00000233008_88 (sequence is synthesized)
tgaataggacaattcataagcattgagggaaaattaagtgttgttaattaaaatgcacactgatgccttttaatattggacttcctcaaacacatttgaatctcgcatatcaaatcagag

SEQ ID NO: 857049 - DNA, 120 bp, Artificial Sequence
  ENSG00000233008_89 (sequence is synthesized)
taggtctgtggttttaccaaatgcaaattttgtctcggagtctgaactgtagacaagaggaaggttccactgccaagagagtggggtgcaaaaggaggccaatttttgacctctcatttt

SEQ ID NO: 857050 - DNA, 120 bp, Artificial Sequence
  ENSG00000233008_90 (sequence is synthesized)
aaagccactcacctctgttttattgctttttcaacactgcgtgaaagcaggaaactttcaaagtccgggtgaagcaagagaatgctacctttccagggactagggtagctttaattaaaa

SEQ ID NO: 857051 - DNA, 120 bp, Artificial Sequence
  ENSG00000233008_91 (sequence is synthesized)
ttgggttttattttggaatgatttgctttgaatttgaaccaaaaagaagtgaaagaggaagagagaaaagtagagcaattgatggtctccctaatggcaaaaagatcaattaatttacaa

SEQ ID NO: 857052 - DNA, 120 bp, Artificial Sequence
  ENSG00000233008_92 (sequence is synthesized)
cgagaaaaaaacagaactgtattacagatttacaaaatgttcattatctatggactttggatatgacccatcattagcctaatatgcaaggcagagatctgacagttccaaccctgaatt

SEQ ID NO: 857053 - DNA, 120 bp, Artificial Sequence
  ENSG00000233008_93 (sequence is synthesized)
acgggaccagttgataaattaaaaatcattttaaaatttaatattaaaattgataattgctctgtgggaaatagatttttctgaacttacacccttttcctgcactgctgagcaaatgca

SEQ ID NO: 857054 - DNA, 120 bp, Artificial Sequence
  ENSG00000233008_94 (sequence is synthesized)
aagcgataaactgcccatttgtcacaatgatagatagacaaatcctacttttacccttgttcctcagtactcatacatttcaattaaggagaataagtgctacgatttgtaatgtgtatt

SEQ ID NO: 857055 - DNA, 120 bp, Artificial Sequence
  ENSG00000233008_95 (sequence is synthesized)
catattgtcttatctagttctttagggctcaaagaattctccttagaaatagaaaaaaatgttccccaacacactccatataactattgggttgtattattcaacccttcaaggaacatg

SEQ ID NO: 857056 - DNA, 120 bp, Artificial Sequence
  ENSG00000233008_96 (sequence is synthesized)
gcaggggggctagagagttattggctattaatagtatcttaaagatgtgacatataaagtagtatctggaaataattgccaatcgtctaaattgatggaacagttagttccatcatgtta

SEQ ID NO: 857057 - DNA, 120 bp, Artificial Sequence
  ENSG00000233008_97 (sequence is synthesized)
gtcctgctgaattctcctctacgttgctaatgtttgtttacactttaagttttttgtgcaattgtcacttgaggtatattagattactttttgctgttattcacttactccctttgctat

SEQ ID NO: 857058 - DNA, 120 bp, Artificial Sequence
  ENSG00000233008_98 (sequence is synthesized)
ggaactttgcagagaactagagtaggtggggtatacttcccatctcattgatgttaggcttggttatatgacttgcttgaagtcattgaaatattagggcatatgatgtgaataaagacc

SEQ ID NO: 857059 - DNA, 120 bp, Artificial Sequence
  ENSG00000233009_0 (sequence is synthesized)
ctcgcaagacctggttgtttaaaagtgggcggcaccttccccttcgctcttcctcctgctcctgccctgatgtgtctggatggtgacagatgggaatcttctccagtgaccagaatccat

SEQ ID NO: 857060 - DNA, 120 bp, Artificial Sequence
  ENSG00000233009_1 (sequence is synthesized)
gccttaccttgggagcccaagctgacttctcaagctctggggatgcctcagtgatctctgatgtggaattagtggaggctggccgttgctcacctctacacagcctgctggtcgttagcg

SEQ ID NO: 857061 - DNA, 120 bp, Artificial Sequence
  ENSG00000233009_2 (sequence is synthesized)
agcaggagttctgatgttcctctcatcttggatgtctttcctaggagaatatttctcacgtgtttgacagaaaacattatctgtccatcatttccatggattcctgggtctcacgggcag

SEQ ID NO: 857062 - DNA, 120 bp, Artificial Sequence
  ENSG00000233009_3 (sequence is synthesized)
aaggacaaggcagatatgaggcggatctggtaaaaccataaacaccatgagatcagagcatccatctgtagactcacagagcaagaagcgtgactgccccaatcttgaatggatgagtaa

SEQ ID NO: 857063 - DNA, 120 bp, Artificial Sequence
  ENSG00000233009_4 (sequence is synthesized)
gatgaaaatcaatttataaacatcttgtgacaagctggaattcagttatagatcaattacagattgctcactggacaatcaaggacattattagaaaacggtttccaccactagaaattc

SEQ ID NO: 857064 - DNA, 120 bp, Artificial Sequence
  ENSG00000233009_5 (sequence is synthesized)
atctacattgacatccacctaaatatccagaaggtcatccccactttcgtcgctctccacagtcagctgccgggtccaccacttcttaacttcagaaccgcaggaagccgcgtcagtcat

SEQ ID NO: 857065 - DNA, 120 bp, Artificial Sequence
  ENSG00000233009_6 (sequence is synthesized)
ggggttcattttgcacacgacagatttcatggttgtccttcctccaaaccgaggaacctagatcttctctgatctctgaaaaataagttcctggatatgaaaggggatactttccttggt

SEQ ID NO: 857066 - DNA, 120 bp, Artificial Sequence
  ENSG00000233009_7 (sequence is synthesized)
ggtagtcccagtgaagacccactgaacatcgtcagcctcaaaatgtaagctgtgctgtcatctgctttgtggaacacatatgctacacatcttctcctttcaattgggctgaagttgggg

SEQ ID NO: 857067 - DNA, 120 bp, Artificial Sequence
  ENSG00000233009_8 (sequence is synthesized)
cacagttaaagagcattataaagctcctgctttagcatgaacttagttatctatagaaaaaaacatgtacaaggacactgggctgtggggagcattgctctccctccattcctgagtgct

SEQ ID NO: 857068 - DNA, 120 bp, Artificial Sequence
  ENSG00000233009_9 (sequence is synthesized)
cttaatgggattatcctggctttccaaaaccctatagagaagaagctcatagaagaaaattctcttactgaatcagtaaaatatggaaaataatgggactgtttattaaaggattgaatg

SEQ ID NO: 857069 - DNA, 120 bp, Artificial Sequence
  ENSG00000233009_10 (sequence is synthesized)
agagaacacaagtaatgcacttagaagagtgactggcatacagtgagtactacgtgctggcttctcaaccatgatagcctgaaatgtacccggaaaatgggggctaatgtaagtcatatt

SEQ ID NO: 857070 - DNA, 120 bp, Artificial Sequence
  ENSG00000233009_11 (sequence is synthesized)
ttgcattttgaaaggcaagacccaaaacacacaaacagagtaaatacctttaaaatgcctcgatcgctggagaaatgcctggatggacctacctgagggcagacgccactgcccaaattt

SEQ ID NO: 857071 - DNA, 120 bp, Artificial Sequence
  ENSG00000233009_12 (sequence is synthesized)
cctctggggtttccctgcgtcggctgcatcttgccgacttcctcctcgatccgacagcgtggggctcaggagctgctgctggctgcttgtctgcatgggaggagaagcacacagttaccg

SEQ ID NO: 857072 - DNA, 120 bp, Artificial Sequence
  ENSG00000233009_13 (sequence is synthesized)
tctttttaaccctgcgctctcctccttttactataagaaaggaaaacacatggcaggaggacaagtgggaagaacaacatggactcagagtgtccacaatggggaaaagtgaaaatgggt

SEQ ID NO: 857073 - DNA, 120 bp, Artificial Sequence
  ENSG00000233009_14 (sequence is synthesized)
ataaagggtcacagaagaaaaagagccaccactgcacgccctgctgaaggagacaccactcttcctgggacatcttgtcctgggtaacccccactgcttcgttcccctccatgcctgaga

SEQ ID NO: 857074 - DNA, 120 bp, Artificial Sequence
  ENSG00000233009_15 (sequence is synthesized)
atgtcattgtttcccttcatatcttcgctggcaaaccagggggtaaggaaggggaactgcaggaaggaaggtggggcagtggggacgggctgggcgggggcagtctactgtcaccagcct

SEQ ID NO: 857075 - DNA, 120 bp, Artificial Sequence
  ENSG00000233009_16 (sequence is synthesized)
ggagatccacacttagagcttcagggaaagagttctctgcaggcaaagctgtatgatgggccctggtggaggatggagctgataacaatctaagctacagtgaaagaaagagagatgcca

SEQ ID NO: 857076 - DNA, 120 bp, Artificial Sequence
  ENSG00000233009_17 (sequence is synthesized)
agacttcccacacatttcacctgttctcaggttcacctgtcacctctccctttcctaacaaaagccttggtcttcacatctctttagtatccttttttttttttttttgtcacctctttc

SEQ ID NO: 857077 - DNA, 120 bp, Artificial Sequence
  ENSG00000233009_18 (sequence is synthesized)
tttcttaggctttttcatctaaaaacagagggctctgaaatcatcactttccccaacctcattagccctgtctcactgtctgtcctgacttcagcctgcctccctctcccatgcgagaca

SEQ ID NO: 857078 - DNA, 120 bp, Artificial Sequence
  ENSG00000233009_19 (sequence is synthesized)
ttgccaaccatcttcagggtgaccagtggcaaggccactgcagatgcctccccttgccccttggttgactaactccgcagaagtccctgcagtcggtggcagatgatttctaaaggctgg

SEQ ID NO: 857079 - DNA, 120 bp, Artificial Sequence
  ENSG00000233009_20 (sequence is synthesized)
ggagcccaaaacatgagatctactgaaaactgagctatggcaccagtgggcctcctggagcaccctgctgggccgtggagccttaggcttccaaaggtactctggcccctggctgcgttg

SEQ ID NO: 857080 - DNA, 120 bp, Artificial Sequence
  ENSG00000233009_21 (sequence is synthesized)
ctgcacaccatggagcctggtgctgctgggggctctgcacagagcacgggatcagctccacgttgttaacctcaaatcgtaattgctgcctcataaaggggcaggtcctcccagccagct

SEQ ID NO: 857081 - DNA, 120 bp, Artificial Sequence
  ENSG00000233009_22 (sequence is synthesized)
gcttctcacagcacaggactctccaggacgctgataactccttgtacttttttatatagacacatacatagagtttgaaaatgaaaatatgctgtgacttaataaatagaaactcctcaa

SEQ ID NO: 857082 - DNA, 74 bp, Artificial Sequence
  ENSG00000233002_0 (sequence is synthesized)
gggtttcaccgtgttagccaggattgtctggatctcctgacctcgtaatccacccactgaggactggcagaccc

SEQ ID NO: 857083 - DNA, 120 bp, Artificial Sequence
  ENSG00000233002_1 (sequence is synthesized)
gaggactggcagacccatctgactttcttggagtagaggaggaagaggaggaagaagaggtgcaggaggaagaccagggtgtggctgacatctagctggatgcagtggatgattctggag

SEQ ID NO: 857084 - DNA, 120 bp, Artificial Sequence
  ENSG00000233002_2 (sequence is synthesized)
gtagggcagggccaagaggaggaagcagcctcagaacagacaaaagactccctgccccaaacggcagtcatcccacagtcagcacttctggaaggaaggaaggaaggtttccttctgcag

SEQ ID NO: 857085 - DNA, 120 bp, Artificial Sequence
  ENSG00000233002_3 (sequence is synthesized)
aggaaggaaggtttccttctgcagaaagctcctttttaccttgtttctgacaccagggagggtcagcagagcccagcgcacctgtggtgcctgagttaccatctatgcccaggatgtgcg

SEQ ID NO: 857086 - DNA, 120 bp, Artificial Sequence
  ENSG00000233002_4 (sequence is synthesized)
tggggactgaccaagttcccccactgaggggtcccaggctggaccgacaggagagcctgggaggagttctgaccctggagaggaggttggcccagccagggagacatgtcctgcttcaga

SEQ ID NO: 857087 - DNA, 120 bp, Artificial Sequence
  ENSG00000233002_5 (sequence is synthesized)
ccctgaggttatacgggtccccatccatctccatcctgcaagacaaagtcatcccaaggctctcccgcacccaagagctccagagaacagccaaaccacacgcactgcactcccagacac

SEQ ID NO: 857088 - DNA, 120 bp, Artificial Sequence
  ENSG00000233002_6 (sequence is synthesized)
actccagtctggtgagccccattccactacccctcccagatgacaggggccagactcagtggtcccacccctgactagatctctgaagtccttgcctccaaccagtggtgggctccttcc

SEQ ID NO: 857089 - DNA, 120 bp, Artificial Sequence
  ENSG00000233002_7 (sequence is synthesized)
tgaggatttgagcacacgggaacctggacagagaggcctattgtccctgaacaccccaaggcagacacacacctgccctggcaggacaaacggcgtccacttgctgagggtgaagtcccc

SEQ ID NO: 857090 - DNA, 120 bp, Artificial Sequence
  ENSG00000233002_8 (sequence is synthesized)
ggagtttatggaattattgaaggaaagccgcgccagtgccaagagatcatggcccagagctggcagaactgatcagaccaatgctgagcaaaaggcctgaagaagaccatctggaggagc

SEQ ID NO: 857091 - DNA, 120 bp, Artificial Sequence
  ENSG00000233002_9 (sequence is synthesized)
atcccgagggccttccccaaagcaccagatcgccttcctttccgaggccacaaaggcgagaacttccagaaatagcatgaaacacggtggcttggtgacatccaagcctgctgccaccgt

SEQ ID NO: 857092 - DNA, 120 bp, Artificial Sequence
  ENSG00000233002_10 (sequence is synthesized)
gctgagcaagacatcgatagtgggtgaaggcaagtgtttgtcccaggagaggcccagggtggttggtcccttgaagtcacccgccagtctgaaggcccaggggacttgagcaataccaag

SEQ ID NO: 857093 - DNA, 120 bp, Artificial Sequence
  ENSG00000233002_11 (sequence is synthesized)
aactggccacggtcctgcaacagcccaagggctgcctgccggacataaggggtggctgggtcctccatgtgggcagctcatgcagtcagctcagcagctctccctgcctggaatggtctg

SEQ ID NO: 857094 - DNA, 120 bp, Artificial Sequence
  ENSG00000233006_0 (sequence is synthesized)
gcgcgtgcgcgcggggcacccgccgccgaccaggcaagccaggcagcaggcgacccaagaccgtccgcggaggagacaagcaagctgtcatgttataagcagccctttgaggggtccatg

SEQ ID NO: 857095 - DNA, 120 bp, Artificial Sequence
  ENSG00000233006_1 (sequence is synthesized)
tgatgtcaaggaatgaagtctctagccaacatttaatgaggaactgaggcccaccaacaaccttgagtgagcttggaagtagctccttcagcatcagttgggtgtcgagatgactactga

SEQ ID NO: 857096 - DNA, 120 bp, Artificial Sequence
  ENSG00000233006_2 (sequence is synthesized)
atcagttgggtgtcgagatgactactgacagcttgactgcaacttcatgagagtcttctggaccagaaccactcaagtcagggtttccccatgttggtcagcctggtctcaaactcctga

SEQ ID NO: 857097 - DNA, 120 bp, Artificial Sequence
  ENSG00000233006_3 (sequence is synthesized)
ccaaagcgctgggattacagtttcagttatctacggccaactgggtaaaccaaatagatgctctttacaaatattttttaacttcttaaaatatctcattgaggattccgttccaagatg

SEQ ID NO: 857098 - DNA, 74 bp, Artificial Sequence
  ENSG00000233006_4 (sequence is synthesized)
tttgaatgaagagaagcacacctcctccccagaacagtactgcagctatgatataacgcctgggcagggttcgc

SEQ ID NO: 857099 - DNA, 120 bp, Artificial Sequence
  ENSG00000233006_5 (sequence is synthesized)
cagtactgcagctatgatataacgcctgggcagggttcgcaatagcagccaggctgtaatgtaagctggaatttcaatcaaggcagagaggaaacagttcagatggagtcttgctctgct

SEQ ID NO: 857100 - DNA, 120 bp, Artificial Sequence
  ENSG00000233006_6 (sequence is synthesized)
ctgaggcagacctcaaccccagcccagctctgagggaatattagcacggctggcgggcagactctcctcccctgggccaggatattgcctttgtacaaagggcataggccttgcagccct

SEQ ID NO: 857101 - DNA, 120 bp, Artificial Sequence
  ENSG00000233006_7 (sequence is synthesized)
gggtttgactggcctgtgccgggactggggagagtaacctggggcaggtcactgccctccctgaaactcaggatcctctttggaaagggagggtgatgctcctactccgctcgcattaca

SEQ ID NO: 857102 - DNA, 120 bp, Artificial Sequence
  ENSG00000233006_8 (sequence is synthesized)
tagcaagaagccagccaaggccatggctgtgactggtgacccctcagctgtgaggcagtccaaagtaaaggtggcactgcatcttcagaagccagcctagtgcggaggggaggtgtttga

SEQ ID NO: 857103 - DNA, 120 bp, Artificial Sequence
  ENSG00000233006_9 (sequence is synthesized)
aaagcccaaagggcagggcagagggcatggccacttggtccaggcgtaaaatttcttttcccttgttgaaaagtgcaagtggttccaggagctctgtgactttattttctgagcaggccc

SEQ ID NO: 857104 - DNA, 120 bp, Artificial Sequence
  ENSG00000233006_10 (sequence is synthesized)
ctctgagaaatcatgtggtccctggtccactcacgcctaggccaagcttgtggcctgattcggggccccatcgttctggggcctacttactcctctccagggctccctagctcccctcct

SEQ ID NO: 857105 - DNA, 120 bp, Artificial Sequence
  ENSG00000233006_11 (sequence is synthesized)
acatccctacaccctccttcccatccagtctttccagaagtgtggtccctcccattccctagggtctgtgggatgctgctgccctaacaagtccctgccagtgcatctacaaaatgagtt

SEQ ID NO: 857106 - DNA, 120 bp, Artificial Sequence
  ENSG00000233006_12 (sequence is synthesized)
tcagccagagtttcagtttgacttaagtcaattaagcaacatctcaagggaggtgacaaaaatttcaaagtgtgtttagtgacctttcatttattaaaaacaaataaataaacaaacaga

SEQ ID NO: 857107 - DNA, 64 bp, Artificial Sequence
  ENSG00000233006_13 (sequence is synthesized)
ggacacgaaggagccgaggagcacgcctacgaagaacagggaggtggtgaggggcaccttccag

SEQ ID NO: 857108 - DNA, 77 bp, Artificial Sequence
  ENSG00000233006_14 (sequence is synthesized)
gtcaggggatttccacgggacactcctgcccaaatactgcgcttttccaaagtcttagcaaatggcacaccaggaga

SEQ ID NO: 857109 - DNA, 120 bp, Artificial Sequence
  ENSG00000233006_15 (sequence is synthesized)
tgtgcctggctcgacagatcctatgtccatggagccttgctcactgctagtgcaacagtctgagattgacctgcaaggcagcaacctggcatggggaggggcatccgccattgctgaggc

SEQ ID NO: 857110 - DNA, 120 bp, Artificial Sequence
  ENSG00000233006_16 (sequence is synthesized)
ggcccgggcggggcctgtcctggggacctggcgaggcccggcctctgccagccaagcctgctggggacgaccgaggtagcccgggctcggcttaggaaggcagcgggactcgaggccttg

SEQ ID NO: 857111 - DNA, 120 bp, Artificial Sequence
  ENSG00000233006_17 (sequence is synthesized)
gggtccgagtccgaactcgctcctctagcgccgggcggggagcgagtgggagagcggccgcgaagctccagtgttgaaaacgcacccctcccagctttttgcaaggcctacttgggggcg

SEQ ID NO: 857112 - DNA, 120 bp, Artificial Sequence
  ENSG00000233006_18 (sequence is synthesized)
cgttatgtaggctggagtagtcagcaattacttgcctgaggaagggaaggcctcctcctttaagaaaagaataggctgggtgcggtggctcatacttgtaatcccagcattttgggaggc

SEQ ID NO: 857113 - DNA, 120 bp, Artificial Sequence
  ENSG00000233006_19 (sequence is synthesized)
cttctggaccagaaccactcagttaagtggctcccagattcctgatcctcagaaactctgagaaataatgaatgttggttgttttaaaatggtaaattttgaggtattatgttatgtggc

SEQ ID NO: 857114 - DNA, 120 bp, Artificial Sequence
  ENSG00000233006_20 (sequence is synthesized)
aatagatagctaatatataaattatttgaatcaaacaatacgttaaattaaagctcagaagaataaacatctgtaattccttaatttgttttcccttctattctacagaatagaatttta

SEQ ID NO: 857115 - DNA, 120 bp, Artificial Sequence
  ENSG00000233006_21 (sequence is synthesized)
cagatgaaccttgtagttacttgtgcaataagagacagtatgttgtattgattaagtgcagagcctctggatgtatgatagaagaaagaccaatattcaattgctttcttcttcaattcc

SEQ ID NO: 857116 - DNA, 120 bp, Artificial Sequence
  ENSG00000233006_22 (sequence is synthesized)
aagcttgtgagcttgagcaaattttaaaagtgttttaagcctcagtttcctgggatggtagtgcttagctcgagctcctagcatatattaactacaaactaaatattagctataattatt

SEQ ID NO: 857117 - DNA, 120 bp, Artificial Sequence
  ENSG00000233006_23 (sequence is synthesized)
aaaaaaaaaaagaaagaaagaaaagagtagaaggcccaagcttagtccaatattatagcttcagcatcagagtagagaatgattcagagcatctgtccagtgtctgctgtagatccctca

SEQ ID NO: 857118 - DNA, 120 bp, Artificial Sequence
  ENSG00000233006_24 (sequence is synthesized)
ccagtgtctgctgtagatccctcaaatccgtgtttggacgcttctggtaaggggtgtatggcagatgcacccgacagatgcacttggcagcaataacttatgcatacctgaagaatgacc

SEQ ID NO: 857119 - DNA, 120 bp, Artificial Sequence
  ENSG00000233006_25 (sequence is synthesized)
ctatggtctaagaagaatgtgtgttcagagctccaagctaaggaatctgggagtggccaacccagatatttcatttcttatctatgacgaacttctgaactgctcccacccccagcccat

SEQ ID NO: 857120 - DNA, 120 bp, Artificial Sequence
  ENSG00000233006_26 (sequence is synthesized)
cctgtagaatgcaggccctacgaggcgatcaaagccctttgttttaggttaaatgaaggttgcctggtggaggttgctaggggaaaggtgttaagtaaaaatgttatataaactgcatgg

SEQ ID NO: 857121 - DNA, 120 bp, Artificial Sequence
  ENSG00000233006_27 (sequence is synthesized)
tgggattacaggtatgagccaccacgcctggccaattgcatgctttttacaaggagttttggttctcctgcccagcccactgccactggactgccctgtattgtaagtcccctcaataaa

SEQ ID NO: 857122 - DNA, 120 bp, Artificial Sequence
  ENSG00000233006_28 (sequence is synthesized)
actggactgccctgtattgtaagtcccctcaataaaccttatgtctcagtttctggttctaggtctcttcttcagcctcttgaacatggtgccatccctactgaagtcaatggggtctga

SEQ ID NO: 857123 - DNA, 120 bp, Artificial Sequence
  ENSG00000233006_29 (sequence is synthesized)
catgactaggggaacttgaacaaaatctgaaatagctgtttttttcttgccaaaatcactgtaagacattatttgcctcagccccagaacattgaattatatgacccaagagtggagaaa

SEQ ID NO: 857124 - DNA, 120 bp, Artificial Sequence
  ENSG00000233006_30 (sequence is synthesized)
gtttttttttttttctgcagtttcagttatctacggccaactgggtaaaccaaatagtgcagagatgatatttaaatcatgagactggattttttaaaaaggaagaggactgaagactaa

SEQ ID NO: 857125 - DNA, 120 bp, Artificial Sequence
  ENSG00000233006_31 (sequence is synthesized)
gttctgggcactccaattttgggcagtagcggagatgaagaaaaaccagcacactagatggtaaaggagcagccaacaagatgctctttacaaatattttttaacttcttaaaatatctc

SEQ ID NO: 857126 - DNA, 120 bp, Artificial Sequence
  ENSG00000233006_32 (sequence is synthesized)
agtgtggttgcgccaggcgctgctcaggttcgcggcgtccggcacccggcagcggtgctccggggtcgctatcaggaacacggaggacaggccggtgaagccattggggatgatgctggc

SEQ ID NO: 857127 - DNA, 120 bp, Artificial Sequence
  ENSG00000233006_33 (sequence is synthesized)
gctgagcaggaagaagatgaggcgctggaagggcccccactcgcccaggaaggcggtcacctcgtcgtagtcccgcatgccgccctcagaggcccacagagcgcggcctggggtcgggga

SEQ ID NO: 857128 - DNA, 120 bp, Artificial Sequence
  ENSG00000236075_0 (sequence is synthesized)
acagccattttcacccaaaggacttccattctgcctctgaaatcctccctcccttcaatcctccttgaagccctcggagatgacctacaccaccctggctctgggtgccggctgggcgca

SEQ ID NO: 857129 - DNA, 120 bp, Artificial Sequence
  ENSG00000236075_1 (sequence is synthesized)
ccagtgtattgaaggcagagagaggcacgctggcacgtggctgaatccataccctggaatattttggcttcaagtgccctagattttctaaatgtaaaatattaatctgattatttaaaa

SEQ ID NO: 857130 - DNA, 120 bp, Artificial Sequence
  ENSG00000236076_0 (sequence is synthesized)
agattctcctgtttgaggaacgttgctggctagtgacatggaggagcactcaccaagagagaaggggttgattttatcactgaaagcccagctctgtggtacattctagaagctctcaac

SEQ ID NO: 857131 - DNA, 120 bp, Artificial Sequence
  ENSG00000236076_1 (sequence is synthesized)
cgttcagttaacacccaaaaagagctgcagccacagactggcactgcatcaggaaaggcagacgggaacacattctagtgaaatgcaggaagttagagacacgaggcaaaaaagatgtta

SEQ ID NO: 857132 - DNA, 120 bp, Artificial Sequence
  ENSG00000236076_2 (sequence is synthesized)
aagagttttgtgtcagagatagcagaaactccttaattactttttggagtttggatttctaaatcacagctttctggaaaattcagattcttatcagtaaaagatcctgctttaggttat

SEQ ID NO: 857133 - DNA, 120 bp, Artificial Sequence
  ENSG00000233005_0 (sequence is synthesized)
agcactggcacagaggcagcacagctatgtgggaagaacacaggctggtctgcaggtgtctagatttggatcctagctctgttacttactactttgtgactttgagcaaattcacgtctc

SEQ ID NO: 857134 - DNA, 120 bp, Artificial Sequence
  ENSG00000233005_1 (sequence is synthesized)
tgaaagatctgtagtgtcatgaggcaaagtgccagccaagcagggacgctctggcatcagacagcttgggttctaatcctggctccaccacccactagctgtgtgatcttgggaaagtga

SEQ ID NO: 857135 - DNA, 120 bp, Artificial Sequence
  ENSG00000233005_2 (sequence is synthesized)
gcctggctgctctttgaggactgagatgaacttagcaatgcagagaagaacaaagagaggcttgtgctcaccgtgttccagagggatcaccgtgttccctttgttcatttgaggacatga

SEQ ID NO: 857136 - DNA, 120 bp, Artificial Sequence
  ENSG00000233005_3 (sequence is synthesized)
atacaactatggtctttggacaaaaggcatatgccaggcagtatgaatggtctctcttgtctgtgcaattagtatgtaagagcacgtgaactggtgcctgggacctctacctgttttagt

SEQ ID NO: 857137 - DNA, 120 bp, Artificial Sequence
  ENSG00000233005_4 (sequence is synthesized)
atgatagcaccacagtaaagggcctggactttgtatgagcttgggaaaatcatgtcacctctgcaagtcttggtttccctgggtgttaaatgtcaatttaagtaaaatgctatctacttt

SEQ ID NO: 857138 - DNA, 120 bp, Artificial Sequence
  ENSG00000233005_5 (sequence is synthesized)
aaacaaagctccaaatttggaagcagcagtgaaactccacagattactgagggcaaaattgctgggtcatatggcaccaaggaaaggtcttgtgctgacacagggagaaagctgtcattt

SEQ ID NO: 857139 - DNA, 120 bp, Artificial Sequence
  ENSG00000233005_6 (sequence is synthesized)
ggaggagaccttcaccagaaactgaatttgctaccacctggatcatgaacttttactctccaaaacggaaggaggtgatgaagagagaaagaaaggatggaaggaaggaggaagtggaca

SEQ ID NO: 857140 - DNA, 120 bp, Artificial Sequence
  ENSG00000233005_7 (sequence is synthesized)
atgagatcctggctgatggatgtaatgaaggcatgaactatactagttgaacaaggaaatgaacttgaaccaaattgtgaagttctctgcagtgaaatattaaaggtacagatcaaagct

SEQ ID NO: 857141 - DNA, 120 bp, Artificial Sequence
  ENSG00000233005_8 (sequence is synthesized)
cagcacagctatgtgggaagaacacaggctggtctgcaggtgtctagatttggatcctagctctgttacttactactttgtgactttgagcaaattcacgtctctgaaagaccaggacca

SEQ ID NO: 857142 - DNA, 84 bp, Artificial Sequence
  ENSG00000235526_0 (sequence is synthesized)
actagatactgaagctgatatcatgtgtttacaacaaccctacggccagccacatggctcaggattcacattcatgcctcagga

SEQ ID NO: 857143 - DNA, 120 bp, Artificial Sequence
  ENSG00000235526_1 (sequence is synthesized)
gccagccacatggctcaggattcacattcatgcctcaggagattcattaagtgcttcataaagtggacctttgaagttggtcacgtgtaaacctctgatgttatatccaagaacactgag

SEQ ID NO: 857144 - DNA, 120 bp, Artificial Sequence
  ENSG00000235526_2 (sequence is synthesized)
tggagtggcgtgtgccctagccagtactacccctgagacatcaggagcctacagggatttccaaccctatcagatctgggttcttcttcctgtgtcatcctgcatgaactgtttgtgtaa

SEQ ID NO: 857145 - DNA, 120 bp, Artificial Sequence
  ENSG00000235526_3 (sequence is synthesized)
aggggtgtgtgtgtgtacacacatgtgcaaggtggcaccaatgaacactgaggccttcaagctggcctgacagagctctgaccctgtgcccatgggctatagtctcaccaggtccctgct

SEQ ID NO: 857146 - DNA, 120 bp, Artificial Sequence
  ENSG00000235522_0 (sequence is synthesized)
aaaactgaggaagaaaactgacaaggttttcaagggaatttccaggtcacccagagaactcgccttgccttgttctacttcctacaagtctctaagcacttcatgctttactagaatctt

SEQ ID NO: 857147 - DNA, 120 bp, Artificial Sequence
  ENSG00000235522_1 (sequence is synthesized)
aaaaaaaaaaaaaaagaagacacacaacaagtcaacaacgtaacaatgtttggcatcactaaaaagatggtactttggtgaaaggtagaaattggaaaaataaagctcaggacaaccttc

SEQ ID NO: 857148 - DNA, 120 bp, Artificial Sequence
  ENSG00000235522_2 (sequence is synthesized)
aggacaaccttcaagtttttctctattcatgctaccctctttttttggtaaccacagttaattaagagttataagcataaaacagtgtttctttcaagtggcatgcttatgtgggggaag

SEQ ID NO: 857149 - DNA, 120 bp, Artificial Sequence
  ENSG00000235522_3 (sequence is synthesized)
catacgaagttccatgtctcacttatctctccaaatcatgcaaactaactagaaagacgaacagtgtcccttgaaatgcacaaggcttcctctctcgagggtgaaacactcacctagtgt

SEQ ID NO: 857150 - DNA, 120 bp, Artificial Sequence
  ENSG00000235522_4 (sequence is synthesized)
gtccttcaggttcttcacgagggagcccttcttcaggctgttcttccgctccacgtagttggacggtacatagcccgtcctgttggccgcgttcctcacccgccaccacgtcttggagtc

SEQ ID NO: 857151 - DNA, 120 bp, Artificial Sequence
  ENSG00000235522_5 (sequence is synthesized)
gtccagcaaccacagccgctcgttcttcttgatgtccagctcctggtcctgctgggcggtgtagtcccacttggctatcacaataacttcttctgtcatctttcatggagtccttctgcc

SEQ ID NO: 857152 - DNA, 120 bp, Artificial Sequence
  ENSG00000235522_6 (sequence is synthesized)
ttagctaacggcacccaggactgtggtgtgatgtagcatccatttcagagagggaaaaagtgctttggctgtcccctgctctaggcacgtaggccaaatggacaggattgtataagagag

SEQ ID NO: 857153 - DNA, 120 bp, Artificial Sequence
  ENSG00000235522_7 (sequence is synthesized)
cttccgctccacgtagttggacggcctcaacttttgcacttccgtgtccatctctgcattgcccaatttttgcaagactctcctgctaaggtgctctagctggaatcctccactctcaac

SEQ ID NO: 857154 - DNA, 120 bp, Artificial Sequence
  ENSG00000235522_8 (sequence is synthesized)
atctgatcaggttcctcatcctctaccatcccccaggtgacagctgatcaccctgtcctgccttcagaagaatcctgttcgcgtgttggaggcaggccgtgtgcactgctattctcggga

SEQ ID NO: 857155 - DNA, 120 bp, Artificial Sequence
  ENSG00000235522_9 (sequence is synthesized)
ggcagcagcttctgattaaccatttttaagtgtacagttcagtggcctcaagtacattcaccctgttgtgcaaacatcaacatcatctatctgcagaactattttcatcttgaaaaactg

SEQ ID NO: 857156 - DNA, 120 bp, Artificial Sequence
  ENSG00000235522_10 (sequence is synthesized)
gaatagggattgccctaatgtcttccacggaggctgcatctacaattccaccaacagtacacaagggtaccaagttctctacatccttgtcaacgcctgttattgtctactttttgacag

SEQ ID NO: 857157 - DNA, 120 bp, Artificial Sequence
  ENSG00000235522_11 (sequence is synthesized)
cagtcatcctattgggtgtaacgtatacatcaatttcttaactgaacagtatttgtactgcatcctcaatagaatttattagcacatagcaattctcaataaaaagaaaaattttatact

SEQ ID NO: 857158 - DNA, 120 bp, Artificial Sequence
  ENSG00000235522_12 (sequence is synthesized)
aaaactgaggaagaaaactgacaaggttttcaagggaatttccaggctgagaatctacgatggccagtgagctggtatgattcatacgaagttccatgtctcacttatctctccaaatca

SEQ ID NO: 857159 - DNA, 120 bp, Artificial Sequence
  ENSG00000235522_13 (sequence is synthesized)
cttgaaaaattaggcactgacagcttttattacaactctgcaaccagttttctcctgggtcttgaaatgctcaactttaaaatgaccttctttcaacaagctttagtatttggtttagaa

SEQ ID NO: 857160 - DNA, 120 bp, Artificial Sequence
  ENSG00000235522_14 (sequence is synthesized)
acagcaaccttataaaacaaatcttatgttactgtttgctgtacatggggaaatctgaccctctaacaaaaacaaacttgaaaaaaattctaaataacattataattaaatgagtccatt

SEQ ID NO: 857161 - DNA, 120 bp, Artificial Sequence
  ENSG00000235522_15 (sequence is synthesized)
tcattaagtaacactgcctcctgataactgttaggttgacactcattttctcaggatatgctgtgtcttataaacatatttaataagtcaacataaccaaactactcctataaattaaaa

SEQ ID NO: 857162 - DNA, 120 bp, Artificial Sequence
  ENSG00000235522_16 (sequence is synthesized)
ttaacattgtactaataacaaggtggtatcctggattggatcatgaaacagaaaaagaaaattaatggaaatactggtgaaatcaaaataaagtctaagaataataataacaataaataa

SEQ ID NO: 857163 - DNA, 120 bp, Artificial Sequence
  ENSG00000232754_0 (sequence is synthesized)
ccaccagtggggcttctctgctgtaaaggagataaaggacatggaaaggaatggctttggagtccaacaggccattgtcctggatttcatgatagactgcagtcctcaagcatttaggac

SEQ ID NO: 857164 - DNA, 120 bp, Artificial Sequence
  ENSG00000232754_1 (sequence is synthesized)
ccttctatttgtagtaactagcagtgcctggcacatacacatcaatcagtatttggtgatccctatacgtttttattattgcctttatactatttttggagaaaagaaattcccacccga

SEQ ID NO: 857165 - DNA, 120 bp, Artificial Sequence
  ENSG00000235529_0 (sequence is synthesized)
ctaggattggagcatccagaacagagtcacttcagcctgggaagagcggggacttgagcttggagggagctggagtggccgcttgctgagtctttctccctggagctcgtgggcagctgg

SEQ ID NO: 857166 - DNA, 120 bp, Artificial Sequence
  ENSG00000235529_1 (sequence is synthesized)
ttacctcgcgctggggcgaccctgacttaggacctcctgccgtttctctgggtgactgctctgtagtcgtgagtcgtctctttaatgctgagcatcagtacctgcacagccctgaatgga

SEQ ID NO: 857167 - DNA, 120 bp, Artificial Sequence
  ENSG00000235529_2 (sequence is synthesized)
ctgactaaggagtttttgtctctgtcaccctgtcccctgtggttttatgaagacgttagttatgaatccgtgtttaggatgagaagatgtaaacagtgaggaggataagtgagaagctag

SEQ ID NO: 857168 - DNA, 120 bp, Artificial Sequence
  ENSG00000235529_3 (sequence is synthesized)
caagagtctggatggtgatggcgggggagcgctggtggaggagtcgggggcgtcccgctggactggggcacagctctgcagcagcagccggtgcggttttgccttgtaagtgacaccgtt

SEQ ID NO: 857169 - DNA, 120 bp, Artificial Sequence
  ENSG00000235529_4 (sequence is synthesized)
gcctgcaggcatctctgacagctgctcctgctccagattccagaaatttctatggaacatttcctgaaccatcctcctggtttcttcccttcccctcactgaataaaatccgtaatagca

SEQ ID NO: 857170 - DNA, 120 bp, Artificial Sequence
  ENSG00000232756_0 (sequence is synthesized)
tggtctcactcccacagtgcctcccctaacagcaccaaatctgtttccaggcagtgggcaagcagggctgagaattgccccagactacccacctcccagctgcaaaggaaaagggctcag

SEQ ID NO: 857171 - DNA, 120 bp, Artificial Sequence
  ENSG00000232756_1 (sequence is synthesized)
ttcttcccccacctgtggagtctgcatgctggattcccgttctccccagagttctggccaggaggcttcttgcctggttcaaattgttatgaagttcagctggagacttccttctccctg

SEQ ID NO: 857172 - DNA, 120 bp, Artificial Sequence
  ENSG00000232756_2 (sequence is synthesized)
cctccgtatgctgctctgtctgtccaagtcggagctgcaatctggttctgcctcctgtctgccgtggtgatccctgttgtagtttctgtgtgtcttcttttgagaaatgccttgcgccct

SEQ ID NO: 857173 - DNA, 120 bp, Artificial Sequence
  ENSG00000232756_3 (sequence is synthesized)
cccgctcttccaggataactcagggcctccatctcctcctttgaaaactccgttcctccccttcacctccacctgattattcatgtcgtgaagaaactggtctacttgtcctgtagaatc

SEQ ID NO: 857174 - DNA, 120 bp, Artificial Sequence
  ENSG00000232756_4 (sequence is synthesized)
tcttccaggataactcagggcctccatctcctcctttgaaaactgtaagtgacatctacctccaggtcatatttaatacctttcacaactggtatgtcccaggccactgagaatagaagt

SEQ ID NO: 857175 - DNA, 120 bp, Artificial Sequence
  ENSG00000232756_5 (sequence is synthesized)
ggattataaataattcattaggacttaccggtgccaaccatctgaatatcagccctcttggggttaaattaagtgagttaagtgagaattaagtgaggtaatgtgcttggcacagtaata

SEQ ID NO: 857176 - DNA, 120 bp, Artificial Sequence
  ENSG00000232756_6 (sequence is synthesized)
tgaagtggctatagggttatcctcatggtcctggatgcccagaacgtgaatggtctcactgagattacatgaggtgccagtgggcagcagcctgcgatgagactctgtgaacacacccaa

SEQ ID NO: 857177 - DNA, 120 bp, Artificial Sequence
  ENSG00000232756_7 (sequence is synthesized)
ggccttaaaggagagagaatgctgtggcactctcagagaagaaacccaggatgctttggggaagaggctggcagcctggtcttgttttctgcacgtggaggcctctggaccatgcacctg

SEQ ID NO: 857178 - DNA, 120 bp, Artificial Sequence
  ENSG00000232756_8 (sequence is synthesized)
ggtctgtgaaggaggagacctgctctatttctcagctgttgttctgttgaaacaggtggatgagtttgagcctgaaaggtaataagtaaaggagaaagactgggagcactaggctctggg

SEQ ID NO: 857179 - DNA, 120 bp, Artificial Sequence
  ENSG00000232756_9 (sequence is synthesized)
atgccctctgcatgagaaagatgggcactaaacctgtctgaggggaaggtgtagacagaaataaacacgccacagcctggagtccagaaccttgaaagtttaatgagaacagttagtgaa

SEQ ID NO: 857180 - DNA, 120 bp, Artificial Sequence
  ENSG00000232756_10 (sequence is synthesized)
gcactgccctgtgattcatctcctcacaaacaacacttaaatcacgtaggatcagggtagacaacgatcatttcatttagctacttaaaggttatttggaactcttaatagcatgttgtc

SEQ ID NO: 857181 - DNA, 120 bp, Artificial Sequence
  ENSG00000232756_11 (sequence is synthesized)
aataggacctggcttctaaatccaggcagataaaagtccattcgttccccagagtggaggacttaggatctaagccaactccataagcctgatgcacctgaatacgtgagaaaaggcaaa

SEQ ID NO: 857182 - DNA, 120 bp, Artificial Sequence
  ENSG00000232756_12 (sequence is synthesized)
aggagatgggagtgaagggagttgaagggagttgctgtggttttgtggggttttttttttttttacttttaaaaaattattttattttttcatgatcgcctcccaataagtcttagaaaa

SEQ ID NO: 857183 - DNA, 120 bp, Artificial Sequence
  ENSG00000232756_13 (sequence is synthesized)
cgcctcccaataagtcttagaaaagtaatattgaggccagtgttattttattttttcatgatcgcctcccaataagtcttagaaaagtaatattgaggccaggcgcagtggctcacgcct

SEQ ID NO: 857184 - DNA, 64 bp, Artificial Sequence
  ENSG00000232756_14 (sequence is synthesized)
tgggtgcctgctgttgtagtgagctgagatcgtgcctgtgcactccagcctaggtgacagagtg

SEQ ID NO: 857185 - DNA, 120 bp, Artificial Sequence
  ENSG00000232756_15 (sequence is synthesized)
cctgtagaatcgcccgtattgtggatttggccattgcttctacatgatgataagagaatgttacattagcagagacatccattaaacaggagagctgaggccatctgacgctgagaatca

SEQ ID NO: 857186 - DNA, 120 bp, Artificial Sequence
  ENSG00000232756_16 (sequence is synthesized)
caataacagggacaaagccaaaagggaaggaaaatgggggccaaaatggtgaggggagccaaaaagcgtgagaagaagcacgctcagcctcactggctcctgacttctctctgagtgagt

SEQ ID NO: 857187 - DNA, 120 bp, Artificial Sequence
  ENSG00000258819_0 (sequence is synthesized)
catagtaaacattcttcaattctgcacaaaagccgagaagggattttcttcaggaacctccttgtggctctgccatggcggggagggttgggggtaagaaatataagacccaattccctg

SEQ ID NO: 857188 - DNA, 120 bp, Artificial Sequence
  ENSG00000258819_1 (sequence is synthesized)
tggaggcggggattcggtgaaaccaatcccttgaatgtggggtggaaccaacatgtaactcaatttgctttggctctcactgtgcatttgagctaaagcaagggaagcatttccccttcc

SEQ ID NO: 857189 - DNA, 120 bp, Artificial Sequence
  ENSG00000258819_2 (sequence is synthesized)
cctggctgaaagctcagctgaccccgaggctcttctggtcatgcttagagtgggccctacatccaatgactggtgttctcataaggagagagagacaaagagtagacagacacaagggag

SEQ ID NO: 857190 - DNA, 120 bp, Artificial Sequence
  ENSG00000258819_3 (sequence is synthesized)
aaggccgtgtgaagatggagacagagattggaatgatacagccacaagccaagaaacatctgcggccgtcagaagttggaagaggcaaggaatgatttattctttcccactcattgtttc

SEQ ID NO: 857191 - DNA, 120 bp, Artificial Sequence
  ENSG00000258819_4 (sequence is synthesized)
tgccaccgttctgaccctgctgacaatgtggtttcagacttctggcccccagaactgtgaaagagtaaatttctgttaagttatcttgcttgtggtactttgttacagcagccctgtgga

SEQ ID NO: 857192 - DNA, 120 bp, Artificial Sequence
  ENSG00000258819_5 (sequence is synthesized)
tctaatatagtcataagagacattgtgacctcctccctgctctcttgaaccactcattctgggagaagtcagctgccatgtcatgaagctactcagggaggtccatggagaggtccacat

SEQ ID NO: 857193 - DNA, 120 bp, Artificial Sequence
  ENSG00000258819_6 (sequence is synthesized)
ggcaaggaactgaggcctcctgccagtagccagcaccatcttgctggccatgtgagcgtgccatcttagatgcagatcatacggccccagtcaagccttcaaatgactgcatccctactt

SEQ ID NO: 857194 - DNA, 120 bp, Artificial Sequence
  ENSG00000258819_7 (sequence is synthesized)
gacattttgactgtaacctcatgacaaaccctaagccagaacaccagctaagccactccccaattcctcatcaagagaaactgagataataaatgtttattattgttttaagctactaaa

SEQ ID NO: 857195 - DNA, 120 bp, Artificial Sequence
  ENSG00000258819_8 (sequence is synthesized)
aaacattcttcaattctgcacaaaagccgagaagggattttcttcaggaacctccttgtggctctgccatggcggggagggttgggggtacagctatgactccatcttcaacccctagaa

SEQ ID NO: 857196 - DNA, 120 bp, Artificial Sequence
  ENSG00000258819_9 (sequence is synthesized)
atccagcatcctcttccaacttctttctgctgacatccctttgcccttctcagaggccctacaggacttaaaatgacccccaccttggccctctctcctgccatggtccatctgatccac

SEQ ID NO: 857197 - DNA, 120 bp, Artificial Sequence
  ENSG00000258819_10 (sequence is synthesized)
atgtggcccatgggaagaactcacacagccccttcactcatcctaatgcagtccctcctggcacagtcccatgggggcccacagctccaagtggctgcatggaagcccccatcactaggc

SEQ ID NO: 857198 - DNA, 120 bp, Artificial Sequence
  ENSG00000258819_11 (sequence is synthesized)
ttgagttgaaagcagtagggcccctaactccttggtggggtagcttacagcatggctttgccctttctggaagtttctatttccaaactctccccattctccacactctatattgttggt

SEQ ID NO: 857199 - DNA, 120 bp, Artificial Sequence
  ENSG00000258819_12 (sequence is synthesized)
aggctgagggccctgagtgctatgcaactggttccccattatttcctttgtaaatactacatatgggagtctgtctcatgttcagtttgctatctgatgatattgtggtagcctgcttcc

SEQ ID NO: 857200 - DNA, 120 bp, Artificial Sequence
  ENSG00000258819_13 (sequence is synthesized)
acaatggcccctcattgtccccatctcctggtattcacatcattgtgtctcctccctccgtgaacagggccgacccttgtagccacttgctattgcagagctgatggcatgcatcttctg

SEQ ID NO: 857201 - DNA, 120 bp, Artificial Sequence
  ENSG00000258819_14 (sequence is synthesized)
tacagccaaaccaggatactcagggacttggaatctgttaccagacttttatttagtacagacacagcgccagggggctgagcattcttcagcaacaccctttggacccctttctacacc

SEQ ID NO: 857202 - DNA, 120 bp, Artificial Sequence
  ENSG00000258819_15 (sequence is synthesized)
atcatgctgtatgaacagaagggttggggacatgaaggagcagctcagctaaggtgacccagatggttgggctcagagctggaagaacaccgtggtcttctgactcccaattcctgcatc

SEQ ID NO: 857203 - DNA, 120 bp, Artificial Sequence
  ENSG00000258819_16 (sequence is synthesized)
tgtcctgcttgtaagaggcttgccaagaacaggagcttttgtttgtaggtctctagggatggccaccacagggagtgtgatttgaagatggggtcggcgtgacattacaggcccccttta

SEQ ID NO: 857204 - DNA, 120 bp, Artificial Sequence
  ENSG00000258819_17 (sequence is synthesized)
ggctctgctgggttgcaggccagctctctgggctgcctttctgatggctgctattttaaaggcagataggatgaagttagcaacaacttatatcattaaactagcaagggctcaggaggg

SEQ ID NO: 857205 - DNA, 120 bp, Artificial Sequence
  ENSG00000258819_18 (sequence is synthesized)
gcagcccccttctgggaatgtgcctagctcctgctccagaatggaggagtttctgtggctctaggagagctggccttctatggagtctgagcaatgtaccgcacggggaggagaagacgc

SEQ ID NO: 857206 - DNA, 120 bp, Artificial Sequence
  ENSG00000258819_19 (sequence is synthesized)
ttccagaagataccagtgtttctatccagagacgtttccaggacaccacgttaagcagcagagacactagaagccaaggcacctatggtctggtgtggatgtgtgcctcctgtgcctcag

SEQ ID NO: 857207 - DNA, 120 bp, Artificial Sequence
  ENSG00000258819_20 (sequence is synthesized)
agtccccatctccttcccagtttcttcaaagccttctggaaggcactggcatagcccagtcctgaggcactgctttttctttcatggatgatcaggagcttctgtgatttcttccccctc

SEQ ID NO: 857208 - DNA, 120 bp, Artificial Sequence
  ENSG00000258819_21 (sequence is synthesized)
actcttcattttgccaagatgttgcccatagtaacctcagcagtggagcgaggattctgcactgttccactgccctggggctgcacacccacgtgagcggggccgacccgtcccagagcg

SEQ ID NO: 857209 - DNA, 120 bp, Artificial Sequence
  ENSG00000258819_22 (sequence is synthesized)
ctttgccctcagaaggcagcatcacctgcaggagcaatgccatggacagctctggcttgtcctccagggccctggcatggtcagtgagaaaatgcccctggggcatgggcttctcctgtc

SEQ ID NO: 857210 - DNA, 120 bp, Artificial Sequence
  ENSG00000258819_23 (sequence is synthesized)
agtcaagttcagaaggcttcctggggtaggtagagacgctccctacccagctgagttattgaaatgataggagggagaagggaaggtctgggcatgtggcactgtgatttttttttcttt

SEQ ID NO: 857211 - DNA, 120 bp, Artificial Sequence
  ENSG00000258819_24 (sequence is synthesized)
cttctttttttttttttttttttttggagactcggggtagaaatgaggacaggaagaagtacaatccgtctgggattggtttatttttattgctttttaaaatcatgtgactaattggtg

SEQ ID NO: 857212 - DNA, 120 bp, Artificial Sequence
  ENSG00000258819_25 (sequence is synthesized)
ttcattgaaaaagagaaaacaaaaataagccaagagaagacagcaaaaataatctgttaacatcttggcaaatatcctttttctctgcatagaaacggagaatacttttgtttcacttat

SEQ ID NO: 857213 - DNA, 120 bp, Artificial Sequence
  ENSG00000258819_26 (sequence is synthesized)
aaaatgtttcttaatgtacacagctttataacctgctttttgcttaatgggacaatatactaggacatgttttcaggccaacagataaatatacttcacttgcattgatgctattggctc

SEQ ID NO: 857214 - DNA, 120 bp, Artificial Sequence
  ENSG00000258819_27 (sequence is synthesized)
gtgcatttgagctaaagcaagggaagcatttccccttcccctggctgaaagctcagctgaccccgaggctcttctggtcatgcttagccctcaccagaggctgagcagatgctgaggcca

SEQ ID NO: 857215 - DNA, 120 bp, Artificial Sequence
  ENSG00000258812_0 (sequence is synthesized)
atgctctgccctggcctgctgtgggcattcgtggtcccctttggcttcagatccagcatggctcagaaagtaacccaagttcagaccacagtaactaggcagaaaggagtagctgtgacc

SEQ ID NO: 857216 - DNA, 120 bp, Artificial Sequence
  ENSG00000258812_1 (sequence is synthesized)
agggttattctaagtcaaatgcaaagcctgtgaactttgaaaaaaagaaaaagttcatcaacctcaccatcaattccttaaaactgactcagccaagtacttctgtgctctcaggaatcc

SEQ ID NO: 857217 - DNA, 120 bp, Artificial Sequence
  ENSG00000258813_0 (sequence is synthesized)
aaagtaacattttaatgtggagcttagtaatcgcctagaatgaatggcgatatacagtttactgcaccctccaatgcgcaaaagaggcaggatggcaaaattcatgactatcttaagcaa

SEQ ID NO: 857218 - DNA, 120 bp, Artificial Sequence
  ENSG00000258813_1 (sequence is synthesized)
gccaggagactgctaaaaagccaccccggcttttcctcctccaccagctgaggcacccggtctcccggtttccacacgcgttcagagacacaaactcacccgccgctgaggaaacggtac

SEQ ID NO: 857219 - DNA, 120 bp, Artificial Sequence
  ENSG00000258813_2 (sequence is synthesized)
tgccttcgcgaccttctgggatccaggttacgagtgcgctccactggttcgagatttctgcccgtcgctcgccagggagactgagtgcccaagcgcctactcgcacaggccgcaaataca

SEQ ID NO: 857220 - DNA, 120 bp, Artificial Sequence
  ENSG00000258813_3 (sequence is synthesized)
gccgcgctgcgcggcgagctgatggaggtcttcctcttgcccggcgtgcactgcggccgggggcggggagcgcggaaccatagagaagaacgtatatagatcgtctccgctgttggctct

SEQ ID NO: 857221 - DNA, 120 bp, Artificial Sequence
  ENSG00000258813_4 (sequence is synthesized)
tctagcggttactagaaaggcccgaactgtaaattatgacccaccatgtttgattggagccgactgaatcttacgactacgggacgccatcttgaggtcaaggttccggctgggcacggc

SEQ ID NO: 857222 - DNA, 120 bp, Artificial Sequence
  ENSG00000258813_5 (sequence is synthesized)
gcgaggagtgttagaggctttctcacttttcgtagtttttcggggggtggaaccttgctttgtgattccttgaggttcgaggaactgataactgggcgcgatctgcaaccttagtgttaa

SEQ ID NO: 857223 - DNA, 120 bp, Artificial Sequence
  ENSG00000258813_6 (sequence is synthesized)
accccaagtgctgttataacaactactcgagatcaacaaataattggcaaaggctgtggaggttttttgaaaagcaaaagcttatgcgtagttgtagggccaaagaggtggctagaagat

SEQ ID NO: 857224 - DNA, 120 bp, Artificial Sequence
  ENSG00000258813_7 (sequence is synthesized)
gtttggaaaaacgtgaaaagtcctgtaatactagttaacacagctttcgttctgtaatctaaacgtgctaaaagaacttagcttaagttaatggaaatgaataaaattaatcataaatga

SEQ ID NO: 857225 - DNA, 120 bp, Artificial Sequence
  ENSG00000258810_0 (sequence is synthesized)
ctttacgctacacatttatgtcatatcttaggaacaaagaatggaatatgaggtttcaggagcctggattccagggtgatgactgatcaagggccctcccattgggaagagattagcagg

SEQ ID NO: 857226 - DNA, 120 bp, Artificial Sequence
  ENSG00000258810_1 (sequence is synthesized)
agggagaatctgtgctcacgtttggtatgaacaagtatacgaaagtagcagcatctgaaaggaaaggggttgaatggatttatatgaacattacctggaaattgccagagattcttaaag

SEQ ID NO: 857227 - DNA, 120 bp, Artificial Sequence
  ENSG00000258811_0 (sequence is synthesized)
attattttattaaggccagcagtttttacttgagtctcttagatcgttcaggtgttcaagcatatcatcatcaagaagaagagcttggccaggtgccgtggctcacacatataatcccag

SEQ ID NO: 857228 - DNA, 120 bp, Artificial Sequence
  ENSG00000258811_1 (sequence is synthesized)
gatcacttgagcctaggagtttgagaccaatctgggcaacatagtaagaccctcatctctataaaaaaatgtaaaaataaaaaaagaaggggaagctctgtaatccttttttaccaatgt

SEQ ID NO: 857229 - DNA, 120 bp, Artificial Sequence
  ENSG00000258811_2 (sequence is synthesized)
tctgtaatccttttttaccaatgtttacgccaattatttcacttttattatgtgcacaagtgggtggctaccttctcctctgtaccatctgttattgggggctgggggctcccgcctttc

SEQ ID NO: 857230 - DNA, 120 bp, Artificial Sequence
  ENSG00000258811_3 (sequence is synthesized)
cctgtgctgtggaataagtgcattgggtcagacctgtctgttctctgcaggtaagcagagccctgctctcctcctcctccccactgcctttgctcatggcctcggccgggccctgctgga

SEQ ID NO: 857231 - DNA, 120 bp, Artificial Sequence
  ENSG00000258811_4 (sequence is synthesized)
aacaccaggtgctcgctcccagcagaggtttgaacctctgtccctgcaagcttgggggttggggtcctggcagatgaggtaccaggaggccctttgggggaggcccaggctctttgactg

SEQ ID NO: 857232 - DNA, 120 bp, Artificial Sequence
  ENSG00000258811_5 (sequence is synthesized)
atggtctgcgggtgtgagcccccaagttctaggcctgggggccgaaaggaagaagcttcgaggaagagtcaagcaggccaccttgggcatacgtgctgtcaccccgggatgcccgcccag

SEQ ID NO: 857233 - DNA, 120 bp, Artificial Sequence
  ENSG00000258811_6 (sequence is synthesized)
cgcgccaagccccccacgctcacctgtaagtgcaggtggtgctggaggccaggccggggccctgcaggggcaggcacacagtggggctccgtcgccgcagcgccccggcggcctcctcct

SEQ ID NO: 857234 - DNA, 120 bp, Artificial Sequence
  ENSG00000258811_7 (sequence is synthesized)
ggccgctggccctcccctaaggcttcctcatcctaaacagcaagtgaagccaaacgaaaaccctgtctctcccgccgttccctccctcctggcctccgtcccccgggctcgcctgccccg

SEQ ID NO: 857235 - DNA, 120 bp, Artificial Sequence
  ENSG00000258811_8 (sequence is synthesized)
ccgcccggcggaccggtcccttcctgctttccctggcgggtgctttccgctgctctgttacccggagccaggacgcgcatatattcccagaatccgcgctcagtgcgttcggtcccccgg

SEQ ID NO: 857236 - DNA, 120 bp, Artificial Sequence
  ENSG00000258811_9 (sequence is synthesized)
gacacctgttctctgcacaggcgcgtctgggcgcagcgggggcagacacgcgttcccgggcagcgactccggaaggcccgagggagtaaatctggccctcccggttcagcacaaagctcc

SEQ ID NO: 857237 - DNA, 120 bp, Artificial Sequence
  ENSG00000258811_10 (sequence is synthesized)
cctggccgcctttcaaaaccgaccgcctcccaactctccgcggacacgagtggcggctgcctcccctcccctcccctagggccgcgcacgcctcccgcagggtctcagtgcctcctgggc

SEQ ID NO: 857238 - DNA, 120 bp, Artificial Sequence
  ENSG00000258811_11 (sequence is synthesized)
gggggataattcctgtccccaccggtgtcctgtactcgcggggtcccgggtgtaagttctgggtcccgggctggctccctggtgagcaaagccgcatcgctcgaattccagaaacccttc

SEQ ID NO: 857239 - DNA, 120 bp, Artificial Sequence
  ENSG00000258811_12 (sequence is synthesized)
tcgccgagcgcctgcctggctgctgaaagcctggagactgcgctctcggaggtggatttcggaactcaggagagaagaatgagacgctccctagtacccctagtcccccaggggtgggag

SEQ ID NO: 857240 - DNA, 120 bp, Artificial Sequence
  ENSG00000258811_13 (sequence is synthesized)
aaataagattctgcaactcgacttttataggggaaaccaggcacgcatttcaaaatcttctcatccgtccccacctccttgcgccgcttttccgcgcctcctgtgccacggaagctgccc

SEQ ID NO: 857241 - DNA, 120 bp, Artificial Sequence
  ENSG00000258811_14 (sequence is synthesized)
tctgctcctgctgtttccagcccggcagcccccagacaggatctagcttggcccagccgggccctgcttcctctgcctggggtcctcaggccatgcaagtgaggaaacccaggctcagag

SEQ ID NO: 857242 - DNA, 120 bp, Artificial Sequence
  ENSG00000258811_15 (sequence is synthesized)
gggccacgtaactcttcccaaatcaccagcaagcctggtgcagccacggtggcgcgcattcgcccactcggagaccgagaggcaggttttctgcctgcacagcctcccgcccaaggccag

SEQ ID NO: 857243 - DNA, 120 bp, Artificial Sequence
  ENSG00000258811_16 (sequence is synthesized)
acctgctggaggcccaggccctggagatggctgtcttcagggagactctttatgtcacgctcattcactccctagcgcctctttctggcaacggatgtgtccagcgttcaggtctcttaa

SEQ ID NO: 857244 - DNA, 120 bp, Artificial Sequence
  ENSG00000258811_17 (sequence is synthesized)
cttacggtctccgtttttccaagtttggaaatcagctcagagcagagcgggcaaagaggggctttcactggtgctcagagctcacctgcgaaggagggaccacagcctccgggatgcagc

SEQ ID NO: 857245 - DNA, 120 bp, Artificial Sequence
  ENSG00000258811_18 (sequence is synthesized)
gccctggctgcctactgctggctggctggcccctcccctgcagattcctcctcacccagccccgcacaggctgagggcttcactaaccagaaccatagtgtgacaaatgcacactggggg

SEQ ID NO: 857246 - DNA, 120 bp, Artificial Sequence
  ENSG00000258811_19 (sequence is synthesized)
gttacggaggaagagcagagttggggtcagaaggcatttaccctgagaaaaaagggcacatggcacacaacccatgaagggaagggagaggaacagcatgtgcaaaagctcagagttcag

SEQ ID NO: 857247 - DNA, 120 bp, Artificial Sequence
  ENSG00000258811_20 (sequence is synthesized)
agtggtggcctggagcttagctggagtcaaaggtgatggtgggaggtgagggtctggtgcaggtggttctcccaagctgggctgagctgtatgacttgaccctgaggggcatgcgggcca

SEQ ID NO: 857248 - DNA, 120 bp, Artificial Sequence
  ENSG00000258811_21 (sequence is synthesized)
ggctgtgttttgtggggaggcaggagccaggacacagattgggggaaaggggtaaaggagcctggtccctgcggccgcctgcttacctaggacctcaggacttggggaataagtggccat

SEQ ID NO: 857249 - DNA, 120 bp, Artificial Sequence
  ENSG00000258811_22 (sequence is synthesized)
cctttggaatgctctcaagggatctcagataaggggaggcagaagagtgttctggagaaagcagggcccatccttctccaccccaccaccctctccccatgtccctggagctggctcctc

SEQ ID NO: 857250 - DNA, 120 bp, Artificial Sequence
  ENSG00000258811_23 (sequence is synthesized)
tcccacaagccaggcctggccagcccctggtatctcaccctgccaaagagctatgtagtggcagttccacaccctgtgcccctcccccaccccacccacagtgaggaccccctggtgttg

SEQ ID NO: 857251 - DNA, 120 bp, Artificial Sequence
  ENSG00000258811_24 (sequence is synthesized)
gggacactccgggtctgtgggatttctccagaagcagactcagacagggattggcacccacactgaaaagttaacatagtctaaatatgtgtgtccctcccaagttcacatgtgatggtg

SEQ ID NO: 857252 - DNA, 120 bp, Artificial Sequence
  ENSG00000258811_25 (sequence is synthesized)
gtattagggggtagggcctttgggaggtgattaggtcatgagagcacagcccttaggaatggcaatagtacctttataaaaatggcccaagagagatccctcatccctcccaccatgtga

SEQ ID NO: 857253 - DNA, 120 bp, Artificial Sequence
  ENSG00000258811_26 (sequence is synthesized)
ggacacagtgagaagccccatctatggaccaggaagcagccctccccagacactgctggggccttgatcttggactccacagcctccagaacaatgagaataaatttctgttgtttgtaa

SEQ ID NO: 857254 - DNA, 120 bp, Artificial Sequence
  ENSG00000258814_0 (sequence is synthesized)
gagttctggcttaagcacagtcaaaatcagagggttgcaaggccctatggaataaccagcacttttgcaccctttctcttagcctgggtaaagtttgaatcctggaactgggctttgtgg

SEQ ID NO: 857255 - DNA, 120 bp, Artificial Sequence
  ENSG00000258814_1 (sequence is synthesized)
aatagcacagtggacattttcaggcctgctgtgttgcctcttgtactacggagaggagagtttcattgaattttttgagatatgactttgtacctgtacaaatgccccacatgttagtta

SEQ ID NO: 857256 - DNA, 120 bp, Artificial Sequence
  ENSG00000258814_2 (sequence is synthesized)
ctcaattttaaatagaagttttatccttttaagaagatctctttctcctgtataaatttgtcacttgtattgaaattatagattcacaagattcattaattttgaaattgttctgcacgt

SEQ ID NO: 857257 - DNA, 120 bp, Artificial Sequence
  ENSG00000258814_3 (sequence is synthesized)
gtatcctgattcccatggatgattttcatcctctgcatttacttcatcgaaaaacaaacagcttggaaattacacatgtgtttcaagaaaagccctgattttgctgcttcatggctagga

SEQ ID NO: 857258 - DNA, 120 bp, Artificial Sequence
  ENSG00000258814_4 (sequence is synthesized)
ccattcaggatatgaaataggaggcatgaaaacagctagagtttaagataagtaaatgtagaactaataacaacaaaaatgcagccactatcctcaaataagcataggctgagatgtatt

SEQ ID NO: 857259 - DNA, 120 bp, Artificial Sequence
  ENSG00000258814_5 (sequence is synthesized)
ccagagaatacctataaaataattgtttaagttaaatccaaagaaattcacttgctgaattggaatgctgaattaaagacatcctaaaagagaaaatttaaggttctaagactttccttg

SEQ ID NO: 857260 - DNA, 120 bp, Artificial Sequence
  ENSG00000258814_6 (sequence is synthesized)
ctctttttatcaatattgcttaaaatgctacaagtctcgttttcattacattagatttcccagcactgaaaggaaatcagttgcctgttcaaaaccaaaaaatatatataaattgactat

SEQ ID NO: 857261 - DNA, 120 bp, Artificial Sequence
  ENSG00000258814_7 (sequence is synthesized)
aattgtcttctttcctggctaacattagaaaatattaatatattggtaatatttgactttttggaatatattctgcaaagcaattgtaatttccccacatatttttgtatacatcaacta

SEQ ID NO: 857262 - DNA, 120 bp, Artificial Sequence
  ENSG00000258814_8 (sequence is synthesized)
atggacatgccgatccctatataagatgaaaatagctctctaactatataagtaaattaataatgatcaaattcacccctgtttaatcatgcaattatcaagtcgctaagaaaggctgaa

SEQ ID NO: 857263 - DNA, 120 bp, Artificial Sequence
  ENSG00000258814_9 (sequence is synthesized)
gagttaagtaagataataaaggtatccccatcctcttgggaagctccaggaaagctatcatgtgctagcgtgttgtattgagctgagaaagcagcctcagaataacacagaatgaaaacc

SEQ ID NO: 857264 - DNA, 120 bp, Artificial Sequence
  ENSG00000258814_10 (sequence is synthesized)
atctcttcttacagttcaccaagtcgaggtgcaaattatggtcacacatttctaatattcctatgatatgattttgaattatctactggcccttttcacacattggattccacttgccta

SEQ ID NO: 857265 - DNA, 120 bp, Artificial Sequence
  ENSG00000258814_11 (sequence is synthesized)
atctctgtgatgcataccaaaaactccaggaagcttaatcagccaaaagaactgaggggacaagtccactctatggccaaatgcattaactgaaagagagcaatcttcactgaaaaccaa

SEQ ID NO: 857266 - DNA, 120 bp, Artificial Sequence
  ENSG00000258814_12 (sequence is synthesized)
agttatttcaaagattgaggataaacttccaaggattattaacctaatggcataattattctgcatgattctaaagatcctctctaagttcatcaagtcatcatgtttgaacattctagt

SEQ ID NO: 857267 - DNA, 120 bp, Artificial Sequence
  ENSG00000258814_13 (sequence is synthesized)
ggtccctgcattactagctgactggagagttgaaagaaaatgaaggaggttttgactggtcggtcacacacagtcttcactgagaagctagtattcctcttcttcaacaaaaaagaaaat

SEQ ID NO: 857268 - DNA, 120 bp, Artificial Sequence
  ENSG00000258814_14 (sequence is synthesized)
tcataaaatgaaatctacataattgcatctcctaaggattattggaagactacaataaagcattttgtcaaatgaatgtgctgaggtaaaagaaaataaataaacaaataattaaatgga

SEQ ID NO: 857269 - DNA, 120 bp, Artificial Sequence
  ENSG00000258815_0 (sequence is synthesized)
tccgtgggcgtaggaccctccgagccaggcatcagctatcaaaacttatgggaaatggaattgaagacaactacttctagaattggtgcatggaagcttctcataggtgattagccacac

SEQ ID NO: 857270 - DNA, 120 bp, Artificial Sequence
  ENSG00000258815_1 (sequence is synthesized)
gaagcttctcataggtgattagccacactcttcttctgtcaacctggtgcagaaaagcttgaagaccttggaaatcacatattgatgatggaggagatacaagaatgaaggaccctgggt

SEQ ID NO: 857271 - DNA, 120 bp, Artificial Sequence
  ENSG00000258815_2 (sequence is synthesized)
agagcactcattttgacattgcaaacggaaaaattcacttctatcaggtttgaaccaatatatagtttagggtttttaaaaaataactgttagcatgactttaactaatacacatgccat

SEQ ID NO: 857272 - DNA, 120 bp, Artificial Sequence
  ENSG00000258815_3 (sequence is synthesized)
acaggatcagacctctgtgactttgcttttacagtctgctctgtctggaggggagtttcatctttgccatccttaatgatatagcatagacgctatgtcctccagaaacttccttggcac

SEQ ID NO: 857273 - DNA, 74 bp, Artificial Sequence
  ENSG00000265415_0 (sequence is synthesized)
tgggactacaggtgtgcgtcaccatgcctgggtaattttaaatttttgatagagacagggtctcgctatgtttc

SEQ ID NO: 857274 - DNA, 120 bp, Artificial Sequence
  ENSG00000265415_1 (sequence is synthesized)
acagggaactaggtctcacagtgacctgctatggacttcagagattccttggcaaggcattgtcgaaaatataaggttcatgttgaagttgtcataaaatttttatgtagctgtataaat

SEQ ID NO: 857275 - DNA, 120 bp, Artificial Sequence
  ENSG00000265413_0 (sequence is synthesized)
taaaaaaatacttctacctttattggcattgtgtgtggaaaaagtggtctatttaagggaaatacaggctagtaaaatatttgttatttgcactaggagataatttaaggaacaccttct

SEQ ID NO: 857276 - DNA, 120 bp, Artificial Sequence
  ENSG00000265413_1 (sequence is synthesized)
caaatgtcatcagacttactttaaaggcaaaccaagtccaaaagttctaaattgagaaagctggaagggaaacttaaatatgatccaaccccctgttttatgaccagaggggaatggatt

SEQ ID NO: 857277 - DNA, 120 bp, Artificial Sequence
  ENSG00000265413_2 (sequence is synthesized)
ggccaagatgtcggggatggttaataggacctcaggctcctggtcagtgtggggcactcagacccatgagtctagaaagcaaagaacaactggattcatgtttcctatgtcagagtccac

SEQ ID NO: 857278 - DNA, 120 bp, Artificial Sequence
  ENSG00000265413_3 (sequence is synthesized)
ccagttgcagttccacctgagtccttcacagacattaaaggtaggattcacatcatggaataagcatttttctactagcgatttgtttaataaagctttattggaatataatttgcatgc

SEQ ID NO: 857279 - DNA, 120 bp, Artificial Sequence
  ENSG00000265413_4 (sequence is synthesized)
cataacatttccccttttagatggaaataatagacactgggaactccaaaagagcagggaggagagggagggttgaaaaattacctgttgggtataacattcgattgtaatcagtttcca

SEQ ID NO: 857280 - DNA, 120 bp, Artificial Sequence
  ENSG00000265413_5 (sequence is synthesized)
gtgttttgcattcctaccagccgtgtaatgcactatgaacattcatttgggggatgaataccctaggagcccaatccccaccattacatgtgtaatacccatgtaataaacaagcacatg

SEQ ID NO: 857281 - DNA, 120 bp, Artificial Sequence
  ENSG00000265413_6 (sequence is synthesized)
taccccaaataaaaaaaaatccccttttaaagtgtgtcattcactggttttcagtgtattcacagagttatgcaaccatcaccacaaaccaaatgtttaacatttccatcacccacttag

SEQ ID NO: 857282 - DNA, 120 bp, Artificial Sequence
  ENSG00000265413_7 (sequence is synthesized)
ccccctcaaagaaatcctagacctactagcagccactccccattacccacttccaggctctggcaaccacccttcagcttccagtctttatagatttgcatgtgctgggtgttttcatag

SEQ ID NO: 857283 - DNA, 120 bp, Artificial Sequence
  ENSG00000265413_8 (sequence is synthesized)
aaaaggagtgtgtgcccttttgaatctgatttctttcactcagcagattcatccatgcttcagttcatccacgttgtaacatggattagtacttcattccttttcatagccaagtaatat

SEQ ID NO: 857284 - DNA, 120 bp, Artificial Sequence
  ENSG00000265413_9 (sequence is synthesized)
catttgagttgtttaccctttttggctgttaggaataatgctctgtgaacatttgtttacagagtttttgtgtatacgtatgttttcagtttccttaggtgtacacccagtagtagaatt

SEQ ID NO: 857285 - DNA, 120 bp, Artificial Sequence
  ENSG00000265413_10 (sequence is synthesized)
gctaggtcatatgggaattctgtgtttaaccttttgaggagctgccagacggttttccaaagtggctgcaccgtttgacattccctccagccgtgtatgagggttcgctttctccacgcc

SEQ ID NO: 857286 - DNA, 120 bp, Artificial Sequence
  ENSG00000265413_11 (sequence is synthesized)
ctcgctaacacctgcgattttcttgttatgtgagccttctcgtgaatgttattccactgacattaatctcatggcaccgtcagtgattgaaatgatcttcttgttctctgtcttcgcctc

SEQ ID NO: 857287 - DNA, 120 bp, Artificial Sequence
  ENSG00000265413_12 (sequence is synthesized)
tggatcatgaccttcccgaggactgaatgtgtcataaaatccccagtctctagcagtacatgtgtattgagttggatcacatgctgctggacccatggcttgtcatcatgtgtacatgta

SEQ ID NO: 857288 - DNA, 120 bp, Artificial Sequence
  ENSG00000265413_13 (sequence is synthesized)
gccgactttgactctcaactgtgtcagttctgggctagagactgttactttatacaaagagagataaactgtgtcccttgtcctcaaataaataggttggactactagggtatttacaaa

SEQ ID NO: 857289 - DNA, 120 bp, Artificial Sequence
  ENSG00000265413_14 (sequence is synthesized)
acagagtgtaggtgaagaaaaggaaatttcagtgacaaattaggaggcacttaagaaatactggacgttttcaattaatttggcaaaatgaaaagtaatagatacatttccttggttgtg

SEQ ID NO: 857290 - DNA, 120 bp, Artificial Sequence
  ENSG00000265413_15 (sequence is synthesized)
gctgtgatgggtagagacagtggtgctgaacctcgctcacacatgtgaaagcttgtctgctccagaagtagaagagagccttccagttgctaaggctctgtccagggccgggctcctgcc

SEQ ID NO: 857291 - DNA, 120 bp, Artificial Sequence
  ENSG00000265413_16 (sequence is synthesized)
aggtggcaggcagaggcttcctcaagccctgcgtccctcttctgggttcagagaccactcccaggcttggttctatcagcacactccatgcatacaggtgcagaatgctctccccggcca

SEQ ID NO: 857292 - DNA, 120 bp, Artificial Sequence
  ENSG00000265413_17 (sequence is synthesized)
cccgagaccacacctcagccaggaccttgtgcagagcttgcttgggccaaggtacacgatccaggaaagctgagctcaagaaaaatgaatccaatgctggatgtggtgactcgtgcctat

SEQ ID NO: 857293 - DNA, 87 bp, Artificial Sequence
  ENSG00000265413_18 (sequence is synthesized)
aatcccagctaattagagttcgaggctgtgttgagccatgattgcaccaccgcactccagcttgggtgacaaagggccatgtttctt

SEQ ID NO: 857294 - DNA, 120 bp, Artificial Sequence
  ENSG00000274177_0 (sequence is synthesized)
aaaccctgaaagcccccgacacaggctgggcagtcccagaggaaggaggtggctggcctcccccacccccacgggctcgggaaggtcaggcccagccagcaggggtcagaggcggctcag

SEQ ID NO: 857295 - DNA, 120 bp, Artificial Sequence
  ENSG00000274177_1 (sequence is synthesized)
ccaggggagttgtgtcagaagctgcggagtcactcggggggacactgtcctggggggcgtgggggaggcccccagcagggcccagcgggctggctggacgccgctccaggagggaggcgc

SEQ ID NO: 857296 - DNA, 120 bp, Artificial Sequence
  ENSG00000274177_2 (sequence is synthesized)
tcaggccggacaggaaggaggcgtctgtgatgatggcagcggtctctgccatccaacccaggtcaccaccggcagctcgtagtggtggaagaagtagatcatggaatgctgcgggaggga

SEQ ID NO: 857297 - DNA, 120 bp, Artificial Sequence
  ENSG00000274175_0 (sequence is synthesized)
gagagactacaactcccagtatgcaccgcgatgcgcgcctcaccctgcatctcccagcccgcagccagctggcatcctagaccctctgccctgcgaccaacagccgggagcggaccagac

SEQ ID NO: 857298 - DNA, 120 bp, Artificial Sequence
  ENSG00000274175_1 (sequence is synthesized)
accagaactcccggaacggttgaagacggttccgctccctgtcccgcctttcgcagcccagcagtttcgccctgcggagaggagccttgctgtttccaaatctctcctgctgaagagaca

SEQ ID NO: 857299 - DNA, 120 bp, Artificial Sequence; identical to SEQ ID NO: 655241
  ENSG00000274175_2 (sequence is synthesized)

SEQ ID NO: 857300 - DNA, 120 bp, Artificial Sequence; identical to SEQ ID NO: 655242
  ENSG00000274175_3 (sequence is synthesized)

SEQ ID NO: 857301 - DNA, 120 bp, Artificial Sequence; identical to SEQ ID NO: 797391
  ENSG00000274175_4 (sequence is synthesized)

SEQ ID NO: 857302 - DNA, 120 bp, Artificial Sequence; identical to SEQ ID NO: 797392
  ENSG00000274175_5 (sequence is synthesized)

SEQ ID NO: 857303 - DNA, 85 bp, Artificial Sequence; identical to SEQ ID NO: 797393
  ENSG00000274175_6 (sequence is synthesized)

SEQ ID NO: 857304 - DNA, 120 bp, Artificial Sequence; identical to SEQ ID NO: 787217
  ENSG00000274175_7 (sequence is synthesized)

SEQ ID NO: 857305 - DNA, 120 bp, Artificial Sequence; identical to SEQ ID NO: 787218
  ENSG00000274175_8 (sequence is synthesized)

SEQ ID NO: 857306 - DNA, 120 bp, Artificial Sequence; identical to SEQ ID NO: 787219
  ENSG00000274175_9 (sequence is synthesized)

SEQ ID NO: 857307 - DNA, 120 bp, Artificial Sequence; identical to SEQ ID NO: 787220
  ENSG00000274175_10 (sequence is synthesized)

SEQ ID NO: 857308 - DNA, 120 bp, Artificial Sequence; identical to SEQ ID NO: 748390
  ENSG00000274175_11 (sequence is synthesized)

SEQ ID NO: 857309 - DNA, 120 bp, Artificial Sequence; identical to SEQ ID NO: 748391
  ENSG00000274175_12 (sequence is synthesized)

SEQ ID NO: 857310 - DNA, 120 bp, Artificial Sequence; identical to SEQ ID NO: 748369
  ENSG00000274175_13 (sequence is synthesized)

SEQ ID NO: 857311 - DNA, 120 bp, Artificial Sequence; identical to SEQ ID NO: 748393
  ENSG00000274175_14 (sequence is synthesized)

SEQ ID NO: 857312 - DNA, 120 bp, Artificial Sequence
  ENSG00000274173_0 (sequence is synthesized)
ggaaatgactgacctgatgtgtgttataacccatctgagccccctacaaccaccagttttgaaataagattaagaactggccttttcctaggtgatacaagtgaaataataactagaaca

SEQ ID NO: 857313 - DNA, 120 bp, Artificial Sequence
  ENSG00000274173_1 (sequence is synthesized)
gaagaaaaaggaatccccaaacaagtaactttaagatttgacgcttgtgcagccattaatagtaacaagctaggaacaggatgtggttctcttaactgggaaaggagctacagagtagaa

SEQ ID NO: 857314 - DNA, 120 bp, Artificial Sequence
  ENSG00000274173_2 (sequence is synthesized)
aataaatatgtttgtcatgagtcaggggtttgtgaaaattgtgccttttggccatgtgttatttaggctacttggaaaaagaacaaaaaggacttggttcatcttcagaaaggggaagcc

SEQ ID NO: 857315 - DNA, 120 bp, Artificial Sequence
  ENSG00000274173_3 (sequence is synthesized)
taataattaccaatcccctagatccccattggaaaaagggagaatgtgtaaccctggggatcaaagggacagggttaaacccccaagttgccattttagttcaaggggaggtccacaagc

SEQ ID NO: 857316 - DNA, 89 bp, Artificial Sequence
  ENSG00000274173_4 (sequence is synthesized)
ggggaggtccacaagcactctcccaaaccagtgtttcaaaccttttatgaggagttaaatctgccagcaccagaacttctgaaaaagat

SEQ ID NO: 857317 - DNA, 120 bp, Artificial Sequence
  ENSG00000274173_5 (sequence is synthesized)
ggggaaccactatcagagaccgatggccttgggaagcctgagagttggtgcccactgatccagctcctgatataatgggggcttgtccaggatctcatcaggactggatggctctcgctg

SEQ ID NO: 857318 - DNA, 120 bp, Artificial Sequence
  ENSG00000274173_6 (sequence is synthesized)
gactatactggatatgtgggcagagagcctacattcagttacctaatgaatgggcagacagttgtgttattggcactattaagccatcctttttcttattaccgataaaaactactggta

SEQ ID NO: 857319 - DNA, 73 bp, Artificial Sequence
  ENSG00000274173_7 (sequence is synthesized)
tgtaaaactttttgttctgttagctgatatatgtagcctccagtcacattcctcatgcttacttgatctatca

SEQ ID NO: 857320 - DNA, 69 bp, Artificial Sequence
  ENSG00000274173_8 (sequence is synthesized)
gggggagcttggctcttaagacatgagtctgccaatgctaccggccaaataaaaacctcttccttcttt

SEQ ID NO: 857321 - DNA, 120 bp, Artificial Sequence
  ENSG00000270883_0 (sequence is synthesized)
tgagatacacgttgcacactgtgaaacaaaggtacggaggtgaaggagagaagacatctcagaggcgcctactcaccactgtccttgcccctgtaactccctctattccatgttgaaacc

SEQ ID NO: 857322 - DNA, 120 bp, Artificial Sequence
  ENSG00000270883_1 (sequence is synthesized)
ccccaatgaataccgccctcagacacaaatttgttttcattcttttagtcatctccggccccaataaaagtcagaattgtaacctatactccttcaggttcatcagccaataaaggatcc

SEQ ID NO: 857323 - DNA, 120 bp, Artificial Sequence
  ENSG00000270883_2 (sequence is synthesized)
tgccttgtcccttatagcaattggaagagaacctcctattttgcagtgccatttgtaattctaatagtagcagtggcttaggtttgctgatgaatgaatttgaataaatgcttctgacac

SEQ ID NO: 857324 - DNA, 120 bp, Artificial Sequence
  ENSG00000234688_0 (sequence is synthesized)
atcacagtcagacgggcacaaaacttcaaccagccgtttctctgcctggaagcggcgaacatgtaacctggacgggaggctggatggggacacataccatgagtgacatcttaccagagg

SEQ ID NO: 857325 - DNA, 120 bp, Artificial Sequence
  ENSG00000234688_1 (sequence is synthesized)
gtggccatgaacttcatcatgttccacaactgttaatgaccactggcgctggccctgctgctctctgaactcctctctgtggaactgtgccccttctctgggaagagtccttgaagctct

SEQ ID NO: 857326 - DNA, 120 bp, Artificial Sequence
  ENSG00000234688_2 (sequence is synthesized)
tcaatcttggtattttcccaacatgttcaggttctggcttggaggtgctatctgttgttgactttggacataaacgaagctgttatttgcctcttttggtttgttatgttaacaagcttt

SEQ ID NO: 857327 - DNA, 120 bp, Artificial Sequence
  ENSG00000234688_3 (sequence is synthesized)
tgggatttgttctttaagattccccacccctattgtatgatgataggtgctggaaccagactggttgggttcaaatttttgctgtcgctaacttgctttgtgaacacatgtcagttactg

SEQ ID NO: 857328 - DNA, 120 bp, Artificial Sequence
  ENSG00000234688_4 (sequence is synthesized)
aatctccccgtgcctcagttttttaaatatgtaaacagggagttctcgtagtacccgtgggtcttagtcagttattgctatagaacaaaccacccccagacttagtaacatcaacaacaa

SEQ ID NO: 857329 - DNA, 120 bp, Artificial Sequence
  ENSG00000223571_0 (sequence is synthesized)
ctgcagatgtctgacgtaatgagaatgcgtgagccaccacgcccggacttaactttctaaattaactgacaccatctcagatattcagggttcacaaaggcttggaggggcctgcaaata

SEQ ID NO: 857330 - DNA, 120 bp, Artificial Sequence
  ENSG00000223571_1 (sequence is synthesized)
tatacaattatagaattaaatagtgatggatagagtcccttattcaaaaatactgttataaattaagttaaaatattaaagtcaaagaaacttcacacccataatcgcaatgctttcaga

SEQ ID NO: 857331 - DNA, 120 bp, Artificial Sequence
  ENSG00000223571_2 (sequence is synthesized)
ggcaacacagcaagatgccatttctacaaaaatttttcaaaaatagctgggcatggtggtgtgtacatgtggtcccagctactggggaggttgaggcgggaggatcacttgagcccagga

SEQ ID NO: 857332 - DNA, 120 bp, Artificial Sequence
  ENSG00000223571_3 (sequence is synthesized)
ctgcagtgagatgtgctcaaatcactgcactccagcctggctgagagaccaagaccttatctcttaaagaaagaaaataggcggctgggtccggtgactcacgcctgtaatcccagccag

SEQ ID NO: 857333 - DNA, 120 bp, Artificial Sequence
  ENSG00000223576_0 (sequence is synthesized)
agagcttttatttatataagatggaattcatgcttatataaacatgaatgacatctaaaacaagcaataaatatctaaaatgtaagaaagtattataaaacaaataaagagtgaaagaaa

SEQ ID NO: 857334 - DNA, 83 bp, Artificial Sequence
  ENSG00000223576_1 (sequence is synthesized)
caggcacaggccaaagcaggtggatggcttgagctcacaagttcgagaccagtccgggcaacatggagaaaccctgtctctac

SEQ ID NO: 857335 - DNA, 120 bp, Artificial Sequence
  ENSG00000266290_0 (sequence is synthesized)
gggagccgtggccttaagaaaggagaggaatgcggacccctccccccggggctggagaggccaggcctgaaaaggaataaagagacatggtcctgagagaggaggagagggaagggtgtg

SEQ ID NO: 857336 - DNA, 120 bp, Artificial Sequence
  ENSG00000266290_1 (sequence is synthesized)
gagacccccagtcccaaggagaaaaaagggagagggggatggagatttcagacccagggaacagatggggctgaggtagagaccccaaccttagagaggggaggagatgaagtcaccagc

SEQ ID NO: 857337 - DNA, 120 bp, Artificial Sequence
  ENSG00000266290_2 (sequence is synthesized)
ctcagaggaaaagacaggacactccctcctcccgtatctgtgagaaagagagggacagccagccctatggagagggagaggcataggagccccaggactccctcccctcaccttccggga

SEQ ID NO: 857338 - DNA, 120 bp, Artificial Sequence
  ENSG00000266290_3 (sequence is synthesized)
aggtcccttcttcctcctttgttctttgaggctgaaggacctaaactcccagctgggcccccagccggtatttgtctacaggagcaatggagacagagccgaagcaaaattgatggggat

SEQ ID NO: 857339 - DNA, 120 bp, Artificial Sequence
  ENSG00000266290_4 (sequence is synthesized)
gtgtctttggtagacaaggttggaggagagtgaatagaagcccccagaggtggtgcctgtcagagctgtgaggagccttcaaaaaccacccatccacacccctcactttataaaggagag

SEQ ID NO: 857340 - DNA, 120 bp, Artificial Sequence
  ENSG00000266290_5 (sequence is synthesized)
aatccaagtacagagagccctgccagatcccgcaggtcaggcttgacttgcttctagctgaaaagaggtgcacccaggaagcagcccctctggaggctcaagagactacttctgggagag

SEQ ID NO: 857341 - DNA, 120 bp, Artificial Sequence
  ENSG00000266290_6 (sequence is synthesized)
tgggtgtgaacgtgcgcgttgggagcctgcctgccctcactccatcccactcccaggaaagatcctcaggcctgcggttttctttctggtctgttttatacagaagtgtctacctcaagg

SEQ ID NO: 857342 - DNA, 120 bp, Artificial Sequence
  ENSG00000266290_7 (sequence is synthesized)
gctgacgagcctttattgggaaccaagcattttggccatacagtagggattaagaagctgccggggatagctcccactcccatcttttccccttcgcctctccaaaccatggtcaggaag

SEQ ID NO: 857343 - DNA, 120 bp, Artificial Sequence
  ENSG00000266290_8 (sequence is synthesized)
tcagacttgccctggccctggcctgctctggtttgaagcatcaaaagttagtgttcgttatgtgtcaggggaaacctggaaaaatcattccctctggttactgctttccacagttctgtc

SEQ ID NO: 857344 - DNA, 120 bp, Artificial Sequence
  ENSG00000266290_9 (sequence is synthesized)
ctctaacaacctcagttgggggatttcagagaccagttaaggcctggggtatcccctcacactaagggttttctgatgtcagtctttgtgttcatgaatgggaggcgtggcctctatggg

SEQ ID NO: 857345 - DNA, 120 bp, Artificial Sequence
  ENSG00000266290_10 (sequence is synthesized)
aggaagggagggagacgaggaaggatgatttatacacttagggcttgtgcggggctaatcgcctggactgcctggagaaagcgaagctagtaccccctttctccaacagtccttagtttc

SEQ ID NO: 857346 - DNA, 120 bp, Artificial Sequence
  ENSG00000266290_11 (sequence is synthesized)
caggcccttccagggcctgaaggtcagatctgccacgtatggttgcacaggtcattcactgcgcaagagtatccaaccgatggagcaagcgggtgctaaaatacagccggcacactgctt

SEQ ID NO: 857347 - DNA, 120 bp, Artificial Sequence
  ENSG00000266290_12 (sequence is synthesized)
gctagcctgtgtgtcacggtacaagccagtgtccaaccagaagatgacttctttcaagtgttcccaagggttactatgagctagcagtggcccttcaaaggccatgctgccagggcataa

SEQ ID NO: 857348 - DNA, 120 bp, Artificial Sequence
  ENSG00000266290_13 (sequence is synthesized)
atcctccctctccctgctccccttccctgaagtataatagggataagagcttgctcatttccaggctgtggtgtggtggacagaagggcacgaagaacttcaactaacagaagtcagagc

SEQ ID NO: 857349 - DNA, 120 bp, Artificial Sequence
  ENSG00000266290_14 (sequence is synthesized)
cacgggttttcacttttaggaaatgtgaatatcagtgctcttgtgtgtgtgtgtgtgtgtgtcaaggactaaactgtagaataacagggagatgtgttaatagtatggtttataaataat

SEQ ID NO: 857350 - DNA, 120 bp, Artificial Sequence
  ENSG00000266290_15 (sequence is synthesized)
aataagtaatcctcatgaatcccttgctctatgtcaggctctattctaagtgttttaaatgcaatgcgttccatttaatcccagaagctgccttttgaagtgcatatatgactatcaccc

SEQ ID NO: 857351 - DNA, 120 bp, Artificial Sequence
  ENSG00000266290_16 (sequence is synthesized)
tgtacagatgagcaaactacagtttagagaagttcagtaactgacccaagattatccagtttgtcagcggcaggattcaactccagattgtttccactgcctacaatcttagccattata

SEQ ID NO: 857352 - DNA, 120 bp, Artificial Sequence
  ENSG00000266290_17 (sequence is synthesized)
ctatactgcatcctaacagagaaaagaggagagaaagtgtaaaacagagtttggccctctatctaaattataccagtattccttaaacttatctgactccaaagccctttttttaatcca

SEQ ID NO: 857353 - DNA, 120 bp, Artificial Sequence
  ENSG00000266290_18 (sequence is synthesized)
aacatttattaacatctccaggaactactattccacaggacacagtttgggaaacttgtgatatactaattactgctatttgtgtaaaatgcttactgttcaggataattactatgcaac

SEQ ID NO: 857354 - DNA, 120 bp, Artificial Sequence
  ENSG00000266290_19 (sequence is synthesized)
atagtcactgttataattaatatgttagcttaacttggtgaatgtttttatttgatacagctacactgtttgtgattgcccagtttcctgttgcccagataacatggtcatgtcttctga

SEQ ID NO: 857355 - DNA, 120 bp, Artificial Sequence
  ENSG00000266290_20 (sequence is synthesized)
cttaaaaatcaaaatcagactattgtttttggctctttggtggacccctttccatctggctacttctttaacttcggggttccccagggctctttgcttccttcactgctcaacttagaa

SEQ ID NO: 857356 - DNA, 120 bp, Artificial Sequence
  ENSG00000266290_21 (sequence is synthesized)
atttcacccacattcatggtttttaccatgatctgggccccgatgaccccctaatgcctggacctctccactgtggatgccccacaggctcttcagactcttcgcatacacacatataaa

SEQ ID NO: 857357 - DNA, 120 bp, Artificial Sequence
  ENSG00000266290_22 (sequence is synthesized)
gcagtgggccagaatgcatggattctgacctttttccaccactctaccagctgtgcagatttggctaagctattcaacatttccaaatttcattttcctcatctataaattgagaatcat

SEQ ID NO: 857358 - DNA, 120 bp, Artificial Sequence
  ENSG00000266290_23 (sequence is synthesized)
atccacttcatggagttaagagaaaatgcatgaagaagtcctggcacagtgcctggttcatatatgtgattaataaatgttagccatcgccaacatctctgtcccagacttgttcccctt

SEQ ID NO: 857359 - DNA, 120 bp, Artificial Sequence
  ENSG00000266290_24 (sequence is synthesized)
ccctgtatttcctatctcagtttatggccccattatccacccaggcacaagccagaaaccctagatttgtgtctctccctcacccaccatgtctccatcactgctcatctcttggatatt

SEQ ID NO: 857360 - DNA, 120 bp, Artificial Sequence
  ENSG00000266290_25 (sequence is synthesized)
ctgtgatctatctaaaatgcagatctcctcaggcacgcccctctttcctgctcagaataaacactaactcctttcccataacttaacctccacacgtgcacacctgcttctctgccttat

SEQ ID NO: 857361 - DNA, 120 bp, Artificial Sequence
  ENSG00000266290_26 (sequence is synthesized)
gtccccacactttccatctcgttcttcctgctctagtaacaccatccaccgcctgtcgtttccctacatgcagattccacacctgagctcatgtggctctcttgcctgtgaggcttggag

SEQ ID NO: 857362 - DNA, 120 bp, Artificial Sequence
  ENSG00000266290_27 (sequence is synthesized)
cttttttcctggctgactcctttggatgtcatctaccaagcccctgaaccccagagggaatgcatacccctcttctgtgctctgtaacatccaggagttttcactgaccacttaccatta

SEQ ID NO: 857363 - DNA, 120 bp, Artificial Sequence
  ENSG00000266290_28 (sequence is synthesized)
aatatgtcagtcttatgtttgtctgtagttcctttcaggtgagaatcacgtcttacttatgtgtggctgcaggacctagcatagttcctgaaacatgggaagttctctgtaaacattcta

SEQ ID NO: 857364 - DNA, 120 bp, Artificial Sequence
  ENSG00000266290_29 (sequence is synthesized)
taaactaattgtgcccattaatgactgaaaagtacagcttggaaggacactgtttctccaccccaaagaacagtgtccaggctctctttgtcaagaaccagcaatgtatactattaacac

SEQ ID NO: 857365 - DNA, 120 bp, Artificial Sequence
  ENSG00000266290_30 (sequence is synthesized)
tgggcccttcctgccctaaacaagttgccaggtaaagacaatccaactccagctgactggatcatctagaggaaagagaccgtggaggtgacagaagttgttttgcctagccctttagca

SEQ ID NO: 857366 - DNA, 120 bp, Artificial Sequence
  ENSG00000266290_31 (sequence is synthesized)
ttgacctgcttcaagatctccaggaaattgtagaaggttgggaaagacacaccttgacactcccattgcaatgcagaccctggtgccagtctcccctctcaagtcccatgtgactagaac

SEQ ID NO: 857367 - DNA, 120 bp, Artificial Sequence
  ENSG00000266290_32 (sequence is synthesized)
tgctgaaatccacctcaattctttgctgatttcttgggtgaccttgtaagacatatttccctgggcaactatttaccaagccctaaatattgtccctccttggctgggagcggtggttca

SEQ ID NO: 857368 - DNA, 120 bp, Artificial Sequence
  ENSG00000266290_33 (sequence is synthesized)
gagactccgtctcaaaaaaaacaaaaaatttgtccctcctgtctccagactccctgaggaaccagccaagttcaaccacttgaaccggtgagataagctctggactaagagtcaaggagg

SEQ ID NO: 857369 - DNA, 120 bp, Artificial Sequence
  ENSG00000266290_34 (sequence is synthesized)
caaggaggaagtcccaagccatattcagctgctagtcaagtcatttcacctctcagactctggatttcttcatctgaaagatgtaggactggctgatctgtaaggtccccagaagcccca

SEQ ID NO: 857370 - DNA, 120 bp, Artificial Sequence
  ENSG00000266290_35 (sequence is synthesized)
aagtctatgattctctatttcaataaccccattacaaaggataccttctctgatccactcagtcagaattcacaccaaatgagttcctggagagttgggatatcattttgctcatctttt

SEQ ID NO: 857371 - DNA, 120 bp, Artificial Sequence
  ENSG00000266290_36 (sequence is synthesized)
tattgccctaagaaacaacatgacttgatctagtttagattcaatgaattgtttagagtttcaattaaaatattaaagcaaatgatcaccaaatagaaactacagagaagatgcccagtg

SEQ ID NO: 857372 - DNA, 120 bp, Artificial Sequence
  ENSG00000266290_37 (sequence is synthesized)
gaagtcatggtgttcaggtcatgactcctcataatttaaaagttttcctccttcattttctggacaaccctgagaaaccctgtctttgccatcaagagaaaatcaagacaatgatatgga

SEQ ID NO: 857373 - DNA, 120 bp, Artificial Sequence
  ENSG00000266290_38 (sequence is synthesized)
aatgactagccttgaatacctgaaaagaccaagttagtgttcttaggtgcaagaaatacctgaaggaaaacaaacaggcctggagtagccaccctgactccagggagcagcagccaggga

SEQ ID NO: 857374 - DNA, 120 bp, Artificial Sequence
  ENSG00000266290_39 (sequence is synthesized)
acagttgcctcagagcatcccagtaaggcaaatccactgttctcctggagtctccccactctccactcaaattcccggtgaagtcatatgtccaccttttggtcacaaaagaggagggca

SEQ ID NO: 857375 - DNA, 120 bp, Artificial Sequence
  ENSG00000266290_40 (sequence is synthesized)
gaaagcctgattgacagaccttctgagatcgaggaaggaagagctgacaggggaaagtccagcagtggttataagaagtaagaagccgccgatgtccactctcttgagagcctcaagaga

SEQ ID NO: 857376 - DNA, 120 bp, Artificial Sequence
  ENSG00000266290_41 (sequence is synthesized)
gggaggcagagttacatatgagggaaatccttgtccccactgtcataaaaatgtacactatggtctttcaccgttggtccctgacagtgaggtggggaatgggggtggggagccctacca

SEQ ID NO: 857377 - DNA, 120 bp, Artificial Sequence
  ENSG00000266290_42 (sequence is synthesized)
aatgagactagtgcaattttgcctgcctttttgaggataattttgaagaaaaactttgccttgtcaggcatgttgtagtttattcaaggtgacaaaaaaaaattattgggaagacagaag

SEQ ID NO: 857378 - DNA, 63 bp, Artificial Sequence
  ENSG00000266290_43 (sequence is synthesized)
tattcaaggtgacaaaaaaaaattattgggaagacagaagtggtcagatcacttgagggcaga

SEQ ID NO: 857379 - DNA, 120 bp, Artificial Sequence
  ENSG00000266290_44 (sequence is synthesized)
gcagaggttgcagtgagcagagactgtcactgcattctagcctgggtgacaaagcaagactctttctaaaactaaaacaaaaacaaaaacttttttgggatcttctcaccaggaaaatgg

SEQ ID NO: 857380 - DNA, 120 bp, Artificial Sequence
  ENSG00000266290_45 (sequence is synthesized)
agactctttctaaaactaaaacaaaaacaaaaacttttttgggatcttctcaccaggaaaatggagggcccccccttacatttcaacttaatattacacacacacacacacacacacata

SEQ ID NO: 857381 - DNA, 120 bp, Artificial Sequence
  ENSG00000266290_46 (sequence is synthesized)
atataattcacatatcataaaatttatctttataatgtgcacaattcagtggttttcagtatatttacagagctgtgcaaccatcactcgttatctaattttagaacacttcatcacccc

SEQ ID NO: 857382 - DNA, 120 bp, Artificial Sequence
  ENSG00000266290_47 (sequence is synthesized)
caaagaaaccccaaatccttggcagtctctcccctatttcctccaattcccgctagtctactttctgtctccgtggatttgactattccggacatttcatataaatggaatcatacaata

SEQ ID NO: 857383 - DNA, 120 bp, Artificial Sequence
  ENSG00000234696_0 (sequence is synthesized)
gggaagtcccgcctgcggctcccagaccccagccctttgcagcctctctgagtcccccatcgccgcctctgagctctcccgtcgccctcccgccaatccctactcggttttgctgccttc

SEQ ID NO: 857384 - DNA, 120 bp, Artificial Sequence
  ENSG00000234696_1 (sequence is synthesized)
tatccctccacccccagcaacgcccagctcccaagcctcttggccggcccgccctgcgaccccccagttccccgcttacggaccttgggatctccgctgccgccgccgtcgctgccaccg

SEQ ID NO: 857385 - DNA, 120 bp, Artificial Sequence
  ENSG00000234696_2 (sequence is synthesized)
cctgctgtgcccgacccgccgcttgcctctctctgccgttcgccctgggacgggcggacggagctcggctccggcgggctcagacctccctgctcgattctcgggcgcgggggtctgtgc

SEQ ID NO: 857386 - DNA, 120 bp, Artificial Sequence
  ENSG00000234696_3 (sequence is synthesized)
tccgccgcccgggatctgcccgggagccgtcctggagccccagggccgcggcgagcgggctcttggcccggctagggagaggccactgcgttgcgctctgccaaaatgaccatggagttg

SEQ ID NO: 857387 - DNA, 120 bp, Artificial Sequence
  ENSG00000234696_4 (sequence is synthesized)
ccgattaggtctacaacgatggtgataaccatcgcgcagaacataaagatgattagagccgtgcaaacacctggcaaagagatgtagattgcagagccggagcacagagtctttcatagg

SEQ ID NO: 857388 - DNA, 120 bp, Artificial Sequence
  ENSG00000234696_5 (sequence is synthesized)
atccagtgctagaccaagccagtccacagcccccagcagggtataggggatagccggtggccccttgaacgctagatgcttgcctctgcaagtatccttgtgaggtccatcccacgcccc

SEQ ID NO: 857389 - DNA, 120 bp, Artificial Sequence
  ENSG00000234696_6 (sequence is synthesized)
gctcccacccccaatctgggtccctaatccctagggaacttaaccccgctccctttctcgccaggagcctcttggctcccttagcggcagctgcgagtagccgctcagtccggtccaggt

SEQ ID NO: 857390 - DNA, 120 bp, Artificial Sequence
  ENSG00000234696_7 (sequence is synthesized)
cttgcactctccataaagagatgtaccctgcgcccgactctggaagtggggagcgggtctgcaccctgggacctagggaaggcattggtggccactcggtcctcagtttgggggcgaacg

SEQ ID NO: 857391 - DNA, 120 bp, Artificial Sequence
  ENSG00000234696_8 (sequence is synthesized)
ggagcgggagctcgtctcctttccagctgccggcagccaggcggcggaagccaagggacgctttgggaaaaagtaaaacaggcaataaagctcttctcttgggtccccgcttctcaagga

SEQ ID NO: 857392 - DNA, 120 bp, Artificial Sequence
  ENSG00000234696_9 (sequence is synthesized)
aactcaggacgagaggctctgacgcctctccctctcgggatgctcggcattctctactgagcggcacggggcagtcaggaaggctgaaggagctgcgccgcagccgcgggaaaggtgcgg

SEQ ID NO: 857393 - DNA, 120 bp, Artificial Sequence
  ENSG00000234696_10 (sequence is synthesized)
aggtgtcacgcggctaaaccaagaagcctctggctgaccggcgatccctgcctcagtcaggattcctctcggtctttctcctttcccatgcccttctggggttctcgtttcgaccccatc

SEQ ID NO: 857394 - DNA, 120 bp, Artificial Sequence
  ENSG00000234696_11 (sequence is synthesized)
cctctcaggcctcccccctcgccctccacaccgcggatctctgtccccgtgcgtcacagttcccctgcggtgcgcccaggatctcgctccgcggggaccacggaaaattcgaatattcgg

SEQ ID NO: 857395 - DNA, 120 bp, Artificial Sequence
  ENSG00000234696_12 (sequence is synthesized)
gcaaaactaaaggggcgtgattcggacactcgttccctcaataaccttggtcacgggaatggatttctgccggctactaaaagttacggctcctgtcgagaagcctttcaaaatctcagt

SEQ ID NO: 857396 - DNA, 120 bp, Artificial Sequence
  ENSG00000234694_0 (sequence is synthesized)
caccgccgcgagctcggaatgtctggccccgggtgcttcagggtccgagaacctgcagaagttcacacttaaatcctacacgagagtcgtatttatgatgcagaactcggtgcagaaccc

SEQ ID NO: 857397 - DNA, 120 bp, Artificial Sequence
  ENSG00000234694_1 (sequence is synthesized)
gatggagtgcccaaggcgcttgagccgttcctagaaggggaaggagagccgcgggcggcagcggggcaggggacggaattgggaagcttgggagcaggaagaaggccagagctacttagg

SEQ ID NO: 857398 - DNA, 120 bp, Artificial Sequence
  ENSG00000234694_2 (sequence is synthesized)
gatcgagaccatcctggctaacacgggactcaagactggaatgggaagagcatgaaattgagctgtctatccccctggatctctcattgccacctgcccataggttggctgcacccctcc

SEQ ID NO: 857399 - DNA, 120 bp, Artificial Sequence
  ENSG00000234694_3 (sequence is synthesized)
ctgcacccctccaccaaagaaaggccatgactccttcctggcagccctgtcttacagctactctctggtgatctgggaaccactccctcccttaccccttgatgcctagggctagtgcca

SEQ ID NO: 857400 - DNA, 120 bp, Artificial Sequence
  ENSG00000234694_4 (sequence is synthesized)
gcaccttgttgttgttagcctcagaggcacttgcactgttccttgatggttttcccaaatcttgccctcatctttgtaaatactgtttgccgtttattacactgtcatcatattacccaa

SEQ ID NO: 857401 - DNA, 120 bp, Artificial Sequence
  ENSG00000234695_0 (sequence is synthesized)
tgaaaagttgaacctgcctcccaaactttctcctgtagtccagacggggacgccctgagggagcgtttgtgtcagtaatgggaaatctgcaagctagacggaaatgacctgctagtgatt

SEQ ID NO: 857402 - DNA, 120 bp, Artificial Sequence
  ENSG00000234695_1 (sequence is synthesized)
gcgctgtaaagaagccggaatccacctcttgaaggcatgaagttcaggtgctggacactttttgattgtctttcgctcatacaaaaaaaaaaatgaaccactggacacaatggcttctgc

SEQ ID NO: 857403 - DNA, 120 bp, Artificial Sequence
  ENSG00000234695_2 (sequence is synthesized)
gccaggagtcagagacaaacctgggcaacatagtgtgattccatctttacaaaaaaaaaaattttaacttagctgggcatggttgtgtacacctgtagtcccagctatatgggaggttga

SEQ ID NO: 857404 - DNA, 120 bp, Artificial Sequence
  ENSG00000234695_3 (sequence is synthesized)
acacctgtagtcccagctatatgggaggttgagatggaaggattggttaagcccaggagtttgaatttgcagtgaactatggtcgtgccacagcactccagcctggatgacagagtgaga

SEQ ID NO: 857405 - DNA, 120 bp, Artificial Sequence
  ENSG00000180539_0 (sequence is synthesized)
tcagccgcagccacagcctgctccctccctgggtggatttgaaggagcctcccccaccctccgcccctagcttgctccttgaggaccctgggcagggtggctgccatggggcccaatcgt

SEQ ID NO: 857406 - DNA, 120 bp, Artificial Sequence
  ENSG00000180539_1 (sequence is synthesized)
gcgtgggaacctgcgagctggcaaacggggctcgggggttttgcccagaaatgggtcagaacgaaagcctctcagaggaaagaaaagggcatgagtcaaagagaaagtcggggggcaggg

SEQ ID NO: 857407 - DNA, 120 bp, Artificial Sequence
  ENSG00000180539_2 (sequence is synthesized)
aggcctcctgactccctgggtttgtgcggacccaggcaggcagccaaccccagctccgtggtgtgtgagcatcgtgatgatcaggacacaagctcttccccgctgagccttcactgtggg

SEQ ID NO: 857408 - DNA, 120 bp, Artificial Sequence
  ENSG00000180539_3 (sequence is synthesized)
ccagcttcccggtggatgcccactgaagaggcctcaacccagtgggccccactccagaccaagagcagaccattggccagctgccccctgcagacagcggcacccggggcagcagcaagc

SEQ ID NO: 857409 - DNA, 89 bp, Artificial Sequence
  ENSG00000180539_4 (sequence is synthesized)
ctgccccctgcagacagcggcacccggggcagcagcaagctgccagcgaatgtcaaccagaaaaacgtgaaaaggagacgacaggcctc

SEQ ID NO: 857410 - DNA, 120 bp, Artificial Sequence
  ENSG00000180539_5 (sequence is synthesized)
gcgtggccagacccagacgtcctggagatctcaatgcagacacccggcggcagttcctgcaggaaggaggctgtcctgccacgcctgcgggtgacccggcctctggtgccagagcctgcc

SEQ ID NO: 857411 - DNA, 120 bp, Artificial Sequence
  ENSG00000180539_6 (sequence is synthesized)
ggcccctgcgtcaggccagcaggataggtgtgtattgtgacctgagggactgaacgtggagctccaggggaacctcccagccagtgacacgctggccttgggccagacgctgccctgcgc

SEQ ID NO: 857412 - DNA, 120 bp, Artificial Sequence
  ENSG00000180539_7 (sequence is synthesized)
ccttgagtgacgctcgggcctccctgcacccacccgctttccctgtggctaatggcttagagtgaaggatggtgggcgtgggcgtgccacgtgggctcagcgtccaccctgccccatgca

SEQ ID NO: 857413 - DNA, 120 bp, Artificial Sequence
  ENSG00000180539_8 (sequence is synthesized)
gccagcccaaggtcacaggatacaaagtattgatgctgggtgtgtctgagagggtgttgccaaaagagattaacactagagtcagtgggctgcggaaggcagacccacccttcatctggt

SEQ ID NO: 857414 - DNA, 120 bp, Artificial Sequence
  ENSG00000180539_9 (sequence is synthesized)
aaatgggtgcagagattcaggctggccaaggctggcacaaggacattcccagtggcgagagcatgagcaagggtcacggatgtgccaggaggggaggcggagagatgcctgggaccaacc

SEQ ID NO: 857415 - DNA, 120 bp, Artificial Sequence
  ENSG00000180539_10 (sequence is synthesized)
tctatggcaggccgcggcccaagggcaggggaggggtggacggagggaagggacagggtctcctccgggaccccagggaggctgggcccaaggaccatggagcctcgcagctgaatggag

SEQ ID NO: 857416 - DNA, 120 bp, Artificial Sequence
  ENSG00000180539_11 (sequence is synthesized)
ccccccaggcctgccttctgtcctgggaaccagggcctccctcgagccagagtcctgagcgccgcttgccccccgcccacagcggccccagcgagcgcgctgcagagggcgcgggtgccg

SEQ ID NO: 857417 - DNA, 120 bp, Artificial Sequence
  ENSG00000180539_12 (sequence is synthesized)
tgactcagccgagcaccgcgatgtcagcggacgcgggaccggactggacacgaccgagccacctccccggaggccgcagcgccggcagtctcccaggatcagtcagccaagagacccgag

SEQ ID NO: 857418 - DNA, 120 bp, Artificial Sequence
  ENSG00000180539_13 (sequence is synthesized)
attctcaaatcacggcagccgccagaggtgcccctgaaatcacagctacgccctagctcagccccgcctggaactgtgctccttttatctctgcccaaggtgagggaactcaggggacct

SEQ ID NO: 857419 - DNA, 120 bp, Artificial Sequence
  ENSG00000180539_14 (sequence is synthesized)
tcctgctcctgccccgcccctgcccccacaacctttggcatcaaccactgtccccacccccatctcggggacttgctagtcctggggctgctgggaggggtacagccacaagagggatgc

SEQ ID NO: 857420 - DNA, 120 bp, Artificial Sequence
  ENSG00000180539_15 (sequence is synthesized)
caagccagggcaatatgacgcccccacagcccaccccactggtctccagagaggcccagagatgtccagctgggcaggcagaggacagagaggctcgggcaggcttggcccagggcagag

SEQ ID NO: 857421 - DNA, 120 bp, Artificial Sequence
  ENSG00000180539_16 (sequence is synthesized)
aaggcccaggtgcaggcaccctgagcacagatggccccccagcccccacccagctacccaggcctgggcgctgcagacagcgagtgcacttccccagagggccaggtggctcctcccacg

SEQ ID NO: 857422 - DNA, 120 bp, Artificial Sequence
  ENSG00000180539_17 (sequence is synthesized)
gcagtatcacccacttcccccagctcaccaccagctgggccctggtctcccaggagaatcttacacattgaagatgtactgtgctcagctctttgccggaagctaaagctcccaattggg

SEQ ID NO: 857423 - DNA, 120 bp, Artificial Sequence
  ENSG00000180539_18 (sequence is synthesized)
ccatcccaccccactctgccacctctgccatctaggaacccagatgcccggagaggaggtctgtcctggggcccttagtgtcttcccacaggagcccagcgcgtgcctgcaagggcctgg

SEQ ID NO: 857424 - DNA, 120 bp, Artificial Sequence
  ENSG00000180539_19 (sequence is synthesized)
tcccggaatgaactgtggatggaggctgctttgtccttttccccgtccagatccatgcccatagacaccgctgactataggctgggcccagggtcccttcctccagcctgcagcagaggg

SEQ ID NO: 857425 - DNA, 120 bp, Artificial Sequence
  ENSG00000180539_20 (sequence is synthesized)
gctttccaggctggaaagggaaggagtccttttgtccctgacgcaagcgggttgggggccagcacccgctccaggaagaggaagggatccagcctgaagtccagactccccgctccctct

SEQ ID NO: 857426 - DNA, 120 bp, Artificial Sequence
  ENSG00000180539_21 (sequence is synthesized)
aagccagggcctggagcctggaggccaggttccttcttctacaccagcccacgttgggtgccagccaggctgggatggccctgcggggtcaccctgagccccagccaaccaacaccccac

SEQ ID NO: 857427 - DNA, 120 bp, Artificial Sequence
  ENSG00000180539_22 (sequence is synthesized)
ggctccggcaacaaggaagactgcccttattctcagtaacaggtggagctgggggctggagagcccctcggacctcgccttgggaaagctgggtgggtgcacggagcctggcaggtggcc

SEQ ID NO: 857428 - DNA, 120 bp, Artificial Sequence
  ENSG00000180539_23 (sequence is synthesized)
aaggggacccccaagtggagggattggtcgaggggcagcacagggtggtgcagtgggtgagctcagcccctcccctccaactctcatcccattgagccccaaggcgtggggggatcacgt

SEQ ID NO: 857429 - DNA, 120 bp, Artificial Sequence
  ENSG00000180539_24 (sequence is synthesized)
ctgtccttgttctcctccaggtggagctgctgggtggggctctggtcctccagggacccactctgcaccccaagttttgccgggacccgctcctctgtgttgtgtggctgtaggggaggg

SEQ ID NO: 857430 - DNA, 120 bp, Artificial Sequence
  ENSG00000180539_25 (sequence is synthesized)
ctgcagccagggactctgaacccggggccggcccacccagccacccagggtggggaacaagatcgcctcccagggccagaagctggggatgtccttgcttcctaggatgttggctagggg

SEQ ID NO: 857431 - DNA, 120 bp, Artificial Sequence
  ENSG00000180539_26 (sequence is synthesized)
atcacacgccccacattctgggtcaagcatggtcctgccccagcatcttgctgggttgggggcatctctgcacagatgagtgccaccccagcgtctccgccagggtctgggcatgtcact

SEQ ID NO: 857432 - DNA, 120 bp, Artificial Sequence
  ENSG00000180539_27 (sequence is synthesized)
cttgggcatctgtgctcaggaggtcaccaggtgtgggcagggcaccaagcagggaggtagccgaggctggaagatgcacatcagtgccccgctgggcttcctcaagtgggaactggtgga

SEQ ID NO: 857433 - DNA, 120 bp, Artificial Sequence
  ENSG00000180539_28 (sequence is synthesized)
gggggcgctaggctgccgggccagggtcagcaggctcaggccggctcagggctcagagttgagccagaaaccaaggtgaaatctgcctcttactgccgccagggcccttgggacagggac

SEQ ID NO: 857434 - DNA, 120 bp, Artificial Sequence
  ENSG00000180539_29 (sequence is synthesized)
aggaacagcagaaggtaaagtggaaaggaattgagtaatgggcccccaggcaaggctgagccaggccccaagcccaggattggggtctccagagtccctgggggccccagggcagctcac

SEQ ID NO: 857435 - DNA, 120 bp, Artificial Sequence
  ENSG00000180539_30 (sequence is synthesized)
ccacagcctggggcctatgggagcaagggggctcctgatgggtgggggcaggagcttggacaaagttgaaggccttctgtctgaattggccaggggccaatgaaagccaaaaagctggtg

SEQ ID NO: 857436 - DNA, 60 bp, Artificial Sequence
  ENSG00000180539_31 (sequence is synthesized)
ctgaattggccaggggccaatgaaagccaaaaagctggtgtggtggcttatgcctgtaat

SEQ ID NO: 857437 - DNA, 64 bp, Artificial Sequence
  ENSG00000180539_32 (sequence is synthesized)
ggtgaaaccccatctccactaaaaatagctgggcgtggtggcaggcacctgtatgtaatcccaa

SEQ ID NO: 857438 - DNA, 120 bp, Artificial Sequence
  ENSG00000180539_33 (sequence is synthesized)
gagaatctgtctcaaaaaaaaaaaaaacaattccaaaaaggcgagtggggagcagggtgctaggctgcatgggggcctatgcccccaccggaggacctagccccctgccaacccttcccc

SEQ ID NO: 857439 - DNA, 120 bp, Artificial Sequence
  ENSG00000180539_34 (sequence is synthesized)
caacccttccccagctcaggcccaccagctcccttctcacacagctgctctgggagggagtccttccttgccaatacctaagagaatgggcagcagggaccctgaggacaggttggggac

SEQ ID NO: 857440 - DNA, 120 bp, Artificial Sequence
  ENSG00000180539_35 (sequence is synthesized)
atggggctcccagctgagggccagcccaaggtcacaggtgaggagtgagaggtgagaggcaagggggcttcctggtctgggtgggctgtggcccccaaaacatgttgcttaggtcaagcc

SEQ ID NO: 857441 - DNA, 120 bp, Artificial Sequence
  ENSG00000180539_36 (sequence is synthesized)
agtctcccccagcaggggtgaacaattttcccccagcctgcctggcccaccctttctccagggacggtgcccagtgggccttatcttccccatgccaggtgtgatggttaatactgtcaa

SEQ ID NO: 857442 - DNA, 120 bp, Artificial Sequence
  ENSG00000234693_0 (sequence is synthesized)
agaaccagcaggccacagaaggttgtgacttcaatataccctctcatgagacctttcctggccccttatctgtggaggaggcacgtgacccacatggtctggccactgatgactgaacaa

SEQ ID NO: 857443 - DNA, 120 bp, Artificial Sequence
  ENSG00000234693_1 (sequence is synthesized)
gctatggacaccggaccccggagagaccattcactcactggccacgaacatgagttcagatacatgccccaaaaggatgagcctgggtactggattccctccctcagaaacgtgaatcaa

SEQ ID NO: 857444 - DNA, 120 bp, Artificial Sequence
  ENSG00000234693_2 (sequence is synthesized)
gcagcccctccagacatccctgggaggctccaaggagctgactcctgatgaggaaaaggatcagccgcagactcactcctcctccagccacttccagacccacgggaggcgtgggtgtga

SEQ ID NO: 857445 - DNA, 120 bp, Artificial Sequence
  ENSG00000234693_3 (sequence is synthesized)
cccagactacctgggagcatctgcttttgtctttatccagggcaggaccctctgaaggaggagccctcagagaagaagggaaaagccaaaaggaattaaaagccaatttccaaatggaaa

SEQ ID NO: 857446 - DNA, 120 bp, Artificial Sequence
  ENSG00000234693_4 (sequence is synthesized)
caaaggcatctgagtggtaagagcatccggagcccaggactgctgagtcaaccctctggaatgcccacaactccccacaggccagccggccttgggactcccgcacagccacgtgagccg

SEQ ID NO: 857447 - DNA, 120 bp, Artificial Sequence
  ENSG00000234693_5 (sequence is synthesized)
gtggagccgggtctgtttgctagtggaggctgttaacagcacgggaagtggtcaagggttcaacaagagatgagccatctggtcctccagaggtggaggaggcacgtgacccacatggtc

SEQ ID NO: 857448 - DNA, 120 bp, Artificial Sequence
  ENSG00000234693_6 (sequence is synthesized)
tgttggtccagatacttgagctaaaaggtgatggatacctggatgtggggtggtcattctggggagtacgtccatatagaaagaggagcaggtgctgtgggattctggatcccagtgata

SEQ ID NO: 857449 - DNA, 120 bp, Artificial Sequence
  ENSG00000234693_7 (sequence is synthesized)
gagctaagtggctggatcaagcttcacctgaaacccactctacttgtcttagtccattttgtgttgctataaaagaatacctgcaactgggtaatgtataaagaaaagagacttatttca

SEQ ID NO: 857450 - DNA, 120 bp, Artificial Sequence
  ENSG00000234690_0 (sequence is synthesized)
acaaccctgggattccctcgccctcagattccagaatccaatttcttggatttcagtgtttttaaggattccgtgagtcaggagcttggccaggctcagctgggacactcatctttgctt

SEQ ID NO: 857451 - DNA, 120 bp, Artificial Sequence
  ENSG00000234690_1 (sequence is synthesized)
cacctcatgtcagctgcagcatcttaggaatgcaagacagcctcattcacatccggcggcgggtgctggctgtccactgggtgccttcgctctttttcaagtggtttctcatcctctggg

SEQ ID NO: 857452 - DNA, 120 bp, Artificial Sequence
  ENSG00000234690_2 (sequence is synthesized)
gtttcactgtctccatgtggcctccctagcaagttgcttagatttctttacgtggaaactggctttctagagggtaaaaatggaagctgcaaggactcttatggcccagaagtcccagaa

SEQ ID NO: 857453 - DNA, 120 bp, Artificial Sequence
  ENSG00000234690_3 (sequence is synthesized)
cgtcacttcttccacaagtcatagggccagccaagattcaaggggaaggaaacagactctgtctcttcatatttcaatgggacaaattgttgcagccacctttggaaacaatctactgca

SEQ ID NO: 857454 - DNA, 120 bp, Artificial Sequence
  ENSG00000234690_4 (sequence is synthesized)
atacactacagcagtggacatctgggcccttaccaggtgccagacgccgtactaacagctttatacggatgaactcatttaatcctcccaaactccatgaggttttgcagcccttgccat

SEQ ID NO: 857455 - DNA, 120 bp, Artificial Sequence
  ENSG00000234690_5 (sequence is synthesized)
gagtggccagttgctgatagcattgctgctgcctgttgctattctgggataggaactgaggatgtgctgtgattacccagaccagaaggaagctcagaaggcactggtcctctcaggtgg

SEQ ID NO: 857456 - DNA, 120 bp, Artificial Sequence
  ENSG00000234690_6 (sequence is synthesized)
cacccagatccagtgtgagccatgggggatgaagggtggttaagtgaaaagctttggagtgctgacaggtggtccccctgatatgccaggaaattacttccgggcaagagaaacaaagga

SEQ ID NO: 857457 - DNA, 120 bp, Artificial Sequence
  ENSG00000234690_7 (sequence is synthesized)
gaggactggcctcaggctagtcagaaatttgcctgaaaacatcattccttggggtggtgggacttctgggtaagccagtgtgacttgaattcttgatttcttatactcccttctaaccaa

SEQ ID NO: 857458 - DNA, 120 bp, Artificial Sequence
  ENSG00000234690_8 (sequence is synthesized)
ccacctgaatgctgatctctactagctgtctgtgtgccttgcatttcaatcagcagccttacaaatgatgatgaggagaaggaggaggatgaggacgatagccaacatttactgttcttt

SEQ ID NO: 857459 - DNA, 120 bp, Artificial Sequence
  ENSG00000234690_9 (sequence is synthesized)
tgctactgtcctaagtactttacaaataccagataattttttcttcataacactgtcattactcccattttacagatgaagaaaacaaagcttaaatagatcacatgatttggtcaaggt

SEQ ID NO: 857460 - DNA, 120 bp, Artificial Sequence
  ENSG00000234690_10 (sequence is synthesized)
cactcatgtcacagagcctgaatccaaatccagtgaagcctccagagcctagtttctacccatgaccctgtgttgcctattgatggtacagtgtaggttttttccttcttcctttttctt

SEQ ID NO: 857461 - DNA, 120 bp, Artificial Sequence
  ENSG00000234690_11 (sequence is synthesized)
tttttgaaagtctttattgaattataattggcataccattaactgcaaatatttgaaaaatacaattttatgagctctgacatacatacacccataaaaccattgttacaatcaagataa

SEQ ID NO: 857462 - DNA, 120 bp, Artificial Sequence
  ENSG00000234690_12 (sequence is synthesized)
tgaatatgtccgtcattccccaaaagcttccctgtgccccttggtaatccacccctcactccccaccccattctgttcctaggcaaccaatcatctgttttctgtcagattaatttgcat

SEQ ID NO: 857463 - DNA, 120 bp, Artificial Sequence
  ENSG00000234690_13 (sequence is synthesized)
tttctagagttttatatatggaagcagacagcatgtactctttttttgtctggcttctttcactcagcataattatttttaggttcatctatattggtgcacgtatcaacaattcattct

SEQ ID NO: 857464 - DNA, 120 bp, Artificial Sequence
  ENSG00000234690_14 (sequence is synthesized)
tttctattcctgagtactattccattatataggtgtactaaatttgtttattcaactcttgatggacattgagttgtttacagtttttggctattacaaataaagctgctatgaaccttc

SEQ ID NO: 857465 - DNA, 120 bp, Artificial Sequence
  ENSG00000234690_15 (sequence is synthesized)
gttgttgatgtgaccgcgtgtccacaaccctgggattccctcgccctcagattccagaatccaatttcttggatttcagtgtttttaaggtgggaggtctcgctatgcttcccaggctgg

SEQ ID NO: 857466 - DNA, 120 bp, Artificial Sequence
  ENSG00000234690_16 (sequence is synthesized)
gcctcctgagtagctgggactacagatatggcatgtcagtctggtggtctagccagaggaagactcctggagctggtgaactgtgcatggatatgcagtcacgggcagcccacctcctac

SEQ ID NO: 857467 - DNA, 120 bp, Artificial Sequence
  ENSG00000234690_17 (sequence is synthesized)
ctactcctcaccctccctgtgcctgtgagggtctgcactcaccctcccaagattcagaatccactggccttgagttcgccctgtcctggggacagtgggacctgtcacctgctggccaag

SEQ ID NO: 857468 - DNA, 120 bp, Artificial Sequence
  ENSG00000234690_18 (sequence is synthesized)
ctcaccctccctgtgcctgtgagggtctgcactcaccctgtcatctccacctttgggatctggccagccagctcgatcagcttgtcccaaggattgcttgggctacaccttagactgaga

SEQ ID NO: 857469 - DNA, 120 bp, Artificial Sequence
  ENSG00000234690_19 (sequence is synthesized)
catctcataatttggagctagacttgctgctcaggagtgtggagcctgcaggaaacaatggcaggagatctgggctttttctggctgcaggcctgactgcagcagagaaggtaacagaga

SEQ ID NO: 857470 - DNA, 90 bp, Artificial Sequence
  ENSG00000234690_20 (sequence is synthesized)
gcccaggctggagtacagtggcgcaatcacggctcactgcagcctcaacctcttgggcccgagcaatcttcccaccttggtctcctacat

SEQ ID NO: 857471 - DNA, 120 bp, Artificial Sequence
  ENSG00000234690_21 (sequence is synthesized)
acttactgggctcttattaaaggtgatttaggtgacttatcaacttttcatgagtacagatgaagaactcttctagggcaggggtccccaacccttgggccacagaccagtactggccta

SEQ ID NO: 857472 - DNA, 120 bp, Artificial Sequence
  ENSG00000234690_22 (sequence is synthesized)
ttaggagccaggccgcacagcaggaggtgagtggcaggcaagcaaatcaagcttcatctgtatttacagccactccccatcactagcattattgcctgagcttggcctcctgtcagatca

SEQ ID NO: 857473 - DNA, 120 bp, Artificial Sequence
  ENSG00000234690_23 (sequence is synthesized)
gtggcgaccttgattgtcataggagcgtgaaccctctagtgaactgcgcatggcagagatctaggttgcactctccttgtgagaatctaatgcttgatgatctgtcactgtctcccatca

SEQ ID NO: 857474 - DNA, 90 bp, Artificial Sequence
  ENSG00000234690_24 (sequence is synthesized)
aatgctgagatgggatcgcctagttgcaagaaaacaagttcaaggctctcactgattttgccttatggtgagttgtataattatttcatt

SEQ ID NO: 857475 - DNA, 120 bp, Artificial Sequence
  ENSG00000234690_25 (sequence is synthesized)
gttgttgatgtgaccgcgtgtccacaaccctgggattccctcgccctcagattccagaatccaatttcttggatttcagtgtttttaagcccaagattcagaatccactggccttgagtt

SEQ ID NO: 857476 - DNA, 120 bp, Artificial Sequence
  ENSG00000234690_26 (sequence is synthesized)
cgccctgtcctggggacagtgggacctgtcacctgctggccaagctgctcaggagtgtggagcctgcaggaaacaatggcaggagatctgggctttttctggctgcaggcctgactgcag

SEQ ID NO: 857477 - DNA, 120 bp, Artificial Sequence
  ENSG00000234690_27 (sequence is synthesized)
ccaccgtggagctgcggctggtcctggggcgaatgcagagctgagcagcatacagctcctgctctcaaagacctggcaactctgacatggaagtaaggcttgcccaagagaggagagtga

SEQ ID NO: 857478 - DNA, 120 bp, Artificial Sequence
  ENSG00000234690_28 (sequence is synthesized)
ctaagggctgcactgctggatgcctccagacccttcgataaggggtctgggagggcagggggcagacagtgagggcaggatggtagaaaatgtgttgactcagtgccagaccctgaacta

SEQ ID NO: 857479 - DNA, 120 bp, Artificial Sequence
  ENSG00000234698_0 (sequence is synthesized)
gaatccattcccagggaaattctcaccacatagcacatgaacacaggtgccaggatgcagctgcaccttcctttgtggagcaaaaacttggaaatatccttaaaagtgattaagtaaatc

SEQ ID NO: 857480 - DNA, 120 bp, Artificial Sequence
  ENSG00000234698_1 (sequence is synthesized)
aagaggaaatgtggacacagacacaaacagagggagggccatgtgagcccagagcaagaaggcggccatctacaagccccggagcgaggctgcgggagaagccagccccgctcacacctt

SEQ ID NO: 857481 - DNA, 120 bp, Artificial Sequence
  ENSG00000234698_2 (sequence is synthesized)
cttttcttcttttctcttctcttctctttttttttctctctctctttcattcacattatagcttgagtcagaacttcattcctttttaaggctgaaggaccacattttgcttgtttgttc

SEQ ID NO: 857482 - DNA, 120 bp, Artificial Sequence
  ENSG00000228661_0 (sequence is synthesized)
ccgcccctagcgggctctcccggacccccggcccgcgctagtctttgccaggatcccgcgcaaaggatcaagtcccagcttccctttccccaccgagagtctccagcgccaaccgcgggc

SEQ ID NO: 857483 - DNA, 120 bp, Artificial Sequence
  ENSG00000228661_1 (sequence is synthesized)
cgtcgggcgggtccctgacccgcagttactcagctacctctctggtggaggaggtgtcagcgacttgagaatgagtgcgccaaagaagacagagccacgcctgagcctccttcaacaaag

SEQ ID NO: 857484 - DNA, 120 bp, Artificial Sequence
  ENSG00000228661_2 (sequence is synthesized)
tctcttctcaagcgtgctgtcagcagatcttgactgaaacctctgtgccctaccctgtccttggcaccagacgcaggggaaaggatcaggcccagtccctcctctgactgacagtgctaa

SEQ ID NO: 857485 - DNA, 120 bp, Artificial Sequence
  ENSG00000228661_3 (sequence is synthesized)
accagctacctgttctgagcaaggcccctgaagactgggaacacgaatttgcccaacagctgcctggcttaagggttaggccgttgatataaaaatacatggctaatgtaacctactacc

SEQ ID NO: 857486 - DNA, 120 bp, Artificial Sequence
  ENSG00000239523_0 (sequence is synthesized)
gggaccagccctttgtggagaagcccaggcggcctagaatccagtgtcgtccgtgagtgcttggctggtgttcaagtgcatcttccagcctgagaccgcgtggactcgctcatcgtgagg

SEQ ID NO: 857487 - DNA, 120 bp, Artificial Sequence
  ENSG00000239523_1 (sequence is synthesized)
gcgagaggaggataagcccattgggctgtcggctgagagtgagattgctgatgaaatccttggcatcgtcggagatctcatcgaatgcctcgtcgtcgaagtcccaggtggctgaggtaa

SEQ ID NO: 857488 - DNA, 120 bp, Artificial Sequence
  ENSG00000239523_2 (sequence is synthesized)
agcaggtgtggctaggagagggcgcgacgaccagatgagggaattgaggcacagcccaggctcaagtcacctgcccaaagattcacagccagtgagattggaagccaggtatctgcctct

SEQ ID NO: 857489 - DNA, 120 bp, Artificial Sequence
  ENSG00000239523_3 (sequence is synthesized)
agagcctgtcctcttaaatgctatactatcctaacatttctgtaaagatgaagtaaattgcagtgttcagcactggcaccaggcctggtccacagtaaggaggcggtccatgcccggaga

SEQ ID NO: 857490 - DNA, 120 bp, Artificial Sequence
  ENSG00000239523_4 (sequence is synthesized)
tctcatgcagttctgctgggttccctccactgccttaccaagctgtgagtgcaggaatgactttgtgaccagcagcttaagccaaataaactttataaggtaaagaatttcaaaacaaaa

SEQ ID NO: 857491 - DNA, 120 bp, Artificial Sequence
  ENSG00000239523_5 (sequence is synthesized)
agttcaatgtagccaccctctccaggcccgctgcttctgccagctggatgttgcgtcgtccctcgctattcgccctcctataatcactgcttccatgttgaatcaaaacaattatgcttt

SEQ ID NO: 857492 - DNA, 120 bp, Artificial Sequence
  ENSG00000239523_6 (sequence is synthesized)
ctgagagtgaggtgcgggaccatccacaatattgtttgaacatctgaagacatggggaacttgccatctgatatctgataacagacttcctgtaaagcaggactggtagtttcctgataa

SEQ ID NO: 857493 - DNA, 120 bp, Artificial Sequence
  ENSG00000239523_7 (sequence is synthesized)
caaattcttcaatatgaaggatatagctgtgtcctttacaactggtagcatggaaagaaagagaagtctgcaaagattgaacaaacagcatgcactgtggtatcctttatttaaaaattg

SEQ ID NO: 857494 - DNA, 120 bp, Artificial Sequence
  ENSG00000239523_8 (sequence is synthesized)
tgagctgactacagttgtagtgttctcatttaccattctgatggcataataaaccaagagaacattaacacaattccaagaaggcattaacctgtaacacacatatacgccacacatgca

SEQ ID NO: 857495 - DNA, 120 bp, Artificial Sequence
  ENSG00000239523_9 (sequence is synthesized)
cacacacaacatacacgcacacaaaggttatattctgaacacaaaagtgatagaaaaaagctttgaatgcgctaaatcaaataaaaaccctttattataataaactgtggcaatactgtg

SEQ ID NO: 857496 - DNA, 120 bp, Artificial Sequence
  ENSG00000239523_10 (sequence is synthesized)
ggaaaacctctctgctttgggaagctggagcagcttgtgggcattgcttcaaccagctgatcccactttccattcattgctttgtttcaggaggttctttatttgtaaacgtcccctgca

SEQ ID NO: 857497 - DNA, 120 bp, Artificial Sequence
  ENSG00000239523_11 (sequence is synthesized)
attttttacacacccaagcagctccttaaatgtattactgtatatgtggtagtataaaatatttatgggttcattccagcaagtgtttatggagcgtccacaaagttgccctggagttca

SEQ ID NO: 857498 - DNA, 120 bp, Artificial Sequence
  ENSG00000239523_12 (sequence is synthesized)
tggcactaagtgaaagagacaaagtcgtcagtctcccagggattatatagagcagcggcccccaaccttttggtcaacagggaccggtttcgtggtgggggggtggatgatggtttcagg

SEQ ID NO: 857499 - DNA, 120 bp, Artificial Sequence
  ENSG00000239523_13 (sequence is synthesized)
atgattcaaaggcattacatttatcattagattctcataaggagcacacaacttagatccctccaatgcgcagttcacaataggttccccgctcctatgagaatctgatgccaccgctga

SEQ ID NO: 857500 - DNA, 120 bp, Artificial Sequence
  ENSG00000239523_14 (sequence is synthesized)
tctgagggaggcggagctcaggaggtaatgctcccttgcttgctgctcacctcctgctgtgcctcctggttcctaacaggccagggattggttctatccgcagcctggggcttaaggacc

SEQ ID NO: 857501 - DNA, 120 bp, Artificial Sequence
  ENSG00000239523_15 (sequence is synthesized)
cctgagggaaccagacgaaaatgctcgtattagttggtgaaaagtggtatcaggaagttattacaataatccagccatggtgatagtggtgtgggccagagtggtggaaatcgaggtgat

SEQ ID NO: 857502 - DNA, 120 bp, Artificial Sequence
  ENSG00000239523_16 (sequence is synthesized)
gaaaacaacaatgaattctgtgcgtattttagaagtagaattataagatttgtggatatgttagttttggagtgtgaggtcaaaggcgttttgagcaacttgtaagaaaccatttttaag

SEQ ID NO: 857503 - DNA, 120 bp, Artificial Sequence
  ENSG00000239523_17 (sequence is synthesized)
gcggaagtcgggaattttgttttttatatgttgaatttgaaatccttattaaacatccaagtggagaggctggatagacaattaaatttagaccctgaggttcgggaaggaagtccaatg

SEQ ID NO: 857504 - DNA, 120 bp, Artificial Sequence
  ENSG00000239523_18 (sequence is synthesized)
ggctagagatataaatttgagagttgtcaacctaaaataataaaaaaggtaagaatctagtttaaaggaagtttattcaagcataaaggttgaagatggctacctgggagcatagattca

SEQ ID NO: 857505 - DNA, 120 bp, Artificial Sequence
  ENSG00000239523_19 (sequence is synthesized)
agttaccctaaatatacactctgattagcagcggttatgagtgggtttttaaaggaaaaagaggcagcttctaagttgtttactaagaatttacattaaaattacattagctattgattg

SEQ ID NO: 857506 - DNA, 120 bp, Artificial Sequence
  ENSG00000239523_20 (sequence is synthesized)
aaactcttgtctctgggcctgataaatttttgcatacttcacatagctcagacagctcagagctgtttgaggtattatcttttctcagagttctgagggtggtggtggtatttaaatcca

SEQ ID NO: 857507 - DNA, 120 bp, Artificial Sequence
  ENSG00000239523_21 (sequence is synthesized)
tgacactgtaatcacccaatacgttcttccttcccactgcacagacaaaatcaattcatagagaccatggcattgcaataaagaatttaattgacatgagataggtcttggagatggagt

SEQ ID NO: 857508 - DNA, 120 bp, Artificial Sequence
  ENSG00000239523_22 (sequence is synthesized)
tattactccaaatctcccccaaaattcagagggtagggtttttcaagaatagtttggctaagatctgagagctatagtcaaaacaaaacaaaacaaaacacccaccccccccccaacaca

SEQ ID NO: 857509 - DNA, 120 bp, Artificial Sequence
  ENSG00000239523_23 (sequence is synthesized)
cacacagtttggcaggcaggaggctggaggaatgggtgctgctgattggttgggaatgcaattataggggtgtggaaaatggtccccctgcactgagcctgcttctgggtggaggccaca

SEQ ID NO: 857510 - DNA, 120 bp, Artificial Sequence
  ENSG00000239523_24 (sequence is synthesized)
ggactggttgagccaagagtcaaaggtctcagtggggtcgtcagccatccgaaatgcagaagcctgaaagtttatctcaaaaggccaatcttaggttctacagtagtgaactggggaagc

SEQ ID NO: 857511 - DNA, 120 bp, Artificial Sequence
  ENSG00000239523_25 (sequence is synthesized)
tgcaaatctagtgacctctggaatagtggctggtaatcatttaacttaacaaagcctatgtcttagcagaattcaagctcctcttatccttctaacctggtggcttttcattagttttac

SEQ ID NO: 857512 - DNA, 120 bp, Artificial Sequence
  ENSG00000239523_26 (sequence is synthesized)
aaaagtggtttagttttggggaggggctattatcgcttaaactgtaaactaagtttctcccaaagttagcttggtgcaagcccaggaatgaccaagggcagttttggaggttaaagatga

SEQ ID NO: 857513 - DNA, 120 bp, Artificial Sequence
  ENSG00000239523_27 (sequence is synthesized)
aaagggaaaagtcaagctgggaactgggtcacacaaacctgcctcccatttggttcctaaataagatagctacaaagataaaagctatatacttccctcacattttacccacaaggaaat

SEQ ID NO: 857514 - DNA, 120 bp, Artificial Sequence
  ENSG00000239523_28 (sequence is synthesized)
ttccctcacattttacccacaaggaaattccttttaggcccaaagatctttactctaaaacagttctgttgaatttcaacctggcaatgtaagttgatatcttcacaggtatgggacata

SEQ ID NO: 857515 - DNA, 87 bp, Artificial Sequence
  ENSG00000239523_29 (sequence is synthesized)
ctacgttatcttatgtaaaaatacagattaactgagccagactaaggcatgaatatttcctccactccccactcacatgaaaattgt

SEQ ID NO: 857516 - DNA, 120 bp, Artificial Sequence
  ENSG00000239523_30 (sequence is synthesized)
catgaatatttcctccactccccactcacatgaaaattgtgtattcaaaaggatgcaactgttttatctttttatctactgacacaatttaaaaatatttcttggctgggcgtggtggct

SEQ ID NO: 857517 - DNA, 120 bp, Artificial Sequence
  ENSG00000239523_31 (sequence is synthesized)
aggcgagggtcggccagcctccccacccccaaactcatgctctgtgggccttgcacctgcctttcttccacttgtggaaagaaaagagggtgtggttcacagccctgtcttttcttggtc

SEQ ID NO: 857518 - DNA, 120 bp, Artificial Sequence
  ENSG00000228669_0 (sequence is synthesized)
gcaagttccaccatgtgaggatacagggagaaaatggcagtctatgaaccaggaagcaagtcttcaccagaacccagctgtgctagcaccctgaactcaggctttcagcctccagaacta

SEQ ID NO: 857519 - DNA, 120 bp, Artificial Sequence
  ENSG00000228669_1 (sequence is synthesized)
tcctcagagctttatagcctttcagttgagaaatatgaaacactgaaaatcaaaaacaaatgctggaaatcttctgagttcttctacagattgaaaacctgcacagtagagaatacaacc

SEQ ID NO: 857520 - DNA, 120 bp, Artificial Sequence
  ENSG00000228669_2 (sequence is synthesized)
taaggagtattttacatgccttcctttgtatcagggcagactcatgattagtggacttggaagttcataaaatttggagggtcctctttaagaaagagaggaaaaggttataaatacaaa

SEQ ID NO: 857521 - DNA, 120 bp, Artificial Sequence
  ENSG00000228669_3 (sequence is synthesized)
attagatgcaaagggcagagtgctacacctaaaagatcgtggatctcctaataatgaggaagaggaacggatattaaagacaaaattagcatgtccgccacagttatactgtatctcttt

SEQ ID NO: 857522 - DNA, 120 bp, Artificial Sequence
  ENSG00000228669_4 (sequence is synthesized)
aagatatgcctttcaccttcagccatgattgcgaggcctccccagcctgatggaattaaaaaccatgcctttcctatgtggataatcagcaaagctgaggacatcgggaagcaactcagg

SEQ ID NO: 857523 - DNA, 120 bp, Artificial Sequence
  ENSG00000228669_5 (sequence is synthesized)
attgccagtttacagctcttctggatgtgcactggttaatgcatggaattcagcaacagcagactttgttcctttgatggatccagaagatcgccacatcaaggaatatggtggtaaaac

SEQ ID NO: 857524 - DNA, 120 bp, Artificial Sequence
  ENSG00000228669_6 (sequence is synthesized)
tgcaagataatctgccacccctaacaactatagaagttctaaggatgttagagactcatagagaggaattctaatggccatacttgaaccgttgcagcaatacactcagaagattggtga

SEQ ID NO: 857525 - DNA, 120 bp, Artificial Sequence
  ENSG00000228669_7 (sequence is synthesized)
aagaaaagaaaggcattttgaaagtgattttcaaaaaacagttaatccagaattccatatttagcaaaattatacttcaagaatgaatgtgacatgataatgtcaatgaaaagaaaaaca

SEQ ID NO: 857526 - DNA, 120 bp, Artificial Sequence
  ENSG00000228669_8 (sequence is synthesized)
aaataatttgtcaccccaaaaaattattgaacaagaatgctaaagaaagtagtgtataacgtatatggctgtgaaatatattatgattaaagcctagaggattttggaagatgtgttaaa

SEQ ID NO: 857527 - DNA, 120 bp, Artificial Sequence
  ENSG00000228669_9 (sequence is synthesized)
gatgtgcactggttaatgcatggaattcagcaacagcagactttgttcctttgatggatccagaagatcgccacatcaaggaatatggagagatgtccaaatttctaccaaagcaatgct

SEQ ID NO: 857528 - DNA, 120 bp, Artificial Sequence
  ENSG00000228669_10 (sequence is synthesized)
aggcctaaaattaattttagaaaagcatactcaagacaatagactattattacacggataaaaaatataagaataaagagtgtaaacacgttaccaaagtgaattcttgaaatggaagag

SEQ ID NO: 857529 - DNA, 120 bp, Artificial Sequence
  ENSG00000228669_11 (sequence is synthesized)
aaacttggccttctttagcttcaccatttgttcctgccttccacctccaataatagtatatgtctcaatccttgtctatactccaaatttgaattgtataattaaattggttaaaactta

SEQ ID NO: 857530 - DNA, 120 bp, Artificial Sequence
  ENSG00000261097_0 (sequence is synthesized)
attttcttgcagggagagtgtaaataatctggaagaaatactgcagtctatcacagatcccaaagatagtttcatcatttgtatttttacaaatacttactggatactattcctttctgt

SEQ ID NO: 857531 - DNA, 120 bp, Artificial Sequence
  ENSG00000261097_1 (sequence is synthesized)
gaggcaagaacaaccagctgtcattctctaaaaattttcagatattaagcacatattcacctctgaactttaatgttttttctacatcagcattattcagaatctcatccaggaactatt

SEQ ID NO: 857532 - DNA, 120 bp, Artificial Sequence
  ENSG00000261097_2 (sequence is synthesized)
tgctaacaatctgcaatgagataagaagattatgccaggaagtaaatcaacacactgcttccttcaccacgaaagccttgctacaaaaaatcaaatggcagcagtactgaacagtgcact

SEQ ID NO: 857533 - DNA, 120 bp, Artificial Sequence
  ENSG00000261097_3 (sequence is synthesized)
tactgatgtagttggttaacattttggcttaagctccttatcttgtcatggacaggtaccgaatactctggactgacagaggtcgacaaactatgctctgagtggcactgttctgcagca

SEQ ID NO: 857534 - DNA, 120 bp, Artificial Sequence
  ENSG00000261097_4 (sequence is synthesized)
aagtggttttacccataagaccattcaattatagaattttagaactgaaagatgtcttagacaccatctagtccaagttcctggtttcacagccgaggatccttagaacctgaaagtttt

SEQ ID NO: 857535 - DNA, 120 bp, Artificial Sequence
  ENSG00000261097_5 (sequence is synthesized)
ccatgccctgaaattcctgaaggaagcagaatttcctctgaggtttctgctgagtcatatgcaggctccatctgatgtagagattcagtagaaggggccaggttgcctcctgatgggggc

SEQ ID NO: 857536 - DNA, 120 bp, Artificial Sequence
  ENSG00000261097_6 (sequence is synthesized)
agcgtgtggaggatgagcctgggcttacttggcagacagatctggtcatgttccagctctatctcctacttgcagaatgtcttcgggaaaattacctacattctcaaagcctcagattct

SEQ ID NO: 857537 - DNA, 120 bp, Artificial Sequence
  ENSG00000261097_7 (sequence is synthesized)
tgctttgtcaacattccttgaagattgctaaactgaagactctggtgttcccttttgtgatagggagaataatagccccccaaagatatctacatcctaatccttggaacctgtgactat

SEQ ID NO: 857538 - DNA, 120 bp, Artificial Sequence
  ENSG00000261097_8 (sequence is synthesized)
gttatgtcacatggcaatgggagacttgaggttccagactgaattaaggttgataatcagctgaccttgagatggtgagactatctgggatcatctgggtgggtccaatgtcatcacaat

SEQ ID NO: 857539 - DNA, 120 bp, Artificial Sequence
  ENSG00000261097_9 (sequence is synthesized)
gttccttataagagagaggcaggagagaaagaatcagaaaggcggcagcatgaggaaggctcagcctgacattgctggcttagaagatggaggagtgaggccatgagcgaaggaatgcag

SEQ ID NO: 857540 - DNA, 120 bp, Artificial Sequence
  ENSG00000261097_10 (sequence is synthesized)
gaagcctctagaagctggaacacacccctgctgacacctggacttgtacctagtgaaacccatttcagacttcagacctccaaaactgtgcagtaataaagctgttttgttttaagccac

SEQ ID NO: 857541 - DNA, 120 bp, Artificial Sequence
  ENSG00000261410_0 (sequence is synthesized)
cacctgcaaatagaccagtgcaggcattgaacatctggggcaagactagcgtctcccagcagattagtctgcatatcaagaacaactagaccttataaaagtcacaacagagcagaggga

SEQ ID NO: 857542 - DNA, 120 bp, Artificial Sequence
  ENSG00000261410_1 (sequence is synthesized)
gagcatctgagggtatcttcagagaaatcaaatgcaccaagacaaaaacgtatgacctgaaactggtcccgaggaaacatcagatggaccacgttgagcatcacactgcagaatgtaggg

SEQ ID NO: 857543 - DNA, 120 bp, Artificial Sequence
  ENSG00000261410_2 (sequence is synthesized)
ctgcattcttccaaactgttgggacgatgaaagtcagggaaagactgaggaaatgctccaaactggggcagactgcaaagatgtgacaattaaatgcaatgtgtaactcggggtttctgc

SEQ ID NO: 857544 - DNA, 120 bp, Artificial Sequence
  ENSG00000261410_3 (sequence is synthesized)
gaaattaatatacctaactgagttagaaaccagggtagtacgcctagcaatgagtacttaaacaaatcctcctggggattctgctgtacactcaagcttcggatacactggtctagagta

SEQ ID NO: 857545 - DNA, 120 bp, Artificial Sequence
  ENSG00000261410_4 (sequence is synthesized)
attgaattgtggctggctgaagacatgggtattttttccccaggacagcagaagcctcccctgcacctgcaaatagaccagtgcaggcattgaacatctggggcaagactagcgtctccc

SEQ ID NO: 857546 - DNA, 120 bp, Artificial Sequence
  ENSG00000261416_0 (sequence is synthesized)
ccgactgctctgaggtccagcacccccggccaccccaggactcccgaagaggctgctaggtcggcctgcccaaagagcggtgaggagcgtatgtgaagagccccagtcttgaggagcagc

SEQ ID NO: 857547 - DNA, 120 bp, Artificial Sequence
  ENSG00000261416_1 (sequence is synthesized)
ctcccaggcccagcctcacctgctgccgagagaggacagtgatcccccaaaagccggaggtggaggaggaggaggaagaggaggaaggagctggaggagccggggactcgcccgctgaag

SEQ ID NO: 857548 - DNA, 120 bp, Artificial Sequence
  ENSG00000261416_2 (sequence is synthesized)
atgctcttgtcaagacaatgaatgagaagcagccgtgcgcccgcctccggggtggccgcgccccttggggcggagctcttccaggcccgccctgcgctcccgggctcccgctgcggccgc

SEQ ID NO: 857549 - DNA, 120 bp, Artificial Sequence
  ENSG00000261416_3 (sequence is synthesized)
ctctgcaacagagcctggcgtggtgttgccccactgcatgtttgttgactgactggctgatggatgcagagcccgtccttcctaatggttcagactcaggcgtcatcagcccagatggct

SEQ ID NO: 857550 - DNA, 120 bp, Artificial Sequence
  ENSG00000261416_4 (sequence is synthesized)
ccgagggaagggagaggccactccgactgctctgaggtccagggaaggggcctgtgctgccgcttggagggtgccatgcccagagcctctgcccctagcctcagcctcgcctactcactg

SEQ ID NO: 857551 - DNA, 120 bp, Artificial Sequence
  ENSG00000261416_5 (sequence is synthesized)
catcgccccaccctgcctcctcccccaccacaggtaccaggcccggaaaccacggaaaggggaacttggtcttttcttgttttgctctcaaccccttcctgtctccaagcccagggcagc

SEQ ID NO: 857552 - DNA, 120 bp, Artificial Sequence
  ENSG00000264421_0 (sequence is synthesized)
gtgtcagcaactgaagtctatacaggaaaaggcagagctgattcacagggagaaactaagtcctgatgacatcacctgacccctgaatccagctctggctagctgtgcctggacttcgaa

SEQ ID NO: 857553 - DNA, 120 bp, Artificial Sequence
  ENSG00000264421_1 (sequence is synthesized)
cacagagttaacttatccagttacactgtaaacgacagaggcaggattcaaatccaggcagcccgacaactcctacttttaccacgacactgattctgagcccacaagcaactaaggttc

SEQ ID NO: 857554 - DNA, 120 bp, Artificial Sequence
  ENSG00000264421_2 (sequence is synthesized)
taatgctattccaacagagtaaaaactcaaagtccagcactcccaaaagcaccaaatgtgacagtgaaatatcaccttttaattctgaaacagggttaacatagttctgcattataaaaa

SEQ ID NO: 857555 - DNA, 120 bp, Artificial Sequence
  ENSG00000264422_0 (sequence is synthesized)
gaattccagctgaggtgacagaatgagaccctgtctctctaaaaaacaagcaagcaaacaaaccaaaaaccacaaacaaaccagacccctcttagcagaatacttccatgaggtaataaa

SEQ ID NO: 857556 - DNA, 120 bp, Artificial Sequence
  ENSG00000264422_1 (sequence is synthesized)
aagtgaaacgaacaaacaattttactcaagaaactagtgagaaatcaaagaaatgtccaagaagtaggatacaagaattaatcaaaacagattaacagtggaataaataaatgaatccaa

SEQ ID NO: 857557 - DNA, 120 bp, Artificial Sequence
  ENSG00000262147_0 (sequence is synthesized)
cgcctgccctccaatcgccagccctcccggcttccatctcctcccagctacctgcagtgccaccaggtttatcaccttagagcatccacagccacagttacccagagagaagagaaggag

SEQ ID NO: 857558 - DNA, 120 bp, Artificial Sequence
  ENSG00000262147_1 (sequence is synthesized)
ccacttccccagcatgactagatttcctgcagcttcgaaatgcaaacattgcctcagacaaaagctaaaattgttacagtcagaaccgaaaccacgagtgagaaggggctctgctcccag

SEQ ID NO: 857559 - DNA, 120 bp, Artificial Sequence
  ENSG00000219665_0 (sequence is synthesized)
gaggaaacccgaagtcgggattctttctttcctgctctgagagggaccaggtccctcctccgtagcttttgtctctctattgcctgcgccgtgtcctggactgctcacgggagttctgca

SEQ ID NO: 857560 - DNA, 120 bp, Artificial Sequence
  ENSG00000219665_1 (sequence is synthesized)
gggagttctgcaggagacgccggaatatctggaagctgaaaaatggaaataaatggaaagaccagaatattgaagatcactacagaaatctaagggtcaggcatggtggctcacacctgt

SEQ ID NO: 857561 - DNA, 73 bp, Artificial Sequence
  ENSG00000219665_2 (sequence is synthesized)
gggaggcgttctggtctgctaaaaatacaaaaattagccgggcctcatggcacatgcctgtaatcccagctac

SEQ ID NO: 857562 - DNA, 73 bp, Artificial Sequence
  ENSG00000219665_3 (sequence is synthesized)
tcttgctttaaaagaagagtaaagacaagagtgttggaccagtattgcagttctgtagtatcatttcttataa

SEQ ID NO: 857563 - DNA, 120 bp, Artificial Sequence
  ENSG00000219665_4 (sequence is synthesized)
ttggaccagtattgcagttctgtagtatcatttcttataaaaaacaaaacaacaataatttatcaaaattggcatataaagactgacaacattctaataaaggcacaaatttctttttaa

SEQ ID NO: 857564 - DNA, 120 bp, Artificial Sequence
  ENSG00000219665_5 (sequence is synthesized)
tccagcaaagcccactcctcttgggtgaaggtcacagccacatcctcaaaggccactgaatcctgaaacatctcacatgtatagaggaggatggataagactaacatcactgggaagcct

SEQ ID NO: 857565 - DNA, 120 bp, Artificial Sequence
  ENSG00000219665_6 (sequence is synthesized)
atactctattcccaagaggtttccatgatgctgtggactcaaaacaattattccatgaccatcagacctcatactctctgtctacactcagtttcttccataaagtaattctgaggctac

SEQ ID NO: 857566 - DNA, 120 bp, Artificial Sequence
  ENSG00000219665_7 (sequence is synthesized)
gccatgcaaggcaagaggtgactcccacgaccagtgcgggtcacagcacaggcgacagaagctatggcagaggcacctgaaccctctcggaggggaaagccaggctcccaacctcagctc

SEQ ID NO: 857567 - DNA, 120 bp, Artificial Sequence
  ENSG00000219665_8 (sequence is synthesized)
ccagcgcccctgattggacgaagcgccgggccccgccccctcagccttttgagtcagggtctcaccctgtggcccaggctgccctccagtgatgccatcatgactcagtgcaacctcaaa

SEQ ID NO: 857568 - DNA, 120 bp, Artificial Sequence
  ENSG00000219665_9 (sequence is synthesized)
ctcccaggttcaagcgatcttccatcctgacctccaaaagggctggattatacacataagccatgtcacactttatatgtttctagggaagcttttctaagaataaatacattggaacta

SEQ ID NO: 857569 - DNA, 120 bp, Artificial Sequence
  ENSG00000219665_10 (sequence is synthesized)
ggtaacggggctctgaaaacgggtttgaccggatccagcgatagattctttaagccagaggtctgtaacctttttagcaccagaaccggtttcgtggaagacagttctcctacgggggca

SEQ ID NO: 857570 - DNA, 120 bp, Artificial Sequence
  ENSG00000219665_11 (sequence is synthesized)
tggactgctcacgggagttctgcaggagacgccggaatatctggaagctgaaaaatgcttgtgccctctgtctcttgccttggcacctgggtggcttgctgcccacaaccccgtgtctaa

SEQ ID NO: 857571 - DNA, 83 bp, Artificial Sequence
  ENSG00000219665_12 (sequence is synthesized)
tggcacctgggtggcttgctgcccacaaccccgtgtctaaaaatacaaaaattagctgcgcatggtggtgggtaccacgcttg

SEQ ID NO: 857572 - DNA, 120 bp, Artificial Sequence
  ENSG00000219665_13 (sequence is synthesized)
actacagaaatctaaggatgaaatcaacagccaatctgggtgccattgagacatctaaagccttactatgagccagatacccaggaagaggttttgggaggatcccaaagactccctggt

SEQ ID NO: 857573 - DNA, 83 bp, Artificial Sequence
  ENSG00000219665_14 (sequence is synthesized)
gtcacgagcaacaactggaaaaacctgagaaaagcgggacaaccagtcacaatgagtaatttaatgatagctatgacagtggt

SEQ ID NO: 857574 - DNA, 76 bp, Artificial Sequence
  ENSG00000219665_15 (sequence is synthesized)
tcacagatggcagagaaaaacctgagaaaagcgggacaaccagtcacaatgagtaatttaatgatagctatgacag

SEQ ID NO: 857575 - DNA, 82 bp, Artificial Sequence
  ENSG00000219665_16 (sequence is synthesized)
tatttaccataatactatttgtaaacaggattggacctggtcagaaaaaatgaacgtacttgtttgggaagattgcattgca

SEQ ID NO: 857576 - DNA, 78 bp, Artificial Sequence
  ENSG00000219665_17 (sequence is synthesized)
gtcagatggtagaaatgataagaagtatggcaagagttcctattatctggaatgctgtaggagctaaacataaggatt

SEQ ID NO: 857577 - DNA, 75 bp, Artificial Sequence
  ENSG00000219665_18 (sequence is synthesized)
aaatttgggaaaggataaaaaagcatctagaaggacactctagaaacttggatattgcaaaattaaaagaacaaa

SEQ ID NO: 857578 - DNA, 120 bp, Artificial Sequence
  ENSG00000219665_19 (sequence is synthesized)
ccggatccagcgatagattctttaagccagaggtggaagtggcactccttactaatttacctgaaagcactatttcctgagccatggagactgagtatagcaatgatatgtgatctaaag

SEQ ID NO: 857579 - DNA, 120 bp, Artificial Sequence
  ENSG00000219665_20 (sequence is synthesized)
tttatgctgcacaaaagctgtgagtcttctgcctggggaacccccacaaaaagttccaacaggggtctgtggacacttgccagtagggacaatcagattacttctaggtagatctagttt

SEQ ID NO: 857580 - DNA, 88 bp, Artificial Sequence
  ENSG00000219665_21 (sequence is synthesized)
aaggagtgcaagtacatacaggagtcactgattcagattacaatgggaaattcaaattgttatagaagcacaactcctgattgtgcca

SEQ ID NO: 857581 - DNA, 120 bp, Artificial Sequence
  ENSG00000219665_22 (sequence is synthesized)
actattcagggaaagaaatttaaaggattggtagatacaggagcagacatttccatcatttctctacaccactggctgtccgcatggccaattcaacccactcaatttaacagagttgga

SEQ ID NO: 857582 - DNA, 76 bp, Artificial Sequence
  ENSG00000219665_23 (sequence is synthesized)
ctcgatcaattgtaacttctgtacctataaattaatgggggagagattttactgcaacaatggggagtacaagttc

SEQ ID NO: 857583 - DNA, 120 bp, Artificial Sequence
  ENSG00000219665_24 (sequence is synthesized)
gggggagagattttactgcaacaatggggagtacaagttctaattccagagcaattatatagccctgaaagtcaacatatgatgcatgaaatggggtatgtcctaggaaaaaaattgcag

SEQ ID NO: 857584 - DNA, 120 bp, Artificial Sequence
  ENSG00000219665_25 (sequence is synthesized)
ggtttgaaggaactgctccaagcagaaagacaaagttcccaccaaggtttagggtatcatttttgatggtggccattgttaagcctccagaaactatacctttaaaatggttaacagata

SEQ ID NO: 857585 - DNA, 69 bp, Artificial Sequence
  ENSG00000219665_26 (sequence is synthesized)
actggaggctttagccccttggaattctccagtcttcgtaattaagaaaacatcaggtaaacggagaat

SEQ ID NO: 857586 - DNA, 85 bp, Artificial Sequence
  ENSG00000219665_27 (sequence is synthesized)
aacctatggggacattacagccaggactgccttctcctgtggattccaaaaaattggcctttaattgtcatagatttaaaagact

SEQ ID NO: 857587 - DNA, 60 bp, Artificial Sequence
  ENSG00000219665_28 (sequence is synthesized)
atggggacattacagccaggactgccttctcctgtggattccaaaaaattggcctttaat

SEQ ID NO: 857588 - DNA, 120 bp, Artificial Sequence
  ENSG00000219665_29 (sequence is synthesized)
taaacagtccaacaatttgccagacttatcaattgaaaacattaaatgactttcaaaaagtactaagggatatcaactggatacaacctgctctaggcattcctacctatgctatgagta

SEQ ID NO: 857589 - DNA, 85 bp, Artificial Sequence
  ENSG00000219665_30 (sequence is synthesized)
atctggcaattaacaaaagaagctgaggcagaggtacagctgattgaaaagtaagtccataaagctcagataaatagaatagatc

SEQ ID NO: 857590 - DNA, 63 bp, Artificial Sequence
  ENSG00000219665_31 (sequence is synthesized)
gcaattaacaaaagaagctgaggcagaggtacagctgattgaaaagtaagtccataaagctca

SEQ ID NO: 857591 - DNA, 120 bp, Artificial Sequence
  ENSG00000219665_32 (sequence is synthesized)
agagcaggacttagtagaatggctttttcttccacatactaactcatggactcttaactccttatctggatcaaatcgctactatgataggaaatgggagaactcggattgttaaattac

SEQ ID NO: 857592 - DNA, 120 bp, Artificial Sequence
  ENSG00000219665_33 (sequence is synthesized)
aaaaattattgtccctctcacaaagacacaaatacagcaagcttttataaacagtcttacttggcaaacccattagctgactttgtgggtattctcgataatcattttcctaaaagaaaa

SEQ ID NO: 857593 - DNA, 72 bp, Artificial Sequence
  ENSG00000219665_34 (sequence is synthesized)
gtatgtggttcattccacaccattagctgaaaatgctcagttgccatttcatacagatgaacaactgatgac

SEQ ID NO: 857594 - DNA, 89 bp, Artificial Sequence
  ENSG00000219665_35 (sequence is synthesized)
tttacccaattgcaaacagcagttagaaatagaatacaccctttttacatcactcacacactgaagggaatcaaatggctgatggccta

SEQ ID NO: 857595 - DNA, 89 bp, Artificial Sequence
  ENSG00000219665_36 (sequence is synthesized)
ctcacacactgaagggaatcaaatggctgatggcctagttgctactacaatatctaatgccagacactttcacaatttaacccatgtta

SEQ ID NO: 857596 - DNA, 61 bp, Artificial Sequence
  ENSG00000219665_37 (sequence is synthesized)
atatggaatattaaacacattattggcattccatacaattctcaaggatgagccacagtgg

SEQ ID NO: 857597 - DNA, 120 bp, Artificial Sequence
  ENSG00000219665_38 (sequence is synthesized)
attggcattccatacaattctcaaggatgagccacagtggaaagaatgaatctgtccctgaaacagcagttgcaaaagcaaaaagggggaaacagggactacaggacaccccatatgcaa

SEQ ID NO: 857598 - DNA, 120 bp, Artificial Sequence
  ENSG00000226746_0 (sequence is synthesized)
aattcactcagggcctaagagctttgggcagttaaatccccctccccgacaacagactaacaggtcccattttgatatcaagggctggggtttcaagacagggaactgtggggcccacgc

SEQ ID NO: 857599 - DNA, 120 bp, Artificial Sequence
  ENSG00000226746_1 (sequence is synthesized)
tgtcctggcctccctggaggcctggctgctctcatgccaggaagggagcttccatttactacgggcctaggatggccgccccgctgcccccagcgctccctgggtgggtgcggatcctgg

SEQ ID NO: 857600 - DNA, 120 bp, Artificial Sequence
  ENSG00000226746_2 (sequence is synthesized)
ccagtcccccagacacgcagtctgctgaccagaagcagcgaccttcggggagagccagccaccagccagccactgctccagaggcaggcctggggccacccgggaggctttcctcaccac

SEQ ID NO: 857601 - DNA, 120 bp, Artificial Sequence
  ENSG00000226746_3 (sequence is synthesized)
ggaaaatatttgcctttggttgtcggctgatgccttgtcttgtgtctgaatggacaactggctgatttctctctctttggaacagccatgaaatgcgaaggtgtttaagagtaaaaacca

SEQ ID NO: 857602 - DNA, 120 bp, Artificial Sequence
  ENSG00000226746_4 (sequence is synthesized)
ggcgagggcaactgggcctggcgtccagctgttttgaacaacactcttgtttttctcccagagtgaacagaatactttctgcggttcagaatactctgtgcactggcccctcttcccagg

SEQ ID NO: 857603 - DNA, 120 bp, Artificial Sequence
  ENSG00000226746_5 (sequence is synthesized)
ccccgccccagccccctcaggcctcacctccagctgctgcagaccattccagaactccctccctcttggcttctagtcactcagcatctgggggagagagcctcttccagctgtacatag

SEQ ID NO: 857604 - DNA, 120 bp, Artificial Sequence
  ENSG00000226746_6 (sequence is synthesized)
ctagcttggcctggccccagaactgctgtgttctggaaagttgtaggagaatccctcttggcgggctctccagcatggagaatcgcaggcctctgctccggaaagggaggcttttgagag

SEQ ID NO: 857605 - DNA, 120 bp, Artificial Sequence
  ENSG00000226746_7 (sequence is synthesized)
gtcagattcaccacagccagaccaatgaactgtgagggctcataggggctggggctccggtttcaggggtgagaggagccaccatctgcccccatgcccactctgattgtaaatggctag

SEQ ID NO: 857606 - DNA, 120 bp, Artificial Sequence
  ENSG00000226746_8 (sequence is synthesized)
actctggtgccggggtcagctctggattcatatcccagctcctgcatatgtatatgctgggtgaccttgggcagtttacttaacctctctgtgctttgtgtgcctaagctgcaagatact

SEQ ID NO: 857607 - DNA, 120 bp, Artificial Sequence
  ENSG00000226746_9 (sequence is synthesized)
ctaaattaaacagcaaactttcagtgctgttgtgggacgaaatgggataatgtgcttggtagctggcaggggctcaataaaaggtagcaacttccagggccaccagttcatggggagcca

SEQ ID NO: 857608 - DNA, 120 bp, Artificial Sequence
  ENSG00000226746_10 (sequence is synthesized)
ggtccaagtcttgtactttctatgcctcccagggagccacgtatgtctgcgacagagctggggaggacattctggggctgagggttgaggtctgcccatagagcagcggcctgtacctgc

SEQ ID NO: 857609 - DNA, 120 bp, Artificial Sequence
  ENSG00000226746_11 (sequence is synthesized)
cagcgggtcaggtgggacaggggttctgcagctgtaaggaactcccaggtcaagccagtgtggcaggtctgtgaccgcagctggtacggcaagatctcagccctggaagactctgggttc

SEQ ID NO: 857610 - DNA, 120 bp, Artificial Sequence
  ENSG00000226746_12 (sequence is synthesized)
tgctgaggctgggctcagagagagaatacaagttttgtcctgtccaaggagcaccctccaggatttcaggacaaggctctggctctgtgtccccaagccctcagtctcagagcttgggtc

SEQ ID NO: 857611 - DNA, 120 bp, Artificial Sequence
  ENSG00000226746_13 (sequence is synthesized)
ctgcagtggcctgggcaaccctccggactctccattcagcatttgttcctgacagcagtgcacggataaagagcagtttcatgctgctgaacttgcaatcacttcaaggcctgggcccct

SEQ ID NO: 857612 - DNA, 120 bp, Artificial Sequence
  ENSG00000226746_14 (sequence is synthesized)
ctgggcctcagtttccccactggcacagtgggaagctgggataagctaatcccaccctttccccttggtaattccccacattgctcttcccttcccttcatcccttcccaaaacacaggt

SEQ ID NO: 857613 - DNA, 120 bp, Artificial Sequence
  ENSG00000226746_15 (sequence is synthesized)
ctgaggcctgagcatccatcctaggggctgggcccccatccccatgactgcagtcatggggtacaagactcatgcagactcgtaagaacagccacttctgacctggggcctcgatgttcc

SEQ ID NO: 857614 - DNA, 120 bp, Artificial Sequence
  ENSG00000226746_16 (sequence is synthesized)
aggcactgtcctaggcatttgcatctacaaacttctcaccataatccaatcaccactgttttacagatgaggaaactgagccccacggggtgaagcctattgcctgagatcttgcagttg

SEQ ID NO: 857615 - DNA, 120 bp, Artificial Sequence
  ENSG00000226746_17 (sequence is synthesized)
gtaacgggtgcaggctggactcaggcccccacacatgcccaggcccttgagtatttgtaagggaagcagctgtttggttttcttggcacagagcatctgcctagctggtgagggcatggg

SEQ ID NO: 857616 - DNA, 120 bp, Artificial Sequence
  ENSG00000226746_18 (sequence is synthesized)
gaaagaggtgcccaatctagttggggatgggagggtaaaatggtactacctctttggagagctttctggcaatatggacccaaatgcaaattacatgtgccctctaacctgggcccgaag

SEQ ID NO: 857617 - DNA, 120 bp, Artificial Sequence
  ENSG00000226746_19 (sequence is synthesized)
tcatctgcacaaggctaccaactgcaatgtcctttgcagcagcaaaacacgggatcccctagctgtccatccaagggggatgagggagatacatctgggaggttctattggctgagtact

SEQ ID NO: 857618 - DNA, 120 bp, Artificial Sequence
  ENSG00000226746_20 (sequence is synthesized)
cagagaatggaagcaccacatggattaattggagcagtcttcaagttggtgaaaaaaagtgcagtgtagaaagtgtgtacagggccgggtgcagtggctcacactgtaatgccagcactt

SEQ ID NO: 857619 - DNA, 90 bp, Artificial Sequence
  ENSG00000226746_21 (sequence is synthesized)
tggagatcctacctctacaagaaaaaaaatgaactaggcaggtgaggtggtgtttgcctgcggtcccagctacttgggaagctgaggtag

SEQ ID NO: 857620 - DNA, 75 bp, Artificial Sequence
  ENSG00000226746_22 (sequence is synthesized)
aagaaaaaaaatgaactaggcaggtgaggtggtgtttgcctgccatgaagtcaggctgcagtgagctgtgactgc

SEQ ID NO: 857621 - DNA, 120 bp, Artificial Sequence
  ENSG00000254095_0 (sequence is synthesized)
tgaagccggtcaggtggggagacagcacttccattctctttaaatgatagaaatgtctaatttctgagactctctgtcttgtggagcactgtcgtcttcatggacacaggcaggatggca

SEQ ID NO: 857622 - DNA, 88 bp, Artificial Sequence
  ENSG00000254095_1 (sequence is synthesized)
ctgacatgctgggattataggcgtaaaccaccatgcatagcctttaggactgtctttttaacctgaaagctagatggacgctaacaaa

SEQ ID NO: 857623 - DNA, 120 bp, Artificial Sequence
  ENSG00000254095_2 (sequence is synthesized)
agcctcaggtatttcctttacagcaacacaaatggactaagacatggtcatgacaaagtctcccatagaaaactgatctggccttctccaaaactgagggcagctgggaggcataaacag

SEQ ID NO: 857624 - DNA, 120 bp, Artificial Sequence
  ENSG00000254095_3 (sequence is synthesized)
aaaaggacattggacaacactgggtttagcctgagagactctcctcactagagaagcagattttcagttgtccaatcaagctgctaaagaaagaggggctgatttgtcagactattttgt

SEQ ID NO: 857625 - DNA, 120 bp, Artificial Sequence
  ENSG00000254095_4 (sequence is synthesized)
ctataactagggtagccatatatgccaatttccccaaggcagtcttgattagcttctattttttggcacaattctgaacagtgtcacctcttttattctaaaatgttttctgaaataaaa

SEQ ID NO: 857626 - DNA, 120 bp, Artificial Sequence
  ENSG00000254095_5 (sequence is synthesized)
atccgtgtgtctgctcttcagcatcccctagggagagtccacgttatttctaagaagacaggagagaaggagggagaaaaaaacgtgcagatcaaaaggcctcagaaaaaaacaaagtgg

SEQ ID NO: 857627 - DNA, 120 bp, Artificial Sequence
  ENSG00000254095_6 (sequence is synthesized)
gatgaaatgctgggctttattctgtacaacctaagcattttctatctttgatgagtcaaggtactggcagttctgtccaccattacttttgcatcatcaatgcaaatatcaacacaacaa

SEQ ID NO: 857628 - DNA, 120 bp, Artificial Sequence
  ENSG00000254095_7 (sequence is synthesized)
aaaggaaaataatgtcttagtattattatgaaaataattttgaccctgtggaccctctgaaagtgtttctgcagacagagttactgcaagtttcctggggacccttggttgggctctgtg

SEQ ID NO: 857629 - DNA, 120 bp, Artificial Sequence
  ENSG00000244265_0 (sequence is synthesized)
agctacaatcccgagagctcccacgtgtcaggggtgcgcagacggtaggcgcggggtgcaggactccaattatcaattcagccgagcccagcgctggtaaagggggcgtttagctcgccc

SEQ ID NO: 857630 - DNA, 120 bp, Artificial Sequence
  ENSG00000244265_1 (sequence is synthesized)
cgaatacacgtctgcagaggacgcgggcattgggccggagatgccgcccgcctctccgggcctgcgagtgggctggcggataccggagtccctgaggtcaccggcggaggtacgtgggct

SEQ ID NO: 857631 - DNA, 120 bp, Artificial Sequence
  ENSG00000244265_2 (sequence is synthesized)
gtccctgggcttaccttacagggaaacaggactgccgaggccaccttctccatagccaggttcctgatgctgggcgtcagggcgcccctgcacgtcgggcagcagctcaacttctggcgg

SEQ ID NO: 857632 - DNA, 120 bp, Artificial Sequence
  ENSG00000244265_3 (sequence is synthesized)
agaggacgcgggcattgggccgggtgagctacgatgttctaacgatcagcaaatgccaattaatctgttaattgtctattaacaattattactcggtaaatgtcaacccagacctacacc

SEQ ID NO: 857633 - DNA, 120 bp, Artificial Sequence
  ENSG00000244265_4 (sequence is synthesized)
caaagtgggcttgagggagggtggacgaagtgtaaacattttttcttttttttttttaaatgagagatgccgcccgcctctccgggcctgcgagtgggctggcggataccggagtccctg

SEQ ID NO: 857634 - DNA, 120 bp, Artificial Sequence
  ENSG00000244265_5 (sequence is synthesized)
aggtcaccggcggaggatatgagacttcacaacctgctaaaaatgagctttcctaacaacgtgggacctattcttctacgcgtaaactctcttagccatgagagatcagacaaaatccaa

SEQ ID NO: 857635 - DNA, 120 bp, Artificial Sequence
  ENSG00000244265_6 (sequence is synthesized)
ggccagagactcattttcttccaaaattgcttactctgaaaggttttaaaaataaaagtgggaagaaatgtgaaaagaaaataactcgggaacccaattcactatgccaaaaggaaaaat

SEQ ID NO: 857636 - DNA, 120 bp, Artificial Sequence
  ENSG00000244265_7 (sequence is synthesized)
aaagctgaaagctgagtcatgcaagaaactgtctttccttttgttcctaagcagatctttaaccttttacctataaccatctccacagcattgaagaaaagaaacaaacatactgctaat

SEQ ID NO: 857637 - DNA, 120 bp, Artificial Sequence
  ENSG00000244265_8 (sequence is synthesized)
aaaaagaatgtctccttgtggctactgaaacccacatgtcaactgctatagctgtcagcctaccaggaataacccctgcttcaaaccccaagaagcccatttactattttaatgacaaga

SEQ ID NO: 857638 - DNA, 120 bp, Artificial Sequence
  ENSG00000244265_9 (sequence is synthesized)
acttgctaatgtgggcatatgaactgtatccttggaaaggaatgccgtccataccaggaagtccttgagaaggcttgagttcttgccataactaaaaatccgatgatgcattaccaatga

SEQ ID NO: 857639 - DNA, 120 bp, Artificial Sequence
  ENSG00000244265_10 (sequence is synthesized)
cttcatccccaaatgaaagctagcagcctgcttccgtaatcctcatggagagttataccaagaaaagacaactttggaaaaacatgcaagagagaggcttcattttctcttttgaataaa

SEQ ID NO: 857640 - DNA, 120 bp, Artificial Sequence
  ENSG00000244265_11 (sequence is synthesized)
agaaagaaaccagtctatgtgactacggaggaggcaccatgcaggccctggtgtgggggcctgtgtttctcctacaatgctgacagctagggatttaccagagacttaaaaaatgaaaaa

SEQ ID NO: 857641 - DNA, 120 bp, Artificial Sequence
  ENSG00000244265_12 (sequence is synthesized)
actgctaatggtatatatatatattttttggtggggcttgtgaatgagaaatatggaaacgattggtctcccccacattaggcttttgcatcccagcagttctgacacttcagacttcat

SEQ ID NO: 857642 - DNA, 120 bp, Artificial Sequence
  ENSG00000244265_13 (sequence is synthesized)
tgcacagcctagtttccctttagaagaagggaacggtcccattccagttgatggtggcctcgctccacttggttctgattgccatctccactggtgaaaaccgtcgtcttggtccatgtt

SEQ ID NO: 857643 - DNA, 120 bp, Artificial Sequence
  ENSG00000244265_14 (sequence is synthesized)
tctcttcctgttggtctctttcccagtgatgggagtgagtatctgaagaaggaatagccagcatttagacccaagcctatgaacaccattccagaggaaaccactaaagaaggacagaag

SEQ ID NO: 857644 - DNA, 120 bp, Artificial Sequence
  ENSG00000244265_15 (sequence is synthesized)
ggtgggtgggcaggagtcaggcttggaaaattgtgctcctacaactggttaagcagatggggattcaagcaggtagtgtgttgaaatgccccatacagaatgagtcagtggtagcctggg

SEQ ID NO: 857645 - DNA, 120 bp, Artificial Sequence
  ENSG00000244265_16 (sequence is synthesized)
ttgttgtgcatattaggacgtagtatgtgtgttgaaacgccccatacagaatgagtcagtggtaacctgggttgttgtgcataactgttgataagctatgtaatacaccttcccgtacca

SEQ ID NO: 857646 - DNA, 120 bp, Artificial Sequence
  ENSG00000244265_17 (sequence is synthesized)
tgatgtgacacctagaaccaggtataggttactaaatattgtcaggaaaaaaaaaaaaagaggccaggcatggtggctcacgcctatggtcccagtactttggggggctgaggcaggtgg

SEQ ID NO: 857647 - DNA, 67 bp, Artificial Sequence
  ENSG00000244265_18 (sequence is synthesized)
ccaaccaaccaaccgaccccacttctccatgcttctcagaatacatttgcatttttggatggagggc

SEQ ID NO: 857648 - DNA, 120 bp, Artificial Sequence
  ENSG00000244265_19 (sequence is synthesized)
catgcttctcagaatacatttgcatttttggatggagggcaaggctttctagtggggtaagcaagaactgggtttggggcttgagtttatctcatattagccaggtgacacttaagaagg

SEQ ID NO: 857649 - DNA, 120 bp, Artificial Sequence
  ENSG00000244265_20 (sequence is synthesized)
tacttagcatctattgctaaacttcatttattcaattagtaactacttgttggacaccatagtttccacttcataaaaacagaaatcctagtacttacctcatgtgactattgggaatgt

SEQ ID NO: 857650 - DNA, 120 bp, Artificial Sequence
  ENSG00000244265_21 (sequence is synthesized)
tacgggttaatgcctgtgaggctttcaacacaatgcccagaacagaaagcaaatgattcttgtgagctaatgaaaaatgttgctttatgcaaagaaggaagttgaggtagaaacaacaat

SEQ ID NO: 857651 - DNA, 120 bp, Artificial Sequence
  ENSG00000244265_22 (sequence is synthesized)
atattttaaggaacatattgtcaatgttatactaaattaagtgggttaagatgtatttctcataattaaagaaaaagaattaggagctgcacaaataaaatagtcactagatgcttttcc

SEQ ID NO: 857652 - DNA, 120 bp, Artificial Sequence
  ENSG00000244265_23 (sequence is synthesized)
acatgtaataatggaagattacttaatgccaggcttgtggtgcaaagtcagacacagtaatgctccataaatacagctaaggctatggatacaaactcccagtttgtccagtgttaatac

SEQ ID NO: 857653 - DNA, 120 bp, Artificial Sequence
  ENSG00000244265_24 (sequence is synthesized)
ctcgtccgggggtcaatgtttaaagacattttaaggttggtctttttccctcaggagtttatgaccgaaatgatctgttcggttgtctgcttctcctgttggatttgaaccatgtttgtg

SEQ ID NO: 857654 - DNA, 120 bp, Artificial Sequence
  ENSG00000244265_25 (sequence is synthesized)
gaactttttggaataaaagaaaccagtctgtgtgactacagaggagccaccaggcagacctgtgccgcattcaccagttttcccagtgtctagccccatgcctggcacagagtaggccct

SEQ ID NO: 857655 - DNA, 120 bp, Artificial Sequence
  ENSG00000244265_26 (sequence is synthesized)
caaaaatgcgttttgtgctcatttgaacagaaatttactatcagtttggttacttatgtcactggatgatcatctgatgtttggttgtgagatagcatcagccaattcttccctgggttt

SEQ ID NO: 857656 - DNA, 120 bp, Artificial Sequence
  ENSG00000244265_27 (sequence is synthesized)
tcccaattatttcctcaggtattagctacctcatgctccaaaatcaaaggccccggagaatggtttttggaaatttggctccataacttttgtttttctcttacctgaaagttattggtt

SEQ ID NO: 857657 - DNA, 120 bp, Artificial Sequence
  ENSG00000244265_28 (sequence is synthesized)
cttctctgctatttctaacccccctgctcctaggtaaagcagatttcaaattcccacattgcaatacttgggtttagggccatgggattcatgtgtgggtttcatttcagaaactgagcc

SEQ ID NO: 857658 - DNA, 120 bp, Artificial Sequence
  ENSG00000244265_29 (sequence is synthesized)
taagcattttcctgtggagctagcatgaatatccacacagttgttaaacattggcaaccgcatctctttgagcacattaaaatccacaacacctggagtctgaaatgctcacctattgta

SEQ ID NO: 857659 - DNA, 120 bp, Artificial Sequence
  ENSG00000244265_30 (sequence is synthesized)
agacgcacaagctttttctgtgagggttggccactgtaaaagtacagatcaaagagacgttccattttccagtctgataagagctgcctgtttgtgcaaaaaaggatgctgtaatttcca

SEQ ID NO: 857660 - DNA, 120 bp, Artificial Sequence
  ENSG00000244265_31 (sequence is synthesized)
ttgatgttgcacagccaaataggtaatttgggagtcttcagcatgctgcccacctggaaaggggaaggggaatgcagataaatatatagattttgccacattgtgacacatgccgataca

SEQ ID NO: 857661 - DNA, 120 bp, Artificial Sequence
  ENSG00000244265_32 (sequence is synthesized)
tgatcgcgaccaaaaagcagctctgaggtttcttgttgcacttgtcgcgtgcagggcactgtacatagagcaagatttgaaatcaaggcttcgtcatgaataaatttgcatttatgaatg

SEQ ID NO: 857662 - DNA, 120 bp, Artificial Sequence
  ENSG00000225623_0 (sequence is synthesized)
cagggttctgggctgtggtaaaaattacgattttccacaagactattctgacactacacaagcaaggaggggatcctcatttcttctgaggtagagagactgagactaggggatattgaa

SEQ ID NO: 857663 - DNA, 120 bp, Artificial Sequence
  ENSG00000225623_1 (sequence is synthesized)
tcatttacccgaggacacactattaggaagtgtcagggttaggattctatatccagtcctgtctcgtattcctctcttacatagactctgtgcttcagccaatctgcttaaccgaagatg

SEQ ID NO: 857664 - DNA, 120 bp, Artificial Sequence
  ENSG00000225623_2 (sequence is synthesized)
ttagtaagaaagcagtgaatggaggatatatgtggttcgtagggtaactcagctccacagtacattggggacccagacctttgcatcctattggaggattctgaagagtaggaatgaagc

SEQ ID NO: 857665 - DNA, 120 bp, Artificial Sequence
  ENSG00000225623_3 (sequence is synthesized)
tgaagagtagaagtagaatctgaaaaagtaggacaactggcttcggatatagaagcattatctgagctcagtaattttttttcaaagaaaaaagcatgaataaatacatgtgtgaaacct

SEQ ID NO: 857666 - DNA, 120 bp, Artificial Sequence
  ENSG00000244260_0 (sequence is synthesized)
agtgtgcgtgctgaggctggagagaaggataagaggtggtcctgccctcggggcttgcagtcggctgggatgataagtcctgcagaaatttagtggccgagctgccactagagctcaggt

SEQ ID NO: 857667 - DNA, 120 bp, Artificial Sequence
  ENSG00000244260_1 (sequence is synthesized)
ctctctctggactcccagaccagggcttatcctgttatattgtggcctcttctattctatcgccacagtcacacgggggctggagtgcagtggcgtgattgctgctaactgcggcctcca

SEQ ID NO: 857668 - DNA, 120 bp, Artificial Sequence
  ENSG00000244260_2 (sequence is synthesized)
cctcttgggctcaaatgatcctcccactccagcctccccaagtagctgggacaacaggatggttgacaggctatttggaacaatcttcctactgaaagaaactaaaaaatatgagtaaga

SEQ ID NO: 857669 - DNA, 120 bp, Artificial Sequence
  ENSG00000244260_3 (sequence is synthesized)
cgtgtcttgatgaaagcattaaagaaatattaagacaccaagaaaccaccacatcaaaaatgaagggaacattcgttcagagaaccctcaggttgaggcccttcctggcaaagctgccct

SEQ ID NO: 857670 - DNA, 120 bp, Artificial Sequence
  ENSG00000244260_4 (sequence is synthesized)
aggcccagatgtcacatatgcatgacaacgtccggggaccatttgccccagcagattccctttcatttctgattggccggcaagtggctgaggatcgtcttactcgcaccctggtgctgg

SEQ ID NO: 857671 - DNA, 120 bp, Artificial Sequence
  ENSG00000244260_5 (sequence is synthesized)
gcgctgaccacctcccgaagcacttggccagggggagaggatgctggacacaatcaggttctcctggggggaggagggagggaatggctgctggaagggttctaccggggactcctacag

SEQ ID NO: 857672 - DNA, 120 bp, Artificial Sequence
  ENSG00000244260_6 (sequence is synthesized)
cagcttgttagatctccttcctcccaattccctgaagttggtggaacaggaagaggacgagaagtcatgtttgtatgttgtccccttggaatctctcaaaaatccgcaatatcccgattt

SEQ ID NO: 857673 - DNA, 120 bp, Artificial Sequence
  ENSG00000244260_7 (sequence is synthesized)
tgtgagcaacgagacggaatccacgcccagggctttctaacggcggggccacgccctccacactccacctcggccctctgccctgcgatggtgcagagacagggtgtggtcaaggggcct

SEQ ID NO: 857674 - DNA, 120 bp, Artificial Sequence
  ENSG00000244260_8 (sequence is synthesized)
agggtgagggtcctgccagtactttacaggaaactccccctcttttagcctcatttgtcaaagaaagggcttagacactaaaatcttttaagtttccttctagctcaatctctctttgat

SEQ ID NO: 857675 - DNA, 120 bp, Artificial Sequence
  ENSG00000244260_9 (sequence is synthesized)
ttaataccttctaaaagagatttggggccccagaaaaaaagaaagcaagaaagcaactggcacttctgtggttgactcagcacagaggcctggacaggcatcaggaggctgggctcctcc

SEQ ID NO: 857676 - DNA, 120 bp, Artificial Sequence
  ENSG00000244260_10 (sequence is synthesized)
tattttgggcctcgtgagttcatcctgaggcctgtgccagtccctgcggtttctcatctctccatcctggtctgtatgacaaaatggctaaaaataccgggctccccgcgggcccgccac

SEQ ID NO: 857677 - DNA, 120 bp, Artificial Sequence
  ENSG00000244260_11 (sequence is synthesized)
ccggctaacaccctcccttgaatcagctcattttttagtcttgggtatgctgcagatgagagtccaggacaagccaccttcggaagctctgactcccaggaaccccgcttgggttggtcc

SEQ ID NO: 857678 - DNA, 120 bp, Artificial Sequence
  ENSG00000244260_12 (sequence is synthesized)
ttgtgctctggtggaagaagcttgggcgctgtccacttcctaggcagactattcccatcatagacacagtgacccttttaaagctcagactctgcaataacggctgcccatctcactcac

SEQ ID NO: 857679 - DNA, 120 bp, Artificial Sequence
  ENSG00000244260_13 (sequence is synthesized)
agagaaggaacaggaccaggagggcctagtgatggaaggaccaacacatggttggatgacagaccctgaagggcccttgtggaggggctccatgggagttggctgtgaaaccacccaggc

SEQ ID NO: 857680 - DNA, 120 bp, Artificial Sequence
  ENSG00000244260_14 (sequence is synthesized)
tgaggctcccctgtgggcttgagtcatgcccggccaaagcttgcaaagtggaggctgtgtcgcattttctgttttccccatgcctgacatccagtgggcactaataaatgtttaacgagt

SEQ ID NO: 857681 - DNA, 80 bp, Artificial Sequence
  ENSG00000244260_15 (sequence is synthesized)
tactgtcttgtaccgatggttgacaggctatttggaacaatcttcctactgaaagaaactaaaaaatatgagtaagacgt

SEQ ID NO: 857682 - DNA, 120 bp, Artificial Sequence
  ENSG00000244260_16 (sequence is synthesized)
cagcttccagctcctctgctctccagccgttcacacactccccatcacaggaagatttgttaaaagccaaccaagaaagagagagaatttgagatcctgcacaaacaatcctagaaggtg

SEQ ID NO: 857683 - DNA, 120 bp, Artificial Sequence
  ENSG00000244260_17 (sequence is synthesized)
tgctctgcccctgtctacagacctgcctctcaccgcatgcccacagtcaccacatgtcagccatggcaaactacctggggacccccaagcgacctgcttgtggggctctgcaccctggtg

SEQ ID NO: 857684 - DNA, 120 bp, Artificial Sequence
  ENSG00000244260_18 (sequence is synthesized)
ccagttcttcttttagcctggggtcctccacctgccctctgcctcaatggctcagtagagccttcagagctcacatatcagctcctccaaaaagtggtgccggaccctgcctcccgtccc

SEQ ID NO: 857685 - DNA, 120 bp, Artificial Sequence
  ENSG00000244260_19 (sequence is synthesized)
tgaaaaccgagcttgcactgtcacatttaacatgttgtgcctgacctattcttctacacttctgtcctcgtgacgtggggtctgctggaggccagtgaatgtgaattttatctttgtact

SEQ ID NO: 857686 - DNA, 120 bp, Artificial Sequence
  ENSG00000244260_20 (sequence is synthesized)
tgcagggcacaacacgacactaggtatggattagatgctcagtaacaattttaaactggtttaaaagtaattccaacattgcagaagggtctaaggcaaaaaatgaataaaagtttcctg

SEQ ID NO: 857687 - DNA, 120 bp, Artificial Sequence
  ENSG00000225626_0 (sequence is synthesized)
agaatgcagtgagggtagcgaccgggctacacaggtgatgaaggggggaactgcatcctgggatccgcagtttcgcctgtccacccgccaaatcctaagagtggctgagcgcagttattg

SEQ ID NO: 857688 - DNA, 79 bp, Artificial Sequence
  ENSG00000225626_1 (sequence is synthesized)
agttattggggagtggtagaagaactcaagtgatccgtccgcctcggtcttccaaactgctgggattacaggcgtgagc

SEQ ID NO: 857689 - DNA, 120 bp, Artificial Sequence
  ENSG00000225626_2 (sequence is synthesized)
ccagcctttggggaagttctttttaccgtccatcatccattgccaccacaccttctgcttacgagttatttataataagtttaactaaaagagaacgagagaacatcccctgaaacccaa

SEQ ID NO: 857690 - DNA, 120 bp, Artificial Sequence
  ENSG00000225626_3 (sequence is synthesized)
agtttgtcattctatacagctttcctgcctgcaaaagaggaggagcagactcatccagcaaatcacctaaaaagtttgaagatcaaaaagcctagctccagtttcagatccttcccctac

SEQ ID NO: 857691 - DNA, 120 bp, Artificial Sequence
  ENSG00000225626_4 (sequence is synthesized)
ctttctgaacactagtttcttcctctgaaaaacgaaagagggaacgggaccgtagagtggagtgggcacaagaatcgcaagtcccttctggctatgacgctgcaagactctaggtacagt

SEQ ID NO: 857692 - DNA, 120 bp, Artificial Sequence
  ENSG00000225626_5 (sequence is synthesized)
ttaggactccgggcattcagatccccgggacttgtcaagttctcctcattgacatttttgatatttcgtgacaacacaaattcatcacatttttgtgctgtgtgttatatgtgggaagga

SEQ ID NO: 857693 - DNA, 120 bp, Artificial Sequence
  ENSG00000225626_6 (sequence is synthesized)
gattttaaaaagattgccttttgaagttattggatagctgtgttacagaagaaaacattgccttcaagaagttattggatagatatgttacagaagaaaagacgtttgtttcatttttga

SEQ ID NO: 857694 - DNA, 120 bp, Artificial Sequence
  ENSG00000225626_7 (sequence is synthesized)
ctttgcaggaaaagaatatgtaacacatcagaattcttctctcctccctggccttagtcgagtacctgaggggcattaaagcacttcctccttgcaatcacttacccagcatagtcctta

SEQ ID NO: 857695 - DNA, 120 bp, Artificial Sequence
  ENSG00000225626_8 (sequence is synthesized)
acttgaggaagaccacatctacacaaaaaaatcaaactttaaaacagagtaagagaccattcacactacaaatagattctcggtttataaaagatgtgttatagtgctcccataaatagt

SEQ ID NO: 857696 - DNA, 120 bp, Artificial Sequence
  ENSG00000225626_9 (sequence is synthesized)
gaggcactcttctgtatcagatggcacaaatttgattacatataactactaagtgcttttccgtggtctgtggttcatagtgtgggtgcctgtggtatgctaaggtctctattttactga

SEQ ID NO: 857697 - DNA, 120 bp, Artificial Sequence
  ENSG00000225626_10 (sequence is synthesized)
cagccacagttaaaatatatttcttaaaaccaaataaacagtccaccatcaccagccaaatgctaggagagtgctgactgctattttagctgctttcttctaggcagaatgaaaagaaaa

SEQ ID NO: 857698 - DNA, 120 bp, Artificial Sequence
  ENSG00000225626_11 (sequence is synthesized)
acataagttaactttaaaaggggaaatatgatccatgtcaagctcaattctgtccaatcaaagcacagaatattgctgttgttccaaaaatattatcatcattgctgtcatctgttcatg

SEQ ID NO: 857699 - DNA, 120 bp, Artificial Sequence
  ENSG00000225626_12 (sequence is synthesized)
tgttcattttacttacgtttagagtggcggtaacataatatatgtgaaaccaatatgtcagatctctgcagacaatttctctcaaagatggaagctgcccaaggccaagctctttccaca

SEQ ID NO: 857700 - DNA, 120 bp, Artificial Sequence
  ENSG00000225626_13 (sequence is synthesized)
gtgcataagtaccacagagatttaaaagcttttcagcacaccaaggagcaataagttaagaaaacatgcaaaacaaacatagctggttattttagagttccttaagccaagccaaccacc

SEQ ID NO: 857701 - DNA, 120 bp, Artificial Sequence
  ENSG00000225626_14 (sequence is synthesized)
tattagagtttgtgaatatgctttttgttatactcactttcctgtttgtatcaaatttataaacttcattgtcttctgtgtctactaaatacttttcaacatccttgtcctaggatttag

SEQ ID NO: 857702 - DNA, 120 bp, Artificial Sequence
  ENSG00000225626_15 (sequence is synthesized)
gatactaattctgtgatatcctcgagtttatgtgcattccattctctttgtatacaccaatacatactgtagaattttggtttcttgattctttatcaataaaataggaatagaacagca

SEQ ID NO: 857703 - DNA, 120 bp, Artificial Sequence
  ENSG00000225626_16 (sequence is synthesized)
gggcggggccagtggaggggcggatccctccaacctgacggccaaacgtttcctagacgttgtcgttactgataagaaactacatttcccagaatgcagtgagggtagcgaccgggctac

SEQ ID NO: 857704 - DNA, 120 bp, Artificial Sequence
  ENSG00000244268_0 (sequence is synthesized)
gtggaatgcacgagcagccggcggagcaaacctgccccatagatttttctaaaccgttcgccacagaaacgctactctgtcttctctgaccgactctgtgcactgcagccttgcacaaag

SEQ ID NO: 857705 - DNA, 62 bp, Artificial Sequence
  ENSG00000244268_1 (sequence is synthesized)
actgttgcattaaaaagaattttcctgccgggcgcagtgactcacgcctgtaatctcgccaa

SEQ ID NO: 857706 - DNA, 120 bp, Artificial Sequence
  ENSG00000229131_0 (sequence is synthesized)
atatatgatctctggttgttttgtgatcccaggatctactgagatgtatagcataagaagttatacacatcctggattttgtaagtttcccagcttctccattgttcttgagtatcattt

SEQ ID NO: 857707 - DNA, 120 bp, Artificial Sequence
  ENSG00000229131_1 (sequence is synthesized)
tcctcactgccctataggacaaaccagaacacgacggccaggattcagctcctaaccaatcaaatagaggattcaaaaatacccaatcaagaggaggattgaaaaacagactcttctgaa

SEQ ID NO: 857708 - DNA, 120 bp, Artificial Sequence
  ENSG00000229131_2 (sequence is synthesized)
tggacaaagggagaatatgggagggaacaacatgggaatataagtcagactagcaacggcaccctcttccgggtccccttccaccacgtggaagctttacttttggtttgctcaataaac

SEQ ID NO: 857709 - DNA, 120 bp, Artificial Sequence
  ENSG00000286259_0 (sequence is synthesized)
gtgctgcaactgaagttgtgagtgagaaaaagtgcagtgaaggaacaaggcaagaaaatggagttttagaaactacacagtaaacgactgctgataaatcgcaatttatgagaggatgat

SEQ ID NO: 857710 - DNA, 120 bp, Artificial Sequence
  ENSG00000286259_1 (sequence is synthesized)
gtggcaaaatgatttgaaaattggaagtgatttactgcacaacttaaatattttgtcttatcattacagcaactctataaggataaagtgcctcccttcagcagattgagtaggcggtga

SEQ ID NO: 857711 - DNA, 120 bp, Artificial Sequence
  ENSG00000286259_2 (sequence is synthesized)
gtcctattctggagaaaaaagtaaatataaaggctgggactatcaatcagagaaagacctctcctcgagaagactggtccaggtggacaggaagtagaatttattgggtctccgcatctg

SEQ ID NO: 857712 - DNA, 120 bp, Artificial Sequence
  ENSG00000286259_3 (sequence is synthesized)
tattcacatgggacagccttgagcagcacagctcagacctcagctcggctgggacgttgtagaagaaagtagagtaccaggaggagaatgaagtagatgaattctaagattctacgctct

SEQ ID NO: 857713 - DNA, 120 bp, Artificial Sequence
  ENSG00000286259_4 (sequence is synthesized)
ctagtggagtgttgtttcctaaaaaattatcagaccacacattccacacatgaaaaattcatcatactttgaagataattaaagtaaatgtcatccaattttaaccaaatttctattcta

SEQ ID NO: 857714 - DNA, 120 bp, Artificial Sequence
  ENSG00000286259_5 (sequence is synthesized)
ccactaaaggacatgcaaatggcttcttttaaaaatatatatagccagaatggtttttggcaatataacaatgaaaaaactgaaacattttgggggtaattaactcatgttttagatatc

SEQ ID NO: 857715 - DNA, 120 bp, Artificial Sequence
  ENSG00000286259_6 (sequence is synthesized)
taccattattaaagttttcatgggtaagactagatcttaaaacagattgattttttgatgaccagaaactgaactgaatttgaacaagtcccattgggactgaatttttagcatctcaaa

SEQ ID NO: 857716 - DNA, 120 bp, Artificial Sequence
  ENSG00000286259_7 (sequence is synthesized)
agtggtgtttaaaaccacactactctgacaatgggaaaccaatgaacatagtacagccacaggatctttatatactgcaatgggtggaagtaaagtttccctaaaataaaattgatgttc

SEQ ID NO: 857717 - DNA, 120 bp, Artificial Sequence
  ENSG00000286259_8 (sequence is synthesized)
ctattatcaattatcccacaaggaagtaaatcctgagacaagaaaggagggcttgggaaatatatgtcagttaccgaagacaaagagaacctctcccttttctaggtgagggactcatct

SEQ ID NO: 857718 - DNA, 120 bp, Artificial Sequence
  ENSG00000286259_9 (sequence is synthesized)
taatgagcaatgaagcctcaatactgtaacagccagtgctagtgactgggcatggggtgagttgcccctataatcaagaataaagcaagcacctgcctgatgaggaacccccaaaggatt

SEQ ID NO: 857719 - DNA, 120 bp, Artificial Sequence
  ENSG00000286259_10 (sequence is synthesized)
tggaacagaggcggcaattttcagatgttttgtataagttgcacttcccttctattatcctcaaacaatatgttttaaaatgctccaaatcctaaaaatctgaaaatgattaaatgtagt

SEQ ID NO: 857720 - DNA, 120 bp, Artificial Sequence
  ENSG00000286259_11 (sequence is synthesized)
ctagtggagttgtttaccctttcccaagtccgaggtggctttggcagcagcaattatggttggagaaaaccgtgcctgcagtgatgttctcacagacagttcagtagaaaaaggccagct

SEQ ID NO: 857721 - DNA, 120 bp, Artificial Sequence
  ENSG00000286259_12 (sequence is synthesized)
gaagagagattctggagcaaccagcacctgagccagtggtgtggatgccctgccatgagggcctgcagcagcatgcagtgagaacattcgggatttccttttgagaatgtcaagtcatca

SEQ ID NO: 857722 - DNA, 120 bp, Artificial Sequence
  ENSG00000286259_13 (sequence is synthesized)
cggacagcggctcatgagtcagacctcaccccgtgtatcatcgtcagaacaccatccatggtggtttggaccattacgcagttttaaattgtttttgttcttattcattgtttaatttat

SEQ ID NO: 857723 - DNA, 120 bp, Artificial Sequence
  ENSG00000286259_14 (sequence is synthesized)
atctgtggtggatcattggttaaagacaggaagcaaaagaacactgatgttgaaatacaaatttatacgaaacataaaagagataattctataaattcccttaagagtttctttaaccaa

SEQ ID NO: 857724 - DNA, 120 bp, Artificial Sequence
  ENSG00000286259_15 (sequence is synthesized)
acctaccagttgcattgaactaatcaaaatatttatatagcacatcacgctctctctagttctacttttagaatgttgaaagggaaactattttgccaataatatggaatttgggttttt

SEQ ID NO: 857725 - DNA, 120 bp, Artificial Sequence
  ENSG00000286259_16 (sequence is synthesized)
tgtctaatgggattaaatattatccataacaaaatgttttatttgagcataggctaggaaaatgacaactgaaatcttttctctgaacccatattttaggaacaaaaatataaaaattat

SEQ ID NO: 857726 - DNA, 120 bp, Artificial Sequence
  ENSG00000286259_17 (sequence is synthesized)
ttcaataaaacacttgtgtttttaaaagtaaaatccaagaaatccaaacataaaataagcagttttgttgatgtcgccacaagtagttacatttatatctatattttaatatatatttgg

SEQ ID NO: 857727 - DNA, 120 bp, Artificial Sequence
  ENSG00000286259_18 (sequence is synthesized)
aaaacgttaaaatgtattttatataataattattaagattatatttaaacaatcaattaagacaaccatgtaatttatcatccaaactagaacagttttgagaatggaaagggctactaa

SEQ ID NO: 857728 - DNA, 120 bp, Artificial Sequence
  ENSG00000286259_19 (sequence is synthesized)
taatcatcatcccaggagaatatataaaatccaggcctatcctaaggaaatgggactgtcggtaatactactaagaatatgatctgtaataacatcttggccttttcataaattttaaat

SEQ ID NO: 857729 - DNA, 120 bp, Artificial Sequence
  ENSG00000286259_20 (sequence is synthesized)
tatttattatgcaacacataagatgatgagatgatttttactgtagaagggatatatgccagaaaacgaacctaaactagattgtgctattttaatccaattccttcatttcacagatga

SEQ ID NO: 857730 - DNA, 120 bp, Artificial Sequence
  ENSG00000286259_21 (sequence is synthesized)
agatcataaacctaaatatgctaaaaggtatgaccaaggtatgacacctaagctagaagaaactttcatgcctttaaattataactacttgcttgatgacagatgaccgggaaattaaaa

SEQ ID NO: 857731 - DNA, 120 bp, Artificial Sequence
  ENSG00000286258_0 (sequence is synthesized)
ggagcttgaaacaaggagctactgccctcccccggccaattggccacagaatgaatcatccattaagatacaggaaagttcaccacattctcagaacagaagatgctggctgctggaaaa

SEQ ID NO: 857732 - DNA, 120 bp, Artificial Sequence
  ENSG00000286258_1 (sequence is synthesized)
caatgtcaggaggtcttgttgcgccccgtctccaggactagaagtcactcgccttccttactctgcaaggggttattatgagtgtaaagagacaaaacgaggctgaagtgttcattctaa

SEQ ID NO: 857733 - DNA, 120 bp, Artificial Sequence
  ENSG00000286258_2 (sequence is synthesized)
ggcgccgttattgttagagccaaacgaccaatgtggttcacctgacgcaagccttaccttctgagaaagggacggggcctcgaatccggaagcccatcgcagaggtctggtgttgaagac

SEQ ID NO: 857734 - DNA, 120 bp, Artificial Sequence
  ENSG00000286258_3 (sequence is synthesized)
tgatgctcacagcaacgacttctggcaaaactgcctagcttcgccattccaggaagcacccacttgagccagctgattgcaatcacttattgaccttaaactggcccagtttggagaggg

SEQ ID NO: 857735 - DNA, 120 bp, Artificial Sequence
  ENSG00000286258_4 (sequence is synthesized)
attttgtctgggtcggaagataaaagcagcttgcttggctttttcggagctttttcagcttgcctacctattgtagcaaacattaaaatagcaccggctatattacacatcaactgtaac

SEQ ID NO: 857736 - DNA, 77 bp, Artificial Sequence
  ENSG00000286258_5 (sequence is synthesized)
accggctatattacacatcaactgttttgcatctttatttttacatctgtatttgcttgaaattttcattgataaaa

SEQ ID NO: 857737 - DNA, 120 bp, Artificial Sequence
  ENSG00000286253_0 (sequence is synthesized)
ggtgagagggaggattgatttgtcatggccagttgaggatggaagcccaggatttccacatgatctccattggcacaacaggtgtgaccctattactgctcattgaagatgaaagttctg

SEQ ID NO: 857738 - DNA, 120 bp, Artificial Sequence
  ENSG00000286253_1 (sequence is synthesized)
cctcctgactcagccttttctgacaccaccctgaagggagcattaaggtttctacttctggctgtagtggagtatgtggtttcaaccagtcttctctcattgaacaactagacaagccag

SEQ ID NO: 857739 - DNA, 120 bp, Artificial Sequence
  ENSG00000286253_2 (sequence is synthesized)
acaaaatattttaatgtattttcttgaagattgtttgaaggctttagcgagcaactgaggctgtgaagaattgtcagaccaaggtccaggaaagaagaaaagtctcaaaaggagatggat

SEQ ID NO: 857740 - DNA, 120 bp, Artificial Sequence
  ENSG00000286253_3 (sequence is synthesized)
ctactaaaatatgttcaggttgccagttacatcttacagaaaaagaaaggaagaaagaaaaagaaatgcaaatgcaatggaataaaaggaaagaaaagagaagtctcagaaggaaagatc

SEQ ID NO: 857741 - DNA, 120 bp, Artificial Sequence
  ENSG00000286253_4 (sequence is synthesized)
agagaaagggaagaagactgaagtaatacactttaatatcctgtcttttcaacacattttttttgttcaatgtctctgagcccttcatttttctagccacagtgtactgttgttgccaaa

SEQ ID NO: 857742 - DNA, 120 bp, Artificial Sequence
  ENSG00000286253_5 (sequence is synthesized)
tgaatttatttgatgaaaaggaaaaagaaaggaaaaccctcagcaaagggaaagggggtcttgccaatgacttctacctcatagattgaataccaagtccccacacaggaacagcagagg

SEQ ID NO: 857743 - DNA, 120 bp, Artificial Sequence
  ENSG00000286253_6 (sequence is synthesized)
ccaggctcctccctcctgcaaatggtgcgaatttcctgaggctccacccgctcctcctagtgagcaggtggacattattcacgaagaatcagttgagaaaggttgagcttcatgtgggac

SEQ ID NO: 857744 - DNA, 120 bp, Artificial Sequence
  ENSG00000286253_7 (sequence is synthesized)
cagcagtccattcttttaaccttcaggctgttttaggcttgaaagtggggtttcccaggggcccttggctgcctcctgtctctatcactgttttcataaacttttataaattttataaac

SEQ ID NO: 857745 - DNA, 120 bp, Artificial Sequence
  ENSG00000286253_8 (sequence is synthesized)
aaaagttggagtatgtatgtacatatcatatgtgcatgtacataaaatacatatatatatcatatgtacatgtacataaaatacacatgtacatatacaaatctatgtaaacatatgtga

SEQ ID NO: 857746 - DNA, 120 bp, Artificial Sequence
  ENSG00000286253_9 (sequence is synthesized)
gtgacatattatacattctgtattataaatttataaaatatacacacataatacacaaacacacacgcactaacgcaaagtcacaaatcctaagtgcacatcttgcttaattatcacaaa

SEQ ID NO: 857747 - DNA, 120 bp, Artificial Sequence
  ENSG00000286251_0 (sequence is synthesized)
agatgcttcctgccctttaacatcggactccgagttcttcagcttttggattctggatctataccaatggtttgccagggtctcttggacctttggccacacactgaaggctgcactatt

SEQ ID NO: 857748 - DNA, 120 bp, Artificial Sequence
  ENSG00000286251_1 (sequence is synthesized)
aggttttgggactcagactggcttccttgttctcctcagcttgtagatggcctattgtgtgacttcaccttgtgatcatagcttacaaaaagcttgattgaaaagagaagagaatggaac

SEQ ID NO: 857749 - DNA, 120 bp, Artificial Sequence
  ENSG00000286251_2 (sequence is synthesized)
gagaagagaatggaacacggtatgatgacaacaaagagaaaaggagccaagattagtctggacagtatgcagacattgactctgctttgaggacagagctggaattaatttcacgtgcac

SEQ ID NO: 857750 - DNA, 120 bp, Artificial Sequence
  ENSG00000286251_3 (sequence is synthesized)
gtattctttggaggagcttccgcctattgcctctgccctccctgcaccgtgggacacatgaagtagtcttagttccagcagatggtaacatcagcttcctggccaacctggcatttcccc

SEQ ID NO: 857751 - DNA, 120 bp, Artificial Sequence
  ENSG00000286251_4 (sequence is synthesized)
agggaagaagggaagacggaataaggttattaatatattcaagtgataatttttttttaaattttcttaaagtctcatttgaccttagtgcctataaataaatttatgttgttttttcat

SEQ ID NO: 857752 - DNA, 120 bp, Artificial Sequence
  ENSG00000286251_5 (sequence is synthesized)
ggcatggtatgtccattttgggaactaagcaacaagttatcttttcgacgtcagtcatcccttgatctgttggcctcaccagacttgaataataataaaatctgtattttaaaacagaaa

SEQ ID NO: 857753 - DNA, 120 bp, Artificial Sequence
  ENSG00000286251_6 (sequence is synthesized)
agtgtttaatggcaggttgagtggtgtaaactggcagaaaatgagctgtgatatttctactttaagatgagaatgagaaacaacttatcttgataaaagcgtagaaattggtttcttcag

SEQ ID NO: 857754 - DNA, 120 bp, Artificial Sequence
  ENSG00000286250_0 (sequence is synthesized)
ggaaagccaagagcacctgtagtgttctggaggtagctgcacactgacatcccttcacacccagtggcctcttgtgaaagagaaggcaatgcaatgccgtcggagacaaagcccagctga

SEQ ID NO: 857755 - DNA, 120 bp, Artificial Sequence
  ENSG00000286250_1 (sequence is synthesized)
agagaggcagtgcacttgctgatggatactaaatgaaaagcaggcagaaatcagcaatgcatccagcttctgttgagggagattcagtggaatgatttttatattttcatgaagaaatta

SEQ ID NO: 857756 - DNA, 120 bp, Artificial Sequence
  ENSG00000286250_2 (sequence is synthesized)
cagttgaatattaaaacctggtatttcagtttatctggtctgactcccatctaactaaccaacatagccatggattttgtaaaactcacttagcaaatcatcttaattggtaccaaaaaa

SEQ ID NO: 857757 - DNA, 120 bp, Artificial Sequence
  ENSG00000286250_3 (sequence is synthesized)
gtgatggctatggaaatattggcatttctatgtgcataactgatgtttttatgaggataagagggagagaagaatcacatttcaaagaagcttctactgaaataaactaaccagaagaac

SEQ ID NO: 857758 - DNA, 120 bp, Artificial Sequence
  ENSG00000286250_4 (sequence is synthesized)
taattgtggcatacttaacagctttgagctttatgtgtacactacctatgtttcctgttcagcaagtgaatgtccccaggccggtaggggcaatgtgaagatgaatcttatatctccaat

SEQ ID NO: 857759 - DNA, 120 bp, Artificial Sequence
  ENSG00000286250_5 (sequence is synthesized)
catcttcctggaattcactcattgccagttcttttagaaatactgacacagttaatagtgtctaatgtcgtggatgactgccttccaccgatgtcgtgacttcccacccaagaaccaatg

SEQ ID NO: 857760 - DNA, 120 bp, Artificial Sequence
  ENSG00000286250_6 (sequence is synthesized)
acttctttctctgtgattcagctctccactgaccctcatgggcaagagtggggtttcagcaattattctttcaacctctattgattaatcacacgatataagccagacacagttctgggc

SEQ ID NO: 857761 - DNA, 120 bp, Artificial Sequence
  ENSG00000286250_7 (sequence is synthesized)
agcaggatacaatagtgaacaagacaaccccaaatccctgctcttgtggaactgacattttctcatggggtgtgggggttggggaagaatgagagatgttaaatgcaaaaccaaaataaa

SEQ ID NO: 857762 - DNA, 120 bp, Artificial Sequence
  ENSG00000286250_8 (sequence is synthesized)
agaaattttaagatcatgtgatagggagtggctggctggtcagggatagcctctccaggactgggacattcatgggagttgacatgtgaattatgagaagaagccgacaatgccaagatc

SEQ ID NO: 857763 - DNA, 120 bp, Artificial Sequence
  ENSG00000286250_9 (sequence is synthesized)
acatggcaacacgtttcatgcaaaagaaacagccagcatgaagcctgtgagctgggaacaagaccggctcaggtcaagggacagacaaaaaggccaacaaggctgaaaaagaataaggaa

SEQ ID NO: 857764 - DNA, 120 bp, Artificial Sequence
  ENSG00000286250_10 (sequence is synthesized)
gaggagaggggtgtgaggttcagcaggaaagatctgaaggactgggtcagacagggttcttcaggacatggaaaagaatttgaattttttaaataaatgcaatgagaagacactggagaa

SEQ ID NO: 857765 - DNA, 120 bp, Artificial Sequence
  ENSG00000286257_0 (sequence is synthesized)
caagaacccaccaattccggacacattcccttcacacctccctctggtgtctgaaaacccaagaacattcatttccttacggagagactcaacaatccttcattgggatgggagaggggg

SEQ ID NO: 857766 - DNA, 120 bp, Artificial Sequence
  ENSG00000286257_1 (sequence is synthesized)
tcaacaatccttcattgggatgggagagggggctcgcatccatccactgtccccttcactgtgaatgaattggttggtttgcattcgctcacatctgtagaactggagggaacaggacac

SEQ ID NO: 857767 - DNA, 120 bp, Artificial Sequence
  ENSG00000286257_2 (sequence is synthesized)
agaaaagagtaggccagaggaacaactgcccaggagtcaggggcaagaggagaactgtttccccccaggggtgtctcacctgggtcagaatcactcatgatggcctcagggaccaggaag

SEQ ID NO: 857768 - DNA, 120 bp, Artificial Sequence
  ENSG00000286257_3 (sequence is synthesized)
ttatgagcagagatccttggtgaggtctacacaccacagttttgcctgaagacgatccttattttagagagccaatttaaagtaggaggaaagcaaaagtaatgttactgaattggtggc

SEQ ID NO: 857769 - DNA, 120 bp, Artificial Sequence
  ENSG00000286257_4 (sequence is synthesized)
aagttgcaggagctggagttgctgtgggctcaccaacctggcaagtcagcagaggaaggactgcaactctagagctgaggcatggatcgggagacgcatcaagcagctaagattggcagt

SEQ ID NO: 857770 - DNA, 120 bp, Artificial Sequence
  ENSG00000286257_5 (sequence is synthesized)
gcatgcaccagaagaatacgtgatgtgaaggcagcccaacttctgattccaagggtccaggagagatgcatggccacctgaaagatccaggggacatggcaaaaagaacctgaattcatc

SEQ ID NO: 857771 - DNA, 120 bp, Artificial Sequence
  ENSG00000286257_6 (sequence is synthesized)
atgaggaaggaacccatcacaaggaagcaacctatgaaggcagccattaggcaagggacatctgagatgggcactgcaagcatgttcaagaaaacacctcttctgccagctagaggctcc

SEQ ID NO: 857772 - DNA, 120 bp, Artificial Sequence
  ENSG00000286257_7 (sequence is synthesized)
cccgcccagtggaggaggaatcaaattccaccatctttaatctggctacaccatatttgaataataatcctgaaattcacattgatgctcaagaagtcgcttcttcaaaactttaaggta

SEQ ID NO: 857773 - DNA, 120 bp, Artificial Sequence
  ENSG00000286257_8 (sequence is synthesized)
acaattaagtattccattgtcatggctcaattaaatggtttggcctgagaaaattggggattgtaaagtgaggatggaatgtgctttgatcctttttccagggttattgtttcattaata

SEQ ID NO: 857774 - DNA, 120 bp, Artificial Sequence
  ENSG00000286257_9 (sequence is synthesized)
aatgaacatgtcatttgtctcaccagagggagctcatgccctccaggcttttttcccttttttgttcaggttttataaagatgaatttccagtgctctgaaataccatggattagtagtt

SEQ ID NO: 857775 - DNA, 120 bp, Artificial Sequence
  ENSG00000286257_10 (sequence is synthesized)
aagcctgacagcacttcggggagtagcgagcttaaagtgcctcacacaggtctccaaagcacttgtttactaatagaggaaatcagcaaccgtctgcagctgctgatatcgcattaccat

SEQ ID NO: 857776 - DNA, 120 bp, Artificial Sequence
  ENSG00000286257_11 (sequence is synthesized)
ttggaaagacagtagctgagataacaaatcacacagttttaataattactcctgcattcccgttttttgtttcctgcataactgtaaaggctggatttcttccaaataaacagataaaaa

SEQ ID NO: 857777 - DNA, 120 bp, Artificial Sequence
  ENSG00000286257_12 (sequence is synthesized)
gactcattgtgaaacccaagctgcagaaaactgacagcaggaacagagaatgctgacctagtttgccagaacaaagaggaaggactgcaactctagagctgaggcatggatcgggagacg

SEQ ID NO: 857778 - DNA, 120 bp, Artificial Sequence
  ENSG00000286257_13 (sequence is synthesized)
gtttttacttggctgtctcacaaacatgcctaccgtacactgagccttggaggagataaagaagacacccacagccctaagaaaaaagaaacaccaaagcaattctaatataaagtttag

SEQ ID NO: 857779 - DNA, 120 bp, Artificial Sequence
  ENSG00000286257_14 (sequence is synthesized)
ctaatataaagtttagaaacatttctgaatattgaaatattgaacttctcatcaccccactggattgtacattcttggaagacagtgtgtccagaattagtgggttcttggtctcactga

SEQ ID NO: 857780 - DNA, 120 bp, Artificial Sequence
  ENSG00000286257_15 (sequence is synthesized)
tctccagaacttacattagaagcgtcctgaaatacgtttgggtgtggcccgtgcacacagccccagctacaacattgagaagttacctgtggcccagccagagctacgagggcaatgcca

SEQ ID NO: 857781 - DNA, 120 bp, Artificial Sequence
  ENSG00000286257_16 (sequence is synthesized)
agggcacttgtgcaccagcttgttagataagttcagtgacttgaaacagcgccagaggtgaatccgtttccactgctagggaatcttctctcagagcactagtcttctcttctgctggga

SEQ ID NO: 857782 - DNA, 120 bp, Artificial Sequence
  ENSG00000286257_17 (sequence is synthesized)
tgaaaggaaagctttgatttttttaaaaaaatcatataatgaaaaatgacatattgtagataaaatatactgtagtttaaaatgttgcaatttccaaacattagtgtaattataggccct

SEQ ID NO: 857783 - DNA, 120 bp, Artificial Sequence
  ENSG00000286257_18 (sequence is synthesized)
gaataaacttggaaagctaaggcacactgcagccagcagcccaaacctgtaagtatgcttataatctaaaatggatatctcattactggttaacattatttatttaggaggagatacgac

SEQ ID NO: 857784 - DNA, 120 bp, Artificial Sequence
  ENSG00000286257_19 (sequence is synthesized)
ctctaatttgcctttaaatgattaatttggtgtttaaataagtgccttttacttaataatgttttcttcaaccaattcacttatgtcaataaactctttgtttaaccttcttaaaggaaa

SEQ ID NO: 857785 - DNA, 120 bp, Artificial Sequence
  ENSG00000286257_20 (sequence is synthesized)
atcgattcacattaaagaaaattagaaggaggaggaggagaaaagaaagccctgtcaccaagtttattattcccagggtggtcagctttctatttaagggaatatgcccaaatttcagaa

SEQ ID NO: 857786 - DNA, 120 bp, Artificial Sequence
  ENSG00000286257_21 (sequence is synthesized)
ctggtttagtttatgatctgaaaaacataggcaattattcacttgcctcttacatatttgtgtgtctggctgtgactttcaatggagggcaataaaaaggaatcattaagaagcctagtc

SEQ ID NO: 857787 - DNA, 120 bp, Artificial Sequence
  ENSG00000286257_22 (sequence is synthesized)
tagatgatgtgttttctctctctgaagaagaagagagatggcttttgcctaagtaccccaaattaaatacataagctttctacatggaagcctaaatagcttattgaattaaaaaagaaa

SEQ ID NO: 857788 - DNA, 120 bp, Artificial Sequence
  ENSG00000286257_23 (sequence is synthesized)
actaactgtaaagaagaaacttcattgagagggacataggtcaatggtgacttacttcagtggcctctactattacttcctttctgaagcctagtttctacttgttctctgtctcacaag

SEQ ID NO: 857789 - DNA, 120 bp, Artificial Sequence
  ENSG00000286257_24 (sequence is synthesized)
agactcagtttaattctctgaatttttcaaactgaggtcatgacaaacttggtttaattctctgagctttcaaacttagttaatgattccatttggaagaatcatggccctcattttccc

SEQ ID NO: 857790 - DNA, 120 bp, Artificial Sequence
  ENSG00000286257_25 (sequence is synthesized)
ttgatggatttgaagcatactgaaaactgattcacaaagcacgtagaatcttgaacattctatacagcagcagtaatgttaatgaaatagtgaggagaactcatgcagtttaaaataact

SEQ ID NO: 857791 - DNA, 120 bp, Artificial Sequence
  ENSG00000286257_26 (sequence is synthesized)
atagatattgtcaaatattttaatgtttggtatgtaggccagaggaggtattttttcatgtttgtgtactttatcttattgaaaatagaacacatttaagtaactttatatacacttaca

SEQ ID NO: 857792 - DNA, 120 bp, Artificial Sequence
  ENSG00000286257_27 (sequence is synthesized)
tatgtaattttatatatactcagtgagagaaagaaagagattgagagagtctgaagttagtttacatacacaattgcatttaagggaagtgcatttcaaatgactagtaccatatcatca

SEQ ID NO: 857793 - DNA, 120 bp, Artificial Sequence
  ENSG00000286257_28 (sequence is synthesized)
tattaaagaagatatctctttggaaaatttgtcatgaacaagagatgattagaagcagcatatgatagacaacaacatttcatctctgcatgcaattatggtacaaattagaaatgctat

SEQ ID NO: 857794 - DNA, 120 bp, Artificial Sequence
  ENSG00000286257_29 (sequence is synthesized)
tatgttggtgctccataattaagtaagcaattaaaaacaaaaacagttcattaacaaatgtcatagctatgccgacaaatgcccagtgaggtcacggtcacagcaattgcacgagatgat

SEQ ID NO: 857795 - DNA, 120 bp, Artificial Sequence
  ENSG00000286257_30 (sequence is synthesized)
gactaagtcttcccaagagcaagagtctccaccaacagcgttggttctatttctagtgcgtgtgttatataaatagcaatttgggctggaaaaactgaaataaacattgcaagcaaatat

SEQ ID NO: 857796 - DNA, 120 bp, Artificial Sequence
  ENSG00000286257_31 (sequence is synthesized)
agagaggaggcgagctgtttgtggtaagttgcttatgccatttgttgagtatgactggaaaccaaaatgaaattttagttttattcaaaaaataaaaataaaatctctgttgatacttaa

SEQ ID NO: 857797 - DNA, 120 bp, Artificial Sequence
  ENSG00000286254_0 (sequence is synthesized)
tagcagcaccgctgctaaaattcttcatcatttgtgaacgttacttgaagtctcatgttttatcctatgctctcttccatcattgagcctcaataggctatttacaatatttaacttcat

SEQ ID NO: 857798 - DNA, 120 bp, Artificial Sequence
  ENSG00000286254_1 (sequence is synthesized)
atataacactgttgggaccacctttgtcaagacattgaagtatttcctcaactgtcttacatattatgtcttcaggaattgaaattactgttcaaacaataataattctagaggttctag

SEQ ID NO: 857799 - DNA, 120 bp, Artificial Sequence
  ENSG00000286254_2 (sequence is synthesized)
ctacatatttccaagtaattttccaaaaaattaggtggatgaaagccacagcactgcactgattaccacatagtagagatttctttgcattcatatggggccaaattgagaggcaacatt

SEQ ID NO: 857800 - DNA, 120 bp, Artificial Sequence
  ENSG00000286254_3 (sequence is synthesized)
ctccaaaagtcaccaggacaatagccatcacatctctgcatcatgtgggaacatgctggacaagccaagctgcagagccaaagctgcaggctacaacatcacaacctcttcctgacagtg

SEQ ID NO: 857801 - DNA, 120 bp, Artificial Sequence
  ENSG00000286254_4 (sequence is synthesized)
ctgctcttcgcacaggaagaatatgaaatctacagaggtactggcaacttaaaaatatttcaaacctaagccaaaatacctcatgcacaaagctacatcattgtactggttatgagccat

SEQ ID NO: 857802 - DNA, 120 bp, Artificial Sequence
  ENSG00000286254_5 (sequence is synthesized)
tcctgcacctggagaaagaatccgaacatcatccctggatagtgttggctgagcaggcaggaccttgagtaggtctcagcagggacatacagacttgggccaacatgatcactgtcatcc

SEQ ID NO: 857803 - DNA, 120 bp, Artificial Sequence
  ENSG00000286254_6 (sequence is synthesized)
cttccctaggcaggatacaaagttatcgccaggtctctgagcatcaggagacagtcagggtggcatgcacccagaagggcaggcatccagtgtctggagaatgagacacctaagcagggc

SEQ ID NO: 857804 - DNA, 120 bp, Artificial Sequence
  ENSG00000286254_7 (sequence is synthesized)
cttggctgatggagcatcagtaggggtgggatatgaacgaggcagggagaatgagggaacgtcacatccaaaatctggctaggtcagatatttcttagggaagatttttagatcctaaga

SEQ ID NO: 857805 - DNA, 120 bp, Artificial Sequence
  ENSG00000286254_8 (sequence is synthesized)
agctgaatagagaacctcaaagagaatggcagcgaaacatctccatcaggtgtgcaattgtttaagatttcatctttaagaggccaggagatggatggttattcaagagattgaaatgta

SEQ ID NO: 857806 - DNA, 120 bp, Artificial Sequence
  ENSG00000286254_9 (sequence is synthesized)
acatttttatttaaaacatcataaaagtagatgtctaggggccaaatgggcaagtgctactcagttgaaggaatgtaggaactcaacatttcagaatcgtccctgctgggctttgaccat

SEQ ID NO: 857807 - DNA, 120 bp, Artificial Sequence
  ENSG00000286254_10 (sequence is synthesized)
ctgatggaattttgagacagcatgatgcgactagttctagggttaaaaagacgcactttaatgtcacctgaacataacacttcagaagaaggtgataaacttttacacccacccaggctg

SEQ ID NO: 857808 - DNA, 120 bp, Artificial Sequence
  ENSG00000286254_11 (sequence is synthesized)
aagctggaggggagtggagtttctgaagctgtggcacatggtgcacaggtccagcaagttctcgggcaccagcagtgcccacggtggaagacaggcaggacagacgagggtggaggaagg

SEQ ID NO: 857809 - DNA, 120 bp, Artificial Sequence
  ENSG00000286254_12 (sequence is synthesized)
agcccagggcagagccaggacaaagcttgctggacagtgtcactcatggagtgcccctagcttcaccccatctgtgacaaatattttcaagatttccattaaaaaaatttactgaaataa

SEQ ID NO: 857810 - DNA, 120 bp, Artificial Sequence
  ENSG00000237200_0 (sequence is synthesized)
gactgtggatctcaagccctcagtgccagcctggcactgggaaagcgtgtcaattgcagcagaggtgtcaatccatcagacccaagctccattcagtgcattccccttacctgttccgct

SEQ ID NO: 857811 - DNA, 120 bp, Artificial Sequence
  ENSG00000237200_1 (sequence is synthesized)
aagaatctcattttaagtggggagaaaggaagcatccctccacttgtgctgttgatgacaaaggaattagtgatgctctggggagtgtgctggaaatcctctacagagaattagaaaact

SEQ ID NO: 857812 - DNA, 120 bp, Artificial Sequence
  ENSG00000177338_0 (sequence is synthesized)
gatcatcaggatggttgcacaatgttttgaatgtaaatgccactgaattgtacaccttaaaagggctcaaatgacgtcatcagcacccaccctcccagatgtgacaatcagaaatgtgtc

SEQ ID NO: 857813 - DNA, 120 bp, Artificial Sequence
  ENSG00000177338_1 (sequence is synthesized)
gcaaggtgggaggtggagaagcacggaaacgaagtctctggctcaaccagcaaaagtgaaccactccccagcagtggaaaccggggcttcctagaagaaacgatgcactccccacctccc

SEQ ID NO: 857814 - DNA, 120 bp, Artificial Sequence
  ENSG00000177338_2 (sequence is synthesized)
tctgtttgtgctgcagtgaaaactgacacgagagattcattggaacatgtgccctcgttccactctcatcagcccaccgcagggacaggagctgttcatctttttggctgtgctcgcagc

SEQ ID NO: 857815 - DNA, 120 bp, Artificial Sequence
  ENSG00000177338_3 (sequence is synthesized)
atgaggcccctggggctcttccagaggctggcactctctgcagttgtcgctcacatacctgctcaggccaggccaggccagagtggacaatgtcttcccagcaggccagaccagtctccc

SEQ ID NO: 857816 - DNA, 120 bp, Artificial Sequence
  ENSG00000177338_4 (sequence is synthesized)
aggaggctgaggctgctgtatcactcaccaaaccctctcatctgccggcctgaccctgtgctatgctggaaatagcactcgagccagacgccctccctgacttggacaagggcagtgccc

SEQ ID NO: 857817 - DNA, 120 bp, Artificial Sequence
  ENSG00000177338_5 (sequence is synthesized)
tggaaggagagggcacagaagcagctgtttacagaacctccgagggctgcaatggggcaatggggtgtgcaggagagtgaccaggagcccggggcagctggtgacccacccctccaggca

SEQ ID NO: 857818 - DNA, 120 bp, Artificial Sequence
  ENSG00000177338_6 (sequence is synthesized)
agtccatcaggcagatgaaatgatttgctttcttcacacttaccaagcttagaaatgacctccttcatgcatgtgaatgactttattcatgtatatgactcaccttcctcatgcatgtga

SEQ ID NO: 857819 - DNA, 120 bp, Artificial Sequence
  ENSG00000177338_7 (sequence is synthesized)
tgatcttattgtatgtgactcactttcatgcacgtgatgaccttatccatgtatgtgactcaccttcatgcatgtgatgaccttattcatgtaggtgattcaccttcttcatgcatgtga

SEQ ID NO: 857820 - DNA, 120 bp, Artificial Sequence
  ENSG00000177338_8 (sequence is synthesized)
tgaccctatccatgtatgtgattcaccttcttcatgcatgtgatgaccttattcacgtatgtgatttgccttcttcatgcatgtgattaccttatacatgtatatgactcaccttcatgt

SEQ ID NO: 857821 - DNA, 120 bp, Artificial Sequence
  ENSG00000177338_9 (sequence is synthesized)
atgtgatgaccttattcacatgtgactcgccttcttcatgcatgtgatgaccttattcacatgtgactcgccttcatgcatgtgacgaccttatccatgtatgtgactcaccttcttcat

SEQ ID NO: 857822 - DNA, 120 bp, Artificial Sequence
  ENSG00000177338_10 (sequence is synthesized)
gcatgtgatgaccttatccatgtatgcgactcaccttcttcatgcatgtgatgactttatctatgaatgtgactcattgtttgtcttcccatccccctaaaacataaactcaatgagagc

SEQ ID NO: 857823 - DNA, 120 bp, Artificial Sequence
  ENSG00000177338_11 (sequence is synthesized)
tgggcagcatcccccagagggccaaggggagatattccagacagtcttccagcagagaagtttgggaagatgctgatttcatctgtccagtcctaaagcaatgcactaatccaaaattaa

SEQ ID NO: 857824 - DNA, 120 bp, Artificial Sequence
  ENSG00000177338_12 (sequence is synthesized)
acgaaaacaaaaatattcaccaggcaaaggagtgtgaaaaatccccatttctgtctctctctcctcatcagcagtggaaaccggggcttcctagaagaaacgatgcactccccacctccc

SEQ ID NO: 857825 - DNA, 120 bp, Artificial Sequence
  ENSG00000177338_13 (sequence is synthesized)
agtcaagcctccgagctgccgatgtacggatgtggtaaggattgccgatgactttttcatcgcttttacggcaactctcactgcatccgccattctttgcaaggagaatgtgaatgaact

SEQ ID NO: 857826 - DNA, 120 bp, Artificial Sequence
  ENSG00000177338_14 (sequence is synthesized)
tcagattgaactacagacagaagaaattcttcctgccaaagacacttaaaacccctcccgtcggcaccgagccccaagaattctgattgtggcagagaaaaaacagccagcaaagataat

SEQ ID NO: 857827 - DNA, 120 bp, Artificial Sequence
  ENSG00000177338_15 (sequence is synthesized)
gaccagccaaggagataccaacgccacgaagctctgggcgaaagaatcttgctaatactgacatccatttcttcgggccttcatttgatgaatattgaggtgtacaaagctcacaaaggt

SEQ ID NO: 857828 - DNA, 120 bp, Artificial Sequence
  ENSG00000177338_16 (sequence is synthesized)
gtcacgtccaacatgtctctgatggcgctgatagaccgaaggggactgttttcaacaatttgagccaaggtgctgatgtccggcgtgtgaaacctggcaacagctcggcaatctggaggc

SEQ ID NO: 857829 - DNA, 120 bp, Artificial Sequence
  ENSG00000260433_0 (sequence is synthesized)
aaggtattgaggaaccatataatgttatttacactacctactttctaatctgcctcatctactcaccttcctctttctcttcctgtaatcttattgcatggaagaaatttttggtgaaga

SEQ ID NO: 857830 - DNA, 120 bp, Artificial Sequence
  ENSG00000260433_1 (sequence is synthesized)
caagttgtctgtttttcttaaaatcatttttttagctagtggtatgtctcgaacactttcctaatagttcattgagataaagtcataacattttttttttctttcttcgctaccctcact

SEQ ID NO: 857831 - DNA, 120 bp, Artificial Sequence
  ENSG00000260433_2 (sequence is synthesized)
cattgccccattggaattgactgcaaattgcaattttctagagaaagaatcagtaatcctttctacacagtggccttggtgatttcaaaactttaagaatatttaaaatattcaagttct

SEQ ID NO: 857832 - DNA, 120 bp, Artificial Sequence
  ENSG00000260433_3 (sequence is synthesized)
ttctccaaaaactggtgactttctgctgctgagctcctgaaagtttttgagaagaaagttgaaaggttgaaaatggtgctgtgtttatttgaatatctgaagggtaaactccaagctact

SEQ ID NO: 857833 - DNA, 120 bp, Artificial Sequence
  ENSG00000260433_4 (sequence is synthesized)
tctgaaaacaaatattctctgaaacctgcagagtaaagaagtataacttgacatttcttctgcaagaaaaaaacaagaagatggtgactttcaagacctcagtcaatgactaaagttctg

SEQ ID NO: 857834 - DNA, 120 bp, Artificial Sequence
  ENSG00000260433_5 (sequence is synthesized)
tgaccacagtgagccttggccatcagtgatggtgaaagcaacagatgtcagatgtcagcccctggcttcctgccttaccgtagagggatactcgacagacagactggacagatcactcat

SEQ ID NO: 857835 - DNA, 120 bp, Artificial Sequence
  ENSG00000260433_6 (sequence is synthesized)
gctggggaaagccaggtgtcatgtcttggggaatccaggtgttatgtcttaaggacaggctggcagacctgtgcatacgcccatgtagcgagaaactagaccctcagctcaagacactga

SEQ ID NO: 857836 - DNA, 120 bp, Artificial Sequence
  ENSG00000260433_7 (sequence is synthesized)
aagaaacctcatgaaacaacttgaagctctgaccctgaaccacctagctaaactgctcttagatacctgattctcagatactattgagaaaataaacaataattattttatgttgctaca

SEQ ID NO: 857837 - DNA, 120 bp, Artificial Sequence
  ENSG00000260433_8 (sequence is synthesized)
gcccgacaattacaccgactagccaacatcataggactcctgcaatccaggccatcgcaggccaaggtttttgaaggaagccctcaaagaaaggaagacccttttattatctggattcat

SEQ ID NO: 857838 - DNA, 120 bp, Artificial Sequence
  ENSG00000260433_9 (sequence is synthesized)
aatgtcaagacaaaggtcagggttggctttaagaaagaagcctgagaaccggaactacatagaggccagaaaatcagtgtctacatgctaaaggcaattttcaggaacaagtaccaggag

SEQ ID NO: 857839 - DNA, 120 bp, Artificial Sequence
  ENSG00000260433_10 (sequence is synthesized)
cagatcaacaaaacaaagaagatcaacaaaacaaataaggaaggtggttttatgaacccagaggggcagtggttatgagttgtggtgccactttattcaaccttatctgcttggaagttt

SEQ ID NO: 857840 - DNA, 120 bp, Artificial Sequence
  ENSG00000260433_11 (sequence is synthesized)
ttctcctacaccattaaacccctcactgaaccaaactttgtacagactgcagccaagaagggctgtattatggctttcttggacctcttcatccacaaaaatattaaaaattgtatttca

SEQ ID NO: 857841 - DNA, 120 bp, Artificial Sequence
  ENSG00000260433_12 (sequence is synthesized)
gaccacagtgagataaaattcttacatgaaagccagaaacacaggaatctcatcttctaaatattttctttatcctaagaaaacacaaaaaaagtgaatagagttaagtgtagactagca

SEQ ID NO: 857842 - DNA, 120 bp, Artificial Sequence
  ENSG00000260433_13 (sequence is synthesized)
gcgccagcacaagtatcacctgggaccaagttagaaatgcaaaattttggctcccactgcagacctactctggagatctgatatactttgagaaccatggctctgaagcagactatcctg

SEQ ID NO: 857843 - DNA, 120 bp, Artificial Sequence
  ENSG00000260433_14 (sequence is synthesized)
gacgggctcttgaaattctctgaggcttactttcttcatatatatacaacgtagttatgaattccttgtttccaaatttaaaggttggttgtgaatatcaagttattaatgtcctgaaaa

SEQ ID NO: 857844 - DNA, 120 bp, Artificial Sequence
  ENSG00000260433_15 (sequence is synthesized)
attgcttgggtacagaagaactctgaacaagatcaaggttctatcagtgataaataagggaggctaagagtaaagaagtataacttgacatttcttctgcaagaaaaaaacaagaagatg

SEQ ID NO: 857845 - DNA, 120 bp, Artificial Sequence
  ENSG00000260433_16 (sequence is synthesized)
gtgactttcaagacctcagtcaatgactaaagttctgtgaccacagtgagaattatttaggtttggtgttatcttctttgaatgaccctaaaaagggagaagtggcgatgatggaacttc

SEQ ID NO: 857846 - DNA, 120 bp, Artificial Sequence
  ENSG00000254314_0 (sequence is synthesized)
ctgtgtcgggaggaacagtaccccattctgtatttggttcaagctccagcaaactgctcacgtgcctcgtatgttctacaagattcgcacactgggatggctcatgtggtgtcatgaatt

SEQ ID NO: 857847 - DNA, 120 bp, Artificial Sequence
  ENSG00000254314_1 (sequence is synthesized)
gtgaacattactgtgcagtcattctcagaaggtggggaaaacaccaaaacaaacaacagaatgcctggcaagcagcagcgatgaggataaagatagactgcaaggcctgttcctacctct

SEQ ID NO: 857848 - DNA, 120 bp, Artificial Sequence
  ENSG00000254314_2 (sequence is synthesized)
tgcatctgcctggggcctgtaccggaggaagatgctcaggaggcccagcagacccaggactctctcccacctgtggccccgtggcaagaccaaaggggagctctttggagctgtggcccc

SEQ ID NO: 857849 - DNA, 120 bp, Artificial Sequence
  ENSG00000254314_3 (sequence is synthesized)
tttgtgtcttccaaatcatattaattccaaattaaaatgaaggacattatatgcatcttacaaccaagttctagaatcaggccgagtacagtggttcatgcctgtaatcctagaattttg

SEQ ID NO: 857850 - DNA, 120 bp, Artificial Sequence
  ENSG00000254314_4 (sequence is synthesized)
gccgagtacagtggttcatgcctgtaatcctagaattttgggaggctgaggcaggagaatctcacatgagcccaggagttgaaggctgcaatgagctatgatcacatcactgcactccag

SEQ ID NO: 857851 - DNA, 120 bp, Artificial Sequence
  ENSG00000254317_0 (sequence is synthesized)
aagagcagatggaaatacagagaccctcagagaagagaaggccatgtaaagatggaggcagaggttggagtgatgcgtacaagcccaggaacaccaaggatgccggcatccaccagaagc

SEQ ID NO: 857852 - DNA, 120 bp, Artificial Sequence
  ENSG00000254317_1 (sequence is synthesized)
caggaagagtccaccgaagcattcacttggcacctctccaaatctgggtactgtgcaagatccttccttgggacactgaaggaaaatcagacacggcccttctctcaagttcgcagactc

SEQ ID NO: 857853 - DNA, 120 bp, Artificial Sequence
  ENSG00000254317_2 (sequence is synthesized)
tccggtatccagatactacggctctcatagtatcagaaaacacagccacaagcgcaggtatcagcgtgcctggcacataaatggtgctcaataaatacttgcggaaggaagacaagataa

SEQ ID NO: 857854 - DNA, 120 bp, Artificial Sequence
  ENSG00000254317_3 (sequence is synthesized)
cctttttgttctctttatgtagataaagtatacgcaattacacgaaatcctacagatgtctcgtagttctcaaaattcttcatttgtttctcctccacttctttatacaactaaatagta

SEQ ID NO: 857855 - DNA, 120 bp, Artificial Sequence
  ENSG00000254317_4 (sequence is synthesized)
gaaagagccaagcaatgtgcacagtaaaatttctactgcagagtagttaaaagtatcactactcagcaatgtactgtactattcaaagagtgctaagtgttttcctctctacccatgacg

SEQ ID NO: 857856 - DNA, 120 bp, Artificial Sequence
  ENSG00000254317_5 (sequence is synthesized)
caagttctcgctccttctgtgggatgtgatcttggcttccttctttggacaaagccaatccagagcacactgcatcaccacactcacttatcaagaaaaggccaatattatctaatatac

SEQ ID NO: 857857 - DNA, 120 bp, Artificial Sequence
  ENSG00000254317_6 (sequence is synthesized)
gtgaaaataaaacatgaagatatatggcattattttcctttgtgcacaaaaacaaattttttttccaagtgcgactgttttactaaagaaaaccaattattatttacctttactcttaaa

SEQ ID NO: 857858 - DNA, 120 bp, Artificial Sequence
  ENSG00000260430_0 (sequence is synthesized)
tgtgcacggccagaggcggagggctcggctggctgctccagtctgcgccgtccatgcgtctcgggtgtcctatcccggaggatacatttttctttttcagaaaagggaaacaggaaaacg

SEQ ID NO: 857859 - DNA, 120 bp, Artificial Sequence
  ENSG00000260430_1 (sequence is synthesized)
catttttctttttcagaaaagggaaacaggaaaacggggacgattagactctatctaggggagccatgtggaaaaaccagcttcaggctggagtttagctcactgcaacctctgcctcct

SEQ ID NO: 857860 - DNA, 120 bp, Artificial Sequence
  ENSG00000260430_2 (sequence is synthesized)
agctgggactacaggctttagaactggcggctttataagaagagaaagagagatctgagctagcacactcaacccccttgctctgtgatgccctgtgccatctcgggactctgcagaggg

SEQ ID NO: 857861 - DNA, 120 bp, Artificial Sequence
  ENSG00000260430_3 (sequence is synthesized)
tccccaccagcaagaaggccttcaccagagcggccccttaaccttggacttcccagcctccataactgtctgactggatccagaagttccagtgaagccgatttctatctctagtctttg

SEQ ID NO: 857862 - DNA, 120 bp, Artificial Sequence
  ENSG00000260430_4 (sequence is synthesized)
tcctctccagcaaggcttttccttgccatgacaagacacctggcagcatctccaggcttactcaaccagtacccttgatgggaaaagggcttttctttcttaattttccagcaaaagcct

SEQ ID NO: 857863 - DNA, 120 bp, Artificial Sequence
  ENSG00000260430_5 (sequence is synthesized)
caagattgactctggagtaaattgcacatggcctcaaattctttgcagctccttccactatgaggtggcatgtattactccaatccctgcatctgggctggatttgtgacttgttttgaa

SEQ ID NO: 857864 - DNA, 120 bp, Artificial Sequence
  ENSG00000260430_6 (sequence is synthesized)
caatagaatgtggtaaaagtgacagtgaaaatatatgagtttcaagcctaagacaacatgcttttcagcctttgctctggatttctttgaatgctgctgtcacataaacaagactgaaat

SEQ ID NO: 857865 - DNA, 120 bp, Artificial Sequence
  ENSG00000260430_7 (sequence is synthesized)
agcctactagaggatgggaaattacatggagcagagacaagcagtcccaggtgtggaacccctagaccagccagcttaccaaccaccagacatgagagtgagaccatcctagatcactca

SEQ ID NO: 857866 - DNA, 120 bp, Artificial Sequence
  ENSG00000260430_8 (sequence is synthesized)
gctccagccaagccaccaagagaccacacagatcagctgaattggcctaggccagacgaaccactctgccaacccacagaattactaaaaataataaatatttgttagtgaagacttcaa

SEQ ID NO: 857867 - DNA, 120 bp, Artificial Sequence
  ENSG00000251143_0 (sequence is synthesized)
ccacgaagcttggccaactcctggtccttgccttccttttccgtcagggcatgagccagtgcctcttgcagggtagcgaactccacacgctgctcgttgagggcgttctgcagccgcatc

SEQ ID NO: 857868 - DNA, 120 bp, Artificial Sequence
  ENSG00000251143_1 (sequence is synthesized)
tcaagctctgctctggccgccttctccagggcaaggtcagcctgggcacggccccgctcctgggtcagccgcgccacctccctttcctgctgcccacgctcctcctgctgctgcccctgg

SEQ ID NO: 857869 - DNA, 120 bp, Artificial Sequence
  ENSG00000251143_2 (sequence is synthesized)
ctctccatcagcgcggcccgcagccgttccagctcattgcccatctgctctgcctcccgctccatagcctgcagcgctgcctgtgtgctgcagaactggcgtccctgttgctcttccagc

SEQ ID NO: 857870 - DNA, 120 bp, Artificial Sequence
  ENSG00000251143_3 (sequence is synthesized)
cactcgggctgtctgtctcctgccctcgcaggctccttgactaactcccgggaggctgtttcctgctgctcacctgccttgcgcaccaaggtctccaagcgggccacctctttgctggtg

SEQ ID NO: 857871 - DNA, 120 bp, Artificial Sequence
  ENSG00000251143_4 (sequence is synthesized)
gcagccatcttttcctgcagagtggagaggtcatctgcaagcttctgggccctgacttccttctcttggacctgctggagtgctctggccaggttggcatggagctcagctagttcgttc

SEQ ID NO: 857872 - DNA, 120 bp, Artificial Sequence
  ENSG00000251143_5 (sequence is synthesized)
tgctgccggcttatctggagctcgctgtgggattctatgcctgccaccttctcctttgcctcctgcagctcctggcgggccttctcacattcctccttcaaagtcatcagctgttcctgg

SEQ ID NO: 857873 - DNA, 120 bp, Artificial Sequence
  ENSG00000251143_6 (sequence is synthesized)
aacatggcgccatactgtgcctcctcttgctggctatcctcataccgctcacgccaggcagctacttctttgacgagctgctcacactcactctcagctgtgtgctgggcagccatggcc

SEQ ID NO: 857874 - DNA, 120 bp, Artificial Sequence
  ENSG00000251143_7 (sequence is synthesized)
tctgccagctcccgccgcaggacttcagtctcagcctgatgggcctccccaagctgctgtaatcgagcctccagccccttgcgcccagccctctcttcttccagctcctttcgttcccgc

SEQ ID NO: 857875 - DNA, 120 bp, Artificial Sequence
  ENSG00000251143_8 (sequence is synthesized)
ttatgctgctccaccaggcttcgggtctctgccttcagctcagagatacaacgctgctgctcttccagggcatctgcagccctgcgcttctcctcttcaaggctgcccttggtgaccttc

SEQ ID NO: 857876 - DNA, 120 bp, Artificial Sequence
  ENSG00000251143_9 (sequence is synthesized)
aaggactctttgagggcctggagctgctcctggagctggtccttctcctgggccaccctttctttctcagttgctttttgctgctcagaccgcagctgcaactctagctctgcaacctgg

SEQ ID NO: 857877 - DNA, 120 bp, Artificial Sequence
  ENSG00000251143_10 (sequence is synthesized)
gcctgggcctcatgctgttcctggcgggctgtctcaacacaggcctggagttcctccaccttccggctcagctctgccttctcccgctgggcctgtgtcactgaggtctgggcactgtcc

SEQ ID NO: 857878 - DNA, 120 bp, Artificial Sequence
  ENSG00000251143_11 (sequence is synthesized)
cgggcttcattagccacctgaagttgctgctgcagaatctccagcttggcagccttctccttctccagtgcctccagctgcttgagagccgcatcccgctcccttaaggaggcctctcgc

SEQ ID NO: 857879 - DNA, 120 bp, Artificial Sequence
  ENSG00000251143_12 (sequence is synthesized)
tcctctgcagcagtggccagttgctgggcatggtcctgcctagttgcctcctgcttctccgctacctccttcaactgctgctccttctgcttcaggctactgcttagctgctccacctgg

SEQ ID NO: 857880 - DNA, 120 bp, Artificial Sequence
  ENSG00000251143_13 (sequence is synthesized)
tggcggaggccctgggaggcctgttcttgctgttggagggtctgtgctagctgggcctgcttctctttggcctgctgcttcaggccagccagttcttgatcctgttgctggatggtggca

SEQ ID NO: 857881 - DNA, 120 bp, Artificial Sequence
  ENSG00000251143_14 (sequence is synthesized)
ttgagtgtggtgagctcagaggtcagagaggccacctgggcagtcaaccgggccccatgagcctgggaggcctgctccagctcttccttggcctggctgaggttggagatggagctctgc

SEQ ID NO: 857882 - DNA, 120 bp, Artificial Sequence
  ENSG00000251143_15 (sequence is synthesized)
aggtcagtgatcaggctagacagctgctgcttttcttcttcgaagtggccccgctcagcaagcagcttggcttcctgctggcctcgctcagtctccagcatctctaccctggcttggagc

SEQ ID NO: 857883 - DNA, 120 bp, Artificial Sequence
  ENSG00000251143_16 (sequence is synthesized)
tgtgtgttgtttgcagcaagagtggctgcctcttgcttcaaggtttccagctggtggtataaagagacaaactgggatcagcatgactcctcagtcatcaagactcctctggaaatggag

SEQ ID NO: 857884 - DNA, 120 bp, Artificial Sequence
  ENSG00000251143_17 (sequence is synthesized)
tccacaccaaccagcagcacacaggtctttctgtgcattcctacctgcaagacatcacccagcacctcgcccttctcctggggtgggttatcctgcagctgggacaagtgttcttccagc

SEQ ID NO: 857885 - DNA, 120 bp, Artificial Sequence
  ENSG00000251143_18 (sequence is synthesized)
tgtgaaagttttccctgaaggatttcgttcttctcttcaaggcatttctgggagtaaatgagacccatgtgaacagagagggggaacaggcaccagattaccacacaagccctcataaac

SEQ ID NO: 857886 - DNA, 120 bp, Artificial Sequence
  ENSG00000251143_19 (sequence is synthesized)
atcagcaaacatggggcccatcatcttgttaccaagatctccttttgccctggcctagaaaaaagcagaaaccatggaactgggagcatgagggacctgattctctagacctagttctaa

SEQ ID NO: 857887 - DNA, 120 bp, Artificial Sequence
  ENSG00000251143_20 (sequence is synthesized)
ggcacaataaagtcataatgtaacctgcttactacttccccaaggctgctgagtttacttcaaatttccttaccgtatacccttcctcagataagtcttgagtcctagattatccaaatc

SEQ ID NO: 857888 - DNA, 120 bp, Artificial Sequence
  ENSG00000251143_21 (sequence is synthesized)
accaccagctgcccaccatcctctgggcagcaataccactggcagcagctactcgttactactcccattttagggaaaggatgcttagaaaaacagactgattaacttgtccaagatcca

SEQ ID NO: 857889 - DNA, 120 bp, Artificial Sequence
  ENSG00000251143_22 (sequence is synthesized)
catcttgtgaacagcagagataggattgaaaggtgtactataaagtgagggcattgactggggaaaaaaaaaataagttaaaaaaaaaaggtgtactagactgaagcccacaatctttca

SEQ ID NO: 857890 - DNA, 120 bp, Artificial Sequence
  ENSG00000251143_23 (sequence is synthesized)
attacagcacactattgaaccttgaagagaaagcaacttaatacccaaaggcccagaagagcacagtggtaaactggactcagctttgcacatgtggtcaagactgtggctgtgacccca

SEQ ID NO: 857891 - DNA, 120 bp, Artificial Sequence
  ENSG00000251143_24 (sequence is synthesized)
gcagagggttaccttgtcctgcagggctgcgctgagctccttctccagctgggcctgcttctctagccactcctgagtggccttgctgtgctcctccgtcagctcattgagggcatcctg

SEQ ID NO: 857892 - DNA, 120 bp, Artificial Sequence
  ENSG00000251143_25 (sequence is synthesized)
tagctgctgcagatgactggcaaactcccgcagctgagacgggcaagtgagaatccccatcacccagagtcaacgctgaccccaccactgctgtctgctcccagaaccccaggggctgga

SEQ ID NO: 857893 - DNA, 120 bp, Artificial Sequence
  ENSG00000251143_26 (sequence is synthesized)
tgcctccaattatcctgccaaccctctacaaaccaatcacagccatcacacctctaattcagaactacaaatcaacatttagggtcacagcccagtacccgggaagccgccaattatggg

SEQ ID NO: 857894 - DNA, 120 bp, Artificial Sequence
  ENSG00000251143_27 (sequence is synthesized)
ataaggaaaggggcaaaatatgcaggtctctggagagactgaagcataagacaggtgctgggacattcttctcaaccctctcttggggagccttccagaccacctcagccctgaggggcc

SEQ ID NO: 857895 - DNA, 120 bp, Artificial Sequence
  ENSG00000251143_28 (sequence is synthesized)
tccatgcacacaccaccttaacacccaccttaaaggaaaggtctccattctcctccgaaagctggttgattttgcgatccatctggctcttctctgtcttcaggtcctggcactgcttca

SEQ ID NO: 857896 - DNA, 120 bp, Artificial Sequence
  ENSG00000251143_29 (sequence is synthesized)
gggtttcatgcagccgcatgcaagctgcttcttcagccgtctcatctggaactgtggggtctgcaggatatcacccatgggagaagctggagaacctgagagaaagctgaggagggagaa

SEQ ID NO: 857897 - DNA, 120 bp, Artificial Sequence
  ENSG00000251143_30 (sequence is synthesized)
ggcccatatgcattggtctcatgaggaacctgaatacaaggaacatcaaactcaacggctagaactcgcctagacctccttcttacattcctatcatccaccagctgacctcttcatcag

SEQ ID NO: 857898 - DNA, 120 bp, Artificial Sequence
  ENSG00000251143_31 (sequence is synthesized)
aagaccagcagaacgatcactctttctactgtagtaccagccgaggccattgatatattccgtacttagattccttatcattatttcctggtttatgtatctgcctttccacctagaaca

SEQ ID NO: 857899 - DNA, 90 bp, Artificial Sequence
  ENSG00000251143_32 (sequence is synthesized)
ttatttcctggtttatgtatctgcctttccacctagaacatgcactacatgacgggaaaaacattttttaaaagactttcctaacacttt

SEQ ID NO: 857900 - DNA, 120 bp, Artificial Sequence
  ENSG00000251141_0 (sequence is synthesized)
ctgacgctgggaggagatgctgccacctaggttacttgtaggaccctatacggcaacctcctttgccaggaactatttataaacatcctgcaggaaaatgagtctatatgtcagaataca

SEQ ID NO: 857901 - DNA, 120 bp, Artificial Sequence
  ENSG00000251141_1 (sequence is synthesized)
cttcagaaggtaattaatgcccttgtaagaagaggccagagagcttgcgcaccttcttcctgccatgtgaggagccaagaagccggctgtctgcaacctgcaagaggaccctcactagaa

SEQ ID NO: 857902 - DNA, 120 bp, Artificial Sequence
  ENSG00000251141_2 (sequence is synthesized)
gctagccatactggcatcctcatcttggctttccaacttccagaactgtgagaagtatatgtttgtggtttagtcaatggtctatggtaatttttttatagcagtcccagccaagacagt

SEQ ID NO: 857903 - DNA, 120 bp, Artificial Sequence
  ENSG00000251141_3 (sequence is synthesized)
ggctgaatcatcttcaactctacagtgaagtagaagagacagggatatcccagaaggttatgcaaaacatcaagagaagatgagaggagtctatatgtcagaatacacatttcccacctt

SEQ ID NO: 857904 - DNA, 120 bp, Artificial Sequence
  ENSG00000251141_4 (sequence is synthesized)
ttagtatacaaatattgagaaatagtttgttattaactatctcatccaagaaatgcagattcatgttgtttctaattttttatatataattgacaaaatgaagaaacttaacaccatcct

SEQ ID NO: 857905 - DNA, 120 bp, Artificial Sequence
  ENSG00000251141_5 (sequence is synthesized)
tttataaacatcctgcaggaaaatgcagtgaagtagaagagacagggatatcccagaaggttatgcaaaacatcaagagaagatgagaggtactctgtgatgtcgtaaggataagaaaga

SEQ ID NO: 857906 - DNA, 120 bp, Artificial Sequence
  ENSG00000251141_6 (sequence is synthesized)
tcaagggatcaggaaaatgaagattttagcttcattcatcttaacgaggttaacagacatgattttcccactctccttcaacactcacatatcaatttcatatttgtggaaagttttcac

SEQ ID NO: 857907 - DNA, 120 bp, Artificial Sequence
  ENSG00000251141_7 (sequence is synthesized)
tcaccatacacaaacatcaaatcagatggattaaacacttcaatctaagacctctcactatgaaatgactatgagtaaacattgtagaatattcatctgggaaaaaatttcttgccccac

SEQ ID NO: 857908 - DNA, 120 bp, Artificial Sequence
  ENSG00000251141_8 (sequence is synthesized)
aagcacaggcaaccaaagtcaaaatggacaaatgggatcacatcaagttaaaaagtttctgcacagcaaaggaaactatcagtaaaacatagaggcaactcacagaactggaaaaaatat

SEQ ID NO: 857909 - DNA, 120 bp, Artificial Sequence
  ENSG00000251141_9 (sequence is synthesized)
cctgacgctgggaggagatgctgccacctaggttacttgtaggaccctatacggcaacctcctttgccaggaactatttataaacatcctgcaggaaaatgcagtgaagtagaagagaca

SEQ ID NO: 857910 - DNA, 120 bp, Artificial Sequence
  ENSG00000251141_10 (sequence is synthesized)
atgagaggtcagagatgggaagaaacaagaactttgacatgcttggtgttcttgcccaagctttgaagaagtttacaaagtctatatgtcagaatacacatttcccaccttgcccaacag

SEQ ID NO: 857911 - DNA, 120 bp, Artificial Sequence
  ENSG00000251141_11 (sequence is synthesized)
tgagaccaatgatgctgacctccctcaaaagctgcatttctgaatttctgaaggcaaactgtctgcctatattgtacagcaaaataatttcctgtattaaaacgtttttattgctctaaa

SEQ ID NO: 857912 - DNA, 120 bp, Artificial Sequence
  ENSG00000251141_12 (sequence is synthesized)
gaacttgtgtgcttagacctgacgctgggaggagatgctgccacctaggttacttgtaggaccctatacggcaacctcctttgccaggaactatttataaacatcctgcaggaaaatggc

SEQ ID NO: 857913 - DNA, 120 bp, Artificial Sequence
  ENSG00000251141_13 (sequence is synthesized)
aattttttttccagcagtgaagtagaagagacagggatatcccagaaggttatgcaaaacatcaagagaagatgagagggtaaggtttatagactgagttattagaaaaatgcacaatgg

SEQ ID NO: 857914 - DNA, 120 bp, Artificial Sequence
  ENSG00000251141_14 (sequence is synthesized)
ggtttgggttgcataaaaacagggtctatgggtgtgtatttataagttcacacatgcacacacaaacacacacatatatgtacacacacaggcagccctcaacattctcatgattggctt

SEQ ID NO: 857915 - DNA, 120 bp, Artificial Sequence
  ENSG00000251141_15 (sequence is synthesized)
ttgtacattattttttaattattaatacctcaaaatgtgtttatatagagaaattgaactttagtgcatcacaaaagagaagagacttcaatttctagttcaagaaatgaatgagaaaga

SEQ ID NO: 857916 - DNA, 120 bp, Artificial Sequence
  ENSG00000251141_16 (sequence is synthesized)
attgttttttttctgttttttttttaatagcaatgtttttttctttaccactagagtctatatgtcagaatacacatttcccaccttgcccaacagtagaaaaacataagaagagaaaaa

SEQ ID NO: 857917 - DNA, 120 bp, Artificial Sequence
  ENSG00000251141_17 (sequence is synthesized)
ctaatttatggttaaatagatatagataacaaacagaatacgcctgtttaaaactgttaaaatgacattggttctaattatacttttatttaaattgaaagacaaggcatttatatggta

SEQ ID NO: 857918 - DNA, 120 bp, Artificial Sequence
  ENSG00000251141_18 (sequence is synthesized)
tctctaaccatcacaacttttgtgtgacaaaaagaaattatcaccaaaatacacctccttaagtaagtgtctgatttcacacttccagaaaaagtgctctttctggtcaagccagcaaga

SEQ ID NO: 857919 - DNA, 120 bp, Artificial Sequence
  ENSG00000251141_19 (sequence is synthesized)
attgagaaagattaagaaagtgcttcaaagatgtttattaaaaagttgtcataaaaatgtgaagtagatgtagcatcaagcataccaaataaagtaaaactgtcatcaagaagattcaac

SEQ ID NO: 857920 - DNA, 120 bp, Artificial Sequence
  ENSG00000251141_20 (sequence is synthesized)
agctatgaaaagagttcttcaaaatatgatatgtttttctagatgataataaaatttatcaattccaaatgtccacattagtctttcataaagacaccaatgagtcacaggaaaaaaaat

SEQ ID NO: 857921 - DNA, 120 bp, Artificial Sequence
  ENSG00000251141_21 (sequence is synthesized)
taaaaataaaaaaaccctatctcagggaatcatgctaacaacctgatgtgttttcttccacatatttatgtctgcttataagtatttacaaacatatattcgcatatatgcattttgaat

SEQ ID NO: 857922 - DNA, 120 bp, Artificial Sequence
  ENSG00000251141_22 (sequence is synthesized)
tttttctgttgctgcacttaaatttttttcataataaaacaagactcctgcaatttgcttttttaggtagactatgtatccctgacaaccatccaggtcagcttgatgattaacacattt

SEQ ID NO: 857923 - DNA, 83 bp, Artificial Sequence
  ENSG00000251141_23 (sequence is synthesized)
cctgacaaccatccaggtcagcttgatgattaacacatttgttttaatagctacatagtattctataagtatgatttattcaa

SEQ ID NO: 857924 - DNA, 120 bp, Artificial Sequence
  ENSG00000251141_24 (sequence is synthesized)
gtcacaggcaacagtgctgaaatgaaaacacttgaacacatatttttatgattttactttttatgattttcaaaagtgtgtttgcaaggtcaaagaatagatgtgttgctcttaataaat

SEQ ID NO: 857925 - DNA, 120 bp, Artificial Sequence
  ENSG00000251141_25 (sequence is synthesized)
atcaaaagattatttactactacccaaattatactgtaatttcttcttgaaccgtttaatttgtatcctcctatcagtgaggttgagaaatattttatgcttactgacttttgcaatatt

SEQ ID NO: 857926 - DNA, 120 bp, Artificial Sequence
  ENSG00000251141_26 (sequence is synthesized)
tctttcacgaattattgccattttctattgtccatttttctgttaggctctatgattagcttattaggctttgtggtttatatgcatcagaaagagtaagacttaattttgtgtggaaca

SEQ ID NO: 857927 - DNA, 120 bp, Artificial Sequence
  ENSG00000251141_27 (sequence is synthesized)
aataccctggtgtagcatgtttcattagaatttgtttatagagatatttgccatagaaaagttattttttattagtaaagaatgctttgtatttcctttgtggcttctaagtaccctttt

SEQ ID NO: 857928 - DNA, 120 bp, Artificial Sequence
  ENSG00000251141_28 (sequence is synthesized)
aatgctttgtatttcctttgtggcttctaagtacccttttttggttattatacctttatccataagtatctttaaatattacaaaaattacatattcttttaaatattttaaagatttat

SEQ ID NO: 857929 - DNA, 120 bp, Artificial Sequence
  ENSG00000251141_29 (sequence is synthesized)
tgaaaagtaagagaaaagtatataaatcatgagcacaaattgaactaaccaaggtaacaatcaatctgctcaagaaattgagcatcaccaccacctcctcctgcactgtccaaatcagca

SEQ ID NO: 857930 - DNA, 120 bp, Artificial Sequence
  ENSG00000251141_30 (sequence is synthesized)
ccccagtactccaaagcaaatgttactcactacactgacttctaacacaatagacttgttttgtctgttttcaactatacaaaaatgaatcatagagtatgtgttgttttgtatttggct

SEQ ID NO: 857931 - DNA, 120 bp, Artificial Sequence
  ENSG00000251141_31 (sequence is synthesized)
cctttcactaaaattttggtttataaaattcatccatgtggttgaacacagttgtagattgttcattttaattgttttacagtatttattgtgtgactaaaacactacttatttattcta

SEQ ID NO: 857932 - DNA, 120 bp, Artificial Sequence
  ENSG00000251141_32 (sequence is synthesized)
taattgacagactttgggttgcttttgctttgggagtataaacatttttatatctatgctttaggtacatgttcatgaatttgtgctgaataattacttgagtgtgaaattgttatgtta

SEQ ID NO: 857933 - DNA, 120 bp, Artificial Sequence
  ENSG00000251141_33 (sequence is synthesized)
tgcgatatatagtagtcaaatatagaagataatgcaaaacaatttaaagtgattgtagcagtttgctgtattctacagcagcagattgtagcagattactgtattctacagcagcagcat

SEQ ID NO: 857934 - DNA, 120 bp, Artificial Sequence
  ENSG00000251141_34 (sequence is synthesized)
gtgagattgccagttgctcaaattcgtgccaatacttggtattttttatcttttaattttagacattctggagagtgtgtagtaatttttcatcttggaaaattacattaaattagtatc

SEQ ID NO: 857935 - DNA, 120 bp, Artificial Sequence
  ENSG00000251141_35 (sequence is synthesized)
catttctctaattttgataacattttcataagtttattgttattagatattttctttattttgaagtgcttattgtccattttacattgggtcatctgttattgaattgtaaacattcct

SEQ ID NO: 857936 - DNA, 120 bp, Artificial Sequence
  ENSG00000251141_36 (sequence is synthesized)
tgaatatttaaatatgagtgcttggtcagtttttgtcacaaatatcctcttttttcactttttgcccttttattattctgaaaatgccaattgattaaaattaattttactattgttcaa

SEQ ID NO: 857937 - DNA, 120 bp, Artificial Sequence
  ENSG00000251141_37 (sequence is synthesized)
gatgctgccacctaggttacttgtaggaccctatacggcaacctcctttgccaggaactatttataaacatcctgcaggaaaatgagtcaaggaagcttttcttttgagctatttacagc

SEQ ID NO: 857938 - DNA, 120 bp, Artificial Sequence
  ENSG00000251141_38 (sequence is synthesized)
ttttagcaattgagtaaagtatactcctgtgaacaaaatttggaacatatttgtttctctctaactgatttctccagaatttggaactagttaaccaggaaccctctcttggggtgtgga

SEQ ID NO: 857939 - DNA, 120 bp, Artificial Sequence
  ENSG00000260439_0 (sequence is synthesized)
gtcagcaggtcgcctgggtctctgtctcagtgctcagcagggcgaggacaggacagaacgggccccatcacagactgcgcttagaaggaactcagtaaaacaaagaccattttcttctgg

SEQ ID NO: 857940 - DNA, 120 bp, Artificial Sequence
  ENSG00000260439_1 (sequence is synthesized)
aggcaactcaaggagatttccagcatcactggtactcaatattgaaggaatgaaaatacgtgaggaataaaagaatgaagaaagtgacctctaccgcaaggacacaggccctgaaggctg

SEQ ID NO: 857941 - DNA, 120 bp, Artificial Sequence
  ENSG00000260439_2 (sequence is synthesized)
agactgtgaagggggcaggcaaagatccacgcccagacaggccacccctgctctcctgggaaaggggccgagagccagagagttcggggcagagagagcctgagtgcgaggcccaggcca

SEQ ID NO: 857942 - DNA, 120 bp, Artificial Sequence
  ENSG00000260439_3 (sequence is synthesized)
gggcctttaccagcaaagaccggcccctctgcctgcgccctgaggtcatggagaaaggcaggggtgggggtatggtcatccttcccaaggtcctggagtcaggtctgcttaccaagccac

SEQ ID NO: 857943 - DNA, 120 bp, Artificial Sequence
  ENSG00000260439_4 (sequence is synthesized)
tccagtattgactgcgttgtgtgggatggggaagacctccggtcccctccaccaaacaaagcacaagccaaagtgcccaccagcgtgagtgccgtgagcaccgtgaaccttctctatgcc

SEQ ID NO: 857944 - DNA, 120 bp, Artificial Sequence
  ENSG00000260439_5 (sequence is synthesized)
gaggggcacacagccttgagcgtccacgggggatgggcctgtgggtgctttccctctgccccagggaagcggtggtaatcacacctgtgagatgccgacaatcatgcgtgcgaccatccg

SEQ ID NO: 857945 - DNA, 120 bp, Artificial Sequence
  ENSG00000260439_6 (sequence is synthesized)
tctctaggtgcccggggcctggaagcccaggagctcccacatccagggaggaggcacggatcagatcacaagcgcccatcactgccctccgtgcatactgggaaggctgatggcagaggc

SEQ ID NO: 857946 - DNA, 120 bp, Artificial Sequence
  ENSG00000260439_7 (sequence is synthesized)
taaggaaggggagaggccaggaaaagtgcgtgaagatacataccaaacacacaacgctcaactctcgcagagctttctctaaatgcatctcacttaccgaaagagtacctgaaaaacaaa

SEQ ID NO: 857947 - DNA, 120 bp, Artificial Sequence
  ENSG00000260439_8 (sequence is synthesized)
ggcgaggacaggacagaacgggccccatcacagactgcgcttagaaggaactcagtaaaacaaagaccattttcttctggaggcaactcaaggagaaaaacatggaaacaatgaacagac

SEQ ID NO: 857948 - DNA, 120 bp, Artificial Sequence
  ENSG00000260439_9 (sequence is synthesized)
gcaagcacgcagagccgcacgccctgacggtgcaccccgagccaggtggcacccagcagccaggaaacccatgagtgacagtggccaaggtggcctggtcgtctgcaattacaggaacct

SEQ ID NO: 857949 - DNA, 120 bp, Artificial Sequence
  ENSG00000260439_10 (sequence is synthesized)
tgcgaggaggacctgcccgctgggcattaggggaacaggagcccctccccacggctcacacacaggcaggcccagaacaggcaaccaaaacatattccaagatacacctactaagtaccc

SEQ ID NO: 857950 - DNA, 86 bp, Artificial Sequence
  ENSG00000254319_0 (sequence is synthesized)
gggagtgaagctgcagacgtttgcgggaacttagagcacaaagtgcacagccatcatagaatctggagacagaggagaatccagag

SEQ ID NO: 857951 - DNA, 120 bp, Artificial Sequence
  ENSG00000254319_1 (sequence is synthesized)
acagccatcatagaatctggagacagaggagaatccagagtcacagcccagatctgcttccatgggaccgttaactggttgggtcacttgaatggcaactctgatgaaccaggaagactg

SEQ ID NO: 857952 - DNA, 120 bp, Artificial Sequence
  ENSG00000254319_2 (sequence is synthesized)
ggtatagatgtggatgagtgacaaactcttgaaagtggccgttatggggcttgcacacgtttctgggctttaccagagaaacaccacagtacattttcatggtgaagatctgagaacgat

SEQ ID NO: 857953 - DNA, 120 bp, Artificial Sequence
  ENSG00000254319_3 (sequence is synthesized)
tctctgctgcctctggcaagggccagagagagaaatgagctccgggccccctccattaggaaggcctactttccaggagaagactggcccagagccttgtccagagccacgtggaatggc

SEQ ID NO: 857954 - DNA, 120 bp, Artificial Sequence
  ENSG00000254319_4 (sequence is synthesized)
atcttctccagaccatgtccccagcctttctgtctcacacaaggggcagggaaagtggaagaaagccacacaggaccctcaggctaaggtcatcacaggccctctgagataaatagatta

SEQ ID NO: 857955 - DNA, 120 bp, Artificial Sequence
  ENSG00000254319_5 (sequence is synthesized)
aactggggtatcatagcgtgacccctcctcctctcctcaccatcacataaacagagctcccttgcaatcaaaatatatagcgcgtttcagtgaaaagagctgcaggtcagacactcagag

SEQ ID NO: 857956 - DNA, 120 bp, Artificial Sequence
  ENSG00000254319_6 (sequence is synthesized)
agggccagctcaagagcagagacacaaacaaggccactagaggagcttgcagtttcttcagcaaacacagagcaaagcctggcaactactcagattaacatacctcttgatagtagaagc

SEQ ID NO: 857957 - DNA, 120 bp, Artificial Sequence
  ENSG00000254319_7 (sequence is synthesized)
cgattctcctcagttcctattacctgatccgtgagttcttccagtaaaaattgggccaaagcaaaggacaagaaaaaataaaaacagtctgaagaaacgaaacctcagaaacaaagtcag

SEQ ID NO: 857958 - DNA, 120 bp, Artificial Sequence
  ENSG00000254319_8 (sequence is synthesized)
gtatgacacagatgttggaattatcagaagggaattaaaacaactggtaaatatgtaaacgttctcatgaaataagtaaacaacgtgcaaacacagatggataatgtaagcagtgtaaaa

SEQ ID NO: 857959 - DNA, 81 bp, Artificial Sequence
  ENSG00000254319_9 (sequence is synthesized)
caacgtgcaaacacagatggataatgtaagcagtgtaaaaggaaaatgaatcttggggtcccaaaatcacaaagccaaaag

SEQ ID NO: 857960 - DNA, 120 bp, Artificial Sequence
  ENSG00000254319_10 (sequence is synthesized)
ttgtttttgtttttgtttttgtttttaacaaaagctacatacttccctcacaatttgtccacaaggaaatcccttgtggacaaaggacagacagatccaagtcatccctctgctcactga

SEQ ID NO: 857961 - DNA, 120 bp, Artificial Sequence
  ENSG00000254319_11 (sequence is synthesized)
catatctgattgcttcctttggaaagcttaaccagaaactcaaaagaatgcaaccgtttttgtcttatctacctatgacctggaaaccccgtccccacctcgagttgcccggccttgctg

SEQ ID NO: 857962 - DNA, 120 bp, Artificial Sequence
  ENSG00000254319_12 (sequence is synthesized)
ccggccttgctggatggagccaatgtatggcttacatacattgattggtgcctcatgtctccttgaaatgtatgaaagcaagctgttccctgaccacctggggcacatgtcgtcaggacc

SEQ ID NO: 857963 - DNA, 120 bp, Artificial Sequence
  ENSG00000254319_13 (sequence is synthesized)
tcctgaggctgtgtcacggatgtgtgtccttaactttggcaaaaataaacgttccaaattgactgagactgtctcaggtatttgggattcacagcagagataacgaacttctaagaaagg

SEQ ID NO: 857964 - DNA, 120 bp, Artificial Sequence
  ENSG00000254319_14 (sequence is synthesized)
gaaataaagagtaccttggacacgcttatcactagacttcacacatctgaagaaagaattactgagtttgaagatgggtaaagggcaagttctcaaagtgaaatgatgagtgaagaaaga

SEQ ID NO: 857965 - DNA, 120 bp, Artificial Sequence
  ENSG00000254319_15 (sequence is synthesized)
atggggaaggtgtggggaatcagaacagaatataccagaactctgggacaatttcagaatgtgtaacgtatacgtaattggaacactagaagaaggaaaagagaaaatagggccaaataa

SEQ ID NO: 857966 - DNA, 120 bp, Artificial Sequence
  ENSG00000254319_16 (sequence is synthesized)
atatttgaagtaatactgataatttttttattaatggaaggcagaatctaagagaactgaaatgaagactagataatacaatactaagagttggagaatttaacatgcctctttaagatg

SEQ ID NO: 857967 - DNA, 120 bp, Artificial Sequence
  ENSG00000254319_17 (sequence is synthesized)
aagcagacagaaaatcaataaggacgcagttggagtaaacagcatgaacaattgacctgatagcttgacatttataaaatactccatctacaacagcaggatacacatgggtttcaagct

SEQ ID NO: 857968 - DNA, 120 bp, Artificial Sequence
  ENSG00000254319_18 (sequence is synthesized)
cccatggaacattcaccaagaaagaccacattctgacccacaaaacacacatgaacaaattaacaataatggcaattgtacagagtaatgttctcagaggacaatggagttaaattagaa

SEQ ID NO: 857969 - DNA, 120 bp, Artificial Sequence
  ENSG00000254319_19 (sequence is synthesized)
atcagtaacaggaaggtagctaaaaaattcccaaatatttgggaatttagaaacttacttctaaatagcatatgggtaaaaaatggaaatctccaaataaatttaaagatattttgaact

SEQ ID NO: 857970 - DNA, 120 bp, Artificial Sequence
  ENSG00000254319_20 (sequence is synthesized)
aaatgaaaacaaaaaataaaacctcgacatctgtgggatgcagaaaaagcagtgcttttagaggacgatttatagcattggagagatgaaaaaagaaaaatctattattaataatctaag

SEQ ID NO: 857971 - DNA, 120 bp, Artificial Sequence
  ENSG00000254319_21 (sequence is synthesized)
taagctttcactttaaagaattgggtaaaaataaatttaatattaaatcaagcagaagaaaagaaataagaaaaaataataccaaaatcaatgaaaatgaatacagaaaaatactagaga

SEQ ID NO: 857972 - DNA, 120 bp, Artificial Sequence
  ENSG00000254319_22 (sequence is synthesized)
caataaacaaaacgttggttgtttgaaaatattaatgaagttgataaaaactaaccagggtaaaaaattataaaaagaataaataaattagctgcatttccctggggagtctgccacctg

SEQ ID NO: 857973 - DNA, 120 bp, Artificial Sequence
  ENSG00000254319_23 (sequence is synthesized)
gaggtgggatcatcaatactaatcatactgacacaaaacagatcatttaaaaaatattacaaacaactcatgaccacataattgataatttagatgaaatggactgattctttgaattgc

SEQ ID NO: 857974 - DNA, 120 bp, Artificial Sequence
  ENSG00000254319_24 (sequence is synthesized)
actaactaccagatctttccctgtgtagtttctaatctgctgttaatcttactccgtggctttcagtttcaggtactatcatttttatctccgtagattggattttaaaatattttccat

SEQ ID NO: 857975 - DNA, 120 bp, Artificial Sequence
  ENSG00000254319_25 (sequence is synthesized)
ttcttttgtttgttttccttaaactaattgctgatgatatgcttttgagtgtctgaattttcacgtcctctagtgaagactgttggactttgacctgatggggagttatgtttctttctg

SEQ ID NO: 857976 - DNA, 120 bp, Artificial Sequence
  ENSG00000254319_26 (sequence is synthesized)
gacgtgttaacattttagatgttgttagcttggttctgaattaaagaagtgtagcccttctagagcttctttggctacacaaaggatcaacgcagggctccattcaggctgggggaaact

SEQ ID NO: 857977 - DNA, 120 bp, Artificial Sequence
  ENSG00000254319_27 (sequence is synthesized)
caaataatttcaggcatgggtgatttctggaaaccattcatgtcacacctacccaactggtctttgccgccacggagtttcactatacaagtgtctgtctttatatgcaataaacatcca

SEQ ID NO: 857978 - DNA, 88 bp, Artificial Sequence
  ENSG00000254319_28 (sequence is synthesized)
cagaccctcgcggtgtgttacagttcttaaagggggcgggtccggtgagtgttacagttcttaacggccgcgcgtccagagtctgttc

SEQ ID NO: 857979 - DNA, 75 bp, Artificial Sequence
  ENSG00000254319_29 (sequence is synthesized)
cgcggtgtgttacagttcttaaagggggcgggtccggtgagtgttacagttcttaacggccgcgcgtccagagtc

SEQ ID NO: 857980 - DNA, 120 bp, Artificial Sequence
  ENSG00000254319_30 (sequence is synthesized)
cgtttgcgagaaatctaaatacatgaccacagtttgagctcctgtctgaagagattttttaaaggctgttttctcattaaagctgggattttcatcatgctgagttcagaggaactcgtg

SEQ ID NO: 857981 - DNA, 120 bp, Artificial Sequence
  ENSG00000254319_31 (sequence is synthesized)
atgacaaaaagatattatgactcccatgcagcggatgaagacattgatgcccatgaaaggagattcacaagcctccctcccagattcagggaaggagatgcagcccccaccccttgactg

SEQ ID NO: 857982 - DNA, 120 bp, Artificial Sequence
  ENSG00000254319_32 (sequence is synthesized)
gaggaggaccaaggtcaccttgcagagcaccgtgagatgtggaagatgccagaactgtctgtgggaaatgggatttgtacttggcttgtctgcctcttgcaaccagagtcctggttctca

SEQ ID NO: 857983 - DNA, 120 bp, Artificial Sequence
  ENSG00000254319_33 (sequence is synthesized)
gggcctcacctgtgcatctcttgttgagcacagaggaggcactcggcataaatgaagaggatgcttgctgagctggctggcccatcctctcttctttcccttgtttttctattttatctt

SEQ ID NO: 857984 - DNA, 120 bp, Artificial Sequence
  ENSG00000254319_34 (sequence is synthesized)
tcaaagcagtgtttcaagtgtttataaactaatctatgtataaaatattatgtggcataagatttgcaaaatattaaagatttaaagaatcaaataaaatatttgtatgataccacagtc

SEQ ID NO: 857985 - DNA, 120 bp, Artificial Sequence
  ENSG00000254319_35 (sequence is synthesized)
aaagatattatgactcccatgcagcggatgaagacattgatgcccatgaaagggctccaggtttccacggtgctttcaagaccgcatttaaaaccgactcttgggttcgaaatggctgga

SEQ ID NO: 857986 - DNA, 120 bp, Artificial Sequence
  ENSG00000254319_36 (sequence is synthesized)
gagactgaattaggcttacagttgaaatgtagagggatgtgattttaatcttttgggtaccaagggctgttattatcagtgagtaataattatgttgagagtgtctaagcaaaaatagag

SEQ ID NO: 857987 - DNA, 120 bp, Artificial Sequence
  ENSG00000254319_37 (sequence is synthesized)
gatatatgcatgtaacagagaggaatgagtaagaaaaagcattttgcccgtttgtctgtcattgttaattcattaagtggatatagcagtgatctaattttatgtcaaactacgtgtata

SEQ ID NO: 857988 - DNA, 120 bp, Artificial Sequence
  ENSG00000254319_38 (sequence is synthesized)
atatatactaattgtgttaaaattcatgttttagaaaatcctgaaaaatctgacgcttgtttcagaaacagatttatatttatttatttatttatgttttcttttgaaccctggaccaaa

SEQ ID NO: 857989 - DNA, 120 bp, Artificial Sequence
  ENSG00000254319_39 (sequence is synthesized)
gttagaaacgaaatttattttaaagcagtagatggtggtggtcaaaatagtaatgaatagtgatcagcacccaagattttcaaaattatgtcaaacacagtgtccaagcagtaatatggg

SEQ ID NO: 857990 - DNA, 120 bp, Artificial Sequence
  ENSG00000254319_40 (sequence is synthesized)
ccgtctctcccacggctggtttgtccccacttccggacctgtcttctttctctgttgcagttggcaaggtggaaggtttaaggaggaaagacttacacaatattgttgtcatgcaacaga

SEQ ID NO: 857991 - DNA, 120 bp, Artificial Sequence
  ENSG00000254319_41 (sequence is synthesized)
gcccgtgcatgtaaatgtattatgtgcagaaaacaaacccgcttgtgattgcgatggggactgtttccataaacttttttttttttttacaagaaaggaaagtctattgaattttaaaga

SEQ ID NO: 857992 - DNA, 120 bp, Artificial Sequence
  ENSG00000254319_42 (sequence is synthesized)
gccagaaaactgccggatgtgctgacagctagaggtgtcttgggtacaaaacacgtcaaatgagccttccctgcattcactctaatatccttcatccaaaagcaggtctttcttcttaaa

SEQ ID NO: 857993 - DNA, 120 bp, Artificial Sequence
  ENSG00000254319_43 (sequence is synthesized)
gttcagttttcattatgacatagagatgcatcttggtaacaaacagttagcgtacgtaatcttattaatcttactgtgtccgtcagttgcatttttaaaatagtggtaggcgtatctgca

SEQ ID NO: 857994 - DNA, 120 bp, Artificial Sequence
  ENSG00000254319_44 (sequence is synthesized)
aacgtacacccaacgtctctgagaaggatatgggctcatccagtcttcatcacgagatccacatacatctcttcatctgagtactatcacacagaaaagactgacggcttgtgacaattg

SEQ ID NO: 857995 - DNA, 120 bp, Artificial Sequence
  ENSG00000254319_45 (sequence is synthesized)
tacaacattgctctttacccgtacatagctaagcaatgttgatatccatgttagtaaggactcaacattcattttcaggtgtcgtttcacttttgattcattttctctctgtgtttattt

SEQ ID NO: 857996 - DNA, 120 bp, Artificial Sequence
  ENSG00000254319_46 (sequence is synthesized)
agagtcttgttctgttcattcattcactttttaaaactaaattataagaaaaaagtgtatatatcggaaatgagaaatataaaataaatatcattactactgagaaaattgtactgtaat

SEQ ID NO: 857997 - DNA, 120 bp, Artificial Sequence
  ENSG00000254319_47 (sequence is synthesized)
ttgtactgtaattgaggagggagaagttgtttgtttccctttgatctcccccagcacttagcaaaaagccttttacagaaaaatgaagataaacattaataaacaggttgatcagttaaa

SEQ ID NO: 857998 - DNA, 120 bp, Artificial Sequence
  ENSG00000254319_48 (sequence is synthesized)
cggtaattcagttccaaccccttcagtgacagcagagagacccaggccaccttccttgaggatttcggagctgcagcccacagccagggccagagtggactcagctctccaacccacgcc

SEQ ID NO: 857999 - DNA, 120 bp, Artificial Sequence
  ENSG00000254319_49 (sequence is synthesized)
ctcccatagccccttcagaaacctgtgacttcctgagtcctaagtcttcagcagaaacagcagctgccccacgccttgagcggcagcaggaccctttctgccctgatctccactcagcgc

SEQ ID NO: 858000 - DNA, 120 bp, Artificial Sequence
  ENSG00000254319_50 (sequence is synthesized)
tggaagcctggctcacattctctctactcacatcagcctgatgtcttcaagccaggatttcttggggtttatctcaccagatgcaatcaactcaagttccctctgtggcgccttctcatt

SEQ ID NO: 858001 - DNA, 120 bp, Artificial Sequence
  ENSG00000254319_51 (sequence is synthesized)
aagtccgcgtaacttttcaatgtgtgtgacagacaggtgaacaaatggcttctcattgtcttcatctgccatttaaaaggggtactccctcttaatctgaggctgtaatcatttattctg

SEQ ID NO: 858002 - DNA, 120 bp, Artificial Sequence
  ENSG00000254319_52 (sequence is synthesized)
attctgattctacatcgatgccgatgtcttgtccagggattgccctgcgtgtgtggtgaacctgggggtaggtctctgttactgcgtagcctgcgcccaagaggacttccctctgtcctg

SEQ ID NO: 858003 - DNA, 120 bp, Artificial Sequence
  ENSG00000254319_53 (sequence is synthesized)
ctctgtgtcatcattttagtccttcccatgtaggtcatctgatgtaacattgtcccgtttgcatttgaaattgatgcatttaaatttatttggagtaaatcgctgatacaattccaccag

SEQ ID NO: 858004 - DNA, 120 bp, Artificial Sequence
  ENSG00000254319_54 (sequence is synthesized)
aaaccaactgctatagctaaaatagtatttgcaagcacaatgacaccctctcagtagcttaaaagcataactgttagtcaggctgataaataattagcatgctttggctctgcctcatat

SEQ ID NO: 858005 - DNA, 120 bp, Artificial Sequence
  ENSG00000254319_55 (sequence is synthesized)
aatcagttcttaaaataagatttctctgtgttaacacaggacatcatagttgaaagttctagccccaaaagtccatcttccgattttgtagaaaatttcttgtttaaaatatgtacagaa

SEQ ID NO: 858006 - DNA, 120 bp, Artificial Sequence
  ENSG00000254319_56 (sequence is synthesized)
cagcaaaaatggttaactttctgccaattttatacaattcccaatgtgatttattttcaagcaaaagatcatttctgatccacaagaaataatcaacacctaagaaaatttaatgaaata

SEQ ID NO: 858007 - DNA, 120 bp, Artificial Sequence
  ENSG00000254319_57 (sequence is synthesized)
cattattttctgtcatgatgtgataattgacaaattaactggtattaccactgaaatcattttcttcatgtcgtttatacctatttttgtggctgatacttgttgagacttgacaattta

SEQ ID NO: 858008 - DNA, 120 bp, Artificial Sequence
  ENSG00000254319_58 (sequence is synthesized)
taagtcagattaaaaatctcaggaattagctgacagaaattccatttgagtttaaaatagttcccgctgagcttattatatattatcgtggcagtaaagattatgaagtcaggtcccaaa

SEQ ID NO: 858009 - DNA, 120 bp, Artificial Sequence
  ENSG00000254319_59 (sequence is synthesized)
cttatttgacctacaaaatggtttataccatcatgtgaattataaataatagagtttgggggaaaagcctctataaatcaaagggtggaataggttttaataaaatcacattgacatgta

SEQ ID NO: 858010 - DNA, 120 bp, Artificial Sequence
  ENSG00000254319_60 (sequence is synthesized)
ttgaaagtccttctggaaggagaactaataatgctgacattggctaagggaagtgtttgcaagctccatgggcatctcattgctgatgctcgagcactacttcatcacacaatacccgaa

SEQ ID NO: 858011 - DNA, 120 bp, Artificial Sequence
  ENSG00000254319_61 (sequence is synthesized)
gatgaactaacagtcacactccttccctacgttagcctgaaaatgaatgcatcaaagagctagaaaataagtcaagaatcacgtggtactaggcagcgtgaattttgaatctcttggtta

SEQ ID NO: 858012 - DNA, 81 bp, Artificial Sequence
  ENSG00000254319_62 (sequence is synthesized)
acgtggtactaggcagcgtgaattttgaatctcttggttataaaacttctggttaggctgggaggaagtggatggatcacc

SEQ ID NO: 858013 - DNA, 72 bp, Artificial Sequence
  ENSG00000254319_63 (sequence is synthesized)
agtggtgcaggaggcagaggctaccgtgagctgagatcgcgccactccactccaacctgggcgacagaagga

SEQ ID NO: 858014 - DNA, 120 bp, Artificial Sequence
  ENSG00000254319_64 (sequence is synthesized)
gactctgtctcaaacaacaacaacaacaatttctggctaataattgcatattgtatatatgcgtgtgtgtgtgtgtgtgtgtactttctgtaacaaatgagctttgtataaatgtttgca

SEQ ID NO: 858015 - DNA, 120 bp, Artificial Sequence
  ENSG00000254319_65 (sequence is synthesized)
gtactttctgtaacaaatgagctttgtataaatgtttgcaaatcttagtcgtgacttcagcatgaaagcttagtttattaagaaataatttccataaagaatcctttccaaataatcaaa

SEQ ID NO: 858016 - DNA, 120 bp, Artificial Sequence
  ENSG00000254319_66 (sequence is synthesized)
tgacaaaaagatattatgactcccatgcagcggatgaagacattgatgcccatgaaagaccaaaagtaacaaaacaacaacagaaaaccagggggggcgcggtggctcacgcctgtaatc

SEQ ID NO: 858017 - DNA, 120 bp, Artificial Sequence
  ENSG00000254319_67 (sequence is synthesized)
tcattcccaagccccaccatcacttgtgcttaattgcgggagaccaaaggtgtgacatcctttcagcttcagctttgtcagtatggagggactagactctccatgtggacccatgtcaag

SEQ ID NO: 858018 - DNA, 120 bp, Artificial Sequence
  ENSG00000254319_68 (sequence is synthesized)
tcactcgtgatcatcaacctgcatattgtttttttttcttactgtatcacttagagtagcatcaggaaatgaagggttcatttgaaattgggttgctcaagaagagttaattttcaaaac

SEQ ID NO: 858019 - DNA, 120 bp, Artificial Sequence
  ENSG00000254319_69 (sequence is synthesized)
aggattcaataaacccacaatctgagaaggaccgagatgaattctgtgagaatttcttatttgctgggctcctttggattactctaatatgttatctcaattaaaccatattgcaacacc

SEQ ID NO: 858020 - DNA, 120 bp, Artificial Sequence
  ENSG00000254319_70 (sequence is synthesized)
tacttgagaacagtatccataaaacgttctgatatgattttcttgttctaatttacatactgtgaatctgtaaacacaagacggagatttgcatgtgttgacattgtttgtgactaaagg

SEQ ID NO: 858021 - DNA, 120 bp, Artificial Sequence
  ENSG00000254319_71 (sequence is synthesized)
gatcgtggcctcagaacacacacattacgtgggtgacacggacattactcatttttgtacatttggatgctaattgaattgggtgcttgcctccaataagaatggaacttgttggcctca

SEQ ID NO: 858022 - DNA, 120 bp, Artificial Sequence
  ENSG00000254319_72 (sequence is synthesized)
gaagagctctgaggaatgctctctgggacacgtcaccatctagaaattggaaaaaggtgtcaaagccatgaaaatgcacaagaagaaatagccggtgagagaagaaaaccaggtgtgtgc

SEQ ID NO: 858023 - DNA, 120 bp, Artificial Sequence
  ENSG00000254319_73 (sequence is synthesized)
gtgctcctaagagccaaggcgggagggagttttaggaagggggaagcctcagaagtggtcaatgctgttataatgttgacgcaagttttggtgggagaaagaccaactgactgtttgcaa

SEQ ID NO: 858024 - DNA, 120 bp, Artificial Sequence
  ENSG00000254319_74 (sequence is synthesized)
ttggatggcatgaaccatggagattattcacgctcaccactggctaaaatgtgtgattgctgtgatggggatgaaagtgtgattggaaaagttttgaagaaagtgaaaagtgaggatgtg

SEQ ID NO: 858025 - DNA, 120 bp, Artificial Sequence
  ENSG00000254319_75 (sequence is synthesized)
aggaaaactaaacataccataaaaatgaaagacttctagaacaatctgaagcaggtgacagagagagcatgagatcttgtggaaaaaaaattcccaaagagggattactaacagtttatt

SEQ ID NO: 858026 - DNA, 120 bp, Artificial Sequence
  ENSG00000254319_76 (sequence is synthesized)
gtgagaagagagaagacaatgtgggtggattgtaagtgtgatgatgagaacttaagagcgttctcttgtctgagtcaactcagaagcaaattcaacttctgagagtaaaaaggaggagtc

SEQ ID NO: 858027 - DNA, 120 bp, Artificial Sequence
  ENSG00000254319_77 (sequence is synthesized)
aaatatcctcattttaaaaagtgtgaattaatatgaggaatcgatgaggcaaaaataatgaggattgccaggcaacgcagggagccaaacacactctgtgtttcccatgtttactcagca

SEQ ID NO: 858028 - DNA, 120 bp, Artificial Sequence
  ENSG00000254319_78 (sequence is synthesized)
cttctcagtgtgtatgcccagaaaaccaagtgtggcttctgctcagatctagccgcagaatacagaactggaataagctggatgtctttgcatagataaatgcaaaaatatttgcatatt

SEQ ID NO: 858029 - DNA, 120 bp, Artificial Sequence
  ENSG00000254319_79 (sequence is synthesized)
tgctcacatacatattattttctattggtgagcttattctatgcatcctatttgcaatctgctttgtagtcactcaaaaatatatcctgaacatatttctacataaagtgaagaaataga

SEQ ID NO: 858030 - DNA, 120 bp, Artificial Sequence
  ENSG00000254319_80 (sequence is synthesized)
gtacagcattactttaaatggttgcagtgtattccacaatatgtctataactaacctgttatgttgggtagttatttatatttcccttttcccattatcgaaataaactatcggtgaaca

SEQ ID NO: 858031 - DNA, 120 bp, Artificial Sequence
  ENSG00000251148_0 (sequence is synthesized)
ctctgagatttcctgctccccacccccgacctccttctgccctgctccctgtcccctctgctccttcccagcacctcggccctcacaggtcctgccacctgggcacctttcctccagccc

SEQ ID NO: 858032 - DNA, 120 bp, Artificial Sequence
  ENSG00000251148_1 (sequence is synthesized)
cttcccttcattcaggcctcagcaaatgtcagcgcctgcaggaggcctccccagattgctctcacaaaaggagctgcctcactggcacccttcacctcatgaaacaattctaatttcttt

SEQ ID NO: 858033 - DNA, 120 bp, Artificial Sequence
  ENSG00000251148_2 (sequence is synthesized)
tctgctgaatgcacacatggggtgggactgctgagcctgacagaggggagcagccgggatccaggcacacctgcccacagcttggctgacagcatggcttgccccaggccctcgagagca

SEQ ID NO: 858034 - DNA, 120 bp, Artificial Sequence
  ENSG00000251148_3 (sequence is synthesized)
ctactgtctttaactgaatccttcctggccaagggcagatatgctcccaggacgtccactccactcctgtgtggccggtgcccccttccagccccacaccgcccaggaggctccttctcc

SEQ ID NO: 858035 - DNA, 120 bp, Artificial Sequence
  ENSG00000259334_0 (sequence is synthesized)
ggttgaaagatccttcagtaccagccaactctctctcctggttccatgttcactctgctactttctaattattactccaggttggagggatggatgatggacaacaacttttctcatcac

SEQ ID NO: 858036 - DNA, 120 bp, Artificial Sequence
  ENSG00000259334_1 (sequence is synthesized)
tggaagggcatgttccccactgaaactgaatccactgttttttgtttgtttgtttatttgtttatttttgtttttgagacagcgtctggctttgttgcccagactggagtgcactggtgc

SEQ ID NO: 858037 - DNA, 120 bp, Artificial Sequence
  ENSG00000259334_2 (sequence is synthesized)
agcctgaaactggcagtcagatttcacaggcttcagaccacagaggagcactaggaccccaccagaggtggtccggaggctgacctgaaggccctggggatgggctatgcaagctgattg

SEQ ID NO: 858038 - DNA, 120 bp, Artificial Sequence
  ENSG00000259334_3 (sequence is synthesized)
ctcactgcgagtagcaagagtatgtgtttttctggaaggaatgattggaatatccaaggacatgaggggagaagaaagcggtaaaatggcatttgctgtaaaagagtgggaaaaaaattg

SEQ ID NO: 858039 - DNA, 120 bp, Artificial Sequence
  ENSG00000259334_4 (sequence is synthesized)
aattactccaaggttcgttgtgttcttccagctccatctatgataaagagaatgaacaactaggtgttttccttctggacaatgattatgacacagattactgctgggaccagaagtatt

SEQ ID NO: 858040 - DNA, 120 bp, Artificial Sequence
  ENSG00000259334_5 (sequence is synthesized)
gccactttggacaacatggaatagaaggattattgagaatcacttataatgagatgttacttcaaattaggaaaaatttgataaacaaatttataatacaaatgattataaaaacctaaa

SEQ ID NO: 858041 - DNA, 120 bp, Artificial Sequence
  ENSG00000259336_0 (sequence is synthesized)
caaagagaggaaggcacagttgcttctggtcatgattccgagatcagtcacctgcctccttcatggatagtaagagttgcagacactgctggaagcacagatggacaagatggcatctgc

SEQ ID NO: 858042 - DNA, 120 bp, Artificial Sequence
  ENSG00000259336_1 (sequence is synthesized)
gctgcttctggtatctgtgacccatttacccagaggagaaattatccatgcagcatgctggtttaacatttcgatcaacaaacaacaactccaccacccagcttgaggagtgagatcttc

SEQ ID NO: 858043 - DNA, 120 bp, Artificial Sequence
  ENSG00000259336_2 (sequence is synthesized)
actctaactgttctcagcacagtctcctggtgcaaagctggactaagaattttaacattacactttgcacctcttttattcaatggtaagacccaaaataaacctttctgcctaggtatg

SEQ ID NO: 858044 - DNA, 120 bp, Artificial Sequence
  ENSG00000259336_3 (sequence is synthesized)
aacatctcttttgcttcaaaggttcgaaagtattctctgtcaacacaaactccctgacctccatgcttagagctgcgtaaaagttaacttcttctgagccacttgttgaaacttgtaaat

SEQ ID NO: 858045 - DNA, 120 bp, Artificial Sequence
  ENSG00000259336_4 (sequence is synthesized)
gaactgacttttctgcagttgtgacttatcaattacatcagcattatcatttcttgcccactggcagaggagttatagttgtagatgggagtcttatcgggcattcggtatgacttcctt

SEQ ID NO: 858046 - DNA, 120 bp, Artificial Sequence
  ENSG00000259336_5 (sequence is synthesized)
ggaaagagacaggtgtacactagagctttcaaaatctatttagagacccagcatctagcagaaaataatttttttctatacagcactttgttgtttttacccactattgtgctatgcatg

SEQ ID NO: 858047 - DNA, 120 bp, Artificial Sequence
  ENSG00000259336_6 (sequence is synthesized)
cattgtagcgcattaccttacttaatcttcttggtaattctctaaggtacaaggagattaaaactgacttgggcaaggacattacaaactggagagccaggacttgaacctcggtaatct

SEQ ID NO: 858048 - DNA, 120 bp, Artificial Sequence
  ENSG00000259336_7 (sequence is synthesized)
atctgacaccaaagttcttattcctaaccacttcatttatactgatactctaagaatttcctttctataactaaaattatgtattaaattttttacatttattagaagaataaattctaa

SEQ ID NO: 858049 - DNA, 120 bp, Artificial Sequence
  ENSG00000259336_8 (sequence is synthesized)
ataaaaactaactcttggccaatatggaagcattttattagtgtactgaagatagaatttgagatcagaggcggggtacatttacttctaatttacgagttggtacatgggagcagaaaa

SEQ ID NO: 858050 - DNA, 120 bp, Artificial Sequence
  ENSG00000259336_9 (sequence is synthesized)
tgtggtaataagagtttttctgcctttttagacattcagcccattttttcaccagattattggtgagatgcatgttctgtagtgttacagcttacccaccatagtcaaaatgttctgtag

SEQ ID NO: 858051 - DNA, 120 bp, Artificial Sequence
  ENSG00000259336_10 (sequence is synthesized)
agctatttaagtagatgtgatgagggtttgttttaagtaaagggtgaatgtgactttcattattctctgtgatatataaacatgaattaataaaggtttctcttgaaacttgttcaagaa

SEQ ID NO: 858052 - DNA, 120 bp, Artificial Sequence
  ENSG00000259337_0 (sequence is synthesized)
atggactggacctggagcatccttttcttggtggcagcagcaacaggtgcccactcccaggtgcagctggtgcagtctggagctgaggtgaagaagcctagagcctcagtgaaggtctcc

SEQ ID NO: 858053 - DNA, 120 bp, Artificial Sequence
  ENSG00000259337_1 (sequence is synthesized)
ctacccacagaagctccagggcagagtcaccatgaccagagacacatccacgagcacagcctacatggagctgagcagcctgagatctgacgacatggccgtgtattactgtgcgagaga

SEQ ID NO: 858054 - DNA, 65 bp, Artificial Sequence
  ENSG00000259331_0 (sequence is synthesized)
aaaaaagagacctgagtggtttttgtttatcttttttttttttaggcagggtcttgctctgtagc

SEQ ID NO: 858055 - DNA, 69 bp, Artificial Sequence
  ENSG00000259331_1 (sequence is synthesized)
tggctcactgcagcctctgcctcccgggtccaacgcaccactatgcccagctaacttttgtatttttag

SEQ ID NO: 858056 - DNA, 120 bp, Artificial Sequence
  ENSG00000259331_2 (sequence is synthesized)
ggagatatgggggaaaatataccttcatcttcctattttgttccagactgattgtctgcctgttctccataaacttcttccctctccccactcccagtcacccagattggggaactgacc

SEQ ID NO: 858057 - DNA, 120 bp, Artificial Sequence
  ENSG00000259331_3 (sequence is synthesized)
ttttgaattcgatggcagtcatagcaagccccagtcattgttggtaatatttctaaagcttctgaaggtcacctaggattaagataggtgccgcatgctgctactttaattatgaaagac

SEQ ID NO: 858058 - DNA, 120 bp, Artificial Sequence
  ENSG00000259331_4 (sequence is synthesized)
acgagaaataaaggaagcccttggaaagaaaagaagaaaatccctgccacagcccaacagaatagagaagcggctgtctgaagaggacagagatttgagataaagaggcacatctatttc

SEQ ID NO: 858059 - DNA, 120 bp, Artificial Sequence
  ENSG00000251490_0 (sequence is synthesized)
tattgctctattttttgtttctgctccaattatgcataggtgtctgagggcaagggttgaatgaggagaaaaagaaagaaacaagaagataatgaacttagctttaaagatgttggaccc

SEQ ID NO: 858060 - DNA, 120 bp, Artificial Sequence
  ENSG00000251490_1 (sequence is synthesized)
tttgattaagttggattgtttttccaagaagcgtactggaagaaacaacctttcttcctactgagtgtgattagaagcatggctctcctgctaacgactggcctccgtcttgtgaccaga

SEQ ID NO: 858061 - DNA, 120 bp, Artificial Sequence
  ENSG00000251490_2 (sequence is synthesized)
cttgatcaaggctttgcagacatcttccaagccagtgatatgtcttcattatttaagacagtttgagttttatttatcattatatgcaacagattcctgaacaatgcactcatgtggaat

SEQ ID NO: 858062 - DNA, 120 bp, Artificial Sequence
  ENSG00000251490_3 (sequence is synthesized)
gacagcttctattcacttgctatctgaaaacatttcttaacacataattcccatttcctttttcccattattttgaagaaaaaagaactataatttcaaatcatagctcattgtctattc

SEQ ID NO: 858063 - DNA, 120 bp, Artificial Sequence
  ENSG00000251490_4 (sequence is synthesized)
aagttcaagatcaaccattttctcaccagatactgtaatctcagttctttcaaagagatctcacatgtctgttactaaattttaattatttaccttgtttttcatatttttatatcaaaa

SEQ ID NO: 858064 - DNA, 120 bp, Artificial Sequence
  ENSG00000251497_0 (sequence is synthesized)
gttgtgcaacatccccaccatccttctccagaaccaattcaccttccccagctgaactctacacattaaacaataactccccattccctcttcaccagccccagcactcactgttctact

SEQ ID NO: 858065 - DNA, 120 bp, Artificial Sequence
  ENSG00000251497_1 (sequence is synthesized)
gtctgtcgctgtgcatttgacaactctagggacctcatcatataatcatgaatggagtctctacgagggcagggatgttggttggctgtatcctcgggctggaagagcactggcacgcag

SEQ ID NO: 858066 - DNA, 120 bp, Artificial Sequence
  ENSG00000251497_2 (sequence is synthesized)
caggcactgaatagaatttctaaatatacaaacggatgaaccaatggatggatggatgaatgaagaccctgtataggtcaatgcctcaaatgtctgtgcctggcctggagttatgtccct

SEQ ID NO: 858067 - DNA, 120 bp, Artificial Sequence
  ENSG00000251497_3 (sequence is synthesized)
cacccccactgtagactaactcctggtcccaccctacggctttggaactgaagccacaggcctaccatccctgagaggtagcggtgctcagcgtggcaggacgccccacttgatggtagg

SEQ ID NO: 858068 - DNA, 120 bp, Artificial Sequence
  ENSG00000251497_4 (sequence is synthesized)
atgtgccctggagcctcacaaggcagcagccaccaggaagaggcatggaggccaggaaggtcctggaacaccagaatttggccaacagagcctgaagccagcacatcgtggaggggcagc

SEQ ID NO: 858069 - DNA, 120 bp, Artificial Sequence
  ENSG00000251497_5 (sequence is synthesized)
agcctgggggcattcgggagacctggagatgtggcagctggccaggagctggggtacaaccttgacaatcactaacctctcacttcctcgtcctgccaggctatttatagcctccctctc

SEQ ID NO: 858070 - DNA, 120 bp, Artificial Sequence
  ENSG00000251497_6 (sequence is synthesized)
tctgaaaactccttcacccatttttctgagcttaacaagcttggtgaattgaaatcaggtggaccacctccccaacctcagcaagcctgctggggtgactgcactcaggccaggcctgct

SEQ ID NO: 858071 - DNA, 120 bp, Artificial Sequence
  ENSG00000251497_7 (sequence is synthesized)
ggcagctcctgctccatgacagggacccttgagggcctgctgagagtcacagggttggggtgaccccgggaaggtggcatctaaagagagggcagcagctgggcacccaggcagacctca

SEQ ID NO: 858072 - DNA, 120 bp, Artificial Sequence
  ENSG00000251497_8 (sequence is synthesized)
aatgtctgggcaggggctgtaaaattggaataggtccccccccactccttaatgtggtggcagagacccctgaggggaaatgcagagggccttggttctcggctgggctgtggagctggg

SEQ ID NO: 858073 - DNA, 120 bp, Artificial Sequence
  ENSG00000251497_9 (sequence is synthesized)
cactcagggagtttcacatagccacgaagctgctttctcaggctcctctggcagggagcgtcaggatgagaatccagacctgactgccacccagccctctcacttcgcagatgcaaaaat

SEQ ID NO: 858074 - DNA, 120 bp, Artificial Sequence
  ENSG00000251497_10 (sequence is synthesized)
ccagactcagaaagggaggtaacttctccaacagggcggggtctgaagcccagggtcccgaccccaccaagctggccctgcaggagcctcctgagaggtgtctcgggagcagacccaggg

SEQ ID NO: 858075 - DNA, 120 bp, Artificial Sequence
  ENSG00000251497_11 (sequence is synthesized)
gaagggggcactgtgcactcttgccgggtaggcaaaagtctgtctgcttcttggcagctgtgtggcttcaaagcccagacagcagggactgaagactgagcaagccacccctctcctgtc

SEQ ID NO: 858076 - DNA, 120 bp, Artificial Sequence
  ENSG00000251497_12 (sequence is synthesized)
ccagacccacctgaacccaccaaagctgggaaaggaggggtagtggagactccagaaaaacaggaaaaatttaaactcaaccactaagtaaagcatcattaactcctgttgtgctgagcc

SEQ ID NO: 858077 - DNA, 120 bp, Artificial Sequence
  ENSG00000251497_13 (sequence is synthesized)
cgatggtgaccccagaagggctcagctcaccccaggcctcctccctgcttcaggaaaaacaaacagattgggacagtggaaaaacagctgtacctttaaattatctggcccacagatatg

SEQ ID NO: 858078 - DNA, 120 bp, Artificial Sequence
  ENSG00000251497_14 (sequence is synthesized)
aaaaacatttgcatgctgaagctgtttgcatcttcggttatttttagggtgaacccagttgcctccccttggaaccagatgaagccccagaggcacgtagtcctttttcccagacggggg

SEQ ID NO: 858079 - DNA, 120 bp, Artificial Sequence
  ENSG00000251497_15 (sequence is synthesized)
tcctggtcctgtttccctgggaataaggcttgagcatgagctctctgggacccagcccccgaccagaaccacaccgtgcattcaggcttgggaggaactggagcaccagggagccaaggc

SEQ ID NO: 858080 - DNA, 120 bp, Artificial Sequence
  ENSG00000251497_16 (sequence is synthesized)
tgcaactttgaacatttgccactgctgacatcgtggccacccacctggggccagaaagagcccctccgctgcccccagagcatgggtgaagagacgaacgcttagcctactacctcctct

SEQ ID NO: 858081 - DNA, 120 bp, Artificial Sequence
  ENSG00000251497_17 (sequence is synthesized)
catgccaggcccagctgatgggaatattttgctgagatatttctagcaccagcagcaattaaagcagattttctcttccactccccttccccaaaacaagaataaatcagttctaccaat

SEQ ID NO: 858082 - DNA, 120 bp, Artificial Sequence
  ENSG00000227660_0 (sequence is synthesized)
gcgccacgctccatggaggcgccaaggagaaggcctgggaagggaagagtgaaccttccctggtggagggcccactcctcaggcagtggggagaccgccttttgcatgcgacaggactta

SEQ ID NO: 858083 - DNA, 120 bp, Artificial Sequence
  ENSG00000227660_1 (sequence is synthesized)
ccagttactattggcaccggaaccaccatctgagatacaggagaagacagaaatggaagcaaaggaagatggaaaaatagaaaacagagacccccaagaggttgaacagcttgccgagaa

SEQ ID NO: 858084 - DNA, 120 bp, Artificial Sequence
  ENSG00000227660_2 (sequence is synthesized)
gaattaaatgaagactaaactcctgtacacgtgtttgttggtagaggccatcacagaatatggccaccatactgtgatctgccaacccaattaagatactggccatggcttctaatttgt

SEQ ID NO: 858085 - DNA, 120 bp, Artificial Sequence
  ENSG00000227660_3 (sequence is synthesized)
gttttacactgttcagacataaatatttaaaatttgttgcattgcaatctgtttggttgtaaagatttgacctatgaagcaagaagtgttcatgaatgaggtttaaggatgtcaggggtg

SEQ ID NO: 858086 - DNA, 120 bp, Artificial Sequence
  ENSG00000227660_4 (sequence is synthesized)
actcagaaggaaacgcgctagaacagcaaggatcagggaagcagcgcttttctctttgcaagtcataaaatacaatgcctgaaagagctaataagccttgttatctaatcatgtctaata

SEQ ID NO: 858087 - DNA, 120 bp, Artificial Sequence
  ENSG00000223969_0 (sequence is synthesized)
cgggcagcgtctggggacagcgtgttgggctgtggggaggttaccgaaaggaaacgggccgagtccagttgtttgagcggttttctccttccacgagcgtgtgtgaaaaagcgcggagtt

SEQ ID NO: 858088 - DNA, 120 bp, Artificial Sequence
  ENSG00000223969_1 (sequence is synthesized)
aattgatctacttgccaatgactgtaagaaagacaaagaagttgtaaaaacatccaaatgatgttaaacataaattagctcagaatagtttgcagaagataaactaccagcgtcaaagca

SEQ ID NO: 858089 - DNA, 120 bp, Artificial Sequence
  ENSG00000223969_2 (sequence is synthesized)
tgcattaaaaactggaaagaaattaaaagtgtggtattgaaagatgtacaactgactttggaaaaaggattcctctctaattggtgtttgtaagtgatcgaaataaacatttttaaacta

SEQ ID NO: 858090 - DNA, 120 bp, Artificial Sequence
  ENSG00000223969_3 (sequence is synthesized)
gctgccaggactgcctcctggactgggtgcggtaaggccttagggatgcattcagatgtagggtgccttattttgggccgagaaagctgtcaagtgaaagatccaaggggaaaggtgggc

SEQ ID NO: 858091 - DNA, 120 bp, Artificial Sequence
  ENSG00000223969_4 (sequence is synthesized)
ctggatttttttgttgttgtttgcggtgggttttttgtttgttttgaggtcaagtgcagaagcagcggaagcttcaactgtaaccctccagaaggcagggatcatgctgtttccctcatc

SEQ ID NO: 858092 - DNA, 120 bp, Artificial Sequence
  ENSG00000223969_5 (sequence is synthesized)
cttgtctctgatcttggtgacacatgtaggtgatttctgataggaatacccagttctgcagtaaatagcagacacagcccttggtctttttctattaaattcttagaatatatttctgaa

SEQ ID NO: 858093 - DNA, 120 bp, Artificial Sequence
  ENSG00000223969_6 (sequence is synthesized)
ttgggagatttaaaggctaaacagattccgacctccttttcccccacctcaaaaacagaactttaaaaaggagtgggggaggtgtttataaaatcccaggacaaacagttccagcagcga

SEQ ID NO: 858094 - DNA, 120 bp, Artificial Sequence
  ENSG00000223969_7 (sequence is synthesized)
acacacatcgtcttcattctgaaaaaacctggtgcggcgtgagttccaaacgtcagtctcccaggggagagagaaggaaggtgggggagggcttgattgtgttgatctgaggccagcaaa

SEQ ID NO: 858095 - DNA, 120 bp, Artificial Sequence
  ENSG00000223969_8 (sequence is synthesized)
ctccttatgaatagaaacgttagtaatcttgagtcatttggctgtgtaagtaataagagcttgtgagggtgtgacaatgctgtttggcttgtaggaaattttggggagtttatgttttgt

SEQ ID NO: 858096 - DNA, 120 bp, Artificial Sequence
  ENSG00000223969_9 (sequence is synthesized)
taaaagatttttatcttaaaaactagccccctgccttccttaaattgtgaggtaaaacagtgatttgttccgccctacactgagcacattgtaggatcttgatagattgcggatgataaa

SEQ ID NO: 858097 - DNA, 120 bp, Artificial Sequence
  ENSG00000223969_10 (sequence is synthesized)
agacaggaagtcaagctaagtggggagcagaggggggcaaggaattcgccaggaaagaccatatgagttaaaacgcaaagctgttggatcctggctgccatgtctagataattacagaca

SEQ ID NO: 858098 - DNA, 120 bp, Artificial Sequence
  ENSG00000223969_11 (sequence is synthesized)
gcaccaagggtggcctcataccggaaaaaagtttgacttttaccacttcctcaggttagttagggagaaagttttcagcagttatgaatgaaaagacaaatgcaaccaatcaaaacacta

SEQ ID NO: 858099 - DNA, 120 bp, Artificial Sequence
  ENSG00000223969_12 (sequence is synthesized)
atgggttgtacgagtcaacaaacacgaagaaatattaatttaacgaactttcactattatacacctgtgactgttatccactgtgacaatggctgtttcaaatatataatatgttaaata

SEQ ID NO: 858100 - DNA, 89 bp, Artificial Sequence
  ENSG00000223969_13 (sequence is synthesized)
ctgtgacaatggctgtttcaaatatataatatgttaaatatatgtttattttaccttcgcagtatttttttttttttttccgagacagg

SEQ ID NO: 858101 - DNA, 89 bp, Artificial Sequence
  ENSG00000223969_14 (sequence is synthesized)
gaaacggggtttcatcatgttaccgacgctggtctcctactcttgagctcaagcaatccgcccgccttgacctcccaaagttctgggat

SEQ ID NO: 858102 - DNA, 120 bp, Artificial Sequence
  ENSG00000223969_15 (sequence is synthesized)
cccaaagttctgggattacaggcgtgcaccaccaccatgctcttccccttcccagtatttctgacttaaaaaaagtagtcagcttcttcttaaattatggtaaaagcatacaaaggtatg

SEQ ID NO: 858103 - DNA, 120 bp, Artificial Sequence
  ENSG00000223969_16 (sequence is synthesized)
atggtaaaagcatacaaaggtatgcaccaattttcttaaatgagatcagtgtgtactgatgtgtgaatatgtacaggctaatttgggagaaaagcatgtttaatattttaaaccatttgt

SEQ ID NO: 858104 - DNA, 120 bp, Artificial Sequence
  ENSG00000223969_17 (sequence is synthesized)
ggaaaaaatgtatacacatctatgtgttcctatatgcatagaatatttctggaaaaaagaacagaaaactgttgattgtatatccagaacagagagaacttttccctttgcaatttatac

SEQ ID NO: 858105 - DNA, 120 bp, Artificial Sequence
  ENSG00000223969_18 (sequence is synthesized)
ctttaagtatagtttgaatgttctaagaatgctttacttttataataataaaaatactaatataaacataatgaatattttccttttccctaccccacttcaaaacttcagctctcccaa

SEQ ID NO: 858106 - DNA, 120 bp, Artificial Sequence
  ENSG00000223969_19 (sequence is synthesized)
cacctgttaagcctgggccaaataaagcttggcaattatgagtaaccaactttccattatatgctcatcttgctccctttcctggttatattttaaaagagcaaattttgcaagaaactg

SEQ ID NO: 858107 - DNA, 120 bp, Artificial Sequence
  ENSG00000223969_20 (sequence is synthesized)
caatgcaaagaaggacatttttaacttgacgcttttaagatatgtatacttattcaactctttctactattatttgtttcacatttgccttcatcttaaacagtgtaagttcagggaccc

SEQ ID NO: 858108 - DNA, 120 bp, Artificial Sequence
  ENSG00000223969_21 (sequence is synthesized)
taagatatgaaacacacagtgcctgttgcatagagaatgtaaattaatgtttgtcaaataaatatagaatggattgctatctctgagaagtgatgtgttgtccttggaaacaaagatgac

SEQ ID NO: 858109 - DNA, 120 bp, Artificial Sequence
  ENSG00000223969_22 (sequence is synthesized)
tatccagcatctgtgtagcatgttttttcagtaggagaatggatctgtgccagttctccatctcaacttctggtttacaaggttatagttttgcatggcctgaattaaaggtgcagtgtt

SEQ ID NO: 858110 - DNA, 120 bp, Artificial Sequence
  ENSG00000223969_23 (sequence is synthesized)
caagtacaaagagataagcttatctagaggctgaacccaacatgggttgaccttaaccaaattcaccaattaaaggatacaagtgtattggagttcagtagtaacaaaagtggctgggga

SEQ ID NO: 858111 - DNA, 120 bp, Artificial Sequence
  ENSG00000223969_24 (sequence is synthesized)
cccaggactcatgagttctagtccctactgtctatcactaggtgcattgtagccttagacaagtaagtgatttacctattttcttatctataaaatgaggggcttgaactagataacctc

SEQ ID NO: 858112 - DNA, 120 bp, Artificial Sequence
  ENSG00000223969_25 (sequence is synthesized)
taggtccattcatagctgcaaaattctaattctaaagttaatggtgagccagaagcaattacccatacctacagtctcagctactcaggtggcttaggtgggaggatctcttgagcccag

SEQ ID NO: 858113 - DNA, 120 bp, Artificial Sequence
  ENSG00000223969_26 (sequence is synthesized)
gagtttaagaccagcctgggcaacacagcaagaacccatctctaatagataaataaaatgtaatgatgaaattttccctcttccatcttatatactatagatagatatattaatgaagag

SEQ ID NO: 858114 - DNA, 120 bp, Artificial Sequence
  ENSG00000223969_27 (sequence is synthesized)
taagtcatacacaaataagatagacaaggattcattgccaaaaattatgtgaaatttaagatacatcatttctagtcacattacatatacattatgcttttattataaaataaaatgtgg

SEQ ID NO: 858115 - DNA, 120 bp, Artificial Sequence
  ENSG00000223969_28 (sequence is synthesized)
atattttccacataagaaaaatatcaggctagtatgctggtagtagattataagggaaagaatcctaatttaagtaagataaaatataaaggatttaattagaatccaaaattccagcaa

SEQ ID NO: 858116 - DNA, 120 bp, Artificial Sequence
  ENSG00000223969_29 (sequence is synthesized)
aagcagacttattgatctgaaacagtttttaaaatattatcagagaaaagaaatccatgaaacaaggataccaagaacatgaagaatagagctggaaaatgagtttcaaaaagatatgtt

SEQ ID NO: 858117 - DNA, 120 bp, Artificial Sequence
  ENSG00000223969_30 (sequence is synthesized)
tataatgtaaagttttagaatttagccaaagcatagatagttaaagattaagacatagtgccagagtataattattaaagtggtagacatttacattattaaatatcctcttagagctct

SEQ ID NO: 858118 - DNA, 120 bp, Artificial Sequence
  ENSG00000223969_31 (sequence is synthesized)
aaatagtcaacctatttaactagttttaggatcaaatttatcctttttgaacacatcaggaactgaagtaacacaaggttaagtgacttgtacaaagttctcagtgagtcatcagtaaaa

SEQ ID NO: 858119 - DNA, 120 bp, Artificial Sequence
  ENSG00000223969_32 (sequence is synthesized)
ttggtacattgactctaaaactcttgtcaccaacccttatgttccaactattggacagtatccaaacttaaagagttcttttttttttttctttgacaaagagcaaattgaaatcagaaa

SEQ ID NO: 858120 - DNA, 120 bp, Artificial Sequence
  ENSG00000223969_33 (sequence is synthesized)
ggggagtaaaatggaaggttccagaaaccagtgtattcacaactcaggtcaatgaaggcttccctcatctctcctccttgttccaccacccatcctttgcctactccttcctaattcaga

SEQ ID NO: 858121 - DNA, 120 bp, Artificial Sequence
  ENSG00000223969_34 (sequence is synthesized)
gccttttcacgtttacagaaatcactgtctgctgacacaaaacctccagtcttgttcgaaaatgagacctacatttgcttattttataggtaattgtacattttttcatcctacatctca

SEQ ID NO: 858122 - DNA, 120 bp, Artificial Sequence
  ENSG00000223969_35 (sequence is synthesized)
ctctattaaatggaacaagttcgagagacattcctaaatgtccagacaactccacagcgcgcatttctctccagcagcgggaagattcagagacctcgagactgaacacccaaatctcgc

SEQ ID NO: 858123 - DNA, 120 bp, Artificial Sequence
  ENSG00000257660_0 (sequence is synthesized)
ctgccccagccccagcccccacctagccattcccgccctgcctgtcacggccctgcgccctcccgcgggaactcagtttaataattaattaagctctcattccacaaggcgccagttatt

SEQ ID NO: 858124 - DNA, 120 bp, Artificial Sequence
  ENSG00000257660_1 (sequence is synthesized)
ctccaggatgtacgtaggaccagccctccctgcagtcctgtccttcaagactcaagtcttgtccactccaaatcaccactgggattcctaagtccaggacagagcttcaggcaaggaaaa

SEQ ID NO: 858125 - DNA, 120 bp, Artificial Sequence
  ENSG00000257660_2 (sequence is synthesized)
gaagagttgggaaagccagtttccaacatttatcagccacgtgtacctgcaaactatataccttgggtaaatcatcaatctcttgaaatgggaataaaaccatctgccttgtctttctta

SEQ ID NO: 858126 - DNA, 120 bp, Artificial Sequence
  ENSG00000257660_3 (sequence is synthesized)
caagctccttttgtctgggcatccccctccccctccccagaagtgggggccgagttgcccactccccttcctagcagcgggttatttccagcacggagcagctgcccaagttacctggga

SEQ ID NO: 858127 - DNA, 120 bp, Artificial Sequence
  ENSG00000257663_0 (sequence is synthesized)
ggcatctggaagactgctccccacagcaagaagtggtggctcttctgtacagtggagaaagaagggggaccccaccagggctatggagagacagtagaggcaggactgaaccgtcagcaa

SEQ ID NO: 858128 - DNA, 120 bp, Artificial Sequence
  ENSG00000257663_1 (sequence is synthesized)
agattaaaaggatgacctgaggctggcaaccacaaaaccaagaagccagcgggggctgccccttccaagtctcaccaatgacccagagcaggttccagagcccaaaggcccaaaagtgca

SEQ ID NO: 858129 - DNA, 120 bp, Artificial Sequence
  ENSG00000257663_2 (sequence is synthesized)
ccagcgacgctcagagggcaagggtgtctttgatgagcctgcgcatggtggtggtgactgaggtgcccagggcatcagtgatctggaaggagatcttgtacaggtagggctgcacgtccc

SEQ ID NO: 858130 - DNA, 120 bp, Artificial Sequence
  ENSG00000257663_3 (sequence is synthesized)
gcaagcctgtgtcaaacacgttatccacctccgactgtgtgggcatcttgggcaagtactcatgccgattcatcacctccacgatgttgatgatcttctcgcagagtttctcacccacct

SEQ ID NO: 858131 - DNA, 120 bp, Artificial Sequence
  ENSG00000257663_4 (sequence is synthesized)
tctcccggcagatctgccgctcctgctccgtggccagggctaccacatgcaccttgaccgtccacacttcccatgggatgcactcgtctgagaatggccagcgagacttcttcttctggt

SEQ ID NO: 858132 - DNA, 120 bp, Artificial Sequence
  ENSG00000283375_0 (sequence is synthesized)
aatacaaatctactggtgctgaaaactcagagcttaggaaacacagcctagctacctgtagagtatcaacttaaaaattataatgccatttctatgaagtcattacttttataggactag

SEQ ID NO: 858133 - DNA, 120 bp, Artificial Sequence
  ENSG00000283375_1 (sequence is synthesized)
gctgggtgtccaagcaagccacttttctgggtcagggtttcagtggtaccatagatggctgccagtctcaatgtacactttggcccatttatctttataaatcataccatatagcttcga

SEQ ID NO: 858134 - DNA, 120 bp, Artificial Sequence
  ENSG00000227089_0 (sequence is synthesized)
aagaggaagttaatatatatgtttctcccaaaagtgtctttgagcacccaaaagtactagagtcttgccttcttccttgtgtgattatgaatatgttgaaaagtagtgtgtggagaagtc

SEQ ID NO: 858135 - DNA, 120 bp, Artificial Sequence
  ENSG00000227089_1 (sequence is synthesized)
tggccaagttcaaagtcccgagcagatcccatgacttcctccctgcagggcagacatctgaccattttttttttctttacagattttactggagatttgtggttttgcagggaggatcac

SEQ ID NO: 858136 - DNA, 120 bp, Artificial Sequence
  ENSG00000227089_2 (sequence is synthesized)
atggcacatggcagatcacacagccttcaactatattcctttctcctttttatccccacccgtatgtaccacattgaaaataatgaattaaatcttcagaaaataatgatctcaaaggaa

SEQ ID NO: 858137 - DNA, 120 bp, Artificial Sequence
  ENSG00000227088_0 (sequence is synthesized)
ctgccttctgggttcaagtgattctcgtgcctcagactcccaagtagctaggattacaggtcatctgaatatccaggcacaacccaggcatactagaccttgatcacactggaagtgcgt

SEQ ID NO: 858138 - DNA, 120 bp, Artificial Sequence
  ENSG00000227088_1 (sequence is synthesized)
tgtgtaaagcaagaaaacatagggacagaaatacaacactggagagatcacttgatgtcatttctgatggcttttatccatcctgcccaaataaaataaacaaattaccctgctacttta

SEQ ID NO: 858139 - DNA, 120 bp, Artificial Sequence
  ENSG00000227088_2 (sequence is synthesized)
gctgttattctgtgagcattacctgataagaactaatcagatgacagatggaatctgaagcttgttctgatgaatttttgagactaacaaaatgatatttgtgtccagaaccagttaaag

SEQ ID NO: 858140 - DNA, 120 bp, Artificial Sequence
  ENSG00000227088_3 (sequence is synthesized)
agctgtggcagttctaaggaaaggagaatggtttgaaaatggtaatgaggagaaagaatgacactgacaccagctccaggtcccgtggaatgaaatctatgacagtttcttgctctgtca

SEQ ID NO: 858141 - DNA, 120 bp, Artificial Sequence
  ENSG00000227088_4 (sequence is synthesized)
cccaggctggagtgtaatggtgtgatcctagctcacggcagccttgaattcccaggatcaagtgattctcccacctcagcttctggagtagccgggaatacagaatctttctcctccctt

SEQ ID NO: 858142 - DNA, 120 bp, Artificial Sequence
  ENSG00000227088_5 (sequence is synthesized)
ctttgtggttcctgaactgataaaaatgagctgcatttgcttactttattggaatacagtcctcccataacaagactaagtgaaagagaacatgttttccaggggaagaaagcatggact

SEQ ID NO: 858143 - DNA, 120 bp, Artificial Sequence
  ENSG00000227088_6 (sequence is synthesized)
tatacttggtttgtatttagctggattgctctagtgttcctctgatctaaactagctgcttctgcactttttctaactaacccattaatatgctagtaaactaataaccaacatttatat

SEQ ID NO: 858144 - DNA, 120 bp, Artificial Sequence
  ENSG00000227088_7 (sequence is synthesized)
aaggctctatatttaaaatgctttcacattaattatctcactaaattcagtttatcctactccacagagacaacctggtatttctaaagtatagcttctatagaatcattactgagtttt

SEQ ID NO: 858145 - DNA, 120 bp, Artificial Sequence
  ENSG00000227088_8 (sequence is synthesized)
tccattattcctattttatatttatgaaggttattactgttaggtttttaaaagaatcctttcgatagtaacttaagttttcactgaaaagttaggaaataaaaaatataacctaaaaaa

SEQ ID NO: 858146 - DNA, 120 bp, Artificial Sequence
  ENSG00000227083_0 (sequence is synthesized)
acaagtagaagtattgaccctcaaggtcattttagtattgatttcattatgagataatcacattattttctctttatccattgagaataaatagcatgcaatctgtcacagtcactggtt

SEQ ID NO: 858147 - DNA, 120 bp, Artificial Sequence
  ENSG00000227083_1 (sequence is synthesized)
tggctaacttgacttccatgcccagccttattttctcttgcctgcctctaacctagagagtggaaaacctaaatatgcaagtttccagccaaccctgaaaccatagtggccacgtgacta

SEQ ID NO: 858148 - DNA, 120 bp, Artificial Sequence
  ENSG00000227083_2 (sequence is synthesized)
aaaagcttttgcttttttgagaaaaggggacaaatttggctgatgttttatcttcttttgtaatgcctgccttggttatggatgtgacacctaaagttagggaaaccttgaggctgcggt

SEQ ID NO: 858149 - DNA, 120 bp, Artificial Sequence
  ENSG00000227083_3 (sequence is synthesized)
tggaggatcacttctggccaggagtttgaggctacagtgagctacgatcaggccactgcaccccagcttgggcaacaaaataagactccgtctctaaaaaaagtttaagaaaggaaaaaa

SEQ ID NO: 858150 - DNA, 120 bp, Artificial Sequence
  ENSG00000227082_0 (sequence is synthesized)
gccgctgtcgccgccgctttttgcccccgccgccgcggctttttgctgccgcgactttttgccccggtcgccgccgctttttgtcaccgcgactttttgcccccgccaccgaggattttt

SEQ ID NO: 858151 - DNA, 120 bp, Artificial Sequence
  ENSG00000227082_1 (sequence is synthesized)
gtccccgccgccacggctctgagggcaggagcggcagactcggctgccagctctactggcgtcctggcaagggcagcgccgaggggtgctcctggtccagctctcctggctcagggattc

SEQ ID NO: 858152 - DNA, 120 bp, Artificial Sequence
  ENSG00000227082_2 (sequence is synthesized)
tttgcctaggcgccggcgccccgggctccttgcctaggcccctgtggcctgcatagagtggcgctgcctgtggaggcggtgggagagaagaaggagggcggtggtgggggtgatgcggcg

SEQ ID NO: 858153 - DNA, 63 bp, Artificial Sequence
  ENSG00000227082_3 (sequence is synthesized)
gggagagaagaaggagggcggtggtgggggtgatgcggcggccacggagggtggcacaggggc

SEQ ID NO: 858154 - DNA, 120 bp, Artificial Sequence
  ENSG00000227082_4 (sequence is synthesized)
tctaacgacctcacccagcaggagatacagaccctggaggctaatacaaccagttggaaaaatgcgatggataatccattggtgagagaacatctgaagtggtactttgctatcttctaa

SEQ ID NO: 858155 - DNA, 120 bp, Artificial Sequence
  ENSG00000227082_5 (sequence is synthesized)
agctaggtgatgatattctgatctatgagatgcaagaagatgtgatgtgtgggacatccatgaaaactgattaatgagacctgacacaaattagagatcaagcccactacgaccaccacc

SEQ ID NO: 858156 - DNA, 120 bp, Artificial Sequence
  ENSG00000227082_6 (sequence is synthesized)
atttttctcttctatcctatttttttgtgacctctagcatgaccatgatgccaagatctctagcagccacatagtgacctgaggtaaatctgagtatgaaaatcatgtgccaggatggtg

SEQ ID NO: 858157 - DNA, 120 bp, Artificial Sequence
  ENSG00000227082_7 (sequence is synthesized)
tagaaagagggttttggatcctattgacaatggaaagttggtcttcctacctctgaacctctttatgtaagagaagtaacctgagttttaaaagccattattatttccattttctctgct

SEQ ID NO: 858158 - DNA, 120 bp, Artificial Sequence
  ENSG00000227082_8 (sequence is synthesized)
gatgcagacaaacacaagtcctaattttatagagacctaatacgttctggacctcagaaagagattcctggaggaaatgttgttttcaaccactaactctgctaatttcaggccaagtga

SEQ ID NO: 858159 - DNA, 120 bp, Artificial Sequence
  ENSG00000227082_9 (sequence is synthesized)
ggcattatatagacagtctgaccactgccacagttgcatacgttctaaatttgaaataaatcccttactctgtatcacttatagtggatctgcttctctgataaaaccctcactaagaca

SEQ ID NO: 858160 - DNA, 120 bp, Artificial Sequence
  ENSG00000227082_10 (sequence is synthesized)
attatcatccactgtttgtttttcctgtggtaagtatatcattgctgtataaaaataaccttttaattattaactcagttggcccagtttagcatcttttccatcttccattctcaattt

SEQ ID NO: 858161 - DNA, 120 bp, Artificial Sequence
  ENSG00000227082_11 (sequence is synthesized)
gataattaccatctttcataataattatccttcaggtttcacaatacatgtatgttgaatgttaaggctattcttcattgatatttacactttgactccatggtgagagaagctgcagta

SEQ ID NO: 858162 - DNA, 120 bp, Artificial Sequence
  ENSG00000227082_12 (sequence is synthesized)
tctgagaaataaataatttgtatgtgggaggtgtgattttacagctagattatagctcagtttctagttctttcttttagagagatttctcttggtcatctttatagaggtatgaagata

SEQ ID NO: 858163 - DNA, 120 bp, Artificial Sequence
  ENSG00000227082_13 (sequence is synthesized)
tttagttttactgttattatattaacattttaaaaagcagctttctacaaggtatggcatcaggtggaattattcttgctgtgctctcaaataatctccatgctaagtttttgggcctca

SEQ ID NO: 858164 - DNA, 120 bp, Artificial Sequence
  ENSG00000227082_14 (sequence is synthesized)
ctgcagcccctgaacacgtatgtctctctgtacctcctctgtatgatgtagtgaattttttggacctttgaatcacacacaggctttcttggctgttttataccaaaggactttcactaa

SEQ ID NO: 858165 - DNA, 120 bp, Artificial Sequence
  ENSG00000227082_15 (sequence is synthesized)
atgatgatgtcaatatttttttaaaatacaatttaaaaaatggttcaacataaattatctcatttagtcccctgaacaaccttgtgatgtgattttgaacaggaatatcaagacctcagg

SEQ ID NO: 858166 - DNA, 120 bp, Artificial Sequence
  ENSG00000227082_16 (sequence is synthesized)
atctggcatcaaattctggggtttgaatattatttctatcacaaactatttatattactgcttatatgtaagtgacaacctttctattccttattttttccacttgtaaaatcagaaaaa

SEQ ID NO: 858167 - DNA, 120 bp, Artificial Sequence
  ENSG00000227082_17 (sequence is synthesized)
tgacaatgatgagagcaccaaacttatgagcttgcgaagattaaatgtgtgtatgggtttttatcagtttgagagacattatatttccatttgttgtcattctgtcccttccatcagggt

SEQ ID NO: 858168 - DNA, 120 bp, Artificial Sequence
  ENSG00000227082_18 (sequence is synthesized)
aggacctttcttcagtgcattactttgtcccctgaacctagaatggtacctggaatatcattggtgcccaataagtacttgctgaataaatgactgaataaataaatgtaatctgtcaat

SEQ ID NO: 858169 - DNA, 120 bp, Artificial Sequence
  ENSG00000227082_19 (sequence is synthesized)
attttcatctgaagatatgatatctgttttttaccttattttttcaatcatccgaaaggtagtatgcacatttgaaaggtagtcattgttattttcttacaccagtacttgcacttttac

SEQ ID NO: 858170 - DNA, 120 bp, Artificial Sequence
  ENSG00000227082_20 (sequence is synthesized)
aatatgtagcaataatcataagcaaagtatcatgacagagtgagaataaacttaaatctgtaattgcaatttttcttcaccgtggcctccattgtttgtcatgtgtcttggctacgtcag

SEQ ID NO: 858171 - DNA, 120 bp, Artificial Sequence
  ENSG00000227082_21 (sequence is synthesized)
gatggaaagcattgcttttttctatttacaggaccagaattaaatccatgtttcttggctgaccatttggttagtttttgtttgttcatttgttttttcatgaaatgttcatggtggttg

SEQ ID NO: 858172 - DNA, 120 bp, Artificial Sequence
  ENSG00000227082_22 (sequence is synthesized)
ggctggaataggtatagcattttatttatttatactcagctgaaactaagagaaatatttcagaccaagaagtggggacaagagcaatacttgtgtaataatacgatgtaccattttaca

SEQ ID NO: 858173 - DNA, 120 bp, Artificial Sequence
  ENSG00000227082_23 (sequence is synthesized)
ttatttggaagtgctgatgcctgcatctatagcatcagtcaagaaagagaggtaatgaaagagatttcaaatgaatatcagataggctttagtattacataggataagacagacaggatt

SEQ ID NO: 858174 - DNA, 120 bp, Artificial Sequence
  ENSG00000227082_24 (sequence is synthesized)
ggtcagggtatgctggaaaagattttttatcttattttattggctttatttaaatttttttttttttcccagctggaaatctatttatttatttttcttcagtgttacaatgaaacaaca

SEQ ID NO: 858175 - DNA, 120 bp, Artificial Sequence
  ENSG00000227082_25 (sequence is synthesized)
ttgctttatttaaattttataaaaattcaaaccatacagtactttataataaaattgactgcctttggctactctatctctatttccagtgcaactgtggaagtggcactgacagatatg

SEQ ID NO: 858176 - DNA, 120 bp, Artificial Sequence
  ENSG00000227082_26 (sequence is synthesized)
cacacacacacacacacacaatttatatgcaaaatgctcatatgcatgtcatattttttctttattcagcaagttatagtggatattcttttatagcatacgtagcaatggacttctctt

SEQ ID NO: 858177 - DNA, 120 bp, Artificial Sequence
  ENSG00000227082_27 (sequence is synthesized)
ggatattcttttatagcatacgtagcaatggacttctctttttaaagactgcctagaattctgtagttataatacagtcattcatgtaactaattctctaaaaacaagccagatgatatt

SEQ ID NO: 858178 - DNA, 120 bp, Artificial Sequence
  ENSG00000227082_28 (sequence is synthesized)
tactaagaacttactatgggtcaggcacagctctaatagtctaatctcatctaatctcaatacgttcatgagttaggaatggttgttattcccatatgttcccaatgaggaaactgaagc

SEQ ID NO: 858179 - DNA, 120 bp, Artificial Sequence
  ENSG00000227082_29 (sequence is synthesized)
agagagtttaaataatgtgccctaatttacagaattattaaactggtactggaattatgcaaagataatcaggcatcagagtttgtgatgtcaactgttatgtgatactgcaataaacgt

SEQ ID NO: 858180 - DNA, 120 bp, Artificial Sequence
  ENSG00000227082_30 (sequence is synthesized)
ctgtgtccccacccaaatcccatcttaaatcgtaactcctacaattcccacctgtcatgggaggaacctggtggtaggtgattgaattatgggggtgggtctttcctgaactgttctcgt

SEQ ID NO: 858181 - DNA, 83 bp, Artificial Sequence
  ENSG00000227082_31 (sequence is synthesized)
accacccatgtaagatgttgacttgctctttcttgccttctgccatgattgtgagaacttcccactcctgtagaactgttaag

SEQ ID NO: 858182 - DNA, 120 bp, Artificial Sequence
  ENSG00000227082_32 (sequence is synthesized)
tgttgacttgctctttcttgccttctgccatgattgtgagaacttcccactcctgtagaactgttaagtccattaaacctcttgttcttcctagtctcgggtatgtctttatcagcagca

SEQ ID NO: 858183 - DNA, 90 bp, Artificial Sequence
  ENSG00000227082_33 (sequence is synthesized)
actaagctagtgaatcctgaaagaggacaagatgtagagacaaaggtttccctgtgtggcctgtcctttcgccttggccccctgaagtgc

SEQ ID NO: 858184 - DNA, 120 bp, Artificial Sequence
  ENSG00000227082_34 (sequence is synthesized)
tgggattacaggcatgagccaccaggcttggccttatacaatgtatgaaatgctacagcatttaatatttgtcatccataggctaatacaaccagttggaaaaatgcgatggataatcca

SEQ ID NO: 858185 - DNA, 120 bp, Artificial Sequence
  ENSG00000250360_0 (sequence is synthesized)
cacaatccttgggaactttgagacttgaatggttaatctctcagacgaaattatcaccccaacgactgttcacagattagtcgatgcaaatgttaaaaacgtgttggcaagctggatgag

SEQ ID NO: 858186 - DNA, 120 bp, Artificial Sequence
  ENSG00000250360_1 (sequence is synthesized)
caggcaaacgcacataagggtccccagatgcagcgaatgaacaggttttcctcgtaaaaatgatggaggtgaaggtggggatgggggtgctctcctcactccggaatctgaagcgggaga

SEQ ID NO: 858187 - DNA, 120 bp, Artificial Sequence
  ENSG00000250360_2 (sequence is synthesized)
ggcctgctccgctctttccctaggctcctctgcaacatcaggcaaccaaggcctgcgctctccttttcctgaggagactccctggaaccttcaagaaccccccgacagccaccaggatac

SEQ ID NO: 858188 - DNA, 120 bp, Artificial Sequence
  ENSG00000250360_3 (sequence is synthesized)
ccggtctgaatggtttcctaccaagaaagaccccgaagacctgcagttctgtccagaaacgagtttttagggtcacttgaatttgagctgctgcgagggcggtgctttagggagcagagt

SEQ ID NO: 858189 - DNA, 120 bp, Artificial Sequence
  ENSG00000250362_0 (sequence is synthesized)
attgtcccatagctggccctgtgtgtttgcactgattcctcagaataagtttgcagatagcttaacttccagaattcctgagtttcactagtcccccttctttatgatgaattggaaaaa

SEQ ID NO: 858190 - DNA, 120 bp, Artificial Sequence
  ENSG00000250362_1 (sequence is synthesized)
gggtatattctgggataaagcaagaggaaactgggtgcagcaaagatccctagaccatttttcccagtggcccattgctcctgctgcttttttcataccagctgaatctccctaaacccc

SEQ ID NO: 858191 - DNA, 120 bp, Artificial Sequence
  ENSG00000250362_2 (sequence is synthesized)
acgtctgcggcaaagtcttcgtggtgaaacaggcagtcttcagtacaagaagcgtcaatctcagatcttactcatttccaacctgtaccaatcaaaggccctcccagccaagataaaagc

SEQ ID NO: 858192 - DNA, 120 bp, Artificial Sequence
  ENSG00000250362_3 (sequence is synthesized)
tccagagcacatgggaatggccccccagtagctggggcatgcaagctaatgaagtttcatcttccacctctatccaaatatgaccttgctgataccatctcctattagatgacaaatccg

SEQ ID NO: 858193 - DNA, 120 bp, Artificial Sequence
  ENSG00000250362_4 (sequence is synthesized)
gatgtttctattgcatggttgttatttgccacatgcttcctggacaagtttctaggtaaccttaatgtctgtgcttctggggaaggaggagtagaaaataactcacctcttcagtaagtg

SEQ ID NO: 858194 - DNA, 120 bp, Artificial Sequence
  ENSG00000250362_5 (sequence is synthesized)
gttttaaaaatataacagtgtttaaaagcttttagagagcagctctccttccggctgctccagctctgtttgctttgtgataggagcccccgtaacacttcgtgcttggcaacatctgac

SEQ ID NO: 858195 - DNA, 120 bp, Artificial Sequence
  ENSG00000250362_6 (sequence is synthesized)
atgcttcctggacaagtttctagccagctgccatgtgtcaggacactcaggcagcctgtggaaagctgcacatggtgaggaacagagggctccagtcaaacgaccaatgccaacaaccat

SEQ ID NO: 858196 - DNA, 120 bp, Artificial Sequence
  ENSG00000258178_0 (sequence is synthesized)
aaagtagcaataaaatacatttttaatttagttaagcttacttaactaatgatcaaatagattaagttgtataaaattttacaaactttatatttttgcatacacttatcttcctggcat

SEQ ID NO: 858197 - DNA, 120 bp, Artificial Sequence
  ENSG00000258178_1 (sequence is synthesized)
tcttcctggcatttttgaaataaaaaaaatacaagtgcatagggcagaggaggcgattcagttacttctgctatgttattaaatctctggtaaccactatacaatacaatacaatacaat

SEQ ID NO: 858198 - DNA, 120 bp, Artificial Sequence
  ENSG00000258178_2 (sequence is synthesized)
caatacaatacaatacaatacaatacatgtagactcagcatccaaactttattttaccttcaagttctacctgataaagtggtggaataaagatggtattttccataactgtttaataat

SEQ ID NO: 858199 - DNA, 120 bp, Artificial Sequence
  ENSG00000258178_3 (sequence is synthesized)
ataactgtttaataataatcacatgttttatacccattgctttgaagaagaaaccttaagcaactagaaatgtcaatctaaaaggcagaaaagctggaaaaatctcatgaagactagaag

SEQ ID NO: 858200 - DNA, 120 bp, Artificial Sequence
  ENSG00000258178_4 (sequence is synthesized)
aaaatctaaagtttggtaaatctttgctttacagggcttcaagttatagatttttcttttttccttttctcttcccctttctctctctttctcttttttatttttgccatttcttctcag

SEQ ID NO: 858201 - DNA, 120 bp, Artificial Sequence
  ENSG00000258178_5 (sequence is synthesized)
gagcccctgcaatttcaaaccttggaattgaattggatttgaggaggaaaacccatattcagctttaattcaaatgaattttactactttagacaaagactaatttggatcatgattatt

SEQ ID NO: 858202 - DNA, 120 bp, Artificial Sequence
  ENSG00000258178_6 (sequence is synthesized)
ggcctgtgtcccacccattattcacatatagaatgggttgcattatcctctccttggaaatatctttcaaagtgggtaatgagaaaactactttgaagactgtgctgaaggaaatgatgg

SEQ ID NO: 858203 - DNA, 120 bp, Artificial Sequence
  ENSG00000258178_7 (sequence is synthesized)
catgaacaactctagataatttttgtttatttggatataacgtgaatgggcccataccataaactcctattaagctgaatcaccaaaaaaaaatttgatatgaaagtcatacattgaaaa

SEQ ID NO: 858204 - DNA, 120 bp, Artificial Sequence
  ENSG00000258178_8 (sequence is synthesized)
aattcactcttaccactgatttgattgatactgagcctgtaaatatttatttatatgatgtttggcactttattttataaaactaccctttacttaaaataaatcattgtattcacataa

SEQ ID NO: 858205 - DNA, 120 bp, Artificial Sequence
  ENSG00000258175_0 (sequence is synthesized)
aatgagtgtttcttctcgttgttctgtgctcctgtcctgcaccataagagcatgtcccaggtcatcatgttcttttgaccaggctcctggaatgagagacgcttggagctgacctgaact

SEQ ID NO: 858206 - DNA, 120 bp, Artificial Sequence
  ENSG00000258175_1 (sequence is synthesized)
ggacctctagaagcagagatgctgagaacatctgcagatacatgatggattgagcagtccctgagtcatatactctaccagagaatgaatgatgtctggtaaataagatgatgaatctga

SEQ ID NO: 858207 - DNA, 120 bp, Artificial Sequence
  ENSG00000258175_2 (sequence is synthesized)
gttgaaagagaaagaagaatgaattggaaaagcaaatacttctgtgttctactgtcaaatgtgatgcattcaaataagggatgttatgacagaaaaaacaaatcttcctcaacttgtcca

SEQ ID NO: 858208 - DNA, 120 bp, Artificial Sequence
  ENSG00000258175_3 (sequence is synthesized)
catcagttccattccctcatttatagggaagcttgaggaatgtttagtgaaatgctggcaaatagacttcaagagaaagtctaattagtaatgttttttcttctaaggtaagtagagaaa

SEQ ID NO: 858209 - DNA, 120 bp, Artificial Sequence
  ENSG00000258175_4 (sequence is synthesized)
aaaaggtaattatggaaaccccaagtttcgttctcaaatttaagcccaacttaaatatagtttaaggtctttcttcctttaaactcaccactcttactgctttttgattttgtggtggtt

SEQ ID NO: 858210 - DNA, 120 bp, Artificial Sequence
  ENSG00000258177_0 (sequence is synthesized)
ccctcagtaatatccaaagggcgtccagagggtggggaaaatccctacagcacagcttttctccaaaaagaaggtatgcactgcccctattttattttctaacttgattcatagcacgct

SEQ ID NO: 858211 - DNA, 120 bp, Artificial Sequence
  ENSG00000258177_1 (sequence is synthesized)
attattttctttcatcagtgaactacgcagaggggattccaccctccccaagacggccccatgcaaggtcaagggtttaccttgtcataatagtatcgcagggctctgctcagcttatca

SEQ ID NO: 858212 - DNA, 120 bp, Artificial Sequence
  ENSG00000258177_2 (sequence is synthesized)
acttcttctgctttgaggagcttgaattcaccatcgttcgaggtccagcagatcaaatgctcatgtttctgatccagcagcaactgcaacaggaactgccacagcgtgattgcactctcc

SEQ ID NO: 858213 - DNA, 89 bp, Artificial Sequence
  ENSG00000258177_3 (sequence is synthesized)
caactgcaacaggaactgccacagcgtgattgcactctccatacctgcagggagaggaggccaggtttcctgaggcctccccagaaacc

SEQ ID NO: 858214 - DNA, 120 bp, Artificial Sequence
  ENSG00000258171_0 (sequence is synthesized)
gcctcctaaagtgctgggattacaggttattgggttgctgaactcccatgaaccaaaaagaaaacactgaatggtatccaaaccagcctggaaaggacagcgagaaaagccagaaccaag

SEQ ID NO: 858215 - DNA, 120 bp, Artificial Sequence
  ENSG00000258171_1 (sequence is synthesized)
gaaccaaggctgaccagcctgaatgctggtaaatgttatcaagatttctctattcatgctactcaacatcccaaaaagaatcagcataaggccacaaactcaacaaaattccttctcctg

SEQ ID NO: 858216 - DNA, 120 bp, Artificial Sequence
  ENSG00000258171_2 (sequence is synthesized)
ttcattaaactcctgtcctgactccaagttcacacctaaataaacaggcaagcctgtgctctgcaccctgaggaacagtctcctaggctttgtccttgcagagagcccatttccaaggac

SEQ ID NO: 858217 - DNA, 120 bp, Artificial Sequence
  ENSG00000258171_3 (sequence is synthesized)
ccagcttttctcaaggccacatagctcctctctaaagacagccatccccaggggttcagttgatcctgacagctgcgcctacagagaaagaagggaagagagatgggagaggaagatctc

SEQ ID NO: 858218 - DNA, 120 bp, Artificial Sequence
  ENSG00000258171_4 (sequence is synthesized)
ccaggagtcaggatgcaaggtgaagccagctgttgatcagcggtcactcagcagctagaccatgcgacactctccttctgaaggctgcaggctgtgagagtgttctgagtggcatttaag

SEQ ID NO: 858219 - DNA, 120 bp, Artificial Sequence
  ENSG00000258171_5 (sequence is synthesized)
gatagctcccatgcagcgtgccagcttcggcagggcctcctatggtaagccctaaaacacagagggaaaagaataaccaagtggaagtggatcatcatgccatctatcagagacaatgca

SEQ ID NO: 858220 - DNA, 120 bp, Artificial Sequence
  ENSG00000258171_6 (sequence is synthesized)
tgtgagaatgctgctactaaatgaatgaaaaacgctttgtaaactcaaagtctgtggttctcaaacttgagcatgtatctttttttttttttttaaattaaaacgctgatttacttggcc

SEQ ID NO: 858221 - DNA, 120 bp, Artificial Sequence
  ENSG00000258171_7 (sequence is synthesized)
agacaactaagtggccaagagaaagagaagccaaggaagaaaccagagaaaagcagttggagaagcaagaaggcaaccagaagtggccttggtacagctgtgatggggagacaatgacga

SEQ ID NO: 858222 - DNA, 120 bp, Artificial Sequence
  ENSG00000258171_8 (sequence is synthesized)
aacagcaggaactggcactgagagttattggtgtagcttgggctctcccctcatcatcctctccagctgggagtcatgtgacagaagcaagaagcctgtcacagcgcacatgtaaaagag

SEQ ID NO: 858223 - DNA, 120 bp, Artificial Sequence
  ENSG00000258171_9 (sequence is synthesized)
caaactccagacacacacgtcttatctgtgctgacggcccaccttggtgactggaaatgacaccatccaattttttctggccgcaatgttgcacccctgattttttccttcatatgacag

SEQ ID NO: 858224 - DNA, 120 bp, Artificial Sequence
  ENSG00000258171_10 (sequence is synthesized)
gtctcctatcaaaaggagaagaacctgaagaaaacacttctcttccttctctctgcctaggggcagtgaccttggattcaaccaccatcatcccttccagacaccagaggggggagtccc

SEQ ID NO: 858225 - DNA, 120 bp, Artificial Sequence
  ENSG00000258171_11 (sequence is synthesized)
cccctgtgacccatccacttctcttccatgttctttacctccttgctcaggaagccataaagttgagctgagtggaaggtgaatttcattgcaaagtttacacaggctctgctgacaggt

SEQ ID NO: 858226 - DNA, 120 bp, Artificial Sequence
  ENSG00000258171_12 (sequence is synthesized)
tcatgaaaacactactgaatatgttacataccaccaaggctcacagcacatcctgtgttggaagtgatacttttccattaccagtaaacctccttttgtcctaggagctcactgaacagc

SEQ ID NO: 858227 - DNA, 120 bp, Artificial Sequence
  ENSG00000258171_13 (sequence is synthesized)
taaaatcaggtgatatttttatgtggaacatgcaacgtattaagtccttttgctcagtgacccaaaaaggaactaaacggtacccagactagaaatcaatgtcaaattattcaaataaat

SEQ ID NO: 858228 - DNA, 120 bp, Artificial Sequence
  ENSG00000258171_14 (sequence is synthesized)
tccacttaaagaatggtggtttggaaagcgctcagtcagaaagaattctcccaagattagtttactgtgaagtagaagggaagaacgttttaactttggttggaaatctgatgacattac

SEQ ID NO: 858229 - DNA, 120 bp, Artificial Sequence
  ENSG00000258171_15 (sequence is synthesized)
atagaaggtgatgaaacatcctctaagaaacggttctgatccattgtatggcacccccctctcacattcccccattttacccactaaagaagttcttttacaagaggctaaggaaaccaa

SEQ ID NO: 858230 - DNA, 120 bp, Artificial Sequence
  ENSG00000258171_16 (sequence is synthesized)
gcaatataagatctaatcaaaactgagtgctggaaatgtgtggggagaaatccataattaaactgagcaattaactccagaaagttaactggggccaactctgacactgctataaagtta

SEQ ID NO: 858231 - DNA, 120 bp, Artificial Sequence
  ENSG00000258171_17 (sequence is synthesized)
taaaatctccagcatctcatttctttgtccctctacccaatttcccctcaaaggtaagcctctctttctctctcctctcttcttcatatttaataaaactgtttgccagaaaggaaagaa

SEQ ID NO: 858232 - DNA, 120 bp, Artificial Sequence
  ENSG00000258171_18 (sequence is synthesized)
tggccactattacatagacaagatctcaggagcaggcatagtttgtgggggtgggagcatcatgagctaggttcaaacacactgattctgagacatctagggaaccacagaacaagttct

SEQ ID NO: 858233 - DNA, 120 bp, Artificial Sequence
  ENSG00000258171_19 (sequence is synthesized)
gggctggagatgtagatttcatttgagagctgccagtagtagagacggtaattgaagccatgggaatggaggtgattgtccagggagtgtaggtaaagtgagaatagataagtgccaaag

SEQ ID NO: 858234 - DNA, 120 bp, Artificial Sequence
  ENSG00000258170_0 (sequence is synthesized)
cattttgacatctattaactaatataggctctttgaagacagtggaatactgtttgtctccatactgtcaatgcccagcgtaatctctgacaaatgaatttcgctcttgtcgcccaggct

SEQ ID NO: 858235 - DNA, 120 bp, Artificial Sequence
  ENSG00000258172_0 (sequence is synthesized)
gacccagcaggaaggcgccatcatgagaaagggggctctcacaggacaccaactcttgatcttggacttctcatcctccagaactgtgagaaataagtttctattatttataagccaccc

SEQ ID NO: 858236 - DNA, 120 bp, Artificial Sequence
  ENSG00000258172_1 (sequence is synthesized)
agtttatggtgtttataaagagctgagacaaacaccactaaatcttgcccttataatcctgttgataattacgcaagagtaaattttgttctggtctcaaccaaatgattaaaactccga

SEQ ID NO: 858237 - DNA, 120 bp, Artificial Sequence
  ENSG00000258172_2 (sequence is synthesized)
gaactctgagccctgcttacatcctgctggctgggatggggaatgaggctggggtgagcagacacttagaatatgaggacaagagaggagcagctgctctaccagccctgcactgcccac

SEQ ID NO: 858238 - DNA, 120 bp, Artificial Sequence
  ENSG00000258172_3 (sequence is synthesized)
ccagaatgccaccagggagagaactcagcttctctgttgctgaagccacagacatcttgggtctctgttctgtacaactgaactgcatcctgattgatttgggaatgatgcctattacca

SEQ ID NO: 858239 - DNA, 120 bp, Artificial Sequence
  ENSG00000226376_0 (sequence is synthesized)
accagacaccaaatctgctggagtatggacttcctagcttctagaactcttggaaagtgtgcttctgcaacatggcagtcgagccccacatcaaagaagcaaaatatagaataacagcat

SEQ ID NO: 858240 - DNA, 120 bp, Artificial Sequence
  ENSG00000242375_0 (sequence is synthesized)
gtgtctgaatgaagagtgcttgtcaatgatcaactcttgtggtacatcagggaactcacataggtgaaaaaacccatacttaccttgagtctgagaaaacctttggtagaagctcctgtc

SEQ ID NO: 858241 - DNA, 120 bp, Artificial Sequence
  ENSG00000242375_1 (sequence is synthesized)
cataacctgaggttggagaggaccacttgggagcctgtaaccaaaactagaaggtaacttctgggatggacggaggttcccttgaagcagtgccaacctaaatctacctcaggtaagtag

SEQ ID NO: 858242 - DNA, 120 bp, Artificial Sequence
  ENSG00000242375_2 (sequence is synthesized)
ttagattaactttttcaagatttcagaccaaacaagacaacttgtattcagttgatgtattcctatgctttaatgtttttgtttgcccttaattattaaataaacatttgttctgaaaaa

SEQ ID NO: 858243 - DNA, 120 bp, Artificial Sequence
  ENSG00000231986_0 (sequence is synthesized)
gaggaataactattctctaccttcagaaaataatgtatgagagtggccgtgcatcatggtctgtcctgtgagagtcattcaagaaatattgctgattgaaagcaatgtgctgaaccacta

SEQ ID NO: 858244 - DNA, 120 bp, Artificial Sequence
  ENSG00000231986_1 (sequence is synthesized)
ctgatcattgttcagcctctagctttctgttcaactatttcttacattattacacattgggccagtacataatagcagaaacctccatgcatctggagaaagaaaaagaagcagacatag

SEQ ID NO: 858245 - DNA, 120 bp, Artificial Sequence
  ENSG00000231986_2 (sequence is synthesized)
ctgaaaagaggcagcggttgtggctgcaaaagttctagaggctggagggtcctaagtcaaggagctggcagatgatgcgctggagaggacctccttccacatagacagacgttttctctc

SEQ ID NO: 858246 - DNA, 120 bp, Artificial Sequence
  ENSG00000231986_3 (sequence is synthesized)
tgtatcttcacaaactggaaaagacaagggatttttctgaggtctctttcataggggcattaattccattcaagaagagccttgatcacctctcaaaagccccactctcaaatgccatca

SEQ ID NO: 858247 - DNA, 120 bp, Artificial Sequence
  ENSG00000231986_4 (sequence is synthesized)
ctatggggattaggatttcaacataagaattttgagaggacataaactttgtttattgcacatggcaagttgagggggcattttgttttatttttaataaagctttgatatgtgtgtgta

SEQ ID NO: 858248 - DNA, 120 bp, Artificial Sequence
  ENSG00000230120_0 (sequence is synthesized)
acatgcagtattggcacttagacttaatgttgaatgaaggggaggcattttaaaattcacatcaaaaaactgttattctttaaaaaaaatactaatctacaaggtcacttcccctccaag

SEQ ID NO: 858249 - DNA, 120 bp, Artificial Sequence
  ENSG00000230120_1 (sequence is synthesized)
catgacgtctacctttactttctgataatcatgatcggcttgtggggatcaagattactcaggattaaattctggccccatcttgagccgtcatggaaacttggggaagctacttaactt

SEQ ID NO: 858250 - DNA, 120 bp, Artificial Sequence
  ENSG00000230120_2 (sequence is synthesized)
tcaggcttgccagatatttactgttcatcttcatcaaatgaggacagtggtatcccactatatggttttcaattttgtgtaagaaaaacgtgctttatgcattgttagtaaaagaaatat

SEQ ID NO: 858251 - DNA, 120 bp, Artificial Sequence
  ENSG00000230120_3 (sequence is synthesized)
ctgaatatccctgccatggaagaaagaaacagagggagaaaagagagttggactggaaagctcaggcagcccaggatgaataatgcagtcaccacagagggacagggtggccacaaggtg

SEQ ID NO: 858252 - DNA, 120 bp, Artificial Sequence
  ENSG00000230121_0 (sequence is synthesized)
agggttcacttgcagacagcagagtctgccccggctagttacacagaggaggattgattaccggctttcagtgactcccagcatcactgcgggggcggggggtgctgaagaaattgaaga

SEQ ID NO: 858253 - DNA, 120 bp, Artificial Sequence
  ENSG00000230121_1 (sequence is synthesized)
cactccaggctgcctcccaaagccacacagcagaaaggggccaccaagaagctgagattctgtcgtcaccggagagccgcctgcctgcaggccagccctgcatgtgactgttgctgctgc

SEQ ID NO: 858254 - DNA, 120 bp, Artificial Sequence
  ENSG00000230121_2 (sequence is synthesized)
atgcctatggagacatccttgtgaaattagaatagctcttctcagtttatttatggaatcttcttgaagatcaaagatgcagcaccgctgttggttttggtttcccctattataacggag

SEQ ID NO: 858255 - DNA, 120 bp, Artificial Sequence
  ENSG00000230121_3 (sequence is synthesized)
tctgaatgaaaggtggaacaaccctaagatcataatgctgttgatttaatgttggaagctcctccaaggaagggaccatgccatgcatttatttacattttacacaaaggctgtcaaatg

SEQ ID NO: 858256 - DNA, 120 bp, Artificial Sequence
  ENSG00000230121_4 (sequence is synthesized)
gggccatcctagtgcctgcgtgatagggcagctgtccttgaaatgaagtgatcactcaagcccttgttgaatgtgcacaagaatgaatgaatcaatcaataaatgaaccaatgatgctcc

SEQ ID NO: 858257 - DNA, 120 bp, Artificial Sequence
  ENSG00000283994_0 (sequence is synthesized)
agttgagctctatgattattctgatgaagtggattggagaccatcacctttctcttagtaaatatttgtccttcacataccaatcgtcaagtctaaaaattggaccactacaggctctga

SEQ ID NO: 858258 - DNA, 120 bp, Artificial Sequence
  ENSG00000283994_1 (sequence is synthesized)
ccacatgtatgagaagccaaaggacctgtgatctcacctgcctcaatcatgtgccattatttactccacttgcctcttctgaatgggtatgatcccaaccaaacatagtgaaggggaaag

SEQ ID NO: 858259 - DNA, 120 bp, Artificial Sequence
  ENSG00000283994_2 (sequence is synthesized)
tcccaaccaaacatagtgaaggggaaagttaaacaatatttggaaagccatgtatttggaaagccaatgtaaaagtgaaaagaaggccacccacgagagagagagagagagagagagaga

SEQ ID NO: 858260 - DNA, 120 bp, Artificial Sequence
  ENSG00000283994_3 (sequence is synthesized)
tgcaaagcttcagaggtccgaatttggccagtatgtttgctgcaaagccttggaatgctgttttgcagtttcaaaagtgatcatactcagcttcccagaattttttatgcctggaggatg

SEQ ID NO: 858261 - DNA, 120 bp, Artificial Sequence
  ENSG00000283994_4 (sequence is synthesized)
ccacaagaacaagggcagccttgttaacaagttccaatctctcaaaaacaagataggattcggatataaatcatcatttcagctcacaaagccatgttctccaccccactgaagggcttc

SEQ ID NO: 858262 - DNA, 120 bp, Artificial Sequence
  ENSG00000283994_5 (sequence is synthesized)
atttacatctaaaatggttaatactgatctgcaccagaactcctaagtggaggaatgcagctgccatgtgcttagtgactctggggttagggaagaatgacatcaccaaatgtaagcata

SEQ ID NO: 858263 - DNA, 120 bp, Artificial Sequence
  ENSG00000283994_6 (sequence is synthesized)
tccgctcgaagaatacctttccccctcccttcttagcagctgcaatatgaagggctgaaaatgtcacttcaactaatgatgaatgatgcttgacctctggatgggttactcagaatttta

SEQ ID NO: 858264 - DNA, 120 bp, Artificial Sequence
  ENSG00000283994_7 (sequence is synthesized)
tgcaattctaaattaatatgaaagatcccaactcaaaggacttcggccgttaagatttgcttcaaggatagatttgtgtaaagcagttagtagctttggggattttgttgctgttgttat

SEQ ID NO: 858265 - DNA, 120 bp, Artificial Sequence
  ENSG00000283994_8 (sequence is synthesized)
tgtacttggtgggggactgggagactcgtgctctgtaagcaaggtaaaaggcagaatgtgctaacatttttatgtgttatttttttcctgtgagattaatatctttttctactagaaata

SEQ ID NO: 858266 - DNA, 120 bp, Artificial Sequence
  ENSG00000283994_9 (sequence is synthesized)
ttgtcagtaagcagaaccagtttgtgaaaaaaacattctcaaaagggcacaggcccacacgtctttgttgtttttatttgaatataattaattatgtaaagcaatagttagtgtaagatt

SEQ ID NO: 858267 - DNA, 120 bp, Artificial Sequence
  ENSG00000283994_10 (sequence is synthesized)
aacaattagtagattctgtcaagtagtcacacggaaattactaactaattgaactactggtcgtctattgtgtcagaaagcagtactgagtgtcattctttttatctttttactttgttg

SEQ ID NO: 858268 - DNA, 120 bp, Artificial Sequence
  ENSG00000283994_11 (sequence is synthesized)
ttttcacagatcctcttgtttctaagatgtatgtttcacagccgactaataaataaataaccctggttgtaatttcataacatgcaaaaaggtttgaaataaaaacacctgttttaatta

SEQ ID NO: 858269 - DNA, 120 bp, Artificial Sequence
  ENSG00000283991_0 (sequence is synthesized)
gcaagagagaagcacagatgaagcacatgctttgctcctgcaccgctcccacgcctccgcactccagaactgatccttggcagcccgatggggtctcacaatgttgcccaggctggtctt

SEQ ID NO: 858270 - DNA, 120 bp, Artificial Sequence
  ENSG00000283991_1 (sequence is synthesized)
gaactcctgggctcaagcaaaccacctgcctcggtctcccaaggtgctgggatgacaggcctgagccaccacgcccggccaccgccgctcccttacccaggatgatgccgttgggctcct

SEQ ID NO: 858271 - DNA, 120 bp, Artificial Sequence
  ENSG00000283991_2 (sequence is synthesized)
ccctgccaagaggagcgtccacagctgacatccacagctcggccccgccccagcctctgctgcctctccccagcactgcccacggcagagttatgagggaaactcagtacaggttcataa

SEQ ID NO: 858272 - DNA, 120 bp, Artificial Sequence
  ENSG00000283991_3 (sequence is synthesized)
ttaggctgtaaaaatccactccaggctgaaattggccatataagtgctcagtgactgaaaaacaattttgttttgtttccctcaactgcaaaagaaagtggtttgaaaattaagttaaaa

SEQ ID NO: 858273 - DNA, 120 bp, Artificial Sequence
  ENSG00000229953_0 (sequence is synthesized)
tgtcagggacagggcagtattccagcttcagcctgtctacctctggagctctcctgatcaatacatcagagaagatgatggagccctcctgccgctcttggggagagttgcgtcgctgct

SEQ ID NO: 858274 - DNA, 120 bp, Artificial Sequence
  ENSG00000229953_1 (sequence is synthesized)
gtcatcgatgccgtgctggacctcacagcgatagatacctgagtcgttggggcgcagctcgctcagcgccagggagacgtcggtgagcgacgctgggtacgcaggcagtgccacgcggaa

SEQ ID NO: 858275 - DNA, 120 bp, Artificial Sequence
  ENSG00000229953_2 (sequence is synthesized)
ccggtaggcctcgttcaccttgacgcgcactccccgcgccaccagcacctctgcctcccggccccgggacaggaaagtccacttgacccgcggagagcccagcacagcccggcggctcgg

SEQ ID NO: 858276 - DNA, 120 bp, Artificial Sequence
  ENSG00000229953_3 (sequence is synthesized)
gggcgccgccgagcacgccctgcagtggcgcgtcgcccgcgatgcgcacgcgaaaagcgcggtcctctgtgaacgggtggagccggctggaacttaacgctgtcgaccctcagagtccca

SEQ ID NO: 858277 - DNA, 120 bp, Artificial Sequence
  ENSG00000229953_4 (sequence is synthesized)
cccggtggcctccaagccccgctccaggatccctccttccggccccaggattccccggcccccctaggaccaggggccaggggccaggggccagggtcctgcagccctacctctaggtcc

SEQ ID NO: 858278 - DNA, 120 bp, Artificial Sequence
  ENSG00000229953_5 (sequence is synthesized)
tccaggaccaccccgacggtctccagacccatcccccaaagtctcccagtcaattcagcccccaggattccttgccctgctctcagagtcttccacttcctctccaaaattcctagacca

SEQ ID NO: 858279 - DNA, 120 bp, Artificial Sequence
  ENSG00000229951_0 (sequence is synthesized)
agtgcaaaccagtccggctgctttagaaacaagttgttttctgcttccagaaccacccaggagcctgcgtgatgtctcttcccccacccgaccccctcttccctctgccggtctccttgc

SEQ ID NO: 858280 - DNA, 120 bp, Artificial Sequence
  ENSG00000229951_1 (sequence is synthesized)
tccaggatctgcacaagcagaggcggcacagggtttggcttccagttgggaaatgaagctccaagggcagccctactatggcgggctgtgtgacctgggccaagccccttgacatctcca

SEQ ID NO: 858281 - DNA, 120 bp, Artificial Sequence
  ENSG00000229951_2 (sequence is synthesized)
gactcggcttccacatctgccaccaccaggacactggattgaatgttgggtacgttgtaaggcaagggagacacagaagtcctaaaggcaataaagcttttccccactgcccctccatct

SEQ ID NO: 858282 - DNA, 120 bp, Artificial Sequence
  ENSG00000229951_3 (sequence is synthesized)
ggacgagtctcctgccaagcatcttcaagtcccactttgaaacacgattctgccaccttcctgttctgaggatctgggaaagcaagggggaaggggctattgggagtcccgcttgctcca

SEQ ID NO: 858283 - DNA, 120 bp, Artificial Sequence
  ENSG00000229951_4 (sequence is synthesized)
ggcccagaccaggaggctcaggcaggcttatctacttctgatgtggtggggggcccaggatgctgccagggtctcacagccatggtctcacagccactatcagcctgtcctcaagggtat

SEQ ID NO: 858284 - DNA, 120 bp, Artificial Sequence
  ENSG00000229951_5 (sequence is synthesized)
aagagaagctggaagcctagatgggcactgccctcaggcaacttccaatccagccaagaagaataaagagtaacacacaaaatattgggggcatgaggcaataactgtgggtacacctat

SEQ ID NO: 858285 - DNA, 120 bp, Artificial Sequence
  ENSG00000229951_6 (sequence is synthesized)
aaaaacctctaattgggcttacctggtaccagacagtattttaattggatcatatatagtgcattaattcagttaatattcacaacacccctatgaggtagctacaattattatccccat

SEQ ID NO: 858286 - DNA, 120 bp, Artificial Sequence
  ENSG00000229951_7 (sequence is synthesized)
tcgatgatggggaaaactgacatcagaagaggtcaacttgcccaagtttccagagctgaaaagcaacagagctgagatttcactgcaggtattctggccccagagtcttggtacaaatag

SEQ ID NO: 858287 - DNA, 120 bp, Artificial Sequence
  ENSG00000229951_8 (sequence is synthesized)
tgttaatgaacaagtcttcttctggtaagagcaccccaattttcctttggagaacctccacttcctcatttcatgtgccatgggtgaccctacccttgagctcttgaggtgaacacatgg

SEQ ID NO: 858288 - DNA, 120 bp, Artificial Sequence
  ENSG00000229951_9 (sequence is synthesized)
acacacgatccagtcctgaccaaacagaatatctcacttccctggctacagttagtgataggttcaggattgtagcaatgacccaagactggcttctgagagtcacatttgagactgtgg

SEQ ID NO: 858289 - DNA, 120 bp, Artificial Sequence
  ENSG00000229951_10 (sequence is synthesized)
ctcaaactcttagagaagcactcgtttttcaactgagacactacagtctttactactccttgaagacggactaccaggaagaaagccaacctagagggctgcaaagctgagcagtggaga

SEQ ID NO: 858290 - DNA, 120 bp, Artificial Sequence
  ENSG00000229951_11 (sequence is synthesized)
tatcccttttgtgttgaagccaatttgaattggatatctgtcacttacaaccaaaaaggtccaaatgtgctagtgaacacagagcacatactgtgagcaactactctttttcttctttct

SEQ ID NO: 858291 - DNA, 120 bp, Artificial Sequence
  ENSG00000229951_12 (sequence is synthesized)
tacaggtgtgagccaccgcgcccggcccgagcacctaagcttttcaagacatttccagaaaaacaaatgcaggtaagaaaggatcagtcttcaaagaacttggaagctggtgagggatta

SEQ ID NO: 858292 - DNA, 120 bp, Artificial Sequence
  ENSG00000229951_13 (sequence is synthesized)
aaagaacttggaagctggtgagggattacaaagattctcaaataactttaaaacaagtcagaacacaattgacagcacaaggcagctacccgggttctctggttaatgcaaagggtgaga

SEQ ID NO: 858293 - DNA, 120 bp, Artificial Sequence
  ENSG00000229951_14 (sequence is synthesized)
attttctatattggatggaacacatcagaaaagttctcacgaaggtggtagcagtgaaattggcctcagaagtctgataggatgttggcaggtgaaggcagggaagctacagggcagaca

SEQ ID NO: 858294 - DNA, 120 bp, Artificial Sequence
  ENSG00000229951_15 (sequence is synthesized)
gcatgaggaagggcccaggttcagggaagtatgggcatgcaggggcaagtgtaaattgatgggattgcctgggaccagaggaaaggtctaaaacgtacagtctgaggctggggcggggtg

SEQ ID NO: 858295 - DNA, 120 bp, Artificial Sequence
  ENSG00000229951_16 (sequence is synthesized)
gggaaaggatggttctgaggtatctgaagtatctccaaatatctgaagatattccccatggaaaagaaactaggcttatttggagtgaccccagaggacaagactacgactaaaaatgga

SEQ ID NO: 858296 - DNA, 120 bp, Artificial Sequence
  ENSG00000229951_17 (sequence is synthesized)
cgctcgcaaatggaggaagtagacctgacccctgactaaggaagatggtgctacctgtttggggcaaatgttcaaaaagaggctgtgtctgtatggtggatgctgttaaaagggactcag

SEQ ID NO: 858297 - DNA, 120 bp, Artificial Sequence
  ENSG00000229951_18 (sequence is synthesized)
aaaccaaatgagagtctgaattagctgagtttaacattctgtgagttttgtgccagacttgggactactgcagaagaccctgggagagttgggattgaattccaaaggcagtgctgatgg

SEQ ID NO: 858298 - DNA, 120 bp, Artificial Sequence
  ENSG00000229951_19 (sequence is synthesized)
acactgacttgaggagccaggaaagaaggcaggaacagtggtggggatcacagcctcacctgtatctgtgcacttctataaattcacagactgggaatttttaatgtgaactggatatta

SEQ ID NO: 858299 - DNA, 120 bp, Artificial Sequence
  ENSG00000229951_20 (sequence is synthesized)
gatgatgaccaggaattgttttaattctgttaggtgggataataccattcactgtgctgtgtaagataatgtccatattgtttagagatgcatactgaagaatataggatgaaatgacat

SEQ ID NO: 858300 - DNA, 120 bp, Artificial Sequence
  ENSG00000229951_21 (sequence is synthesized)
tccaggtgtggagcagagaaaaggctatacccactgatgaacagggatccacacctggggaagaagcaagtatgactttctctcctgtggctttacacaacctccttgaaattccaagag

SEQ ID NO: 858301 - DNA, 120 bp, Artificial Sequence
  ENSG00000229950_0 (sequence is synthesized)
gcattttaatgtccctctgcttggatttgctacttagtttttctttaatcaggatagggcacagccaaaattggtcagaaaggggagtaaagtgggacacgagcttcaaagtagggaaac

SEQ ID NO: 858302 - DNA, 120 bp, Artificial Sequence
  ENSG00000229950_1 (sequence is synthesized)
caaagaagggagcatccacgtcctctctctgcagcttctcccccgcgttcttcgggcgaatccgagggacgggcgctgcgctggggaaagtttgtcccacccgcgtttcgcagctggttg

SEQ ID NO: 858303 - DNA, 120 bp, Artificial Sequence
  ENSG00000229950_2 (sequence is synthesized)
caaggagaggaggaggagagggagggtcaagctcggagcctgtgaccgcacggatgatcgagccggcgtcgcgcttacctcgcagtcctcgtacttgatattatccgtcaatttccaaag

SEQ ID NO: 858304 - DNA, 120 bp, Artificial Sequence
  ENSG00000229950_3 (sequence is synthesized)
cattttcatggatcggcgtgaacggatatgcccctctcggtctcgcacccaagtggagctactctctggcctaatcgcctcattagcatatcaacaatagtccaattgctcgccagtacc

SEQ ID NO: 858305 - DNA, 120 bp, Artificial Sequence
  ENSG00000229950_4 (sequence is synthesized)
acaatctgccgccggccgctccgacacaggtataaaggcctctctacgccgcgaacttgcttctagagcgcactccagcctgcgaactgataaaaccttcctcgagctccgccgcgaggc

SEQ ID NO: 858306 - DNA, 120 bp, Artificial Sequence
  ENSG00000229950_5 (sequence is synthesized)
cctgccccaacaccccctctcttaccccaattccgccacattccccttcctttctttctccgcttccttttctccagagatgccttctgcaaagcccggcactgctcaaggtccaagcgc

SEQ ID NO: 858307 - DNA, 120 bp, Artificial Sequence
  ENSG00000229950_6 (sequence is synthesized)
gcttctagcacttctcccttaaccctgctaccacgatccgagctgcccttttggccccgtgcaattttattagaaatcattatccctttcgcaattaaacataaccaccaaaccaagacc

SEQ ID NO: 858308 - DNA, 120 bp, Artificial Sequence
  ENSG00000229950_7 (sequence is synthesized)
ggcgaagtcactccaggattttttcccaacaagggatcgcctccgctcgaggcagccaccccctcgggccgcagcgccttgggagttttattggctttgagctttcccccaggttggaga

SEQ ID NO: 858309 - DNA, 120 bp, Artificial Sequence
  ENSG00000229950_8 (sequence is synthesized)
ttctgccaagcggctccggtggctctgctggggtttgcaatcccttaattgcagcgtgtaaaataaaagttgtaccctgaagaggttacttgacagctccaggggttaaacaatttttct

SEQ ID NO: 858310 - DNA, 120 bp, Artificial Sequence
  ENSG00000229950_9 (sequence is synthesized)
cctgtttgtgtgaagctagggccaactgacagttcaaattggtgttcaggctaaggtttcctgggtgcaacgtggacacgaatacagaactcctatggaactgcacacccgcttctgaag

SEQ ID NO: 858311 - DNA, 120 bp, Artificial Sequence
  ENSG00000229950_10 (sequence is synthesized)
ttgagcctaaaaacagacgtgtgtgtgcctgcaagtctagataccgtctcgtgcgtgcatcaaaataaatcaccgggaaccgacttttagctgtgttaatctgctctagttttcccaaga

SEQ ID NO: 858312 - DNA, 120 bp, Artificial Sequence
  ENSG00000229950_11 (sequence is synthesized)
ttcccctttttaattaaagcagggagagttccttcatgatttggtgatgctactaacgcgggcgtgctcgcgaggcagagcccggctgccgcggaacctggaggcctgggagccacctac

SEQ ID NO: 858313 - DNA, 120 bp, Artificial Sequence
  ENSG00000229950_12 (sequence is synthesized)
tcgtccagactggtcagtccgggcttttggactcctcaccggggcctgctgggtcctctggggcttttatccctttcggttttgggatttttttttaagtaagaaaaaaaaaaaagaaaa

SEQ ID NO: 858314 - DNA, 120 bp, Artificial Sequence
  ENSG00000229950_13 (sequence is synthesized)
ggccctcaatctcgatgaagataacacgaggagtgcacaggcaagtgcccagttgccagcaattgcttcaaaagcccatgttcttcttttcccccattcttaggcacagccaaaattggt

SEQ ID NO: 858315 - DNA, 120 bp, Artificial Sequence
  ENSG00000229957_0 (sequence is synthesized)
gtgtgcctcagttttcttatccataaagtgcatatgctcagaccacctacttcatagggttgcaataaggataaaacgcaatagcaacagctgacacttactgagcattttacataaatt

SEQ ID NO: 858316 - DNA, 120 bp, Artificial Sequence
  ENSG00000229957_1 (sequence is synthesized)
aacgcatttaatcccacaacaacgcaatgaggcagccctcgttttacaggtgagaaaactgaggcacaaggaggttaagtaacttgtgcaagatcaaatgacaaataactggagatgctg

SEQ ID NO: 858317 - DNA, 120 bp, Artificial Sequence
  ENSG00000229957_2 (sequence is synthesized)
agatttaaacccgggtgctctgacccccagaacctaccccgtcagcagtacatacagtgtccagcacacaggaagccccaaacatatgcttgggtgtatccaaaagtccctgtctgtgct

SEQ ID NO: 858318 - DNA, 120 bp, Artificial Sequence
  ENSG00000229957_3 (sequence is synthesized)
ctgggagagctcattcctctacccgccactgcattccacagcctgtagaagtcctcaagcgccccgtgatttctgctagttccagagtggggtgtggaggaaaaggtgctttcattaggc

SEQ ID NO: 858319 - DNA, 120 bp, Artificial Sequence
  ENSG00000229957_4 (sequence is synthesized)
ctgttttatgaggatgagatgaggaacccagggctcacagatgaaccatgctttgcccaagggcatgaagcctttaaaggcctgaaatgatttcacactcccacacgccacggctctgca

SEQ ID NO: 858320 - DNA, 120 bp, Artificial Sequence
  ENSG00000229957_5 (sequence is synthesized)
cagggcctagatgactctgattgtgagtgaagtttctgggagaacagagaagcatgttggtgagaaggggaggcacttcaggggatggcagagctgggagcaagatggacagaggggcct

SEQ ID NO: 858321 - DNA, 120 bp, Artificial Sequence
  ENSG00000229957_6 (sequence is synthesized)
agctggctagccactgtccaagcctgggtctgtgtctctggtgtgtgtgtgtgtgtcctcatgtggctgtggacaagcaccagggaggtgggaagccagcattgagcagcacaggtcaag

SEQ ID NO: 858322 - DNA, 120 bp, Artificial Sequence
  ENSG00000229957_7 (sequence is synthesized)
aactaaactcccacctcctgattcaggcagctcagagagctggctgctgtcatacagggtgtctaagcgcctgcatccatcagccagccgtcatcacagcccacccccaggtcacaaatc

SEQ ID NO: 858323 - DNA, 120 bp, Artificial Sequence
  ENSG00000229957_8 (sequence is synthesized)
tgaggcgagacggctcacgttccagcgtgtgcatgagcatgccagcacatgatgcatgcacaggttgtacccacagacatgttcgcacctgtgggcacaatgcagacatgttcacagcga

SEQ ID NO: 858324 - DNA, 120 bp, Artificial Sequence
  ENSG00000229957_9 (sequence is synthesized)
tacacacagagcatatccctgcaggtctgcaaatgtggacacatgccagcatgctatgcgtgcatgggaggcaagctctcatgtgtgcactcatgtttgtattcagagcatgcacatgcc

SEQ ID NO: 858325 - DNA, 120 bp, Artificial Sequence
  ENSG00000229957_10 (sequence is synthesized)
tgccatagataagttctcttacatgcatgtacatgtgtgtccactggtactcttcaataagcaaacatattttcccattcaggcatatattcatacccattcactaacatatgtgtgtcc

SEQ ID NO: 858326 - DNA, 120 bp, Artificial Sequence
  ENSG00000229957_11 (sequence is synthesized)
ccagaaactcccactcaaatacatagcacatatgtgtgcataccctcaaatgtacttctgtgcatgaacatacaaccccatgctctcattctcagtcatatgcccatttgtatgcacgca

SEQ ID NO: 858327 - DNA, 120 bp, Artificial Sequence
  ENSG00000229957_12 (sequence is synthesized)
caggaaagcaaatgtaacctcaggaacagtccattacaaactccaaattcaaacgcatgctcccatagatgcatttgtacatgtgaggacataggtctgtgtgtatgaacataatataca

SEQ ID NO: 858328 - DNA, 120 bp, Artificial Sequence
  ENSG00000229957_13 (sequence is synthesized)
cgatcaagtacaagcacctaaacaaacagccatcctccaacaaatgctcagatctgcaccaagcactcacacacatgcaatggtatatgtgcatctgcctgtctccatgtaggttcctca

SEQ ID NO: 858329 - DNA, 120 bp, Artificial Sequence
  ENSG00000229957_14 (sequence is synthesized)
acttccagacaacgtgtcctcaggcattaaccacctctgtccacgtgcacctttaggcaggcccagcacagttcactcatacccatgccccatgtgcctaactcaaccccacagacaagc

SEQ ID NO: 858330 - DNA, 120 bp, Artificial Sequence
  ENSG00000229957_15 (sequence is synthesized)
acgcacatagacacgtgcctccaaagcccatctcccacacgtgtgtggagtcagatccctatcatgtggatgcacacacaccctctctggggcacagcctgcccaaccccagatagtcag

SEQ ID NO: 858331 - DNA, 120 bp, Artificial Sequence
  ENSG00000229957_16 (sequence is synthesized)
gtgtgctggggacagcaagaatgatgcccacacgcagaaatcgccagtcacgcagaattgcatctgctgcaaacttctcatctgctgtgcaaatgatgattaaatgttattgtgcaagag

SEQ ID NO: 858332 - DNA, 120 bp, Artificial Sequence
  ENSG00000229956_0 (sequence is synthesized)
aatcaaaaggtagccaggtgcatcggggaaagcactgacattggagtcagacagactgaagttcatatctgattctgctatatgacaacgtgtgggctatgtggctaacttctcagagct

SEQ ID NO: 858333 - DNA, 120 bp, Artificial Sequence
  ENSG00000229956_1 (sequence is synthesized)
tcagttttctcaagggcaaaatgaaaataatagaaataatagaatccacctcacagggctgtggtgagaattggagatgaagcacatacagcatattacatcaactaaacacatgctaaa

SEQ ID NO: 858334 - DNA, 120 bp, Artificial Sequence
  ENSG00000229956_2 (sequence is synthesized)
aattaaaggggatgaaagatacattggtccctgcagtgggaagtttccttgacaatgcaattattgattccagtgaaggagcagctttggcttactattcaagctcgaggtcagggcttg

SEQ ID NO: 858335 - DNA, 120 bp, Artificial Sequence
  ENSG00000229956_3 (sequence is synthesized)
tagcaaaggaagaagcaacaattcttctgaaatctcatagtcgaaagctaaagacaggggcctaggtcaagctcaaagtcacttacaggacgtgaaaatcacctcggatttaatctaggc

SEQ ID NO: 858336 - DNA, 120 bp, Artificial Sequence
  ENSG00000229956_4 (sequence is synthesized)
ttagcagctacaggaaaagaactgaagaaaggccttgttttatgttttctgacagtaaaatgaaataaaacgtggaatattatagaaaggattttgtaagtgaaagggagtggttgagaa

SEQ ID NO: 858337 - DNA, 120 bp, Artificial Sequence
  ENSG00000229956_5 (sequence is synthesized)
gaggcaaagtgagtgttggaaaggatattgaaacttgaagaaggctggaagaagaggtcaagggaatcctatgactgaaagcagcatcagagacacaaacatactgatcttggagccctg

SEQ ID NO: 858338 - DNA, 120 bp, Artificial Sequence
  ENSG00000229956_6 (sequence is synthesized)
caaatacatctctttatattgaacattttgagtctttttctattcctaggtgtgtttactaaattatacaagtctgctaataccaattatcctataaatgcccttcttaattcttaaaat

SEQ ID NO: 858339 - DNA, 120 bp, Artificial Sequence
  ENSG00000229956_7 (sequence is synthesized)
ggaggcggaagtgactgatcaattcaggggcgtggggttcgtttaggttttgccctgtgtatgacctcgtttggagccatgaaaccaggaagctcttccacgagttcacgaatggaaata

SEQ ID NO: 858340 - DNA, 120 bp, Artificial Sequence
  ENSG00000229956_8 (sequence is synthesized)
acatcaagagtttttcatcttcttagtgtgcaaggtatggatattctgtgtgtgaacttcaagagtatctaagggaggcaataacatggttgataatataccagagactacaaactgtct

SEQ ID NO: 858341 - DNA, 120 bp, Artificial Sequence
  ENSG00000229956_9 (sequence is synthesized)
gtgcatcccagaggaacaggaagcttgtgcaggtgaaaagactggaggaggaagtatgttgatgatacccaggaagcccaccttccacttctttggtcatcagaaataaatatcaaggag

SEQ ID NO: 858342 - DNA, 120 bp, Artificial Sequence
  ENSG00000229956_10 (sequence is synthesized)
tgcaattcctggatttatgatgtctgaggaatagtcttagtggattatcccaaacttgacacattttttgcaaaatgctatacaaaaagaagatacatgcgattatgacaagattctcca

SEQ ID NO: 858343 - DNA, 120 bp, Artificial Sequence
  ENSG00000229956_11 (sequence is synthesized)
ggagctggaaaggtggaggcggaagtgactgatcaattcaggggcgtggggttcgtttaggttttgccctgtgtatgacctcgtttggagccatgaaaccagggcactgaagatattatt

SEQ ID NO: 858344 - DNA, 120 bp, Artificial Sequence
  ENSG00000229956_12 (sequence is synthesized)
gcagtgtttaagcctgaattctaagccacttctttgaaatttcctcatttttttgtggggggaggcatttcccatgtatatattggaatatatgtgctaataaacttgtttgctttcctc

SEQ ID NO: 858345 - DNA, 120 bp, Artificial Sequence
  ENSG00000229956_13 (sequence is synthesized)
ggtggaggcggaagtgactgatcaattcaggggcgtggggttcgtttaggttttgccctgtgtatgacctcgtttggagccatgaaaccaggtggcttttctacaatataaagatggaaa

SEQ ID NO: 858346 - DNA, 120 bp, Artificial Sequence
  ENSG00000229956_14 (sequence is synthesized)
gcagatgctggcagtttgtgttagaaggttccggggctaaacagatgcctagaattagccaccaaaaggtaaattgtagactccactcttcaagaagcagcagaaggattaggaattcaa

SEQ ID NO: 858347 - DNA, 120 bp, Artificial Sequence
  ENSG00000229956_15 (sequence is synthesized)
cagcaagaacttcttaggccataaagcatgacagacctcttttccttatgcgctgaattgaagaagtgctgactcttttgctgatggaagctcttccacgagttcacgaatggaaataac

SEQ ID NO: 858348 - DNA, 120 bp, Artificial Sequence
  ENSG00000229956_16 (sequence is synthesized)
tgtactgaataccggaaagcatgtatttgtttgctaaattgctctctttccaccagtgatatcaattctgaaatacttttgagatcttgacaataatcaaaaggtagccaggtgcatcgg

SEQ ID NO: 858349 - DNA, 120 bp, Artificial Sequence
  ENSG00000229956_17 (sequence is synthesized)
ggatgaagaaactgaggcccacagaaggtgggtgatacctgcaaaatcacaagctttcatggtgaaagaagagggcaaaactcaacccgtctctttagacttgggaagaatatgaaagga

SEQ ID NO: 858350 - DNA, 120 bp, Artificial Sequence
  ENSG00000229956_18 (sequence is synthesized)
ccaggagggacacctttcctaataacctagctgatggttcacttattgtaagcacattctcaaacaaggtgacaattaggttcaaatatcgtctttgaaacacaaagtagatcttaccct

SEQ ID NO: 858351 - DNA, 120 bp, Artificial Sequence
  ENSG00000229956_19 (sequence is synthesized)
ttttatcctcttattgctagtttagcttctactgttagaaagttgattcttaatgtaatatttgtctaagggtctgttataggagtcctaaacagatacatcagccattttatgctccta

SEQ ID NO: 858352 - DNA, 120 bp, Artificial Sequence
  ENSG00000229956_20 (sequence is synthesized)
tgcaagccaggaaagagctagagataaaagcaaagatgttaatttatgtaaagtacttagcatggttcctggcaagaataacaagtcaataaatgatattaataataatactaatactgt

SEQ ID NO: 858353 - DNA, 120 bp, Artificial Sequence
  ENSG00000229956_21 (sequence is synthesized)
aaataatacctaacaaggctatttttcttattatttttaaaattcatacagtctctaaaatcttcagttacttgttcctctcacagtgttccatactacaccctggagacactgatcaag

SEQ ID NO: 858354 - DNA, 120 bp, Artificial Sequence
  ENSG00000229956_22 (sequence is synthesized)
cagagaactgtgtttacttgattgtctgaaacagcaggccgatatagcagttgcaagcatcttgagcaattctattccatatagagacataagaaaccgagagaaagagacacaatacat

SEQ ID NO: 858355 - DNA, 120 bp, Artificial Sequence
  ENSG00000229956_23 (sequence is synthesized)
ggtggaggcggaagtgactgatcaattcaggggcgtggggttcgtttaggtcttttcctagttttgccctgtgtatgacctcgtttggagccatgaaaccaggtctgtgaaatttagtgt

SEQ ID NO: 858356 - DNA, 120 bp, Artificial Sequence
  ENSG00000229956_24 (sequence is synthesized)
ctattttctaccataacacatgttaatttggactaaccacatttcgagtgctcagtagccacatgtggctagcgactactatcttgagcaatgcaacgataagtctgcacttacgttcaa

SEQ ID NO: 858357 - DNA, 120 bp, Artificial Sequence
  ENSG00000229956_25 (sequence is synthesized)
aaagacttaaagcagggatcgacaacccccaggccacagactggtatggatccatggcctgttaagaactgtgccacacagcaggaggaagctcttccacgagttcacgaatggaaataa

SEQ ID NO: 858358 - DNA, 120 bp, Artificial Sequence
  ENSG00000229956_26 (sequence is synthesized)
aaggttattttagggcaatgatggaaagcaccaagtggagtctggagctagactgatctgtgttcaatcctgtcttggttactcattggggggcctcgactttcatgtctctgtaatgtc

SEQ ID NO: 858359 - DNA, 120 bp, Artificial Sequence
  ENSG00000229956_27 (sequence is synthesized)
cacgtttgaacagatacctttgagaagtttatgattctccaagttctctttctcctactgtggcacctactgacaagataaatgtgtagaggttcctgagtctaggggtgagtcttgcat

SEQ ID NO: 858360 - DNA, 120 bp, Artificial Sequence
  ENSG00000229956_28 (sequence is synthesized)
atctgatgaatccaccagtaaaagtaccactgctgaaatcacgcaaatatatttttttagaccttatcaaccttggcatggaattagatgagcaaaaagctgagttgaattgatgaaaag

SEQ ID NO: 858361 - DNA, 120 bp, Artificial Sequence
  ENSG00000229956_29 (sequence is synthesized)
aatcccaagtcattaattactaatgatggagcttgtaaagtacagcatcactggggaaagcaactgactttcctcatacacattatatttttatctgaatttcaatactgcttaaatatg

SEQ ID NO: 858362 - DNA, 120 bp, Artificial Sequence
  ENSG00000229956_30 (sequence is synthesized)
tacttcattacagggcacaactaaaatagaagggcacctgctaagtcagagccataaaacagatctacagcctgctggcatgtgaaatttctctaatttatattttttatgaaactaccc

SEQ ID NO: 858363 - DNA, 120 bp, Artificial Sequence
  ENSG00000229956_31 (sequence is synthesized)
tcacattatgtggttggcagcataaataataaagcatgttactgaagcaattttacatttactgtattagtaagtaaatgcaatggccactcttattctcaaataaaaactacccagcct

SEQ ID NO: 858364 - DNA, 120 bp, Artificial Sequence
  ENSG00000229956_32 (sequence is synthesized)
tttcatgaaagatgtttgcaatttccattggcctgtatatgcaataaaaagccataactcatcaaaatttcagctattttctcttaagatagaagagcattttgcttgaacattgaacgt

SEQ ID NO: 858365 - DNA, 120 bp, Artificial Sequence
  ENSG00000229956_33 (sequence is synthesized)
agaaggctgaacaaatgttgacagaggaacacactgtttgcttatgtctaatcttcccatctgacttatataaatgtcacaaatgaatctcagacatgtgcccaatatcaaatatccata

SEQ ID NO: 858366 - DNA, 120 bp, Artificial Sequence
  ENSG00000229956_34 (sequence is synthesized)
cgatggccctggaaagaggcaatctacatttatggctgatgagaagatggatttttagcttgaaagaaacttattactggggagaggaagtataaatgaatggagagagctatgaagagg

SEQ ID NO: 858367 - DNA, 120 bp, Artificial Sequence
  ENSG00000229956_35 (sequence is synthesized)
tggaagttcccttggtctccatttgtttagaaaaggtgatgcatcagaaacctttccttacactgtatgatagatgggtggtgggaaacaaaatctacttttgctccattctgatacatg

SEQ ID NO: 858368 - DNA, 120 bp, Artificial Sequence
  ENSG00000229956_36 (sequence is synthesized)
agaagagagtatgtttatattctctcagtgagaattcagacccaggtatcacttagacttccattcaataaagtaaaaagaaattataaaacataaataggcagaaataaaattaaaagt

SEQ ID NO: 858369 - DNA, 120 bp, Artificial Sequence
  ENSG00000229956_37 (sequence is synthesized)
atacatataaaatattatataaaacgtaaatatacaataattggatgttctaacactgaaaaattaaaagattaaagatgggataaagttaactatgaaacaatgggacagaaaaaagtg

SEQ ID NO: 858370 - DNA, 120 bp, Artificial Sequence
  ENSG00000229956_38 (sequence is synthesized)
acagagggtagttttaaaggctttagcacttgtctaaaagaaatttcaccagaagaaaatggaataacaggaaagtaatacctgataagataacagttgagactttcccagaattaaaca

SEQ ID NO: 858371 - DNA, 120 bp, Artificial Sequence
  ENSG00000229956_39 (sequence is synthesized)
tataagtactaagattgaaagtgcacattcaataccagtcagaataaatgaaattaaatacttacatattttataacattgtaatgaacttgcaaagaagtataagaagaagatcttaaa

SEQ ID NO: 858372 - DNA, 120 bp, Artificial Sequence
  ENSG00000229956_40 (sequence is synthesized)
agctaacagaaatagggcatggattacctaaaagggaacaacaattagaatgacagcaaatttctcattagcaactagtggatgtcagaagataatgaaattatagcttcaaagtactga

SEQ ID NO: 858373 - DNA, 120 bp, Artificial Sequence
  ENSG00000229956_41 (sequence is synthesized)
gggaaaaatcaaccagtgaacctgtcaacccagaattctacatatcataaaacaactgggagtaaaagagttaacactatacctgcaacttgatcttttttatggaggccatccagggaa

SEQ ID NO: 858374 - DNA, 120 bp, Artificial Sequence
  ENSG00000229956_42 (sequence is synthesized)
aatgaatgaccctcggtgtacttccttataaccatgccaaagaccttcaacagacctctatgcagtataaaaatagtatttactacagatagggagtttttattgagaacatatattttg

SEQ ID NO: 858375 - DNA, 120 bp, Artificial Sequence
  ENSG00000229956_43 (sequence is synthesized)
taggatatatttgttgtaactagatttcttattttcaatgaacctggaccttatggatgtacggggcatggctttttggagaatggggagcagtgggtggtagtcatcaaaatattccct

SEQ ID NO: 858376 - DNA, 120 bp, Artificial Sequence
  ENSG00000229956_44 (sequence is synthesized)
tatccctgtaattataagagtataaaacaaaagagctccaaattcctaatggcttcctttgtgactagtgtgcatatattgcttaatactattctgtgtgtcagaaatgaaaacacatcc

SEQ ID NO: 858377 - DNA, 120 bp, Artificial Sequence
  ENSG00000229956_45 (sequence is synthesized)
gaaagtaagaaaaaaaaattttggaagctgcatttggtctttagttcctgctggaaatagatgtcttgcctgagcctgctgcttgcctgtaccttttgaatcattaataaagtttggcac

SEQ ID NO: 858378 - DNA, 120 bp, Artificial Sequence
  ENSG00000229956_46 (sequence is synthesized)
ggagctggaaaggtggaggcggaagtgactgatcaattcaggggcgtggggttcgtttaggttttgccctgtgtatgacctcgtttggagccatgaaaccaggtctgtgaaatttagtgt

SEQ ID NO: 858379 - DNA, 120 bp, Artificial Sequence
  ENSG00000229956_47 (sequence is synthesized)
atgtgtatctgatcatatcaatatgttaaaatgacgttcaaagtatgatctacctcagaataatctagcctcaagctttattctaggaaggtaattctgaagatacctatcttcttgaga

SEQ ID NO: 858380 - DNA, 120 bp, Artificial Sequence
  ENSG00000229956_48 (sequence is synthesized)
gtgaaattttatggaatcctagatttctcatacctaggaataacaatacaagggacagaatagttagcagtgttcctgttgaaaggtccaagtatctccctaggcacagaaaacacccaa

SEQ ID NO: 858381 - DNA, 120 bp, Artificial Sequence
  ENSG00000229956_49 (sequence is synthesized)
tgaaattttatggaatcctagatttctcatacctaggaataacaatacaagggacagaatagttagcagtgttcctgttgaaaggtccaagtatctccctaggcacagaaaacacccaaa

SEQ ID NO: 858382 - DNA, 120 bp, Artificial Sequence
  ENSG00000229956_50 (sequence is synthesized)
aaaggtggaggcggaagtgactgatcaattcaggggcgtggggttcgtttaggttttgccctgtgtatgacctcgtttggagccatgaaaccagcctcaagctttattctaggaaggtaa

SEQ ID NO: 858383 - DNA, 120 bp, Artificial Sequence
  ENSG00000229956_51 (sequence is synthesized)
ttctgaagatacctatcttcttgagagtgaaattttatggaatcctagatttctcatacctaggaataacaatgagcaaagcagaccttggtggccagaggggagccctcaggtagagct

SEQ ID NO: 858384 - DNA, 120 bp, Artificial Sequence
  ENSG00000229956_52 (sequence is synthesized)
acatcaagagtttttcatcttcttagtgtgcaaggttaaaatgaataatgaaaggaaagggagagcgtctctctttacaatgctggaacagatgtcttgagtctgcctcctgatgactta

SEQ ID NO: 858385 - DNA, 120 bp, Artificial Sequence
  ENSG00000229956_53 (sequence is synthesized)
atttatgtcatgtgctcagccctaaaccaatccctgtggcagaagtgaagtggctgtgaaaagaactgggggtagtattgagaagaaaagtagaaaatgacaggtcaaaatataacaaat

SEQ ID NO: 858386 - DNA, 120 bp, Artificial Sequence
  ENSG00000229956_54 (sequence is synthesized)
gtccgctaccaaaaataatgttttcctgtcaatttttaagcatgtgtgtatggtttcaatgtattattaaaagtatgtgtgtgtatacatatacatataagaatctaatgtattctatat

SEQ ID NO: 858387 - DNA, 120 bp, Artificial Sequence
  ENSG00000229956_55 (sequence is synthesized)
gtggagctggaaaggtggaggcggaagtgactgatcaattcaggggcgtggggttcgtttaggttttgccctgtgtatgacctcgtttggagccatgaaaccagagtttcgctctttttg

SEQ ID NO: 858388 - DNA, 120 bp, Artificial Sequence
  ENSG00000229956_56 (sequence is synthesized)
actgtaaatatttgtattaatggacaaatagtcattcatgtgtatatatagctgtgttttattagctaaatactgtactaaatgctaggaaaacaagaatattgtcccttccaaggcctt

SEQ ID NO: 858389 - DNA, 120 bp, Artificial Sequence
  ENSG00000229956_57 (sequence is synthesized)
tttttggtgagaaaagatcttcaaacaattataatacagaatattagagttgcatgtgcatacccagtaacacagacaaattgtgcttttaaattgcctgggtaagggagatttcaaata

SEQ ID NO: 858390 - DNA, 120 bp, Artificial Sequence
  ENSG00000229956_58 (sequence is synthesized)
cagttttactaaaggagactatcatgtgggtagaagaaataacatattcgaaggcataataaaaggacagagcaaggtgtgtcgtatagaatataaaggtagatttagtcttgctggacc

SEQ ID NO: 858391 - DNA, 120 bp, Artificial Sequence
  ENSG00000229956_59 (sequence is synthesized)
ggcccgaagtggagggaattgaaactagacctctagacaggtagaatgacctctactgtaatgaaaaagggactaggtttttatattgaaagacattttgaagaatttggagagttgaat

SEQ ID NO: 858392 - DNA, 120 bp, Artificial Sequence
  ENSG00000229956_60 (sequence is synthesized)
gtatgactacatttatacatcagaaatattacagtcttatatatggggaagttcacatggtacttggctaacagtcatgttgaattttcactgaatacctgaaaattcaccaagtttggg

SEQ ID NO: 858393 - DNA, 120 bp, Artificial Sequence
  ENSG00000229956_61 (sequence is synthesized)
atattattggagtgtttggaatgggtttcactttgtttatgaacagacagttgcctagttgtagtgaattatattgtgttccagaaattaaatgttacagccgtgcttggacttgtttga

SEQ ID NO: 858394 - DNA, 120 bp, Artificial Sequence
  ENSG00000229956_62 (sequence is synthesized)
gactgattctcatttaccataataataataataattgtaataacaaaaaacctgccaatatattttaaccaccttttcttaatgaaacctggatttcaagcactatttcctagtagaaat

SEQ ID NO: 858395 - DNA, 120 bp, Artificial Sequence
  ENSG00000229956_63 (sequence is synthesized)
tgaataatgtagtaaagaaatcgactacttcatttctaaatttataactcaaatccaggagcaggtttagtcacactgagtctgaattgccagcagatagttttaatgaaatgttcacaa

SEQ ID NO: 858396 - DNA, 120 bp, Artificial Sequence
  ENSG00000229956_64 (sequence is synthesized)
atgactatattgctacgtaacaagaataataaattctgctgtttacacttccaagaaattaaaggggatgaaagatacattggtccctgcagtgggaagtttccttgacaatgcaattat

SEQ ID NO: 858397 - DNA, 120 bp, Artificial Sequence
  ENSG00000229956_65 (sequence is synthesized)
tgattccaggtgagtgggatttgaacactgagactactattttttaataaacaaagagcaaaattaactatttaatgcatgtgtataattacaaatgagttttttaaaaaataaaaagac

SEQ ID NO: 858398 - DNA, 120 bp, Artificial Sequence
  ENSG00000229956_66 (sequence is synthesized)
aaagaaagtaagtctattgttgaacagagagcttttcaatttctgatgtatatgaagtctaatttaaagctatggaactcctcattgtccccttttctagacctagaaaaatattttaaa

SEQ ID NO: 858399 - DNA, 120 bp, Artificial Sequence
  ENSG00000229956_67 (sequence is synthesized)
aatacaaattaatctttatttaatatatgaccttctcaatagtagttatgctagagttgtttttcaagaatgtcaagtgtaataaaacttgtataatggtaaaggaccaaaaatatgtaa

SEQ ID NO: 858400 - DNA, 120 bp, Artificial Sequence
  ENSG00000229956_68 (sequence is synthesized)
ggtggaggcggaagtgactgatcaattcaggggcgtggggttcgtttaggttttgccctgtgtatgacctcgtttggagccatgaaaccagcctcaagctttattctaggaaggtggctt

SEQ ID NO: 858401 - DNA, 120 bp, Artificial Sequence
  ENSG00000229956_69 (sequence is synthesized)
ttttgagtaagtttggaattactagaaaaacagtgaatgtaaatgtgaaggtgtatgattcttggaaagttcagagggagtacattgacgggtgtttggatcaaattccactaacttgaa

SEQ ID NO: 858402 - DNA, 120 bp, Artificial Sequence
  ENSG00000229956_70 (sequence is synthesized)
tgaattaccttggaaaattatctctacaaattcttacttacatttctgactgtcaggttaaagtgaataattattttctgtataccaagatatgattttgaagcatctatgttttgccct

SEQ ID NO: 858403 - DNA, 120 bp, Artificial Sequence
  ENSG00000229956_71 (sequence is synthesized)
attcttttgagagggaaactagctctgtttcatgtgctggttttccatgtctgatacttgatgtttctgtttctgtgatgtaatttatgcaagatagataagatagatgttgaaaaggga

SEQ ID NO: 858404 - DNA, 120 bp, Artificial Sequence
  ENSG00000229956_72 (sequence is synthesized)
atacaacccaaggctgtgtgtccaaaggcaactgtacttctgggactggaaacaaattgggaacatttttcattgcatatttggctcagatctgccacttagttgaagtataatcttcag

SEQ ID NO: 858405 - DNA, 120 bp, Artificial Sequence
  ENSG00000229956_73 (sequence is synthesized)
aagtatttgaaagtgttgagaaagccacaatagcaacacttgcaaaagtgctccattgtaaaatgcaaaggagaggtagttgtgaccctttggggaaaactatagttgccacaattgtct

SEQ ID NO: 858406 - DNA, 120 bp, Artificial Sequence
  ENSG00000229956_74 (sequence is synthesized)
ctgaaatgaagcatgtttcttagactgaaggaaagccctgggagagattggtctagctttaggatgactgtgggtagagcttctagggagaagaatgaaacgtattcctcttttcctttt

SEQ ID NO: 858407 - DNA, 120 bp, Artificial Sequence
  ENSG00000229956_75 (sequence is synthesized)
aacaagaggctggaaagctgaaaaatgacattcccagactccattgaaattagatttccagaggtgatttatgttccacacatcagatgtatatgctcaagatttgtttaacagggaagg

SEQ ID NO: 858408 - DNA, 120 bp, Artificial Sequence
  ENSG00000229956_76 (sequence is synthesized)
aggcagtggtgtgtgggtcccttttgctcatgtgaatcttacagagttgtctcactaagcccaaatttgtctaactggccttatttccctggagtatatcctggaagtttccattcaagc

SEQ ID NO: 858409 - DNA, 120 bp, Artificial Sequence
  ENSG00000229956_77 (sequence is synthesized)
caatttaagttactttaaattaggaaaggcagaaaacaaaagcccaaacctttgtaaaggaggaggatttgctacattgttctcaattcatcacagaagaggatgaaactgagtgattac

SEQ ID NO: 858410 - DNA, 120 bp, Artificial Sequence
  ENSG00000229956_78 (sequence is synthesized)
gttgtttagagaaagagaattttcactttatatgccagtcattgataatatttgccatagtggttgctgttaagtaagtttcttcctgcaggcctgtgagaaggcatagtacatgaaagt

SEQ ID NO: 858411 - DNA, 120 bp, Artificial Sequence
  ENSG00000229956_79 (sequence is synthesized)
agcagtgctttcaacctgattattattatacagtatggacttttattatataacaagcaatacttacattttgttatttacttatttattactatacacttacacatatgcagacacagt

SEQ ID NO: 858412 - DNA, 120 bp, Artificial Sequence
  ENSG00000229956_80 (sequence is synthesized)
aataaacatctaagtggtacaaataggtacaaaaccaaaaataaaagtctgccttctaacttcagtaagatgtttcagtctcatcctgggttctactgcctttaatatgcaatcagccac

SEQ ID NO: 858413 - DNA, 120 bp, Artificial Sequence
  ENSG00000229956_81 (sequence is synthesized)
acttcccaaggggctttagtcccttttgttaaaaaatagtaataaagatcaaatctaggggatagaagtagagattttagtattttatatgagaattggggatgcagcatgctaatgaag

SEQ ID NO: 858414 - DNA, 120 bp, Artificial Sequence
  ENSG00000229956_82 (sequence is synthesized)
ccacctgagttacagggcagactattacttttctttttaaataacaggtaacaattctatattgttattttcaatttaaccaagtttttattttagcactgagagtttttaatctgattt

SEQ ID NO: 858415 - DNA, 120 bp, Artificial Sequence
  ENSG00000229956_83 (sequence is synthesized)
gtttttaatctgatttctccttcctctggtagatttgaggttatttattgtcacaccaaatagcattttgtctcctatatttagaagtcttttgtttttttttttttttttgagatggac

SEQ ID NO: 858416 - DNA, 120 bp, Artificial Sequence
  ENSG00000229956_84 (sequence is synthesized)
tcttactctatttttgtcccttgcctcaagtaccctagaagtgactacctacacaactccccttatcagcattttagaggaaagactatctgaaaagtaaaataaattctatcttttctc

SEQ ID NO: 858417 - DNA, 120 bp, Artificial Sequence
  ENSG00000229956_85 (sequence is synthesized)
acagaattataaagaatatacaggcaaaagacacctaatatttcatatggaatgataaacaatttgaagaaaaaaaggacaaatctttgagatttagcctaaaactattttttaactttg

SEQ ID NO: 858418 - DNA, 120 bp, Artificial Sequence
  ENSG00000229956_86 (sequence is synthesized)
aatttccatggacatttgtcaacatttatcttttatttccagtaacattggtattaaattacagtgaatatatacaaatatttattagctcaatattattttattagtccaatttttcaa

SEQ ID NO: 858419 - DNA, 120 bp, Artificial Sequence
  ENSG00000229956_87 (sequence is synthesized)
ttagagtcagataaaactctaaataaaggtcaaaaatcatcagaatattttgtaacccccaaattcaggtagaaaaaatttctgtatattatattgtcccattctacaagactcaactca

SEQ ID NO: 858420 - DNA, 120 bp, Artificial Sequence
  ENSG00000229956_88 (sequence is synthesized)
tcccattctacaagactcaactcacagtagattatagcacattggaatataacatatttcatattaaatattatatttaatctacatttaaatattctgaaacctccctactaataatta

SEQ ID NO: 858421 - DNA, 120 bp, Artificial Sequence
  ENSG00000229956_89 (sequence is synthesized)
tgcttttcatgttcacataagccaaaatcagaaaattcatcaagttttaccaatagaaattttcaccttttatgcgaacacatgtatttgcctagatcaaggcatcatatgcctacactt

SEQ ID NO: 858422 - DNA, 120 bp, Artificial Sequence
  ENSG00000229956_90 (sequence is synthesized)
ccaaagttaatttgtattacctgcataatccccctaaaataaaaccccaattattttattcttataatttggtaaattgagcctcaaaagctccattcatttagaatatgcattttccaa

SEQ ID NO: 858423 - DNA, 120 bp, Artificial Sequence
  ENSG00000229956_91 (sequence is synthesized)
gattttgacaataataaaaaatttgttcttaaaattctgtgttgaattttaagcacctctctatcacagggataataacttaaatgcttcagattatctgttagagaccctataaaacaa

SEQ ID NO: 858424 - DNA, 120 bp, Artificial Sequence
  ENSG00000229956_92 (sequence is synthesized)
taatctctttttttatgtgtccaattaacatcagaatccatttagggaacatgcttctctttgagggtcttgtgaggccctacacccagtttattcaaatgtcactgctacaaaggcgct

SEQ ID NO: 858425 - DNA, 120 bp, Artificial Sequence
  ENSG00000229956_93 (sequence is synthesized)
ggccttaccttcagtcttctggggcaaggcctggctgcagactcaggacagcctgctttattctgttgtaccagttctccctgttgccctgcttgttcctttcccacatttctgatgcta

SEQ ID NO: 858426 - DNA, 120 bp, Artificial Sequence
  ENSG00000229956_94 (sequence is synthesized)
gatttcctaatattgtactaactttgatccagctttttaactcctttttatgttttcactctgctcaatattatccatttaacaacacctcctattccgtctacgtagaaaactgtttat

SEQ ID NO: 858427 - DNA, 120 bp, Artificial Sequence
  ENSG00000229956_95 (sequence is synthesized)
acagagagtatctgaaaagttgatatctgtaagtttatttccagaatgacacatggttcctaatgatatggaattgtaatgttgtcaacataattcatccaaagaggatatataatttat

SEQ ID NO: 858428 - DNA, 120 bp, Artificial Sequence
  ENSG00000229956_96 (sequence is synthesized)
tatcccaggcataattttgtttagaggagatgactcttggattgggcccacctgagtttaggaaaagactggcactgcacttgtttcctctatatctattaatcttggagaattaagttt

SEQ ID NO: 858429 - DNA, 120 bp, Artificial Sequence
  ENSG00000229956_97 (sequence is synthesized)
cctttatctttttattcatttttataggtaatttagatgtcagtgcgaggctgctatttcttaataagaaaggaatggatgtttatcccttcaatagaaagtgaaagaatgtttatggca

SEQ ID NO: 858430 - DNA, 120 bp, Artificial Sequence
  ENSG00000229956_98 (sequence is synthesized)
gaggttgggcaaactataaccagtggcccaaattctgccttcagtctgtttttgtgtggcctgtgagctaaggattttcttaaaatatattttaaagagttgtaaacacacacacacaca

SEQ ID NO: 858431 - DNA, 120 bp, Artificial Sequence
  ENSG00000229956_99 (sequence is synthesized)
taaaacagggactgtatttgacctgtgaagtgcagaatatttaaagaaaatgttgcagacccctgtcttaatataactatcataaaacgatcatttaaaacattttttatatgacaagta

SEQ ID NO: 858432 - DNA, 120 bp, Artificial Sequence
  ENSG00000229956_100 (sequence is synthesized)
catgggattttgtatatgttagctcattgaaatcttataagaatcttaagtgtattaagagttgaagtattctcctcattttggagatgataaaactgagatgtgagaggttaatatcac

SEQ ID NO: 858433 - DNA, 120 bp, Artificial Sequence
  ENSG00000229956_101 (sequence is synthesized)
atactttctaaatgccagagagaagatttacactaagacagttgggaactggagctggtacttatagctaccatattatactgcatctgaatgtgacctgacagttgtttgtttgagtct

SEQ ID NO: 858434 - DNA, 120 bp, Artificial Sequence
  ENSG00000229956_102 (sequence is synthesized)
atcccactcctcatactaatctgcaagcagtccaaacagaataataatgagattggcaagatactgctcatacacaaagcaaagagtatacaagattctttaagcatataaagggaacca

SEQ ID NO: 858435 - DNA, 120 bp, Artificial Sequence
  ENSG00000229956_103 (sequence is synthesized)
tgactgtgcacaagctggctatatactgcagcaaacacagcaacactaccagttagatgagtaagacactcttgctctcaaattctcatgaagttccctgacttccagtaatactacttg

SEQ ID NO: 858436 - DNA, 120 bp, Artificial Sequence
  ENSG00000229956_104 (sequence is synthesized)
ctcagggtgatgactcttcagggtactatccttgatagtctcagaggattcataccttgttggtccctcatgacttctctctctagagatttgcgctatgtgcctgactgcttcacattt

SEQ ID NO: 858437 - DNA, 120 bp, Artificial Sequence
  ENSG00000229956_105 (sequence is synthesized)
gacattactgtacttggtaacactctcaaagtatttatcagtactatgaaaagactgaggatattacatgtaaattctaggcctgtcacccttttggcagatttgggcctccaggcctac

SEQ ID NO: 858438 - DNA, 120 bp, Artificial Sequence
  ENSG00000229956_106 (sequence is synthesized)
tgaaggcatattcctggaatagccagattgctgtgctttcttctctcagtattggtctctgtgcctatcatttccatcagaggttttggtctgttacgaaaggagttcctgtctctgttg

SEQ ID NO: 858439 - DNA, 120 bp, Artificial Sequence
  ENSG00000229956_107 (sequence is synthesized)
taattttctcctgcacatatcctgagttctagattcttccattatgatttctttattaatctgattttacttcccttggttttgcagctgtctgttaaactctttaacttgtcattgtac

SEQ ID NO: 858440 - DNA, 120 bp, Artificial Sequence
  ENSG00000229956_108 (sequence is synthesized)
tctatgtctttataagtttattcataatataattttatagtgttatttcaaggacacttttggaaggaaaagagagataaacatatgtaccagatctatcattctgaagtagaagctatc

SEQ ID NO: 858441 - DNA, 120 bp, Artificial Sequence
  ENSG00000229956_109 (sequence is synthesized)
aaactttatgtgacgagaaaatgcatttgggtatatactgataggtttcctatcacttcatgctttattgcatttcttctcccatgtttttgaagctttctaatcaactgtggaatgatg

SEQ ID NO: 858442 - DNA, 120 bp, Artificial Sequence
  ENSG00000229956_110 (sequence is synthesized)
ccatttgtttagaaaagctgcaataaagcataaccaggagtacaacagatttcaatttctgtgagtccttctagcaaattgccaaaactgaagatggctttgggaacatccaaagttata

SEQ ID NO: 858443 - DNA, 120 bp, Artificial Sequence
  ENSG00000229956_111 (sequence is synthesized)
aggtagttccaaaatgtcttaaaaggaagagataaagttaaattaaaagtactgtattggggccccaggcaatgaataaaatgagtagaaggaaaaatattttttgttccctacactgga

SEQ ID NO: 858444 - DNA, 120 bp, Artificial Sequence
  ENSG00000229956_112 (sequence is synthesized)
ttggcatacatgaagatagcagagcactcataatactccactacagtgaggacaccattaatagcaaaatgggaatgatgctgttgattcaaagaaaactgaaagtcccttgaaatccta

SEQ ID NO: 858445 - DNA, 120 bp, Artificial Sequence
  ENSG00000229956_113 (sequence is synthesized)
tgctgtattttaggcaggtaattaattatttatgttaatttcataagctttgtagcatttgccaggcttaaaaattttaatttattttgatttatttttctaaatacatattaaccttca

SEQ ID NO: 858446 - DNA, 120 bp, Artificial Sequence
  ENSG00000229956_114 (sequence is synthesized)
gtggagctggaaaggtggaggcggaagtgactgatcaattcaggggcgtggggttcgtttaggttttgccctgtgtatgacctcgtttggagccatgaaaccagcctcaagctttattct

SEQ ID NO: 858447 - DNA, 120 bp, Artificial Sequence
  ENSG00000229956_115 (sequence is synthesized)
tcttcttttttttaaaagaccacatcacatttttaagatgtaatccctagtaatcaacatgacagcccagcagagcagaatcaggagttcttgctgaaataatcctacacactaacactt

SEQ ID NO: 858448 - DNA, 120 bp, Artificial Sequence
  ENSG00000229956_116 (sequence is synthesized)
tgtctaatgtcataataacatctgaagatgcacctttttctccaactattgagcggctactttctttcctctttccctcacagctgtctcccaggcagatgattttagtataatatctgt

SEQ ID NO: 858449 - DNA, 120 bp, Artificial Sequence
  ENSG00000229956_117 (sequence is synthesized)
aatcactccagagctctttcctgatgtgtactttgttctctgaaccctttaaagttgtagcccctctgattattttggtcccagagtttcatgccttttacacattgttattctaaattc

SEQ ID NO: 858450 - DNA, 120 bp, Artificial Sequence
  ENSG00000229956_118 (sequence is synthesized)
cacgagtcatttacttgctcataatccaggtctttcaagcctctttgagtttgcacactcggttccacactatttgtctccatttttgtatcattagccaaattgactaatatgaagtct

SEQ ID NO: 858451 - DNA, 120 bp, Artificial Sequence
  ENSG00000229956_119 (sequence is synthesized)
gctcaggatggttcaaaatgaaaataatgtgctagctgaagagtaaatattactgagctatgaatgatgaagatttgctcagaaattttgcttatgagtagtttgttatgaagcatacaa

SEQ ID NO: 858452 - DNA, 120 bp, Artificial Sequence
  ENSG00000229956_120 (sequence is synthesized)
ggtggaggcggaagtgactgatcaattcaggggcgtggggttcgtttaggttttgccctgtgtatgacctcgtttggagccatgaaaccaggtcaccatgtgtgatgactacatccaaag

SEQ ID NO: 858453 - DNA, 120 bp, Artificial Sequence
  ENSG00000229956_121 (sequence is synthesized)
ggcggaagtgactgatcaattcaggggcgtggggttcgtttaggttttgccctgtgtatgacctcgtttggagccatgaaaccagagaacttgaatacagcaatcaacagatgtcactat

SEQ ID NO: 858454 - DNA, 120 bp, Artificial Sequence
  ENSG00000229955_0 (sequence is synthesized)
gatcttcagtcttatttagaaaagcttaatgttaaagatctagtttattcaaaactaaagataacaaggagtatgagaatttctatttcggagtgtaaaggaggagatgtttccttggct

SEQ ID NO: 858455 - DNA, 120 bp, Artificial Sequence
  ENSG00000229955_1 (sequence is synthesized)
tctctgagcctacaggccttccttgctctttaaggaagtagagagagggaggaaagtaaagaagccccacccagtgcttgttgaaggcagaaagttgtggaaagcaagccgggatttgaa

SEQ ID NO: 858456 - DNA, 120 bp, Artificial Sequence
  ENSG00000229955_2 (sequence is synthesized)
atgagtgaccattctgaggtgttaagtatttcttgaatggggattttaggaaaagtttctgtatttctgtgctcattttgttgacctctgtatgtgcaaaatctctaagggggtgtttgg

SEQ ID NO: 858457 - DNA, 120 bp, Artificial Sequence
  ENSG00000229955_3 (sequence is synthesized)
gcacttagattggatgcagatttgtttgtatatgaaacagattttaaattgttttgtatacactggatttaaaatattttagtttactaaagtgttttaatgttttcatcttaatcttca

SEQ ID NO: 858458 - DNA, 120 bp, Artificial Sequence
  ENSG00000285230_0 (sequence is synthesized)
tgagagcacgagaagcccgttgtccttcattcctcagctatggatttccctgaaagttgagaactgaccatattctcgatgcctcctccgacctgtgatttcatgactcacatcgcttcc

SEQ ID NO: 858459 - DNA, 120 bp, Artificial Sequence
  ENSG00000285230_1 (sequence is synthesized)
ccagaacctgcttaacagacgggattcctgagaatggagcagagtttgaattcagagtcctggctttgccataccagcagttataattgtccttctgttgtttgatgacctccctgccct

SEQ ID NO: 858460 - DNA, 120 bp, Artificial Sequence
  ENSG00000285230_2 (sequence is synthesized)
gcttcaaaaggaagagaaatcaaagagttgacgaccctgagcgcaaggcctgggacgttcttccccaaactcgctttaatatcaccttctcaaaagaactcttccctgaacaccttgtct

SEQ ID NO: 858461 - DNA, 120 bp, Artificial Sequence
  ENSG00000285230_3 (sequence is synthesized)
aacaccttgtctcaagatgttctctagtttgtcttcttgttctgtcatttatttgtctgttcattgtttgtgtgttttttgaggcggagtctagctctgtcgcctaggctggagtgcagt

SEQ ID NO: 858462 - DNA, 120 bp, Artificial Sequence
  ENSG00000285230_4 (sequence is synthesized)
ggggtttcatcatgttggccaagctgggctctaactcctgacctcaggggatctgcatttgaggataaaccctgtcttggctcctccctgacgggggtgagaagtagccctcctggaatt

SEQ ID NO: 858463 - DNA, 120 bp, Artificial Sequence
  ENSG00000285230_5 (sequence is synthesized)
gcctcaaagcccccggttatcaccagtgttctcggttgcaaattacgaaacataaataaactcagactaacagatgcagcaaaggaatttatcaggaaggaatggggagctcccagaact

SEQ ID NO: 858464 - DNA, 120 bp, Artificial Sequence
  ENSG00000285230_6 (sequence is synthesized)
gcactgaagtggtgagcgcagaggcttgaatgttgccaggactctcctcccagtcctttatctcttctctctgtatgcgagcttttctcctcaaggctaggcacctggctgcagcagcgc

SEQ ID NO: 858465 - DNA, 120 bp, Artificial Sequence
  ENSG00000285230_7 (sequence is synthesized)
tcaccactcacaactctcacccgttccaccggagagagactgaggatttctgcttctggtctgaaggacaaaattttagggaaaaactttgattggtccaacatagatggagaaatgaca

SEQ ID NO: 858466 - DNA, 120 bp, Artificial Sequence
  ENSG00000285230_8 (sequence is synthesized)
actggagaggggagttctactggagaggggagttcacacatatacactgaaagctgcccatcaaaagagttgcagaaccaggactacagcccttgcatcttgactgccagtacgatgcag

SEQ ID NO: 858467 - DNA, 120 bp, Artificial Sequence
  ENSG00000285230_9 (sequence is synthesized)
gttaaactctgtgtttgatgcttgttgatgtggacgtctggaacttgaatagaagacatttcttatttcagatgcatccattagcaggtcttagccaggagccaggcccttgcaagtata

SEQ ID NO: 858468 - DNA, 120 bp, Artificial Sequence
  ENSG00000285230_10 (sequence is synthesized)
tattgcaagtaattgatgacattggagccagaaatcgaatgaaccgggcccagttcaatccacttactggacaagctcctcaagcactctaagccccaatttcctcctctgtaaagtggg

SEQ ID NO: 858469 - DNA, 120 bp, Artificial Sequence
  ENSG00000285230_11 (sequence is synthesized)
cataaattacatttaccttgagggttgctgtgaaggctagaaataatatatgtaatgtcccctgatacacagaaggtgctcaagaaatagtaagctcttctaatgattgttattgatggc

SEQ ID NO: 858470 - DNA, 120 bp, Artificial Sequence
  ENSG00000285230_12 (sequence is synthesized)
aaagatgatgaaaaaacaaatgctctgacttctcaaaggagagagaatcatccctgaggattgtgtcttggagaacataaatccatattttctctttcctgaacaaattccctctggaag

SEQ ID NO: 858471 - DNA, 120 bp, Artificial Sequence
  ENSG00000285230_13 (sequence is synthesized)
ggcacaaagggaacaaattcccttgttaggaaggaaggaagggaaggaaggatggaaaacaagagcaaggaagggttggcaggttgtgactgtctacctctccctgaggcttgctctgct

SEQ ID NO: 858472 - DNA, 120 bp, Artificial Sequence
  ENSG00000285230_14 (sequence is synthesized)
cgggcgcggagggctggggccggggacccggggcggcgggtccgagtgggagaaaggagcggcggagggggcctagagttactcgggctcccgggactccccgaagggcagaaataagtt

SEQ ID NO: 858473 - DNA, 120 bp, Artificial Sequence
  ENSG00000285230_15 (sequence is synthesized)
tctaaaaataggcagcggcctgccggaagaagctgtgggcggtgcaggagggatccggaagagacgaggcaggaagaaactcctggtcctttcgcttttaaggaacgtgccacctagaca

SEQ ID NO: 858474 - DNA, 120 bp, Artificial Sequence
  ENSG00000285230_16 (sequence is synthesized)
attctctaaccaatactgtgaataaggaagtgggacgtacagggagatggcagccccatcggaaccatatggtcagagaaagatgcatttcccaaaagatggagttcatgctctggggca

SEQ ID NO: 858475 - DNA, 120 bp, Artificial Sequence
  ENSG00000285230_17 (sequence is synthesized)
gattgaataatagattttcactacacctgccccagagttacccccaaccaatacattacttactgcccaactctcatcattccttctctgctcaaaacccttcaatgggctgggcgcggt

SEQ ID NO: 858476 - DNA, 82 bp, Artificial Sequence
  ENSG00000285230_18 (sequence is synthesized)
tctctgctcaaaacccttcaatgggctgggcgcggtaagggggggattacttgaggtcaggagttcaagaccggcctgggca

SEQ ID NO: 858477 - DNA, 120 bp, Artificial Sequence
  ENSG00000285230_19 (sequence is synthesized)
agcctgagacacagagagagactccgcctcaaaaacagaaaaacaaaaaacaaccttcaatagcctcccattgccatgtcatcagcatggatcaaaaactcaaatgtcatgccgggcaca

SEQ ID NO: 858478 - DNA, 69 bp, Artificial Sequence
  ENSG00000285230_20 (sequence is synthesized)
atcagcatggatcaaaaactcaaatgtcatgccgggcacagtggctcattcctttaatcccagaatttt

SEQ ID NO: 858479 - DNA, 86 bp, Artificial Sequence
  ENSG00000285230_21 (sequence is synthesized)
ctacaggaggccaaggctacagtgagacatgctcacaccactgcatccagcctaggcaacagagtgagacccttctcaaaacaaat

SEQ ID NO: 858480 - DNA, 120 bp, Artificial Sequence
  ENSG00000285230_22 (sequence is synthesized)
ccagcctaggcaacagagtgagacccttctcaaaacaaataacaacaacagcaaaccctcaggtgtctacaggggctagaaagaaggttaggcatgagacaatagggagtggagagcact

SEQ ID NO: 858481 - DNA, 120 bp, Artificial Sequence
  ENSG00000285230_23 (sequence is synthesized)
gtcatgaactggaggatgtgtgttgcatactgttcctagaatgcaggtgctgagatgtaggattcttcaagagagcccccaaatctggattttcatataaaatctcccaatttctaaatg

SEQ ID NO: 858482 - DNA, 120 bp, Artificial Sequence
  ENSG00000285230_24 (sequence is synthesized)
ttggctcaactatttttaaaaaccctgtgcaagccaaatgaattatgtctgcaggccaattactgtaggctgtggtctaaaaatgagcaatctctgacctttataggataaagcctataa

SEQ ID NO: 858483 - DNA, 120 bp, Artificial Sequence
  ENSG00000285230_25 (sequence is synthesized)
gaagagacgaggcaggaagaaactcctggtcctttcgcttttaaggaacgtgccacctagacaagaaggcctgggtgtcagccagaccacacatggatccttgagccatcctatgggaat

SEQ ID NO: 858484 - DNA, 120 bp, Artificial Sequence
  ENSG00000285230_26 (sequence is synthesized)
atgacctgagaggcccttcccattgactcagcagcgggatggagaaaccccagcatatcatggtttcgtggactgaaaatccatccggggtcatctgctggggtcctgcctgtgcctcct

SEQ ID NO: 858485 - DNA, 120 bp, Artificial Sequence
  ENSG00000285230_27 (sequence is synthesized)
agtccctaaggtgatgactgcagctatgaccctgctgagagctttctcctgatgccagggcacacttggcccactcactggacaagacagaagtactggagatgttgtactcacagaaat

SEQ ID NO: 858486 - DNA, 120 bp, Artificial Sequence
  ENSG00000285230_28 (sequence is synthesized)
gttgttcagccaatgacagggaattgatgatgatgttagtatcctctccccttgtactggataaacctgagtgttcttgtgtccgggaggtccccagtgggattgagctccagttgtcca

SEQ ID NO: 858487 - DNA, 120 bp, Artificial Sequence
  ENSG00000285230_29 (sequence is synthesized)
cagaggggaatttcttcatcacacctgatttcttggcagccttttcctccctgtgtcactccctaatctgttaacggtgttccctgggatcatcccccaaataaactacctggccttgca

SEQ ID NO: 858488 - DNA, 120 bp, Artificial Sequence
  ENSG00000285230_30 (sequence is synthesized)
gagggatccggaagagacgaggcaggaagaaactcctggtcctttcgcttttaaggaacgtgccacctagacaaggtgagggtcgctcttcgctgcctaatctgggactgggcggagagg

SEQ ID NO: 858489 - DNA, 120 bp, Artificial Sequence
  ENSG00000285230_31 (sequence is synthesized)
ccgcgctaagggtgatctccgaaaaagatgcaggagatgttttataacttgatccaggtgctagtcctctctcctacacatttctcctgtcgggatttctcactttcagtgttccagcct

SEQ ID NO: 858490 - DNA, 120 bp, Artificial Sequence
  ENSG00000285230_32 (sequence is synthesized)
ggccttgcattcttgtcccaaggtgtgcaactgagagaaccctaaaacatcacccatttaacttttttttttttttttctgagacagactctcactgttgcccaggctagagtgcagtgg

SEQ ID NO: 858491 - DNA, 120 bp, Artificial Sequence
  ENSG00000285230_33 (sequence is synthesized)
acaggcgtgagccaccacacctggcttttaattttataagccccacttactgacccacagggaccaaaccctgctgtatgggaggaacttccagatccccttcctcccattgatgggcct

SEQ ID NO: 858492 - DNA, 120 bp, Artificial Sequence
  ENSG00000285230_34 (sequence is synthesized)
cctaaggcacagatgaagagagagggcttgctaccaacttgatagttctcataagaatctccatagctcatacaaattaaagtggtttcatagttcccaatgatgtccctggtggccatg

SEQ ID NO: 858493 - DNA, 120 bp, Artificial Sequence
  ENSG00000285230_35 (sequence is synthesized)
tcggtgcgtcccacctttgttgtggaaatggaaccatagtgattggtccgtgccatgagcgtgtcattcaagctaggccaattagagatatctcctggaactttttacaccaaaactaat

SEQ ID NO: 858494 - DNA, 120 bp, Artificial Sequence
  ENSG00000285230_36 (sequence is synthesized)
ggagagatgttctctgaactccaagagttgctaaagctggaaggctgtgattctggagtggccagagtccatcttcccctccccgtggagaagtctgcctgtgactggtaagaatggctc

SEQ ID NO: 858495 - DNA, 120 bp, Artificial Sequence
  ENSG00000285230_37 (sequence is synthesized)
caacaggcaaagagcagcagagaaaagagagaacagcctggtggcctttgggtgtctgaatccagtcatctggggtattggctccaccgggtgctgtccatggtttgtgtatgtgaaaca

SEQ ID NO: 858496 - DNA, 120 bp, Artificial Sequence
  ENSG00000285230_38 (sequence is synthesized)
atgaattaccctttcttgctcaaagtagttacagttcggtttctgtcacttccaacaaaaaatctttgatgaatacagatatccccagcaatggaaaagatgaggagatttcaggtggcc

SEQ ID NO: 858497 - DNA, 120 bp, Artificial Sequence
  ENSG00000285230_39 (sequence is synthesized)
tcccaggcagtggatgttcacagctgggacaagactggggggctacaaaaatggctgccaatagctggtctttaagcatgtaacaaataccttccagggactcctagggatacacatgtc

SEQ ID NO: 858498 - DNA, 120 bp, Artificial Sequence
  ENSG00000285230_40 (sequence is synthesized)
cttacacacacacacacacacacacacaacaccagggataaagaaaaaatacctttaaggaaaagatattaccataacaacattcttagtcaggtactgtattgtttaacctctttgtaa

SEQ ID NO: 858499 - DNA, 120 bp, Artificial Sequence
  ENSG00000285230_41 (sequence is synthesized)
gtcaggtactgtattgtttaacctctttgtaaagctcattccttaagtatgttcttttcaactctacaaggcagcaaagaaaatagatgttttagctattgttctcttattcacgctctt

SEQ ID NO: 858500 - DNA, 120 bp, Artificial Sequence
  ENSG00000285230_42 (sequence is synthesized)
ctttcggaatcgttcctaaattaattaccttttataaccttatataaccataaaaactatagtcattctttatgaggaattgcacaatacatatctctcaaacagaagttctcgtgcgca

SEQ ID NO: 858501 - DNA, 120 bp, Artificial Sequence
  ENSG00000285230_43 (sequence is synthesized)
tgtaaaagcttgaacataaagtgctggggtctttgtcaagtcctccaggagcagatcctagtgtagcgggcagatgtaggagctaagaggcataaactccgagtcaatgttttgtttctt

SEQ ID NO: 858502 - DNA, 120 bp, Artificial Sequence
  ENSG00000285230_44 (sequence is synthesized)
ctttattatttgggaagaaatattgcttaattgaaataaaatgagtgtaaatttttctatagccccattctgagaggtgagggaggaactatcatgtgaatattcattatttgagaatta

SEQ ID NO: 858503 - DNA, 120 bp, Artificial Sequence
  ENSG00000285230_45 (sequence is synthesized)
attgtactttggtactttggagttgaagggagaacacgaagaagactttgcaaaaagggtgtgaggccccatgcgagtgaaaaatagtaggaagagaaaccatgggcttttgatagaaag

SEQ ID NO: 858504 - DNA, 120 bp, Artificial Sequence
  ENSG00000285230_46 (sequence is synthesized)
tagattccatcgttgtcaggaacgtttcctccttcccctccacctccatggatggagtatacttcctcaccccttgacttcgggcttggccctgagacttgctttggccaatggaatagc

SEQ ID NO: 858505 - DNA, 120 bp, Artificial Sequence
  ENSG00000285230_47 (sequence is synthesized)
accagacataaaacaaatgagcttggaatatgcctgcacagctaggcaaactctcctacaattccatcatctccaagagttaaatatgttctggttagcccactggttccaggaagagga

SEQ ID NO: 858506 - DNA, 120 bp, Artificial Sequence
  ENSG00000285230_48 (sequence is synthesized)
tgggagtcacgtgcagcagagccacccagcctacttatggagtgaagcagagccaccagctgatcaggaaacttgtaatcccagtgcttactgtcatatgccactgagagtttgaggttg

SEQ ID NO: 858507 - DNA, 120 bp, Artificial Sequence
  ENSG00000285230_49 (sequence is synthesized)
attgttatgtggcattgctagagcagtaactaattgacagaagctgttagtgtgatttcccttgaatgtgcaaactgaagaagctcagcatcgtttggattattgtactaataaaagtaa

SEQ ID NO: 858508 - DNA, 120 bp, Artificial Sequence
  ENSG00000285230_50 (sequence is synthesized)
gttggtgtcagaccaccagctttgagccatccctgggaatccccaggatactggatagcagatttggagcatacagttcccacccactgtgactgacggctagggagctcaaggttatgg

SEQ ID NO: 858509 - DNA, 120 bp, Artificial Sequence
  ENSG00000285230_51 (sequence is synthesized)
aggaagctctcataagtcaatgcaagtttgtgtgtctcccgttcctcactggcttagccctcagagcccttgtccctgctttctgccttgcaactaggtcttcacattagtgttttatca

SEQ ID NO: 858510 - DNA, 120 bp, Artificial Sequence
  ENSG00000285230_52 (sequence is synthesized)
aacaaaagacaggctgacatctttaaagtatggtctttattaagtagggagcaaatcattccacaccttccctcccaatacctccctcaccagtgacttcaagccttcaaacaagagggg

SEQ ID NO: 858511 - DNA, 120 bp, Artificial Sequence
  ENSG00000285230_53 (sequence is synthesized)
acacctctccccacttcccagtgacctttctccgcccctcattgcatccatgagtgacaccactgagatcagatgcagtgatgttaattgaaatggacattaagggctcacttgctcaag

SEQ ID NO: 858512 - DNA, 120 bp, Artificial Sequence
  ENSG00000285230_54 (sequence is synthesized)
cagaagcacattagaagaaatataaacgaggaagacattgggtcagtaacatttgttctaatgagaataaccatctctagagcatcttgttcaaaaaggattgagtgcccaggaaacaac

SEQ ID NO: 858513 - DNA, 120 bp, Artificial Sequence
  ENSG00000285230_55 (sequence is synthesized)
agatacatgaggccttccacccccaccccacccccaatactcagaagtgtcacacatacttgcagagacttttcaatcatccttgcttcaatcatgattccccaggtgcatttctgtggg

SEQ ID NO: 858514 - DNA, 120 bp, Artificial Sequence
  ENSG00000285230_56 (sequence is synthesized)
tgtcacccagcacattccccctcgtgttcttcatctgtttctccaaatctacttctccatattattttaagagtttgtgaccagatgttggtaacatgtggtcccagatgttcttatttg

SEQ ID NO: 858515 - DNA, 120 bp, Artificial Sequence
  ENSG00000285230_57 (sequence is synthesized)
ctatacctcaggaattcttgactaagtgacccaagagcttctcaactttggatccaataaggggaacctaaggctaaaagaatcccatctggagtagagaggaagatacccaattaccca

SEQ ID NO: 858516 - DNA, 120 bp, Artificial Sequence
  ENSG00000285230_58 (sequence is synthesized)
atttttttgtttgtttttgtttgttttctgagacagagtctctctctgtcacccaagctggagtgctgtggtgcggtcatagctcactgcagcattgaactcctgagctaagcagtcctt

SEQ ID NO: 858517 - DNA, 120 bp, Artificial Sequence
  ENSG00000285230_59 (sequence is synthesized)
ggcatgtaccaccatgcccagctaatttttaaaaaaagtttttgtaaagacagggtctccttatgttgcaaaggctggtcttgaactcctgggctcaagaggtcttcccacctcagcctc

SEQ ID NO: 858518 - DNA, 89 bp, Artificial Sequence
  ENSG00000285230_60 (sequence is synthesized)
gcccaagtttctgcataaagaacatgaaggttttccttagatcatgctttacatggcacatcatgtctttatggttattagtgggcagt

SEQ ID NO: 858519 - DNA, 120 bp, Artificial Sequence
  ENSG00000285230_61 (sequence is synthesized)
acatggcacatcatgtctttatggttattagtgggcagttgcaaggtatagataccatttttgtctatgctgtatcatctcccaatattcttaacagcatctgacttaaaaaaatttttt

SEQ ID NO: 858520 - DNA, 86 bp, Artificial Sequence
  ENSG00000285230_62 (sequence is synthesized)
cccaatattcttaacagcatctgacttaaaaaaattttttttttgagacaaggtcttcctctgtcacccagtatggagtgcagtgc

SEQ ID NO: 858521 - DNA, 89 bp, Artificial Sequence
  ENSG00000285230_63 (sequence is synthesized)
cctcaggctggtccctaactcctaagctcgagcaatctgcccgtcccagactccctgtaagtgcttggattacaggcatgagccattgt

SEQ ID NO: 858522 - DNA, 120 bp, Artificial Sequence
  ENSG00000285230_64 (sequence is synthesized)
ttacaggcatgagccattgtgcctggccagcatctgatttttctgtgagcctctactcctattcttggtccaggccataaagagtatggaaactaaagtctgactgcctaggtttgaata

SEQ ID NO: 858523 - DNA, 120 bp, Artificial Sequence
  ENSG00000285230_65 (sequence is synthesized)
tgactgcctaggtttgaatattggctctgccattgaccagctatgtgaacctggaaaaattcctaacctctctgtgcctcatataagaaatgtggagaatagtatctacctcatggagtt

SEQ ID NO: 858524 - DNA, 120 bp, Artificial Sequence
  ENSG00000285230_66 (sequence is synthesized)
tttgggttatatgagttaattcagataaaatgtttaaaagagtgactggcacatagtaaacaccccccaaatgtcatctagtattaatattattactattagttcagaaggggctgactt

SEQ ID NO: 858525 - DNA, 120 bp, Artificial Sequence
  ENSG00000285230_67 (sequence is synthesized)
cattccccctggccctggtgatggcacctgacccaggcctggccaatcaggacattctgtccccctgtccaccatggagtccttctccatggtcagtcataccagtcatttggattggca

SEQ ID NO: 858526 - DNA, 120 bp, Artificial Sequence
  ENSG00000285230_68 (sequence is synthesized)
ctgtgggctgtgatctaatgtgaactctgaaagcctggtcatgctgggccaaagctgcaaagtaaaggtaaacatcaaatctgggctggttcatcaggagagaacattctgagtagggag

SEQ ID NO: 858527 - DNA, 120 bp, Artificial Sequence
  ENSG00000285230_69 (sequence is synthesized)
acctggggactatccagtttcaccttgcaggtgaaggcccactctccctactctagccgttagttagaccccatgaaaataattgcagtagactgttaatttgatggcttccagtgaacc

SEQ ID NO: 858528 - DNA, 120 bp, Artificial Sequence
  ENSG00000285230_70 (sequence is synthesized)
atgcttctggcattcatactcttatgtagtcccctcccacattgattctggactttgccatattgatgcagggcaggtaagccccagaattggggcttagcccgagaaggttcttcactt

SEQ ID NO: 858529 - DNA, 86 bp, Artificial Sequence
  ENSG00000285230_71 (sequence is synthesized)
gccccagaattggggcttagcccgagaaggttcttcacttcatccaggaaagaattcaagggcaaacaggtggtggtagatgccaa

SEQ ID NO: 858530 - DNA, 86 bp, Artificial Sequence
  ENSG00000285230_72 (sequence is synthesized)
caccaccatgcccagctaatttttgaattttagtagagatggggtttccccacgttggtcaggatggtctcgatctcctgacttca

SEQ ID NO: 858531 - DNA, 120 bp, Artificial Sequence
  ENSG00000285230_73 (sequence is synthesized)
gcagcagtgtccaacagcagcagaggtactgctccttgtggaacaggactaccccctaggcagcatgcccagagtagcagctcaggggtaattctgtcgtcatatttatacccactttta

SEQ ID NO: 858532 - DNA, 120 bp, Artificial Sequence
  ENSG00000285230_74 (sequence is synthesized)
attacatgcaaattaaggggcaggttattcagaattttctggacaaaggatgatacttccaggccattgccatggaaaggggtggtaacttttaggtgttgccatcactgtggtaaactg

SEQ ID NO: 858533 - DNA, 120 bp, Artificial Sequence
  ENSG00000285230_75 (sequence is synthesized)
acgtggtgttgctgggtatgtctcatggagaggtgctttcactgcttccctgttcacctagtcttcaatctggtccagagtttcagccccatctctggagttgagtcctgccttctccct

SEQ ID NO: 858534 - DNA, 120 bp, Artificial Sequence
  ENSG00000285230_76 (sequence is synthesized)
caatgtgacaaatgttggccaatggtatatcgcagttgtgatgcaagcagaggcttggtaaatgcctgcatactggggtttgtcctcttggaatgctcatttgtgggagccctgaacaac

SEQ ID NO: 858535 - DNA, 120 bp, Artificial Sequence
  ENSG00000285230_77 (sequence is synthesized)
tatgtaagaagtctggctaccctgctggagagaacacatggtgggaagagactaaaattatgtgaagagagtcaggccagccatcccagcttctctgctgagccccgccatcagccaacc

SEQ ID NO: 858536 - DNA, 120 bp, Artificial Sequence
  ENSG00000285230_78 (sequence is synthesized)
tgccagctgaatgcaaccgtaagagtgatcaccagcaagatcactagaaaaaccacctaactgagcccaccctggattgaacaatcataaacaaataaaatggttattgttttaaatcac

SEQ ID NO: 858537 - DNA, 120 bp, Artificial Sequence
  ENSG00000256209_0 (sequence is synthesized)
agacgtcccaaggtatgagctgtagatacgcacgtgagcgctggtgggagacgccaggctgggatttccgctcgatctgggaatgagcaatgcaacctaatgacacccagagctcctgaa

SEQ ID NO: 858538 - DNA, 120 bp, Artificial Sequence
  ENSG00000256209_1 (sequence is synthesized)
tcacccgaggaaaatgacgagagactccctccggtgggaacgtctcctagaaacaaggcctaagatggggcgacaacagccccacagctgtgtccagatgcagggagcactcgcctgtgc

SEQ ID NO: 858539 - DNA, 120 bp, Artificial Sequence
  ENSG00000256209_2 (sequence is synthesized)
tgtgagggacggccggtgtcatcgttggagcttcctaagagtcccagaggctgatgcacctcccagactctcctcggcccggctccctgggccctgctccaggggcttcattgctccctg

SEQ ID NO: 858540 - DNA, 120 bp, Artificial Sequence
  ENSG00000256209_3 (sequence is synthesized)
ccccgggtcacccctcggctcaccgtctctcaggtgtggaatatcctgctccaatcaaagccatgtcacctgcgttgtccagtgaaacatcagtggacaggcgctgcccgggctccaggg

SEQ ID NO: 858541 - DNA, 120 bp, Artificial Sequence
  ENSG00000256209_4 (sequence is synthesized)
actccctgtgcctctgccatcagcacagggggacatgcctggctgcctgtgggaccagggaggacgcgcggtgcgggagcagagccagccacactgccgctgctgcactgttcatctgag

SEQ ID NO: 858542 - DNA, 120 bp, Artificial Sequence
  ENSG00000256209_5 (sequence is synthesized)
tggcgcaagattcagtgcctgcgtcatagaagggtccgtgtcagtaaggaagtgaaaagcaagatggaatactggaactctcctggcagattgtctgaagtcaatgtgttttctggttat

SEQ ID NO: 858543 - DNA, 120 bp, Artificial Sequence
  ENSG00000256209_6 (sequence is synthesized)
gtgtttcagctgcgagtttttcaaattgttgcaaatcttcaaacatttttccaacaaatttactgaaaaaaatccacatataagtggcacccccaccagtttaaacctgtgttgttcaag

SEQ ID NO: 858544 - DNA, 120 bp, Artificial Sequence
  ENSG00000256209_7 (sequence is synthesized)
agtcagctatttttatgaggtgttttcaaaagtttatggaaaatgaatcttatgaataaaactatgcatggatttcaaatcttttgcaccaaaataaactcatactaacttgttataaaa

SEQ ID NO: 858545 - DNA, 120 bp, Artificial Sequence
  ENSG00000256209_8 (sequence is synthesized)
ggtgggggtggggggtctctgtgaagagaagaggtgcctgcagcagagcctgccctgtcccctccgtggttccacatccgtgcctctgaggaccttggacccccaaagcgaggcccgaag

SEQ ID NO: 858546 - DNA, 120 bp, Artificial Sequence
  ENSG00000256209_9 (sequence is synthesized)
tgtaagtctgtcccacagtggagaaaaggctcagaccccacggctctgctgtccaccctcagtgcgggggagaggggggatccatatcggcagtcaaggagcgggaatctgaaaaggcca

SEQ ID NO: 858547 - DNA, 120 bp, Artificial Sequence
  ENSG00000256209_10 (sequence is synthesized)
aggctgaaccctgcacagaacccagacctccgtgtgcctccagaaacagccgaggctgggccttccttgagatactcttcaacttcaaggctcttctcacctgagctccttggaagctgt

SEQ ID NO: 858548 - DNA, 120 bp, Artificial Sequence
  ENSG00000256209_11 (sequence is synthesized)
cccagacagctgctggtccctcctctgtccccactgtgcagagtgtggccccactggagagactgtttttccccccgtgtattggagtcagtcaccctcacctggaagaatgggactgtt

SEQ ID NO: 858549 - DNA, 120 bp, Artificial Sequence
  ENSG00000256204_0 (sequence is synthesized)
ccagaacggccatcagaccctgtccctgccttgctccagctctgttctcaaggctgctttcctggtgtgggagcagcatccgctcagaagctccaagttctggttttgtcagatttttcc

SEQ ID NO: 858550 - DNA, 120 bp, Artificial Sequence
  ENSG00000256204_1 (sequence is synthesized)
aatatggaaggcacattgtgaatttgttatgactctatgaagacgtgaattgatacttaaatataagctgttgctcaggtagaagtcattgttttgtgcgttgagttaactaaatgaaaa

SEQ ID NO: 858551 - DNA, 120 bp, Artificial Sequence
  ENSG00000256204_2 (sequence is synthesized)
gcttggttaccggcaccatggatggccttcgatctacccttacctaacaccacatggaatttttttatttttatttttcttcctgaacagaaagacatttggccaagacaggctcatttt

SEQ ID NO: 858552 - DNA, 120 bp, Artificial Sequence
  ENSG00000230690_0 (sequence is synthesized)
ggtggtcccccctggagaaaagagccgccgccgagggcgcgaaaaggcgagtccggaagcccgccagggagccagtggcgcgttttccagatcaccctgttggaacttagcgtagcagag

SEQ ID NO: 858553 - DNA, 120 bp, Artificial Sequence
  ENSG00000230690_1 (sequence is synthesized)
gaagaacaccatggaataaggagaaaggagatacaagtagcctctccaggaagaatgtgactgaatactttttatacaaaaccacaaaattagataaatatgtatttaagtgttattcct

SEQ ID NO: 858554 - DNA, 120 bp, Artificial Sequence
  ENSG00000230690_2 (sequence is synthesized)
gaaagctggagaaagaaatcttacttctaagaattgtttagcgaaggaataagaaaatgtgatgcttggaagaaaaaacacactgccgagaggccttgcgctgagtgtgctgaacaatag

SEQ ID NO: 858555 - DNA, 120 bp, Artificial Sequence
  ENSG00000230690_3 (sequence is synthesized)
acaacctctaaggatgctcgcctgcaattccggctctgccatcaattcactgtatgcctttggatcatctacaagacatgaatgatgttcagaattacttgtcatgccctttgcttgggg

SEQ ID NO: 858556 - DNA, 120 bp, Artificial Sequence
  ENSG00000230690_4 (sequence is synthesized)
ctgaaaacaagatgcagtcacacagatttcaatggagtgtgtactctagaggcagactgcctgggatcaaaatgcttgcagtataaccattgacagcttccataacttatctcttcccag

SEQ ID NO: 858557 - DNA, 120 bp, Artificial Sequence
  ENSG00000230690_5 (sequence is synthesized)
aatcaacctgtaaaatggggtaatatctgctcctccctcatagggttgtgcataaaaatctcatgagattataggtgtagagaggtgagaacccacagaaacctttccataaatgctacc

SEQ ID NO: 858558 - DNA, 120 bp, Artificial Sequence
  ENSG00000230690_6 (sequence is synthesized)
tattattattaaattctagctttctttcagttttcaaatttaaagtaaagactaaaatcagctgagatatactgcaatctccagctaatgtttggagaagcattagtagtattcccttca

SEQ ID NO: 858559 - DNA, 120 bp, Artificial Sequence
  ENSG00000230690_7 (sequence is synthesized)
tctttcctcatcccctccttttaaagaactctaactgggaacatgcatttatttccctcatatctgtacaagccattgatttgccaggagagaaatacaaagactttcacatttttgctg

SEQ ID NO: 858560 - DNA, 120 bp, Artificial Sequence
  ENSG00000230690_8 (sequence is synthesized)
ctctctctcctgaattaatactccacttctgaatttaaggcagcaaaactccattcagtgttttaagagtgggtaaaatatatagaaatgagaatagctttgacaagttaacatccatgt

SEQ ID NO: 858561 - DNA, 120 bp, Artificial Sequence
  ENSG00000230690_9 (sequence is synthesized)
gaatgagactagagaaataacattctgtatatgagtgcttttcttctaaatcatcttaccaactttcaagtgattagacaattttgtttcattcccttcaaacttacaaattaatatttt

SEQ ID NO: 858562 - DNA, 120 bp, Artificial Sequence
  ENSG00000230690_10 (sequence is synthesized)
taagagatggagttaataaccagttaaaaactataaaggcttcctcaattgaaggtcggagctttgctatctaaaactgacttagagttacaataaaaatagcaatatcatgaaatgcta

SEQ ID NO: 858563 - DNA, 120 bp, Artificial Sequence
  ENSG00000230690_11 (sequence is synthesized)
tcgcctgcaattccggctctgccatcaattcactgtatgcctttggaaacttgaaaattacacatctgacttaagtctgtgggagccacagtgctctagagggtcttgcactggcaattg

SEQ ID NO: 858564 - DNA, 120 bp, Artificial Sequence
  ENSG00000230690_12 (sequence is synthesized)
aatgctgaactaacttgcataattcttcaaatgaatatcacaccttcgatggggacatacaaattgtttcaacctgaggcttgaaaatatgtgtcataaagcattctgatttatcaagaa

SEQ ID NO: 858565 - DNA, 120 bp, Artificial Sequence
  ENSG00000230696_0 (sequence is synthesized)
ggagaaaataattttgttttgtatttgcatattttgctatatattttcttttttgttgattacaaaaattatacagatattatttagcttatcctcaggtattctgattagcttttttag

SEQ ID NO: 858566 - DNA, 120 bp, Artificial Sequence
  ENSG00000230696_1 (sequence is synthesized)
atttacctaccttttagtcagaaaattatgttatacttttatgaattaactttgttattcaagtacaatttatttatttatttattattattttttgaaatggagtttcactcttgtcgc

SEQ ID NO: 858567 - DNA, 82 bp, Artificial Sequence
  ENSG00000230696_2 (sequence is synthesized)
tatttattattattttttgaaatggagtttcactcttgtcgctcagagtatttcccgggaggatcgcttgaatccaggaggc

SEQ ID NO: 858568 - DNA, 120 bp, Artificial Sequence
  ENSG00000230696_3 (sequence is synthesized)
gtgagactctgtctcaaaaaaaaaaaacacattgttattcggagtgttcagtcacaaggtcagcctattttatcaaaatgtaccagcaaaagattgttgttagcatatatgaaatttagt

SEQ ID NO: 858569 - DNA, 120 bp, Artificial Sequence
  ENSG00000230696_4 (sequence is synthesized)
atgaaatttagtcacgatgtacactattttgtctctgtaagatttattcactgtgtatgtgtgtgtgtgtgcatgtgcgtgtgtgcatgcgcatgcgtgcacgcgcccgcacagaggatc

SEQ ID NO: 858570 - DNA, 120 bp, Artificial Sequence
  ENSG00000230694_0 (sequence is synthesized)
tagatagtgggatactttcctttctgagcaaacaatgagaaaggctgcttcctctccaccctccctatccccgaccctgggcatcgcactcctctacctagacatcactataaaaagaca

SEQ ID NO: 858571 - DNA, 120 bp, Artificial Sequence
  ENSG00000230694_1 (sequence is synthesized)
ttccaagaccttggtatatctaaagaggactcctcaaagataagaccacaaaagtgaggaacaattcaacaaggcaaccacacatgaccctgtgtaaagcattcctgaagctgaagggaa

SEQ ID NO: 858572 - DNA, 120 bp, Artificial Sequence
  ENSG00000230694_2 (sequence is synthesized)
aacaaacttcaaaaatcatgacattgctgaatgaaagcagaaagtctttaaaatgcgagtttttcattaaaaatattaaatgcaaaggcgataaatgcttaaagaatataataaaagtcg

SEQ ID NO: 858573 - DNA, 120 bp, Artificial Sequence
  ENSG00000230695_0 (sequence is synthesized)
ggttcgcagcgaacaaaagagatgctgatggcccgccaggactggggaaagccttcctttcctggggatgggacgcccgtttccactgaaagtgaaatcactgtgaacaacctgaaaatt

SEQ ID NO: 858574 - DNA, 120 bp, Artificial Sequence
  ENSG00000230698_0 (sequence is synthesized)
ccttgtgccccgaccctctggggcctttgtcagtggccacagcagcccaacactctcacccctcacctggcctgactggagaaggccctgggcctgccggttaccatcccacattgcccc

SEQ ID NO: 858575 - DNA, 120 bp, Artificial Sequence
  ENSG00000230698_1 (sequence is synthesized)
cacagggctctcagtgtagcaagggcagggagaaggcccaggctggaaggtccactcctcattctccctgccccaccctgccatgcccatcctgatggtcaccatggcctgtaccaggcc

SEQ ID NO: 858576 - DNA, 120 bp, Artificial Sequence
  ENSG00000230698_2 (sequence is synthesized)
cgcgggcactgccagtcctcgcccgccgcgggcttggcaggcaacagcagcagcaacaggaaggactgaggcagcggcgggaggagctccatcgaggcgagctgggaccctagaggatcc

SEQ ID NO: 858577 - DNA, 120 bp, Artificial Sequence
  ENSG00000230698_3 (sequence is synthesized)
ctaccggcctgggcctggacctgggcgtgggcctggctgggggcccgactcgaggtctggactgggccaaatttaagcagcggtcccgacagccccaagatagcggacccccgccccagg

SEQ ID NO: 858578 - DNA, 120 bp, Artificial Sequence
  ENSG00000230699_0 (sequence is synthesized)
gtgctcacacgcagctggcaatggcaagtcagtggatttaggataaaaccgagaataaggaactttacattgtcaatgatcaaacacctagtgcacccatggccgtgcgtccgcaggaca

SEQ ID NO: 858579 - DNA, 120 bp, Artificial Sequence
  ENSG00000230699_1 (sequence is synthesized)
aagcagcctttggagccctggaacttaagatgtccagagatcagcagctctcggctcaggcccaggcagctggacagcacccagcgcctcctccaggtcctcctgggtcccctcctttct

SEQ ID NO: 858580 - DNA, 120 bp, Artificial Sequence
  ENSG00000230699_2 (sequence is synthesized)
ttcactttcagcccgggaatctctgtgaagtcctagctgataactaaggggttaatgaataatcacagtgatgagctctggaggagccatggcccagagcagctgtggcctcctttgatt

SEQ ID NO: 858581 - DNA, 120 bp, Artificial Sequence
  ENSG00000230699_3 (sequence is synthesized)
aaaccacagaagtccggaggatcaggcctcaaacctccaccacctgccagctggcacctgtgaaggaggtgggaccagcacccacctcacagtggctgcagggtcacctgagatggtgat

SEQ ID NO: 858582 - DNA, 120 bp, Artificial Sequence
  ENSG00000230699_4 (sequence is synthesized)
tgcaaagtgctgagccatcgggacacatatttccaagacctcctgagtgccggctggcccctggagcagagatgagacccctgtggggcctacagtccagttatgaaggcagggttcctg

SEQ ID NO: 858583 - DNA, 120 bp, Artificial Sequence
  ENSG00000230699_5 (sequence is synthesized)
tgtaagccagcaggcccagttctggaaaggccaggatgtgggttcagaagctcaaggacaatggactcattctgactggagggatccaggaaggcttcgtggaggaagtggcatttgaca

SEQ ID NO: 858584 - DNA, 120 bp, Artificial Sequence
  ENSG00000230699_6 (sequence is synthesized)
ttggcatcaaggatgaacaggaatagagagaggggactggtgtctgcgtgaaggatcgccaaagcgctgttctggggtgagggcgatcagcccctcctgcccctcctgaactatgaggct

SEQ ID NO: 858585 - DNA, 120 bp, Artificial Sequence
  ENSG00000230699_7 (sequence is synthesized)
cgggagcctttggcagaaggtggctctgcacgccccaggtgcaagcttggagcttccttttctgcactccacagcaggaagaagggcagtgtgaactgctcaccactgtcttcctgggtt

SEQ ID NO: 858586 - DNA, 120 bp, Artificial Sequence
  ENSG00000230699_8 (sequence is synthesized)
tgcagctctgcgcctggcacagagacaggctcagtgacggttgaaggaatcggagaaataatgaaaagtgtgttcatcctgcaggcagcagagcctcgggttaaccgttaacgtcaggaa

SEQ ID NO: 858587 - DNA, 120 bp, Artificial Sequence
  ENSG00000230699_9 (sequence is synthesized)
atgacagatccaacgctcctgcttggggcagcgtggaggccagcggaggaactgcaggagcctaaaggagatggcgcgcgggcctggctcaggagagcagccgtctgaaagatggcggcg

SEQ ID NO: 858588 - DNA, 120 bp, Artificial Sequence
  ENSG00000230699_10 (sequence is synthesized)
aagggtgcgggaggagatgccccgggcaggggcttggcggggtctggcaccaaacttcccaaagcagctgcctctgtgaactgtgcctggcagggagggagccacaccgggagtgaccct

SEQ ID NO: 858589 - DNA, 120 bp, Artificial Sequence
  ENSG00000230699_11 (sequence is synthesized)
agacgctggctccccaggggtgactggaggcagtgtctcccgcccatgtgggcctccggcttggggtccccagagctctgccctgctgctggctgcactgagagaggtggccttctgaat

SEQ ID NO: 858590 - DNA, 120 bp, Artificial Sequence
  ENSG00000230699_12 (sequence is synthesized)
accctcaaaacacgccatgcccattggaggctctgggtgcaggctgcccctcaaacagagaaaaaccacacgctgtttaagacccaaaccaaggagacagcccctcatgcccccttctat

SEQ ID NO: 858591 - DNA, 120 bp, Artificial Sequence
  ENSG00000230699_13 (sequence is synthesized)
ctccccttctgtccagggccccctgcctgctctggtccaccccgtcctgaccccctctgcctgttcatctgagggccgtgagccaaggcctgggcctggccaagggtcagggatcctggg

SEQ ID NO: 858592 - DNA, 120 bp, Artificial Sequence
  ENSG00000230699_14 (sequence is synthesized)
acctgcttgagaccatgccccatacactccttcggccagaaggtcagccgtagagacaaacccccaccctgagcccgcagtgtcagcaacgccctgtcctcagtgccaggcagtgtcagg

SEQ ID NO: 858593 - DNA, 120 bp, Artificial Sequence
  ENSG00000230699_15 (sequence is synthesized)
ctgagacccgggccacctgatccaacgtccactccaagcaagccagagccaggtgctgccagcctgcccatgtgcacacgttagcagacaggtttcctggtgtggcacacacgtgttatg

SEQ ID NO: 858594 - DNA, 120 bp, Artificial Sequence
  ENSG00000230699_16 (sequence is synthesized)
accgcggctgctgcccccagcccagagtgcacttccgggtaatccagcaccctgaggcttcactgctctcctgagagttttctaagattaaatctccttcacaatgacagcctcctgtca

SEQ ID NO: 858595 - DNA, 120 bp, Artificial Sequence
  ENSG00000230699_17 (sequence is synthesized)
cctgggccctggtgacaaagcctttggagaggcaaggacccagccggggcattcacagtgggcatgctatccaccctccgcccctgtcctggcccccacagtggagccgccaccttgggt

SEQ ID NO: 858596 - DNA, 120 bp, Artificial Sequence
  ENSG00000230699_18 (sequence is synthesized)
aacaggggctgcctgaggtcctggagaaggaagaaccaggtggcccaccttcggtgcacagggaacagcagggacctgacggcagcccccgcacccctccctgggctgaagttcaggctg

SEQ ID NO: 858597 - DNA, 120 bp, Artificial Sequence
  ENSG00000230699_19 (sequence is synthesized)
tctcatcccttgccaggagctcagggctgagctaggttggcaggggatgggttgagggtctgttgtccagcagattgcccgggccccacccaggccactcagaaaacacctgtgagagcc

SEQ ID NO: 858598 - DNA, 120 bp, Artificial Sequence
  ENSG00000230699_20 (sequence is synthesized)
ccgcaggcatgcagggcactgtcgtgagcacaccagtggggacagacgtccaggcaggagggagcagccagacccccatcccgccagggtcaccaggtgagcaaggctggggaacaatgg

SEQ ID NO: 858599 - DNA, 120 bp, Artificial Sequence
  ENSG00000230699_21 (sequence is synthesized)
aggcggagccccgcgactgcccagctcactgcccccagtgtccaggctgtggtgcaggcgtggggacccaggtgtgttcaggggtctccttcagggaaggagaccaagctgggagtctgg

SEQ ID NO: 858600 - DNA, 120 bp, Artificial Sequence
  ENSG00000230699_22 (sequence is synthesized)
caagctgggagtctggggaggctgaggtgtgaggtgacagcaggtaaagagtgagccacaatcagcattttcacatgaaaggaaactacaggcctgggcgcagtggctcacgcctgtaat

SEQ ID NO: 858601 - DNA, 120 bp, Artificial Sequence
  ENSG00000203402_0 (sequence is synthesized)
tatctctaaagcaaaacctattcttaaactaagaatgctttttcttcttaaagtactaggacatttccataagttctgggtctttattcagttagttaacattattaccttgttccctca

SEQ ID NO: 858602 - DNA, 120 bp, Artificial Sequence
  ENSG00000247473_0 (sequence is synthesized)
gtagaatccagccagtcagagagcaaatccttggcttcttccagcaacacctgaagagaaagaaacaaaaatccagcagcgggccacacacttcacatgagaacatctcgtgcagctggt

SEQ ID NO: 858603 - DNA, 120 bp, Artificial Sequence
  ENSG00000247473_1 (sequence is synthesized)
gtgagcccatcagtgccctgaattcaaaggtgctgaccttgacctgtgaagagccaccgtctcctagggagactgtgatgcttacacaactggctcggcagggacaaatacaagactcta

SEQ ID NO: 858604 - DNA, 120 bp, Artificial Sequence
  ENSG00000247473_2 (sequence is synthesized)
caaatgggcaggtctcacatgaactcagaggagcaaagccaaggggactgtgggtgcagaggcaaaaagaggtgggagggccgaggtgggcctggtgagcatgtgcagcctacctgggcc

SEQ ID NO: 858605 - DNA, 120 bp, Artificial Sequence
  ENSG00000247473_3 (sequence is synthesized)
gtgcagggcagggttatgggcagaggctgggcaggagcacacagtgtgtcacctacagcacaaccccttggtgcattcaggaaaagattcatgacggacacagccagaggttaggagaga

SEQ ID NO: 858606 - DNA, 120 bp, Artificial Sequence
  ENSG00000247473_4 (sequence is synthesized)
taggcagggcactggtcccagaggtctcaaaagccccatctccctgacgccattgactgaagatgccatccccacttgacacaccatggaatgggagtaaaaaccaccaatcccagcaaa

SEQ ID NO: 858607 - DNA, 120 bp, Artificial Sequence
  ENSG00000247473_5 (sequence is synthesized)
acatggcacctatgtgaaccaggtcctgaccacacacactctaggcatgagacacgccccaactgcactcatgtcagaaaagagaaatgtctaccctccgccatcttggagggacctaga

SEQ ID NO: 858608 - DNA, 120 bp, Artificial Sequence
  ENSG00000247473_6 (sequence is synthesized)
gtctcaatgcactgacgtggacccaggacagggcgtgacaccaagcagatggtctgtggcctactatgggaaggggaggcaaagaaccaaggctggagagaaaaagtgtaggaaaatggc

SEQ ID NO: 858609 - DNA, 120 bp, Artificial Sequence
  ENSG00000247473_7 (sequence is synthesized)
ctggcagacagcaaggacacagggtggacaaagccacaacacagacagagaaggggcacagggcccacgtgggccaggttcctgatgcaatccctgcctacagctcctgaatcaaacaga

SEQ ID NO: 858610 - DNA, 120 bp, Artificial Sequence
  ENSG00000247473_8 (sequence is synthesized)
tgtgttaaatgtattgcaggcctgcaagtggcaaggcacgtctgcaggaatgagcacaccctccccaccgcggcagggcatccagtgggcagacaagcaccaaaagcagggtgtgcgctc

SEQ ID NO: 858611 - DNA, 120 bp, Artificial Sequence
  ENSG00000247473_9 (sequence is synthesized)
tggggagcaaaggctgccaagtctgctgcccgaaaagcaaacactgggcctgccccaagtacagggaaacgcgcatcctggccctcaggatcaccaaggtcacgacccagcaagaaccga

SEQ ID NO: 858612 - DNA, 120 bp, Artificial Sequence
  ENSG00000247473_10 (sequence is synthesized)
catcctaatcgaggtcaccaaacacccaagaacatgagcaactgtgaatgggagtcagcagaaacgacaaacagatggacgcttcagatggaggagttatcagatacataataaaatcca

SEQ ID NO: 858613 - DNA, 120 bp, Artificial Sequence
  ENSG00000247473_11 (sequence is synthesized)
taaggacggactcccagatgacaggcaatagcaagcagggacaggccagcaaagcggcccagctggatctgaaaatagaagcaaacggaacctgcagagatgaaatctattaacaggcga

SEQ ID NO: 858614 - DNA, 120 bp, Artificial Sequence
  ENSG00000247473_12 (sequence is synthesized)
aacagtcttatccatcctactgagtgactgtttcacttcctgtctgaaggagaatttgtgaacaggaagacagaactgaagaagtcatccaaaatgaaacagagacaagaaggaaaattt

SEQ ID NO: 858615 - DNA, 120 bp, Artificial Sequence
  ENSG00000247473_13 (sequence is synthesized)
tatgaaagacaggttaggagacacggagaaggatgagatgaaatgatgagactcacatctaattggcaacccagaggagaggagagagggaatcgagtaaaggtgatacttgaagacaca

SEQ ID NO: 858616 - DNA, 120 bp, Artificial Sequence
  ENSG00000247473_14 (sequence is synthesized)
tctgagaatttctcaaaacccatgcaacaatccagccccgggaagcacacaaaatatccaataggataagtaaaaacaaatctcttacaatgtctttgtgaaatagcagaaaactgaaaa

SEQ ID NO: 858617 - DNA, 120 bp, Artificial Sequence
  ENSG00000247473_15 (sequence is synthesized)
gagagaatacttttataatgcgcctgatagaaaagacatatttaccaatcaaagaaaagtaatttgaagggcagccgatgttttcaacaacagccaacaatggaagccagaagacggcaa

SEQ ID NO: 858618 - DNA, 120 bp, Artificial Sequence
  ENSG00000247473_16 (sequence is synthesized)
ccaccttgaacaaacagggaaatatacacacttcaagatagacaaaagctgcttcccaccaatacttctaagataatgtttctaaaacttgcctgatgatagggctggaatactcaatgt

SEQ ID NO: 858619 - DNA, 120 bp, Artificial Sequence
  ENSG00000247473_17 (sequence is synthesized)
tgctggtcaagcatacagatcaacaatcaaaatgcataaatacaaaatgataagagacttctgctttccagtttcacataagtcaggagcttggaagttgccactctacctaacaacagg

SEQ ID NO: 858620 - DNA, 120 bp, Artificial Sequence
  ENSG00000247473_18 (sequence is synthesized)
tctctgtagcagatctaagatctttgtggacctaagatcgctgctgtggatcccaatggctctgacttctgcgtgcaactgcagaagctgcagggacaccccgcggtggacctacctggc

SEQ ID NO: 858621 - DNA, 120 bp, Artificial Sequence
  ENSG00000247473_19 (sequence is synthesized)
gtgccccatgtgagatgcgtcatagacggttggcccacagcaataccacgtcacctttttcccatcttgaggtatgaacacttcctttgttaggaatgaaggaatgacgatcacaagaaa

SEQ ID NO: 858622 - DNA, 120 bp, Artificial Sequence
  ENSG00000247473_20 (sequence is synthesized)
tgcaagaaacactgcacaggattaccaaaaacagcaacaaacatcacagtgtggtttgtgtttagtgtaaacaattcaacagagaccattttgttttactgtgaaaagtcacagtctcag

SEQ ID NO: 858623 - DNA, 120 bp, Artificial Sequence
  ENSG00000247473_21 (sequence is synthesized)
tgggagcccagtgagatgtacggcacctcccaccaactgagccctgggtgggtggggcctcttcctccctggggttctactcatctatggagggaggcgataaagggaatcaatgatttt

SEQ ID NO: 858624 - DNA, 120 bp, Artificial Sequence
  ENSG00000237477_0 (sequence is synthesized)
gcaaaacgttagcaggacccaaataggagtcactgccagggtgtttagtgaagggttcactgagcctttgacatttgaactgagtctagaagaaagtcattaactcagcagagaaagggg

SEQ ID NO: 858625 - DNA, 120 bp, Artificial Sequence
  ENSG00000237477_1 (sequence is synthesized)
ggaaaaagcagaagaaaaagtatacagtggttgagaagcaccaaacaacatgctgtttggaggagaatttagagtattcttgctgtggctgcatgaggatcatttaagagaaggatcaaa

SEQ ID NO: 858626 - DNA, 120 bp, Artificial Sequence
  ENSG00000237477_2 (sequence is synthesized)
tctgaaaagcataaggaaaagaaaaaccaccagtgatctcataatacagacattttggaatatttgaaaagatcacaccactgcacttcaacctgggacaaagagcaagactctgactat

SEQ ID NO: 858627 - DNA, 120 bp, Artificial Sequence
  ENSG00000237477_3 (sequence is synthesized)
aaaaacaaaaaccaaaaaaaggtgtgcactatgcacatatgtacatttttagaaaattgtttcttaccctatgtagaatgttatagcctgcttttaacatttaatctgcaccatgagcac

SEQ ID NO: 858628 - DNA, 120 bp, Artificial Sequence
  ENSG00000237473_0 (sequence is synthesized)
ggggagagagtggcattgaagaaaaggagggtatcagccaaactgtctgaggtgaggaagatctcatataatgttgcagtcacagaaaggtgtcaggcagctgaccaagggtggtgactt

SEQ ID NO: 858629 - DNA, 120 bp, Artificial Sequence
  ENSG00000237473_1 (sequence is synthesized)
cccattcccaaaagtcaaggaggatttaacatcaagcacgaaggctcactacagagaaataagagcaaagaacatcaatgatttgatgaaaccatgtggcattttatagaaatggataaa

SEQ ID NO: 858630 - DNA, 120 bp, Artificial Sequence
  ENSG00000237473_2 (sequence is synthesized)
gaggaaattggctaacaaagatgaatgtgcagcaaagaaaccaaagtgaaaatattgaaatgtgaggataatgtaaatggagttatagaagaaatagctgatgtgaaaatgttgataagg

SEQ ID NO: 858631 - DNA, 120 bp, Artificial Sequence
  ENSG00000237473_3 (sequence is synthesized)
attgacactggcaataacaacttcacattaaagccacacttagagatgcttcatgacatggaaagcacaaagcataaaattttggaagctgattcaaagttggaaaggaatatgacaatt

SEQ ID NO: 858632 - DNA, 120 bp, Artificial Sequence
  ENSG00000237473_4 (sequence is synthesized)
tgccaaggcataacaaagatgcttgattcatacgaagaattataaatgagaggaaggcaagcactgttttgaactattctcgtatggagatgttgctggacaatggctgccccttcaagg

SEQ ID NO: 858633 - DNA, 120 bp, Artificial Sequence
  ENSG00000237473_5 (sequence is synthesized)
actattatttcccagcctctcccccttgcatccaggtagaccctgttaccgatgcatgtctacgttacctctaggagacaggtggctgacccatgcattgtactgtatgtccacgggctt

SEQ ID NO: 858634 - DNA, 120 bp, Artificial Sequence
  ENSG00000237473_6 (sequence is synthesized)
tccaggttaattctgcatacgggacataataaaaaggcgcttttagagagagagctgggcactctgtggagtttctttatatgacctgaggccttactctagtggcacagttaatactgg

SEQ ID NO: 858635 - DNA, 120 bp, Artificial Sequence
  ENSG00000237473_7 (sequence is synthesized)
catgcactgaaacctcccatgaacataactttgaaacagattgaggatcttcgagaaatggtgtctcttgcctgtcatcccagcagtttaggagtctgaggtgggaggatcacttgagac

SEQ ID NO: 858636 - DNA, 72 bp, Artificial Sequence
  ENSG00000237473_8 (sequence is synthesized)
cagaagtaaaataaattagccagtcatcctagctgctagagaggctaaggcaagggtactgcttgagcccag

SEQ ID NO: 858637 - DNA, 85 bp, Artificial Sequence
  ENSG00000237471_0 (sequence is synthesized)
agcaacctgctcaggtccccttccatggtgtggaagctttgttctttcgctgttcacaatggctttatgagctgtaacgctcact

SEQ ID NO: 858638 - DNA, 84 bp, Artificial Sequence
  ENSG00000237471_1 (sequence is synthesized)
aaggaggaaacaactccggaagcaccacgtttaagagctgtaacactcactgcgaaagtctgcagcttcactcctgaagtcagc

SEQ ID NO: 858639 - DNA, 87 bp, Artificial Sequence
  ENSG00000237471_2 (sequence is synthesized)
ggaaggaagaaattccagacacatctaaacattggaaggaacaaactccagacacactatctttaagaactgtaacactcaccgcga

SEQ ID NO: 858640 - DNA, 120 bp, Artificial Sequence
  ENSG00000237471_3 (sequence is synthesized)
gggtctgtggcttcatgcttgaagtcagccggaccaagaacccaccggaaagaaccaattcctgacacaatcgttcttcatggtctatgactccaaggtctgaaatgatctcatttaccc

SEQ ID NO: 858641 - DNA, 120 bp, Artificial Sequence
  ENSG00000237471_4 (sequence is synthesized)
cacatgatagatgtggcccttccagatgaggagttcaacaagactacatggtagagcagccagagaacccactggaaataaggctcaaaataaggagtaaccacaaaataagagacagag

SEQ ID NO: 858642 - DNA, 120 bp, Artificial Sequence
  ENSG00000237471_5 (sequence is synthesized)
tcactatgcagtgaaacatgcctaacgtgtcaacagctaaatgcccggtgacagtgtggttgtctgggcaacagaagaagtcacccacgcaaacacttaaaggaccatacttattttaca

SEQ ID NO: 858643 - DNA, 120 bp, Artificial Sequence
  ENSG00000237471_6 (sequence is synthesized)
agaggaacagttttcaatggaatggatattaaaacacacacctggatccctttaccacaggtgctttgagaggcaccatcaaggacagtgagctaacgcaggaaggcagtgtggagctgc

SEQ ID NO: 858644 - DNA, 120 bp, Artificial Sequence
  ENSG00000237471_7 (sequence is synthesized)
ttgatggcctctgagtcacattgcttccctagaagcttattggccagagttgcaaagttctgctgcctgagccatctgagggctgtgtctgctgtgctggtgcccatccatgttggagca

SEQ ID NO: 858645 - DNA, 120 bp, Artificial Sequence
  ENSG00000237471_8 (sequence is synthesized)
gaaaggaccctagctgaagctcagaggctgtgactggagccacgacaggaagggcaggctgctgcttctgcagaaccagaggcctgggggagaggccccagagctcaacacaaaagcccc

SEQ ID NO: 858646 - DNA, 120 bp, Artificial Sequence
  ENSG00000237471_9 (sequence is synthesized)
agatgaagccctagtgaggccaagtcctgtctgagactctgccgttggggttgcctgtgagtggctgacactgacccctgcccccagcccctttattgggattctgctgttctcatccct

SEQ ID NO: 858647 - DNA, 120 bp, Artificial Sequence
  ENSG00000237471_10 (sequence is synthesized)
gtcccctggtgcagctacacacatttgctcagaaagagagcccccagcagcttagatttcaagattttcttgttggaaaaacacaacttttggagaaaataaaaatggcaaaatgctaaa

SEQ ID NO: 858648 - DNA, 120 bp, Artificial Sequence
  ENSG00000237471_11 (sequence is synthesized)
gcatattcaatgctccttgctgcttatttctggaattgaggtggcctcgtgcttttataggacagcaattgacacatttgccctggcagctgagacagcccatgaggaaagacgctttgg

SEQ ID NO: 858649 - DNA, 120 bp, Artificial Sequence
  ENSG00000237471_12 (sequence is synthesized)
tgacagagtcatgggctaatacaggtaacacagggtagtgagttaactcaagtaatatagctaagccaggtaacccagcttacacagccaacacctggcagtgggctaacacagttaact

SEQ ID NO: 858650 - DNA, 120 bp, Artificial Sequence
  ENSG00000267980_0 (sequence is synthesized)
ctggcgtagctcctcatcggggatcttgccctgccgcttcttcttgtagtcaaagtccaggcggcggccctccagtttcttcaggtggtgctggagacgtgggggacatgggtcacacca

SEQ ID NO: 858651 - DNA, 120 bp, Artificial Sequence
  ENSG00000267980_1 (sequence is synthesized)
gtagcggccagagggccgccccacgcatggctttgacccactgtccctgcaccactggggatcctgcctgcctgagacccagagggcagtgccgaggctggaggttctggagggggtcaa

SEQ ID NO: 858652 - DNA, 120 bp, Artificial Sequence
  ENSG00000267980_2 (sequence is synthesized)
tgaagttctgcttgacctcgatgtccagggagtccttcacctctgccaggcgcttcatggactcgccggcatccagcaatgcgtcacctgtggagaagtggtgggggaagccatcatacc

SEQ ID NO: 858653 - DNA, 120 bp, Artificial Sequence
  ENSG00000267980_3 (sequence is synthesized)
ctcctcagcctttgtttttgaaatagcgtttcacaggctggaacgcagtggcgctgtaccagctcactgcaggcctcaaactgggctcaagccatgctggcacctcagcctcccaagtag

SEQ ID NO: 858654 - DNA, 120 bp, Artificial Sequence
  ENSG00000267980_4 (sequence is synthesized)
catgctggcacctcagcctcccaagtagccgggaccacaggcgttcacccccacacctggatcctttccaacttctttgagatgaagtctcgctgttgcccaggctgcagtgcagtggca

SEQ ID NO: 858655 - DNA, 120 bp, Artificial Sequence
  ENSG00000237479_0 (sequence is synthesized)
gagctgggaatacaatcttcaggcaaatgactggaaagcctccttcaggcccctaacatctcccagcagtaagtatgagcactaagtgtgtgcattcagccacactaggatacagcagag

SEQ ID NO: 858656 - DNA, 120 bp, Artificial Sequence
  ENSG00000237479_1 (sequence is synthesized)
ggagaaggaagaggaagagggcagtgattggcaaggcttgaggcatgaagaaagtgcactttcactgttgcagtagtcttagaaaacaaatatttctgcatggtgacacggttcttacta

SEQ ID NO: 858657 - DNA, 120 bp, Artificial Sequence
  ENSG00000237479_2 (sequence is synthesized)
gaaccccagaacatctccatggtatgacctaccacatttcctccccaccaaaataataataataataaggctacacagtatctggaatttcttgctcattaaaatctgattactaccaca

SEQ ID NO: 858658 - DNA, 72 bp, Artificial Sequence
  ENSG00000258231_0 (sequence is synthesized)
caattcttgcagccctattttacagctcacagaaattaattaattgaacagtgcttctgatctggaaagtga

SEQ ID NO: 858659 - DNA, 120 bp, Artificial Sequence
  ENSG00000258231_1 (sequence is synthesized)
aaattaattaattgaacagtgcttctgatctggaaagtgatggactcaggcttatagcataggcagcctgactccacagctcaactattaaacactactctcatcaccccacagggcctg

SEQ ID NO: 858660 - DNA, 120 bp, Artificial Sequence
  ENSG00000258231_2 (sequence is synthesized)
aattttctgctcctgaattcaaacattaaaatgtgtggtatatcagtactgggatttatgaggacaatgtggttaatttaaatgccttttggagcaaataggacgtatcttattccaatt

SEQ ID NO: 858661 - DNA, 120 bp, Artificial Sequence
  ENSG00000258231_3 (sequence is synthesized)
cagaatagaatgcaactgaagaaatggctggtgcaattcagcaaggtaaaagattatcttacccccagctggttaaaggcagaagctatgaatttgtgctattgtctgtgggctcctttc

SEQ ID NO: 858662 - DNA, 120 bp, Artificial Sequence
  ENSG00000258231_4 (sequence is synthesized)
agctttctgtttttctcatgcatgagaaaaatgcatttcagctgaaaacagtattatgaaggagaagtacttcaaaataaaacactttactcaacccaaaagactcactataagttctca

SEQ ID NO: 858663 - DNA, 120 bp, Artificial Sequence
  ENSG00000258231_5 (sequence is synthesized)
aacagtagctgccacttctagctgggagagaaatgagagctctgctcatggtgatccagtatctccagaatccatcaccactgctgacctcccactccatgtctccaagtgctctgctat

SEQ ID NO: 858664 - DNA, 120 bp, Artificial Sequence
  ENSG00000258231_6 (sequence is synthesized)
acctgccaccagcagctgccacctccagactttggaaggttataataaaacctctgttctacgatctgccttctgcttcaacatcctcactccccacaaacaattctaataaacagcaat

SEQ ID NO: 858665 - DNA, 120 bp, Artificial Sequence
  ENSG00000258231_7 (sequence is synthesized)
ggctggcagaagcagcagggaagatttcatattgaagactaactagttctgagacgttttggatgtcttcttgcaaacaaaatagaatgcaactgaagaaatggctggtgcaattcagca

SEQ ID NO: 858666 - DNA, 76 bp, Artificial Sequence
  ENSG00000258231_8 (sequence is synthesized)
attgagcctcgggatggaataactgtgagatgtgtttgttgcattcacatatacaggttctgttgatgtgatggaa

SEQ ID NO: 858667 - DNA, 120 bp, Artificial Sequence
  ENSG00000258231_9 (sequence is synthesized)
gtttctctcaaaagctacactgctcttgtgtccttacaaggtattttcttagcaagaataatctgtttgcatgggtgttaatgactaaatccctttcttgtaaagttatgcccatctgtc

SEQ ID NO: 858668 - DNA, 120 bp, Artificial Sequence
  ENSG00000258231_10 (sequence is synthesized)
acacaagaagaatagtaccctttagagagcgctgaaatgtagggaaatgtagggaaaatgagcagctattcaaaaaggtaaaatgctgccacagagcctgataagagcaattaattaaac

SEQ ID NO: 858669 - DNA, 120 bp, Artificial Sequence
  ENSG00000258231_11 (sequence is synthesized)
attaagtgtagaatagggaatatatggcatgggataaattatagtcacaattcatgtttcttttgtctccagaagttcacacacaaaaacccatgcctttacaaaacaataaattcagca

SEQ ID NO: 858670 - DNA, 120 bp, Artificial Sequence
  ENSG00000258231_12 (sequence is synthesized)
ataaatggcggagacttttccctaaatgggttacttgatttaagagctgctggctaattttggtcggataatttaatagaagagggaagaggaaaggaaagaaaggggcttgaagaaaga

SEQ ID NO: 858671 - DNA, 120 bp, Artificial Sequence
  ENSG00000285906_0 (sequence is synthesized)
agcgagactccgtctcaaaagtaagtaacaagaggattcagaatctgagagatactgcttaaaaggaaaatgtcctggagggatgccaaactgcactctcaaaggtttcggctggatgtg

SEQ ID NO: 858672 - DNA, 120 bp, Artificial Sequence
  ENSG00000285906_1 (sequence is synthesized)
aacccatttcagtgtctctaagaagggggtagtgctcctctttccaggatgtctctggggaatctagagcaccccaaagtgtggtatgcatagaaacattgctgcttaaggtctgaatat

SEQ ID NO: 858673 - DNA, 120 bp, Artificial Sequence
  ENSG00000285906_2 (sequence is synthesized)
ttgttcctcatcaattcatgtgttgaaattctaacctctcctgaatgggattagtgctcttacacgagaggcctgacagagactcctcacccttcccaccatgcgaagacacagtgagaa

SEQ ID NO: 858674 - DNA, 120 bp, Artificial Sequence
  ENSG00000285906_3 (sequence is synthesized)
acccttcccaccatgcgaagacacagtgagaaggctcagtctatgaaccaaaatgttgactgtcaccatttactcaatctgctgtcgccttgagcttggacttcccagcctccagaactg

SEQ ID NO: 858675 - DNA, 75 bp, Artificial Sequence
  ENSG00000285906_4 (sequence is synthesized)
aattacaacccttataaagctgggttgactgaggcatgtgagtcgcctgaacccgggaggcagaggttgaagtga

SEQ ID NO: 858676 - DNA, 86 bp, Artificial Sequence
  ENSG00000285906_5 (sequence is synthesized)
gaatggactaagacacccttcccaccatgtgaagacagagtgagaaggttcggtctatgaaccaaaaactgaccctcaccagtcat

SEQ ID NO: 858677 - DNA, 120 bp, Artificial Sequence
  ENSG00000285907_0 (sequence is synthesized)
aaaagcccggcccttcctggattctaagaatgaagagcttgctctcctagcatttctgaactccagaggtgtctcctaaggacggggggagaggggagggggaagcggagccaggcggca

SEQ ID NO: 858678 - DNA, 120 bp, Artificial Sequence
  ENSG00000285907_1 (sequence is synthesized)
aattttaagtgattggaatataggtattactcttttaaaactattaaacttttcttttcttttcttttcttttttgagacggagtctcgctcggttgcccaggctggagtgcggtggcac

SEQ ID NO: 858679 - DNA, 120 bp, Artificial Sequence
  ENSG00000285907_2 (sequence is synthesized)
gggcgcacaatagcagaggtctggcgtgtggcggtttgctgtagggacaatcgaggctttctcttcatagcaacactgtccacctgccgccgggtggggtgggcaggaccccgccgcgcg

SEQ ID NO: 858680 - DNA, 120 bp, Artificial Sequence
  ENSG00000285907_3 (sequence is synthesized)
tgggggtcgccgggctgcctggcgcgtggggtcgaggctgagtgccactccgtggtccctgagtgcacgcccccagtactggccctgctacaagtaattcccttccatccgttcctcgca

SEQ ID NO: 858681 - DNA, 120 bp, Artificial Sequence
  ENSG00000285907_4 (sequence is synthesized)
cgggtgccgaacagccgcgcgagttgggaaggacggagagctgctgtgcagtcttcgcggctggacgccctgtggccgggaccccgcggctgcagcccctggagcttagacggagtctcg

SEQ ID NO: 858682 - DNA, 120 bp, Artificial Sequence
  ENSG00000285907_5 (sequence is synthesized)
agatgccttccagcatgtgaaggacaccattgcattggctctcaccaccaccatgccctcctccttacccagggtgaagcatgaatctgcacatggggaggcttcagaggacaactgaga

SEQ ID NO: 858683 - DNA, 120 bp, Artificial Sequence
  ENSG00000285907_6 (sequence is synthesized)
caagaagcaggaagctgagaaaggaggacacctcccacacacacatctagcaaaagctggacatttctggtcagtcatccttatgcaaagactttctggaaggagcagttattcttgggt

SEQ ID NO: 858684 - DNA, 120 bp, Artificial Sequence
  ENSG00000285907_7 (sequence is synthesized)
gagcacttatgtagcatgaaagaggttaacattagcccagggaaatccttcaaagtaattgagggggaaggatacattatttatgcatttgttcccttctctatcgacagtaagaaatga

SEQ ID NO: 858685 - DNA, 120 bp, Artificial Sequence
  ENSG00000285907_8 (sequence is synthesized)
gaaaacccctgagaagccacagatgtgcagtcttcccagcttgactacatgcccaagtcttctgaaccttagtttcccaacctaggaaataaaaattgtgccctttacccctcatgaacc

SEQ ID NO: 858686 - DNA, 120 bp, Artificial Sequence
  ENSG00000285907_9 (sequence is synthesized)
ttattggggtcttataagattgctcctggttgccatttggcccacagatgggtttagtttggtggacagtgtcccgaaagacttacaaattcagatctgacttgttcatttgtgtagggg

SEQ ID NO: 858687 - DNA, 120 bp, Artificial Sequence
  ENSG00000285907_10 (sequence is synthesized)
agagttggtggcacacatcctctctgtcactgtaagtatgttccaaatgtcacattaggtccactggcacgtgtaagccctgtctggcatttgcctggtccctgcaggcatttgggttgg

SEQ ID NO: 858688 - DNA, 120 bp, Artificial Sequence
  ENSG00000285907_11 (sequence is synthesized)
cagtaaactttcttttctaacagatttctggaaatgtttacatgtagcatataatagaataatagaaccacagaacttccacagtaaagccttccttcttttatgttccaaaagctaaaa

SEQ ID NO: 858689 - DNA, 120 bp, Artificial Sequence
  ENSG00000285907_12 (sequence is synthesized)
tgtactaacaacctccaaaaggcactatgacattggagtttaaactttgtggagcaggactcaaagctggacttagctgcttgctaactttgaccttgagtgaagagttagcagatgatt

SEQ ID NO: 858690 - DNA, 120 bp, Artificial Sequence
  ENSG00000285907_13 (sequence is synthesized)
taaagtgtaaagtagaaagaattcatgctggttagcccattaaatacccgttaattaagctctccaaaaacgccattcaaaaatgtatatgataatcaaatatttattgcaatgtttctt

SEQ ID NO: 858691 - DNA, 120 bp, Artificial Sequence
  ENSG00000285907_14 (sequence is synthesized)
aaaatagtgaaaaattagaaaacattatagggggctagtgttaaatcatggtgtaaccagaaatgaaacattatgcaaccataaaaaggagttctgaagagtagttcccggcatgatata

SEQ ID NO: 858692 - DNA, 120 bp, Artificial Sequence
  ENSG00000285907_15 (sequence is synthesized)
atgtgaaaaaaagcaaaatacgaaattgtgcaattctaattttgcaaaaactttcagcgtacacgactatcactgtataaagtcacaaagtaggaatggtgattgtatcttggagtgatg

SEQ ID NO: 858693 - DNA, 120 bp, Artificial Sequence
  ENSG00000285907_16 (sequence is synthesized)
gaaaggaagcacctcaatccaggccccagagagttcctagaataaagtcccaccaaatatgagtccacaatccaaaattacaaaataggtgatccatgagctccacaggcaagagaccgc

SEQ ID NO: 858694 - DNA, 120 bp, Artificial Sequence
  ENSG00000285907_17 (sequence is synthesized)
agaaatgacaaacagcagaggccatctctcccaaactgcagatcttggaactactggatccagaatataaggtccagtggctcatacctgtaatcccaacactctgagaggccaaagcag

SEQ ID NO: 858695 - DNA, 120 bp, Artificial Sequence
  ENSG00000285907_18 (sequence is synthesized)
gaggattgcttgagaccaggagttggacatcagcctgggcaacatagtgagaccccatcgctacaaaaaaagttttaactagccaggccctggtgatgtacacctgtagtcccagctact

SEQ ID NO: 858696 - DNA, 120 bp, Artificial Sequence
  ENSG00000285907_19 (sequence is synthesized)
tgggaggccaaagcaggaggctaacttgaacccaggaggttgaagttacagtgcactgtgattgcgccactacattccaacctgagcaacagagtgaaagctggtctcttaaaaaataaa

SEQ ID NO: 858697 - DNA, 120 bp, Artificial Sequence
  ENSG00000285907_20 (sequence is synthesized)
taaataaataaataaataaataaaattaatgtatggctttttaaagggaagatgatgagggtcaactttactccatactggaaattacattcttcataactatataagcttatgaggaca

SEQ ID NO: 858698 - DNA, 120 bp, Artificial Sequence
  ENSG00000285907_21 (sequence is synthesized)
tttgtagttattaactttataatatataatgcagtacataatttttcacagttcttatagggaatatgaaagaaaacaagtcttgagagttgttttttgtttttttttgagacggagttt

SEQ ID NO: 858699 - DNA, 120 bp, Artificial Sequence
  ENSG00000285907_22 (sequence is synthesized)
ggattacaggcctgagccaccgcgctggccttaaagaaaaaactctttcctgccatgggaagtctggggcctccaaagcctccaaacaaagctggctctgcaggctccagaccggctgcg

SEQ ID NO: 858700 - DNA, 120 bp, Artificial Sequence
  ENSG00000285907_23 (sequence is synthesized)
aacaaagctggctctgcaggctccagaccggctgcgattggctgacatcatggagcagaaaattaccaccaagagcttcgtgacatcaccatcgtagatcagcgggaagtaaccagggcc

SEQ ID NO: 858701 - DNA, 120 bp, Artificial Sequence
  ENSG00000285907_24 (sequence is synthesized)
tcagaccaacagagccagctgtcagtcaccagaggctagctggaggcttgcccccgccgtcatctagagctccctctggccacagcatcaaaaatggcagacaccctacttctcagaggc

SEQ ID NO: 858702 - DNA, 120 bp, Artificial Sequence
  ENSG00000285907_25 (sequence is synthesized)
cacggttccccgtgatcgatcacccagtcagtgcagtgtggagccgcatactggtgcatgcttaggacaagagtcctgtggggacccagcacagccctagccacctgagacagaccgagg

SEQ ID NO: 858703 - DNA, 120 bp, Artificial Sequence
  ENSG00000285907_26 (sequence is synthesized)
ctactttgccagtggcctctcctccattctggtcgtttccccgtgtgtcctctgcagtcctggagcggttctccacattagagatgcaaaaatgccaaaagagacgcacatgcagagcct

SEQ ID NO: 858704 - DNA, 120 bp, Artificial Sequence
  ENSG00000285907_27 (sequence is synthesized)
gtgctgaccaagatcagagagatcattcccttattccccattcaacaaaaatgagggtaaaccacatgaaccactgtgcgggggacaacaaaagatcagatattggcaattttcaatcta

SEQ ID NO: 858705 - DNA, 120 bp, Artificial Sequence
  ENSG00000285907_28 (sequence is synthesized)
atcgtatttattgagcccctccatgtcccctgcacgtttccagtgctgaatattgtgaaaggaaattaaatcttgagaccccaaactcattaagccaaagggagaagtcaagctggggcc

SEQ ID NO: 858706 - DNA, 120 bp, Artificial Sequence
  ENSG00000285907_29 (sequence is synthesized)
tggatcacgcaaacctccctcccccttttggctcctaaataagatggctacaaggtgaaaagctacatgcctcccctgtattttgcccacaaggaaattcttagtgagctgcaagatctt

SEQ ID NO: 858707 - DNA, 120 bp, Artificial Sequence
  ENSG00000285907_30 (sequence is synthesized)
ttaaggtgtttctgttaacatttcaccatgacaacgtaaattcaaagcttatcattacagacgcagtcaccccccgcccaccagacacaaatgcatatgggattgttttgctgccccatt

SEQ ID NO: 858708 - DNA, 120 bp, Artificial Sequence
  ENSG00000285907_31 (sequence is synthesized)
ttgtctaagttatcttatgtaaaatgcagattccctgcatttttccccgacccatttgtcaatgtcatcttatgtaaaaaatgcagattcagtgagccagacaaagtcatgaatgactat

SEQ ID NO: 858709 - DNA, 120 bp, Artificial Sequence
  ENSG00000285907_32 (sequence is synthesized)
ttttccctacccgcctcttacatgaaaactgtgtgcttctcaatatcccgccctttcccctttaaatttggagccctcaaaatcgtcttcggagcaaggaatcgacctgtctccctggca

SEQ ID NO: 858710 - DNA, 120 bp, Artificial Sequence
  ENSG00000285907_33 (sequence is synthesized)
aaacatttacaattcaattttatttaacaaaaatatataaaacttctcaaatggagtaacttcagtaccagacatcctcaacctgactgctctggaggttattgtgcagagcaatctttg

SEQ ID NO: 858711 - DNA, 120 bp, Artificial Sequence
  ENSG00000285907_34 (sequence is synthesized)
accatatggtcacagatccagaagccagacgtctgtggggctttgctcctgagactgtgacctttgattcctgcactcctcctcttgccatctgacgccggtctgcgcctgtgactgagt

SEQ ID NO: 858712 - DNA, 120 bp, Artificial Sequence
  ENSG00000285907_35 (sequence is synthesized)
gaaaatcgtcataactgtactcggaggttaactctggcatgactgggatggaatcccaggcaacatgctggaggcaggaaagaaggccagccggcaagtcagaaccaaacaccctggacg

SEQ ID NO: 858713 - DNA, 120 bp, Artificial Sequence
  ENSG00000285907_36 (sequence is synthesized)
gcacctttccttacaaatgcggttcacaggacccttggggatcctctgcgcacactgaggcaagcagcaatggaagaaattatcttccactcccttcttgttgaaaatgtctgttttcca

SEQ ID NO: 858714 - DNA, 120 bp, Artificial Sequence
  ENSG00000285907_37 (sequence is synthesized)
gaaatgaattacagtaatagattatgaaaattgtttccattgcctacataacacagcagggaattctaaaatttcaaaacatgtaatatactcaacctgtgcttgagactgtagggtatt

SEQ ID NO: 858715 - DNA, 120 bp, Artificial Sequence
  ENSG00000285907_38 (sequence is synthesized)
atatgatgctgcaatttgcgaaaagcacctttatagaagcaaagggatttttttttgcattttgtattgctacctttctatttgtttcttttctttaatttgaagtctatgagactgttg

SEQ ID NO: 858716 - DNA, 120 bp, Artificial Sequence
  ENSG00000285904_0 (sequence is synthesized)
tcccagggcccggccccgcgcggagctgcggtaaacaggaccttctgccggactcgccccctcgcctctcggggtgggggagaggtggcttaacccttcctgggaggacgcccgccgcgc

SEQ ID NO: 858717 - DNA, 120 bp, Artificial Sequence
  ENSG00000285904_1 (sequence is synthesized)
gcgggctccattccacccaggcccgggcggattcgcgaggtgcttccggcctgaggcttagacctggacgtccaagcctggggaacggcggccgcgtgcccggccccgcttactctaggc

SEQ ID NO: 858718 - DNA, 120 bp, Artificial Sequence
  ENSG00000285904_2 (sequence is synthesized)
agttaacacactctcggcaccgggccggggccgggggcacctcgggcagtgagtcaggcaccacccttgccccaggcagcttgccgtcgggccggggtaatgacagtcatgagaccggcg

SEQ ID NO: 858719 - DNA, 120 bp, Artificial Sequence
  ENSG00000285904_3 (sequence is synthesized)
atgcagaatacaggacagtcaggccagtgaatccaactcttctgtgtggacttctgtgcacaggatgaaaggcacctacctcttgcttctgagagacttccctgcctactttctggccca

SEQ ID NO: 858720 - DNA, 120 bp, Artificial Sequence
  ENSG00000285904_4 (sequence is synthesized)
acgaggcaatctcttcagagtcaggagaaggagtgaggctgatcttgaactcctagttttgagagatcttcctgctctgtctggcctcccaatgttctaggattacaggtgtgtgagcca

SEQ ID NO: 858721 - DNA, 120 bp, Artificial Sequence
  ENSG00000285904_5 (sequence is synthesized)
tggtgcacagccgcccaggtgtttttggtggaggtggctcaagtccccaccagagacacactggtttagagcctgctcaggaggaacaaagacgttgaagctgcagcagagacagagtct

SEQ ID NO: 858722 - DNA, 120 bp, Artificial Sequence
  ENSG00000285904_6 (sequence is synthesized)
tgctatattgccccggctggtctgaaactcctgtgctcaagcaatcctcccactttggtctcccaatgtgctgagaatacagatgtgggccaccatgcctggctgacacttggcaatgtt

SEQ ID NO: 858723 - DNA, 120 bp, Artificial Sequence
  ENSG00000285904_7 (sequence is synthesized)
tgaagatattttattgtcataattgggaaagggaagtgctatggtctgaacgtgtccgcctccaaaattcatatgttgaaatcctaacgcccaaagtgatggaagtcccctgcatcccgc

SEQ ID NO: 858724 - DNA, 120 bp, Artificial Sequence
  ENSG00000285904_8 (sequence is synthesized)
aacatttcttggcgagccagccaggaggagtggagacggcagatctactgtctcctttccctatggggctggagccccgggcctggggagacctgtgaccccaggtgccacctggagaac

SEQ ID NO: 858725 - DNA, 120 bp, Artificial Sequence
  ENSG00000285904_9 (sequence is synthesized)
ttcagcctagaggggtgaaatcagctctcctgtgacccagcacccctacccagcagcacaacagaacctgagaggggctacaggacaattccagaaacagcgtgcttcaggaactgcgtt

SEQ ID NO: 858726 - DNA, 120 bp, Artificial Sequence
  ENSG00000285904_10 (sequence is synthesized)
ggctaaaaccggcagctcaggacaagtggaccagtcagcaggacccagatcacccaacctggttgatcctgagatgagaccaagctgctgctaaagatgactgccctgctctggtcactc

SEQ ID NO: 858727 - DNA, 120 bp, Artificial Sequence
  ENSG00000285904_11 (sequence is synthesized)
cggaagctgactactctacccacggctgaagcttgaggactcatcaagcaagtaaatgtggttagaaatcttagagctagtagctttccttgtaatactaactgttttcctgttgttctg

SEQ ID NO: 858728 - DNA, 120 bp, Artificial Sequence
  ENSG00000285904_12 (sequence is synthesized)
tcgctgtgcccaatctcctcccccaggtaaagacctcttctatccttgctgaatataaatatgctgtacattgttttgctgttgttaccccccctaactatgctagaagaagcacctata

SEQ ID NO: 858729 - DNA, 120 bp, Artificial Sequence
  ENSG00000285904_13 (sequence is synthesized)
gaaggatgtccccactgtacacatactacctggtcagggaacagtataactaaaactctattgtgccatacttattatgagtgtacaaggactcgcttaggaacttgtatttataatcag

SEQ ID NO: 858730 - DNA, 120 bp, Artificial Sequence
  ENSG00000285904_14 (sequence is synthesized)
acctcctactcaatttgtgacccaggaaataaccaaccttatgtatgttatgacaccaagttttcacctggtaaatggtttgaaatccatgcagggtcaaaggactgttccctcttaaac

SEQ ID NO: 858731 - DNA, 120 bp, Artificial Sequence
  ENSG00000285904_15 (sequence is synthesized)
caaaccaaggtccctcccttttacctagggcctatttctctatattttgatgcttgtcaggtagcatacctagactcacccgtctgtcgtaacctacctttaaaaagagactataaaaat

SEQ ID NO: 858732 - DNA, 120 bp, Artificial Sequence
  ENSG00000285904_16 (sequence is synthesized)
aaaatgatggtaaaaccagattgtaaaacaaaaacctgtgatcctataaatttcaccattctaaggccaaacctacccatgtggactgcaggttaccccacacatgtctacatacacaca

SEQ ID NO: 858733 - DNA, 120 bp, Artificial Sequence
  ENSG00000285904_17 (sequence is synthesized)
tacccagcaacctacctatatgttatcaaaaaggaaacccggacccatctggcccagcaacaattctgagtctttaaatcattctataagcatgtagactaaaagttaccagagcctcct

SEQ ID NO: 858734 - DNA, 120 bp, Artificial Sequence
  ENSG00000285904_18 (sequence is synthesized)
cctttaaccaaaaacctgtttgctcagctggctgaaaacattgctggcagcctaggcatttcctcatgttatgtttgtggaggaactaacatgggagaccaatggccttaggaagcaaaa

SEQ ID NO: 858735 - DNA, 120 bp, Artificial Sequence
  ENSG00000285904_19 (sequence is synthesized)
aagttaatgccacaaaattattttactctgaccctgaactgacacccataagttcaagcatctggctcctaaaaacttctattacagaaagatactctgttgctcactggggaaaggctt

SEQ ID NO: 858736 - DNA, 120 bp, Artificial Sequence
  ENSG00000285904_20 (sequence is synthesized)
ttacagacccagtaggagaactaacctgcttaggacagcaatattataatgaaacactacggaaaactttgtggcagggcaaagataactccaaatcacctcatccaaatccattctccc

SEQ ID NO: 858737 - DNA, 120 bp, Artificial Sequence
  ENSG00000285904_21 (sequence is synthesized)
atttctcttctctaaaccatacctagtatcggcataaagctccaaatacctggcaagcaccctctggtctccgctggatctgtgggccatgggcctaccaacagttgccagccaaatgga

SEQ ID NO: 858738 - DNA, 120 bp, Artificial Sequence
  ENSG00000285904_22 (sequence is synthesized)
caggggcttgtgtacttggaacaattaggccatctttcttcttactcccactgcaacaaggaaaaactttagggtgtcctgtctataataaaattttaaacaaaacacaaaagaaataga

SEQ ID NO: 858739 - DNA, 120 bp, Artificial Sequence
  ENSG00000285904_23 (sequence is synthesized)
gacataaaaaaagacacaaaaatagaaaattaaaaagacacagattggctccctgaaagaataattcagtactatgggccagctaggcacaagatgggtcgttgggataccgtaccccaa

SEQ ID NO: 858740 - DNA, 120 bp, Artificial Sequence
  ENSG00000285904_24 (sequence is synthesized)
tttacatgcttaaccacatcacaaggttgcaggcagtacttaaaatcatcactaatgaaacagcaaacgcattggatttactgcccagcaagccacaaaaataaaaaatgccatctacca

SEQ ID NO: 858741 - DNA, 120 bp, Artificial Sequence
  ENSG00000285904_25 (sequence is synthesized)
aaagagtttagctttaaactacctcctagcccaggaaggagaagtatgaaaaaagtttaatctaactaattactgcctaaaaattaataacaacgggaaagctatgatgaaaataactgc

SEQ ID NO: 858742 - DNA, 120 bp, Artificial Sequence
  ENSG00000285904_26 (sequence is synthesized)
aaaaacaaaaaaattagcccatgttccagtccaaacttggaaggggtggacttctaattccttctttgaaggctggttttctgtcttcggtggattcaaaaccttaataggagtagttct

SEQ ID NO: 858743 - DNA, 120 bp, Artificial Sequence
  ENSG00000285904_27 (sequence is synthesized)
agccatactaggaatttgtttaatactcccttgcctcttacccctccttattaaaagcatccaatcaactataaaagccattgtaactaggcaaactaccactcagctaatggctctgtg

SEQ ID NO: 858744 - DNA, 120 bp, Artificial Sequence
  ENSG00000285904_28 (sequence is synthesized)
aatatcagcctgtgcctaaaaaagaagatctgctctttcataaaaaatcaaataatagggatgctttctattaaaatcttgtttataaaaaaagcatcaaaggggaaactgaggcagaaa

SEQ ID NO: 858745 - DNA, 120 bp, Artificial Sequence
  ENSG00000285904_29 (sequence is synthesized)
tttaaggaaaaataaatactgcatttattcactccaagaaaagtaagggttaagtaagaaacacaagttttcctctactgcaagcaaggctgtagacaggttgtagtgacctagcctgca

SEQ ID NO: 858746 - DNA, 120 bp, Artificial Sequence
  ENSG00000285904_30 (sequence is synthesized)
aaaatgagctccagacacccctgagcaaggttaaaagaaaaaaaacaaattcctttactgtctctcctgtactgaactattagttatgactatgtttgccaatgcttatatttagtaaaa

SEQ ID NO: 858747 - DNA, 120 bp, Artificial Sequence
  ENSG00000285904_31 (sequence is synthesized)
tttataaattcctgtttttctttcaacgtagctggaaggtcactagctatacaaggccacaagttatgccaagtcaacagttatgccataaattacatgacttgtaatttatgtaattac

SEQ ID NO: 858748 - DNA, 120 bp, Artificial Sequence
  ENSG00000285904_32 (sequence is synthesized)
cgcctttgttttgctcttgtatactagcctatataagctaaactctgtctttgtttggggctcaggtttttaaatgtgaatccactgagccagtgcgtaccttaaaataaatatcctcct

SEQ ID NO: 858749 - DNA, 120 bp, Artificial Sequence
  ENSG00000285905_0 (sequence is synthesized)
agacttagctggggctgacggatccacttccacgcgctgtctttagctgctcaccatgtggccctctccatagggctgctcacctcatggcctcccccagaacgaggcatccgagagatg

SEQ ID NO: 858750 - DNA, 120 bp, Artificial Sequence
  ENSG00000285905_1 (sequence is synthesized)
gaagccatggtcttttatagactaatcctggcagggacctatcaccactagtgtcatattctattggtcacacagaccagcactggcacagtgttggaggggacacagaactctgtgcat

SEQ ID NO: 858751 - DNA, 120 bp, Artificial Sequence
  ENSG00000285905_2 (sequence is synthesized)
ctcaggaagtgggaccatcgagggccatggtgaaggcggcaccatgacaacactgtgggggacattattcatcccaggttatagatgagagcactaaagatcccagaagttaactgattt

SEQ ID NO: 858752 - DNA, 120 bp, Artificial Sequence
  ENSG00000285905_3 (sequence is synthesized)
gcacaaggccacaactggaagcatccaaggtgggatttgggtcaaagtctgtctggactccaaagtctacattcacttctcctaatccacgacctctccaagctgcagatatgtcaaggg

SEQ ID NO: 858753 - DNA, 120 bp, Artificial Sequence
  ENSG00000285905_4 (sequence is synthesized)
agcaccaagcggtgcagttgactagaacgctgaactctgaatgccaggctggggaaacgtgaattccattctggcttgaagggacacacagaagctcctgagcaggaaaagccatgatgg

SEQ ID NO: 858754 - DNA, 87 bp, Artificial Sequence
  ENSG00000285905_5 (sequence is synthesized)
tgtggatggatggcttgagcccaggagctgaagaccagcctgggcaacatcatgagacctcgtctctataaaaaaatgtttaaaaat

SEQ ID NO: 858755 - DNA, 120 bp, Artificial Sequence
  ENSG00000285905_6 (sequence is synthesized)
ggagctgaagaccagcctgggcaacatcatgagacctcgtctctataaaaaaatgtttaaaaattatctgggcatggtggtaggcacctgtacttcccagctacttgggaggctgaggtg

SEQ ID NO: 858756 - DNA, 120 bp, Artificial Sequence
  ENSG00000285905_7 (sequence is synthesized)
tccagcctgggtgacacagcgagaccccatctccagccgggagccatgcctcctctcctttggccttgtttgtctcccagaaaacgagagaaggatcttgtcggtcttctgaactgttga

SEQ ID NO: 858757 - DNA, 120 bp, Artificial Sequence
  ENSG00000285905_8 (sequence is synthesized)
cgagagaaggatcttgtcggtcttctgaactgttgaaccctcacacccatgtttgccaggtcttgcagccatcaacttccccagaaccctgatgtgtgcagggtccaggactgttcagaa

SEQ ID NO: 858758 - DNA, 120 bp, Artificial Sequence
  ENSG00000285905_9 (sequence is synthesized)
ggaacggctgctactcaagatagagccagcagttaaaggaaatcaccaacttttgcttctggtcttgccactaaccagctggccttgggctaaaaacaaataaagctgacatttattgag

SEQ ID NO: 858759 - DNA, 120 bp, Artificial Sequence
  ENSG00000285902_0 (sequence is synthesized)
atttaaatagaatctgaggaaaggatttgatgaaccaaaaagctaactgaaagtattgagagatcaagagtggagaatatatgaagaaacacaaattatttgctctaccattttgcaaat

SEQ ID NO: 858760 - DNA, 120 bp, Artificial Sequence
  ENSG00000285902_1 (sequence is synthesized)
tgtctaaccctgtacttaagggagagaaggcaaagagggtctgacatcattttttttccattaagcaggtgcaaatctctctgggtcctacctggaatatcatgttgtatttagttgtct

SEQ ID NO: 858761 - DNA, 120 bp, Artificial Sequence
  ENSG00000285902_2 (sequence is synthesized)
ttggctgtgacagtttttcttgcttttgaagaccttgacagttttgaggagttccagtcagatatttttagaatactctattagaatttgtctgattttttttctcatgacataagattg

SEQ ID NO: 858762 - DNA, 120 bp, Artificial Sequence
  ENSG00000285902_3 (sequence is synthesized)
aggttatgggttattcacagaggtgaagtgccattttcatcacatcacatcacgtcgcactatcagcatgatttatgactgctgacgttcgccttgatcacctggctgaagtaatgtttg

SEQ ID NO: 858763 - DNA, 120 bp, Artificial Sequence
  ENSG00000285902_4 (sequence is synthesized)
ttaggtttttctacagtaaatctaccccaccctctaaggaagtcactataaccagtccacacttaaggtcacatattatttacttaagacacgtatatctgatgaacctgctaacatcca

SEQ ID NO: 858764 - DNA, 120 bp, Artificial Sequence
  ENSG00000285902_5 (sequence is synthesized)
ggttcctgaggactggacattgtaaattttctgaggaccctgatgccttaggagtgtggaattatcaagagaaagtgtggcatgggtgggacgttaaagacaccatggtgtttcacttgg

SEQ ID NO: 858765 - DNA, 120 bp, Artificial Sequence
  ENSG00000285902_6 (sequence is synthesized)
gaatatgggacaaggctctggccaaaggcacaaagcaccccaagagacagaacctggtggaatgttaataaaataaataacacaacaatgaaacaactaggaaaaaagcttgtaagcata

SEQ ID NO: 858766 - DNA, 120 bp, Artificial Sequence
  ENSG00000285902_7 (sequence is synthesized)
ttgttgggtgaaaggagtataaattctagtttatgttttggctagaagggggcagggtaaaaaagtgattcttattttccccatatttctcttttttctaattagttacagatgttttta

SEQ ID NO: 858767 - DNA, 120 bp, Artificial Sequence
  ENSG00000285902_8 (sequence is synthesized)
ttataacatttaagtaattaaggagaactctttgagtacagaaaatagtcaaatgaggcaatttgctccaattttaaaaagagtttgggaagtggaagtcagaaaatgtggatttcagct

SEQ ID NO: 858768 - DNA, 120 bp, Artificial Sequence
  ENSG00000285902_9 (sequence is synthesized)
ttgcattttattggtgagcttccttttaaacttctgtcatcccatgtgtgaaataatagtaaaatctatcttatattttttggtatagttttggatgtactcaaataaaataatacacaa

SEQ ID NO: 858769 - DNA, 120 bp, Artificial Sequence
  ENSG00000285900_0 (sequence is synthesized)
caggcgtgagccactgcacccaaccccgataactttttctgtgtaagggcgtaggtactttaaatgcaaagtgagaaatgcagtattaccagggcagaaaaacatgctctgtgaacttat

SEQ ID NO: 858770 - DNA, 120 bp, Artificial Sequence
  ENSG00000285900_1 (sequence is synthesized)
gaacttatgtgaattcattattccttacttacaatgattgttcacatccctgtagtaaagaaacttctctacttacaacttcccataggtagcaataaaggtcccaggcacagcagaagc

SEQ ID NO: 858771 - DNA, 120 bp, Artificial Sequence
  ENSG00000285900_2 (sequence is synthesized)
atggcaatgaagaataccaccaacagaggacatcagaacttactttaggccaccattaggttttcttagcctgtgttgtgttttgtgtgcatattttcataatgttttataaatattatt

SEQ ID NO: 858772 - DNA, 120 bp, Artificial Sequence
  ENSG00000285900_3 (sequence is synthesized)
attaacaccgctatgttcaaaagtacaaaagagtcaaaaaagtgttcctttaagaaaagacatgcgattactacggcaacaaaagagaacttattgtagaagggtgtacattgtatatat

SEQ ID NO: 858773 - DNA, 120 bp, Artificial Sequence
  ENSG00000285900_4 (sequence is synthesized)
tggtcacttttgtatgtcattttggacttaaaaggaaatgaatttccaaacagcccttgagaaccaattctctttgtagagaaaggaggttgtatgttgtctataaattataggatcata

SEQ ID NO: 858774 - DNA, 120 bp, Artificial Sequence
  ENSG00000285900_5 (sequence is synthesized)
gactctttttgtttgttttttgagttagagtctcactgtcacccaggtaaaagagtaattctctgtaaaacatctttgtgcaagtactgttgattgtccccatatattttccattttttc

SEQ ID NO: 858775 - DNA, 120 bp, Artificial Sequence
  ENSG00000285900_6 (sequence is synthesized)
ttgtggcaatagaactcataattttcagttgggtatgtagatgcctgaaggaaagaatatatttcttagcctcacatagatgtaaatataatcatgggacaaagttctggtgaaggaact

SEQ ID NO: 858776 - DNA, 120 bp, Artificial Sequence
  ENSG00000285900_7 (sequence is synthesized)
atcaggggatacatttcatgacagtttctgaaagattttctcacaacactgctggcacacgccctctctgtgcctccttccttcttccatgttgctgggggctggaactcagatgtgttg

SEQ ID NO: 858777 - DNA, 120 bp, Artificial Sequence
  ENSG00000285900_8 (sequence is synthesized)
aggccaccatggcaggacaaggtaaaggaggacttcggacttagtgaagcagaatagcggaaggaggcctgatctacctagttctgggcttgtacatgagagagacctacatttctctat

SEQ ID NO: 858778 - DNA, 120 bp, Artificial Sequence
  ENSG00000285900_9 (sequence is synthesized)
tgtttaagctattgttacagtttgtcctattagcagatgaatcagattaaaaaatgatggaaatttgtgaagcagcccatgccacttaataacaactctaacgtttacattttccttact

SEQ ID NO: 858779 - DNA, 120 bp, Artificial Sequence
  ENSG00000285900_10 (sequence is synthesized)
cagagtaagctccactgtaacacttgcccatagttctcttctacaatcttacttaattaagtgtgctgtgtcctttacccaccctccccagatgcatgaagaagctgtcctgtattttca

SEQ ID NO: 858780 - DNA, 120 bp, Artificial Sequence
  ENSG00000285900_11 (sequence is synthesized)
tgttatcttcttactgaacattctagattctttcaaatatttgtcatataaccatcgctatacctttcacaatcttggttgccctgctgtcaatgtattatgatttttcagtgttctcat

SEQ ID NO: 858781 - DNA, 120 bp, Artificial Sequence
  ENSG00000285900_12 (sequence is synthesized)
catacgtgatgctcataagtcaatatgactgcagatgtggtttaactagtgaagagattaatggaacatttgtgaatttcattaatgcaatctaatactgtattgcctcgtacagtaagc

SEQ ID NO: 858782 - DNA, 120 bp, Artificial Sequence
  ENSG00000285900_13 (sequence is synthesized)
cacaccagatcatactggagattaatacagtccttgtggttatttaaaatcccaatttgtttttcatataaagcgccacaaagtcagatgttcctcagcctatatttgtacaaaagactt

SEQ ID NO: 858783 - DNA, 120 bp, Artificial Sequence
  ENSG00000285900_14 (sequence is synthesized)
taaaaatcttaaaggcaggacatcttgcttgttcttgttaaattttattttaatttttttattttggtacagtatcccagtctgttataatcttattttgagtcttgattttgatctttc

SEQ ID NO: 858784 - DNA, 120 bp, Artificial Sequence
  ENSG00000285900_15 (sequence is synthesized)
agtgtgttgactcccattctcacctttgtgtcatttgaaaaattaataagtgcacaatgtatatgcttatctagaaaaatgacaaaaatctgggtcaaagtacaggcaaggaggcaccac

SEQ ID NO: 858785 - DNA, 120 bp, Artificial Sequence
  ENSG00000285900_16 (sequence is synthesized)
ttttagggggcactatttatggagggttgtgaaatgaagtagaactgaattcactctgtggttagcaccacaaaacacttctcaaattgacagtttaacacaacattcctccttgggcat

SEQ ID NO: 858786 - DNA, 120 bp, Artificial Sequence
  ENSG00000285908_0 (sequence is synthesized)
tgtagactgggtgggtctcaccctcctgatgccctcaaggcgccctctcagccccgcgtccccggcctgcagcggtgcagccaaagcccggacctctgcccgccccaaacccgccatgac

SEQ ID NO: 858787 - DNA, 120 bp, Artificial Sequence
  ENSG00000285908_1 (sequence is synthesized)
caccggccgccttttacctagcgtcagcagcaccgcaagaaccgccaccactactgacaacagcgttgggtccgtctgctgcagctcctgccgcaaggtgtctaggtagggctggaaggt

SEQ ID NO: 858788 - DNA, 120 bp, Artificial Sequence
  ENSG00000285908_2 (sequence is synthesized)
gcccccggcaccgccgccatctgccacccggcgcgagtccgcggaagccatggatgagacgcgtggtccccggtacagcaaaagcgacgtggccctgcactctgcgcaggcgcggggagc

SEQ ID NO: 858789 - DNA, 120 bp, Artificial Sequence
  ENSG00000285908_3 (sequence is synthesized)
agagcctcacgcgaatggtggttcctaagccatagtctctccctcagccgcggcgatcccccaagtgcttgatgggagttgtagttctctgggactccgtcctcctacagaacgataggg

SEQ ID NO: 858790 - DNA, 120 bp, Artificial Sequence
  ENSG00000285908_4 (sequence is synthesized)
gcagacaggttatttgtcgagggacacacacatcttttaagagatgagtcagtcgtcgtcacctacgttatgactgttgaaagaatgatgaaatgaataaaatgaatgaatggctcccga

SEQ ID NO: 858791 - DNA, 120 bp, Artificial Sequence
  ENSG00000285908_5 (sequence is synthesized)
aactaccactgaggagttcccgaccgtcgctaagtgacgtgagacttgtgaagaactcaagcatcctacaaacatttaatctgaatttaatgtgacaagggatgtgacagatggatgtac

SEQ ID NO: 858792 - DNA, 120 bp, Artificial Sequence
  ENSG00000285908_6 (sequence is synthesized)
ggagcgatgtgggaatacataatgggacgcggagtccatcatgagttcagagaaaagcttctggacattggaattgagtcctgaagaatgagttagcatctgcgagtggttaaaggaaaa

SEQ ID NO: 858793 - DNA, 120 bp, Artificial Sequence
  ENSG00000285908_7 (sequence is synthesized)
aaaggtgctgtgcagaagaaaatgagtgtaagaaacgatgtatgtgggaaccctaagtaattcagtgcccctacactgtcaatctagggctgcaaactcaaatgtctgcattaaaggaag

SEQ ID NO: 858794 - DNA, 120 bp, Artificial Sequence
  ENSG00000285908_8 (sequence is synthesized)
caactaggaaaatcaacgcccaggagagctggggctgttgaaaactgcaggaggtatttctgctgaaagtagggccgaccctattcagccagaaaaatcactggatattaccattagacc

SEQ ID NO: 858795 - DNA, 120 bp, Artificial Sequence
  ENSG00000285908_9 (sequence is synthesized)
tcctgactggggaccaaagatgcagggaagaaggaagagccagacacggagagttccaaccgtaactgtcttaactcgctgaggatatttggtcagagctatgtgaatgaagagggctgc

SEQ ID NO: 858796 - DNA, 120 bp, Artificial Sequence
  ENSG00000285908_10 (sequence is synthesized)
cgtggtggtgaagttgggaaaggaagaaaaaaggttcaagaaaagagactttttttcttcagtatgtttcctgggcagaagaaatgtgcacagctcccacactcagtgagaagttagcac

SEQ ID NO: 858797 - DNA, 120 bp, Artificial Sequence
  ENSG00000285908_11 (sequence is synthesized)
tcccattctcaggaatgagcaggaggggtgagattagttgcttccctgtactcacccatctccatcaggagctccgtgggcacgaatgcagaggaaggacatgcgatactgactgctgcc

SEQ ID NO: 858798 - DNA, 120 bp, Artificial Sequence
  ENSG00000285908_12 (sequence is synthesized)
tgctgataagtttttagttcttgattccaatagcagatggaaagttacaatgaaaccagttgtagtcagggaatttttctcttctcttccataaactaaaatgtcccattcaccagacac

SEQ ID NO: 858799 - DNA, 120 bp, Artificial Sequence
  ENSG00000285908_13 (sequence is synthesized)
accaatcatgggattcccctgctatggctttgtttaaaaaaacgtttagaggatttttaaaaacagaatttaacacatgcttattatattaaaaactcaagcaataatgaaagccacaaa

SEQ ID NO: 858800 - DNA, 120 bp, Artificial Sequence
  ENSG00000285908_14 (sequence is synthesized)
tcacctctatttttctacctatagtatctgataaatatttaagacattcctctgtacatatgtactaataagaaggctgtatggataagagcagtaaatacaaacgaacacgttattttt

SEQ ID NO: 858801 - DNA, 120 bp, Artificial Sequence
  ENSG00000285908_15 (sequence is synthesized)
aaagagattatagtatgcacctctgtattccccatccctgaacagtacttggctcatgggaggcactggtcaactgttgaatgaatgatcccaggcctactgtgtccattgctgtgcccc

SEQ ID NO: 858802 - DNA, 120 bp, Artificial Sequence
  ENSG00000285908_16 (sequence is synthesized)
aggctcctgtctgacatcctcctgcttcacatccctgccttagcgggtttgaggacatgtcaccctagcctaccaaatttaatttctaattttagcttctcagaaagtagaatctgctgg

SEQ ID NO: 858803 - DNA, 120 bp, Artificial Sequence
  ENSG00000285908_17 (sequence is synthesized)
taagaataattacatctgaatagaggcaccatttaggattttctctaacatcattcaatattcttcgtcagatacaagtaggatcagtcccctatatccatcagtcacacttagtccaca

SEQ ID NO: 858804 - DNA, 120 bp, Artificial Sequence
  ENSG00000285908_18 (sequence is synthesized)
gacatctggccaggcagcttgggcagctccctccagtcccttaaaggatggaaggggagaaaggtgagtccactggaaacacaagaggtcctgacaaagagctccacttcagagctgact

SEQ ID NO: 858805 - DNA, 120 bp, Artificial Sequence
  ENSG00000285908_19 (sequence is synthesized)
cactcacttgattgcaccatatctaagcttattcagctctgatactttggacagtcccacagcatacattgtacaatgtaatcattcatttttcaggtgtaggcatagggaaggtctggc

SEQ ID NO: 858806 - DNA, 120 bp, Artificial Sequence
  ENSG00000285908_20 (sequence is synthesized)
tctataccaaaactgctggctcttagcaggcacccagtttgcacttatttaaatgacttgatctgggaaggaaacacccggaggtcctaggtggtccctatctgctgatggagcagcaca

SEQ ID NO: 858807 - DNA, 120 bp, Artificial Sequence
  ENSG00000285908_21 (sequence is synthesized)
gagaacaaatgatgtcttaaccttttgagaccaaggagggggatttaaggccaggccagattacagccctgagcctcagtcataggctgcctggtactacagaggaacagtgccacactt

SEQ ID NO: 858808 - DNA, 120 bp, Artificial Sequence
  ENSG00000285908_22 (sequence is synthesized)
ctaggttcgtccctgggggaagaaggaagatgatgtcagccacagctgtcctggctttactgaaagcgtgctgtcattactgctcgctggcatgtggaagtgcacatgctggcgttacag

SEQ ID NO: 858809 - DNA, 120 bp, Artificial Sequence
  ENSG00000285908_23 (sequence is synthesized)
tgacgtagatgagaagaggaaccatggtgttctacaagggaacattccattcaacttctgttcatccttcccagccttttccacccaatggcactttttccttcacattcaaggataact

SEQ ID NO: 858810 - DNA, 120 bp, Artificial Sequence
  ENSG00000285908_24 (sequence is synthesized)
ttttgtctgttaaacacagaaggggtctcttctacttctaaatccttcttgatattaacagaatctagctgggacctttggagaattatctgggcatactttccttagaccttaaaatac

SEQ ID NO: 858811 - DNA, 120 bp, Artificial Sequence
  ENSG00000285908_25 (sequence is synthesized)
acaattgcataataccaggaactgcaaaattcagattattttactattaaacttctccccgagagccacttgaaaaaagtaattgaggtaatagatcttcattttgagaagttgaatggt

SEQ ID NO: 858812 - DNA, 120 bp, Artificial Sequence
  ENSG00000285908_26 (sequence is synthesized)
acataaaaatgcaaaattaaaataattatttttttctctgtccttccaaggctactgctcatatgtaactgtcctttcacacacacgcaagcatatatgttcatgtttttattcaaatat

SEQ ID NO: 858813 - DNA, 120 bp, Artificial Sequence
  ENSG00000285909_0 (sequence is synthesized)
gaagcactgccccgctttctacatttggcacaatcaaaactatctccagacattgtcctatctccacgggaaggacaggcagctttcacagcctagtgaaaggccatcacttttctgcag

SEQ ID NO: 858814 - DNA, 120 bp, Artificial Sequence
  ENSG00000285909_1 (sequence is synthesized)
tgcaccagccacgctgggtgattaatacaggagactgcatacctcaggctggttccaggaatggagtctactccgtgtgcagagcagttgggtgtgaggatgggcagaattagagccagc

SEQ ID NO: 858815 - DNA, 120 bp, Artificial Sequence
  ENSG00000285909_2 (sequence is synthesized)
ctgattccaggcactccagtgaccaaggatggaagatgctggtagagtaaccaaactaattccctgaattcacgtactacagcacctctcatctaccactgtctgttagttgagacttca

SEQ ID NO: 858816 - DNA, 120 bp, Artificial Sequence
  ENSG00000285909_3 (sequence is synthesized)
gtttctgatacggtcactctttcagctaccagtggccaataagatccacgcaattcagtcccacctttcatcaacagaggtcaaaaaggaagtgattacaagcccacagggagatcgaga

SEQ ID NO: 858817 - DNA, 120 bp, Artificial Sequence
  ENSG00000285909_4 (sequence is synthesized)
aagatgtgacatcgataaagtgttttgaggtcctcagaaacaaccgctgtcaatggagggtgtgcatttttgctgagcggaagtatcctaacagaagagtgatagccctgagctggtgtc

SEQ ID NO: 858818 - DNA, 120 bp, Artificial Sequence
  ENSG00000285909_5 (sequence is synthesized)
cacagtcaggctctggggagaggctggccagggctgccttcttcctcgcagatcctcggatcaagtcactagcgctatccctgaagcctttactccccagttggcagagtagtaacatca

SEQ ID NO: 858819 - DNA, 120 bp, Artificial Sequence
  ENSG00000285909_6 (sequence is synthesized)
ctgcccacctgaatatctctggagggagctgagcgctaccaggaatatgaaaaacaacaacaataagagaagaggcagctgaatgtattgggaggaacagaggattgggaaagaaaagac

SEQ ID NO: 858820 - DNA, 120 bp, Artificial Sequence
  ENSG00000285909_7 (sequence is synthesized)
tatataattccagcccagccaaaaggacatagagttttagttacttgtggctcttctttggagagctgactacttttggttgtagcaattggtctcaccctagatcaaacctccatgact

SEQ ID NO: 858821 - DNA, 120 bp, Artificial Sequence
  ENSG00000285909_8 (sequence is synthesized)
catctagaggtttctctcactggagaaggctgatggagctaacatgagatacaatgatggatgtgatgtggagcacagtttcctaaaatcagcattctaatgaatagtggagcactatgg

SEQ ID NO: 858822 - DNA, 120 bp, Artificial Sequence
  ENSG00000285909_9 (sequence is synthesized)
tcagccaggattctctaggaaaataagccaggctcccagtccactgcagaaggcctgggtgtgtggctccagactccattcccttcataataaacaccatcttcccaggggagaacaggt

SEQ ID NO: 858823 - DNA, 120 bp, Artificial Sequence
  ENSG00000285909_10 (sequence is synthesized)
tgcagccaggcagcattgcctgtgtgaggcctcagccagcacaacagttctggccgagtataaacagagcacccaattaaaacacctaattatagggtaggctggagccaggaggtgggc

SEQ ID NO: 858824 - DNA, 120 bp, Artificial Sequence
  ENSG00000285909_11 (sequence is synthesized)
tctgttggtggccctgaagccggctgctggccaggctgccagcatctccctgacaagccacatccaatttcagactgcaatgagcctccaatggacagatgacgacagagatgggagggc

SEQ ID NO: 858825 - DNA, 120 bp, Artificial Sequence
  ENSG00000285909_12 (sequence is synthesized)
agagaaggagtgtgacacacctcactgcttcttagctcctggggcgtggaccgcattctcccaaggagcattcaggaggcttctgggaagacactcctcagtgcaagagaattggaattt

SEQ ID NO: 858826 - DNA, 120 bp, Artificial Sequence
  ENSG00000285909_13 (sequence is synthesized)
cacattttagggacccgattatctcatccacacagtgaaataatatctaatttttccattataataagataaatgctgccaggtgtaacttaaaaagctctttgttgttggccaaagcac

SEQ ID NO: 858827 - DNA, 120 bp, Artificial Sequence
  ENSG00000249521_0 (sequence is synthesized)
acccatcaagcccctgtgcatataaccatttatgcttcattaacacaaagtaaatgcttcatatttgtttattatcatgatgacctgcacaataagaaccaaaaccaagccagatagtgt

SEQ ID NO: 858828 - DNA, 120 bp, Artificial Sequence
  ENSG00000249521_1 (sequence is synthesized)
agaattggcctgttcaactggcagtattaataaacagcacctgcaagaacgggtgcagtctagcttacaaaacaggaaaatcattcactgaagaatttgcatatggaatacagatacatt

SEQ ID NO: 858829 - DNA, 120 bp, Artificial Sequence
  ENSG00000249521_2 (sequence is synthesized)
gcatggaaagaaagccgacctggagactgacaggcagctgtggtgtgaatgcctcatgatggtgaaagtcaggatggtggatggatgctgcattgctttgttgatgcagttatgaacatt

SEQ ID NO: 858830 - DNA, 120 bp, Artificial Sequence
  ENSG00000249521_3 (sequence is synthesized)
ttgtgagaccgtgatattcccccatggtagacccaaatgctcgctttcagctcagttttatcacagagactgaaggaataatatctttagcttttaatagcaggacacatttaggaaatt

SEQ ID NO: 858831 - DNA, 120 bp, Artificial Sequence
  ENSG00000249521_4 (sequence is synthesized)
atacatgagttgaagatagagaaattctggaacaggagaggtcatcagtgcatttctgcaagtagaagcttgtttagtcagataatgtggtctcaacagattaaaacatcacttgtgatt

SEQ ID NO: 858832 - DNA, 120 bp, Artificial Sequence
  ENSG00000249521_5 (sequence is synthesized)
aaattgattggtataaaactataagtgaaccattctgttcgttccatgtattagatgggaacagccaaattaatttgaaatcaagaaattattaaaataaaattctcactgaaggtccaa

SEQ ID NO: 858833 - DNA, 120 bp, Artificial Sequence
  ENSG00000249526_0 (sequence is synthesized)
agctgctttgagcctggctgagatggaggctagacttcaggaaggacttcctgacagtgttgggcactggcttcagtgtgccaacccacagcccagcgtgtctcctgagcccactcccca

SEQ ID NO: 858834 - DNA, 120 bp, Artificial Sequence
  ENSG00000249526_1 (sequence is synthesized)
cccagcacacggccgaaactcagagctcctcacctgttccagcttcacactgctttgtggaaatgcatcacgtaagaagtgcttttcgcctcccgccatgattctgaggtctccccagcc

SEQ ID NO: 858835 - DNA, 120 bp, Artificial Sequence
  ENSG00000249526_2 (sequence is synthesized)
tgtcatggctgaaatcccctggactgcattgggaccatactgctgagagtctggttgctgggcttcagctgacagaacatcagagccccaggatgggatagccacaagttgggaagctgc

SEQ ID NO: 858836 - DNA, 120 bp, Artificial Sequence
  ENSG00000249526_3 (sequence is synthesized)
caccactgggaatggtacattcaggagggcatggttttacagagaagtttgaggcccagagatgtgcgagctgcactcaaagtcacacagcaagtttggttcattagcagggtaagttct

SEQ ID NO: 858837 - DNA, 120 bp, Artificial Sequence
  ENSG00000244926_0 (sequence is synthesized)
cttgggaccttgtatgtaagaaaacattgagtcagaagagagcgttagtcatagggctactgaaacacaagctgtctgcctacggaaggctccagagtccctgacgcatatttatatctc

SEQ ID NO: 858838 - DNA, 120 bp, Artificial Sequence
  ENSG00000244926_1 (sequence is synthesized)
gagattccattcttatggttcacaggaagcacctggcacacagtaactattattaatttctgcactggaggcatcaggaaagccttcacgctatagggggcccttttaagttaagaagtt

SEQ ID NO: 858839 - DNA, 120 bp, Artificial Sequence
  ENSG00000244926_2 (sequence is synthesized)
ggagagcaagcctcggggaaagcaaagagataacttagtagaatggagcaaccatacgggaacagtgagagtccatggatctccctgggctaagatcatgtatggatttggcaatctggg

SEQ ID NO: 858840 - DNA, 120 bp, Artificial Sequence
  ENSG00000244926_3 (sequence is synthesized)
agtcatagggctactgaaacacaaggtgacgagaactattaggcaattgagtgcattccctgcagggctgctcccacttctatctgacttgggtctagatgactcaagtgattcccgagg

SEQ ID NO: 858841 - DNA, 120 bp, Artificial Sequence
  ENSG00000244926_4 (sequence is synthesized)
ggaaaataatctatgtggaacagctgtcatgagcaggccttctgctgctcttcagcctcaatttcagcctgctacttcccgtgacatcattcagtgattcctccctttaaggggacagtt

SEQ ID NO: 858842 - DNA, 120 bp, Artificial Sequence
  ENSG00000244926_5 (sequence is synthesized)
ttctcttgtattacaggtgactacttgaaggtggctagacgagagcatactgccaccactctttatttggaggcctgtaacctgtcttgagtgtgttgcaggaagactcagttacagtgt

SEQ ID NO: 858843 - DNA, 120 bp, Artificial Sequence
  ENSG00000244926_6 (sequence is synthesized)
tccctgaatatgtagctttccattacaatagtatgcaagccaagatgaaaccacctctgtttgggtttcagcagctgtctgcctacggaaggctccagagtccctgacgcatatttatat

SEQ ID NO: 858844 - DNA, 120 bp, Artificial Sequence
  ENSG00000244926_7 (sequence is synthesized)
tggaaatgtctcgtgaacatgtggaaagtgatgactggaacttcagatgaaagtcaaagctggagataggagattcagaagtcaccccaccaaagaaggaatggttaaagctataagaac

SEQ ID NO: 858845 - DNA, 120 bp, Artificial Sequence
  ENSG00000244926_8 (sequence is synthesized)
cagttcataatctcctaaaaaataatgtagagaacaataacagaatcaaagaaatcttgaacgtctatatttaaggggttgaatgtaaaagaaaaggccttaaaggaggcagaaaaatag

SEQ ID NO: 858846 - DNA, 120 bp, Artificial Sequence
  ENSG00000244926_9 (sequence is synthesized)
caatgagaaaagtttgggaattctaaaacaagacagtatttcagaggaagaaaacgcaggtaatacatgggcaagtttcacacacagaggtgatgcatcctggtgaccaatattacaagg

SEQ ID NO: 858847 - DNA, 120 bp, Artificial Sequence
  ENSG00000244926_10 (sequence is synthesized)
aagagagatgatgactgaggacaggctggtggacttgatttgaggtcaacggtatgaggataatttcagcagagtggtgggatggagcgaaacagcaggtgtgtcaataatgagttaagc

SEQ ID NO: 858848 - DNA, 120 bp, Artificial Sequence
  ENSG00000244926_11 (sequence is synthesized)
tttgagaaaggggagacttcagatgcagacaactcattcctgaatctgtgcttcaaaaacaagaaaaagcccaagatgtcaggatatctgcagggtcaagcaaagcatttttttcacgat

SEQ ID NO: 858849 - DNA, 120 bp, Artificial Sequence
  ENSG00000244926_12 (sequence is synthesized)
ggtaataggtaaaagagatttctctagcccgctggtctaaggatcagacagagggtggaggtgcttgataaggatggtcatggcattttttgcagactgaaatgatatttgaaaactaaa

SEQ ID NO: 858850 - DNA, 120 bp, Artificial Sequence
  ENSG00000244926_13 (sequence is synthesized)
tgctagcctgtgttacagctacttacccgctgaggatcaaacgtacatttatttgccctattgcccaacttatggctatgccagtaatgtcctctttttttccttatcatttcttttcag

SEQ ID NO: 858851 - DNA, 120 bp, Artificial Sequence
  ENSG00000244926_14 (sequence is synthesized)
cttgttttcccaaactgtggtgttgccttgcccttgagaacccagctgaggtctagactgtttcatggatcacctaagcttggagctacagttgggctgcaaagttgttcctctagtgct

SEQ ID NO: 858852 - DNA, 120 bp, Artificial Sequence
  ENSG00000244926_15 (sequence is synthesized)
gatacaagaacatagctggtcctcttgttcatagtggtaaaatatttttaaaatctgacataaacacaacatattaattacagaaatgatggagagagaataaagctgggaccccacaaa

SEQ ID NO: 858853 - DNA, 120 bp, Artificial Sequence
  ENSG00000244926_16 (sequence is synthesized)
aggaacaaacacacacctgccatttcccaaatctcataaaacatataaatggatgagaccaaagagaggcatgagattccattcttatgaaggagacagacaggaaagagggcaagggat

SEQ ID NO: 858854 - DNA, 120 bp, Artificial Sequence
  ENSG00000244926_17 (sequence is synthesized)
cctactaatgcaacacagagctcacaaatgcatccttccctcgaggccagagtggcaacagaccatagagccacccttcaactgaagcaagatgcccttcaactgaagcaagatgcatgg

SEQ ID NO: 858855 - DNA, 120 bp, Artificial Sequence
  ENSG00000249293_0 (sequence is synthesized)
aatgtttgcgctttttctatcccccaaatgctgagagaactctagacgagcagtccagacgctaaatagatcagtcctctgctctataggggtagtgggagtctatagtgtggtcggtaa

SEQ ID NO: 858856 - DNA, 120 bp, Artificial Sequence
  ENSG00000249293_1 (sequence is synthesized)
gggagtggactgatcacctgagttctgacggcttgggccagtgtcacctcaggtcacaccaagcagaaggttctcaggaatatcatgcatgtaccagaaagagaaccgaaaatcttgacg

SEQ ID NO: 858857 - DNA, 120 bp, Artificial Sequence
  ENSG00000249293_2 (sequence is synthesized)
cagaggaccaggatagtcaccaagtgccatgccgctgtctgagcatctcttctgaggaaaagcacttggctgagctctgcccccatggaactgatgctggcaaaaccaagcgtctgccca

SEQ ID NO: 858858 - DNA, 120 bp, Artificial Sequence
  ENSG00000249293_3 (sequence is synthesized)
gatgctggcaaaaccaagcgtctgcccagccagaataaccaccacttggtgctttggtgagaaaccacagtgatggctgaaggcttgagtagcattttttttttttttttagacggagtc

SEQ ID NO: 858859 - DNA, 120 bp, Artificial Sequence
  ENSG00000249290_0 (sequence is synthesized)
gaaatcaacaatgttttagatcaaagctgttccattttcctggatcctagtggggagctaacatggcgcagagccacagccaatccaaggacatgtgaatcctagaaaagaggagttcct

SEQ ID NO: 858860 - DNA, 120 bp, Artificial Sequence
  ENSG00000249290_1 (sequence is synthesized)
ccaaggccctggaatcagaaacttggattgccaggacctgccctcagtgttcttcactccacacaacacagctgacccagacatcatgtgcaggaggtacctcctgacagcaggcttgac

SEQ ID NO: 858861 - DNA, 120 bp, Artificial Sequence
  ENSG00000249290_2 (sequence is synthesized)
accagctactgtccagctccccagtaaaccagattccctcattgctcctaatggggtctagactgcaggaggaggaagcaggtgggcaatgtccagatttccatgatgaccctctgagga

SEQ ID NO: 858862 - DNA, 120 bp, Artificial Sequence
  ENSG00000249290_3 (sequence is synthesized)
ccatcagctttgtttcctaactcctggcctgcctcctttcttgtggcgccatctcacagccaaatgacaacaagccctctctgtccctcacaaaatgcctgtgataaaaagttccctttg

SEQ ID NO: 858863 - DNA, 120 bp, Artificial Sequence
  ENSG00000249290_4 (sequence is synthesized)
cagccagaccagctgagactggtacatagaaccaagacagctgaccaaaggacttcaaaaagacctcagtcttcatgataatcttatttccatgctaaatgatactccctccagcaccac

SEQ ID NO: 858864 - DNA, 120 bp, Artificial Sequence
  ENSG00000249290_5 (sequence is synthesized)
gacagttgacaattgccatgacaatgactggaagaagccgtaaaaggactaaaagggaggcggtactactgattccaggaggttcaccacccacttctggaaaagacatgaatattcttc

SEQ ID NO: 858865 - DNA, 120 bp, Artificial Sequence
  ENSG00000249290_6 (sequence is synthesized)
aaacttggattgccaggtgaaggaaactaggttttgcttcatctgggtggttggccaggatcctgagtgagagccatggatacctagttgctttccagcttggtacctcctgacagcagg

SEQ ID NO: 858866 - DNA, 120 bp, Artificial Sequence
  ENSG00000249297_0 (sequence is synthesized)
agctaagtttacttggcctatttaaggacagtcacaaaagagagttaatggataccaaagtttggaagagacagcactatctcactgtaacttggaactgaaccagatggggtctcgttg

SEQ ID NO: 858867 - DNA, 120 bp, Artificial Sequence
  ENSG00000249297_1 (sequence is synthesized)
tgctgcccaggttgctcttaaactactgatctcaagcaatcctcccacctctggctctcaagtagctgggattacaggcaaataatgatggaaatctggggattcttgatgggccgttga

SEQ ID NO: 858868 - DNA, 120 bp, Artificial Sequence
  ENSG00000249297_2 (sequence is synthesized)
aatataccacaacaaactcagtactgtcaaaagtactggttcttaaatacagagcacatatatcactccagtggaagagttcatcagatagtgagaatctcacctataaatctcaagcat

SEQ ID NO: 858869 - DNA, 120 bp, Artificial Sequence
  ENSG00000249297_3 (sequence is synthesized)
gcctgccaaggagtctcaagtcaggaacagaggagaaaatagccatcaaatagggcgtcttgtcagtattattcaaatgtaatagaaaatcaaattataataaaacatttaacataccaa

SEQ ID NO: 858870 - DNA, 120 bp, Artificial Sequence
  ENSG00000249297_4 (sequence is synthesized)
agatggggtctcgttgtgctgcccaggttgctcttaaactactgatctcaagcaatcctcccacctctggctctcaagtagctgggattacaggactccagagtcaaaagggctccatag

SEQ ID NO: 858871 - DNA, 120 bp, Artificial Sequence
  ENSG00000249297_5 (sequence is synthesized)
cttcgggggagagatcccagaatcctgacatgccagcaaagggcaaggcatttaatggttgaaaagttgatattttccaagataatttaaaaattattggtttttctctgttaaaaaaaa

SEQ ID NO: 858872 - DNA, 120 bp, Artificial Sequence
  ENSG00000249297_6 (sequence is synthesized)
tgtaatcccagcactttggaagaccaaggcaggaggattccttgagcctaggaattcaagaccagcctgaacagcatgcaatggtcatggctcgtggtcaccagcaatgctggcaaatgc

SEQ ID NO: 858873 - DNA, 120 bp, Artificial Sequence
  ENSG00000249297_7 (sequence is synthesized)
ggctcgtggtcaccagcaatgctggcaaatgccttcgtacagcatgacaccgtacttaccttctgctgtgttgattgctctgaaggtactgctggtgaatgtttgcaagtctccatagtc

SEQ ID NO: 858874 - DNA, 120 bp, Artificial Sequence
  ENSG00000249297_8 (sequence is synthesized)
ttgtgatttccatctttctacacttcagatccctggaagataccttctgactcaggaaatccagatgcagaagaagttgggagtgtcttctgagaaaaagaaaagtggggagatttcaag

SEQ ID NO: 858875 - DNA, 120 bp, Artificial Sequence
  ENSG00000249297_9 (sequence is synthesized)
ataatatccatcctaaactgagaaagtgtgctcccttctctcatggggcccagagaatatggcagttagatttcaaactttagtccattcagactgctacaaaaggatctcatccattgt

SEQ ID NO: 858876 - DNA, 120 bp, Artificial Sequence
  ENSG00000249297_10 (sequence is synthesized)
gttccagactcttaactctatgctgagtcctggcaagggggaaagggggagggagctttaaataactgtgaggtgttttttgtttttgtaagagcactaattccatatatgagaggtgaa

SEQ ID NO: 858877 - DNA, 120 bp, Artificial Sequence
  ENSG00000249297_11 (sequence is synthesized)
tatgtgtcataggatttgtattcatatgacacatattcaccttccaaatgtcctatctcctaataccatcaaattgggtgttgggatttaaacatacaaattgtgggggacacaaatatt

SEQ ID NO: 858878 - DNA, 120 bp, Artificial Sequence
  ENSG00000249297_12 (sequence is synthesized)
gagtctatagcattccatcctgacccctcaaaatttatgttcttctcacatacaaaatgcattctttacatccaagcagcctcaaaagtataaactgtttccagcagcaactctagagtc

SEQ ID NO: 858879 - DNA, 120 bp, Artificial Sequence
  ENSG00000249297_13 (sequence is synthesized)
taaatatcaaaatctctgaatatcctctaaatcaggtgatatttgagactaaatacatttcaacctgaggaaaattgctctccaactgagatcctgtggaaccaaacaagttatatcctt

SEQ ID NO: 858880 - DNA, 120 bp, Artificial Sequence
  ENSG00000249297_14 (sequence is synthesized)
ccaaaatacaataatgggttaggaataagatagatacttctattgcaaaagggagaaacaggaaagaagaaagggataaaatatttcaaataagttcaaattgaaaagcattctccatga

SEQ ID NO: 858881 - DNA, 120 bp, Artificial Sequence
  ENSG00000249297_15 (sequence is synthesized)
gtaacactttttggtttgaggctctgcctttcaggtccactggggaaggtcccatcccatagctttgggtcaagaccatctggcttgttgaatgcaatgcaatggtcccccttctgaaac

SEQ ID NO: 858882 - DNA, 120 bp, Artificial Sequence
  ENSG00000249297_16 (sequence is synthesized)
tgaggaagtatccctgataatctctgaatcaactttggggttattcttcccctgtaatgaaaaatagcacatattcacagtcaaatagctccatatcttattctataaaatccatgaaat

SEQ ID NO: 858883 - DNA, 120 bp, Artificial Sequence
  ENSG00000249295_0 (sequence is synthesized)
ggaaccagccatgcaaagatctgtgacaagaacattctagggctagaatctaggaccactttggacattcaaagcaaaggaaggaagaggaaggggagcatgggggagatgaaacgcaag

SEQ ID NO: 858884 - DNA, 120 bp, Artificial Sequence
  ENSG00000249295_1 (sequence is synthesized)
gtttgaaagcagcttctagatgacgcttgtggatatttggaataatatctactaatttctgttaagcagctatgtttcaactccacttcaataaaaacagccaaatttctctcctggaaa

SEQ ID NO: 858885 - DNA, 120 bp, Artificial Sequence
  ENSG00000249295_2 (sequence is synthesized)
ggaaccagattggaccatggatatctctgcctgcaaaacctcttgtgctttcaagttgaaggtaacggaaaagtatcagagtaactttaaaagtgtacaatgtctatgtaagcacaacaa

SEQ ID NO: 858886 - DNA, 120 bp, Artificial Sequence
  ENSG00000268842_0 (sequence is synthesized)
aaaatacatcaaattttattagttaaaacattaaatctatgatgcattcttaaatagtagcaaaatgtgattccagcagttaatgtaaatcctagtaacaaacatgggattctggttact

SEQ ID NO: 858887 - DNA, 120 bp, Artificial Sequence
  ENSG00000268842_1 (sequence is synthesized)
agtgctctctaattcagactatatttaattttaaaaggcagagtcttttttcttcaggagcttggagagaaataatcctcacctaatgaagtgagtgagcccttccatcctttgattctt

SEQ ID NO: 858888 - DNA, 120 bp, Artificial Sequence
  ENSG00000268845_0 (sequence is synthesized)
agcagcagagacgagatgaacctgtggctgcggttgcttggttgactctgcagatgatgatgcagtgcctcctttatgaaagatttctgaggacttccccacttcttcctacttgcgggg

SEQ ID NO: 858889 - DNA, 120 bp, Artificial Sequence
  ENSG00000268845_1 (sequence is synthesized)
aagataataaggagaaaagatcaaggaaccagaaagcttctagaggcatgagatgtcggattccaataaagcactcagaaggagctgatcttaccgttttggtttgggtagtagagcgag

SEQ ID NO: 858890 - DNA, 120 bp, Artificial Sequence
  ENSG00000268845_2 (sequence is synthesized)
atcccactaaaccactttttatattccattcgaacctggaaatttgagtggagaggtccgtgttacatccagagcttggtttgggagaaaggatcctaaaatgggaggctaaagataaag

SEQ ID NO: 858891 - DNA, 120 bp, Artificial Sequence
  ENSG00000268845_3 (sequence is synthesized)
acaccaagccctactctctagttttccatataatcttggccatgcccatgttgattcattttatttaaactcaaacttctcagttgtaaaaaagatgtgtattaaatatcagacactata

SEQ ID NO: 858892 - DNA, 120 bp, Artificial Sequence
  ENSG00000253474_0 (sequence is synthesized)
aagacagaagaagactaggtctgtcaaggctatacagaaactgtccaacacttggactttgcactgttgctgaatgtggttattagctccgagagttttttttttaatattttggggttt

SEQ ID NO: 858893 - DNA, 120 bp, Artificial Sequence
  ENSG00000253474_1 (sequence is synthesized)
tctttataaaggatagatcatctacaaatacttcttgcttttcaatttagatgatgtttcctttcctgcccaatttatctggttaaaacgtctgatacactgttgaatagaagaggcaag

SEQ ID NO: 858894 - DNA, 120 bp, Artificial Sequence
  ENSG00000253474_2 (sequence is synthesized)
aaaacgtctgatacactgttgaatagaagaggcaagggcacatgttcatgtcttgttcctgatattgggagaaagcatcccgtttttcaccacagaaacggggtttcaccatgttagcca

SEQ ID NO: 858895 - DNA, 120 bp, Artificial Sequence
  ENSG00000253474_3 (sequence is synthesized)
ccttggcctcccaaagtgctgggattatgcattctctctttacatcacaatgaccatgaccttggatatggagtccactcaaaagtaatctgaactaataaacaaattctgcaaggttga

SEQ ID NO: 858896 - DNA, 120 bp, Artificial Sequence
  ENSG00000253474_4 (sequence is synthesized)
aagaatactgacacagaagaaccaagtaggagagtgtgcaattcccagtctcatatctcattacaaaaccaaactaaacaaggcattggcacaagaatagacatacagatcaatggaaca

SEQ ID NO: 858897 - DNA, 120 bp, Artificial Sequence
  ENSG00000253474_5 (sequence is synthesized)
gaactgagaccccagaaataaaaccaagtggtcagctgactttttgaaagcttgccaagaccatcaaatggggaaaaatttttttaatatacgttgcagggataattggatataaacatc

SEQ ID NO: 858898 - DNA, 120 bp, Artificial Sequence
  ENSG00000253474_6 (sequence is synthesized)
caaaagaatgaacttggatgcttatcttgcaccatatgcaaaaataactgaaaatgaattcaaggctataactattaactcagaaaaaaaaaatgagctgcattttcatgatcctaggtt

SEQ ID NO: 858899 - DNA, 120 bp, Artificial Sequence
  ENSG00000253474_7 (sequence is synthesized)
tggcaaaatactcttaagtataactccaaaaaaaaacccaccaaaaaacctagataagttaaatttcatcaaaattaaacattttgggcatcaaagggcatcattaataaaatgaataga

SEQ ID NO: 858900 - DNA, 120 bp, Artificial Sequence
  ENSG00000253474_8 (sequence is synthesized)
cttactacagattgtgagaaaatgcttgcatatcatacgtctggtaagcaaattgtttctagagtaatatattaaaaaactcttacaactcaataagaagaagacaaataacacaaacta

SEQ ID NO: 858901 - DNA, 120 bp, Artificial Sequence
  ENSG00000253474_9 (sequence is synthesized)
atgtcttgttcctgatattgggagaaagcatcccgtttttcaccactctggccaggacagcctatctgtgcaggaggcattgctggcaccccgtggggactgaggaccaaggaggagctg

SEQ ID NO: 858902 - DNA, 120 bp, Artificial Sequence
  ENSG00000253474_10 (sequence is synthesized)
ctcccccacacacggttcgtacttctgctctgtgaagagagacaactgtgccctgtcaccttcactgaactatgaggatatttttataagacatctatttcccagatgagatattccctg

SEQ ID NO: 858903 - DNA, 120 bp, Artificial Sequence
  ENSG00000253474_11 (sequence is synthesized)
atgttgtctgctggctcatcaactgagaaatcagctgccagtcttattgttgtctctgtaaaggaatgtgtttttcacatctggctacggcacttacccaagcagaaacggggtttcacc

SEQ ID NO: 858904 - DNA, 120 bp, Artificial Sequence
  ENSG00000253474_12 (sequence is synthesized)
catttacagtagaataacaaaaaaatacttaaaaataagtttaatcgtgagatacaaattggtaccctgaaaactacaaaacattcctgaacaatattaaaggtctaaataaatggaaaa

SEQ ID NO: 858905 - DNA, 120 bp, Artificial Sequence
  ENSG00000253474_13 (sequence is synthesized)
ctccctggatttaaaatgagttcaaattataagaccttcattttattggtaatatattaaaatttgggggaaagaactagttttaaaactttctattaagcctaaagtagtggcaaattt

SEQ ID NO: 858906 - DNA, 120 bp, Artificial Sequence
  ENSG00000253474_14 (sequence is synthesized)
cataattagattgcacaatattggatagcttaaaaatttcaaaattgccaatttgttacttgtctgtatttgatgtatactgtaaaatacaaaatgcactttatgttttccatcgtgcaa

SEQ ID NO: 858907 - DNA, 120 bp, Artificial Sequence
  ENSG00000253474_15 (sequence is synthesized)
acagtaggggacttagcaacctcctcccatgcctgtctgctttcctattgcagaggcagacagagagaggcctctctctgatttctgccttctctgtcctatagacatggttttaatgag

SEQ ID NO: 858908 - DNA, 120 bp, Artificial Sequence
  ENSG00000253474_16 (sequence is synthesized)
ttatcctaattaggtcaggcccacctgagataatctctcctgattaacttgaagtcaactgattagggacctttattacattgacagaatacctccacttttgccatataagctctggcc

SEQ ID NO: 858909 - DNA, 120 bp, Artificial Sequence
  ENSG00000271040_0 (sequence is synthesized)
taggtaacttcccaacagtgttgaggaataagtgacaggctttctccctggaggagagccagccacccggttctgcggtgacgggtacctccgccgcggtgtgagtgctcggcctccgtc

SEQ ID NO: 858910 - DNA, 120 bp, Artificial Sequence
  ENSG00000271040_1 (sequence is synthesized)
gggaagtggaacactcacaggatgaccgaatgaaagtaccacccccgaaaggagagcgacgcccgctggaagcgcttgcagagctgccggcaacgttgaccgctagcaagcttggtcttc

SEQ ID NO: 858911 - DNA, 120 bp, Artificial Sequence
  ENSG00000271040_2 (sequence is synthesized)
ccgtggagaggaggaggctagtggtgatagaaaatcttttcagcctctcagagaacaatgacatcttgtaaaataaggcggtctctctgctatttgtcctgccccccatcaccggagggc

SEQ ID NO: 858912 - DNA, 120 bp, Artificial Sequence
  ENSG00000271040_3 (sequence is synthesized)
atgagtttcctgaggatggagatgggactctatgttcagtttatatcccccagctttcagatattaactggttaccaacatcaaatgcatgttggatgaatgagtaaatgaatgcatcca

SEQ ID NO: 858913 - DNA, 80 bp, Artificial Sequence
  ENSG00000276017_0 (sequence is synthesized)
ggcggctggacgaggacgctccgagcccagctctcgagagttcaagcaaccgacggttccccacttcctgttcgggccca

SEQ ID NO: 858914 - DNA, 120 bp, Artificial Sequence
  ENSG00000276017_1 (sequence is synthesized)
ggccgaggacctgccagtagggctcagttgcctggagcccgttcagcccatcccccagttcactttgcctgtgggatctccccgttgctcctgcccgtggactgagtggcaggccatcct

SEQ ID NO: 858915 - DNA, 89 bp, Artificial Sequence
  ENSG00000276017_2 (sequence is synthesized)
cctgcgttccttcctgggatcctgccttcaatttgattgcacaggtaccacagcaagccagtgctgtgtgctccgagttccagggcgtc

SEQ ID NO: 858916 - DNA, 120 bp, Artificial Sequence
  ENSG00000276017_3 (sequence is synthesized)
acagcaagccagtgctgtgtgctccgagttccagggcgtcctccagctcagccactgcactgagaacatggactctctgtggggcccaggagccgggagtcacccctttggggtccacaa

SEQ ID NO: 858917 - DNA, 120 bp, Artificial Sequence
  ENSG00000276017_4 (sequence is synthesized)
gagaagggtccccgaggtcaccggggatgcaccgtctgcatttcggcccctgcgggacaatggaggcctctctccctttgtgcccgggcccgggcctctgcagacagacctccatgccca

SEQ ID NO: 858918 - DNA, 120 bp, Artificial Sequence
  ENSG00000276017_5 (sequence is synthesized)
cccgggcctctgcagacagacctccatgcccagaggtcagaaatcagatataaccagacatcccagacctcctggacgagctcctgcaccaaccgaaatgccatctccagctcctacagc

SEQ ID NO: 858919 - DNA, 76 bp, Artificial Sequence
  ENSG00000276017_6 (sequence is synthesized)
tggtcacacccagtgtgaaaaggcagcagatatagcaccagggcagacactcaccctcaggaatgactcctccaca

SEQ ID NO: 858920 - DNA, 120 bp, Artificial Sequence
  ENSG00000276017_7 (sequence is synthesized)
cccagtgtgaaaaggcagcagatatagcaccagggcagacactcaccctcaggaatgactcctccacatccgaggcctctaggcccagtacacacaagtttcccctgctgccacgcaggc

SEQ ID NO: 858921 - DNA, 90 bp, Artificial Sequence
  ENSG00000276017_8 (sequence is synthesized)
ggagcctttgatgctgccacctcccgtagagctggggtaccgggtcactgttgaagaccttgaccgggagaaggaggcggcattccagcg

SEQ ID NO: 858922 - DNA, 70 bp, Artificial Sequence
  ENSG00000276017_9 (sequence is synthesized)
cttctggtctgcctgccgtttctaaagcacccagtatggatgcacagcaggagacacacaagtcccaaga

SEQ ID NO: 858923 - DNA, 120 bp, Artificial Sequence
  ENSG00000276017_10 (sequence is synthesized)
ttcctgcccccttcccagctgcaagcatggatgctggcatgggaagaacaaggcctggcacttctgctcctgcagctgctgcagcagctcctcccccctccacattgaaccccacgttgg

SEQ ID NO: 858924 - DNA, 79 bp, Artificial Sequence
  ENSG00000276017_11 (sequence is synthesized)
gcctggcacttctgctcctgcagctgctgcagcagctcctcccccctccacattgaaccccacgttggggtcactactg

SEQ ID NO: 858925 - DNA, 120 bp, Artificial Sequence
  ENSG00000276017_12 (sequence is synthesized)
cagagatcccagacctcccggaccagctcgtgccccaaacgaaatgccatctcaagcccctaccgctctacgggaggcctcccggaacgaaagcagaggagggggccagcctcatcccac

SEQ ID NO: 858926 - DNA, 60 bp, Artificial Sequence
  ENSG00000276017_13 (sequence is synthesized)
caggctgtctcttcgggtcacacccagtgtgaaaagacctctaggccctgtagatgcaag

SEQ ID NO: 858927 - DNA, 74 bp, Artificial Sequence
  ENSG00000276017_14 (sequence is synthesized)
ccccaggggtggctcccccagatcccagtcctctaggccctgtagatgcaagtttcccctgctgccacgcaggc

SEQ ID NO: 858928 - DNA, 120 bp, Artificial Sequence
  ENSG00000276017_15 (sequence is synthesized)
accgggtcactgctgaagacctggaccaggagaaggaggcggctttccagcgcatcaagagtgcactgcaggttgaggacaaggccatttagtactgcagaccctcacggccttcccaca

SEQ ID NO: 858929 - DNA, 120 bp, Artificial Sequence
  ENSG00000276017_16 (sequence is synthesized)
ggggcttctggtctgcctgccatttctaaagcacccagtatggatgcacagcaggagagacacaagtcccaagactgcctgggcctagtggtcccccagcatctgctgcacaggcctgta

SEQ ID NO: 858930 - DNA, 90 bp, Artificial Sequence
  ENSG00000271046_0 (sequence is synthesized)
gactattacctttaaaagtgctccttgaagagaaaatccactctgccgtttcaagcttgacttccctccccagtcttagagactgatcac

SEQ ID NO: 858931 - DNA, 120 bp, Artificial Sequence
  ENSG00000271046_1 (sequence is synthesized)
tcaagcttgacttccctccccagtcttagagactgatcactggggcagagtgacattttcccacaatgctggctcattattttcctcctggaattgcaaatccaagggacaagtggtaca

SEQ ID NO: 858932 - DNA, 120 bp, Artificial Sequence
  ENSG00000271046_2 (sequence is synthesized)
gcctgcacccatccagaaggggagggaatcccaccagaggtgccctgaaacaaagaaaacaagtaacttcaaaaccacatcctaaaatctggacctgtgacaggacagatggaactctgg

SEQ ID NO: 858933 - DNA, 120 bp, Artificial Sequence
  ENSG00000271046_3 (sequence is synthesized)
attgtttgattctatcagcagaacagaggaaggaaatgttttaaaacgagattatgttattttccccagttattatgaagccttcctgaaatgaactttaaatatcggccaccactttca

SEQ ID NO: 858934 - DNA, 120 bp, Artificial Sequence
  ENSG00000271046_4 (sequence is synthesized)
tgaggctgaatgggattcagcaattaggagcgttgcagggaagtgtggcagggcagaggtgggacaaattgcagatccctgtggggtcccttggttaggtgacaattagtctataaaaca

SEQ ID NO: 858935 - DNA, 120 bp, Artificial Sequence
  ENSG00000271046_5 (sequence is synthesized)
cagctgtgtgtgttagggagggagtggtgtctttaaaaagctctgtgcccaataggaacattaattaaagggtcttttttcaaaggacattaataataatgaataaaaagccttctgcga

SEQ ID NO: 858936 - DNA, 120 bp, Artificial Sequence
  ENSG00000273759_0 (sequence is synthesized)
gacgctgcccggtggcctcggcgggggccctgtccttggccgctgcctctctgaatcccaggtgagaagaataaaacgtcctgacgctgtccggcttccggttcttggagaggacgggcc

SEQ ID NO: 858937 - DNA, 120 bp, Artificial Sequence
  ENSG00000273759_1 (sequence is synthesized)
gtctctgccgagagaactgtgcggaatcaggaagcgctggtgctccttcgctttcacgggactaagcgaaatccggctttaaacgaagtaaagccggctgcctcctggagtatttttgtc

SEQ ID NO: 858938 - DNA, 120 bp, Artificial Sequence
  ENSG00000273759_2 (sequence is synthesized)
ccatttttttttaagaattgctgagttttccggattgtactttcaaagactttccctgaaactttgcgtggcatgggggttgcagaaactggtgtctacacattacaaaagtgtactgtt

SEQ ID NO: 858939 - DNA, 120 bp, Artificial Sequence
  ENSG00000273759_3 (sequence is synthesized)
tacacctatttgtgatgcacccatcgtgtttttctccatggaccacctattaagcttcctgctggagcgctcttggcccccttcctgctttctgggccacatcctgttgtaaatcggtgc

SEQ ID NO: 858940 - DNA, 120 bp, Artificial Sequence
  ENSG00000273759_4 (sequence is synthesized)
tacttgtggggttttgtttgtgaattggggatatttaaggaacaatttattgaaacaactgaagagtttgtttcctcctttgggttttacttttaaaataaattcggttaggaaaaagta

SEQ ID NO: 858941 - DNA, 120 bp, Artificial Sequence
  ENSG00000233570_0 (sequence is synthesized)
gccccttccgccttccggatggatgaaagcagaagcagtggctggagctagagcagctatttaggactatgagatggaagaaatgtggtgacaatagcagaacaaaaatatagaaatctt

SEQ ID NO: 858942 - DNA, 120 bp, Artificial Sequence
  ENSG00000233570_1 (sequence is synthesized)
gggtacttgatgaccacggagccgccatacaaactctggactataatttccagagactgtttatacgaagagacggagtctcaagtttccatagctggtgtgcactttagttcctcaagg

SEQ ID NO: 858943 - DNA, 120 bp, Artificial Sequence
  ENSG00000233570_2 (sequence is synthesized)
acaataatgccccacccttgagagaatgaagatactgtcattacctctgcaaagaatgcatcctagcacagatcaaagatcttccaagtccagccacaccattttacagttctgaacctc

SEQ ID NO: 858944 - DNA, 120 bp, Artificial Sequence
  ENSG00000233570_3 (sequence is synthesized)
aatcagataaaaacctgtcatgttactaagagcaggagatgaggcagcctggaccaagatggtggcagagagaagaaaattgcttgagagaattgattaaactacttggttagcacagat

SEQ ID NO: 858945 - DNA, 120 bp, Artificial Sequence
  ENSG00000233570_4 (sequence is synthesized)
agagctgaatcaaaaattaggatggtaagctaagtaattttacacacaaaaaggcagagttgcattcataattagtctctccttcagactgaatattacagacaaaatatagccattggt

SEQ ID NO: 858946 - DNA, 120 bp, Artificial Sequence
  ENSG00000233570_5 (sequence is synthesized)
gttgcaatcacttcctttgggtttgtatccaaggttaagaatgtcagcatccaaagacccaaattcttaatgtttttagttgataaagtttattcaaggtagacagcctgtgttgaataa

SEQ ID NO: 858947 - DNA, 120 bp, Artificial Sequence
  ENSG00000233570_6 (sequence is synthesized)
cttagtcttccacaaatttcaagaaaaatccattgtccctcttctccgccacagacacactttagttgaacattaagcatatttattaaagaaacattctccttgtgctttttctcccaa

SEQ ID NO: 858948 - DNA, 120 bp, Artificial Sequence
  ENSG00000233570_7 (sequence is synthesized)
agattctaggaaagggaatatagacacctctgccctaataagaggactcaccctgtaagaggggcatgtggaatgggaggtattatggctgccatctttagaaattacaatttgccacag

SEQ ID NO: 858949 - DNA, 120 bp, Artificial Sequence
  ENSG00000233570_8 (sequence is synthesized)
gttgtgttccctagaagcagaggttgaaataggggttcttttgtgagttaaggaagagggagaagctaagcgaggatgtagcttcaggtgaagtccagcttcaacctgatcttgtaggca

SEQ ID NO: 858950 - DNA, 120 bp, Artificial Sequence
  ENSG00000233570_9 (sequence is synthesized)
gcactggatctcacattgtctgcagcatttgtccttccttgaggcaaaaaagtggggcttttgtacacacatatcagtcaacccttagcttagggaagccccaggggaagggttgtaact

SEQ ID NO: 858951 - DNA, 120 bp, Artificial Sequence
  ENSG00000233570_10 (sequence is synthesized)
cctaggtatctcgtagacaggcaactcctcttgcttaaaggcatttcccagacaaggcttgctctgtgagcctttaatagcagttaataaaaagattgccagagatctgattgggactgc

SEQ ID NO: 858952 - DNA, 120 bp, Artificial Sequence
  ENSG00000233570_11 (sequence is synthesized)
aacagcctcagctacattaagatatgggggcacattcaaggcctgttttatagagactagcagagaccatataagaatcactaacatgagctgcatacgctggaggcccctctgctgtca

SEQ ID NO: 858953 - DNA, 120 bp, Artificial Sequence
  ENSG00000233570_12 (sequence is synthesized)
aaacatgccactaaaagttagccctggagggcctttaagtcagctttcaaagaacaacagatctggttttgtgactctgggaaaattaccatccaagcctcagtttcttcttctctaaaa

SEQ ID NO: 858954 - DNA, 120 bp, Artificial Sequence
  ENSG00000233570_13 (sequence is synthesized)
tgggaaggatagtaaaagtacctgcgacagagttgttgggaggaccgagcaagaggctgcacagtgcctggccctgaccaaatgaacaagtctatctgaactttttctccagagaatgaa

SEQ ID NO: 858955 - DNA, 120 bp, Artificial Sequence
  ENSG00000233570_14 (sequence is synthesized)
atgttatagtaaagtgagataaacattctcagaaacatgattgtgacttaaaaaaaaaaaaaaccaacaaaccactttctgtagaggaattatgctttggggacagaaactttcctttat

SEQ ID NO: 858956 - DNA, 120 bp, Artificial Sequence
  ENSG00000233570_15 (sequence is synthesized)
aatttttacagctgcacgcagataaagtgtattaaaaaggcacaacacatcaattatgaaaacatggctaccctttaagagaacacagactttttccagatccatcttaaatctcaggaa

SEQ ID NO: 858957 - DNA, 120 bp, Artificial Sequence
  ENSG00000233570_16 (sequence is synthesized)
ttctagatcgagacaggcatgaatgctcctgttgctgaaatcactctgatttccttcttgttaaacacttcactcagcaacattatagattagcaccaaaaaagttgtttgtaggtgaaa

SEQ ID NO: 858958 - DNA, 120 bp, Artificial Sequence
  ENSG00000233570_17 (sequence is synthesized)
aactgttcagaaaaggacaccttattaggcaggctgtcgatttacaaataaaagccgattctggctctcctgaatgaaaagaagagtaatttctggggcttattaacttgattttagact

SEQ ID NO: 858959 - DNA, 120 bp, Artificial Sequence
  ENSG00000233570_18 (sequence is synthesized)
gggggggggtcccagaaccagggaggtcctgaaaagggccatgtcacagtaactactcgatccaagcttctcctcagtctgagatgtaccatggccactgcttgccccatgtctacagga

SEQ ID NO: 858960 - DNA, 120 bp, Artificial Sequence
  ENSG00000233570_19 (sequence is synthesized)
ttcagagtcttcagggaaagttgggcacaaacggtagagtcctcttccctggctgtgttcccacctcccaaagccccacataatggaaaatccctcaagaggaggcagtcacagagggaa

SEQ ID NO: 858961 - DNA, 120 bp, Artificial Sequence
  ENSG00000233570_20 (sequence is synthesized)
gtagaggccaggcagcctgcgaatgatcaatgtggtacagggctcctgtcccctctatggccacctctcaagttgttctttcctaggttctttattaaatgtgatagatttatccaaaac

SEQ ID NO: 858962 - DNA, 120 bp, Artificial Sequence
  ENSG00000233570_21 (sequence is synthesized)
agttatgaattcagatcctaccaatctgatattacaagagctcacataggggaaggaatggagtttaacagtaatgttgacaaagaaaaataaagtttttaataaaaggtatcaacaaaa

SEQ ID NO: 858963 - DNA, 120 bp, Artificial Sequence
  ENSG00000233570_22 (sequence is synthesized)
cagcccagtcagatggggatggcctggaataggagccagttctgatataggaggcattgtcatcccattttacagacgaagagacggagtctcaagtttccatagctggtgtgcacttta

SEQ ID NO: 858964 - DNA, 120 bp, Artificial Sequence
  ENSG00000233570_23 (sequence is synthesized)
tggcatacatttacctcagccgcactcttcagtgctctgcatccaggctacgcggaggctgcatgttacaggagccgtgcatccctgaagacttggaataagtcaagatttacataatcc

SEQ ID NO: 858965 - DNA, 120 bp, Artificial Sequence
  ENSG00000233570_24 (sequence is synthesized)
cagagacatccttccaaagcgtgatagtaactctgttccatggctggagtggctcctccaggtgccagcagcataaacccacctttcaatcagtctgcagctcagaaatactacctgatt

SEQ ID NO: 858966 - DNA, 120 bp, Artificial Sequence
  ENSG00000233570_25 (sequence is synthesized)
ctagacaggcttttcaacgtaataggttgaattattatgtcttgtacataaattaagactttacatttttatactgctatttataatgtatataatgcaaatccatgtaaactatggtta

SEQ ID NO: 858967 - DNA, 120 bp, Artificial Sequence
  ENSG00000233570_26 (sequence is synthesized)
aagcagtggctggagctagagcagctatttaggactatgagatggaagaaatgtggtgacaatagcagaacaaaaatatagaaatcttggttctgatataggaggcattgtcatcccatt

SEQ ID NO: 858968 - DNA, 120 bp, Artificial Sequence
  ENSG00000233570_27 (sequence is synthesized)
attgccacgagcaaaaaaggaaatacattggttcatgaaatgagaaagtcaatggacagtgctgacccagattggatccagggctcaaagagcatctccaagagaccatataagaatcac

SEQ ID NO: 858969 - DNA, 63 bp, Artificial Sequence
  ENSG00000233571_0 (sequence is synthesized)
tctgtgggcataggaccctccgagccaggtgtgagatataatctcctggtgcgcggaactccc

SEQ ID NO: 858970 - DNA, 75 bp, Artificial Sequence
  ENSG00000233571_1 (sequence is synthesized)
tctccctgctttggctcgcgcacggtgcgcacacccactgacctgcacccagtgtctggcactccctagtgagat

SEQ ID NO: 858971 - DNA, 120 bp, Artificial Sequence
  ENSG00000233571_2 (sequence is synthesized)
gttcctattcggccatcttggctcccaaatcccagataacaaaattctgttcttcatggatgaagtacaactggaaaagttctatggcattttgattgatttaatctctaggagacactc

SEQ ID NO: 858972 - DNA, 120 bp, Artificial Sequence
  ENSG00000233571_3 (sequence is synthesized)
tggcattttgattgatttaatctctaggagacactccagttcaaggacagcaaggagtgactacagatcaaaaagaaagctagaagcaagcaagcaaggaagaaatgaggaaaaaaggca

SEQ ID NO: 858973 - DNA, 120 bp, Artificial Sequence
  ENSG00000233574_0 (sequence is synthesized)
gtggcttgccagcatcccttccccttctgctatgactggaagcttcctgaggccctcaccagccacagatgctagtgccatgcttcttgtgcagcctgcagaacggatccagatctgttt

SEQ ID NO: 858974 - DNA, 120 bp, Artificial Sequence
  ENSG00000233574_1 (sequence is synthesized)
tagaccaactgacctttgcgtcagcatccatcagtgttcattacaggacatggtgcccacaacagaggagcaaaaatattccttctgaaaagctgtccttcagcatctgatctccacgca

SEQ ID NO: 858975 - DNA, 120 bp, Artificial Sequence
  ENSG00000232220_0 (sequence is synthesized)
gccaggaaaaagaaagaaaaacaaaacaaaacagaaaaggtcgatcttgccttgaaagcgggcagtggctattttcttctctctgccaaagcaggacacgttattcttaacacagagggc

SEQ ID NO: 858976 - DNA, 81 bp, Artificial Sequence
  ENSG00000232220_1 (sequence is synthesized)
gtcttcaacatcctgtggttcttcgtccgattccctgggccacagagtgagaatccgtcttaaaaaaaaaaaaaaaaaaaa

SEQ ID NO: 858977 - DNA, 120 bp, Artificial Sequence
  ENSG00000232220_2 (sequence is synthesized)
ggtgaaaacaggatgtgggcaacaaaacaacacaggaaggaaacagcaagaggaaagggaaggaagaagatgcatccaagaactggttagagtgcaaggaattgggaaggaaagaaaaag

SEQ ID NO: 858978 - DNA, 120 bp, Artificial Sequence
  ENSG00000232225_0 (sequence is synthesized)
ggattttagaaaatataattttaaagacaaattatacctatttttctcaataacacatggctacagtgaaagacttccatttattgacggagtcttgccctgtcactcaggctggagtgc

SEQ ID NO: 858979 - DNA, 120 bp, Artificial Sequence
  ENSG00000232225_1 (sequence is synthesized)
agtggcacaatctctgctcactgccagcctctgcctcccgggttccagtggttcttctgcctcagcctcctggacagctgggattaaaggtacccgccaccaaacctcagcctcctggac

SEQ ID NO: 858980 - DNA, 120 bp, Artificial Sequence
  ENSG00000232225_2 (sequence is synthesized)
attctctccctatacatttttgttgtattgaatttcagtttcattttattctcttatctttcatggaatgttacaattacctaaattatagactaatatagaagcttttgagcaaaaggg

SEQ ID NO: 858981 - DNA, 120 bp, Artificial Sequence
  ENSG00000232225_3 (sequence is synthesized)
tgtatgtgctgtgaaggtcaacattttaaacgatcctaaaacataattgttttagaacgggcacttgtctgggtcccactgaatgactcatttcacggcatcacattcaaaatggattct

SEQ ID NO: 858982 - DNA, 120 bp, Artificial Sequence
  ENSG00000232225_4 (sequence is synthesized)
atcaaaggaaaaccaactcattctcaagatgaaattcatcctttgcatattatgtatcaatgatatcactcttccagtgccagttgtggaaaaataggtttcaacatagagtggcttgta

SEQ ID NO: 858983 - DNA, 120 bp, Artificial Sequence
  ENSG00000232225_5 (sequence is synthesized)
acaccaaacatttgatagaagattattaatatgagtggtagtaggacagaaagactgtcacatatttttgagggattttagaaaatataattttaaagggggcagcagttcaatactact

SEQ ID NO: 858984 - DNA, 61 bp, Artificial Sequence
  ENSG00000232225_6 (sequence is synthesized)
gaaaatataattttaaagggggcagcagttcaatactactttaaaaataatactccctggc

SEQ ID NO: 858985 - DNA, 120 bp, Artificial Sequence
  ENSG00000232225_7 (sequence is synthesized)
aattatacctatttttctcaataacacatggctacagtgaaagacttccatttattgatcactttttggcctttggctgagatcaagagcactacctgaagatgaaagatgaaaggagct

SEQ ID NO: 858986 - DNA, 120 bp, Artificial Sequence
  ENSG00000232227_0 (sequence is synthesized)
gaagagagatatcaccgtggtaagcaatgcaggtttgatagcaacaccagctcagacggtaattccacaggacgtaccgaggaaaggctagcagaagactcaccagaaaggttctgaaga

SEQ ID NO: 858987 - DNA, 120 bp, Artificial Sequence
  ENSG00000232227_1 (sequence is synthesized)
tacaaacaaagagcctgaaatgttggaaactttagggtcaagcattggtattagagccttggaaagagaatagagttgtcagtcaatttacattacactggaaactataataaattgggc

SEQ ID NO: 858988 - DNA, 120 bp, Artificial Sequence
  ENSG00000232227_2 (sequence is synthesized)
tccaaaaattctggcctgtcaaaagttaacgatcatctttcttaatctagcaaattaaatatgacactgaatgactttaaataacactgacacttccataggaatgttgatatgaagcat

SEQ ID NO: 858989 - DNA, 120 bp, Artificial Sequence
  ENSG00000232227_3 (sequence is synthesized)
ggtatttaattttttatgtaaaatatgaatgcacagaaagacatgaatgatgcatagtatgaaaacatgattcaaaaataaaaatatgactggtgaaataaaaactttagagaaatgtca

SEQ ID NO: 858990 - DNA, 120 bp, Artificial Sequence
  ENSG00000232227_4 (sequence is synthesized)
tttagaagagagatatcaccgtggtaagcaatgcaggtttgatagcaacaccagctcagacggtaattccacaggacgtaccggtacctcagtcacatctttgtcatgttcgaagctgct

SEQ ID NO: 858991 - DNA, 120 bp, Artificial Sequence
  ENSG00000232229_0 (sequence is synthesized)
aggattgattttcattttgcaaatataatactggttcattttctttctcttcctccatccattctactattgaacataaaacgtgtcaatagtattgtagttcagcatgtatctcaggat

SEQ ID NO: 858992 - DNA, 120 bp, Artificial Sequence
  ENSG00000232229_1 (sequence is synthesized)
attaaaagggcagtgtgactcagctagaaaaggatgaactttccccaaagataaagtgacctatgcgactctgttgggtacaagtgacacagaaagtcatctcaaactagctgaaacaca

SEQ ID NO: 858993 - DNA, 120 bp, Artificial Sequence
  ENSG00000232229_2 (sequence is synthesized)
aaaggtaatttatttgtttcaatacctggaaattccaagagttttttttagctctagttatagctggatcaagatgagtgtcaaatgatataatgatattgtcagtgtttgagtgtctta

SEQ ID NO: 858994 - DNA, 120 bp, Artificial Sequence
  ENSG00000232229_3 (sequence is synthesized)
gtgtcttatctatcatgtgtctatccatacatatctatacctacatatatacatatatcacacacgttttataaaaaatttatcatgtcgacaataatatttaaacaaatacccaaataa

SEQ ID NO: 858995 - DNA, 120 bp, Artificial Sequence
  ENSG00000232229_4 (sequence is synthesized)
cattgagttttctcagaaggctaaatcacttacaaacaaaatggaacatttttatatttttataatttccttctggtactgtggatcacagccacagaaggaaatcagtctagtaatatt

SEQ ID NO: 858996 - DNA, 120 bp, Artificial Sequence
  ENSG00000232229_5 (sequence is synthesized)
cttatggacatttgtgaatttttagctctgcttagcatctaaaatccagtgtatgtttggaatctttttcaacattattagccatagtgtggaggagagactgcctcacccaatgggaga

SEQ ID NO: 858997 - DNA, 120 bp, Artificial Sequence
  ENSG00000232229_6 (sequence is synthesized)
tgaaaatgccaaactcttgcttgcctagactcccttggagctaggacatgaccaagtgaggtacattccactaatcagattcagccatggaagcaggaaccagtaactcaaagaagcagg

SEQ ID NO: 858998 - DNA, 120 bp, Artificial Sequence
  ENSG00000232229_7 (sequence is synthesized)
gactgagagcctccattcagactgaattcctagtgcagctgtggcagcagagctagaggcagtgtcacagtgcagtagtggaggggttggtggtgcaggctgtagagtcttttgcttgtt

SEQ ID NO: 858999 - DNA, 120 bp, Artificial Sequence
  ENSG00000232229_8 (sequence is synthesized)
agtgttggtagggatgtcaacattaggtgagctgtgtcatgtcttggtgagcctgtgtttcatagaacctggctcttcatacatgctggcaatgtaatccacccaatatcattatcacaa

SEQ ID NO: 859000 - DNA, 120 bp, Artificial Sequence
  ENSG00000232229_9 (sequence is synthesized)
acacctttcccattgaaattaacctgagttggtttctgttgcttgcagctgatgaatggatgaccttctcttcctctatgtcatctcctttagttatgtatttattaacttaaatctcat

SEQ ID NO: 859001 - DNA, 120 bp, Artificial Sequence
  ENSG00000232229_10 (sequence is synthesized)
ccaaagataaagtgacctatgcggtaagtcctacgggacttcatatcctcattggagagaggtttagggtgtttctagttgtagcagggttagttgcaccttaggttgaagcaagatttt

SEQ ID NO: 859002 - DNA, 120 bp, Artificial Sequence
  ENSG00000232229_11 (sequence is synthesized)
gctactggaaattaaatatggtaaaaggaggtgctctcggccgccaatttgacaagggatggaccgtgctggttttgtatcaactggcctaagctagaacttcatttccattatgtctcc

SEQ ID NO: 859003 - DNA, 120 bp, Artificial Sequence
  ENSG00000232229_12 (sequence is synthesized)
atatcaggtttggccaaaagatatatctatgccagatttgggaagcagaagtgaaagagtaaccgttactctgtgtagctggtgcggaaggagagaagtgtagatgtactgcttgtgggc

SEQ ID NO: 859004 - DNA, 120 bp, Artificial Sequence
  ENSG00000232229_13 (sequence is synthesized)
cgcctgcctctgtcttgactccagctggtgtccttttctgcctgccttgctgaccaacagcagccccaaacccacagtcaatgcagaggcaacagccttccatgcacttcttcgccagct

SEQ ID NO: 859005 - DNA, 120 bp, Artificial Sequence
  ENSG00000232229_14 (sequence is synthesized)
cctgttgtggtctcactcttgcaactggatgttcccagttctctatatgtaacctgtgacttttccttcacttgactacttcaggagaggtgaatagagacttttctccaattctccacc

SEQ ID NO: 859006 - DNA, 120 bp, Artificial Sequence
  ENSG00000232229_15 (sequence is synthesized)
ttccaacggtggccttacttccccgtctcctcccactattgtgcaaggtctaattttttaatccttagactataaactctgtggaggtagccacctgtttagtttacagctatagtccca

SEQ ID NO: 859007 - DNA, 120 bp, Artificial Sequence
  ENSG00000232229_16 (sequence is synthesized)
gcgcctggcacccagaagacactcattaaatgtttgaagaattattaaagcccccaataattgatagcccttattatttatccagtacttagattctcaaatatgaaacacgaacaactt

SEQ ID NO: 859008 - DNA, 120 bp, Artificial Sequence
  ENSG00000232229_17 (sequence is synthesized)
ggtttcattatctggcttaaaaagcttatcagggaaaaagtttttaaaaatatattttgggcagcatttgagtcatttcccgcacccccaaacctatgtcagtcgataggaagtctgaaa

SEQ ID NO: 859009 - DNA, 120 bp, Artificial Sequence
  ENSG00000232229_18 (sequence is synthesized)
ccaggcgtggtgacctgggtggcgacgctcgtggaggccgaggagcttctggaccggcgcttcgggggaccaagtggagaggctgctggagttgtcgcctgagtcctcccttagttcttc

SEQ ID NO: 859010 - DNA, 120 bp, Artificial Sequence
  ENSG00000232229_19 (sequence is synthesized)
gcgccggcctcgcccacggctccgggtcccagccgccactgcagtctccgcagcaccgagcggggctccaccgactcgcgacctccagcctccgcctcaagggcagggagcgcggctggg

SEQ ID NO: 859011 - DNA, 120 bp, Artificial Sequence
  ENSG00000232229_20 (sequence is synthesized)
tctctggaaagccatttttaaatcactgcctctgctgcccccatgtgaggtcggagtgtcctcccccgtctttgctttcaggttctttcaggttcctttgggcaaacccgcagctaagag

SEQ ID NO: 859012 - DNA, 120 bp, Artificial Sequence
  ENSG00000232229_21 (sequence is synthesized)
tccagcttgtgaacttgaacctgaacttgctgaagaagctcccggcggccccctgctgtctgcggcctttgtttgagggagaggctggggtcacccggttgggccgcatttccggggccg

SEQ ID NO: 859013 - DNA, 120 bp, Artificial Sequence
  ENSG00000232229_22 (sequence is synthesized)
tcacctgtcgggctgccaggccgcgcgtaccttgtcccatcgggggctctgctctgccccctgcgctgatgacgcgggtggaagggaggtatcaggggcactctggggagctgtacctgg

SEQ ID NO: 859014 - DNA, 120 bp, Artificial Sequence
  ENSG00000232229_23 (sequence is synthesized)
cgggcaccccccagctgctctccgtggggtacgacaccgagacctggttgggctgcaaggagaccgactgggattcccgggctggtggccggggagacgaaggcggggggtgagaggcag

SEQ ID NO: 859015 - DNA, 120 bp, Artificial Sequence
  ENSG00000232229_24 (sequence is synthesized)
gaacccaggaggccccaggcccagcgctgtggggctgctgttgtcgttctgcgtggaggtctggccaaactggcttttgccccgagtgaggaattcctgctcttttttggttttggtaag

SEQ ID NO: 859016 - DNA, 120 bp, Artificial Sequence
  ENSG00000232229_25 (sequence is synthesized)
aggtcgctattcacagagggggcggggttcgtcccctccaggcgagtacggggctggcgggcgcagtgctgcctttctgctctgtctcttgatcccgcttaggatctttgtggctcctct

SEQ ID NO: 859017 - DNA, 120 bp, Artificial Sequence
  ENSG00000232229_26 (sequence is synthesized)
gagtcttcttagagaggccgtgaaagatgggaaaggcaggttgctgaaacgctgctgctcggggctggcagagaccctggtatagggaaggcgcaccactgtgggtcagatcagctgaca

SEQ ID NO: 859018 - DNA, 120 bp, Artificial Sequence
  ENSG00000232229_27 (sequence is synthesized)
gtgggggttttaggtgatggggtaaccttacagttcggatctcttagaacccagaagcaggtaggcgatcgctgcttcatcacacttcacagggagtcctggatctttcctgtccgtaac

SEQ ID NO: 859019 - DNA, 120 bp, Artificial Sequence
  ENSG00000232229_28 (sequence is synthesized)
ccatggacgccatgattcagtatggcggaggtccggggcttaagttcctgttcatgcttcctaatcattcatggatccatcacaatgtgctctgaagggcctctcttgctgggattgaga

SEQ ID NO: 859020 - DNA, 120 bp, Artificial Sequence
  ENSG00000232229_29 (sequence is synthesized)
aggatacattttttgagcaggtttttatactcaatggacatgtagaagggaatatattctactcagttcccctcctgcagctccttgaaattctgtccatcaaaagcagggatctgctga

SEQ ID NO: 859021 - DNA, 120 bp, Artificial Sequence
  ENSG00000232229_30 (sequence is synthesized)
ccagaggtgactgccacagaaggtatccagtttgtaaaagctgaatttgttgctgaagccagaatttgcaatcttgatgtttgtgttaacatccaagagcgtgttttctgcctttaaatc

SEQ ID NO: 859022 - DNA, 120 bp, Artificial Sequence
  ENSG00000232229_31 (sequence is synthesized)
agaatttgcttcagtcctttttttttctttcctgctgccatgagcaggtattcacaaacttctcctcctggctagtgtgcttcatgacaaagcaaagagattcctcaatatcgatcacag

SEQ ID NO: 859023 - DNA, 120 bp, Artificial Sequence
  ENSG00000232229_32 (sequence is synthesized)
caaatgtttcactatgttggggtgatccgagccttcatggttcctactttgtggatggtgtctggaggagatctgctgagtctcatcaatgaacttcacagctgctgctttcccagttaa

SEQ ID NO: 859024 - DNA, 120 bp, Artificial Sequence
  ENSG00000232229_33 (sequence is synthesized)
gaggtcccaggccaaccttaccttagccaggttgcccttgacgatggtctcaaggatcctagctgccagtaagggtcccttctcagcagagatggctgagaggccctgtggcatgtgaga

SEQ ID NO: 859025 - DNA, 120 bp, Artificial Sequence
  ENSG00000232229_34 (sequence is synthesized)
cttactgctgggcttggagtcaaggtgtcccaggtcagcttaatttcgggaaaaactggtaagacgcttggttcaaatcacttgaaaagaaaatcacttgcatagttcacctgaagaatg

SEQ ID NO: 859026 - DNA, 120 bp, Artificial Sequence
  ENSG00000232229_35 (sequence is synthesized)
gatctctataatggaattaaagcacaatgctggacaaaaagtaagaaaaagcaacaaactgaaaggaaaaattgagtaaaaagaataaagaactagaactggcaacctcagccaagccag

SEQ ID NO: 859027 - DNA, 120 bp, Artificial Sequence
  ENSG00000232229_36 (sequence is synthesized)
ggaattacatacatcttggaattccaaagcaatgcttccttatgagggcataggaagaaataaatctaataacaaggctgggattaattcacgtggttttctcacattttggtctcaaga

SEQ ID NO: 859028 - DNA, 120 bp, Artificial Sequence
  ENSG00000232229_37 (sequence is synthesized)
actttttactctaaaactaattattgaggaccccaaagagctttttatgtgggttatagttatcagtatttactttattggaaattaaaacctgtaggatgtttcagtggtcttttctag

SEQ ID NO: 859029 - DNA, 120 bp, Artificial Sequence
  ENSG00000232229_38 (sequence is synthesized)
tttgaagggtttaataatttttggcttttaaagagcccataatcaattaaaatattttattttcctttaaattgtaaatgattggtgtcataatgatgctacaacttaactggcattaca

SEQ ID NO: 859030 - DNA, 120 bp, Artificial Sequence
  ENSG00000232229_39 (sequence is synthesized)
atactatacaaatacgttctattgtataagtcacaataaggtacattattaactctataacatttaggggaagatagctgttatcatattatttaaagttttgcctagtttctttgtagt

SEQ ID NO: 859031 - DNA, 120 bp, Artificial Sequence
  ENSG00000232229_40 (sequence is synthesized)
agacttatcttttccaggagccagagaacccgctatatcagtttcagtatctttaaatgtagagattgcagctgtgtgttgagaaagcacgtttcacttagcatgggatggggacttcga

SEQ ID NO: 859032 - DNA, 120 bp, Artificial Sequence
  ENSG00000232229_41 (sequence is synthesized)
ggtactggatatgtcactggcacctcaggggaggaaaccaagatgcccctatatgattttaaacatggtttattaaagcgtgatacagaaaagtgcacaaattgtccacctacagcttgg

SEQ ID NO: 859033 - DNA, 120 bp, Artificial Sequence
  ENSG00000232229_42 (sequence is synthesized)
tgactgttcacaaattgaactcatctaactagcctccagaataagaaacaggcctttacacacccccaccagcctcccaatccccttttcagtcaccttctctgcagtgataaccactat

SEQ ID NO: 859034 - DNA, 120 bp, Artificial Sequence
  ENSG00000232229_43 (sequence is synthesized)
tctatattctgacagcatagtttcacttgttttttaacttcacataaatgggatcagacagtattgaatcctttgtgtctgcttccttcactcaatattttcctgagatttttctatatt

SEQ ID NO: 859035 - DNA, 120 bp, Artificial Sequence
  ENSG00000232229_44 (sequence is synthesized)
gtttattctaaatgcccattgtacgactgtaacacaatttgtttatccattttactgttcttgggcatttgggtagttctcactgtggatgctaagaagagtgttgctataaacattcag

SEQ ID NO: 859036 - DNA, 120 bp, Artificial Sequence
  ENSG00000232229_45 (sequence is synthesized)
gtcttttggtaagcatatacctggctttctgttggctatttatacctagaaatagagttgctggcttataaggtatgcatatttttagttttagtagacattgcagtttgtaccaattca

SEQ ID NO: 859037 - DNA, 120 bp, Artificial Sequence
  ENSG00000232229_46 (sequence is synthesized)
cccacccaccaatgtgaatatctaatattgcctgcctgtctgtacgtgtgtactggtatagcattgtggttttaatttgcattttccagtgcctaatgaaataaagcaccttttaatatg

SEQ ID NO: 859038 - DNA, 120 bp, Artificial Sequence
  ENSG00000268157_0 (sequence is synthesized)
ggggctccctgcccagaaagacagtgatgggggtttctagaacaaggaaacccagaaggttcccagatgtccaggagacaggaaatgagaatttcagagccagcgggaagacaaggtgcc

SEQ ID NO: 859039 - DNA, 120 bp, Artificial Sequence
  ENSG00000268157_1 (sequence is synthesized)
tcactgagctgctggaccatgaaaggtgaaaaacacactgaagatgagagccatctcgggagcacccgaacacagatgtccataaaggagctcgtgaacaccacggaccctcccgggacc

SEQ ID NO: 859040 - DNA, 120 bp, Artificial Sequence
  ENSG00000268157_2 (sequence is synthesized)
ctccttcccctccaccatgctctctctgtggctactctgggtctaacacaaccactagaaaaactatccccaaacaggcacagtgagagcacacgaacagacatgctgatacagttcgga

SEQ ID NO: 859041 - DNA, 120 bp, Artificial Sequence
  ENSG00000268157_3 (sequence is synthesized)
cattcgtcccttccaaatttcatattgaaatgccatctccagtgttggaggtgaggcctggtgggaggtattggatcatggaggtgaacccctcatgaatggctttgcaccatctccttg

SEQ ID NO: 859042 - DNA, 62 bp, Artificial Sequence
  ENSG00000270318_0 (sequence is synthesized)
taaaggtccctgagactctcctgtgcaggctctggattcaccttcagtagctatgctatgca

SEQ ID NO: 859043 - DNA, 120 bp, Artificial Sequence; identical to SEQ ID NO: 769885
  ENSG00000270318_1 (sequence is synthesized)

SEQ ID NO: 859044 - DNA, 120 bp, Artificial Sequence
  ENSG00000269400_0 (sequence is synthesized)
ggtggagaccagttccaggggcagggatctgggtatgaataaaagggtgtatgatgtgggtgggttgggataggcccaggagccaggattgtgggagatcagattcaggggtagggcctt

SEQ ID NO: 859045 - DNA, 120 bp, Artificial Sequence
  ENSG00000269400_1 (sequence is synthesized)
ttaacactaagagtttaggggagcaggagaggactgggtcatagatacacatataggaaaacttaagaatggtacaaagtcagtcaaatattctcccaccacggtctttcagttcttttg

SEQ ID NO: 859046 - DNA, 120 bp, Artificial Sequence
  ENSG00000269400_2 (sequence is synthesized)
ctcagaggcaaaaataattttctcctctatctttccagatatagtgtggacatgtatgtgtgtgtatgtgtgtatgccgtagtcatattcatggaataaatgctattacctcccccccaa

SEQ ID NO: 859047 - DNA, 120 bp, Artificial Sequence
  ENSG00000277831_0 (sequence is synthesized)
ccatgcccagccaattttcagcctttagagcaagaaatcctaacaagcctatgcccattaatcataaatctgccccacttagggcactggatgtgtggctgtacagactgagttttaccc

SEQ ID NO: 859048 - DNA, 120 bp, Artificial Sequence
  ENSG00000277831_1 (sequence is synthesized)
atctttataaatgatgctacactactaaactgtgatgcattggacatctctcatttttctgtggctgaccagcatgcaaacattctttatatttggggcactccatcactgtgagagtct

SEQ ID NO: 859049 - DNA, 120 bp, Artificial Sequence
  ENSG00000277831_2 (sequence is synthesized)
ggccacatacttggtctcccaacccctcacagctagggtggcgtgtgatctggccaatgagattctccttttgggaactgtgaatcttgatcaagtggtgcaaagacagagacacgttaa

SEQ ID NO: 859050 - DNA, 120 bp, Artificial Sequence
  ENSG00000277831_3 (sequence is synthesized)
aattcatcttggtggtcgagtttctagagactggtagtacctagcaatcatggtggaaccagtgacagtatcctttttattccgtggtacctgaaatccttacaataaattcttccgctt

SEQ ID NO: 859051 - DNA, 120 bp, Artificial Sequence
  ENSG00000277837_0 (sequence is synthesized)
tgaagcgcttaaatctttaatgtttttggacaacacagtctatatgttttctgcataatgtatcatttctttaaactatagtattaaaaataatttcaaattgtaatgaaaagtcatttg

SEQ ID NO: 859052 - DNA, 120 bp, Artificial Sequence
  ENSG00000277837_1 (sequence is synthesized)
gctttaaaaccacccaggaagaggatataaaatgcgtataccaaaagactatgatgcggcttccagtgtttttctgatatagatcataataatttaaaaaggcttttgtcaggctgtctg

SEQ ID NO: 859053 - DNA, 120 bp, Artificial Sequence
  ENSG00000277837_2 (sequence is synthesized)
aatacatcaaatactttctcatttctgtgtcggctgtgaagctctaactatagtggcttctctagcaggtattctccgcacaactgtgccaaatcgttctgaggacacccagattctcct

SEQ ID NO: 859054 - DNA, 120 bp, Artificial Sequence
  ENSG00000277837_3 (sequence is synthesized)
ccttctcaaaacagacattcctgactgggtcctagggcagggagaggggcgttggacccctactgccctctgggttctccgagcaccaggacttgttgctccggcgggaactcgcgcgga

SEQ ID NO: 859055 - DNA, 120 bp, Artificial Sequence
  ENSG00000277837_4 (sequence is synthesized)
tccaccggctcggcacatcctgcctacaagtagggcggcgtgtgctaggagccgggccccgggccgagtcgtccgtgccgcagcggagagctccgaccggcgcggccccaccatccgctg

SEQ ID NO: 859056 - DNA, 120 bp, Artificial Sequence
  ENSG00000277837_5 (sequence is synthesized)
gctgaccttcgcccggtccggcctggagcccggccgcggcctccctaggcctctctaggccgggcgccggttcagcgaggaccggaagcgcccgccgtccgcccttccgcctccaggccg

SEQ ID NO: 859057 - DNA, 120 bp, Artificial Sequence
  ENSG00000277837_6 (sequence is synthesized)
ggctggggacgccctgggagtgccccgggggccgccttcttccccgcaagcccggagcgggcgtcgctcccgcccccgcctcgtcttcagttcccccgtcgcttccgccgccgtgggtag

SEQ ID NO: 859058 - DNA, 120 bp, Artificial Sequence
  ENSG00000277837_7 (sequence is synthesized)
ccgccgccgtgggtagaacagacccgagctgggagccaggcctgcggcccctcgaacactagccacatctggcccgccgggcctagcacggagagaggccctggggcttggcggccgggg

SEQ ID NO: 859059 - DNA, 120 bp, Artificial Sequence
  ENSG00000277837_8 (sequence is synthesized)
ccgggagaggtcgcgcggccaaggacacccgagggcctgggctgcctccccgcccttccccgcccctcccctcggccctggaatcaatagtggccgctgacttttcacgacaattgcagc

SEQ ID NO: 859060 - DNA, 120 bp, Artificial Sequence
  ENSG00000277837_9 (sequence is synthesized)
tgtctaattcatcagcgaataattaaatcagaggccgccgggcctgcctggagtcggagacgaggggtcgctcctctcaaatcctgtcaaattggggagccagtgggcagcgcggagagc

SEQ ID NO: 859061 - DNA, 120 bp, Artificial Sequence
  ENSG00000277837_10 (sequence is synthesized)
ggacaggcctcgccctgcgccgaggctgcgagagccgcctggacccggcgccattccgagtgtagggggaagcaagcccccaggtgtggggagcaaaaggaaggaggagggcacaggcgg

SEQ ID NO: 859062 - DNA, 120 bp, Artificial Sequence
  ENSG00000277837_11 (sequence is synthesized)
gggccccgccgaggctggactccctcgtcagcagggccctcctggccggtgcgtggtccgggtgcccggcgtggggcagcggccgtggggcccacagacaccatcctcacgcagacttcg

SEQ ID NO: 859063 - DNA, 120 bp, Artificial Sequence
  ENSG00000277837_12 (sequence is synthesized)
cgaatgtcgtggaactccatcctcgggaggcgctttgcctttgaggaagatggagaggagtcgggagaagcgcctagaaaccgcattgatttagacatcaatcctggccggctccctccg

SEQ ID NO: 859064 - DNA, 120 bp, Artificial Sequence
  ENSG00000277837_13 (sequence is synthesized)
atcaatcctggccggctccctccgcctgccgagctgcggggccgcgccgccccgtccccgagaagcggacctagggtacgccgggctccgccgagcgggcaaagggagcggcctgcgccg

SEQ ID NO: 859065 - DNA, 120 bp, Artificial Sequence
  ENSG00000277837_14 (sequence is synthesized)
gccgcagccgccacgccaacaccgattcctcgtggccaacaggtttctcgcagccctccgagtcggcagcgccgcccgcgtccctcttccagccgggccggcgggacgccctcagagctt

SEQ ID NO: 859066 - DNA, 120 bp, Artificial Sequence
  ENSG00000277837_15 (sequence is synthesized)
gtgctctctcgaggccgccgagcccactgagcccggccggggcgctggttcgcgtgggccgcggggaacaggtcccgcttctccaacgaccacggccccggcggctgcgaaacggccacc

SEQ ID NO: 859067 - DNA, 120 bp, Artificial Sequence
  ENSG00000277837_16 (sequence is synthesized)
tccgacccttgagtccgccagagtcgctctccctttcacatttgcaagcaaaacaacatacgtaatagtgacatcgaggcacttttccaaactaaaatgatcctaaaataatctgaatgt

SEQ ID NO: 859068 - DNA, 120 bp, Artificial Sequence
  ENSG00000277837_17 (sequence is synthesized)
actgttacttttgatcgtgttaccccaaaagattagctcagattcacttggttcttttatttctttgggagatgatactcgaggaatctgaaaaaatatacgatttttaaaaacgatatg

SEQ ID NO: 859069 - DNA, 120 bp, Artificial Sequence
  ENSG00000277837_18 (sequence is synthesized)
attcgcatacctatttcaacccctcggttggttttgttagtttccaaatagaaatattgccttttgaaatcggagatcatatttctcaagtttaaaatctagccaagtcttttttttttt

SEQ ID NO: 859070 - DNA, 120 bp, Artificial Sequence
  ENSG00000277837_19 (sequence is synthesized)
aatactccgtctgaaatttttttccatggtagctagacaattgaaattatacacaaagattttttaactctcggattttcattggaaggggacgtaaatagtttttgtactaatgcctaa

SEQ ID NO: 859071 - DNA, 120 bp, Artificial Sequence
  ENSG00000277837_20 (sequence is synthesized)
ggtaataaataaaagcaacacccgtgcttagtgtctcagggcaacttgaaaacagctccactttcagggagttaaatttgtcctttttacaatcaactgcaacttttgccttcctttgga

SEQ ID NO: 859072 - DNA, 120 bp, Artificial Sequence
  ENSG00000277837_21 (sequence is synthesized)
aaggacgacaaaaagatttcacgcacaacttgaccggaacaaagggacatcatgccagtttttcttttgtggggtgacaactagaagagaggaaaagtttattttaaccatacttgagtt

SEQ ID NO: 859073 - DNA, 120 bp, Artificial Sequence
  ENSG00000277837_22 (sequence is synthesized)
gtacttttggaaccctcctttaaagagaaaatgtgacggcagatctttcaacttaaaaatcgaagctatggggctttggggcagaagggacagatagcgcgagcaaaactgaaagtcggt

SEQ ID NO: 859074 - DNA, 120 bp, Artificial Sequence
  ENSG00000277837_23 (sequence is synthesized)
gaggggaaattttgtcttcgttctcagactaagttgcctatttaaaatgaaactttcttctagagcaaaatctccgttcccctaagagctgtgcttcccccaccccttccgcaaaaagaa

SEQ ID NO: 859075 - DNA, 120 bp, Artificial Sequence
  ENSG00000277837_24 (sequence is synthesized)
gcccttgggtatttgcaggttcgaatcctcaaccttccctcctttgaatttcattttcccaaaagagtagaattatttctcccaccagcttctgcagcgttagcatccgaaaaatcgggt

SEQ ID NO: 859076 - DNA, 120 bp, Artificial Sequence
  ENSG00000277837_25 (sequence is synthesized)
gggtggggcgttgcagaaagggtctgcagttggccccgaattcggaggaaggaaagtccctggaagggaccgcagtcccagcccccagtcctggggaccggtccggatcagaggcccggc

SEQ ID NO: 859077 - DNA, 120 bp, Artificial Sequence
  ENSG00000277837_26 (sequence is synthesized)
ggatcagaggcccggccacccacttccacccaaactcctcacgggagggggctgtggaaaccctgagagggcagggagctggagaagcaaagaaatgtacgtgtgtgtgtgtgtgtgtgt

SEQ ID NO: 859078 - DNA, 120 bp, Artificial Sequence
  ENSG00000277837_27 (sequence is synthesized)
taagcggttcccgaagacacaaaacttcaacagtcccctatctatatgggtagaggagggcgatcaaggtcggccgccctggtgttcttttaaactagacaggtggacgcgctagcagct

SEQ ID NO: 859079 - DNA, 120 bp, Artificial Sequence
  ENSG00000277837_28 (sequence is synthesized)
tagctaggcagagctgggattccggtttcccctgcagactgacactccctggagcaggtgccaaagccctttggggtggggtctcctcccctttcccctctctcaagcctgcccactctc

SEQ ID NO: 859080 - DNA, 120 bp, Artificial Sequence
  ENSG00000277837_29 (sequence is synthesized)
ggcgtctggacttcggaggaaactatagtttgcttcccgcagccctactcccccaccttctaatccaggtgctgggcttggggctcggagagaaccttcccccagcacgcagggctcctg

SEQ ID NO: 859081 - DNA, 120 bp, Artificial Sequence
  ENSG00000277837_30 (sequence is synthesized)
tcgcttctttttcctttccctaagaggccggacaagggtgagaacaagactaacaaccccatatctctccctgccctcacgcaaagtatcttttgtcaaccaaaaagttaagggcagtcc

SEQ ID NO: 859082 - DNA, 120 bp, Artificial Sequence
  ENSG00000277837_31 (sequence is synthesized)
cctgccagctctgctaacctggcgttttgaattttaacaagattaacgaagaagaaggagacaaaaaaggacgcgtttggcctcaccacccagaaaaacaaacaaacaaaaactttccaa

SEQ ID NO: 859083 - DNA, 120 bp, Artificial Sequence
  ENSG00000277837_32 (sequence is synthesized)
gatccaactggcaaatctgaaaagtgacggtgaattgtgacagtgaatttctgagctgagaggccaaagagaattagtggggcccggcttcggttttagttttattctccctgggctcag

SEQ ID NO: 859084 - DNA, 120 bp, Artificial Sequence
  ENSG00000277837_33 (sequence is synthesized)
ccagcccgagctttcaaacagaagaaacctgaagctaatgaagatctcaaacagagccacaattccgagggccccttttccgccacaagcacccactgtccatctgcacgtgtaatcaca

SEQ ID NO: 859085 - DNA, 120 bp, Artificial Sequence
  ENSG00000277837_34 (sequence is synthesized)
gagacttgccctgtcttcattaccaggggatccgaggaaaggggagaaaattctctgtcgtgaaaaggaaccttgtgttatcactactattatttgtgtatagcgacctaagagtttcct

SEQ ID NO: 859086 - DNA, 120 bp, Artificial Sequence
  ENSG00000277837_35 (sequence is synthesized)
tgtcctcttcaaattcccctacaatattgaaacagcatttgttgccccattcttacaaacgtttgaggcctttctggaaaaccattaccattcaaaggctagaaaattgctctccttcct

SEQ ID NO: 859087 - DNA, 120 bp, Artificial Sequence
  ENSG00000277837_36 (sequence is synthesized)
tttttttttttttttttttaaaaaaaaggcaggcgcagcagcagctataacagataacaaaaactttctaccgcataatcctcgccctcagaatgacaaagaaatgatattgacttaccc

SEQ ID NO: 859088 - DNA, 120 bp, Artificial Sequence
  ENSG00000277837_37 (sequence is synthesized)
ccgaacggatgatgtgtttgataagggagggaaatttttttttttttttgaagatttctgttgaggagctgcacagacagctgcaattcatgggcgacgctgattgccagaaacgctatg

SEQ ID NO: 859089 - DNA, 120 bp, Artificial Sequence
  ENSG00000277837_38 (sequence is synthesized)
gattggcatggggtctgcagctcacagatccctgatcaatacccctacactaacacgccagatggtttggggaaggacaaaaataaaatagtccaaatcaacccaccattatgttttttt

SEQ ID NO: 859090 - DNA, 120 bp, Artificial Sequence
  ENSG00000277837_39 (sequence is synthesized)
gtgtgtgtattgctctgataacctagttgtagcataaatgtgttctaccctgacacaaaacctgacaagatttcgagcattggggtagaaattagcagctctcctctaccctagatttgg

SEQ ID NO: 859091 - DNA, 120 bp, Artificial Sequence
  ENSG00000277837_40 (sequence is synthesized)
gtcgtggttactgttgtatagtaaaaacaaagatattgggccccttatgcagattgggtttacttgtggtctgtttatctttttccgtgaataatttataaagtatctcttttaattgaa

SEQ ID NO: 859092 - DNA, 120 bp, Artificial Sequence
  ENSG00000272807_0 (sequence is synthesized)
tttttttttggtcacaggtattactgtcttacagtgtgaataccccatgaaaacgtagaactctttgcaacttatgtcacacctgtatcttcaagggcaaggattatttgttgctatagt

SEQ ID NO: 859093 - DNA, 120 bp, Artificial Sequence
  ENSG00000272807_1 (sequence is synthesized)
ttttatgtcactaaagtaccttttagtgtcatatacatagtagataacactggataataataataaaaaagactaagaatgctaaagtagtctaggaattcctaaatcttaataaaaact

SEQ ID NO: 859094 - DNA, 120 bp, Artificial Sequence
  ENSG00000272807_2 (sequence is synthesized)
gagaaataaagttgtgatactatataacacttaaggcacgagtaatttttttttcaccgtttcccctccatggctatgaaggaactgggagaaggatgctcctttcattaattaaaattc

SEQ ID NO: 859095 - DNA, 120 bp, Artificial Sequence
  ENSG00000272807_3 (sequence is synthesized)
ttattagggaaggaaggaagaaaaatatgaagatgtaagtatacataccttggagtaagtatttccttatattggagtttctctaatttagctggggctactaatgacatgggaatcaca

SEQ ID NO: 859096 - DNA, 120 bp, Artificial Sequence
  ENSG00000272807_4 (sequence is synthesized)
atgttatctatgtcataagagctctcacttctcaatctccgtcgtgcagtattctgcaaaacaggattacagtagatttacagtactgtctagttacttgtaatgataccctcctttcat

SEQ ID NO: 859097 - DNA, 120 bp, Artificial Sequence
  ENSG00000272807_5 (sequence is synthesized)
cagttatgtaaatatggcagtacacgttacataatttttgtaaatacattgttataaagtctgactaaaaaatgttaagaaaaccaaaaaataaaacatttttctatcttttgtaaatca

SEQ ID NO: 859098 - DNA, 120 bp, Artificial Sequence
  ENSG00000288057_0 (sequence is synthesized)
agactgagatccaggcatcaggagagggtgttttattaaaagtgtggctggagcagcatgcaaggatgaaaaagattgagaaagaatggactcttcagtaaatgttgaggaagatatttt

SEQ ID NO: 859099 - DNA, 120 bp, Artificial Sequence
  ENSG00000288057_1 (sequence is synthesized)
ctgaagaggattagtagaagaggctatggaaagaagaataggagaggagaccagaggagaaaaaactgagcaagatgggaaaatgcagaatgaagggaatgtacaagaagaaaagactta

SEQ ID NO: 859100 - DNA, 120 bp, Artificial Sequence
  ENSG00000288057_2 (sequence is synthesized)
agaagaacacagtgtacatggagatggaaaagaacaagaaagaagaaagaaaaaggaggaagaaagagagacaagagagtttcagaatgggtccagtgtctgacagtattggtttcagca

SEQ ID NO: 859101 - DNA, 120 bp, Artificial Sequence
  ENSG00000288057_3 (sequence is synthesized)
tagatccaaggttggataacatcaccttcagactggggtccagggtctgactgcattcttttcagattggttccatgggtggattatggctgcatccaggtaaccgccagctggtgtggg

SEQ ID NO: 859102 - DNA, 120 bp, Artificial Sequence
  ENSG00000288057_4 (sequence is synthesized)
gctggtttccccaacatctggtggccaacgcggggctccccataatctctacaaataatccagtgaaggaacgccagagcgtgcaaagtggaggacgactgacaaaggacacctgaatat

SEQ ID NO: 859103 - DNA, 120 bp, Artificial Sequence
  ENSG00000288057_5 (sequence is synthesized)
gttttcacttcaagctctacagcaactgtatgtcagataacgatgcacattactgcagaaatcacatatacaggtccaaagggagacgaagaagaagaagaaagcaaggtttaaagtcta

SEQ ID NO: 859104 - DNA, 120 bp, Artificial Sequence
  ENSG00000288057_6 (sequence is synthesized)
tacattcctaacactgtatcagaaactcagtaatgacagtgaaatcaaagaatgatcacagtcaattccatgtcatacctagactgaaatatgaaacgtcaaaagaaaagaaagttaaga

SEQ ID NO: 859105 - DNA, 120 bp, Artificial Sequence
  ENSG00000288057_7 (sequence is synthesized)
actttgggcttgtaaaaattttcccatacagatgaaattattggtaactttgtctcactagaaaacataaacaaaaatccactttttgcatatgtgtaaacagaaatatttttatttcca

SEQ ID NO: 859106 - DNA, 120 bp, Artificial Sequence
  ENSG00000288057_8 (sequence is synthesized)
tgcaagcaagtaataaagtgaaagtacaatacaatgatatatgaaattttctcagtattaaaatattccattgagactatttattttatgaaaaccataaagagtcttcattaaactaca

SEQ ID NO: 859107 - DNA, 120 bp, Artificial Sequence
  ENSG00000288057_9 (sequence is synthesized)
tcttcattaaactacattacatagtactttttagtgttttacttatagtttaaataatcaacaaattaaagggaattcttcaacattatttattaccaatactgttattctacttgagta

SEQ ID NO: 859108 - DNA, 120 bp, Artificial Sequence
  ENSG00000288057_10 (sequence is synthesized)
caaattatattgactgatttcagcttttgatgaaagcatacttctgtatttgtagtaatgtgaagtataactttcttctcacaatgggtcttttataacacgagtgttattgttttgtct

SEQ ID NO: 859109 - DNA, 120 bp, Artificial Sequence
  ENSG00000288057_11 (sequence is synthesized)
cttcgaacagatggaaaaattatatttgtgacaaacttcaaggaaaggaaatggtaaaatgggagaataatttctaactttctaactgttggtcaatgcagttgtacatgtttagatgta

SEQ ID NO: 859110 - DNA, 120 bp, Artificial Sequence
  ENSG00000288057_12 (sequence is synthesized)
gacacatatttgcacactgcaagtttgcacatgtacatagaaatttatatgagatacccaaaatatatgggttgtgtaattttttaattaatccacaattttatatgcatgaaatttgat

SEQ ID NO: 859111 - DNA, 120 bp, Artificial Sequence
  ENSG00000288057_13 (sequence is synthesized)
aagcggttacattatccatattcaatttgttgtaaagccaacaaaatctctgtcagcattcatttcaattaatacaataatgttaactgctgatagcttcattttccttgttccatgctg

SEQ ID NO: 859112 - DNA, 120 bp, Artificial Sequence
  ENSG00000288057_14 (sequence is synthesized)
gcaacctgaaagtagattctcactctaattagcacttagggtgcgatccacaagacactgtcaccttgctgtggattgtgacctctgacgactactctttcttcctatagcattcctact

SEQ ID NO: 859113 - DNA, 120 bp, Artificial Sequence
  ENSG00000288057_15 (sequence is synthesized)
ttgcatatttaataaactttgtgcatggttaaaaggataaaagtgaagtgaaatgtaggccatgctgtgaaatgttccattgtttctatatctctgactgacttttcatgctatagagga

SEQ ID NO: 859114 - DNA, 120 bp, Artificial Sequence
  ENSG00000288057_16 (sequence is synthesized)
caagaaagacaattcaatatgtttcttattatccagtccaaagcactctttcttactaatatgccaaatccgttgcttcaaggcactgacatctaaacacggctacacatctcaaaatct

SEQ ID NO: 859115 - DNA, 120 bp, Artificial Sequence
  ENSG00000288057_17 (sequence is synthesized)
cttctcattaataaccgttacgttaatcactgttgtccagaactggaatctgactgtgaaatccccaggtggaaattgctataatggctcaaactatgggaatgactatttttcagcgta

SEQ ID NO: 859116 - DNA, 120 bp, Artificial Sequence
  ENSG00000288057_18 (sequence is synthesized)
attgctgctgtcatcttactgaaaaatatcatattagatggcagcttttagttacataaatcctgttattaatttttaatgtcccacatttttatgatattgcacaagtaaagatctttg

SEQ ID NO: 859117 - DNA, 120 bp, Artificial Sequence
  ENSG00000288057_19 (sequence is synthesized)
ataacttaaatggtaaactgagcaattgctaaaataactcacagcacttcaaacattcatttacttactaggagtgccacatatcatcgacccctgattaaaacaaagttggaaaattag

SEQ ID NO: 859118 - DNA, 120 bp, Artificial Sequence
  ENSG00000288057_20 (sequence is synthesized)
ttattaaagtatgcatttcaagatatttttaaaaactacccatgccatatatgatgccctatctgcaaggatgaagccttagcataaatgtttcaaagcagagaaatctaaacaatactg

SEQ ID NO: 859119 - DNA, 120 bp, Artificial Sequence
  ENSG00000288057_21 (sequence is synthesized)
gcaacatgacatcccaatcatgtgctcaagtgtatgtttgtgcctctagggaggcaacttaagtggtgtgtaatattaccattttcattctccccagtacctcttttatttaaaacaaac

SEQ ID NO: 859120 - DNA, 120 bp, Artificial Sequence
  ENSG00000288057_22 (sequence is synthesized)
aaatgtttcactatttgcaagaaaaaaatgagttcttactctattgtataactgatatttctatcagcttgttttaatcttcctatgaactgtgaatgcttagataactttcagtgtatc

SEQ ID NO: 859121 - DNA, 72 bp, Artificial Sequence
  ENSG00000288056_0 (sequence is synthesized)
ggattctgagtcagtgggctggggaaggaaaatctactcttaatctagtgggcacaatctaatcagctgcca

SEQ ID NO: 859122 - DNA, 83 bp, Artificial Sequence
  ENSG00000288056_1 (sequence is synthesized)
taacatgaaaagagtgagactggcctagcctcccagcctatatctttctcccatactggatgcttcctgccctcaaacatcgg

SEQ ID NO: 859123 - DNA, 90 bp, Artificial Sequence
  ENSG00000288056_2 (sequence is synthesized)
gactggctctccttgcttattgtgatcgtaaatggctgaggaaagagacttactggtatctacagactgggtcatcctatctacttgttt

SEQ ID NO: 859124 - DNA, 120 bp, Artificial Sequence
  ENSG00000288056_3 (sequence is synthesized)
tactggtatctacagactgggtcatcctatctacttgttttttacaattctcctctactgaggtcatcctttggtgagtattcacatggaacacaaatgtctttatgtcctttgcccatt

SEQ ID NO: 859125 - DNA, 120 bp, Artificial Sequence
  ENSG00000288056_4 (sequence is synthesized)
taaaaaggtgtatccacatacctcttcatcatatttcttttgtcaccggtttttcaccatgtttcttccaagcccttgaccatccagccaagctattgactacagcccatgaattggtat

SEQ ID NO: 859126 - DNA, 120 bp, Artificial Sequence
  ENSG00000288056_5 (sequence is synthesized)
ataatcacacatctggccctttctccttccacacaaagcacacgaccaggggcactgcccaaagtttaccccactaaaaagatattccttcacctttggactttcagagatgtcttagaa

SEQ ID NO: 859127 - DNA, 120 bp, Artificial Sequence
  ENSG00000288056_6 (sequence is synthesized)
gaactatctattaaccaggcctgagtcttctcttcccatcagctgatcatagcgaacttcccatgaggttacagctacaggctgagaagaggagccattgtagcaaagcagaaaccatgg

SEQ ID NO: 859128 - DNA, 120 bp, Artificial Sequence
  ENSG00000288056_7 (sequence is synthesized)
acatttgtgccacttcttcatggaccttacttgtgccttcaggacctgcctgggtttgatcatgtatataccacttacattgatgatgaagtgctgctgtgcatgcctaactttatggct

SEQ ID NO: 859129 - DNA, 120 bp, Artificial Sequence
  ENSG00000288056_8 (sequence is synthesized)
tggtggatcagagaacatccagttcataatagggatcttgggtcacatggtaacttggtggcctgtggtcaagctttcagtttctactaaggctcagtagcaggccaagagctgtctctc

SEQ ID NO: 859130 - DNA, 120 bp, Artificial Sequence
  ENSG00000288056_9 (sequence is synthesized)
aaaaagagagtagttatttgtggatgacagcagggcagtgctccaaaatcctaaaggcctttgttgcaattcacctatggaggcctgccaaaggctgcaaacattatccctatctgccac

SEQ ID NO: 859131 - DNA, 89 bp, Artificial Sequence
  ENSG00000288056_10 (sequence is synthesized)
agacctgttgtggagccttctcctgctttagaccctactcaaaactagcagctttttgagttttttggtaaatgagctagaatttacca

SEQ ID NO: 859132 - DNA, 120 bp, Artificial Sequence
  ENSG00000288056_11 (sequence is synthesized)
agctttttgagttttttggtaaatgagctagaatttaccaaatggaatttcacccctgtggtttgaatgtctcccctctaaaattcaggtcttgccaattagatagtattaacccttttc

SEQ ID NO: 859133 - DNA, 120 bp, Artificial Sequence
  ENSG00000288056_12 (sequence is synthesized)
ctgtttagaattttaaaaatgcagctcatggccagcactcatttaattttacttaaacatgctctttgaggctgcagcaaatctgacttgattttccaatgtgaaaataaaatataaaaa

SEQ ID NO: 859134 - DNA, 120 bp, Artificial Sequence
  ENSG00000288055_0 (sequence is synthesized)
agcgagccagcggccactgcaaaggggcgaagggcagtcccgcggtcagtaagggccactgaactttctgcccaccggtcatccggagctgaggactgggacatggtggggtgcgtcggc

SEQ ID NO: 859135 - DNA, 120 bp, Artificial Sequence
  ENSG00000288055_1 (sequence is synthesized)
gagggtcccctgaccctgcacaaacccaggggtgtggtgtggatgacccgggaagccgcacccagagctggcggccccctcctgtccttcctcatcctttcactgagcgggttcaggccc

SEQ ID NO: 859136 - DNA, 120 bp, Artificial Sequence
  ENSG00000288055_2 (sequence is synthesized)
tagttactaccgcaggcaccagccacacccggggagatgtgtgctgttttgtgcaagacgctgcggtcacccagtccggaattctgctggtctacaccgagtgccgcaacaccaccacca

SEQ ID NO: 859137 - DNA, 120 bp, Artificial Sequence
  ENSG00000288055_3 (sequence is synthesized)
cctccgcacacatacgccctccttgaacctcttccccatgaatgctttggcttttaaggaactttgtggcgtttctgctctttcggaggcagctgcccgaggcagcttcccaaggcagaa

SEQ ID NO: 859138 - DNA, 120 bp, Artificial Sequence
  ENSG00000288055_4 (sequence is synthesized)
cagggactgactgctgaggttccgcggggtcggggaggtggagaagccagttcccaagtggctcgtcgcgggtgttagagtccctcgttactaaggacgccgccgcccgcgcgccaggct

SEQ ID NO: 859139 - DNA, 120 bp, Artificial Sequence
  ENSG00000288055_5 (sequence is synthesized)
tggggaccagggtgactctgccctttctgggcggaatacgggtgaaggctgtctttggggatccacaggtgatctgtgccgttctcattgtattctcaactctcatcccttccaggttag

SEQ ID NO: 859140 - DNA, 120 bp, Artificial Sequence
  ENSG00000288055_6 (sequence is synthesized)
cccgatccctttaatgcaaggatcggtgccgggaggaaagagagcgtgggccactctggaacggaggctggtgttttgggggagcggggagagcctgtagcccacacatctccacggctc

SEQ ID NO: 859141 - DNA, 120 bp, Artificial Sequence
  ENSG00000288055_7 (sequence is synthesized)
tggcccaatttctccactttttcacttcgatctaattggtcttcaaggttcccgaggctgcgcaccagtttttgatgtcgattgaacagggctccagattaatcacttgtcctcacagcc

SEQ ID NO: 859142 - DNA, 120 bp, Artificial Sequence
  ENSG00000288055_8 (sequence is synthesized)
ctttggaataagattcactctctagctgtttaaagcttttctttcggttctaggaaacagcttatttttccgcttttcctatcagactttgacactggactgtaaagttttcccatgggt

SEQ ID NO: 859143 - DNA, 120 bp, Artificial Sequence
  ENSG00000288055_9 (sequence is synthesized)
tttacagaattgggtaggggaaggctactctgtcagctgtggttggttgccttatctttgttcttgagagaatagcttggacttttccaccacacatgaagattttatttgaaagcagag

SEQ ID NO: 859144 - DNA, 120 bp, Artificial Sequence
  ENSG00000288055_10 (sequence is synthesized)
atacttgcccctgccagctaccatcagataaaattaaatagaaggccatacttgtatctctggggtgcatgcttagtactgcaatcatgtaagtaatggacatttgaccatctttccctt

SEQ ID NO: 859145 - DNA, 120 bp, Artificial Sequence
  ENSG00000288055_11 (sequence is synthesized)
ttaactctcacaactctggcaaaacaagaataattttcttcatttttacagtgttaagatctggatttgaacccaatcctattttcaaggctcttctactatctcataaaagagtatggg

SEQ ID NO: 859146 - DNA, 120 bp, Artificial Sequence
  ENSG00000288055_12 (sequence is synthesized)
catggaggctgaagaagccaagattgtttggattattttgaattccaaggttaggaaatcaaaattttttagggtagatgcagttgcagttagaaaggagaatagcacagaatttgaaag

SEQ ID NO: 859147 - DNA, 120 bp, Artificial Sequence
  ENSG00000288055_13 (sequence is synthesized)
cacagacagaaatcttacagtctgggtcagaccctgactctgcagcttaccatctactagaaattacttaaccttccaaactttattgttttattctaaaaatggggcatagcaataaca

SEQ ID NO: 859148 - DNA, 120 bp, Artificial Sequence
  ENSG00000288055_14 (sequence is synthesized)
cccacctcacagtttcactgaggggcttaaattagatgcatctgcaatgcttagcacaggggtggacagaggtgcttaatcaatgatagatgatgttcttataaatactaagatcaaaga

SEQ ID NO: 859149 - DNA, 120 bp, Artificial Sequence
  ENSG00000288055_15 (sequence is synthesized)
agaggaaaatttggcttcttaaaccaacaacacttctatttccattcttggcttcttctcctgtatccagacaggctgatttcagtttaggaaaaagcataccatgtactatttcccatc

SEQ ID NO: 859150 - DNA, 120 bp, Artificial Sequence
  ENSG00000288055_16 (sequence is synthesized)
ctaacatttttatgcaagtaaaatcagtttaaacaaagaacagacttaaaagagtaagtcacaaaacttgtagccttataaactgtgcatgtcggggcttatcctttttggtgaggtcat

SEQ ID NO: 859151 - DNA, 120 bp, Artificial Sequence
  ENSG00000288055_17 (sequence is synthesized)
ttgatgtttgggaaagagttctgaagtcacacagacctacccagctttaggacttcaccatggactgctgcgagctagtataaattatttaatctctcaaagcctcggggtttttattta

SEQ ID NO: 859152 - DNA, 120 bp, Artificial Sequence
  ENSG00000288055_18 (sequence is synthesized)
ttcaagacaaagattaataatatcatctttccaaagtcacagtaagaattaagccatattatgtatgtaaaagtgcttagcagaattcttggcacatcactgttcctgaataaatgaaac

SEQ ID NO: 859153 - DNA, 120 bp, Artificial Sequence
  ENSG00000288054_0 (sequence is synthesized)
tacgtgggataatataggcaaaagcactcaatgcagtagttcacaggtagtaagaatttgttaaatgccaatagtactatagttggagagaattaagagatgacatagcaagatgaaaga

SEQ ID NO: 859154 - DNA, 120 bp, Artificial Sequence
  ENSG00000288054_1 (sequence is synthesized)
tgatgtaaataatcacaaatatatgtccagggaaatagtaagcgcagtagaacaaagaattggggagtagtagggagtaaactgtcaaaaggtaaatcatgattggattacaggggaatc

SEQ ID NO: 859155 - DNA, 120 bp, Artificial Sequence
  ENSG00000288054_2 (sequence is synthesized)
taaacattgggctgaaagattgaggtggctgctagaaacaatgagaattcattcagaaaaggtcacatgagatttattttttgtttaaaggtttagatttgacaacaccaaggtaactgc

SEQ ID NO: 859156 - DNA, 120 bp, Artificial Sequence
  ENSG00000288054_3 (sequence is synthesized)
cacaaattatgcttatttagaccaactaagtaaacttgctccaaatgtagataattgagagggtgtagatttgcatagccaattaagccttttcaataaaataaagcccctaattaatat

SEQ ID NO: 859157 - DNA, 120 bp, Artificial Sequence
  ENSG00000288054_4 (sequence is synthesized)
attctctgtaaatactgggtaactactaaggacaaatctttgcttaataattttgaaagcagaatacagtacacaacatttaaataaatatcaaacttaagtgtatatttagtatctttg

SEQ ID NO: 859158 - DNA, 120 bp, Artificial Sequence
  ENSG00000288054_5 (sequence is synthesized)
tcaatattgggttcaccatcattacttagtctaactgatacgttcacttttctgatttaagcagatcctttcatattctcttaattatttttctggtagggttacaggttagggaaaatt

SEQ ID NO: 859159 - DNA, 120 bp, Artificial Sequence
  ENSG00000288054_6 (sequence is synthesized)
attttaagtctgtacagttaatctgcagagcaattataaagtactgaaagcaagactcattgttatatctccagcctctaacaaaaggtcttgcacagtataaatgctcagcaaatcttt

SEQ ID NO: 859160 - DNA, 120 bp, Artificial Sequence
  ENSG00000288054_7 (sequence is synthesized)
taaatgctcagcaaatctttgcaaatattaactatggattcaacaaaggactagtatccagaagccacaggaactcaaacaaatcagcaagaagaaaaacaaataatcccatcaaaaagt

SEQ ID NO: 859161 - DNA, 82 bp, Artificial Sequence
  ENSG00000288054_8 (sequence is synthesized)
caaaaagtgggcaaaggacatgaataggcatttctcaacagatttacgaaatcatcagggaaatgcaaatgaaaaccacaat

SEQ ID NO: 859162 - DNA, 120 bp, Artificial Sequence
  ENSG00000288054_9 (sequence is synthesized)
gagataccaccttactcctgcaagaagactattattaaaaagacaaaaaacaacagatgttggtgtgatgtggtgaaaagggaacacttttatactgctggtgggaatgtaaattagtac

SEQ ID NO: 859163 - DNA, 79 bp, Artificial Sequence
  ENSG00000288054_10 (sequence is synthesized)
gtaaattagtacaaccactatggaaaacaatagggaggatccttaaagaactcaaagtagaactaccattcaatccaac

SEQ ID NO: 859164 - DNA, 89 bp, Artificial Sequence
  ENSG00000288054_11 (sequence is synthesized)
agtatatatacactatggaatactactaggccataaaggatgaaataatgtcttctgcagcaacttggatggaactggaggccactatt

SEQ ID NO: 859165 - DNA, 120 bp, Artificial Sequence
  ENSG00000288054_12 (sequence is synthesized)
ctaagtgaagtagctcaggaatggaaaagcaaatatcatataatctcacttataagtgcgagctaagctatgaggacacaaagacataagtgtgatgtttgaactttggggactcagggt

SEQ ID NO: 859166 - DNA, 120 bp, Artificial Sequence
  ENSG00000288054_13 (sequence is synthesized)
aagacataagtgtgatgtttgaactttggggactcagggtaggttgagaggggagtgagggataaaagactatatattgagtacagtgtatgctgctcaggtgacaggtgcactaaaatc

SEQ ID NO: 859167 - DNA, 120 bp, Artificial Sequence
  ENSG00000288054_14 (sequence is synthesized)
aagaacttatccatgtaaccaaaaaccacttatacccaaaaaactactgaaataaaaaaatttgcaaatattccttaagggaaaaaaggtaggaaaaagatgataaagggaaggaaatat

SEQ ID NO: 859168 - DNA, 120 bp, Artificial Sequence
  ENSG00000288054_15 (sequence is synthesized)
aaagggaaggaaatattgctgtaacatgttgttatcatcctgcagaggtccttggcttcttgcacacctgcatgataaaggtgctattgattcacaaccctacactcaggaaaagtttca

SEQ ID NO: 859169 - DNA, 120 bp, Artificial Sequence
  ENSG00000288054_16 (sequence is synthesized)
tcagctgccatttgactactgctgtttactgtcctgattgaagcaaggccattgtatgtttcagaaaatgtgacgggggttgatattaggttaggcaagaaactagcagcaaactaaatt

SEQ ID NO: 859170 - DNA, 120 bp, Artificial Sequence
  ENSG00000288054_17 (sequence is synthesized)
gagtcaagttgtacgttttgctcaaagctgacagaaatctccacagcagtaaggatcctctattatagactaagtttttacacatgatcaaaatgtgcctgcatgcctgtgaattaacag

SEQ ID NO: 859171 - DNA, 120 bp, Artificial Sequence
  ENSG00000288054_18 (sequence is synthesized)
gagtccgccagagcatcttgtcttaacagttatgagaaacaactgattggactcagctttgcttttccatctcacatgttttctcagcattgcttgctatcacaatgtgcaagtactgca

SEQ ID NO: 859172 - DNA, 120 bp, Artificial Sequence
  ENSG00000288054_19 (sequence is synthesized)
cactagctgattgcgccactggagcatgctttaaattctgaaaattctgacaagtcaatacacactaagtggttactagtagaatctacttttaaaaaaatgaatttggaatatttaatt

SEQ ID NO: 859173 - DNA, 120 bp, Artificial Sequence
  ENSG00000288054_20 (sequence is synthesized)
tcacccattatttaagcaaaatatgaagctaacatagacccattaaatatatagcgatatttatttatcccacatggacagtactggcaagcaaactctgcagatgtgtgggatatgagc

SEQ ID NO: 859174 - DNA, 120 bp, Artificial Sequence
  ENSG00000288054_21 (sequence is synthesized)
tgctataattcaaatggcaggaatttatttatacatactaagcttcagagattattttacatgaaacatttataaaatatagtcatattcagtgtattaaatgagtccttcctaccaaac

SEQ ID NO: 859175 - DNA, 120 bp, Artificial Sequence
  ENSG00000288054_22 (sequence is synthesized)
gcaaaacaaagctgaaacccagatgactttgccgatggggaaatcaaccatgcaaatttagtcatgtccatttaacccagcaaggctgggcagaacctgataattaatagaagccagctc

SEQ ID NO: 859176 - DNA, 120 bp, Artificial Sequence
  ENSG00000288054_23 (sequence is synthesized)
ctttcactggtgatctgagtacatcagagtgaggcaccccagcaggaaagagcttcggcatggtaagggaggccctgaaacaaatgctttagatgtcagtgcaggacattcagtgacctg

SEQ ID NO: 859177 - DNA, 120 bp, Artificial Sequence
  ENSG00000288054_24 (sequence is synthesized)
gaaatatgaggtctctctttattttgacccaaattgaaagcccaaagagtgtagaccaaagacagaggacacagcctagttcagtgccagccacatgtgagcacttgatgaaagttcttt

SEQ ID NO: 859178 - DNA, 120 bp, Artificial Sequence
  ENSG00000288054_25 (sequence is synthesized)
gaataaagcaggtttcttgttgatctcattgacaacatttatttactgtaattgtcttgttgactaaagcaccgtctattgcagactcatattttaagcaataaacatcatcggattttg

SEQ ID NO: 859179 - DNA, 120 bp, Artificial Sequence
  ENSG00000288054_26 (sequence is synthesized)
cagacacacttagaaattacttttcatagaaatttactttcttttcctaggacttgatggcctaggagaattaacatagctcgttaataaatattagacattgagagacagtcctcactt

SEQ ID NO: 859180 - DNA, 120 bp, Artificial Sequence
  ENSG00000288054_27 (sequence is synthesized)
aactttgctgaattgttattatttaagcagcagaaaacataagcaaatgtgagctgggcaggcttgaaggccttctcatgagggctcagtgtcaccttgttaaacagagctgttaggaca

SEQ ID NO: 859181 - DNA, 120 bp, Artificial Sequence
  ENSG00000288054_28 (sequence is synthesized)
cctagtgtatgtccaattgagccgcatgtttaacaggctttagggggattttccatatatagaatacacattagtactttagtggtggacataaattgtgtatgactaagccattcctca

SEQ ID NO: 859182 - DNA, 120 bp, Artificial Sequence
  ENSG00000288054_29 (sequence is synthesized)
agatcagtgacaagatttaaagagaaaacttgaccaaatggagtgtattagtaaaaagaaaccatgaactcaaggcacctggacaccctgatacctgaagaatgcctggagtaattgagg

SEQ ID NO: 859183 - DNA, 120 bp, Artificial Sequence
  ENSG00000288054_30 (sequence is synthesized)
atatgtagtctgaaaaagaggagatttgtgttttgatgtttcaatgtctaccttatgaaaaaagagattatatttgttctcttttgtaccaatggtgaaaaacagaaatggatttcagct

SEQ ID NO: 859184 - DNA, 120 bp, Artificial Sequence
  ENSG00000288054_31 (sequence is synthesized)
ctttgtaatagaaaactttataataatgggaaccataaaactaccggccatctagtgaaatattcaggtctccactggtcattgaaagtgttcaaataggggaagacaatctgttattct

SEQ ID NO: 859185 - DNA, 120 bp, Artificial Sequence
  ENSG00000288052_0 (sequence is synthesized)
ggcgtgagccaccgcgcccggcccacaggctgcattttaataacactctctggtgatttgtacgcttgtgtgttggagacctattatatttgcctaactgtcgttctctgcttcaggaaa

SEQ ID NO: 859186 - DNA, 120 bp, Artificial Sequence
  ENSG00000288052_1 (sequence is synthesized)
tcaggaaatctgtcatttatctgtttcaggaaatgctctgactccaacacataaggttggttgcattttccctgatacagaagtgggtgtataactaagttaagctatttagagtatgct

SEQ ID NO: 859187 - DNA, 120 bp, Artificial Sequence
  ENSG00000288052_2 (sequence is synthesized)
atccctgtaaacagagtaatttgtccattgctgggcatgtgtaagcaagaccaatcagagtccattttttcagaaaaatatgggtggtgggagaaaggaaatgctcctctctctgggatt

SEQ ID NO: 859188 - DNA, 120 bp, Artificial Sequence
  ENSG00000288052_3 (sequence is synthesized)
attagctgtatggataatgcaaatccaaaaattgctgtggccatctttgctgcaacataaaggaaagttctctgaagtgattccagaaaagaggaggacagaagtcagagatggagagag

SEQ ID NO: 859189 - DNA, 120 bp, Artificial Sequence
  ENSG00000288052_4 (sequence is synthesized)
tgagcctctggatccagctctgcctgaagtcatctgccccatgattttcagtaatgtgaatcaacaacatattctgcttttctagctaatgcagagaacagaggagagatgaggcaaaag

SEQ ID NO: 859190 - DNA, 120 bp, Artificial Sequence
  ENSG00000288052_5 (sequence is synthesized)
ggaatattagacagattcaaagcttgaaaaggacttgatccactatgaggccattaatgaaggaatgcaggctgcctgtaacagttgaaaatcaccccagccaacacccagcaaggaaat

SEQ ID NO: 859191 - DNA, 120 bp, Artificial Sequence
  ENSG00000288052_6 (sequence is synthesized)
ggagaccatagtcctctaactgtatggaactgaattctgccaacaaagtgaataagatgggaagtgaagaccctcccagagcctccagaaaggaagagagccattcagacaccttgattt

SEQ ID NO: 859192 - DNA, 120 bp, Artificial Sequence
  ENSG00000288052_7 (sequence is synthesized)
cagccttctgaaacttggagcagagagccggctgtgtcaacctgaacctgggtttttaacctacaaaactgagaaataatgaatagtgatttttttttttaaagatggagtctagctccg

SEQ ID NO: 859193 - DNA, 120 bp, Artificial Sequence
  ENSG00000288052_8 (sequence is synthesized)
tcacccaggctggagtgcagtggcacgaatagtgattgttttaagccactaaatttatggtagttttgttagggcagcaatagaaaactaatacatatgtaatatagcattttataaact

SEQ ID NO: 859194 - DNA, 120 bp, Artificial Sequence
  ENSG00000288052_9 (sequence is synthesized)
aaaatgtcaggcaaatatgtgctcttataatttgatattgctatctattagagacattgggttaaagaatatactgaaccaatgttgtatttattataagaaagataagggtgggagatg

SEQ ID NO: 859195 - DNA, 120 bp, Artificial Sequence
  ENSG00000288052_10 (sequence is synthesized)
gaaaaaatgatgttaaactcatgaatttagtttgctttgcaaatgtttaactttgaggttgcttttttccagatccctggagatttggcctttcggcatacagagaggttttattaaagc

SEQ ID NO: 859196 - DNA, 120 bp, Artificial Sequence
  ENSG00000288051_0 (sequence is synthesized)
agacagggacagcgtgtagagcgtggctccatcccatgcaggaggtgcctggagggcttgggacctggaatcacccaggccctgccccggccctggagaacctcagcatcacgcggcaga

SEQ ID NO: 859197 - DNA, 120 bp, Artificial Sequence
  ENSG00000288051_1 (sequence is synthesized)
cctggatgtggacccgaatgattccaatatcctgacatggaaggtggcatcgggtgtgcacaccctgccagggaggacgtgggagcgctgctgtgccttgtgtctgcaggcacaggaaag

SEQ ID NO: 859198 - DNA, 120 bp, Artificial Sequence
  ENSG00000288051_2 (sequence is synthesized)
ccccctagagggcgcttgatcaagtccggagactcgcatctgcctggcagagaagatactgggtgagtgcctgctgtgagccgagtgctgtgctaggagctggcggtcagggaggagcag

SEQ ID NO: 859199 - DNA, 120 bp, Artificial Sequence
  ENSG00000288051_3 (sequence is synthesized)
gaacgatggatagaatgaatgagcgcgtggaggactcggccttgtccagttcaggaagaacgcaatcttgtcaagtgtttgtcatccatgtgttcatgcactcattagacagacatttac

SEQ ID NO: 859200 - DNA, 120 bp, Artificial Sequence
  ENSG00000288051_4 (sequence is synthesized)
tgaggcctcctctatttggggcactgcagtgaacaaaacagacaaaagtctctgcccttggagcttcaattccagggattaaaatgagtaacgataaccattgttcttctgacgcttttt

SEQ ID NO: 859201 - DNA, 120 bp, Artificial Sequence
  ENSG00000288051_5 (sequence is synthesized)
tcagagcaaccacaaggtcttcatctatgtctgactcatcaacgaagcaaccaagaccccatgagccacttcatgagctccagggaataaccagcactcatgggcggagtctaaaactaa

SEQ ID NO: 859202 - DNA, 120 bp, Artificial Sequence
  ENSG00000288051_6 (sequence is synthesized)
tataaatgcttagaaataaaaatacatgattttatctctcctttttcccctaaaatgttggtttctaaggaaacggaaacatgtttgactctaaaacttcgattttagtgtttagcattg

SEQ ID NO: 859203 - DNA, 120 bp, Artificial Sequence
  ENSG00000288051_7 (sequence is synthesized)
tgaaccccaaaatctgagacaggtctcagtcaatttacgaagtttattttgcccaagttaaggatgtgtgtctgtgacacagcctcagaagttttgaccacacgtgccaaaggtggtcag

SEQ ID NO: 859204 - DNA, 120 bp, Artificial Sequence
  ENSG00000288051_8 (sequence is synthesized)
tagggagacatgagacatcaatcaacatacgtaagatgaacattggcttggtccggaaaggcggggcctcggtgacatcaatcaacatatgcaagatgaacattggcttggtccggaaag

SEQ ID NO: 859205 - DNA, 120 bp, Artificial Sequence
  ENSG00000288051_9 (sequence is synthesized)
gcctcagtgacatcaatcaacatatgcaagatgaacattggcttggtccggaaaggcagggcctcagtgacatcaatcaacctatgtaagatgaacattggcttggtccagaaaggcagg

SEQ ID NO: 859206 - DNA, 120 bp, Artificial Sequence
  ENSG00000288051_10 (sequence is synthesized)
gcctcagtgacatcaatcaacgtatgtaagatgaacactggcttggtctggaaaggcggggcctcagtgacatcaatcatcatatgcaagatgaacattggcttggtccagaaaggcggg

SEQ ID NO: 859207 - DNA, 120 bp, Artificial Sequence
  ENSG00000288051_11 (sequence is synthesized)
acctcggtccagaaaggcgggacaacttgaagccaagacaggaagcaggaaaggggcttccaggtcacaggtagaaacaaatggttgcatccttttgagtttctgattagcctctccaaa

SEQ ID NO: 859208 - DNA, 120 bp, Artificial Sequence
  ENSG00000288051_12 (sequence is synthesized)
agcctctccaaaggaggcaacaagagatgcgtttatctcagtgagcagaagggtgactttgaatagagtgggaggcaggttggccctgagcaattcccagcttgacttttccctttagct

SEQ ID NO: 859209 - DNA, 120 bp, Artificial Sequence
  ENSG00000288051_13 (sequence is synthesized)
agccccaagatttattttcctttcacagcatgtggcggttctttattctcataaatgatttcaaaacattatgcacttgggggattttataatgaaaaatcgcggtgtcctattaaagca

SEQ ID NO: 859210 - DNA, 120 bp, Artificial Sequence
  ENSG00000288051_14 (sequence is synthesized)
caaagaggcaaagcagaagcagcagacaggacgtcaaagaaccagtgcatggctgcgccgggccccggggcttcccacacgggttactgtcatccttccgaatcactggacttgaagccc

SEQ ID NO: 859211 - DNA, 120 bp, Artificial Sequence
  ENSG00000288051_15 (sequence is synthesized)
agcatgttgctgagttttgctccagagacaattgccatttgttatttaagtgacaaaggtaacgcatgccggcgggaagcaatgcacaaaatgtgaagggaagttagttttggctgccag

SEQ ID NO: 859212 - DNA, 120 bp, Artificial Sequence
  ENSG00000288051_16 (sequence is synthesized)
cagctttgtgggacacaaccacaagaatggaagatacatggccattaggattctcacctccgggaccagaaggatctagactcactagctgtataaatgtagtcaagtaatttaaactct

SEQ ID NO: 859213 - DNA, 120 bp, Artificial Sequence
  ENSG00000288051_17 (sequence is synthesized)
taaaactacacatgtccttgtctataaattgagaataatagtatagttgtgaagcttacatattttaggtagaatgtgattgttgttcggcacacaggaaatgctcaatgcatgtcaact

SEQ ID NO: 859214 - DNA, 120 bp, Artificial Sequence
  ENSG00000288050_0 (sequence is synthesized)
atcctgtctagggctggcgcctgccttgcatcctgagctgctgggacagactccggccaccccagacactgaactggaataagcgagttggaaaatgaatgaaggaatgaatacaaataa

SEQ ID NO: 859215 - DNA, 120 bp, Artificial Sequence
  ENSG00000288050_1 (sequence is synthesized)
ttgtaaaataaaaatgtgtaccacaatgtaccacaataaacaatgtgggatgaaagcacttggcgagcccaccaaatttgttattggttttgaacttcgtggtgggagtaagtgctcctt

SEQ ID NO: 859216 - DNA, 120 bp, Artificial Sequence
  ENSG00000288050_2 (sequence is synthesized)
acgagtttcactttgcaaacatttattccttgatttaacccaccaccactacaaccaccatcactcgctgttttaccaaaaactgggtaccgttagggaaattcacattgtcgtgcaacc

SEQ ID NO: 859217 - DNA, 120 bp, Artificial Sequence
  ENSG00000288050_3 (sequence is synthesized)
atcaccaccatctatctccaggaaatcttcatcggcctcatctctcggtccacgtccaacaagcagaagggacacctcactttcaggtcaccaactatccttctctgtctctgctagtgt

SEQ ID NO: 859218 - DNA, 120 bp, Artificial Sequence
  ENSG00000288050_4 (sequence is synthesized)
gagcaggagttacaaaagcaacaggaagaaaaaagctgctgagttgggataattcaaaaacatgccactgggaaaatcaaaggttgatatgacaacaaaagcaaaggaagaatgtaaaaa

SEQ ID NO: 859219 - DNA, 120 bp, Artificial Sequence
  ENSG00000288050_5 (sequence is synthesized)
tttcactttgtaaagatggccaaataataataggacaaagaccatggttgtatacaagacagtgactggaaatctcaactccaaacagcagaaaatggaaaacaagagatttcccaaaaa

SEQ ID NO: 859220 - DNA, 120 bp, Artificial Sequence
  ENSG00000288050_6 (sequence is synthesized)
gtgcggtacccgagggtatgagcacacttgagtttggcatctacacaggaaacgaggtcatttctttttctcctgagttattatcatcaaggtctcgactctgtaacaaaatttcacact

SEQ ID NO: 859221 - DNA, 120 bp, Artificial Sequence
  ENSG00000288050_7 (sequence is synthesized)
cataaagaccacgtgtaagactagtttcaagaggcttatgacagaataaattccacactctgggggcttggcacaacttctatccacaaaagaagaccactcatttgttcaaaggcacca

SEQ ID NO: 859222 - DNA, 120 bp, Artificial Sequence
  ENSG00000288050_8 (sequence is synthesized)
ccccaagacacaccagcaaattcctatcagtggattctccttttcctcactgtagtgtagacacaccatatattcagcagtgcagccacaaaaccattcactaagtctacataaagttct

SEQ ID NO: 859223 - DNA, 120 bp, Artificial Sequence
  ENSG00000288050_9 (sequence is synthesized)
atgcattgtaaatgcattttaacaaataatattcctctgtcttatgacatcacaaaagattcaacaaaactcagtcaaatgagaacaggaccagacagctcttgttctctaaaacaggct

SEQ ID NO: 859224 - DNA, 120 bp, Artificial Sequence
  ENSG00000288050_10 (sequence is synthesized)
tccacagctgcattttcagctttgcatgaaggattaccgccttcttgcataaactcccaaattggtgcatggaaatagaaaatcatacacacgagttgagcagctccggctccattaacc

SEQ ID NO: 859225 - DNA, 120 bp, Artificial Sequence
  ENSG00000288050_11 (sequence is synthesized)
aatttgcatgcaaaatcgacatcagcactctctggtctattttttgcctatgtaagagatggcatttaggatgccttgggattctgcttttcagaggcattttggttcccactaaagaaa

SEQ ID NO: 859226 - DNA, 120 bp, Artificial Sequence
  ENSG00000288050_12 (sequence is synthesized)
acggggtccctaatggtgtttgggggcacatgcacatgtccctcccagctgccttctcaggcattccagtgaaaaagagaaaagtttgagaatgagatcaagtaaacaattaggtgagag

SEQ ID NO: 859227 - DNA, 120 bp, Artificial Sequence
  ENSG00000288050_13 (sequence is synthesized)
ccaatggtcagggggatgttcttcagactaatacaacgaagcaatcaggtgaaaatcatttctaattacacccagaagaaaaatacgatctatccaccgttggcacaagaagggaaagat

SEQ ID NO: 859228 - DNA, 120 bp, Artificial Sequence
  ENSG00000288050_14 (sequence is synthesized)
ggatttttaatcaggcaaaggaatgtactttctggacttgccagtgatcacttactgagatgggccatggagaagtctggcctttgaggttacgcatgaggatctgataggcatttgtgt

SEQ ID NO: 859229 - DNA, 120 bp, Artificial Sequence
  ENSG00000234104_0 (sequence is synthesized)
aatgaaaacattagacaccctctcgttctctttctgctcctctcacaatgcaggcccattcagaacacaattgtgatactcctggacaggacgtgaaaaaggcaccggagccgctacgtg

SEQ ID NO: 859230 - DNA, 120 bp, Artificial Sequence
  ENSG00000234104_1 (sequence is synthesized)
cacagtaatgacatctcaaaggccaacagcactggctggagaataaaggcgttttaaaggtctaagaacactggattgaagagccaaggagaacccttgatggatgaggaggaaggcaga

SEQ ID NO: 859231 - DNA, 120 bp, Artificial Sequence
  ENSG00000234104_2 (sequence is synthesized)
tttccaatgccggagtgaggtagaacaaaagtactgaagagacaggagcttccgttcctgccccggtgccagcttgtctttcccgtttcccaggaagctcagctgactacaagcctacgg

SEQ ID NO: 859232 - DNA, 120 bp, Artificial Sequence
  ENSG00000234104_3 (sequence is synthesized)
gggtacggccctcctcttatttctgttgcctcttgttagttgagaaatgttagtgtctcaaattgttttagtccctcaaattgcctttaaggataatggtaataaaatgatttaagctac

SEQ ID NO: 859233 - DNA, 120 bp, Artificial Sequence
  ENSG00000234105_0 (sequence is synthesized)
ttctgtctctcgctagttgtgacctgagatgacaaaccctaatcactgctctctgttatctcaacagtcaactgagtttggatacataaactaatatgaaatactttaggacatgcagaa

SEQ ID NO: 859234 - DNA, 120 bp, Artificial Sequence
  ENSG00000234105_1 (sequence is synthesized)
ttgaaaacagagaaagagaagcaacccaaggaaaaccaaacaagaaagcaaaataaaaaactgtcttgtgaaaaggccaaggccattattaagaagcacatgccagccgtcacccaggcc

SEQ ID NO: 859235 - DNA, 120 bp, Artificial Sequence
  ENSG00000234105_2 (sequence is synthesized)
tccttgcaagtttactgccttttattctacataaaatatgtaatggtttataactatttatggaaataatgcatgctaattttaacttatccatacaataaagtttgaaaacaaacaaaa

SEQ ID NO: 859236 - DNA, 120 bp, Artificial Sequence
  ENSG00000274560_0 (sequence is synthesized)
ggactatgtcctactaggccctttaaggaaaaaactggcaaccactgccttagagcaatgagggtctctacagaccaagcgtatatgtcttaggaatatggatctcctcatctttagtgt

SEQ ID NO: 859237 - DNA, 120 bp, Artificial Sequence
  ENSG00000274560_1 (sequence is synthesized)
gtaactactttttaatttaccgatgccatgaacagtccaaggaaaaaatccttttctagattagccgatttcactgtattaaagataatttttaatgtacatcaaaagacgtcatcaaga

SEQ ID NO: 859238 - DNA, 120 bp, Artificial Sequence
  ENSG00000274560_2 (sequence is synthesized)
gaatgaaaagacaagccataaactgggaaaaggtatttccctcaaaacccacaatgagtagaacccagattatgtaaagaactcctaaaaatcaatcagaataaaaaataatcaactggg

SEQ ID NO: 859239 - DNA, 120 bp, Artificial Sequence
  ENSG00000274561_0 (sequence is synthesized)
agagatctggaagatcaccttaaacaagtgatcaaacttagcattatgagccacctgcaatcacgaggcaggaaggatatatcacctatgcagtatttttcccaaaaatgcttaccttga

SEQ ID NO: 859240 - DNA, 120 bp, Artificial Sequence
  ENSG00000274561_1 (sequence is synthesized)
gaaagatcaaaaaaagtagaggaatgttttagattaaaggaaatgaagacatgacatgcagtgcctaatctttgattggattctgtgctattctttcatctttctggtatgtttgaattt

SEQ ID NO: 859241 - DNA, 120 bp, Artificial Sequence
  ENSG00000274561_2 (sequence is synthesized)
tttttgaaatataaacttgggcaaaagagataaccaagataattgattaatttattgttatggctcattgggggcagtttcagagaaataaaaacaatctttgtaactggagtaaattct

SEQ ID NO: 859242 - DNA, 120 bp, Artificial Sequence
  ENSG00000274565_0 (sequence is synthesized)
ttcgaggggtagaggggaagggaagtgggcagcgtgggaggggaaggggaggaggcgcgggtctggggctagagcgtcgggagggagagaaaggggtggcggagaggaggacacgccggg

SEQ ID NO: 859243 - DNA, 120 bp, Artificial Sequence
  ENSG00000274565_1 (sequence is synthesized)
tccaggaggaccccagcgtgcgccctttctcttgctgctctgtttcccagtctctccccgcctcgccttccctctcttctgtcccggccaggatccccagacgctgcgtcacaactcccc

SEQ ID NO: 859244 - DNA, 120 bp, Artificial Sequence
  ENSG00000274565_2 (sequence is synthesized)
cgctggcgcgggcggggaagcaactgcaaaactttccgcaaacttcacggcgtggtgggacctgggctacgaggtccggccagcccggggcgggggcgtgcagctgacccaggtggccag

SEQ ID NO: 859245 - DNA, 120 bp, Artificial Sequence
  ENSG00000274565_3 (sequence is synthesized)
acccgggccgccagcatccgccccgccatcccgcctctttctgcgggcgtctccagcagcctagcatcccctacctccatgccgaggaggacccctcccccggtctggtggggaaggggc

SEQ ID NO: 859246 - DNA, 120 bp, Artificial Sequence
  ENSG00000274565_4 (sequence is synthesized)
caacaattcttgcacgtcttgttttagcattttcgtgacccctgtgtcagtgttcccggtgcaggagtgtagcacttttgcttgttggggctgcatccagaaacctggggaaaatctgtc

SEQ ID NO: 859247 - DNA, 120 bp, Artificial Sequence
  ENSG00000274565_5 (sequence is synthesized)
cactggacgtctcagaagaccggcatcatcactcccaccaactggactgctggccggtagcaaaagaccagctggaaatttcataaaaggttagacaatccacagttactcagtgttacg

SEQ ID NO: 859248 - DNA, 120 bp, Artificial Sequence
  ENSG00000274565_6 (sequence is synthesized)
caacaggtctctgcagcacagagcacgaactggggagtcaggatgctggagtccagccctgcctctctgcggattccctgcctgaccttgggaaagcctcttggggtctcggggcatagg

SEQ ID NO: 859249 - DNA, 120 bp, Artificial Sequence
  ENSG00000274565_7 (sequence is synthesized)
ggcatagggcaggactgagacgttgagaccccaagtgcaaagaagacacatttctcctaccacgagtaatcaaaaacactatgaaactgtaatatgggccgggtgcggtggctcacgcct

SEQ ID NO: 859250 - DNA, 82 bp, Artificial Sequence
  ENSG00000274565_8 (sequence is synthesized)
actttcggaggccgaggagagcagatcccatctcattttgttaatataaaatttttaaataataataaaactgtaatataaa

SEQ ID NO: 859251 - DNA, 120 bp, Artificial Sequence
  ENSG00000284623_0 (sequence is synthesized)
aattctgtgagcaaaagacaaaaagacagacagaaaagtctccatttgatggtggagaagggtccagccctgtgcatgtttgggactgagctgagagcgtgctcgcaggagaggcgccct

SEQ ID NO: 859252 - DNA, 120 bp, Artificial Sequence
  ENSG00000284623_1 (sequence is synthesized)
gaattccatgccgggtcattacagagccagtggcggagactctatgagacccagccccactggctgcagccccttcggatgcatctgcgagagcagcctggccgtcacccgccggcctgg

SEQ ID NO: 859253 - DNA, 120 bp, Artificial Sequence
  ENSG00000284623_2 (sequence is synthesized)
cccgtgctgtcagccggccagagcgtgtctgaatcgaggaaagctgactggggctcgattcacactgactcgagccgcaagatctgagcatcattacgagctgccatggaggcccttcac

SEQ ID NO: 859254 - DNA, 120 bp, Artificial Sequence
  ENSG00000284623_3 (sequence is synthesized)
taccttaaacttcacaacaagcctatgaggctcctccaggtagccgagcctcagccaccagggccacagacttctctgctgccttgagggacctacgggactagcaggagctgctcttcc

SEQ ID NO: 859255 - DNA, 120 bp, Artificial Sequence
  ENSG00000284623_4 (sequence is synthesized)
tcgtacgacttctacccacccagggatatcacttgacctctctgagcctgcttcctcctggagacaacagtgtatactcagggctattgcggggaatgacaaggaaaatggatgaaaatg

SEQ ID NO: 859256 - DNA, 120 bp, Artificial Sequence
  ENSG00000284623_5 (sequence is synthesized)
tgctggagaaattctgaggcatcagtcagatgaaaggttgtttaccatcaccttggaagctgtgcttgctctgtccccaggttcactttctgccctgttctgggccctccaggggccttc

SEQ ID NO: 859257 - DNA, 120 bp, Artificial Sequence
  ENSG00000284623_6 (sequence is synthesized)
tatgaagtgtgtctcccaggctctcccaccctctggcttccagtccaggccagctaatatgtggcaccagcaaggaatcaagggcaggaaaagagagaggttgggaatgtgcctcccatc

SEQ ID NO: 859258 - DNA, 120 bp, Artificial Sequence
  ENSG00000284623_7 (sequence is synthesized)
tcctctctgactcactgcattcaggcactggctgagctattctatggccacagctctgtccagcggcccctcctctgtccttccttcccttgccccttcaggcctaagagcggccacagc

SEQ ID NO: 859259 - DNA, 120 bp, Artificial Sequence
  ENSG00000284623_8 (sequence is synthesized)
ttccttctccctgttgctaaagtccagatgcttcagcatcttgtattctttctcttagccctacctctccctctcaaatcagagcctgtttggcgaagacttttcaggtgtgccgactgc

SEQ ID NO: 859260 - DNA, 120 bp, Artificial Sequence
  ENSG00000284623_9 (sequence is synthesized)
cccaagctgacccagtgcggatcctaactggccccaccagcatcttccatgctcacccagctggcccatgtcttgaagatgccctgggctcccagctctgccaccccagctttctgagtc

SEQ ID NO: 859261 - DNA, 120 bp, Artificial Sequence
  ENSG00000284623_10 (sequence is synthesized)
tccatggatcgggatcactggggacccagcaggaagaagttggagaagataggaaggcaggacgggactggaatgattctaggatgaccaccccactggcccctgcagcagaaggagcct

SEQ ID NO: 859262 - DNA, 120 bp, Artificial Sequence
  ENSG00000284623_11 (sequence is synthesized)
cagcctgggccctgtctctgccaacgccccctcctggcagaatgggcagcctatctgggtaaagacctgcccagaccccacagccaagggcagcccctcagagattcaggccaggagcgg

SEQ ID NO: 859263 - DNA, 120 bp, Artificial Sequence
  ENSG00000284623_12 (sequence is synthesized)
cctttgttccccacacctggagctcagagcttgcttagcctgcggtggaagctctggtttaattaaggatcttaggagagaattctctcttgttattttctgaataaattaaggaagtaa

SEQ ID NO: 859264 - DNA, 120 bp, Artificial Sequence
  ENSG00000284624_0 (sequence is synthesized)
ggagggaggaggacgacgtccctcccgaagagaagaggctgcggctgttgctggagaggggaagcgcgcagcccgaggactgcgaggacggggaggacgcgccgcggccaggcaggaaga

SEQ ID NO: 859265 - DNA, 120 bp, Artificial Sequence
  ENSG00000284624_1 (sequence is synthesized)
acccagacaggtggcgacggcagaggaatccttcgtagaaattcctaaggctcaatgctgtgtggaagtttctaagaaagaaaatagtttcccatctttgggattcccctgagatggtcc

SEQ ID NO: 859266 - DNA, 88 bp, Artificial Sequence
  ENSG00000284624_2 (sequence is synthesized)
cagtcttatccggattggatcctgggaattgagaagcttcaacaagtgggaaatgcaccctccacaggttcacacccttgtgggctat

SEQ ID NO: 859267 - DNA, 120 bp, Artificial Sequence
  ENSG00000284624_3 (sequence is synthesized)
ggaaatgcaccctccacaggttcacacccttgtgggctatttcagttacctattgcaccctaaaattagaaactttaaaccaccacaagtcattattgctcatgaccctgtgagttgcat

SEQ ID NO: 859268 - DNA, 120 bp, Artificial Sequence
  ENSG00000284624_4 (sequence is synthesized)
aacatccaggacagcctcacgtgtgtgcctggcagttggtgctgcctgtcagccggggaaccttgttttcctccatgtggcccctagccctccagagcccctctccaaatggccctttaa

SEQ ID NO: 859269 - DNA, 120 bp, Artificial Sequence
  ENSG00000284624_5 (sequence is synthesized)
gcaggatagccaaggcttgattggtgccagcatccaagagggcaaaaatatggaaactacgagagggttctcaaggcctaagactatatgcaccccaaaaatctgaggtctcagttaatt

SEQ ID NO: 859270 - DNA, 120 bp, Artificial Sequence
  ENSG00000284624_6 (sequence is synthesized)
ttattttgccaaggttgaggatgcacgcctgtgatacagcctcaggaggtcctgacaacatgtgcctaaggtggtagggacacagcttggtttcatacattttagagagacatgagacat

SEQ ID NO: 859271 - DNA, 120 bp, Artificial Sequence
  ENSG00000284624_7 (sequence is synthesized)
tgagacatgaatcaatatgtgcaagatatacattggtccagtctggaaaggcgggacaactccaggtgaaggtgaaggtgagacaactcgaagcggagagggggcttccaggtcataggt

SEQ ID NO: 859272 - DNA, 89 bp, Artificial Sequence
  ENSG00000284624_8 (sequence is synthesized)
agtcctgattagcctctccaaatgaggcaatcagatatacatttatctcagtgagcaaaggggtgactgaatagaatgggaggcaggtt

SEQ ID NO: 859273 - DNA, 82 bp, Artificial Sequence
  ENSG00000284624_9 (sequence is synthesized)
gcgttcagacgccccagctccgccgacaggccgctcgcgccgggtccttcctcttccccaggtgcaggcagagcccccagag

SEQ ID NO: 859274 - DNA, 120 bp, Artificial Sequence
  ENSG00000284624_10 (sequence is synthesized)
tctggaccgtctagccggggagggcgtcaaggccaggtacctcatgccaccctttgtcacgatgacctcccggtcccgcttcaccgccatcccggtcttagcaaatggcacaccaggaga

SEQ ID NO: 859275 - DNA, 73 bp, Artificial Sequence
  ENSG00000284624_11 (sequence is synthesized)
acggagcctcaaggctgggagaggggcgaccgccattgcctgggcttcagtaggtaaacaaagtggctgggaa

SEQ ID NO: 859276 - DNA, 79 bp, Artificial Sequence
  ENSG00000284624_12 (sequence is synthesized)
gatcaaactactccgatccttgaaaaaaggttagatgaatggctaactatatggatgaatggctaactagaataaccaa

SEQ ID NO: 859277 - DNA, 89 bp, Artificial Sequence
  ENSG00000284624_13 (sequence is synthesized)
cttaaaggacctgatggagctgaaaaccgaggcaagagaactacatgacaaatgcacaagcctcagtaactgatttgatcaactgtaag

SEQ ID NO: 859278 - DNA, 62 bp, Artificial Sequence
  ENSG00000284624_14 (sequence is synthesized)
tccatcagactaacaactgatctctcagcagaagctctacaagccagaagagagtgggggcc

SEQ ID NO: 859279 - DNA, 71 bp, Artificial Sequence
  ENSG00000284624_15 (sequence is synthesized)
cctacaaagggaagtccatcagactaacaactgatctctcagcagaaggaagaattttcaacccagaatct

SEQ ID NO: 859280 - DNA, 62 bp, Artificial Sequence
  ENSG00000284624_16 (sequence is synthesized)
gcatcaactaacgagagaaataaccaatgggctgaattctctgattaaaagacacagactgg

SEQ ID NO: 859281 - DNA, 67 bp, Artificial Sequence
  ENSG00000284624_17 (sequence is synthesized)
cacataacaatattaaccttaagtgtcaatgggctgaattctctcctgtattcaggaaacccatctc

SEQ ID NO: 859282 - DNA, 61 bp, Artificial Sequence
  ENSG00000284624_18 (sequence is synthesized)
taacaaggatatccagggattgaactcagctcttattcttctcagcaccacaccacactta

SEQ ID NO: 859283 - DNA, 120 bp, Artificial Sequence
  ENSG00000271868_0 (sequence is synthesized)
tgatgccttcgggaagaacagccttttacctccctaggttttctccccgcctagagttctgtttcttactacattacatttccgctcgcttagtgtttttcaaccctcgagctctcctca

SEQ ID NO: 859284 - DNA, 120 bp, Artificial Sequence
  ENSG00000271868_1 (sequence is synthesized)
acatgctgcaggattccacgtgcatcaaattctagaaaagccaaaacccacccacataggttgcttaggatggggtggggggactaagaaggggcatgagaaccttctttgggtgatgaa

SEQ ID NO: 859285 - DNA, 120 bp, Artificial Sequence
  ENSG00000271868_2 (sequence is synthesized)
aatgtcctatgttgttctgcctgaggtcatgctgcatttgtcaaaattcaaaaacactgaaaatgagtacattttattgtatataaatgacacctcaataaaaacgaaagatgtgagcaa

SEQ ID NO: 859286 - DNA, 120 bp, Artificial Sequence
  ENSG00000271869_0 (sequence is synthesized)
ctgggcgcacaggactgtacttttggtagcggtgcggggccgcccgcggactttagccctgcatagagatgggtagaccctaatttggaacagccattgactgggcacaggccagcactt

SEQ ID NO: 859287 - DNA, 81 bp, Artificial Sequence
  ENSG00000271869_1 (sequence is synthesized)
accctctcacggtggcctgcgcctgtaccccagctactcgagaggatcgcctgagcccagtgaagctgcagcgagctgtga

SEQ ID NO: 859288 - DNA, 120 bp, Artificial Sequence
  ENSG00000271869_2 (sequence is synthesized)
gaggatcgcctgagcccagtgaagctgcagcgagctgtgaggatgccaccgcactccggcctgggctaaaaagctagatcgtgtctctgataaaagaataaaagctgtttattgcaatcc

SEQ ID NO: 859289 - DNA, 120 bp, Artificial Sequence
  ENSG00000271862_0 (sequence is synthesized)
gggaatgccagtccatgaagttgatggttaggctaagatctactgcagatgaagagcatgaacaaagtggcagagacaggaaagagcttgggacttgaaggggtggagaaattcatagaa

SEQ ID NO: 859290 - DNA, 120 bp, Artificial Sequence
  ENSG00000271862_1 (sequence is synthesized)
aactagcatgaagaatgctatttaatgttactaatactgagtgaggcaaagaatggagtaagttggaaagaaaaaataagccaaatcatgcagggctttgagccatagagaaggctggcc

SEQ ID NO: 859291 - DNA, 120 bp, Artificial Sequence
  ENSG00000271862_2 (sequence is synthesized)
aactcatccaaaggatttgaccttacataattaaaggagctaatagagtagtctctgtaagactattgtctttgtttctaatgttggacctgaaatccacagggaagggaagggaagggt

SEQ ID NO: 859292 - DNA, 120 bp, Artificial Sequence
  ENSG00000271862_3 (sequence is synthesized)
agaagctgtgtcagttcttgtcattgaccttggtactgtggatgtcttgcagaaagaagccagtgcccttcttgaagctatatgtggccaagaagtcagagaggctgaaggataatccag

SEQ ID NO: 859293 - DNA, 120 bp, Artificial Sequence
  ENSG00000271862_4 (sequence is synthesized)
gggaagatagagtagttataggcccacctgctgcctcacagtaacaacgttaatctgcacatctgtgacatcacagttgagctacaaaattactactgctttacctctgttgaacaaatt

SEQ ID NO: 859294 - DNA, 120 bp, Artificial Sequence
  ENSG00000271862_5 (sequence is synthesized)
tcacccaagactccctcctgtggtccacactaaccagaagtttacaaggaaggcagtcctaggaaatgagcagcctaaccaagttgacacattacaaagtcatcatgctctctaagaccc

SEQ ID NO: 859295 - DNA, 120 bp, Artificial Sequence
  ENSG00000271862_6 (sequence is synthesized)
atatatcccaaacagaattcttcaaaacctgcttctccttctgggtcaccctattttgttttttaacagtgccactttccttctatgcttaaaattttctaatcttgttaactccccctt

SEQ ID NO: 859296 - DNA, 120 bp, Artificial Sequence
  ENSG00000271862_7 (sequence is synthesized)
ttcctttctcatatacctctcatgctaccaccaatctataacagttctatcatttttacctctgcagtgcccaccccaggtggatgagttcaaactcaacaggtgattatacaatcccac

SEQ ID NO: 859297 - DNA, 120 bp, Artificial Sequence
  ENSG00000271862_8 (sequence is synthesized)
acattgatttcatatttagtttgatataagccccccttctggaaccccaaaagaaggaaaaggccattttcctctccaaaagcacatacaggggagtgagttataacgaggagctagtat

SEQ ID NO: 859298 - DNA, 120 bp, Artificial Sequence
  ENSG00000271862_9 (sequence is synthesized)
gctgctatcattatttaaaccaagaaaacccactgtagacaagatgaaggatctaataaaaatgtgttcttattcctgattctaaaactttaacagctgggctttcccatgtggaataat

SEQ ID NO: 859299 - DNA, 120 bp, Artificial Sequence
  ENSG00000271862_10 (sequence is synthesized)
gttacataaataactcagccaggaaacagaggggctgtgaagaagtccaacaaaatgatagatgatcttggacagtcttagtatcacacccaatggagttagaaggaaataagtgcattg

SEQ ID NO: 859300 - DNA, 120 bp, Artificial Sequence
  ENSG00000271862_11 (sequence is synthesized)
aaggtacgggtgagctatgttgttatgtgtgagcagcaaactttacagaacctgacagttatctgagtcatgtatcactaattctacagaagttttctttctacttaagtatattaacac

SEQ ID NO: 859301 - DNA, 120 bp, Artificial Sequence
  ENSG00000271862_12 (sequence is synthesized)
tccctaatctattccatagggaccttttctgctccatccaaatttgtcatcttttaattagtcatggaagtctagataaagcgggtttcagaaaataaacatgttgagttttaaaactaa

SEQ ID NO: 859302 - DNA, 87 bp, Artificial Sequence
  ENSG00000271860_0 (sequence is synthesized)
atttttcttcagacttcagactgctgtgctggaagcaagaatttcaagcattggatcttagcttgctgggctccataggggtgggat

SEQ ID NO: 859303 - DNA, 78 bp, Artificial Sequence
  ENSG00000271860_1 (sequence is synthesized)
ccagatgtccttggcgtgtacaccctgtggaatctggttcatcttcaatctgtcagaaggcatcagaggtggttttga

SEQ ID NO: 859304 - DNA, 120 bp, Artificial Sequence
  ENSG00000271860_2 (sequence is synthesized)
tcatcttcaatctgtcagaaggcatcagaggtggttttgactccttatgtcttggacctgtgcacaaaaagtgtaaaatggatggaacatcagacagctcattatagagacaagtaagct

SEQ ID NO: 859305 - DNA, 120 bp, Artificial Sequence
  ENSG00000271860_3 (sequence is synthesized)
ccagttccaaagttggttgacagaacaagtcatgaccttgtgtggaggaaaatgagatcccgagtgaagtctacaatgtcattgactctgaagaaggactcagagacccattggtgttta

SEQ ID NO: 859306 - DNA, 120 bp, Artificial Sequence
  ENSG00000271860_4 (sequence is synthesized)
tgactgcagccaatgggaactctatagattggtttgctgctctctttcctgataaagagaagactttgagatgtgcatgtttatgttggtaaataaattctggcatgaaatgagaattca

SEQ ID NO: 859307 - DNA, 120 bp, Artificial Sequence
  ENSG00000271860_5 (sequence is synthesized)
ggaatcaagcctaaggcatcaaaaacagtaataaagtgaatttgtagccatattgtctttggtgcttccaggacaaagtctgcatatttaaggctaatggtgcagatttctgagttttat

SEQ ID NO: 859308 - DNA, 120 bp, Artificial Sequence
  ENSG00000271860_6 (sequence is synthesized)
gaaatatgtcatcatgtgatgatcttgagtgtgccttaaaattccatttcatggagaactgtgcgtggttgaattttgattgattactcaattaactgatgtattggtagagtgattaag

SEQ ID NO: 859309 - DNA, 120 bp, Artificial Sequence
  ENSG00000271860_7 (sequence is synthesized)
aaagaagactttgggatcagaccaacctggttttgaattcaagctcagcaacttactaggtaaggaggagaaaagaaagaaggaaaaattggaaagataaatggggtctttccagtgaag

SEQ ID NO: 859310 - DNA, 120 bp, Artificial Sequence
  ENSG00000271860_8 (sequence is synthesized)
ctgcagttatggcattaaccacccagttgttacctacttctagatgaaagctcaattttcctacataattaagagtttggaattcgggcaatatcaagaaccacatctgtcctgaaatca

SEQ ID NO: 859311 - DNA, 120 bp, Artificial Sequence
  ENSG00000271860_9 (sequence is synthesized)
ggcatcctcaggtaccctgcagggtttgtggggaggctgctggacttacagattgttgtggatttcatcctggatggtttactgagctctttggggttcctgaggtgaaaattacagcaa

SEQ ID NO: 859312 - DNA, 120 bp, Artificial Sequence
  ENSG00000271860_10 (sequence is synthesized)
ttttaagagtctgacacactttccagctgatagcactaaaaacatgacttgtagcctcctctctttttcctgtttgcttctctgaatgaagatggcagaactaatctgtatgaactatta

SEQ ID NO: 859313 - DNA, 120 bp, Artificial Sequence
  ENSG00000271860_11 (sequence is synthesized)
tctgttatgtgaatttttatgaattaaactaatttatctttaaaaatccatttttttctctatgagcaacttatgcaatggaatggacctactatatttgtcaaagttattagagtcccg

SEQ ID NO: 859314 - DNA, 120 bp, Artificial Sequence
  ENSG00000271860_12 (sequence is synthesized)
ggtttttaattactagtttgaaccccacagctcttctggtaaaatgtggactgcatactgaagggaaaacaaaataacagattatgcaatatacaaatagaattaccagtgacttattct

SEQ ID NO: 859315 - DNA, 120 bp, Artificial Sequence
  ENSG00000271860_13 (sequence is synthesized)
cctttaagtcaacatttaatgcaatggtttttgctctggatctcatatcccttttattttgtattttttttgggtaaggtggttccgatgttatcaaccaataaaataaattctacttca

SEQ ID NO: 859316 - DNA, 120 bp, Artificial Sequence
  ENSG00000271860_14 (sequence is synthesized)
aggcgtgtgccaccgcgcctggcctcatctcttaattcgagtaattttacataagcaacaatggggtaaggaggagaaaagaaagaaggaaaaattggaaagataaatggggtctttcca

SEQ ID NO: 859317 - DNA, 120 bp, Artificial Sequence
  ENSG00000271860_15 (sequence is synthesized)
gtgaaggaacttggcaaatgtatttgatgtactacttgatttaacatctatgcttccaaatgtttattataaagaaattaccaaggctcaattttcctacataattaagagtttggaatt

SEQ ID NO: 859318 - DNA, 120 bp, Artificial Sequence
  ENSG00000271860_16 (sequence is synthesized)
attcgggatcccacatcaccatctaacaaatgaatttttgtaagaaaacccattgagacaagatcatgttctgttgctcaggctggagtgcagtaacacaatcatagctcactataacct

SEQ ID NO: 859319 - DNA, 120 bp, Artificial Sequence
  ENSG00000271860_17 (sequence is synthesized)
cagcctcccgagtagcttggactacaggaaccacttgggtgcccagctgctgtccattctctacacttatcccacctgatggaaggctgttaagaaaaacatcactgcaatgcctaataa

SEQ ID NO: 859320 - DNA, 120 bp, Artificial Sequence
  ENSG00000271860_18 (sequence is synthesized)
gttaagaaaaacatcactgcaatgcctaataaacagacatgggtcccagacccaataagagtgaaaccatccccctatttaaatgaaattatggctgatgagaaagacaaattaatttct

SEQ ID NO: 859321 - DNA, 120 bp, Artificial Sequence
  ENSG00000271860_19 (sequence is synthesized)
ctgtccctagtattacacaaaactttggatgctgccattgttacaattttattttccccaggagctcagagtcccaccttcattctttttgtttaatgcttaagcttgcctgtccaccta

SEQ ID NO: 859322 - DNA, 120 bp, Artificial Sequence
  ENSG00000271860_20 (sequence is synthesized)
gaacacgttcttggatttctcatgctaggcctaaggagcagactgcttatattcaagaatgatttggaggggataaagtgtgcaagattttgaattcttgccataagtccctggcagaca

SEQ ID NO: 859323 - DNA, 120 bp, Artificial Sequence
  ENSG00000271860_21 (sequence is synthesized)
gccaggcagcctcagaggaataaggctaatgaagggagggtaaagaagatccgggagtgtggctggtaatgcagtattcatttaattgggagcagacgggcaggagaggatgcaggagac

SEQ ID NO: 859324 - DNA, 120 bp, Artificial Sequence
  ENSG00000271860_22 (sequence is synthesized)
gatcttcagaaatagatggttctttggcagtgttaagaaatattatttttgtcatgttctaatgcagtagataggcacttttatgcactgcctgcttttatctattggttttgcagagag

SEQ ID NO: 859325 - DNA, 120 bp, Artificial Sequence
  ENSG00000271860_23 (sequence is synthesized)
agacttagcaaacttttgatgaaatattactgccatcttattaatgaacactaatccttttaatttgattacatccttagggtttgatttaatctataaaagacaccagtaaaaacccca

SEQ ID NO: 859326 - DNA, 120 bp, Artificial Sequence
  ENSG00000271860_24 (sequence is synthesized)
tacatagaaatgttgttgccattcaggcttgaagtttttgttcttgcataacttagaatatattctatattacatcaatactgagagaacttgtctttatggattaagtggatgttagaa

SEQ ID NO: 859327 - DNA, 120 bp, Artificial Sequence
  ENSG00000271860_25 (sequence is synthesized)
cattgcccaacagactttttttcataatgcttattttgttggaccttttagtatcacattgccctcccatttatataagacggtaataatgaaaaggtttgagaaaagcacccttaattt

SEQ ID NO: 859328 - DNA, 120 bp, Artificial Sequence
  ENSG00000271860_26 (sequence is synthesized)
tgaatgcaaataagtttaaaaaaatgatgtacataccatggaaaattttataaggaaacatttaaaatgtgaagataacttggtgataatattggagagaaattacaaccttattatatg

SEQ ID NO: 859329 - DNA, 120 bp, Artificial Sequence
  ENSG00000271860_27 (sequence is synthesized)
cataattagttcttcataggtctgcagattatattgtgttgtagagggtccaatgttgcaaaatgaggaaaaggttaggtgcattttatcattttaagggccatgatgagataaaacatg

SEQ ID NO: 859330 - DNA, 120 bp, Artificial Sequence
  ENSG00000271860_28 (sequence is synthesized)
gtaagctgttgtgctggctctttttatgttgatcattggcagttaccaagctgactatctgacatgagctgaaaacctatgttgaaaaaatgtccagttccattttatgtagcttcaact

SEQ ID NO: 859331 - DNA, 120 bp, Artificial Sequence
  ENSG00000271860_29 (sequence is synthesized)
catctttaaaaaatgaagtgatttagaacacatgtcacgcactcctgggccagccagcttccctttctctcctcgtatgtaatatctttttttcccctttctagcaagtactttcaaaag

SEQ ID NO: 859332 - DNA, 120 bp, Artificial Sequence
  ENSG00000271860_30 (sequence is synthesized)
agatttatctgcactgacagccaccccccttacacacacacactctctctttctcattctcctttccctcctctccatctccctattgcattgtgtctgactgattttcagagcaccttc

SEQ ID NO: 859333 - DNA, 120 bp, Artificial Sequence
  ENSG00000271860_31 (sequence is synthesized)
gctgtttcccccttctcgttcccttctcataaaatatctagacaggaaggaggtggctgcagaggctgaacaatctcatattctgcctgcaatgtcatcgtttctttcccccattttagg

SEQ ID NO: 859334 - DNA, 120 bp, Artificial Sequence
  ENSG00000271860_32 (sequence is synthesized)
gggctgaagttgcccagcaagggatgcagaggagctggaaaagaaggggggagctctccagaggcagctgcggtcaggggcagggactgccgccagatgtgcctgcctttctgggctttg

SEQ ID NO: 859335 - DNA, 120 bp, Artificial Sequence
  ENSG00000271860_33 (sequence is synthesized)
atgagaaaggggcagcaggaggaaatattgggagacaaaagccccggtttaaatgatcattttctttatttaacatggcagcagacactctctgcgtaggatcatcatgccgagcataaa

SEQ ID NO: 859336 - DNA, 120 bp, Artificial Sequence
  ENSG00000271860_34 (sequence is synthesized)
ctggactttcccacttgcctggcaggagtcacacagatccctgcgtgctaaatgaacatctgaggtttgagatggggcccaagatgcttttctgacaagtttcctggtgatgcaatgttg

SEQ ID NO: 859337 - DNA, 120 bp, Artificial Sequence
  ENSG00000271860_35 (sequence is synthesized)
ctgttggggaaacctccatttgacccttgaatcctgactattggagaaacagcaccatattttggatactgattcagaccatatacagccttctggagaatcttgccccagtcctgaaag

SEQ ID NO: 859338 - DNA, 120 bp, Artificial Sequence
  ENSG00000271860_36 (sequence is synthesized)
gtatttctattcatctagttggtgctataactgagtcttcaaaagacaattccactgttctatcaagaaagctgcttcaggatggtgggaaatatggttttggtatcaggatgatgctgg

SEQ ID NO: 859339 - DNA, 120 bp, Artificial Sequence
  ENSG00000271860_37 (sequence is synthesized)
ttggacttggactggaactaaaccatcagctcttcttgttctaccacttgcagactgtatgtcttgggacatgtcagcctctgtaatcacgctcaattttcctacataattaagagtttg

SEQ ID NO: 859340 - DNA, 120 bp, Artificial Sequence
  ENSG00000271860_38 (sequence is synthesized)
ggaggtctgtgttttgagccttcctacaaaacacaagaaataagaagaccattttgagaagaacagagagtagccttaagaaaatccctgtcgcaagcactctgggatttggactcaaat

SEQ ID NO: 859341 - DNA, 120 bp, Artificial Sequence
  ENSG00000271860_39 (sequence is synthesized)
gctaattatacaatgaggaaattgagatacagaaaggtgaagaaataatgtcacatagtagtggagtcagaataaaaatgcagacaggaaccacttgggtgcccagctgctgtccattct

SEQ ID NO: 859342 - DNA, 120 bp, Artificial Sequence
  ENSG00000271860_40 (sequence is synthesized)
cttggccaaacaacgcggattgcagttcatttcaaagagaatgatggctcagaatgccccaggtgagaggatgagatgagtttgtgatttaaaaatgctgtgactctaaaaagaaaattt

SEQ ID NO: 859343 - DNA, 120 bp, Artificial Sequence
  ENSG00000271860_41 (sequence is synthesized)
ttaaagttaaaagcaccatgctagtttcctccctgctcccagatcattagagtgtcacataatttgaagccctgctacatgatgatcctgctgtcttcatcctcctacccacaacccaag

SEQ ID NO: 859344 - DNA, 120 bp, Artificial Sequence
  ENSG00000271860_42 (sequence is synthesized)
ttcagcccccttccagattcaaactaatggtgtctcaccaacacatggcatgagaacacctgtagcaatctgtttgacagtcattcacgagcaacttagaattgcaagaaagatgtcctt

SEQ ID NO: 859345 - DNA, 120 bp, Artificial Sequence
  ENSG00000271860_43 (sequence is synthesized)
agctgaaatgacatggttgcctatgtaaaaatatatctgacagcagagctttcgagtcagcgcttttcttcattttccccgctgctcaatccatccagcggctgtcacagaggggaagcg

SEQ ID NO: 859346 - DNA, 120 bp, Artificial Sequence
  ENSG00000271860_44 (sequence is synthesized)
gcaccctgctgaacagaactccaaacagaggagtagcaaaatgggaggaaggtgctgtgactaaatgaaggaaggctgaggggttaaaatcattgctgggtgatttcaccactactgccc

SEQ ID NO: 859347 - DNA, 120 bp, Artificial Sequence
  ENSG00000271860_45 (sequence is synthesized)
agtgcctgggtccgtgtgaagtgaatacagatgtctcaataatgatcggcaggacgttgggctgattttcagtgtttgaaggtctcctataaagtcgtcctttgtgcagttgtaagggtt

SEQ ID NO: 859348 - DNA, 120 bp, Artificial Sequence
  ENSG00000271860_46 (sequence is synthesized)
attttttccgttctttttttttttctctctctctttctcaacgtgaacagctctgttggtaagaatcatctaacaggaaactgttttttgctctgaaggagatcaagagaactcgttttg

SEQ ID NO: 859349 - DNA, 120 bp, Artificial Sequence
  ENSG00000271860_47 (sequence is synthesized)
tccatccttttgaattgtttgaaatagtttcagaagaaatggtaccaactcctcttttacctctggtagaattcatctgtaaatccatctagtcctgggcattttttgatcttgagtgtg

SEQ ID NO: 859350 - DNA, 120 bp, Artificial Sequence
  ENSG00000271860_48 (sequence is synthesized)
gaaataagaagaccattttgagaagaacagagagtagccttaagaaaatccctgtcgcaagcactctgggatttggactcaaatgctaattatacagtctataatgatgactggaatagg

SEQ ID NO: 859351 - DNA, 120 bp, Artificial Sequence
  ENSG00000271860_49 (sequence is synthesized)
aaattcggacagcaaaagtggtcgcttcttaggcttcctgccagattttgaaaaccactataactagtcgtttctgccaagaaccacttgggtgcccagctgctgtccattctctacact

SEQ ID NO: 859352 - DNA, 120 bp, Artificial Sequence
  ENSG00000271860_50 (sequence is synthesized)
catttctattttctctctcctcccctacttcttgttttaatgataccttccaagttttatttctccaagcctaaccccttacataatacaagaggacaacagtttgcaaaataaatatct

SEQ ID NO: 859353 - DNA, 120 bp, Artificial Sequence
  ENSG00000271860_51 (sequence is synthesized)
gttggccctaactggtaaatactgaaatagatttcaagtaatgtgagtgtttttgaaaccacctaaatctgtaagccaccctgcaaggaacaagggtagcaaagtgaataagccagacat

SEQ ID NO: 859354 - DNA, 120 bp, Artificial Sequence
  ENSG00000271860_52 (sequence is synthesized)
gtaaaaataaagatgacaaaatggaaggcaattaatgcctgtaatggaggtggggaaggggggaatgacaagttaataagaaatttatttttaaatgctatcatctgccataaaatatcc

SEQ ID NO: 859355 - DNA, 120 bp, Artificial Sequence
  ENSG00000271860_53 (sequence is synthesized)
atgcttattttagaaaatatgtaaaatgtttaagaattaaacatctttaaaaaaatcacatgaactcatcaccctgcaacaaaacacacacagatgagtgcacacacttaaacacacatt

SEQ ID NO: 859356 - DNA, 120 bp, Artificial Sequence
  ENSG00000271860_54 (sequence is synthesized)
aattttcaattagtatataaagttaatatcctgctaagtacaagatactatatcatgagcactttgtctcgccaatattctatgaaaacataattattacagaatattctggaaagtgaa

SEQ ID NO: 859357 - DNA, 120 bp, Artificial Sequence
  ENSG00000271860_55 (sequence is synthesized)
tataccatgatttatccagtcatttccctattaacacacattttgtgattccaatttatcactgccacacagtattttcttaaataacctcacttataagttttgtttgaacgtttttat

SEQ ID NO: 859358 - DNA, 120 bp, Artificial Sequence
  ENSG00000271860_56 (sequence is synthesized)
tattttctatttaatataatgttaatataatgttatataatataatgttataatgttagggttttactatataaggtgtatacattattttaacgctcgttccactggacacccaaagcc

SEQ ID NO: 859359 - DNA, 120 bp, Artificial Sequence
  ENSG00000271860_57 (sequence is synthesized)
ctcagtaagtttagtgaataacagtacaatgcccaaatttttgaaagtttttctcttccttaatttttagcattttgcactatattttattttgaataaattaaagaactcatttaaagt

SEQ ID NO: 859360 - DNA, 120 bp, Artificial Sequence
  ENSG00000271860_58 (sequence is synthesized)
atatggatatgagagatcactttgctgtgctgtaaatgatcgattaaaatacatatttcttttgtctcctggtactttcttatcccagtgctgtgctgagccatattggagcctaaggca

SEQ ID NO: 859361 - DNA, 120 bp, Artificial Sequence
  ENSG00000271860_59 (sequence is synthesized)
aaagggaccatcagtaacactaatcctgtctttatttaaaattttgatattttgttcatcatggatttatttgcataaattttaatattgaaatctattgattaaaatattatgtatctt

SEQ ID NO: 859362 - DNA, 120 bp, Artificial Sequence
  ENSG00000271860_60 (sequence is synthesized)
gtagcttttcattggaaaatctgttgagacatgcagagctgaggcatctggatatctaccctgcaaaatccctagagatgaggaaattgagatacagaaaggtgaagaaataatgtcaca

SEQ ID NO: 859363 - DNA, 120 bp, Artificial Sequence
  ENSG00000271860_61 (sequence is synthesized)
tagtagtggagtcagaataaaaatgcagacaggtaggaaaccagaggctccggcaagtgaagtgacttgctcaaggtcaaagatatggaaccacttgggtgcccagctgctgtccattct

SEQ ID NO: 859364 - DNA, 88 bp, Artificial Sequence
  ENSG00000271860_62 (sequence is synthesized)
agatccttggccaaacaacgcggattgcagttcatttcaaagttttgctactgttcctgattcatttcattgtgataagaaaagctgc

SEQ ID NO: 859365 - DNA, 120 bp, Artificial Sequence
  ENSG00000271860_63 (sequence is synthesized)
agagtccgtcagtccgggacgaggtactgagaaacttttttttttgtacctttaattggtgcgttcggctgaaaggcggggcctggtaaaaaaaaaaaaacagaactgctgctgaggcgg

SEQ ID NO: 859366 - DNA, 120 bp, Artificial Sequence
  ENSG00000271860_64 (sequence is synthesized)
aggagaggacttaaggactatgggtttatcctctggccggaccaaagagaagatatttactccagtgagtgcgaagtgagtgcctcgttcacacccacagtcgcgccgtcccctcttccc

SEQ ID NO: 859367 - DNA, 120 bp, Artificial Sequence
  ENSG00000271860_65 (sequence is synthesized)
gctctggggccagcaactcttgttagaatgcagatgccttttgtccatggactgtgaggcagcagacactctctgcgtaggatcatcatgccgagcataaactggactttcccacttgcc

SEQ ID NO: 859368 - DNA, 120 bp, Artificial Sequence
  ENSG00000271860_66 (sequence is synthesized)
acatctgaggtctttgaggaatcgccacactgttttccacaaaggtcaaactaatttacactcccaccaacaatgtacccttgaatcctgactattggagaaacagcaccatattttgga

SEQ ID NO: 859369 - DNA, 120 bp, Artificial Sequence
  ENSG00000271860_67 (sequence is synthesized)
tactgattcagaccatatacagccttctggagaatcttgccccagtcctgaaagttctggctcattgtataagagaagtttgctgccttagtgagatttgttttggtatcaggatgatgc

SEQ ID NO: 859370 - DNA, 120 bp, Artificial Sequence
  ENSG00000271860_68 (sequence is synthesized)
acagaatctgaggagggtggctctgttattctgatggaatgaatgctcagtgagatcaaaatcaagtcattgaggatgccaggagagtctggggcatcctcagaaacacaagaaataaga

SEQ ID NO: 859371 - DNA, 120 bp, Artificial Sequence
  ENSG00000271860_69 (sequence is synthesized)
gacacacaggtggccatacctccagagaagtacttcagcggtagaagactcaagcggctggtcctccagaggacctcgagaggagcatgttggcagaaaaacacaccgacagacatctgc

SEQ ID NO: 859372 - DNA, 120 bp, Artificial Sequence
  ENSG00000271860_70 (sequence is synthesized)
acgcctgcaggccattgattgaggggactaggcggagtttggccggggctgttggaggagagccggggccacctagcggcccaattccaggggaaaatcgtctgcctctggctcctccat

SEQ ID NO: 859373 - DNA, 120 bp, Artificial Sequence
  ENSG00000271860_71 (sequence is synthesized)
tctgcctctggctcctccatcagctgagagctacttccactcaataaaactttgtactctttctccagtcccgcatgtgatccgattcttccggtacaccaaggcaagaacccgggatac

SEQ ID NO: 859374 - DNA, 84 bp, Artificial Sequence
  ENSG00000271860_72 (sequence is synthesized)
cgggatacagaaagccctctgtccttgcgacaaggtagaggttctaattgagcggacttacacaagacacctatagacggcaaa

SEQ ID NO: 859375 - DNA, 120 bp, Artificial Sequence
  ENSG00000271860_73 (sequence is synthesized)
acactgccgtggagtcaagagccccacagcctgcccatctgtatgctcccctagaagtttgagcagcggggcactgaagaagcaagccacacccacatcgcacgccctgcgagggggatg

SEQ ID NO: 859376 - DNA, 120 bp, Artificial Sequence
  ENSG00000271860_74 (sequence is synthesized)
atggtataatgtgatgttctgaccaacaacgtatgaggatgtgtttcttcacaacctcactagcagggtgtatggtgaagctttggatttctgtcaacttgataaggaagaaatggtaaa

SEQ ID NO: 859377 - DNA, 120 bp, Artificial Sequence
  ENSG00000271860_75 (sequence is synthesized)
cctgcgtgctaaatgaacatctgagacccttgaatcctgactattggagaaacagcaccatattttggatactgattcagaccatatacagccttctggagaatcttgccccagtcctga

SEQ ID NO: 859378 - DNA, 120 bp, Artificial Sequence
  ENSG00000271860_76 (sequence is synthesized)
tactaggtgagtaacctctaaacccacattaagccttttttctatccataaaatggagatactaacattgcttgtcttgtttggctgttatgatgacaaaatcagaaaatatgaataaaa

SEQ ID NO: 859379 - DNA, 120 bp, Artificial Sequence
  ENSG00000271860_77 (sequence is synthesized)
aggtgtgcactggctaatttttaatgtttaaaaatttgttgtagcaatagtgtcttggtatgttatccaggatagtcttgaactcctggcctctaggggtccatctgcctcggctttcca

SEQ ID NO: 859380 - DNA, 120 bp, Artificial Sequence
  ENSG00000271860_78 (sequence is synthesized)
aagctttcggattacagatgtgagccaccgcgactgggcttattatcctttttaaataaacatttttgatggtgaaaatacatggaacatatgaccaaattcaataattacaatgtatat

SEQ ID NO: 859381 - DNA, 120 bp, Artificial Sequence
  ENSG00000271860_79 (sequence is synthesized)
aatgttactgaaggatggatataacagaaagttaagacttgaggtctgatataagacagcctgcctgagttcaagaccaaactcttcctcagatgggctgtgagacagtgatcaagatac

SEQ ID NO: 859382 - DNA, 120 bp, Artificial Sequence
  ENSG00000271860_80 (sequence is synthesized)
tgacctcttttaaaatctctgctttttcatctgtaaaatgtaaattaaaaataccttgtgctatatggttgttgggacaattaatatgctaaaagagcacatgagaatacacactgatat

SEQ ID NO: 859383 - DNA, 120 bp, Artificial Sequence
  ENSG00000271860_81 (sequence is synthesized)
cccattggtgtttaatgacccttactggcctatgcaatggaaactgatatcaagataactgcacattttaacctataaagaagccctataatctgtcggggagccacatggagagccttc

SEQ ID NO: 859384 - DNA, 120 bp, Artificial Sequence
  ENSG00000271860_82 (sequence is synthesized)
atgatggaattctaaaatatattgtgggttgcatttgatgacttattggagtccccaaaatattattgtaaagataaatattatatacattgagcctcagcttcttgataataaatcacc

SEQ ID NO: 859385 - DNA, 120 bp, Artificial Sequence
  ENSG00000271860_83 (sequence is synthesized)
ttatctctgtttgtttctcttctccgtctgcttcttcctaccagtggccatggtccatgcctcctttactacatcagatccacctagtccctggactaatcagaaacacaagaaataaga

SEQ ID NO: 859386 - DNA, 120 bp, Artificial Sequence
  ENSG00000271860_84 (sequence is synthesized)
gaacagccaacatgatctcagctgacaagcaggaaatggatgtaataaagattgtttctgcatgctctttgcatctttgataaatcaccatgctgtgcatcagatacaagtgccacatgg

SEQ ID NO: 859387 - DNA, 120 bp, Artificial Sequence
  ENSG00000271860_85 (sequence is synthesized)
ggagcccaaagtttccagttggcactcttaacttccagttcaatggaatggttgttgtgtctcacagttgtaatattctctctgaaactgagacttctagaccagcagattataaaatca

SEQ ID NO: 859388 - DNA, 120 bp, Artificial Sequence
  ENSG00000271860_86 (sequence is synthesized)
accctactctgagcctccagagactgacattttttaatttaattaagaggacctcttgccctctggactgagatggatttcaaccaatagactcaaactggaagtgtctcaagggagagt

SEQ ID NO: 859389 - DNA, 120 bp, Artificial Sequence
  ENSG00000271860_87 (sequence is synthesized)
taatggtattattataaattttgttactaataatgacatacatatacttgctcaattactaggaaaatgaatgcttaagcttatctttcttttattatcagtgggttgaattatgtctta

SEQ ID NO: 859390 - DNA, 120 bp, Artificial Sequence
  ENSG00000271860_88 (sequence is synthesized)
gaccattcatatttcttctgtgaattttcttgtcttttaattattatcagtatatttcttttttctctagattttgtgttaaaaaaacactataatatgtagtaacaatattatcccttt

SEQ ID NO: 859391 - DNA, 120 bp, Artificial Sequence
  ENSG00000271860_89 (sequence is synthesized)
tatatgctattatttttatacttagaacagctttttccaaattttaatctatgaaacactaggcttctaaaacattttgttaaataaataaaattatatggtctaacaagtttgaagaaa

SEQ ID NO: 859392 - DNA, 120 bp, Artificial Sequence
  ENSG00000271860_90 (sequence is synthesized)
tgaagaaaatgaagatatataaatttaagtggttttctttcacattttttatgtttgtaggaagctaatatgcattgtagtgccaaagggcatttacaaaacatatttgaccatggcacc

SEQ ID NO: 859393 - DNA, 120 bp, Artificial Sequence
  ENSG00000271860_91 (sequence is synthesized)
ctccattcataaagcatttcgtagggttagtgtgtctctgaatacattttagttgacctatatagaagctatttatctgttccaagaccacataaaaaagttaaaccaggccaggtgcgg

SEQ ID NO: 859394 - DNA, 89 bp, Artificial Sequence
  ENSG00000271860_92 (sequence is synthesized)
taactcctctaatcccaacttggtcaaaagtttgagaccagactgaccaacatggtaaaacgctatctctactaaaaatacaaaaatta

SEQ ID NO: 859395 - DNA, 120 bp, Artificial Sequence
  ENSG00000271860_93 (sequence is synthesized)
gctggccttggcagtgcacccctgtagtctcagctactcgggagcctgagacaggagaatcacttgaatctgataagcatagcttgctgtgagccaacattgtgccaccgaactctagcc

SEQ ID NO: 859396 - DNA, 120 bp, Artificial Sequence
  ENSG00000271860_94 (sequence is synthesized)
tatttctctcctgaccctctgggcctgcctttccatgcagtacccttgttctctgagagtgaggaggtctgtgttttgagccttcctacatggccatggtccatgcctcctttactacat

SEQ ID NO: 859397 - DNA, 120 bp, Artificial Sequence
  ENSG00000273035_0 (sequence is synthesized)
catttctttgttaatgaacttttcatgcactttttttacttatctagtagtctgcttattgagtagtttgccttttcatcatgtgtctgtgacacagagcaagtatcttttctatgcctt

SEQ ID NO: 859398 - DNA, 120 bp, Artificial Sequence
  ENSG00000273035_1 (sequence is synthesized)
atttcaattaatatacagtggtaactgttatttgaaccatgatgtagggaactagtgttatttaactaaattatggtaactgaaattggtgcataacaaagctgtaaaacaaggactgcc

SEQ ID NO: 859399 - DNA, 120 bp, Artificial Sequence
  ENSG00000273035_2 (sequence is synthesized)
tatatccttttcagtgcactaaatgctacatgattgtttcttacctcaccctatgtacttgtcatgtctttttaaaaatgtactcaaagaacagaaataataaaccaaatagagaagcaa

SEQ ID NO: 859400 - DNA, 90 bp, Artificial Sequence
  ENSG00000273033_0 (sequence is synthesized)
agctggtcttgaactcctggacttagttgggattaaaggcgtgagcccccatgtccggccaacaagacttcctcgtgactataatgtgag

SEQ ID NO: 859401 - DNA, 120 bp, Artificial Sequence
  ENSG00000273033_1 (sequence is synthesized)
atgtccggccaacaagacttcctcgtgactataatgtgagcataatattaatagctctgagagagagaagtgaaccagaagaccaacctcagtgtcaggaagtctgggcgtctgtcttct

SEQ ID NO: 859402 - DNA, 120 bp, Artificial Sequence
  ENSG00000273033_2 (sequence is synthesized)
gcatggctgaagacatggggctttgggcaagtcatctgttctctttgaactttggcttcctcacttctgaaataggagggtcagagaagatgtttctttttgctgaaaagttttacagtt

SEQ ID NO: 859403 - DNA, 120 bp, Artificial Sequence
  ENSG00000273033_3 (sequence is synthesized)
ctctgatctataccccttggtcacacacaaccaaaaagtagaaaacatgagtgcaatacttttccaccagtactcccagtttatacattatcttctcaaaccaataaggaacttctacaa

SEQ ID NO: 859404 - DNA, 120 bp, Artificial Sequence
  ENSG00000273033_4 (sequence is synthesized)
ggccctgttagtgatgtgttacaggtgccagcattagggaaactttcagactgttatatctattcgttccttcatccatgtatactattcattctgtatgcagagtaatttatatatgta

SEQ ID NO: 859405 - DNA, 120 bp, Artificial Sequence
  ENSG00000273033_5 (sequence is synthesized)
tcattctgtatgcagagtaatttatatatgtacaattacatggcagtgaaagataatcagaaaaatgaagttttttttttttttttgagatagttttgagacagagtcttgctctgtttc

SEQ ID NO: 859406 - DNA, 120 bp, Artificial Sequence
  ENSG00000273033_6 (sequence is synthesized)
aactcctggcctcaagcgatcctcctgccggcttcccaaagtaccgggattccaggcatgagccaccatgcccagtcagaaggtttttttttaaaaaacacactcctgaactaacaatta

SEQ ID NO: 859407 - DNA, 120 bp, Artificial Sequence
  ENSG00000273033_7 (sequence is synthesized)
aaaaaacacactcctgaactaacaattacaaagagctagtgacaatttcccaaataattatgcataacaggagcccatatattgttctcaaatcataaaccataactgattttgaggaaa

SEQ ID NO: 859408 - DNA, 120 bp, Artificial Sequence
  ENSG00000273033_8 (sequence is synthesized)
agacattctgtcccactgatattcttttcatgagtaagatctggatctgtctggaggcacagaattaatttttgcatgaggaatcccaaccctaccatcattccatggctgaggaattgg

SEQ ID NO: 859409 - DNA, 120 bp, Artificial Sequence
  ENSG00000273033_9 (sequence is synthesized)
ttattactcctatgggaaattgggaatgttgttggtaccccagccttctcttaagacaaaatttaacaaatgcatacatgctaagatgcttatactcataaggctttgtgggtctccttt

SEQ ID NO: 859410 - DNA, 120 bp, Artificial Sequence
  ENSG00000273033_10 (sequence is synthesized)
ctaaggggaatttgaatactaacaagaacaaaggctaaataccaaaagggggctttctaatggtagaatttgggatatcaggtagccacatagagcagggctactttgggggctggagac

SEQ ID NO: 859411 - DNA, 120 bp, Artificial Sequence
  ENSG00000273033_11 (sequence is synthesized)
tgcagaaacccttcagtttatacgtgtgagtaaacctaatcacacttgatgtattgctagtgaagtcccagccccctgagcctttgcagaaacccaaagaatgctaaaaagggcaggttt

SEQ ID NO: 859412 - DNA, 120 bp, Artificial Sequence
  ENSG00000273033_12 (sequence is synthesized)
tagttcctgccaattatttcatttactacaaatgccccgagttccgaatttacttccctccccaccagaaatatgtcattttggaggcttgtgaaaattaagcattaagaaaatcccgcc

SEQ ID NO: 859413 - DNA, 120 bp, Artificial Sequence
  ENSG00000273033_13 (sequence is synthesized)
tccatcctaatacactgcatccacaagtcccaaacaaaatcacttccttggcctacacacataactacctgtttctgtttaggtctgtgactcagaaagtgcctggaagaagtcatgaga

SEQ ID NO: 859414 - DNA, 120 bp, Artificial Sequence
  ENSG00000273033_14 (sequence is synthesized)
gggagtcgatcccatcttacctgccataggaagaatagggcctgctcagtagagttcagtgtgtgtgttgaaggtggtggttcttagtccttccctgaattcactaattcgcattgcact

SEQ ID NO: 859415 - DNA, 120 bp, Artificial Sequence
  ENSG00000273033_15 (sequence is synthesized)
cactcttcctgatcaatgagttattgctgagaaatcattgtagtaagtaatacaggtatccccagtaaagccatccctctcctccatacctccgctgtcccttgggttttggctccagga

SEQ ID NO: 859416 - DNA, 120 bp, Artificial Sequence
  ENSG00000273033_16 (sequence is synthesized)
tccttgccccatgtcccaaagaatccctaccttgggcctccctcctcctcttttgtcaattgcacttgaccttttcaggaaaaagaaatcaattgataccttagtcctaatgtttgaccc

SEQ ID NO: 859417 - DNA, 120 bp, Artificial Sequence
  ENSG00000273033_17 (sequence is synthesized)
ttttctatctcagaatagagaagtccctgtatttgttctttttttactcaagtttaatatagaccacctaggcacagaagctccgtgctatattctgttgcctgtaattgtccttccatc

SEQ ID NO: 859418 - DNA, 120 bp, Artificial Sequence
  ENSG00000273033_18 (sequence is synthesized)
taattgggaaaaggttactctattgaaccatctgctgattcccttaccttttcactcttttgtcagtattcctttaccagtaaattcttggttatctaggtcctgaagtttcattcatgt

SEQ ID NO: 859419 - DNA, 120 bp, Artificial Sequence
  ENSG00000273033_19 (sequence is synthesized)
tttttttaaaagctttaatttttcttaggaaaactgtttctctcatcttaaagcagactatgatcttttctactttgttatacaatctgaacataatgaacactctaaagtcaggcatgg

SEQ ID NO: 859420 - DNA, 120 bp, Artificial Sequence
  ENSG00000273033_20 (sequence is synthesized)
attttatcataaaagcagatcgtattaagatttttttaaaaaagaaccaggattgaggaatctgtagctaataatttaataattcaccagcatgttttgggctcccacttcatgctggcc

SEQ ID NO: 859421 - DNA, 120 bp, Artificial Sequence
  ENSG00000273033_21 (sequence is synthesized)
ttcataaaacctaactcaaagccagcaacacccccaaaagggctgttggaagctttgtagctcatctgtacagctgtcttgattcctgtacgggatcttactttcttgggaaaatatgtt

SEQ ID NO: 859422 - DNA, 120 bp, Artificial Sequence
  ENSG00000273033_22 (sequence is synthesized)
ctaaatcctgtttccttgggccattaaaaatccatgctgtccctaatcaatatatagttatgtgtgaccttcttagaattaaaaaaatgccgctggacagcctttgaagggaaaggcaga

SEQ ID NO: 859423 - DNA, 120 bp, Artificial Sequence
  ENSG00000273033_23 (sequence is synthesized)
gaaatctgttttgatggcttgaaaataagtgaaaaggtttttagggaaagctaacaagctttcaaagatttcagatctgccagcattcattcattaaggcatgggattaggccaaaagag

SEQ ID NO: 859424 - DNA, 120 bp, Artificial Sequence
  ENSG00000273033_24 (sequence is synthesized)
cctcctaccaagggagagacaggaaccatgtaaggagatctgtgagaccgcagtggaagagtattgaaatagaagccagacctgtagacgtatttgttaatatgtgtgccaagccaaagt

SEQ ID NO: 859425 - DNA, 120 bp, Artificial Sequence
  ENSG00000273033_25 (sequence is synthesized)
acaggaggaggcttggaggcatggagttgtggtggaagcaggttctgaaaagcagaactctgaagctggctcattctcacgaagtcatctggcccagcctcccgcctccaagcacatcct

SEQ ID NO: 859426 - DNA, 120 bp, Artificial Sequence
  ENSG00000273033_26 (sequence is synthesized)
gcctgcagagggtctggctagctgccttttcagctctcgagggatagagattctacaacctccctctgtcatcagttccagagccactcccctttgcactagaagttcttgctttcaaag

SEQ ID NO: 859427 - DNA, 120 bp, Artificial Sequence
  ENSG00000273033_27 (sequence is synthesized)
aatgagggtgtgagggagggaggggtcaagaaacagagtgacaggggaaacaggcagaacaagtcagggcaaaggaccccagcatgaagagttgtggaggtggaggtggggaagcagcct

SEQ ID NO: 859428 - DNA, 120 bp, Artificial Sequence
  ENSG00000273033_28 (sequence is synthesized)
cacatctcacacttccttccttctcttaaatgtgagcagctgactccaagccttgtggaaactctagaaggtagaaccagccatctggggaagctggccttacagatgccccgtctggca

SEQ ID NO: 859429 - DNA, 120 bp, Artificial Sequence
  ENSG00000273033_29 (sequence is synthesized)
tagtggaggttcctgtgctctgagaacgcagtgtgaatctagacatccactgcagcctgggaagagctgtgttttcttcaaaagtctttaactttcacagtcacccctctaaagaaatgt

SEQ ID NO: 859430 - DNA, 120 bp, Artificial Sequence
  ENSG00000273033_30 (sequence is synthesized)
tctctgattgaaggcatgcttctattcctactttattgtgtttcatgcattctgccagagtaattacttttcataccaattcttggatgcagagaaatctctggtagtctaaggggattt

SEQ ID NO: 859431 - DNA, 120 bp, Artificial Sequence
  ENSG00000273033_31 (sequence is synthesized)
cgatccaagtaaagctactatctcctattccatccagacttttccgtctgcctccattctctcagtcacatacctagaagcaagccagaaagcctgtccaaccaaaatcactctccaaag

SEQ ID NO: 859432 - DNA, 120 bp, Artificial Sequence
  ENSG00000273033_32 (sequence is synthesized)
cccaagcactttattgttctccctgtctgttatcgagccaaggtgtatttggcctcattttatgccattagttgtctggctttcatggctctgcaccacattacagtcagagcaggaagg

SEQ ID NO: 859433 - DNA, 120 bp, Artificial Sequence
  ENSG00000273033_33 (sequence is synthesized)
ccagcagtggagatagaattatggcagaaacccagagtagaggcctctgctggtgagggagcctgcagcactctccacgctggtgggtcctagcatgcccaacagacccccatcccttcc

SEQ ID NO: 859434 - DNA, 120 bp, Artificial Sequence
  ENSG00000273033_34 (sequence is synthesized)
catcagccttgggccttgagtctcattccaactcatcccctcccctttcccttctttccagtcccaggtgacacttgatgcctctgactcctttgaagagggcatcaagaagtgaaagaa

SEQ ID NO: 859435 - DNA, 120 bp, Artificial Sequence
  ENSG00000273033_35 (sequence is synthesized)
caaagtccttttctgttcgggatctgggcccatcctgggagaggtttttggcagaaatggctgcagtggaaccctctgactgccagggtgaaatagtgctccagcaggctgcggtagact

SEQ ID NO: 859436 - DNA, 120 bp, Artificial Sequence
  ENSG00000273033_36 (sequence is synthesized)
cactgccagagtgggtcaggactggcccagaggacagggtcgtctcttgagagtcctcccagctccagggcctgattttaaagcagtaacacgaggatataggttatatacaggctcctg

SEQ ID NO: 859437 - DNA, 120 bp, Artificial Sequence
  ENSG00000273033_37 (sequence is synthesized)
gaaggcaggtgccgcagctcctgtgacaccccatatgcctgagcaagcttctccagcacaagagatgatgcaagtatgaatgggtacggggggagcttaaaacctgccaacactgagact

SEQ ID NO: 859438 - DNA, 120 bp, Artificial Sequence
  ENSG00000273033_38 (sequence is synthesized)
tgatgccaggggccgtgcacccgctctgccacctgctaggtctgtgcaatggtcagagcagaggtgtgtgatgagttcagctcccaagcacatccacacttaggaagtgttctgtgtgtt

SEQ ID NO: 859439 - DNA, 120 bp, Artificial Sequence
  ENSG00000273033_39 (sequence is synthesized)
tttaaataatccttaccatgtaaagattgtattacatttgtatacaaaatttttttgcattttacttttgtaatatttggggttttatagatttttattttatggccaagtatacttttg

SEQ ID NO: 859440 - DNA, 120 bp, Artificial Sequence
  ENSG00000273033_40 (sequence is synthesized)
taaggaaatgttgaagtcttgagtatttttattcttttaaaaaactatagttagtgtcaactgtgagcactgataaatattattcatgtgtggttttccttctttttaatccagactttt

SEQ ID NO: 859441 - DNA, 120 bp, Artificial Sequence
  ENSG00000273033_41 (sequence is synthesized)
taagaaactgttttggcatagagctttacttaaaatgctgcttcattttacacattgtgaatactgaagattctaaaaaataaagatgcatttaaaatctctgtgctgttccattgtaga

SEQ ID NO: 859442 - DNA, 120 bp, Artificial Sequence
  ENSG00000273033_42 (sequence is synthesized)
aatggtaatgtgcattgctttgccaaagtggtaattaaatgtttaatggtttagaactcctagttcacaacagggcttctcgtcatcacttgcagcgtgtgagcttccaaataagccgcc

SEQ ID NO: 859443 - DNA, 120 bp, Artificial Sequence
  ENSG00000273033_43 (sequence is synthesized)
atttctttggaaaacgcacgcacttaggcatggcgatctcctgttccgttaggaaatacggttatgttgacattatggttactgtgcttgtggttttgcaataaacatgtattgaaagca

SEQ ID NO: 859444 - DNA, 120 bp, Artificial Sequence
  ENSG00000273032_0 (sequence is synthesized)
caccattgcgctagagcccgggcgacagagcaagacttggtctcaaaaaataaataaaataaaataagtacaataaaataacaaaacaaaacaaagtaagaggagatgatatctggtcgt

SEQ ID NO: 859445 - DNA, 120 bp, Artificial Sequence
  ENSG00000273032_1 (sequence is synthesized)
gttttatggccatctggtttacagatctgggactgaaacccgcacaaggataaatggctgcctcaaggctatcttcaggcccattctgaaagaaaaaggaagttctcgtcgcagaaagaa

SEQ ID NO: 859446 - DNA, 120 bp, Artificial Sequence
  ENSG00000273032_2 (sequence is synthesized)
gaagagtaaatatgaagaccaagagcagtgatgaccttttagctggaatggccagaggggtaacggtgactaatggtgttaaagggaaggaaagctcctgcccatctgcagcaccttcgg

SEQ ID NO: 859447 - DNA, 120 bp, Artificial Sequence
  ENSG00000273032_3 (sequence is synthesized)
catctgcccctgccatgaccactgtggagaacaaatccaagattagcacaggaaattgtagacatacaaaagtagatggattgatatttcagcccaatacgctcatcacgctcatcacca

SEQ ID NO: 859448 - DNA, 120 bp, Artificial Sequence
  ENSG00000273032_4 (sequence is synthesized)
ttatcagctcacagccagttgtaactctgtgatacccaccctcccctcttattattttgaagcagattctggacatcatatcatttcatccataaatattttattatcttggaaagagaa

SEQ ID NO: 859449 - DNA, 120 bp, Artificial Sequence
  ENSG00000273032_5 (sequence is synthesized)
ggtccccgaccctccattgcagccagctctctctggaactaacagaaaggccccctggtaaggccagccagccggaggaccaccccgcagaccacacgcccagggcctggcaccgagggg

SEQ ID NO: 859450 - DNA, 120 bp, Artificial Sequence
  ENSG00000273032_6 (sequence is synthesized)
gaggccccgatcagcaggtgaaagcgacaccctgatgacactggctagttcaccttcactctggtcatcgtttactgtaccccggggcagctcccgcctgagccctatgaccccaaccgc

SEQ ID NO: 859451 - DNA, 120 bp, Artificial Sequence
  ENSG00000273032_7 (sequence is synthesized)
cgcagcctctggctgcctcactggcccatcattaatacgtcgatggtgagcgcactggtgtacagcgagggggctccacttccgagacccctggagaggcccgtcctggtggagttcacc

SEQ ID NO: 859452 - DNA, 120 bp, Artificial Sequence
  ENSG00000273032_8 (sequence is synthesized)
ctgctggagatggagaagcgaaccaagcctgtctgtgtgttctggaaccattccctggcgtaaatgtgatgccgggagttctgcatcttcatgtttacagatctgggactgaaacccgca

SEQ ID NO: 859453 - DNA, 120 bp, Artificial Sequence
  ENSG00000273032_9 (sequence is synthesized)
taaaagccacccacactggaaaagaggacatcaaattatccttgtctgatgaagatgtgatcttggatttacaaacatgtaaagcctccaccagaaaactctagacttgataaataaatt

SEQ ID NO: 859454 - DNA, 120 bp, Artificial Sequence
  ENSG00000273032_10 (sequence is synthesized)
aatcaacatacaaaaatcagcagcattttatacaccaataatggtctaggaaagaaattaaggaggcaatcccatttacaatagcaacaaaatgaaaaatgatatgccacagaggaaatt

SEQ ID NO: 859455 - DNA, 120 bp, Artificial Sequence
  ENSG00000273032_11 (sequence is synthesized)
aaatgatatgccacagaggaaattttaccaaggaggtgaacgatttctacaaggaaaactacaaaacactgatgacaaagtttaagaggacggaaagaaatggacagtcatttcatgctc

SEQ ID NO: 859456 - DNA, 120 bp, Artificial Sequence
  ENSG00000273032_12 (sequence is synthesized)
atggaaggaattcatagcattaaaatgaccacactgcccagagcagtctagagattcaatacaacccctaccaaaataccagtgtcatctctcacagaactggaaaatcgtaaaactcat

SEQ ID NO: 859457 - DNA, 120 bp, Artificial Sequence
  ENSG00000273032_13 (sequence is synthesized)
atgaaaccaaaaaagagctcaaagagccaaagtcatcctcagcaaaaacaacaaaactagaagcaccccatttcactgcaaattagaatgacaaaatttttgacaagtgcatggtaacca

SEQ ID NO: 859458 - DNA, 120 bp, Artificial Sequence
  ENSG00000273032_14 (sequence is synthesized)
aaacagcatggtcctagcataaaactagacacatagatcaatgggacggatgacagagcccagaaagacagccacatagtcttggggcttgtgtctctcctgctgtgcatccatgctggg

SEQ ID NO: 859459 - DNA, 77 bp, Artificial Sequence
  ENSG00000273032_15 (sequence is synthesized)
agatggccttggcctcaccccgcagtgcgcttttgcaccagagtgccaccttcttctccaggtccaggtcttcagca

SEQ ID NO: 859460 - DNA, 120 bp, Artificial Sequence
  ENSG00000273032_16 (sequence is synthesized)
ccagagtgccaccttcttctccaggtccaggtcttcagcagtgaccccagaccccagctgtaagggaggtggcagcatcagaggctccccttgcctgagtggcagcagaggaaacttgca

SEQ ID NO: 859461 - DNA, 120 bp, Artificial Sequence
  ENSG00000273032_17 (sequence is synthesized)
tggggcctagaggcctgggatgtgggggagccattcctgggggcaagtgtctgccctggtgctgcatctgctgccttttcacactgggtgagaccccaagagacagcctgaggccggtcc

SEQ ID NO: 859462 - DNA, 120 bp, Artificial Sequence
  ENSG00000273032_18 (sequence is synthesized)
tcactcactgtctttgaggacctgaggggcagctgacagtgggatgaggctggccccctcctctttggtgacaggaagcctcccatggaactgtaggagctcacgatggcattttgtttg

SEQ ID NO: 859463 - DNA, 120 bp, Artificial Sequence
  ENSG00000273032_19 (sequence is synthesized)
gtgcacgaactcatccaggaggtctgggatctctggttttatccgacttctgacctctgggcatggaggtctctctgcagaggcccaggcctgggcacgaagggagagaggcctccattg

SEQ ID NO: 859464 - DNA, 120 bp, Artificial Sequence
  ENSG00000273032_20 (sequence is synthesized)
agggagagaggcctccattgtcccacaggggcctaaatgcagactgtgcatccccggtgccctcaggaacccttctctgatcatcaggattctcttggactctggggtccttgtcctgct

SEQ ID NO: 859465 - DNA, 120 bp, Artificial Sequence
  ENSG00000273032_21 (sequence is synthesized)
ttcaggagggccctcaacacgatcttctctggacaggagtctggggcacaactggatgttgtgggccccaaaggggtgactccctgctcctgggccccacagagagtccttgtgctcagt

SEQ ID NO: 859466 - DNA, 120 bp, Artificial Sequence
  ENSG00000273032_22 (sequence is synthesized)
gcactggctgagctgcaagacatcctggaattgggagcacacagcaccggcttgctgtggtacctgtgcattcaaattgaaggcaggatcgccagcaaggaacacagggcttgcaggatc

SEQ ID NO: 859467 - DNA, 120 bp, Artificial Sequence
  ENSG00000273032_23 (sequence is synthesized)
acagaaaacccttggagttgttttgacacaccactgatgccaagtgtctgggtacttgtaggatggccctgccattccatccaggggcagtggcaacagggagattccacaaacaaagtg

SEQ ID NO: 859468 - DNA, 120 bp, Artificial Sequence
  ENSG00000273032_24 (sequence is synthesized)
aactgggggatgggatgagcaggctccaggcaactgagccctactggcaggcccttggcccccggggccgggacaggggtgacagacacagagtgcccaggtaaccactcctgggagcag

SEQ ID NO: 859469 - DNA, 120 bp, Artificial Sequence
  ENSG00000273032_25 (sequence is synthesized)
tggggaaccgtcggatgcttcaactcttgagagctgggctctaagcatccgccttagctgccaacttggccaaaggctatgcgagcagtttcccgttgacgggcaatgcatctttccaac

SEQ ID NO: 859470 - DNA, 120 bp, Artificial Sequence
  ENSG00000273032_26 (sequence is synthesized)
ctgagcgagtgggtgtgtgtgcaaagatggtgcgagtcacggatctgcgcaggaagggtgactttaagggattagcatggccaggtatgcacacaaggcacctgctggcaatgccttggt

SEQ ID NO: 859471 - DNA, 120 bp, Artificial Sequence
  ENSG00000273032_27 (sequence is synthesized)
ggggagcgggcagtgcacacaagaggtactggagggagaggcgcgcgggaagaacaggcgcgcacaatggctgcagatccacctgtggatcgctgaagattcctgctgagggttgaggct

SEQ ID NO: 859472 - DNA, 120 bp, Artificial Sequence
  ENSG00000273032_28 (sequence is synthesized)
gctgggctggaggactgtatggtccatgcattgtaatgtccccttctctccctggcccggagccccaagagctatccggactctctccaagacctggttctggcccagcaaagaggtctc

SEQ ID NO: 859473 - DNA, 120 bp, Artificial Sequence
  ENSG00000273032_29 (sequence is synthesized)
ggcaggggagcaggattcccggcccagcagctggctcaggaggtgacagctttgggattcgcatctgagcatcctcctactcttctcctgggaactctgttggggagggttgctcagaac

SEQ ID NO: 859474 - DNA, 120 bp, Artificial Sequence
  ENSG00000273032_30 (sequence is synthesized)
agaagtgcctgggacgcccagatcctgctggagtggcagctggggtgatggccagggcaggctgggagggacatactttccataggacccagtgctttcatctccgtgcaactgaccaag

SEQ ID NO: 859475 - DNA, 120 bp, Artificial Sequence
  ENSG00000273032_31 (sequence is synthesized)
agaaaccaaacccaaactccttcctttacacagacctatttgagggaggctgggtattgtttgtgtatttcaacctaacaagattttgagatagttggaatgcagaaggagacaggagga

SEQ ID NO: 859476 - DNA, 120 bp, Artificial Sequence
  ENSG00000273032_32 (sequence is synthesized)
ctcaagtgtcctgtcttttgcaaaaatgtcaaacgtagctactcagtctcttttttgtttttttgtttgttttgaagactatggttattttgcaaaatatatattatttgagtttctcta

SEQ ID NO: 859477 - DNA, 120 bp, Artificial Sequence
  ENSG00000273032_33 (sequence is synthesized)
cggggctgggccggagcggcggcgcctggatgccggcccggggctgggccggagactggcgcccgccccgaagcgactttcggtccccgacccgctccgcctgacccctatgatgaagag

SEQ ID NO: 859478 - DNA, 120 bp, Artificial Sequence
  ENSG00000273032_34 (sequence is synthesized)
ggcgtccactggagttcttgctgtcgacatctttgacaagttcaacttcacgggagccagagtcccatggttcgacgccattcatgaagaattccccagggagctggagtcctccatctc

SEQ ID NO: 859479 - DNA, 120 bp, Artificial Sequence
  ENSG00000273032_35 (sequence is synthesized)
aaatccaagattagcacagggcaccaactggacagaggcctccggtcagcctcactctgactgcaaccccctctcactggacagcatcacctggacacagagcctcacctagtctgtgtc

SEQ ID NO: 859480 - DNA, 120 bp, Artificial Sequence
  ENSG00000273032_36 (sequence is synthesized)
ccatggacacaactttgctttggacagtgacaccaagaatactcacccctttacttagccagaccacaggcagccacctggacacaaacatctctccagagtcagcctccacacagactc

SEQ ID NO: 859481 - DNA, 120 bp, Artificial Sequence
  ENSG00000273032_37 (sequence is synthesized)
cacagcagaactcccagggaggcactggggcatggcttcagagcaccaggcagcgctccgcggtgcctagcacccgctcagccagggcagcctgcagcggagcttggagccagcagcttc

SEQ ID NO: 859482 - DNA, 120 bp, Artificial Sequence
  ENSG00000273032_38 (sequence is synthesized)
tcatctcttggcctcgggaaatgtagctggagtcatcatttagcagagcacggtgtccctgggttggccacccagcttagttttaaaataaaataatgtaatcttggcctaatggtggaa

SEQ ID NO: 859483 - DNA, 120 bp, Artificial Sequence
  ENSG00000273038_0 (sequence is synthesized)
tagtatttatgcattgttttatgaacataaaacaagcgaaactgagtatgttgaatgaaaatttagaattgaaacatcccattcctgatgaatatgaattactaaagttttagtctaaaa

SEQ ID NO: 859484 - DNA, 120 bp, Artificial Sequence
  ENSG00000273038_1 (sequence is synthesized)
tgactagatgatataatgatatatagcttgagaactgataatagcaagtaaatgaaagtcaatttattcagagaattgaatgggaaactaaaaccatttaagccttttctataaaaaacc

SEQ ID NO: 859485 - DNA, 120 bp, Artificial Sequence
  ENSG00000273038_2 (sequence is synthesized)
atcagctttatgaatcaccaaattaaagaataaatatactaagataaaagtttccccattatattacagagaaaaccatgttctgagctatggacttttatacctggatgtctaatctga

SEQ ID NO: 859486 - DNA, 120 bp, Artificial Sequence
  ENSG00000273038_3 (sequence is synthesized)
ggccatcaaaagaactcactcatagatcagtttgcctcatttcatggtctgccttggattcccccacacccactgatccaaagtctgtggaatagggaggcaccttccagcaaagaaggc

SEQ ID NO: 859487 - DNA, 120 bp, Artificial Sequence
  ENSG00000273038_4 (sequence is synthesized)
agacatgaaagtgtacattgtgatctctctgttacgaagttgaagaactggccaaactgatgtatgttaataggaatcaaaacaggggctgcgtgtggaggggtggacgatgttatttga

SEQ ID NO: 859488 - DNA, 120 bp, Artificial Sequence
  ENSG00000273038_5 (sequence is synthesized)
aaagttacaggacagattttctgtgttaatggacatgagccatacattgagagggctgctggctactgaaagaaatataaaattttaaaatttctgaaatcatgcagttaacatctgcac

SEQ ID NO: 859489 - DNA, 120 bp, Artificial Sequence
  ENSG00000273038_6 (sequence is synthesized)
acttcactatattttaagtttttgttaatataaaagaataagaaaacagaaaagtattactgttaaacaataatagagaaatgtatactttatttacaaatttctccctctagctgatca

SEQ ID NO: 859490 - DNA, 120 bp, Artificial Sequence
  ENSG00000273038_7 (sequence is synthesized)
tacagttgaccagttcagggtgcccgctgctggttggatgccaggcggaatgtcagggtgttctctggtgtctgttgtggctgtgggatccacggttactgggcggagccctgtggtggc

SEQ ID NO: 859491 - DNA, 120 bp, Artificial Sequence
  ENSG00000273038_8 (sequence is synthesized)
gctgcgatcttctgtggagctggaccctgagctgactccagggaagctggatgaggagatggtggggctgccaccccatgacgcgagtcctcaagtcactttccacagcctcgatgggaa

SEQ ID NO: 859492 - DNA, 120 bp, Artificial Sequence
  ENSG00000273038_9 (sequence is synthesized)
gacagtggtgtgtccacacttcatgggcttactgctgggtctcttacttttattgactttgtctgttaggaaccaactctgtgtaagaggtgaaaggcagcttgcagaaacactgcattc

SEQ ID NO: 859493 - DNA, 120 bp, Artificial Sequence
  ENSG00000273038_10 (sequence is synthesized)
acaggtgaaggagaaatcccagctcattggcaagaaaacagattgtagagactgaggcatctttaaaagatgtcagggtacagaaaaagtctttcaacacccccggctttgtagatgcct

SEQ ID NO: 859494 - DNA, 120 bp, Artificial Sequence
  ENSG00000273038_11 (sequence is synthesized)
acaagaaggtgaatagcaccaacgagatgctgatggagaaatttaccaccctcgttcaagaactgaaagaagagacatcctccagactctccaggcaacaagaggagctggtagagatgc

SEQ ID NO: 859495 - DNA, 120 bp, Artificial Sequence
  ENSG00000273038_12 (sequence is synthesized)
taacaacgctggaggccctgggagaggccatgagagccaccccgtcacaaggagcttttccacacctgccatgcagctgagagccaagccctgctgctctctcccccacgagggggctgg

SEQ ID NO: 859496 - DNA, 120 bp, Artificial Sequence
  ENSG00000273038_13 (sequence is synthesized)
gtcttagagcagcactgttcttttcccctccacccaggcctcccgagctgccaggctctgtgctcccacactgactccatctgaggggtccttgaggccagtggatctggagtaccccgc

SEQ ID NO: 859497 - DNA, 120 bp, Artificial Sequence
  ENSG00000273038_14 (sequence is synthesized)
ccctggcctggagttcctcctccttctcacgctgacactgcagccagctcctcaatgggcggtgcctccaaatctaaagaatatggaggtcctggagcacaccaagaaatgagggacttt

SEQ ID NO: 859498 - DNA, 120 bp, Artificial Sequence
  ENSG00000273038_15 (sequence is synthesized)
ttctttgcagaaagtttgaattctgtcttaatgagacagaatgccatacttgagcacctcatcttttgctcaaattgaaatgtcatcgaactgtatttctcaagtcaatggtctgtaaat

SEQ ID NO: 859499 - DNA, 120 bp, Artificial Sequence
  ENSG00000273038_16 (sequence is synthesized)
atcgaactgtatttctcaagtcaatggtctgtaaatatgatttatgtattaatctcctaagtgaacaatttatattttatcctctacataattatcgtattatgctttaaatatatattt

SEQ ID NO: 859500 - DNA, 120 bp, Artificial Sequence
  ENSG00000285578_0 (sequence is synthesized)
tacctctcctctcatactgggctctccgtgtagcatgtgttttctcctgggaccctgaagcacacatccattctactcatgtaaaacagacagctgcataagagaaaataatatattcac

SEQ ID NO: 859501 - DNA, 120 bp, Artificial Sequence
  ENSG00000285578_1 (sequence is synthesized)
gtgtacagctgttggcaagaagtcttcagagatggagaaaccgatgaagaatcttgctgcaagatcccaacctatgccaagggccactgcgagaagccagcatggacacgaaattcacac

SEQ ID NO: 859502 - DNA, 120 bp, Artificial Sequence
  ENSG00000285578_2 (sequence is synthesized)
ccagggcagctcctgtgtcttctgagccttctcatgagggctgcaagcacagtggtctggtactgcctgcctgtaatgttttcttttagaatagaccctgtgtgtagatgaaagagcatt

SEQ ID NO: 859503 - DNA, 120 bp, Artificial Sequence
  ENSG00000285578_3 (sequence is synthesized)
cgacatcattactacgtgggatgctgagaaccaggtgttttcttctctgggcataagctcctgaggctcccgaaagtctcatcctcctgggccgaggatgctgaagggagcagtgggatg

SEQ ID NO: 859504 - DNA, 120 bp, Artificial Sequence
  ENSG00000285578_4 (sequence is synthesized)
gaaggcgggcccagaaagcacacgggcaggcagaatctgctctgcccagctccagtgtcttgtctttactgtgctcaccgtatgttttcagaaagacaggccaagaacaaaagtgggagc

SEQ ID NO: 859505 - DNA, 120 bp, Artificial Sequence
  ENSG00000285578_5 (sequence is synthesized)
cacctaaatgtccaaccatgatggtccatgaacacagtggaatgtgcaagataattgtgaaaattgtgcggaagtatggggaactgcttaggatacacagttaagtgaataaagcagcat

SEQ ID NO: 859506 - DNA, 120 bp, Artificial Sequence
  ENSG00000285578_6 (sequence is synthesized)
gttaagtgttatatatgccatggttacaattccaaaaatatgtatgtacataggcaaattctggaagaataaaaccagaagaaaatgttgtattaaagtgatagcatcatggatgtatat

SEQ ID NO: 859507 - DNA, 120 bp, Artificial Sequence
  ENSG00000285578_7 (sequence is synthesized)
agatagcctttgatgtctttgttggaagaggccatccttgcaccctgtcccttgctgagcatgccacaactgcaaggccctgagtgtcccttagctggcccatttctcaggtccagctga

SEQ ID NO: 859508 - DNA, 120 bp, Artificial Sequence
  ENSG00000285578_8 (sequence is synthesized)
taactctgagaggtgaggtaacattgacccctccccatgatcctccaggcaaacagcaggctggcttctggcttgctgtaagcacagcgccttctccaagctccacgcttcacgctgcac

SEQ ID NO: 859509 - DNA, 120 bp, Artificial Sequence
  ENSG00000285578_9 (sequence is synthesized)
acacggcattcatctgagcctgctgtgtcacctgtgagggaactgggactgaggggaactgacacagaagtgcggctggacataacatccaggaaacagtagcaggttgactgaatagct

SEQ ID NO: 859510 - DNA, 120 bp, Artificial Sequence
  ENSG00000285578_10 (sequence is synthesized)
atgacagtcttaataaggttgcgataccaatttgaaattacagttgactcttaaacaccggtttgaactgcgagggtccacttagagatggatttttttttccaaaaaatacagtccgtg

SEQ ID NO: 859511 - DNA, 120 bp, Artificial Sequence
  ENSG00000285578_11 (sequence is synthesized)
ggttttgtatccacaaccaaacacagatagaaaatatagtattctcaggatttaaatctgcccgtacggaagcctggcttttcataaccttcggtccccaggactcactatgggacttga

SEQ ID NO: 859512 - DNA, 120 bp, Artificial Sequence
  ENSG00000285578_12 (sequence is synthesized)
gtatgtgcagattttcatgtcttacccatggccctggaagcaatttcctacagattcccagggatgactgtatttgcctaatgtttctttcccagcagactcatgtctgtcttgtgcact

SEQ ID NO: 859513 - DNA, 120 bp, Artificial Sequence
  ENSG00000285578_13 (sequence is synthesized)
gctgtgttcctggcaccatgggggagcgtggtgcagagcaagtttcctcagatggccctttgtggatggactacaggagcagagatgtgcaagaagcaagtttcagaaggaattcaaacc

SEQ ID NO: 859514 - DNA, 120 bp, Artificial Sequence
  ENSG00000285578_14 (sequence is synthesized)
aaaatgtagagtttgaaggcaacagtgacctttgcaatcatacctccctgttattcagtaacaaagccaccaccatgtatcaagcacccacaggccacacctgtcttctggacgattttc

SEQ ID NO: 859515 - DNA, 120 bp, Artificial Sequence
  ENSG00000285578_15 (sequence is synthesized)
ggggcatcatatttcaatgttctgtccatttccaggcacaaagtgctttcactcacattcggtccttgctgcaactgcaagccactgaagacaggtgtgtctgatcccaacgtggagccc

SEQ ID NO: 859516 - DNA, 120 bp, Artificial Sequence
  ENSG00000285578_16 (sequence is synthesized)
acagtaacagcaagcagcgactgttgcttgtgcaggaggccctgtgtgccacatgttgctcttcactactgatcagggctgtttacgtgggtcccatcacagctgctctgtgactaggga

SEQ ID NO: 859517 - DNA, 120 bp, Artificial Sequence
  ENSG00000285578_17 (sequence is synthesized)
acttgacgtctccatttttcaactgaaaacacagaagtacaaaggggttcaccaccttgtccacggttgccctgcttctaactggtcatgttggaataaaaacaagcaactgtcatccgg

SEQ ID NO: 859518 - DNA, 120 bp, Artificial Sequence
  ENSG00000285578_18 (sequence is synthesized)
gatattaaccacgcaggctgtggtgttgcaaagcaggggagcacggagcagggagcataccaccctgctgagatcagctcactcacaagtggcagggctagggctgcagtgcagctcact

SEQ ID NO: 859519 - DNA, 120 bp, Artificial Sequence
  ENSG00000285578_19 (sequence is synthesized)
tacgggcactgtgtaagcctgaaagcaaagtccacatccaaaggtcgtagtggccccaaaacagcttcctgacctgcttctgtggtcccagacctcttgctgctgaggtaccttagcttt

SEQ ID NO: 859520 - DNA, 120 bp, Artificial Sequence
  ENSG00000285577_0 (sequence is synthesized)
tcctttctagtgcttgtctcaaatctgtgagtttgcatttatctgtgagatgtttgagtgcatgtcagtctcccccaccagacaagacagggtctcactgtcactcgggctggagagcag

SEQ ID NO: 859521 - DNA, 120 bp, Artificial Sequence
  ENSG00000285577_1 (sequence is synthesized)
ggactcaagcgatcctcccacctcagccttcaagtagctgagattacaggcacacaccccacgaagcccagagaggcagatattgaggtgaaaaataatgagagcatgaagatggaaaat

SEQ ID NO: 859522 - DNA, 120 bp, Artificial Sequence
  ENSG00000285577_2 (sequence is synthesized)
gaggtgaaaaataatgagagcatgaagatggaaaataatcccaaaagagccagtgaaaggaagaggcaaagagcctgtgaatctaggaagcagaaagagcttggataaactggtgtcacg

SEQ ID NO: 859523 - DNA, 120 bp, Artificial Sequence
  ENSG00000285577_3 (sequence is synthesized)
cactgagtgtgggaaggaaacaagaaccaggcaaggtgcctaccaaccctgcacatcaccgtcatgtgtgctgaacactctcagctgactcaccctcacaacggcctctctgagtcatgc

SEQ ID NO: 859524 - DNA, 120 bp, Artificial Sequence
  ENSG00000285577_4 (sequence is synthesized)
ggtacccgctgtcacagtattcacaccggaaggcccccacagtattgacacagtgcccctccccacagacgtccggcctcaggcattcgtcaacatctacgaagagcagatagcattgtt

SEQ ID NO: 859525 - DNA, 120 bp, Artificial Sequence
  ENSG00000285577_5 (sequence is synthesized)
agcagatagcattgttgagttttgtgttccaaatactgtttcaaacctctcccatctcccagcttagctcaaatataataacgaagtaactgatttctttttttttttgagatggagttt

SEQ ID NO: 859526 - DNA, 120 bp, Artificial Sequence
  ENSG00000285577_6 (sequence is synthesized)
gtgtgggccatggcgcctggccagtaactgatttctactttccctttgatttgtttgacacacatcaaaatcatccagttttgattcatgcagggtggtccaaaagtaacatttaatgta

SEQ ID NO: 859527 - DNA, 120 bp, Artificial Sequence
  ENSG00000285577_7 (sequence is synthesized)
tcttgtctatgcacatatatgacactctttcttcaaaaatgttaggggaaaaaaatccatttttatatcacctgggatctagcagactgctgtcatgataattgtttaataaaaaattct

SEQ ID NO: 859528 - DNA, 120 bp, Artificial Sequence
  ENSG00000285577_8 (sequence is synthesized)
gggttgtctggataagcactgaactgatgatagtcttaggggatctaaaaactcagatctaagaatttgtaagcaggaagaatgctgccattacctatgcagttagtaccctcctcactg

SEQ ID NO: 859529 - DNA, 120 bp, Artificial Sequence
  ENSG00000285577_9 (sequence is synthesized)
gccataaatcctgctgggcaaatgcacaagaaacttccctcggtgttttcacagcggccctgggagcagaggtgttggacctgagtacactcatcaatatctgttaacaaaaatacatat

SEQ ID NO: 859530 - DNA, 120 bp, Artificial Sequence
  ENSG00000285577_10 (sequence is synthesized)
aaaaatattagttctgtgtagcaagaacttagtttccctgttctgtaaaataccatcatactattccctgggtaccacccaacctttataactgaggacaacagcaaaaggagacacgat

SEQ ID NO: 859531 - DNA, 120 bp, Artificial Sequence
  ENSG00000285577_11 (sequence is synthesized)
ctttctcctcgcgtacttgaaggattgttcctggaagagagaagcagcctactgtgtatcacttcaaaggctaaaactacaaaaccatgacactggtgtttcaaagaggcagatttcagg

SEQ ID NO: 859532 - DNA, 120 bp, Artificial Sequence
  ENSG00000285577_12 (sequence is synthesized)
tcaacacagaaggattctcctgataacgagagacatccaagcaatggaatttgctgtcagtagggagtcagaaatgccatgaaagagactcttcctccgtgcatgtggatggagttggat

SEQ ID NO: 859533 - DNA, 120 bp, Artificial Sequence
  ENSG00000285577_13 (sequence is synthesized)
taggtcatctctgttgcctttctaacttaatattctaggttctgaaagtgacacatataatgtatacaaatgacaaggaaatagccaaattatggaccaggtggctgtctcctttctccc

SEQ ID NO: 859534 - DNA, 120 bp, Artificial Sequence
  ENSG00000285573_0 (sequence is synthesized)
agtgggttttggccagcttctttaccatgacctgttttatcagcaaggtcttcatggcctatatcttgtgctgacctgctgtctcaccctgagacttagaatgcctaatctcctgggaac

SEQ ID NO: 859535 - DNA, 120 bp, Artificial Sequence
  ENSG00000285573_1 (sequence is synthesized)
gtagcccagtagatctcagccttattttacccagcccccacgcaagatgaaattattctggttcaaacacttctgacatcctgccaagaagcagacacatgcagggggtgaccatgcaag

SEQ ID NO: 859536 - DNA, 120 bp, Artificial Sequence
  ENSG00000285573_2 (sequence is synthesized)
ctcacagggaaaaaacatccatctgcaacccaggatccaaatttcaaaagaaaaaattctgcccacacattgatcttttaatctccataactagcagacaatttgtaaagcgcccccctg

SEQ ID NO: 859537 - DNA, 120 bp, Artificial Sequence
  ENSG00000285573_3 (sequence is synthesized)
aagcactttgttaacgcagctgaaacagactaaggcccccagattccctgaggtggaagtggactggtctgagatgtgtttggagattcttccttctggtggatgtgtggtctcactgac

SEQ ID NO: 859538 - DNA, 120 bp, Artificial Sequence
  ENSG00000285573_4 (sequence is synthesized)
tgcagatcttcgccgtgagtactacagctctcacagatggagcatccacagttgttcttcctggtgggttagtggtcttgctggcttcaggggagaagccagagaccttcttggtgagtg

SEQ ID NO: 859539 - DNA, 120 bp, Artificial Sequence
  ENSG00000285573_5 (sequence is synthesized)
ttacagctcatgaaggcggcacttccagagttattcctttctcctggtgggttcatggtctcactggcttcaagagtgaagctgcagactttcccgatgccaaggtcatctttctgtttg

SEQ ID NO: 859540 - DNA, 120 bp, Artificial Sequence
  ENSG00000285573_6 (sequence is synthesized)
tactacagatacgctgtaattgattttctgagcgaacctctgcatgttcctacgacattttgtgatcttccaagtgaacaacctgacagtgccaacatttatactgaagtaaaagaactc

SEQ ID NO: 859541 - DNA, 120 bp, Artificial Sequence
  ENSG00000285573_7 (sequence is synthesized)
ctgaaaattctcatataaatgtcagcaatattgtggaagtttgaccactttcatgagtccatacattggaaatcaaagtaataaggaaatatcttaactctattaaaatcattttttctc

SEQ ID NO: 859542 - DNA, 120 bp, Artificial Sequence
  ENSG00000285571_0 (sequence is synthesized)
agaattacttgaacctgggagacagaggttgccgtgagccaagatctcaccagtgcagtacagcgtgggtgacagagcaagtaagtaaagaggaggtttggaattagatatttggtgtat

SEQ ID NO: 859543 - DNA, 120 bp, Artificial Sequence
  ENSG00000285571_1 (sequence is synthesized)
gaatgaatgggctaaagtgcaaaagaacaggcagaataactgagctggtacagaggaaaaaaatcacacttaaaatctaaaagtatctgcttctcaatttgggctttcccacttagcagc

SEQ ID NO: 859544 - DNA, 120 bp, Artificial Sequence
  ENSG00000285571_2 (sequence is synthesized)
tttgacaccttagaaagaacacttaacttacctgagcttctattacttctaaaaagtgcataaagtgcaggctaagacatagtttttttggcaaaattcagtcagactacatcaagtaaa

SEQ ID NO: 859545 - DNA, 120 bp, Artificial Sequence
  ENSG00000285571_3 (sequence is synthesized)
ctccctaagtctcctagtataattcatggcacaaaaactggggaaaaaacagggaggatatgtttataagttcagtttgggttttttgttgagtgaatgtctccagtcatagagatgcaa

SEQ ID NO: 859546 - DNA, 120 bp, Artificial Sequence
  ENSG00000285571_4 (sequence is synthesized)
gacaccttggaaggctatttcttccttcattcattcagttggtcactcaatgaactatcatgaattgagcactacctctgtttcttatcaacaaaggagactacggaaaagaagagtgac

SEQ ID NO: 859547 - DNA, 120 bp, Artificial Sequence
  ENSG00000285571_5 (sequence is synthesized)
taagatctctgaagaagggaaaagctagatgactgggccacaagaggaaaaaaagcagcaagacagcttgaatgtgaggcaactgtgaaaagtgcagggcagagccacctgggtaaatac

SEQ ID NO: 859548 - DNA, 120 bp, Artificial Sequence
  ENSG00000285571_6 (sequence is synthesized)
agccctggctttctggtgagaggactgaaaccaggatgtgtcaagtaactagaatgtgcctggacagatactgtagaaagcaaacccataaagttgttcatgagcttgtggacgcacctg

SEQ ID NO: 859549 - DNA, 120 bp, Artificial Sequence
  ENSG00000285571_7 (sequence is synthesized)
ccagctgtgaataagtgggtctaatcccaaacaacttacctaaaaagagcctgaggactgaactaaacaatggtccactttccagtcctcactgaccactggttgcacacactccagaga

SEQ ID NO: 859550 - DNA, 120 bp, Artificial Sequence
  ENSG00000285571_8 (sequence is synthesized)
tctctcatccgcagtgtcaaggctttcaaatagagttatctgtgaaacaacaacacatggaagtctggttggtacttggagcttaaatacaaggcaattgtgtgcctgcaaaaacaaaaa

SEQ ID NO: 859551 - DNA, 120 bp, Artificial Sequence
  ENSG00000214851_0 (sequence is synthesized)
gccccggggctcaggggcagcccaggactctccctcgcccggctcacggccctgcctggggggcgcctccgggagcagatcacgagccctggggctcagccctcaggcgcgtctagctcg

SEQ ID NO: 859552 - DNA, 120 bp, Artificial Sequence
  ENSG00000214851_1 (sequence is synthesized)
gcggtcaccccagtgccgggaggaccctgaagacgcgccccaggcggccctactcagagcctcctcccaaggcccaggaatgcggcgctgtcggaggtgtgcgcggtggccacaccgctg

SEQ ID NO: 859553 - DNA, 120 bp, Artificial Sequence
  ENSG00000214851_2 (sequence is synthesized)
tccgggtccccaaagcgggccccgctcccacttctcgccttggccccgaaccctgggtccagccccagcgctttgtgtgcgaacaccgctccgccccggacccagctccgccttggggcc

SEQ ID NO: 859554 - DNA, 120 bp, Artificial Sequence
  ENSG00000214851_3 (sequence is synthesized)
cctctctgcctgcccctccgtgcccgactacactgcttcccctccggcgggcgactcagcccggtccatcgtggcggcttccagggcggcaggctccgggagtactcccggggccggctc

SEQ ID NO: 859555 - DNA, 120 bp, Artificial Sequence
  ENSG00000214851_4 (sequence is synthesized)
caaggactgttcccctcctccccactcccactccgcggcggcggcgggcgagagcggcgacatagggccagggtccggagcggtggaggctcctggccggggagcacgtcgccccacccg

SEQ ID NO: 859556 - DNA, 120 bp, Artificial Sequence
  ENSG00000214851_5 (sequence is synthesized)
gcaacgcgaggatggtggcggcgcagtcggctgctttggggtctcaaggcacaggggacgcgaggcacagatgtcccacagcagccactgcggctcccgcagctgctccgccgccgctgc

SEQ ID NO: 859557 - DNA, 120 bp, Artificial Sequence
  ENSG00000214851_6 (sequence is synthesized)
ccgcccctccctgctgcagctggcgtgatggcagcggcagctctggacgccccactgctgccaccatcagccttgtgaaatagcttgaaagatctagccacgtgagcaggacagaagtgc

SEQ ID NO: 859558 - DNA, 120 bp, Artificial Sequence
  ENSG00000214851_7 (sequence is synthesized)
acaacaaccatatcttgatttctgtggaccaggtggggcccctgccagccttgctagacagacccaggtgaacagtccttctaggggatctcatcaccaggcaagcacgtggtacgagaa

SEQ ID NO: 859559 - DNA, 120 bp, Artificial Sequence
  ENSG00000214851_8 (sequence is synthesized)
gagcagtcattaggaaggccatttggaaaagcacatcctctctgttcacgtgagatattttacatcctcattcctcatcgcaagcttcctgggatttggagtgtcacagacaagagggtt

SEQ ID NO: 859560 - DNA, 120 bp, Artificial Sequence
  ENSG00000214851_9 (sequence is synthesized)
gtatacttcagataaacattcttttccataaataagcttcatcatccagaagccatgttgaaagttggtaatcaaggataggaagtgtttccaagggttgtcagtgattaaatcaacctt

SEQ ID NO: 859561 - DNA, 120 bp, Artificial Sequence
  ENSG00000214851_10 (sequence is synthesized)
accttagcatacatgtatgagagaagttagataaattatacatagagagatagctagatagataatagataaataaggtagatgacagattagatacagatgataaacagatatgctatc

SEQ ID NO: 859562 - DNA, 120 bp, Artificial Sequence
  ENSG00000214851_11 (sequence is synthesized)
agtctagatctattactcacagtcagtcgtatcacagtgtaattccatcaacttcatttgcagcaaaagaacagcccctgatgtacgcctgtttcctgaatatttggaaatattaatatt

SEQ ID NO: 859563 - DNA, 120 bp, Artificial Sequence
  ENSG00000214851_12 (sequence is synthesized)
aatatagatagagtcagcttgccagtataaagaatctatctctcactataggcagagccatgtgttggatattatggaggaatatgtattattttaatcgtttaaaagactaataaactt

SEQ ID NO: 859564 - DNA, 120 bp, Artificial Sequence
  ENSG00000214851_13 (sequence is synthesized)
ctaatctacttttgggagcctctgctcaagttcctgaggttcctactctaaaatccacatcaccctccaactgctccctatgtgagccattagggagcacaatgaattagagaatgaatc

SEQ ID NO: 859565 - DNA, 120 bp, Artificial Sequence
  ENSG00000214851_14 (sequence is synthesized)
ctattagcccactaaaaaattatctttcaaaggatgaagactgatgctaaggaaaaagagatgaggcctccctggttccgcattattactccttcctttcttgggttacggattgaacac

SEQ ID NO: 859566 - DNA, 120 bp, Artificial Sequence
  ENSG00000214851_15 (sequence is synthesized)
tgaccttttctttcactcttctgcaagacaaccccataagaaagctgaaacctgcttttgtgaaagcctatgattactataagacaggcacagagcaagaaaatgtttgaggcttgtgtc

SEQ ID NO: 859567 - DNA, 120 bp, Artificial Sequence
  ENSG00000214851_16 (sequence is synthesized)
tataaacaagacttggctggaatccccagacccacgactttttaaaaggatattttgtccctgcaatacagatactgaatgaggttggcaaataaatatgtatttctagagactctataa

SEQ ID NO: 859568 - DNA, 120 bp, Artificial Sequence
  ENSG00000227029_0 (sequence is synthesized)
ctccttcttctccctctgctggaataatgactttgtactgaattctcacaggaagtctcagacgaagacactgctaactccactttcagagagaaacactgaggctcagagctaaactaa

SEQ ID NO: 859569 - DNA, 120 bp, Artificial Sequence
  ENSG00000227029_1 (sequence is synthesized)
ctcgcctcagagcccacatcctggacttgagcctcagggtgttgcatgccaaagcctgtcctcttcaccccagcttcctgggcattggagcggatccatagtgttagatatgcagtggga

SEQ ID NO: 859570 - DNA, 120 bp, Artificial Sequence
  ENSG00000227029_2 (sequence is synthesized)
tggcagcaccctgctagtcctcacatggagccctggagaagccgggttccttaacccagatttgaatcaatagcctcacacctggtatgcacatccaggccaagtgtggctgaatgggga

SEQ ID NO: 859571 - DNA, 120 bp, Artificial Sequence
  ENSG00000227029_3 (sequence is synthesized)
gcatctgttctggagacggccaccctcatgggctcctctgcttcctgtcccttcgggcactgatttatggcacacagcagggaagggcctgagcttgagccctgaccatcgttatcatca

SEQ ID NO: 859572 - DNA, 120 bp, Artificial Sequence
  ENSG00000225637_0 (sequence is synthesized)
atttccagtggatgcaatagtgccgaccatgtgcacatggggtcaggatctcaggcccgccagctggactacagcaagtacccatggtctcagggaaaaggtcccctgctgcaggctgtg

SEQ ID NO: 859573 - DNA, 120 bp, Artificial Sequence
  ENSG00000225637_1 (sequence is synthesized)
ggggacctcggctctcacagtggctatgcctgagaaagcccctccagactcgccaacctggcccgcgcgtcctgtccggagggcagggtggggctggtgctggttacagatgatcctcaa

SEQ ID NO: 859574 - DNA, 120 bp, Artificial Sequence
  ENSG00000225637_2 (sequence is synthesized)
gggcacagcacgcaagccaccaggcgcccctcctgcagctgggtcagagagaggcactgggagcctggctccctccaggtcagtctccaccagggccaccccggtgacctgcaggagagg

SEQ ID NO: 859575 - DNA, 120 bp, Artificial Sequence
  ENSG00000225637_3 (sequence is synthesized)
aaggcagacgaggagtggccctgccccttagggcgcatcgtgcaggtggcacaagggggtcatctgcatcctggtcaagggggagcccacctgcctcctccaggtcgggaacactccctg

SEQ ID NO: 859576 - DNA, 120 bp, Artificial Sequence
  ENSG00000225637_4 (sequence is synthesized)
gaggccatggtgtggagcgtccacccgggcttcgtcctccagctcagctgctgggccctgggaagggacaggcccagcacccgttcagccgggctgagccgcaggcagagcgccttgcct

SEQ ID NO: 859577 - DNA, 120 bp, Artificial Sequence
  ENSG00000225637_5 (sequence is synthesized)
gggagagacaaacccaccgctgaggacacaccctcaaggttcacccttccccacttctgtgttgcccttagctctaaggtgctaattccatctctagtttcaacaggctgattgctctta

SEQ ID NO: 859578 - DNA, 120 bp, Artificial Sequence
  ENSG00000225637_6 (sequence is synthesized)
agggaaaatggggttgcacaatccggctgtggtggccggggctcttggtctccccccagtaagaggatggactttccagccctgctgatggtcagcggggaccacgtggaggctttggca

SEQ ID NO: 859579 - DNA, 120 bp, Artificial Sequence
  ENSG00000225637_7 (sequence is synthesized)
gatgaaatggggcacatgacatagccctgccccagtggaagcctcagagccatggctgggctccaccaggcttgctccagcggccatgaggaccatgccccacaggcaggggctgcacct

SEQ ID NO: 859580 - DNA, 120 bp, Artificial Sequence
  ENSG00000225637_8 (sequence is synthesized)
ccaccctggttccagaaggaagaggcacagccgacatgccgctcgagcaggaaaccctggggaaggtgggacatgagatcctgtgtctgatactacagtgtaaccggctagaaactgact

SEQ ID NO: 859581 - DNA, 120 bp, Artificial Sequence
  ENSG00000225637_9 (sequence is synthesized)
caaaggggcatttttacagcagaaagaggcgaagcacacgtgcatctgccatcctgtgattgtcaggccccgtttaggagtggacagctccatggttgtgtttgagccccacaccggccc

SEQ ID NO: 859582 - DNA, 120 bp, Artificial Sequence
  ENSG00000225637_10 (sequence is synthesized)
tggggggttatactgccctggaggacagctgacctcagttctccaagcttccattcccccttgtatgggcacagcaccccaaccttcttttggcagctcccacgccccccagtgctggtg

SEQ ID NO: 859583 - DNA, 120 bp, Artificial Sequence
  ENSG00000225637_11 (sequence is synthesized)
gccctgatcctctggcccggttcagactgtggtggggcctcgggacctttccagaaccttggaagtgggtagcaccctttgctgggacagacatgcctggagctccgggcattgggccac

SEQ ID NO: 859584 - DNA, 120 bp, Artificial Sequence
  ENSG00000225637_12 (sequence is synthesized)
tgctgggataagcccacgacagaatgaagccgggcaggcagaaagagctgcgggctccctggccactcctgtttccgtaaagggcctggtgtctcatttcctacttaccttggactttaa

SEQ ID NO: 859585 - DNA, 120 bp, Artificial Sequence
  ENSG00000225637_13 (sequence is synthesized)
gggcctcctgcagcctttgtcacacactcttcttatttttttgtccattacaaccttttacggcggcacaagccattgttctcagggccaacgcgtgagtcctgtggtgagtttcctatt

SEQ ID NO: 859586 - DNA, 120 bp, Artificial Sequence
  ENSG00000225637_14 (sequence is synthesized)
agtgtggctcgagaaggtaccccgtgctgacgaagcctggagaggcagggccacactgcagagcctcaggccaagggtggcggtgctggggtctcatgagcccagggttcactgcccacc

SEQ ID NO: 859587 - DNA, 120 bp, Artificial Sequence
  ENSG00000225637_15 (sequence is synthesized)
aggcggcattagcctgcggctttggcgcccagaagtcccgacaggcagcaaagtctcctgctcctggctgctggccaggagagcccagctgggcctcacctgatcgagaggaaacgcctg

SEQ ID NO: 859588 - DNA, 120 bp, Artificial Sequence
  ENSG00000225637_16 (sequence is synthesized)
tgtcctctaatcagcatctcactgacagagtcacccctggtacagcaagtgggctttcaaggacatcaggtggctgcattcaggctggtaacaacaccgccctcagctctcacagtctga

SEQ ID NO: 859589 - DNA, 120 bp, Artificial Sequence
  ENSG00000225637_17 (sequence is synthesized)
ggaagccccctgaaaagtcactggagtggggctgcaggaaccccacaaaggcctttcctgctcctgaataattcccaagcacctaggacttcccgggcctggcttctccgccagtccaac

SEQ ID NO: 859590 - DNA, 120 bp, Artificial Sequence
  ENSG00000225637_18 (sequence is synthesized)
ctccggacctgaagaccaagcagtgcccaagtgtgaggtccctggagaaggaggaggaagagtggaaggaggtggagggtaatgcatccagaggaagacgctgagggtcaggctggccct

SEQ ID NO: 859591 - DNA, 120 bp, Artificial Sequence
  ENSG00000225637_19 (sequence is synthesized)
gggtctgacctgtccttgggatcaactgcttcattaaaaaacatccgcctaaactgtggagacagaggaaggatcagtgcttgccaagggctgggggaggaggaacaggcagagcgcaga

SEQ ID NO: 859592 - DNA, 120 bp, Artificial Sequence
  ENSG00000225637_20 (sequence is synthesized)
gggtttcagggcagtgccgctctgcgtgacgccatcacggagggtccaggtcatcacacgtctctccaaacccctagaatgcccaacactcactctgaagccttctgtcaatgtgggatc

SEQ ID NO: 859593 - DNA, 120 bp, Artificial Sequence
  ENSG00000225637_21 (sequence is synthesized)
atctgtcgtaaagtctgcaccgctgtggtgggggcgtggatagtgggggaggctgtgcgtgtgtgggggcagggagtgtatgggaaatctctgtaccttccgctcaatttggctgcgaac

SEQ ID NO: 859594 - DNA, 120 bp, Artificial Sequence
  ENSG00000225637_22 (sequence is synthesized)
ctaaactgctctaaaaaaagtctatttttaaaaagcatatgcccgaaaagtccttgaaaatgcatctttccctaaatattcaaatttatgttcattaataaaatagcacatatttattct

SEQ ID NO: 859595 - DNA, 71 bp, Artificial Sequence
  ENSG00000221819_0 (sequence is synthesized)
cgcactccagcctgggccacacagcgagattccgtcagaatcagttacttttcgggcacagccccaggcca

SEQ ID NO: 859596 - DNA, 120 bp, Artificial Sequence
  ENSG00000221819_1 (sequence is synthesized)
ccgtcagaatcagttacttttcgggcacagccccaggccacttactgtgagcctttttctttctcaacaccacattccccacagggaaaacacatttctcacctcaaaagaagacaagac

SEQ ID NO: 859597 - DNA, 120 bp, Artificial Sequence
  ENSG00000221819_2 (sequence is synthesized)
aacgagcaaacaagaaggagcagcaggaggggttctgagccgaggatgccgggcagacatgagggagacacgcacccccgaatccaaccagtgcctcggcacaacgacaaatgtcttcac

SEQ ID NO: 859598 - DNA, 120 bp, Artificial Sequence
  ENSG00000221819_3 (sequence is synthesized)
gtcacagacctttagaggctcctgggcagagcctgaaccagggctcctgactggtctgtttggctcacatggtgttgagattttgccatcactcaatattcagatttcttataaatatcc

SEQ ID NO: 859599 - DNA, 120 bp, Artificial Sequence
  ENSG00000221819_4 (sequence is synthesized)
acagcactgaactcctaggcccacaaggcactccccagtgaacagatgaaactgtcctctgctgcggggcaggagtctccaggtcacccccatccctccccacctgcctggaccctgaag

SEQ ID NO: 859600 - DNA, 120 bp, Artificial Sequence
  ENSG00000221819_5 (sequence is synthesized)
aagccttctgagtctgtggctcaacgtgcgatgtgcagtgcaagggcctgccccgtagcctgccccgtaggctgccccatagcctgccccgtaagctgccccgtagcctgccccgtaggc

SEQ ID NO: 859601 - DNA, 120 bp, Artificial Sequence
  ENSG00000221819_6 (sequence is synthesized)
tgccccgtaggctccatggccactgccccacaaggcctgtctccacaggaatgggaagcggacagggagacgggcagcagctcacatgctgggacaacgcagtgttcaatccattctcca

SEQ ID NO: 859602 - DNA, 120 bp, Artificial Sequence
  ENSG00000221819_7 (sequence is synthesized)
tccagcagctccagacatctttccagaacacaaacctgaccccatcacctctctgcttagccactggcttaaactgccaatggtttgcctgcatgtaaaataaagccattctttaccatt

SEQ ID NO: 859603 - DNA, 120 bp, Artificial Sequence
  ENSG00000221817_0 (sequence is synthesized)
agaaaacgggctcactgcagctaacagcctcaccccttgggctaggaagccacggaagcaaaacctccgccccggcctgaaagcaaccgggagaccgcggaaccactgccaccgactcag

SEQ ID NO: 859604 - DNA, 120 bp, Artificial Sequence
  ENSG00000221817_1 (sequence is synthesized)
ccctgcccagcaggggcccgcccaggggccactccccaagggaggcagccagtcactcgcccgcccttccgggcccactcccgaggggacggtctcccgcccgccctcacacacagctag

SEQ ID NO: 859605 - DNA, 120 bp, Artificial Sequence
  ENSG00000221817_2 (sequence is synthesized)
ctcttcaggccaggcccccagggtttcgtccacctctcacctttgacgacgcgaatgaagaatgaggaggtgctgcgatcgaacgactgcgaggaaacacacccgctctcatggcattcc

SEQ ID NO: 859606 - DNA, 120 bp, Artificial Sequence
  ENSG00000221817_3 (sequence is synthesized)
cagtaaactgagaagacgtgattaaacctcaggatctcctactaatagagaaatgtataacgatttagctaccagatctgaatactgaagggttggtaggggaccagagaatagaggaag

SEQ ID NO: 859607 - DNA, 120 bp, Artificial Sequence
  ENSG00000221817_4 (sequence is synthesized)
cattgtaggttctagagtggagaagggaccatccaaaatggagtttgaaagagaattctggcctttgtgtttagagtctggaattgtcaagagtctgaaagcacagaataagactgcagc

SEQ ID NO: 859608 - DNA, 120 bp, Artificial Sequence
  ENSG00000221817_5 (sequence is synthesized)
tagagcaatttaggcgccatagtttgtcaaaacaggtaaggggaataaaggggatgacaccaagagatgtgcaaagaatctgaagaattcacctgaaaaggatacaacctcctcctggaa

SEQ ID NO: 859609 - DNA, 120 bp, Artificial Sequence
  ENSG00000221817_6 (sequence is synthesized)
ggcagaggagtaaatagggaattggaaattaattccttatttctgcacatgcacagaatctgggcccaggtgacttatggaacctttatagagaccacggtgactgacactcatgggaaa

SEQ ID NO: 859610 - DNA, 120 bp, Artificial Sequence
  ENSG00000221817_7 (sequence is synthesized)
gggggtagaggggcaagaactgactgttcatcaaaaattattagatgagtgtgtccacgacaccaggagatatgttgaatcatggacagggaccagcatatccactaagctctatatatc

SEQ ID NO: 859611 - DNA, 120 bp, Artificial Sequence
  ENSG00000221817_8 (sequence is synthesized)
ttgatggtgcaggatccaagtgggatggaacaaccaattcctgcccatcctcctgctcaataatacatgtgctcagaatctgttcataatgcatggtgagacgggatctcactgtgttgc

SEQ ID NO: 859612 - DNA, 120 bp, Artificial Sequence
  ENSG00000221817_9 (sequence is synthesized)
ctgtgatgaacactcaacttgggcaaggaagtgaaattctccaaagtgcagtgggttctgacccaatcagcagcctttgcttctcagattcctctcaaggctttatgactcttctcaccc

SEQ ID NO: 859613 - DNA, 120 bp, Artificial Sequence
  ENSG00000221817_10 (sequence is synthesized)
caggaaaccctacaacacgcacggcctttcagaactgctacatggaatggacattcctctgggctccagctgaatgtttgtaaataaaataatgactgcgtgtccttatttttgctgagt

SEQ ID NO: 859614 - DNA, 120 bp, Artificial Sequence
  ENSG00000221817_11 (sequence is synthesized)
acacagggcctttcctcacattacaaccttcactttctccctgcttcttcacctgcactgtatttttgcttagcaaggaggagggtgctctgaatagatggaccctgattctacttacaa

SEQ ID NO: 859615 - DNA, 120 bp, Artificial Sequence
  ENSG00000221817_12 (sequence is synthesized)
aactgtgggaagaaaccggagcttcctccctctctgagacaacggtgccactgagactgcgtgagatgcgacgtaaattctctgcactgtactgctcatcctccccacactccctgctga

SEQ ID NO: 859616 - DNA, 120 bp, Artificial Sequence
  ENSG00000221817_13 (sequence is synthesized)
ggcctcggcaaggtgtagccttcaaacacacagacacatacaggcagacacataataccagacttatggttttcccacagacagtatcctcagggtatgggaaagagtaggggaagactc

SEQ ID NO: 859617 - DNA, 120 bp, Artificial Sequence
  ENSG00000221817_14 (sequence is synthesized)
agtagtaatagacacctgaattagatgtattggtaagatagtggccatgtaacaatctcctctaattcaaaagaagcccaatcatagaccttattttcttctgatagccccatatcacca

SEQ ID NO: 859618 - DNA, 120 bp, Artificial Sequence
  ENSG00000221817_15 (sequence is synthesized)
tgcctctgccttatcatcatccctgtcacatctctccataattccttccccaacacaccaccccaggcccagcaccttagcacctgaggctgctacctgagaagtacgcactgttctggc

SEQ ID NO: 859619 - DNA, 120 bp, Artificial Sequence
  ENSG00000221817_16 (sequence is synthesized)
ttcatggagaccatgctccatttctgctgttgaagtctttgagagaccaggatcatgggctgagtgcaacctcctccccatgccatctgcagagcctgaagaggaaaacacaaatacaag

SEQ ID NO: 859620 - DNA, 120 bp, Artificial Sequence
  ENSG00000221817_17 (sequence is synthesized)
ttgaggccatctcttcccctagggcctaacctctaagcctagcagcacaaactcaggagctgttgtttcatttaataataaatatgcatccttgaattcaacggaggaacatgctcctgg

SEQ ID NO: 859621 - DNA, 64 bp, Artificial Sequence
  ENSG00000221817_18 (sequence is synthesized)
aatatgcatccttgaattcaacggaggaacatgctcctggaatttagaagcaaggggcagatca

SEQ ID NO: 859622 - DNA, 120 bp, Artificial Sequence
  ENSG00000221817_19 (sequence is synthesized)
ataactgctttgcctccagtcatcatctgggggcatatctactcttcgaggaccaggggttcgggaccctggaacaggatctgaattccaagctgacctcaggggtacatgaagactgct

SEQ ID NO: 859623 - DNA, 81 bp, Artificial Sequence
  ENSG00000221817_20 (sequence is synthesized)
gaactgctggactcaagtctggacaaccttcaatgcactggtactttgtaccctgacctctactgtgatgaacactcaact

SEQ ID NO: 859624 - DNA, 120 bp, Artificial Sequence
  ENSG00000221817_21 (sequence is synthesized)
gactccgtctcaaaaaaaaaaagaaacaagaattttagaatatagatagtttactgagtgtccccatcttgcttcatttcatttttgtaaacataatcagcttctgtcagacttaggctc

SEQ ID NO: 859625 - DNA, 120 bp, Artificial Sequence
  ENSG00000221817_22 (sequence is synthesized)
tgtcagacttaggctcaagacttatagacagaggaaagtatctaacacagtgagttttgttttctaacacagtgattttctaaagtatctgtggtgacaaaggaaattatctccagtcta

SEQ ID NO: 859626 - DNA, 120 bp, Artificial Sequence
  ENSG00000221817_23 (sequence is synthesized)
gttcagaatagaaatgatcataataatcatctatcaaacctcctcattttatataacaggaaaatgagttccagggtctgagagtttagtagtttaaccaggattaaaattaaatcctct

SEQ ID NO: 859627 - DNA, 120 bp, Artificial Sequence
  ENSG00000221817_24 (sequence is synthesized)
tgattttcagtacagtactcttaccatctcacctggtgacctcttttactctgagagcaggagctcctcaggaatgttttacatatgtaatgctcttttccccttagcttctctcaaatc

SEQ ID NO: 859628 - DNA, 120 bp, Artificial Sequence
  ENSG00000221817_25 (sequence is synthesized)
atttaaatttctaaacaaccactaaatgcttacctcttttcaaaatctttctagattgttcagttgctctaaactggattggtgactcccaaggggctatccccaatccaactaattaag

SEQ ID NO: 859629 - DNA, 120 bp, Artificial Sequence
  ENSG00000221817_26 (sequence is synthesized)
ttttccattccaaaactgtatatgcccctgacctacatttgatacatatgtccatggccaattcatgtcttgatttgatgatttgattctaatatatatatatatatctggctgaagctg

SEQ ID NO: 859630 - DNA, 120 bp, Artificial Sequence
  ENSG00000221817_27 (sequence is synthesized)
atattattcatgtaagtattgtaagaccagttattttcagtattcctgggtacttaaatgcagtgctttcaataccacctcagattcatctgggaacttttaaaaatatagcttcctgga

SEQ ID NO: 859631 - DNA, 120 bp, Artificial Sequence
  ENSG00000221817_28 (sequence is synthesized)
tgttaccacagagctgaatcagaaggtttgtggttggtgcctgggaattttcatttttgaaaggttcccaaaaagtctaagaaaatatccttgaacattattgggggaaatgggaaatgt

SEQ ID NO: 859632 - DNA, 120 bp, Artificial Sequence
  ENSG00000221817_29 (sequence is synthesized)
tacagtcttcctaaaaaacaacctggtaatctccaataaaataaaaaatatatttatcctgttgcccaacgattctaatcctgagaagaagaagaaaaaaataccagttcataacaacat

SEQ ID NO: 859633 - DNA, 120 bp, Artificial Sequence
  ENSG00000221817_30 (sequence is synthesized)
atatatgagaatattttctactgacataatttatagtagccaagaactagaaataaagtaatgcccacctatagaagaataaatacattatggtttaataccagatattgtccagccact

SEQ ID NO: 859634 - DNA, 120 bp, Artificial Sequence
  ENSG00000221817_31 (sequence is synthesized)
taaaaagattgaactgagttaaactagatgatttgaagaaattttaatgaaacattgttgcattaaaaggaaaaaaatctgtaaaatgatagacaagcatttgtttatgtatatgtaggt

SEQ ID NO: 859635 - DNA, 120 bp, Artificial Sequence
  ENSG00000221817_32 (sequence is synthesized)
ctacataggattgtataaacagaaaatacagtgtatgcacactagataattacctggggaagtagggactggctgtgagagaagagacaggaaaattgtctataataaaaacagcatgtg

SEQ ID NO: 859636 - DNA, 120 bp, Artificial Sequence
  ENSG00000221817_33 (sequence is synthesized)
gtgtgagccaccgcgcccggcccacagtacagttttacaaagaaaggtgtagctccaggaaaggaaaggaataacctttaccattgactgtgctgcaggactctagccctgatctgctct

SEQ ID NO: 859637 - DNA, 120 bp, Artificial Sequence
  ENSG00000221817_34 (sequence is synthesized)
ctttttttttgtttctccaacttttcttaaaatgttaccttcacttcagttaagctgcctttgtttgatctctgagatctaatgtggaatgccttttcttatacatttattcaactttgg

SEQ ID NO: 859638 - DNA, 120 bp, Artificial Sequence
  ENSG00000221817_35 (sequence is synthesized)
agtgaaattctccaaaggaattattaagataaggaccagcagtacaatgagcttttcactgtatgtctgacctgaaagaagaaaatcttttcagaggactcctctctccccttcagtcgc

SEQ ID NO: 859639 - DNA, 120 bp, Artificial Sequence
  ENSG00000221817_36 (sequence is synthesized)
caagacaatgagagctcttgctacagaatactcatggtcatttcttcccctggcattcataaactaacatggttcccaagcactaccttgttggctgagagagagtccccgcctgtgttg

SEQ ID NO: 859640 - DNA, 120 bp, Artificial Sequence
  ENSG00000221817_37 (sequence is synthesized)
ggaggcaggctgagggctgcgacggctgctgtggtgattgctgctgctgcatgcgatcctgcaggctccgtgcttttcgaatactgatttgcaacttcttatcgactagggctctgctgt

SEQ ID NO: 859641 - DNA, 120 bp, Artificial Sequence
  ENSG00000221817_38 (sequence is synthesized)
gcgtgctacagctggcaccatgcagggcaagtcttagtttagctaaaatgcaaaagaaaatatagcagaaacagaacacaaaacacaaataaaaataaaaagaataaaattgaaaaaaaa

SEQ ID NO: 859642 - DNA, 120 bp, Artificial Sequence
  ENSG00000271913_0 (sequence is synthesized)
aggggcgggctgccgccgccctctgcagctgagtcagtgcagttcctcacctaccttctctgctcaccgctgtgtgctagcaatcggaggacccttggcacacggagcgacaggggcctc

SEQ ID NO: 859643 - DNA, 120 bp, Artificial Sequence
  ENSG00000271913_1 (sequence is synthesized)
ccccacagacacctcattttgggaaagaaaagctacaaatcttcagcattctccactctgtgaagtcagaggaatggcgggaccatagctctgagctcattggcaaatacaactaatttc

SEQ ID NO: 859644 - DNA, 120 bp, Artificial Sequence
  ENSG00000271913_2 (sequence is synthesized)
aatttctggaatggaagcagtcagatattcttctgactgcacgcgtatgtgggagtgccatgttgaagagtggaaaatatggaagatcagtccctacaaacttaataggagaatgacatt

SEQ ID NO: 859645 - DNA, 120 bp, Artificial Sequence
  ENSG00000271913_3 (sequence is synthesized)
cagatttcccgagtattttgcatgtccaactgaaaactgaagtaggtttatgagagaatgcacgcctacctggatgggtctggggagtgtgtcactgtcaccgcagataattgacaaggg

SEQ ID NO: 859646 - DNA, 120 bp, Artificial Sequence
  ENSG00000271913_4 (sequence is synthesized)
ctgatcaaatagcgatgctttcaagtctgtctccaaagccccagaaaaatctgatgcaggggagagccttctcatgagaaagggccaggacagcaccttctttctcttcttaacttctac

SEQ ID NO: 859647 - DNA, 120 bp, Artificial Sequence
  ENSG00000271913_5 (sequence is synthesized)
agccaagaaaacaaggcaacgagaaaaattagactacagtgttaagaagcaaagatccaggtaagaaaatgggtatcgttggccgcataatgtggtcaatagtatgcgatgtgagaaaaa

SEQ ID NO: 859648 - DNA, 120 bp, Artificial Sequence
  ENSG00000271913_6 (sequence is synthesized)
taattttgaaaacttgagaaagcaaagggcgtgaatcttaatctagaaaaaccaaccgataaacaaccacactgttaccagggcaaccagttccctaaacagcaacaccagagttcctca

SEQ ID NO: 859649 - DNA, 120 bp, Artificial Sequence
  ENSG00000271913_7 (sequence is synthesized)
aggcctccacctttcctgttttcactctttccagctgtttgctacagaaaattagcaaaacctaactgtgctgatcataaacaaccatcttaacctactggcctgaataactatagagga

SEQ ID NO: 859650 - DNA, 120 bp, Artificial Sequence
  ENSG00000271913_8 (sequence is synthesized)
aatttctgatatgaaatagattattttgatttcctcctttaactggcgaagaaaacgaaacttaaaaggtgaggaagtgacttgctgaatatcttttcgaaggcacatagcagggctggc

SEQ ID NO: 859651 - DNA, 120 bp, Artificial Sequence
  ENSG00000271913_9 (sequence is synthesized)
tccaaccctttgcagccacgcaggcactaaacagccactagagggagctaacaccatttttccttccaggtgactggtcaccttgggttttccaggttgctgctttaggacagaggcaaa

SEQ ID NO: 859652 - DNA, 120 bp, Artificial Sequence
  ENSG00000271913_10 (sequence is synthesized)
tacgaatcgctgcgggaagccttgaacctagatctggcaactgggaattatcagcaaaacgttatcaagatattctgtccttctgaaatccacaagatgtgtgtgcaatggatattgcaa

SEQ ID NO: 859653 - DNA, 120 bp, Artificial Sequence
  ENSG00000271913_11 (sequence is synthesized)
tctcaaacatttccttctttcttttcttttccttccttccttccttctcctttcttactaattataaaggctatattttctaaatgcattggcatctgtttctatacatttcagattggc

SEQ ID NO: 859654 - DNA, 120 bp, Artificial Sequence
  ENSG00000271913_12 (sequence is synthesized)
attatgaaaaaagttgagagtgaatggtgggtcctttgggatttgagatcagcaacagttgcttcataggctcttggatgcattctccataagagaaggaagaaaatggaaaagacactg

SEQ ID NO: 859655 - DNA, 120 bp, Artificial Sequence
  ENSG00000271913_13 (sequence is synthesized)
tgtgtttttcaaatgtgtgcatgctaattgtcgaaacatacatggccaggagattgaaccgcattaaaaacgcttggcagaactggggattctctatggagaggctctttcctttcccag

SEQ ID NO: 859656 - DNA, 120 bp, Artificial Sequence
  ENSG00000271913_14 (sequence is synthesized)
cactccctgctctagtgagttggagcatacctgccatttaagggttaatgttctgcggtctttaacagaacaacttatacaaaaaaattcctagtagagtaaaagcgctgtggttttgca

SEQ ID NO: 859657 - DNA, 120 bp, Artificial Sequence
  ENSG00000271913_15 (sequence is synthesized)
aaccaagagcactggttgttagcacttacataaaagatcggtatgtttttaaaactcaccaatgagctggcaaatactgtcttcactctcacatgatgccaacaggggatgttccttgat

SEQ ID NO: 859658 - DNA, 120 bp, Artificial Sequence
  ENSG00000271913_16 (sequence is synthesized)
atcaccctaaaaacatttttatttcagttaaatatagtgactgaagaaacctatcgagtctttccccacaaaacacacatacagcattttattcatattaaaaatgaagtcagtagagtg

SEQ ID NO: 859659 - DNA, 120 bp, Artificial Sequence
  ENSG00000271913_17 (sequence is synthesized)
cattgatgttttttctagcttctagaagcaatattaaggtcttgattgtcatcatataagatcctaattaatgtgcttaatttactacatgtgtgatgttagtttactactcttataatt

SEQ ID NO: 859660 - DNA, 120 bp, Artificial Sequence
  ENSG00000271913_18 (sequence is synthesized)
actattcaacccaaataatattcaattaaaacaaagttttccaccttctcacagtacagataaaaagtcttaaaaattgctttcttacctctgattgacattcgattagtgtctccatat

SEQ ID NO: 859661 - DNA, 120 bp, Artificial Sequence
  ENSG00000271913_19 (sequence is synthesized)
tattggcgtttagtgtttttgactaaaagagaaaaaataaaattaggtaaatatcttttggcccttgcctgtaggaaacgtgaatgaatgaatgtgagaggggcactcacagcattgtgg

SEQ ID NO: 859662 - DNA, 120 bp, Artificial Sequence
  ENSG00000271913_20 (sequence is synthesized)
ctgcttctcagcttcatcagtattgcggctgactgtccaggggtggatttcactcccgtgtggctgtgcctctgtctacaacgaatcacatggaaaggagttaggagggactcacacagt

SEQ ID NO: 859663 - DNA, 120 bp, Artificial Sequence
  ENSG00000271913_21 (sequence is synthesized)
aggccactttcagcgccactttgccaaagcacagagtttgaaactatttatttatttttctcttttgctattttttcacttgcctttactttggaaaaaactattacatagacaagtttt

SEQ ID NO: 859664 - DNA, 120 bp, Artificial Sequence
  ENSG00000271913_22 (sequence is synthesized)
catttaaaatcagttctgttaccagatgttgtatgttgttaagagcagcatctgaacacaattatttctaaattatttaagtcaactatctttaccactctaaacgttgttaccaattta

SEQ ID NO: 859665 - DNA, 120 bp, Artificial Sequence
  ENSG00000271913_23 (sequence is synthesized)
ttccgttccatcaagagataatctggatatcaattacgttaacattttaaattaacatgaacattaacttttttggtggagtgctgactatatgccagctgtcgtagtaggtgctttgca

SEQ ID NO: 859666 - DNA, 120 bp, Artificial Sequence
  ENSG00000271913_24 (sequence is synthesized)
aaaattagactacagtgttaagaagcaaagatccaggagataggatggagtgtcaccaagatagaagacaaaaacataagctgtgaaatgtgattataaagtagtgacatgagtgccaga

SEQ ID NO: 859667 - DNA, 120 bp, Artificial Sequence
  ENSG00000271913_25 (sequence is synthesized)
aaccacggaggaaacgtctccttgttctggatccacacttcatacgtggtcattgaaacgtggcatcaaacgggaggaatgtgatgggccaggttaggggaagagcaccaagcagggcct

SEQ ID NO: 859668 - DNA, 120 bp, Artificial Sequence
  ENSG00000271913_26 (sequence is synthesized)
ttccctgggagatggcaccacgtgacatgcttcatacggaagcacatgggccctcagcgctggtatcttgcttcacctggggatggtgatgaaatgatgcagagctgactcaatacgata

SEQ ID NO: 859669 - DNA, 120 bp, Artificial Sequence
  ENSG00000271913_27 (sequence is synthesized)
cagagctgactcaatacgatgtgtgggatcttccatcgtgaagcagctgggagcaccaggaggcaggttttcccgtgcttatggaaagcaccacattgttctgctggggacatgttcttt

SEQ ID NO: 859670 - DNA, 120 bp, Artificial Sequence
  ENSG00000271913_28 (sequence is synthesized)
tactccaaggagtagtggatgtgcaatgggctgtcctgcccgtagagatgtgtggggctggctgctgagaacagatggcaactggctggctctgatgcctcagaagaggtgaatgcattc

SEQ ID NO: 859671 - DNA, 120 bp, Artificial Sequence
  ENSG00000271913_29 (sequence is synthesized)
ggagaggccacagctgagagtccctcaaactggggagttattattctaaaagttggatttttagcaagattttaccaggtgaggctgattaaatgatggtggcaggggcggggagaaaaa

SEQ ID NO: 859672 - DNA, 76 bp, Artificial Sequence
  ENSG00000271913_30 (sequence is synthesized)
cagcacatcttcatatgatggcaggaactttatatgttatagaagttagccccaagaatgaaatcgtgtcctttgc

SEQ ID NO: 859673 - DNA, 120 bp, Artificial Sequence
  ENSG00000271913_31 (sequence is synthesized)
ccaagaatgaaatcgtgtcctttgccaaaacatggatggagctagaggcctttatcctaaggtgctctatgcttagcccatcatagattgtggcccttcattcctgcatttgatgaatcc

SEQ ID NO: 859674 - DNA, 120 bp, Artificial Sequence
  ENSG00000271913_32 (sequence is synthesized)
cagtgaagataatctctggttctagagaacccagaaataaagccacatgtttacaactaagttatcttcaacaaaactgacaagaactttcattggggaaaggacacccttttcaataaa

SEQ ID NO: 859675 - DNA, 120 bp, Artificial Sequence
  ENSG00000271913_33 (sequence is synthesized)
tggtgctgggagaattggatatccacatgccgaagaatgaaactggacctgtatctctcaccatataaaaaaaatcaactcaaaatggattaaaaccaaccgaagaccccaaactgtaaa

SEQ ID NO: 859676 - DNA, 120 bp, Artificial Sequence
  ENSG00000271913_34 (sequence is synthesized)
acttaactaaactaaaaagcttctacacagcaaaagaaataatcaacagagtaaagagacaatcagttgaatgagaaaaaaatatttgcaaactattcttctgacaggggactaatatcc

SEQ ID NO: 859677 - DNA, 120 bp, Artificial Sequence
  ENSG00000271913_35 (sequence is synthesized)
agaatatacaaggaattcaaacaactcgacaggaagaatcaaataatcccattaaaaagggggcaaaggacatgtatagatatttctcacaagaaggtatacaaatggccaaagatatat

SEQ ID NO: 859678 - DNA, 120 bp, Artificial Sequence
  ENSG00000271913_36 (sequence is synthesized)
gaaaaaaatgctcaacattgctaatcatcagagaaatgcaaatcaaaacaatgagatatcattttaccccagttagaatggctgttattaaaaagaaaaaataagagatgttggcaagga

SEQ ID NO: 859679 - DNA, 84 bp, Artificial Sequence
  ENSG00000271913_37 (sequence is synthesized)
catctctcaaaaaactgaaaatagaattactattctatccagcaattccacaactgggtttttagccaaaggaaaagaaatcaa

SEQ ID NO: 859680 - DNA, 120 bp, Artificial Sequence
  ENSG00000271913_38 (sequence is synthesized)
attccacaactgggtttttagccaaaggaaaagaaatcaatatataaagggatccttgcactcctatgtctattacagcactatttacaagacaatgatatggaatcaactaagtgccca

SEQ ID NO: 859681 - DNA, 120 bp, Artificial Sequence
  ENSG00000271913_39 (sequence is synthesized)
taaagaaaatgtggtatatatacacagtggaaccctattcagccagaaagaagaatgaaatcaagtcatttgcagcaatgtacctggaactggaggtcattattgtaagtgaaataagcc

SEQ ID NO: 859682 - DNA, 120 bp, Artificial Sequence
  ENSG00000271913_40 (sequence is synthesized)
gtaagtgaaataagccaagcataaaaagacaaatatctcatgttctcccacttagatgtgagagctgaaatatctgatcacatggtggtagaaagtggaaagagagaacagagatgggaa

SEQ ID NO: 859683 - DNA, 120 bp, Artificial Sequence
  ENSG00000271913_41 (sequence is synthesized)
gggtgattggggtaaaggggtgaggatgaagagaactgggttaaagaacacacatacaattagatagaaataaattcaatttgtaaaaaataatttaaaaaattagagatgggatctcgc

SEQ ID NO: 859684 - DNA, 120 bp, Artificial Sequence
  ENSG00000271913_42 (sequence is synthesized)
tgagttgtctaggctggccttaaactcctgggcacaagcaatcctcccaccctggcctcccaaagtgttgggattataggcttgagccaccgtactgggcctaaattcattgtttggtag

SEQ ID NO: 859685 - DNA, 120 bp, Artificial Sequence
  ENSG00000271913_43 (sequence is synthesized)
cagagcaggatgagtatggttaaacaaaaatgtattgtacgtgggtgatggatatcctaaataccctgacttgatcagtatacattatatacatgtaacaaaatttcacatgtaccccat

SEQ ID NO: 859686 - DNA, 120 bp, Artificial Sequence
  ENSG00000271913_44 (sequence is synthesized)
taatggtgaaatattaaatgatattctaccaaactcagaaaaaaggcaaatgtgctcattttttttaccacttctactcaatattgaattggagcttctagccactgcaataaagaatga

SEQ ID NO: 859687 - DNA, 120 bp, Artificial Sequence
  ENSG00000271913_45 (sequence is synthesized)
taaaatgataaagattggaaagaaggaagcaaaatcgtccttatttgcaggcaatacgattgtttacatatgattgttttctacatcctaaggatctaaaaaataattagaagtagtata

SEQ ID NO: 859688 - DNA, 120 bp, Artificial Sequence
  ENSG00000271913_46 (sequence is synthesized)
aattagaagtagtatattattccattctcacactgctataaagaactacctgaaactgggtcatctttgaagaaaagagtcttaattgacccacagttccacaggctgtacaggaggcat

SEQ ID NO: 859689 - DNA, 120 bp, Artificial Sequence
  ENSG00000271913_47 (sequence is synthesized)
ggaaacttacaatcatggcagaaggtgacagggatgccagcacgtcttcacatggtggcaggtgagagacagaacgaaggcggaggtgctacacacttttaaaagaagcaggtctcatga

SEQ ID NO: 859690 - DNA, 120 bp, Artificial Sequence
  ENSG00000271913_48 (sequence is synthesized)
gaattccatcacaagacagcactagaaggatggtgctaaaccactagaaaccacccttatgattcacctttcaccaggccccacctccaacactcagtatcacaattcaacatgagattt

SEQ ID NO: 859691 - DNA, 120 bp, Artificial Sequence
  ENSG00000271913_49 (sequence is synthesized)
gggtaagtacacagaaccaaaccatatcattttgcacctggcctttaccaaatgtcatgtccttttcacgtttcaaaaaacaattatgccttcccaagaatcctccaaattcttaactcg

SEQ ID NO: 859692 - DNA, 120 bp, Artificial Sequence
  ENSG00000271913_50 (sequence is synthesized)
caaagtctcatctgagacaaggcaagtactactcctctgcctatgagcctgtaaaataaagaaacaagttagttagttccaagatacagtgcaggtacaggcatcgagtaaatgctccca

SEQ ID NO: 859693 - DNA, 89 bp, Artificial Sequence
  ENSG00000271913_51 (sequence is synthesized)
tcttgcaagcaaaacccaggaaggcagtcatttaatctccaagctccaaaatactctcctttgactccatgtctcacatccaaggcaca

SEQ ID NO: 859694 - DNA, 79 bp, Artificial Sequence
  ENSG00000271913_52 (sequence is synthesized)
caaaacccaggaaggcagtcatttaatctccaagctccaaaatactctcctttgactccatgtctcacatccaaggcac

SEQ ID NO: 859695 - DNA, 120 bp, Artificial Sequence
  ENSG00000271913_53 (sequence is synthesized)
tcatgggctgggattgagtgcctgcagctttttcaggcgaacagtgcatgctgtcagtggatctatcatcctggggtctggaagatggtggctctcttctcacagctccattaggcagtg

SEQ ID NO: 859696 - DNA, 120 bp, Artificial Sequence
  ENSG00000271913_54 (sequence is synthesized)
ccccagtgggaacttggtgggagctccaaccccacatttcaccttcacactgcccttgtagaggttcttcatgagggatccagtcctgcagcagacttctgcctggacatccgggtgttt

SEQ ID NO: 859697 - DNA, 120 bp, Artificial Sequence
  ENSG00000271913_55 (sequence is synthesized)
ggctcccaagtctcaactcttgccctttgcatacccacaggcccaacaccatagggaagccatcaagacttggggcttacaccctctgaagcaatgacctgagctgtactgtggcccctt

SEQ ID NO: 859698 - DNA, 120 bp, Artificial Sequence
  ENSG00000271913_56 (sequence is synthesized)
ttagccatggctgaaacgggagcagctgggatgcagggcaccatgtcccaaggctgcacagagcagtaaggccctggacctggcccacgaaaccatttctccctcctaggcctctgggcc

SEQ ID NO: 859699 - DNA, 120 bp, Artificial Sequence
  ENSG00000271913_57 (sequence is synthesized)
tgtaataggaagggctgctatgaaggtctctgaaatgtcttagagggattttccccattgtcttggctattaatatttggctcctttttacttatgtaaatttctgcagctggcttgaat

SEQ ID NO: 859700 - DNA, 120 bp, Artificial Sequence
  ENSG00000271913_58 (sequence is synthesized)
tacttcccagaaaataggtttttcttttctactacatggcaggttgaaaattttccaagcttttatactctgctttccttttaaatataagttccaatatcaaaccacctcttcggaaat

SEQ ID NO: 859701 - DNA, 120 bp, Artificial Sequence
  ENSG00000271913_59 (sequence is synthesized)
gcatatgagcatatgctgttagaagcagccaggtcacttcttgaatgctttgctgctttgaaatttcttccaccagatactctaaataatctctctcaagttcaaagtttcacagatccc

SEQ ID NO: 859702 - DNA, 120 bp, Artificial Sequence
  ENSG00000271913_60 (sequence is synthesized)
gcaggggcacaatgccaccagtctctttgctgaagcatagcaagaatgacctttactccagttcccaataagttcctcatctccctctaagacctccttggcctggacttcattgtccat

SEQ ID NO: 859703 - DNA, 78 bp, Artificial Sequence
  ENSG00000271913_61 (sequence is synthesized)
aagtctctaggaagttccaaactttcccttatcttcatccaaagctgcttccacattttcaggtatcttttgtagcaa

SEQ ID NO: 859704 - DNA, 120 bp, Artificial Sequence
  ENSG00000271913_62 (sequence is synthesized)
caaactgttccaacctctgcccatccaaagctgcttccacattttcaggtatcttttgtagcaatgccccacttctctgataccaatttcctatattagtccattctcacactgctataa

SEQ ID NO: 859705 - DNA, 120 bp, Artificial Sequence
  ENSG00000271913_63 (sequence is synthesized)
aagccaaatagtgcatgttctcactgataagtgggagctaaactatgggttcacaaaggcatgcagagtggtactgtggacattggagactcagaatgggggaggctaggagggaggtaa

SEQ ID NO: 859706 - DNA, 120 bp, Artificial Sequence
  ENSG00000271913_64 (sequence is synthesized)
gggatgaaaaagtacctgttgggtacaatgtacactacttgggtgacgatgggtccactaaaatcccagatttaaccactgtacaattcatccatgtaaccaaaacccacctgtacccca

SEQ ID NO: 859707 - DNA, 120 bp, Artificial Sequence
  ENSG00000271913_65 (sequence is synthesized)
ggcgcagcagcgctcccaggctgcccccgcgataacacgcccctggcagccaggctcccagctctgttacgtgcccgggcggggaagagcttcctggtgtctcccggctcctgcccttct

SEQ ID NO: 859708 - DNA, 120 bp, Artificial Sequence
  ENSG00000271913_66 (sequence is synthesized)
gatattataaatgaatttttcctcatttctcttagaactttgattctttcacttcccacatttaaccttccacgtatccagaatttcccctagcataagttgatacggtcccaatgtttc

SEQ ID NO: 859709 - DNA, 120 bp, Artificial Sequence
  ENSG00000271913_67 (sequence is synthesized)
ttttttttttttcccaaatggccactcatttataccaacaccatttattgaatcgtctatagtccccactgatttgaaatgccagctttacataccaaagtcctgtatgcatttgcctct

SEQ ID NO: 859710 - DNA, 120 bp, Artificial Sequence
  ENSG00000271913_68 (sequence is synthesized)
gttctgtttggtaggtctattcaagctccagttcccaaaagtgttgagtgtcgcttaaaatctagaagggctggtttctagttttccataattgctcctcttttctagtgtcctctgtcc

SEQ ID NO: 859711 - DNA, 120 bp, Artificial Sequence
  ENSG00000271913_69 (sequence is synthesized)
tattagggcttattgatttttaaatatgatttgtggattcagttttctttagttctagtgagcaacaaaaacaaccaagaaaaaaataaaaaaaaccctccctgttttcctttctttctt

SEQ ID NO: 859712 - DNA, 120 bp, Artificial Sequence
  ENSG00000271913_70 (sequence is synthesized)
tctttttttaatcaagatcaccttaagtttaaaaattaacgtaggataacttgacatattttatgatttttatgttactctccaaaaatataataagtggttctatttattcaactctac

SEQ ID NO: 859713 - DNA, 120 bp, Artificial Sequence
  ENSG00000271913_71 (sequence is synthesized)
tgtgactgaatttgaggaacaacgcgcccaccccagagatggacagtggcctgttttcaggagatggcagcattgatgactgggacattgtatctcctcattcaagggagagaatgggaa

SEQ ID NO: 859714 - DNA, 120 bp, Artificial Sequence
  ENSG00000271913_72 (sequence is synthesized)
tgaaacatggatgtcttgggagttccaaagctcacagaggggagtgtgtggaagcaaagcccagggcaggctgtgccgagtatggagctttggtttctcagtcccaaacctgccatcctc

SEQ ID NO: 859715 - DNA, 120 bp, Artificial Sequence
  ENSG00000271913_73 (sequence is synthesized)
caccccgagatgctgggctgggacgttgcaaatcaatgcctgccttgctgcctggctccctgtgaggtcctgctgattgggccgctgcaggctggaggagggggaagggacttgctcctt

SEQ ID NO: 859716 - DNA, 120 bp, Artificial Sequence
  ENSG00000271913_74 (sequence is synthesized)
cctgagcctgttccatcagccggggtcctgggatgaaggtaacgtggagcagagttgcagctgatccacgatgtgttagcgcaagcaagaaataaacttttgtgatcctaagccacgggg

SEQ ID NO: 859717 - DNA, 120 bp, Artificial Sequence
  ENSG00000271913_75 (sequence is synthesized)
gtttttaagttgtttgttagagcatgacctatcctatcctgactgctgtacaaaattaagcaatttctgtttggcaggatttcccagaccctccggaaggctgctgtgctgtgtcaatct

SEQ ID NO: 859718 - DNA, 120 bp, Artificial Sequence
  ENSG00000271913_76 (sequence is synthesized)
ttaaaatgggaatgaggtatatcatttttcccagtcttaatgcccaagactttcttaatgaaatcatctactgggacttgaactgctgttccaaagaagttaatgggataaatggctacg

SEQ ID NO: 859719 - DNA, 120 bp, Artificial Sequence
  ENSG00000271913_77 (sequence is synthesized)
tgtgttctgtgcatgagtcatcttcttccaatgagattgaaagcccctcagtggagtagcatagcatccaacacagagttcaattcaacaaacttgttgataaaaaaatctcatcctttc

SEQ ID NO: 859720 - DNA, 120 bp, Artificial Sequence
  ENSG00000271913_78 (sequence is synthesized)
ctgccacctccatgccccaccccatgctgaaagatttatttgtaatacctgtttcttgcttcgtgaaccaagttaagcagtcagtgcatcctgctcatgtcatatgaggccctgtctcgc

SEQ ID NO: 859721 - DNA, 76 bp, Artificial Sequence
  ENSG00000271913_79 (sequence is synthesized)
tcagtgcatcctgctcatgtcatatgaggccctgtctcgcccatggaactaccactgacttctttttatttaacag

SEQ ID NO: 859722 - DNA, 65 bp, Artificial Sequence
  ENSG00000271913_80 (sequence is synthesized)
tggtttcaccatgttggctagctggtctcgaattcccgacctcaagtgatctgcctacctcggcc

SEQ ID NO: 859723 - DNA, 85 bp, Artificial Sequence
  ENSG00000271913_81 (sequence is synthesized)
tgtctggccactactactgacttctacaagtgctcccttctggggcagcgcctgggaggcaaagagctgtgtgagaagcttattt

SEQ ID NO: 859724 - DNA, 120 bp, Artificial Sequence
  ENSG00000271913_82 (sequence is synthesized)
cagcgcctgggaggcaaagagctgtgtgagaagcttatttccagaagaggtgatgaaggtaaatcaataagattccgatgctgtaaactggtcaagtgtcactctgcagcagacatgcag

SEQ ID NO: 859725 - DNA, 120 bp, Artificial Sequence
  ENSG00000271913_83 (sequence is synthesized)
gcgctttgcgaggttcctggctagggaggcggccttggctggcttgaccgtcatccttgaggcctgcggggcaacggtggctgtccttggcccggctttggaatgtggctttgcagggct

SEQ ID NO: 859726 - DNA, 120 bp, Artificial Sequence
  ENSG00000271913_84 (sequence is synthesized)
aaattagctctgtttctgttagatgagatgcaaatattttcccaagtttgtcctttgtcttttgactttgtttatggtgtttcactcatgcagatgttttttattttcatgtttttaact

SEQ ID NO: 859727 - DNA, 88 bp, Artificial Sequence
  ENSG00000271913_85 (sequence is synthesized)
cagcacatcttcatatgatggcagggcctcgattctgtcctcctcgtcctgcatctccagagcacccatccactcctcaaagagggtg

SEQ ID NO: 859728 - DNA, 120 bp, Artificial Sequence
  ENSG00000271913_86 (sequence is synthesized)
cacaaattactcttgaaacttgatgcaaacaacctgtttaaaaactgatgtaacgagaggaatttcatggatgcaaatgaacacctgtgaaaattcttcggcaagaactgtttcatttag

SEQ ID NO: 859729 - DNA, 120 bp, Artificial Sequence
  ENSG00000271913_87 (sequence is synthesized)
caacaccaggttagcagtttgagagaggatcttttttgggtctacatgcccaaatttacagactgttttgctacttgaatctgccataatgtttgttgaataaataatctctatctttga

SEQ ID NO: 859730 - DNA, 120 bp, Artificial Sequence
  ENSG00000271913_88 (sequence is synthesized)
gaaaatatcaccccagtccctcctggtcatctcactccctcctggcctgtacagtttccactgagaagtctgctgccagatggattggagctccttcatggggagtgaagccagcctgct

SEQ ID NO: 859731 - DNA, 120 bp, Artificial Sequence
  ENSG00000271913_89 (sequence is synthesized)
tctatgctgccattttggaactcctgaaaaatattttcactggattagaattagagcttgatagttctttaaggacttgaaaaatattgtgccactttcttgtctccatgttttaggctg

SEQ ID NO: 859732 - DNA, 120 bp, Artificial Sequence
  ENSG00000271913_90 (sequence is synthesized)
ccccacagacacctcattttgggaaagaaggcctcgattctgtcctcctcgtcctgcatctccagagcacccatccactcctcaaagaggtcgcttgaaagtagcttccgggggatactt

SEQ ID NO: 859733 - DNA, 120 bp, Artificial Sequence
  ENSG00000271913_91 (sequence is synthesized)
ctgaggaagtcctgggggatgagagtgggctgttggcctattggtactgtatgatgtcccatgtccttgttttcacccggttttcgttccatcgcagggtgctctatgcttagcccatca

SEQ ID NO: 859734 - DNA, 120 bp, Artificial Sequence
  ENSG00000271913_92 (sequence is synthesized)
gtgttctgaggggccactggattttgacgtatggattctgccacggaacaatcaaattgcccgtacttggcaaagttttgggagagcagaatgcatcactttctgttggaatctgaggtc

SEQ ID NO: 859735 - DNA, 120 bp, Artificial Sequence
  ENSG00000271913_93 (sequence is synthesized)
acagaaacagaggtgcttactaaataaataaataaagggcttaatgaaaaaaattaaactccaagatcagtgtaccttgctgtgtggggagaagagcctatttcttgcatcctgagaatg

SEQ ID NO: 859736 - DNA, 120 bp, Artificial Sequence
  ENSG00000271913_94 (sequence is synthesized)
agtgtgtcagggccccttggcaggttatttggcgcaagtgtgttgaactcaccttaaagaccacagcgaggaggtgcacggggagcctctccagatccaccgcatccccagagttgagct

SEQ ID NO: 859737 - DNA, 120 bp, Artificial Sequence
  ENSG00000271913_95 (sequence is synthesized)
cctccttcagctccttacgggctttctcgttggctgctctcctgaatatcccttccgttgaagggcctttaaggcatagaatagtgagaatgtcctaaaggaaacagcaataggaacagg

SEQ ID NO: 859738 - DNA, 120 bp, Artificial Sequence
  ENSG00000271913_96 (sequence is synthesized)
aaagggttacccttcttctttagtatactgagatagtcttaacaggaatattgatgtcagattttgctttcagtccagttgctgtcaatggccttcctcaaccctgctatttttctaaga

SEQ ID NO: 859739 - DNA, 120 bp, Artificial Sequence
  ENSG00000271913_97 (sequence is synthesized)
ggaggcaaattgtgaaagctctaattttgcactttctaaaatcactttggagctctctcctttcaaatacttccatatgaacattggatttcagatcacaaagtctatattctgtttccc

SEQ ID NO: 859740 - DNA, 120 bp, Artificial Sequence
  ENSG00000272070_0 (sequence is synthesized)
gcaggcttttgagacacacattaggagaggactctgcccgctgtctgtctcacaatctgctcgaaatatcttggtcaggaatctcaggatgtctagtgaccccgagtgaggtgctgcctt

SEQ ID NO: 859741 - DNA, 120 bp, Artificial Sequence
  ENSG00000272070_1 (sequence is synthesized)
ttattcctgagcatctttggaagcaggaagcagggagcaacggtagcgagaggtattcggatctgagtatcagcaggaagaagaaacagaggaagaagtcccccataaggaaggcgtgag

SEQ ID NO: 859742 - DNA, 120 bp, Artificial Sequence
  ENSG00000272070_2 (sequence is synthesized)
ccgatacgctgtaaaattctggaagagaaggctaggggtttaaggttggtaatctctcagaagatctgcgtctcggtgacggaaagaactaaggatactcacagatggaattctaaactg

SEQ ID NO: 859743 - DNA, 120 bp, Artificial Sequence
  ENSG00000272070_3 (sequence is synthesized)
gtagcagaccctgaaggacaatgtcaccatcagaaccaccaacaaggacaaactgtccctctcctgcatcaccctgcataccatctgcatccacaaaaatgctcattcttcaacaagcct

SEQ ID NO: 859744 - DNA, 120 bp, Artificial Sequence
  ENSG00000272070_4 (sequence is synthesized)
ttgagaatgacgggatagatctagcagttatgcccaaggaagaccctcggccctttgaatttgaaggcactgaaaatcgtataaatgttttcatataaacgtatgcatctttgatataaa

SEQ ID NO: 859745 - DNA, 120 bp, Artificial Sequence
  ENSG00000272070_5 (sequence is synthesized)
taacaaaatggcttttagcacaaattttgttttggaaattttgaaaaacgtcttaataagaggaatgtttactcttaagtctgcagtagattttgaacaccggcagtaactgtacaaata

SEQ ID NO: 859746 - DNA, 120 bp, Artificial Sequence
  ENSG00000272070_6 (sequence is synthesized)
tatcagattagttttaatagccatctccccttcccctacaagtaaaggagagtactacagcagtatgtactctgaattgctgctattgaagaacccctgagcctgtgcagcgtggcactc

SEQ ID NO: 859747 - DNA, 120 bp, Artificial Sequence
  ENSG00000272070_7 (sequence is synthesized)
gaggctgaggcaggaggattgcttgatgccagctagaggctgcagtgcactatgagaacacctgtgaatagccactgcattccagcctgagtaacatggccagaccccatctcttaagaa

SEQ ID NO: 859748 - DNA, 120 bp, Artificial Sequence
  ENSG00000272070_8 (sequence is synthesized)
cagaccccatctcttaagaaaagaaaagaaaccctgaaccagaggagcagagctgccaccacttagtggtggggatggggcagaacagctcagggcaagacacaggccttggatgccaat

SEQ ID NO: 859749 - DNA, 120 bp, Artificial Sequence
  ENSG00000272070_9 (sequence is synthesized)
gccagccgtcagatattgagcaatgtgtaagtggggttagcctgcaggagaacctgctcgccacctcctcctcttcattctttaggtgatccccattgacctagacaatatctttaatat

SEQ ID NO: 859750 - DNA, 120 bp, Artificial Sequence
  ENSG00000272070_10 (sequence is synthesized)
agagttctcctgatttttctacacaattttacagggcatacagaatatatttcctgtccaataatgacagaaatacttgattttgaagagtaacagttatagcttggaatagaagactgg

SEQ ID NO: 859751 - DNA, 120 bp, Artificial Sequence
  ENSG00000272070_11 (sequence is synthesized)
aggcagtttgagggccgacttcagagtcctggttgaaatgaaggttgagaagtataatgcagtcagtgcaggtgactttcagctgggtatctagtcctatcagaggtaaaaactgtggtt

SEQ ID NO: 859752 - DNA, 120 bp, Artificial Sequence
  ENSG00000272070_12 (sequence is synthesized)
gccctaaccaaaacaataggactaagagaccttaaatgaaagatgaaagttattatagagagaaatgatcatactggcaaacaattcacctccaagaattatgatgtgactctttgtcag

SEQ ID NO: 859753 - DNA, 120 bp, Artificial Sequence
  ENSG00000272070_13 (sequence is synthesized)
tatttcttttgggtgactgggaacactgcccagcacctccatcacatgctttagcgcttcccaccctaacttagggtcccatatgcctcctgtttcttcttgaccagtgacctgccactg

SEQ ID NO: 859754 - DNA, 120 bp, Artificial Sequence
  ENSG00000272070_14 (sequence is synthesized)
tgggcactgtcattctacatgtcagtgagtgcagagtgctatggttaccatgcagactatctttgagctgactctgcaggccagtgaccagggttcaacttgctcagtgtcatcctgaac

SEQ ID NO: 859755 - DNA, 120 bp, Artificial Sequence
  ENSG00000272070_15 (sequence is synthesized)
ctgcatgtgatggtggatgaccattgcaaaaatgcaaggacactatgccaggagttgcagccaagtggggccctctttgatgctgcaccactcacaatgcaacccagctatcccatcacc

SEQ ID NO: 859756 - DNA, 120 bp, Artificial Sequence
  ENSG00000272070_16 (sequence is synthesized)
aaagtggacaccagctggggcataaaggctgactgtcctatcatgtgcttcaggccagctaatgtggctcttcaaactagggatgtgcacgagctagatgcgtgccgtgtcactgtgggt

SEQ ID NO: 859757 - DNA, 120 bp, Artificial Sequence
  ENSG00000272070_17 (sequence is synthesized)
aacagagatgcaacctgccaaggtttgttggtcaccgtggtcaatggtgaatcatcacgctgaaacatcacctggttgctgctcatagtttgcaggagttgctaccagacctcagcaatc

SEQ ID NO: 859758 - DNA, 120 bp, Artificial Sequence
  ENSG00000272070_18 (sequence is synthesized)
gcccagcacccaacagcaggcagcagacagcacccaacagctggcgatggccgttgccttgatctccatgctgtttctcctcagtgtgactctggccatctctctgaacctgcaatgccc

SEQ ID NO: 859759 - DNA, 120 bp, Artificial Sequence
  ENSG00000272070_19 (sequence is synthesized)
cctatagctccattgcctggggctgttttcagctggatctctggtccaagcccggatatggagttgtctccaacttaaagaaaggaaatttgccctgttcctacaacgtatgtgtggttt

SEQ ID NO: 859760 - DNA, 120 bp, Artificial Sequence
  ENSG00000272070_20 (sequence is synthesized)
tagatatttttaaaatcttaatttctttaactcaagaaacagctttgaaccaggtattctctgcagtgccagcaatgaagctttgttttatttttgtttttgtagaaacggggttcacta

SEQ ID NO: 859761 - DNA, 68 bp, Artificial Sequence
  ENSG00000272070_21 (sequence is synthesized)
tgtgggcagcaatgaagctttaaatgttgcatttgattcaaatgtatttgtgtgatattttaacattt

SEQ ID NO: 859762 - DNA, 120 bp, Artificial Sequence
  ENSG00000272070_22 (sequence is synthesized)
gcatttgattcaaatgtatttgtgtgatattttaacatttttattttatacttaccatccttttataaatcactcctgcgtgtttttggttgctgaaagtagggagctctacaggtttac

SEQ ID NO: 859763 - DNA, 120 bp, Artificial Sequence
  ENSG00000272070_23 (sequence is synthesized)
ttactagttcttatgtatattttaatttacctcattagctcacaatttctttggggaaaagtttatgcctattaatgtgtattctgaaaagttacattctctgttaaagagttacttcct

SEQ ID NO: 859764 - DNA, 120 bp, Artificial Sequence
  ENSG00000272070_24 (sequence is synthesized)
tgcaatattgaagatgatttattgcacctttaaatttctactctttggctccatgtacttgtctttgagaagctgagaaactgtagatttggttaagaactaaagttctctttccaaaaa

SEQ ID NO: 859765 - DNA, 120 bp, Artificial Sequence
  ENSG00000272071_0 (sequence is synthesized)
atgttgcatcctgttagccaggttcctagttcagtttagctgttgtgcaggtcaaggactcttaaggattgaattgcatcccttcaaaagatattgaagtcctaacccccagaatcggtg

SEQ ID NO: 859766 - DNA, 120 bp, Artificial Sequence
  ENSG00000272071_1 (sequence is synthesized)
actgtgaccttatttggaaatgggtctttgcagacacaatcaagttaagatgaggtcatattggattaaagtggtgtgtaattcaatagatgatctctttaatgaaaagggaaatttgta

SEQ ID NO: 859767 - DNA, 120 bp, Artificial Sequence
  ENSG00000272071_2 (sequence is synthesized)
caatgtgtatgtctgcaagccaaggaacaccaagtattgccagccatcaccagagctggaggaggggcctggaacagattcccactagagcccccaaaaggatccaaccctgctgacact

SEQ ID NO: 859768 - DNA, 120 bp, Artificial Sequence
  ENSG00000272071_3 (sequence is synthesized)
ttgactttggagttgtggccttcagaactgtgagagaattaatttgtgttgttttgagccactcagagtgtggtattttgttatagaagtccttggatactaataaagacattaatagcc

SEQ ID NO: 859769 - DNA, 120 bp, Artificial Sequence
  ENSG00000271911_0 (sequence is synthesized)
attgtcttgatcaagctttcaccctgtgagatccacacacaggaggagagggatgcagctctcagccgttcacagagcccggccctaccgcactgctcagtgtgcctactcttggcaaga

SEQ ID NO: 859770 - DNA, 120 bp, Artificial Sequence
  ENSG00000271911_1 (sequence is synthesized)
tgcaacttcccgttccgagaaaaaggacttagaaaggatcgtaaaatgggctcccaagtctcctggaatagcaaatagcttttaaaagacaaccctttaatggcctatgagtaaccaagt

SEQ ID NO: 859771 - DNA, 120 bp, Artificial Sequence
  ENSG00000271911_2 (sequence is synthesized)
caaaaacaaaagtattgaatatccctttaaatgtatgtgagtttaaaaagcaagatgggaatacatttggcaaagtttcttctggattttatagaattcaaaatactcgagaaattttta

SEQ ID NO: 859772 - DNA, 120 bp, Artificial Sequence
  ENSG00000271911_3 (sequence is synthesized)
cctatacgcccacacacaactgcaaaactgttataaacgacgtggggagataacaaaaacgatactgtgcaaatgcaaacagtatgcagcttctgcactgctgtgcctgatggaaacatt

SEQ ID NO: 859773 - DNA, 120 bp, Artificial Sequence
  ENSG00000271911_4 (sequence is synthesized)
tctctcttttatgagcttctctttgcggatggagacggaagaaagatgggcgtatgaggcagggaggggagaaagggggaagagacgcctattccggggctccatggctgttctcgatac

SEQ ID NO: 859774 - DNA, 120 bp, Artificial Sequence
  ENSG00000271911_5 (sequence is synthesized)
tcactcgtgttgctctttaaatggaaccatttgctgcacattttgaatcgttaacatttggtagaataggggacaatggattttcatgtaaactatgaattttatgacaatgaattagca

SEQ ID NO: 859775 - DNA, 120 bp, Artificial Sequence
  ENSG00000271911_6 (sequence is synthesized)
tgttcattgaacagaaagtaaacaaagcttagtacaaaattggttcagtatataacctaactcttctgctgcttaatgaagtgatgggatgaaaccaaaacaaatagctttatgctttgt

SEQ ID NO: 859776 - DNA, 120 bp, Artificial Sequence
  ENSG00000271911_7 (sequence is synthesized)
aaagcacagggaaacatactttcgtgtgtaattactgcgtggttatgacaaggctggtacctgcctgaaccatcagttacaaagtttgcagcaaccactcctgctttagcagactgggtg

SEQ ID NO: 859777 - DNA, 120 bp, Artificial Sequence
  ENSG00000271911_8 (sequence is synthesized)
acaacactggcattagaacagagaggaaaatatacatgcaaatatagtcagttctgacgaacctccaacatctgttaagcacctactgtgtgtgtaccaggcactggggatatggcacaa

SEQ ID NO: 859778 - DNA, 120 bp, Artificial Sequence
  ENSG00000271911_9 (sequence is synthesized)
tgagatgggggcatttgcattgtccagaactctagggagggtagggaggatgaggtatgattgtcttagttgttctgtgatgattaatttcgtgtcatcttgaccagaccaggtgtcttc

SEQ ID NO: 859779 - DNA, 120 bp, Artificial Sequence
  ENSG00000271911_10 (sequence is synthesized)
ctttttcttctgggatattggaagaaaatgttcatgatcttcacagtttgagtgaagtgcaacagtctaaccgggatgtgtctcagtgactggcctctattttcttttctggataaaggt

SEQ ID NO: 859780 - DNA, 120 bp, Artificial Sequence
  ENSG00000271911_11 (sequence is synthesized)
ccatacccaggaaaattgaaacatacgtccctacaaaaatatgtgcaagagtgatcacagcagcaatactcacagtagtcaaaaagtggagacaatccagatgtccacgaactgatgaaa

SEQ ID NO: 859781 - DNA, 120 bp, Artificial Sequence
  ENSG00000271911_12 (sequence is synthesized)
agataaagtgtggcatatccatatccacataatggagtgttatcagctgtaaggaggaatgaagttctgatagatgctacaacatgcgccagccttgaaaacattaggctatgtgaaaga

SEQ ID NO: 859782 - DNA, 120 bp, Artificial Sequence
  ENSG00000271911_13 (sequence is synthesized)
agccagatgcagaggccacatgtgtcattccacacatatgaagtttccacggtagacagttctatggacacagcacatggattcctggttgcctagggctgggggtggggcgactggggg

SEQ ID NO: 859783 - DNA, 120 bp, Artificial Sequence
  ENSG00000271911_14 (sequence is synthesized)
gaagtgaggagtgactgctatgggtagagggcgtttctgggaggtgagaaaggtctctgaaaattgcttgtgatggtggttgcacaactttgagaatatggtaaaattcattgaattata

SEQ ID NO: 859784 - DNA, 120 bp, Artificial Sequence
  ENSG00000271911_15 (sequence is synthesized)
tacactaaacgggtgaactttatcatcgaattgtatacactaaatgggtgaactttctcattgaattatatacactaaatgggtgaactttctcattgaattatatacactaaatgggtg

SEQ ID NO: 859785 - DNA, 120 bp, Artificial Sequence
  ENSG00000271911_16 (sequence is synthesized)
aactttctcattgaattatatacactaatgggtgaactttctcattgaattatatacactaaatgggtgaactttatggcatatggattgtatctcaataaagctgttgaaaactttaaa

SEQ ID NO: 859786 - DNA, 120 bp, Artificial Sequence
  ENSG00000272076_0 (sequence is synthesized)
tgccaagagcatagtgattgttgggatttaaaggaataaatttcgttttttggctttattggtatacttggacaataaaagtcatgtgaacaatgtcaaatgtaaagtttaaaataaatc

SEQ ID NO: 859787 - DNA, 120 bp, Artificial Sequence
  ENSG00000272076_1 (sequence is synthesized)
attcttgttcatggagattagttttgttttttagatctttttacattttaatctccccaaaatcacatatttagatatgaacattttgccaaaagagggcagtattcgcctacagtagaa

SEQ ID NO: 859788 - DNA, 120 bp, Artificial Sequence
  ENSG00000272076_2 (sequence is synthesized)
tgcaagttttaatttgttttctattacttttatggatttaaaacatttttgtttgaaaatgttagtctttaaagataaagccaaaaatctgtttaaaaatacctgcttacagaatgacca

SEQ ID NO: 859789 - DNA, 120 bp, Artificial Sequence
  ENSG00000272076_3 (sequence is synthesized)
aaaagtagatgttttcatatttattaagttttcagacacgtcctcaacgaggtgctgctcacttcagggaaagatggccagttcaaactgctgatgaaaagtctgcaaccagcaagacca

SEQ ID NO: 859790 - DNA, 80 bp, Artificial Sequence
  ENSG00000272078_0 (sequence is synthesized)
gcgtcgcccagcgccaggcccaggccggcggccgccgactgcaggaagagcagcgagcccggctcggcgcccagcgacag

SEQ ID NO: 859791 - DNA, 120 bp, Artificial Sequence
  ENSG00000272078_1 (sequence is synthesized)
acagggagccgtccagactgatgggaggcccgggcgcggggccctctgccgcgggctcgccgcgctcctgcttctcgtgcttgcgcttgtgcgagtccatctgcgacatgcccaccaccg

SEQ ID NO: 859792 - DNA, 120 bp, Artificial Sequence
  ENSG00000272078_2 (sequence is synthesized)
tgtggcggcagcccgggaaggtgcagtggaagtgcgagcacttgagcttgtacttgcagtcgggcacggcgcagtcggcgctggagctgaactggcagaagcccgcggcgctgatcacgt

SEQ ID NO: 859793 - DNA, 120 bp, Artificial Sequence
  ENSG00000272078_3 (sequence is synthesized)
cctgtttgccgtggtgcttgcgatgcgccgtgaccttggtgctgtcggtgcagcggaagcggcagcgcaggcagtggaagtgcgtgctggtgcccgagaaggggcagtcggcgaagtggc

SEQ ID NO: 859794 - DNA, 120 bp, Artificial Sequence
  ENSG00000272078_4 (sequence is synthesized)
agctgagtgaggccttgaagcgcttgaagtcgtccagcaccaggttgtccacgcggtcgtggtgctgcgcgtgcttgtacatgtgcgtgcgcccgcagaacttgtagccgcagttctcgc

SEQ ID NO: 859795 - DNA, 120 bp, Artificial Sequence
  ENSG00000272078_5 (sequence is synthesized)
gcgtgcagtggtagtgggtgaccttgagcgagaactgacaagctgcgtccttgcagtcctcgtaaaggtcgaagcgccggaagccctccagcatcatgccctcgtccagcatcttccggg

SEQ ID NO: 859796 - DNA, 120 bp, Artificial Sequence
  ENSG00000272078_6 (sequence is synthesized)
aggacgccgtcttccgccgcttgccgaagggcgacatgtcctcgatgatccagaagcgctttttggcccccgaggctgtcggcatagagatggtgttccctggggaggggcagggaggaa

SEQ ID NO: 859797 - DNA, 120 bp, Artificial Sequence
  ENSG00000272078_7 (sequence is synthesized)
gccgcacacatgacaatacaaagtcaccgttctccctgcaaggagccaccaccatccagtgaggagggtcccttccacccaagagctcagaccactgtgcaggccagtgacggcctggag

SEQ ID NO: 859798 - DNA, 120 bp, Artificial Sequence
  ENSG00000272078_8 (sequence is synthesized)
gggcctggcccctacccgtgacttcacgtgccctgcagagattcagccatgggtgtgagccacagaggaggccaatacggaggctcggagggagacgcagccctccttgtcaggctggga

SEQ ID NO: 859799 - DNA, 120 bp, Artificial Sequence
  ENSG00000272078_9 (sequence is synthesized)
gttgtcctctgaggaccaccacgcccagtccaccccacctggccctggcaggatcaccacatgccctgcaggagcagtagccactgccgccaccatcggcccacgcgggctggcctgctc

SEQ ID NO: 859800 - DNA, 120 bp, Artificial Sequence
  ENSG00000272078_10 (sequence is synthesized)
tgggacaggcagtgaggtaggagcagcagcatctttggctagaaggacatcacccgatggccatgccccagagaggctggggacagcagcaccatccgcagtgaggaacagggcctccta

SEQ ID NO: 859801 - DNA, 120 bp, Artificial Sequence
  ENSG00000272078_11 (sequence is synthesized)
gcgcccttgctagcacctactcccgagacgcgaggggaacgcgggactcccggctcatcgagggactcacttctcctggaactggaggaatccgggtttgacctggggcttggcgttctc

SEQ ID NO: 859802 - DNA, 120 bp, Artificial Sequence
  ENSG00000272078_12 (sequence is synthesized)
tagagaagtcgttgccaagggcgaggcgggcaggtgaggcactgacgctgggatctgaggcatctggggtatggtggaagccagctgcttccaggcgagcagggtgggggtggagggcac

SEQ ID NO: 859803 - DNA, 120 bp, Artificial Sequence
  ENSG00000272078_13 (sequence is synthesized)
ggaggccgggctgggagcgggcccctccagagaggacaccgtggccgtggtgacaggagggaccggaggggacgagggggccatgggaggtttggtctcggcggccgaggccggaaaggc

SEQ ID NO: 859804 - DNA, 120 bp, Artificial Sequence
  ENSG00000272078_14 (sequence is synthesized)
agcctctgtgtttccttttgctgctcctccctctgtccggaagtggaagctgcgagaggtagaagagggggtctcatggggggcagtgaagacaggtgtggaggggcatgcatgtgaccc

SEQ ID NO: 859805 - DNA, 120 bp, Artificial Sequence
  ENSG00000272078_15 (sequence is synthesized)
catcacaggcctagaccccggtgtccgtccctactcgtccccatcactcagctccagaagtcccctgtgaccccaccaggacagaaggactggagggcaaactgcagcgtcccctggttc

SEQ ID NO: 859806 - DNA, 120 bp, Artificial Sequence
  ENSG00000272078_16 (sequence is synthesized)
cgaacttggtctcctggcttgggcctaaccatgccttcctacttgtgcccttcctcggtccccagctcctccatatgtgtgacagcaggccctgccccaggaagcctcttccttccagaa

SEQ ID NO: 859807 - DNA, 120 bp, Artificial Sequence
  ENSG00000272078_17 (sequence is synthesized)
cctgctcggaggtcttaaaggtaggattctcagtattcacagcaggcttccccgcgggctacggccgagggtgcctacgcggtcggaaaagccttgggagcactgcaggtctgttttaaa

SEQ ID NO: 859808 - DNA, 120 bp, Artificial Sequence
  ENSG00000272078_18 (sequence is synthesized)
cgatttcaagttctgagttcccttataagtgggcggctaggctcgaagccttttaactcaatgggatttacaaattcatttcattatgtttaggtcaaaggtaacctagagatgtaatat

SEQ ID NO: 859809 - DNA, 120 bp, Artificial Sequence
  ENSG00000272078_19 (sequence is synthesized)
tgtggcttggaaaggccttcagctagggttcctgctccaggtcacagccgagtctctccagctgggctctgtgcccctctggcctgctctgcagggagcacgtgctgggactgatggctg

SEQ ID NO: 859810 - DNA, 120 bp, Artificial Sequence
  ENSG00000272078_20 (sequence is synthesized)
ccctggggacgtgggtgcagcagcagctgttgctcagggtcccaggaagggcctggacaggggctcagagcccccggctgagggctgcatgtgtgaaggaggatgggaagcccacccttg

SEQ ID NO: 859811 - DNA, 120 bp, Artificial Sequence
  ENSG00000272078_21 (sequence is synthesized)
ctggggcagcatctccgagaagccggctcagcttctgtggcccagcgggaactgctgtaccagcctgagccccacccaccccagagccaggctgggatccgtggggctctgtggaaatgg

SEQ ID NO: 859812 - DNA, 120 bp, Artificial Sequence
  ENSG00000272078_22 (sequence is synthesized)
cccccagcaccctactcactttgcgtgcttgatggccccgtccaaggtgctgaagagcgcgccgcattcctccaccacgcagtggaagtgggccttgtggaggaagtcacactggccgtc

SEQ ID NO: 859813 - DNA, 120 bp, Artificial Sequence
  ENSG00000272078_23 (sequence is synthesized)
acagaagtcctttgtaccaaacctagccagaggagctggcgttagaggagagcctggggctccagggcgggtgcggggggacgatgggtggacgcggccagcagcccctcacctgcgcag

SEQ ID NO: 859814 - DNA, 120 bp, Artificial Sequence
  ENSG00000272078_24 (sequence is synthesized)
gtacaccttccagggctctgccaacttctcctgaaccagcgccttcacggccttgcctaggaagggcgagggctccgcagcggggctcccctccgcttccgccttgatgttcagcaggct

SEQ ID NO: 859815 - DNA, 120 bp, Artificial Sequence
  ENSG00000272078_25 (sequence is synthesized)
gcccaggccagggttgccctgagacatctgtgagggacagaggccgagcatggggctggggtagcttagaacacagacacggcagcctggggagcaacagccgaagctctgggctgctgg

SEQ ID NO: 859816 - DNA, 120 bp, Artificial Sequence
  ENSG00000272078_26 (sequence is synthesized)
gacccacccagccctcagagccagcagagaatgcggcccgcctacttggctctggctgtggctgggccctctctgaacagagagcctgctgtgctgccccgaccccaggagctgcgaggc

SEQ ID NO: 859817 - DNA, 120 bp, Artificial Sequence
  ENSG00000272078_27 (sequence is synthesized)
ctcctcagggctcctccacatgagcccgtgccgcgggatccatcactcaagccgaggccgcgactcagggtgcacgctgcagcccatctttccccagacttcgcggctccctggttattt

SEQ ID NO: 859818 - DNA, 120 bp, Artificial Sequence
  ENSG00000272078_28 (sequence is synthesized)
tcctgccagaaggttttcaaaagaagcgcagaaggaggagggatgggggaacccctacgaattccttgagaacaagaggaggcccacaaaggagagagagggagggagggagggagggag

SEQ ID NO: 859819 - DNA, 120 bp, Artificial Sequence
  ENSG00000272078_29 (sequence is synthesized)
gctcacgggtgagacccagacaggcttgctgcagcggccgggagggggtcattgcgaggatccaagggaagggagggggtcgtgggggcggaggccaaaggaaggggagggggaaggaga

SEQ ID NO: 859820 - DNA, 120 bp, Artificial Sequence
  ENSG00000272078_30 (sequence is synthesized)
gcaagagggcaagtggccaaggagtggatgccacggaccagtgaggctccttccccaccgagtgcccggctggggccctgcggcgagaggtccggcccgggcccggcccctcctcagggc

SEQ ID NO: 859821 - DNA, 120 bp, Artificial Sequence
  ENSG00000272078_31 (sequence is synthesized)
agtcacttgtgtacagtaaccgaattaatcttgctgtagtcaaatgtatcatgtgaaggggaaaaatgtatttgagatgatgtataatttacaaagaccctgcattatttaaaataaata

SEQ ID NO: 859822 - DNA, 120 bp, Artificial Sequence
  ENSG00000272078_32 (sequence is synthesized)
ttccggagcgacctctccggaaggcgtccgagaccattactcaaccggaaaagtggaaattgatgttttgctcccactttagtcccccctcccccatccccttttaaacaaacaaaaaat

SEQ ID NO: 859823 - DNA, 120 bp, Artificial Sequence
  ENSG00000272078_33 (sequence is synthesized)
tataaaataaataaataaaattaataacgaggcacgaacgaagttgaagggctctggaaaagcttttggagccctccatctgaagggaaaaaaaggtgtcagaggctggaatatatttct

SEQ ID NO: 859824 - DNA, 120 bp, Artificial Sequence
  ENSG00000272078_34 (sequence is synthesized)
tcagccagttcattaaattaatttgtaagcagtggctctgaaattatatccgatgaaaaatggcctcaaaatttaaatggtacaaactcatcttattagaggcaaaacattaaaaaacaa

SEQ ID NO: 859825 - DNA, 120 bp, Artificial Sequence
  ENSG00000272078_35 (sequence is synthesized)
acacatccccccaccccccagcacagctttaatttctctgggtgggggaacgggaggcgtgtgatggatggctcttaccttattcataagcgaggataaaagagatgaatttgccgggac

SEQ ID NO: 859826 - DNA, 120 bp, Artificial Sequence
  ENSG00000272078_36 (sequence is synthesized)
tgcgtggccatttgattcgttgctagaacacacaaaccaagggacttgagctcagacggccggggcctgggccctggggctcaccttccctgcccgaccctggggctccagccgagcccg

SEQ ID NO: 859827 - DNA, 120 bp, Artificial Sequence
  ENSG00000272078_37 (sequence is synthesized)
ctgcaactgcctgggcgggaccaccccggggctccagctcgaaggtgtggttcccggggctggctcccatagggggcctcgcctcacctgggctccttcacagtcaggtctagactgcgg

SEQ ID NO: 859828 - DNA, 120 bp, Artificial Sequence
  ENSG00000272078_38 (sequence is synthesized)
tcctgggaggcttcgtgggggcctggggcgccggtgctctcaccgggttccggcttcacttgggccggggggaacctggctggggtgacctgctgcccgcttcctgcaggggaggggtgg

SEQ ID NO: 859829 - DNA, 120 bp, Artificial Sequence
  ENSG00000272078_39 (sequence is synthesized)
gaagatgcgtcagaggggctgaaggcctggcccgggcacagacagccgccgtgccccctggagggagggcagtgggctgggtgggccccggctactggtcagcgcttctcccgctgacgt

SEQ ID NO: 859830 - DNA, 120 bp, Artificial Sequence
  ENSG00000272078_40 (sequence is synthesized)
gatcgctcgcgacgctcgctcctgtgtggcaattcttcaagtgataattattgcaaaattatgtcaaagttgtcctggctcagggcctcctggaggagaagggcgggaggctggggaggg

SEQ ID NO: 859831 - DNA, 120 bp, Artificial Sequence
  ENSG00000272078_41 (sequence is synthesized)
ggctggggtgggggcgggggcccttcattttctccaccaactgtcacagtcgatttgtggggctgccgcttaggcttttattaaagactctgttaatgctgagggaaagtggcagatctg

SEQ ID NO: 859832 - DNA, 120 bp, Artificial Sequence
  ENSG00000272078_42 (sequence is synthesized)
gactgggagggcccctctgtggtccccagcccgcggttgctggggtgacggcccccgcacggagcatgcccaggaagggcctctgctgtgtcagggcgatggggccgatggccaatcaga

SEQ ID NO: 859833 - DNA, 120 bp, Artificial Sequence
  ENSG00000272078_43 (sequence is synthesized)
gcggccacaccgggtgacctcgcagtcaagctatccggggcagggacacgaggccaggctgggccgagctgggtccggaagggagctgggcgggtgaggccgcaggaggccagcagagca

SEQ ID NO: 859834 - DNA, 120 bp, Artificial Sequence
  ENSG00000272078_44 (sequence is synthesized)
ggggtaaaagaagttgctgacagggccatccagcgagctttcccctacaatcccccagtgacggaaatatgaatttgccccaaggtgctgtagctgacagagtgctgcttcagaaacagc

SEQ ID NO: 859835 - DNA, 120 bp, Artificial Sequence
  ENSG00000272078_45 (sequence is synthesized)
aagtggcattttattaaaaaataaaacggccccctcccctgtgcttgatctttcttttgggagaaggagacttttctaatgaaaacaaagtacttgacagtctggccaccgagcccacgt

SEQ ID NO: 859836 - DNA, 120 bp, Artificial Sequence
  ENSG00000272078_46 (sequence is synthesized)
ggccctggagtgggccctgccccatccatcaggcacctggctggaagggcgtggccagcgaggccccacccatgcctggaccaggaggcggtccctccacgcggccaccgggcatgagcg

SEQ ID NO: 859837 - DNA, 120 bp, Artificial Sequence
  ENSG00000272078_47 (sequence is synthesized)
tcctattgggcctgtgagagttttcagaccttgggacttcacattccagcagctctccaaagtcacctgcccaaggtcccaggaaaacggcccagctcccctgccaagcactggcagcct

SEQ ID NO: 859838 - DNA, 120 bp, Artificial Sequence
  ENSG00000272078_48 (sequence is synthesized)
ctgcaaggtgtgggcagagccccagactgggccacagggaccctcagtcttggctggttctgagagggtttcgaatgggaacagggcatctaggcccaggagccccactcctgcgggcag

SEQ ID NO: 859839 - DNA, 120 bp, Artificial Sequence
  ENSG00000272078_49 (sequence is synthesized)
cgccttggttcaccacttcctagccatgtgcccgggacagaccatccctgaccgtctgctggctccacggcgtggggctctgtctggcgtcccgcctgctgtgtccccagcacccggctt

SEQ ID NO: 859840 - DNA, 120 bp, Artificial Sequence
  ENSG00000272078_50 (sequence is synthesized)
ggagcctggctctcagcaagcatcagtggttgttgaatgaataagtgaaatgagccacatcccagatgtgaacggaactctcctcaaggattcaacaaataggaactacccagagcaggg

SEQ ID NO: 859841 - DNA, 120 bp, Artificial Sequence
  ENSG00000272078_51 (sequence is synthesized)
aaactgggagaggagtgaggtaaacagaaaacaccctcaccccaatccagagaaaaatggagggaaatttttttaaaatggatatttatgaaattataggaaggcaggaaagagaactgc

SEQ ID NO: 859842 - DNA, 120 bp, Artificial Sequence
  ENSG00000272078_52 (sequence is synthesized)
gcccctcagtgaaccagcgtgaagaaggaagatgcaactccggggctctggcccttttctgtctgacgtggcagtccctggccaagtgtggttgtttaaagtgacaatcccgcttcccaa

SEQ ID NO: 859843 - DNA, 120 bp, Artificial Sequence
  ENSG00000272078_53 (sequence is synthesized)
tcacagacccagcttcaagcaccaacagtcacacgtggccagtggctgccaagtcaaacactgcagaatagaaggcttccaaggcctggaaagtcctactgcaatggcactcatggagga

SEQ ID NO: 859844 - DNA, 120 bp, Artificial Sequence
  ENSG00000272078_54 (sequence is synthesized)
gggagcctgggaagggcgtccctgggcctggaggtgtccaggtgtgaggtgcagccccactaccgctgggctggacgcaggccctgctccaggtcagctggaggaaacgctcggcacgcc

SEQ ID NO: 859845 - DNA, 120 bp, Artificial Sequence
  ENSG00000272078_55 (sequence is synthesized)
aggggccctgggcctgctcttatcagggtggacttgggatgtgggagggtgagcagacagggaggggggacctgcagtggccccagggatgcagggcagccgaggaggcagggaccatcg

SEQ ID NO: 859846 - DNA, 120 bp, Artificial Sequence
  ENSG00000272078_56 (sequence is synthesized)
cccccagctcacagatggggaaacagaagcatggcccccctactgtggggagccagaaccaggggccccacatagaaaccaacaggatgggggcgaagatcaggcaaagagggggtgctg

SEQ ID NO: 859847 - DNA, 120 bp, Artificial Sequence
  ENSG00000272078_57 (sequence is synthesized)
gcaagcaggggccacacggacacttcttccaaacaccccccgactctgctctgcagcctgaggccaggtggccaccccagtccagaaggtgcctgctttctgggcaggacccagcctgct

SEQ ID NO: 859848 - DNA, 120 bp, Artificial Sequence
  ENSG00000272078_58 (sequence is synthesized)
cacctgggtcaaaggtggcagagggcttgagggcagctgcagccagcctggccatcatgggcgagatgaggcccttgcttgcagagatcctctccatgatggaggcgggtggtgccggga

SEQ ID NO: 859849 - DNA, 120 bp, Artificial Sequence
  ENSG00000272078_59 (sequence is synthesized)
cagaggcggcagccacgggggctgagtctccagctcccgaggcgaccagcgtgggtgtgtcaggggtggctgaggctgctgacccagacgacacggcacccaggaggctgggggtgccca

SEQ ID NO: 859850 - DNA, 120 bp, Artificial Sequence
  ENSG00000272078_60 (sequence is synthesized)
caggcagggaggtgctcccacggccagccagtatggggaagtagggcgtgggggtgggcaggcccgagttggagagggccagggccagggggattgagccaggcaggccctggggcagca

SEQ ID NO: 859851 - DNA, 120 bp, Artificial Sequence
  ENSG00000272078_61 (sequence is synthesized)
gccccgagatcttgctgttgggaggtttggtggcactgggcccagcctcggtggcggcagtggcggcagccagggacgcagaggactgctggctggtaggggaggcgctcaggctggagt

SEQ ID NO: 859852 - DNA, 120 bp, Artificial Sequence
  ENSG00000272078_62 (sequence is synthesized)
tcttgctgctcagggcggagaagtcaacaaggtcgtcgttgctggactcctcgtgctccgtgtccttggcgcccagcagcgagggcggcagccccagcgcgcccgaggagcggatgtgcc

SEQ ID NO: 859853 - DNA, 120 bp, Artificial Sequence
  ENSG00000272078_63 (sequence is synthesized)
ggcgctcatgcttgcgcttgtgagaggtcatctggctggtggaggtgaaggtgaagccgcagccggcgcggatgcagtggaagtggttggtagccttgctgtacacgcagccctcgtact

SEQ ID NO: 859854 - DNA, 120 bp, Artificial Sequence
  ENSG00000272078_64 (sequence is synthesized)
tgcactcctcgtacttgtagaacttcttgaagccgtccttggcgtaggcatcgtccttgatgtggtagctcttgtgcttctcgatgtcacacttgttcttgaaagtgaatgtgcagccgg

SEQ ID NO: 859855 - DNA, 120 bp, Artificial Sequence
  ENSG00000272078_65 (sequence is synthesized)
ggcgcctggatgggacattgggagcctgtcatgagacccagaggaggccccaccctgctacaccatggccctgggagggacagtcccccgggtggaaaacccaggctggacaccgaggca

SEQ ID NO: 859856 - DNA, 120 bp, Artificial Sequence
  ENSG00000272079_0 (sequence is synthesized)
ccctgagaggaagctcctgttctctccagctttgcctgcaccccacctgccagtttctgtgcagcctctacaacttaataaagttctctttgttccctaggtggcctgagctcaggtaat

SEQ ID NO: 859857 - DNA, 120 bp, Artificial Sequence
  ENSG00000272079_1 (sequence is synthesized)
caggcgaaaattctttctcagtgggctcttctccagcagcctaggactggtatcagaaagccaaccttgaccctgggggacctcggagagcccgggacccaccaccaagaagggcagtgt

SEQ ID NO: 859858 - DNA, 120 bp, Artificial Sequence
  ENSG00000272079_2 (sequence is synthesized)
agcccgggacccaccaccaagaagggcagtgtactagttctttgtgactgcagtaaaaattttattttttaattttttttatttttggtagagatgcggtttcaccatgttagccaggat

SEQ ID NO: 859859 - DNA, 120 bp, Artificial Sequence
  ENSG00000272079_3 (sequence is synthesized)
aggcgtgagccaccgcgcccggcctgaccgcagtagcaaatttatacacactgcatggcttcaaacaacagaaatgtattcgttacaattctggaggccaaaagtcaaaaataaaggtgt

SEQ ID NO: 859860 - DNA, 120 bp, Artificial Sequence
  ENSG00000272079_4 (sequence is synthesized)
ggaggccaaaagtcaaaaataaaggtgtgggcaggaccctgttcccttcacaggtgctaggggaggatccctcctgcctcttccagctcctggtggctccaggccctctgtggcttgtgg

SEQ ID NO: 859861 - DNA, 120 bp, Artificial Sequence
  ENSG00000272079_5 (sequence is synthesized)
tttttatgttgtaagaggttggattgtcgttgaaggtaggacccgcctgaaacctaggataatctcattttgatatccttagtttaattacatgtgcaaaggcccttttatcaagtgagg

SEQ ID NO: 859862 - DNA, 120 bp, Artificial Sequence
  ENSG00000272079_6 (sequence is synthesized)
tcacattcacagattccagggcttagagggtggaggtatcattttgcgtgcccccatctggacatgcagtgtcctctcccctgtggggctgacctaccttcctagccgtcttcccagaac

SEQ ID NO: 859863 - DNA, 120 bp, Artificial Sequence
  ENSG00000272079_7 (sequence is synthesized)
gtaatgtgtcttaaatccgtcatgctgacctggggccctgggtgcccttgggcaggagctgatggcactagtaccttgataaagttcttactggcaccagaagagaataaagtaactctc

SEQ ID NO: 859864 - DNA, 120 bp, Artificial Sequence
  ENSG00000272079_8 (sequence is synthesized)
cttccccttctctgacttatggccaggtgcccattcccactggcttgccgctccccagctccctgcgctttatattgttgaggcctcctctctcagctaagaaacaggaagtacacagat

SEQ ID NO: 859865 - DNA, 120 bp, Artificial Sequence
  ENSG00000272079_9 (sequence is synthesized)
gtgtattcttaaagacagcattagccacggggcccccaccctcaaagggtgggagcgataactgctgctggttgaaactgacagttactactgataataaagttaattgttacccagtca

SEQ ID NO: 859866 - DNA, 120 bp, Artificial Sequence
  ENSG00000249883_0 (sequence is synthesized)
cttacctgttaaatggggaacacgatagcatatcacttacaatattcaattaacatctataaaccgcttaaaataactgtcatgtattaatgacgagaattcgttctaaaagaaaaaagc

SEQ ID NO: 859867 - DNA, 120 bp, Artificial Sequence
  ENSG00000249883_1 (sequence is synthesized)
catacatttctgaaatttaaggtgcccccagtattcagtacagtatgatgctgtacaggtgtataacccagaagcaacgggctgtaccatagagtccagatgtgtagtgggctgttctgt

SEQ ID NO: 859868 - DNA, 120 bp, Artificial Sequence
  ENSG00000249883_2 (sequence is synthesized)
ggaagttcttgtaggccgaaaaaggaagaaaagaaaaagaaacagaggatgagaggagtcctcttctccttaaaacttcctcaaacctgaccatcataatgacctcctgtatatacaaat

SEQ ID NO: 859869 - DNA, 120 bp, Artificial Sequence
  ENSG00000249883_3 (sequence is synthesized)
attcatattgcacatcatatttccaaagaggctaattttcaggtctgctattgtggttcaaatttaatcattccaaatatgatttgatagctgttaataaaggtgtgataccacctagaa

SEQ ID NO: 859870 - DNA, 120 bp, Artificial Sequence
  ENSG00000249882_0 (sequence is synthesized)
agaaggctgtgtatgctctgaatcagtggccgatatatggtactgtttctcccatagccaagattcaggagtccaggaatcaaggggtggaaatggaagtggcacgactcaccaacaccc

SEQ ID NO: 859871 - DNA, 120 bp, Artificial Sequence
  ENSG00000249882_1 (sequence is synthesized)
tttttgcttcctgttcccatgacattatattttgctggcctaaaggtcttagttccagagggagaaacactgccgccaggagacacaacaacgattccattcaattagaagttaagattg

SEQ ID NO: 859872 - DNA, 120 bp, Artificial Sequence
  ENSG00000249882_2 (sequence is synthesized)
caacgattccattcaattagaagttaagattgccacttggacactttgggcttctcctaccttgaagtcaacaggctaagaagagagttacttggctggggcgattgacccagattatca

SEQ ID NO: 859873 - DNA, 120 bp, Artificial Sequence
  ENSG00000249882_3 (sequence is synthesized)
aaaaaacattgtttaccatcaaacagcaccaaaacttctggctgtgttattaccaatttgaatggacctttgccgaaagtccctgaagccaagccacactgctaactgatgagagaccag

SEQ ID NO: 859874 - DNA, 120 bp, Artificial Sequence
  ENSG00000249882_4 (sequence is synthesized)
cttgaaagagggaggacctgccaattgccatcagcacaactccagatatatgggagtcaggctttagggcaaaaaccggggatcacagaatgcttgctcaatcaactttgctcatccaaa

SEQ ID NO: 859875 - DNA, 120 bp, Artificial Sequence
  ENSG00000249882_5 (sequence is synthesized)
atcacaaaaatcgcctcaaaaaatgttgatgataatttaattttcttcactctccatgaagatgttagataatgctcactctgggtgagaataaaagccagactcatcaattgtgttacc

SEQ ID NO: 859876 - DNA, 120 bp, Artificial Sequence
  ENSG00000249882_6 (sequence is synthesized)
caaagtactgggattacaggagtgagtcaccacgcccggccggattatggatttttaagaggaaaaccacagaggaagccaagccacactgctaactgatgagagaccagcttgaaagag

SEQ ID NO: 859877 - DNA, 120 bp, Artificial Sequence
  ENSG00000249882_7 (sequence is synthesized)
ctgctaactgatgagagaccagcttgaaagagggaggacctgccaattgccatcagcacaactccagatatatgggagtcaggtgatcataaaccatccattttctgctgagtcacagta

SEQ ID NO: 859878 - DNA, 120 bp, Artificial Sequence
  ENSG00000249882_8 (sequence is synthesized)
gactgcaactccatgaatgagacaaggaggtgtcggtaaaaacaaaacaaaacaaaacaaagcaaaaactgcctggtgtaaccacagaatcttaagaaataataaatgattttaatccaa

SEQ ID NO: 859879 - DNA, 120 bp, Artificial Sequence
  ENSG00000249881_0 (sequence is synthesized)
atcccatgggccagcatttactgctgctggtttgttaacagaactccgacctcatggacatttggttgcttgatggttatgtgctgggagtagggaatgggaagatgattggaacacctg

SEQ ID NO: 859880 - DNA, 120 bp, Artificial Sequence
  ENSG00000249881_1 (sequence is synthesized)
gagtataagtggagtaaagagtacagaagaaatgcctctggcggaaaatttgaagcagtttctgtgcaagactggagctcacacatgaagccaactctgaggaagtacaaagtgttgtcc

SEQ ID NO: 859881 - DNA, 120 bp, Artificial Sequence
  ENSG00000249881_2 (sequence is synthesized)
ccaatcctcgtaatatccagcttctttggcagcttgctctgcccaaaagaagataggagacagacagacagacaaacacacaggcatacacacagatgcgcagatggacagacaataaac

SEQ ID NO: 859882 - DNA, 120 bp, Artificial Sequence
  ENSG00000249881_3 (sequence is synthesized)
ctggcctcagcaggtttcagagaacaggcagatgggtgataatactcagaaaggcatccatttatcagtgagttttccttctaagctacatcccacacagcagctttgtgaatgccttca

SEQ ID NO: 859883 - DNA, 120 bp, Artificial Sequence
  ENSG00000249881_4 (sequence is synthesized)
tcccacacctcagcaattttgaaccagaacaagtttccgtaaagggtaaggatgatctgtataaaatggtctgtgtaagaatgatctgcataagaaatgaaaagagcaggtgtgttcaag

SEQ ID NO: 859884 - DNA, 120 bp, Artificial Sequence
  ENSG00000249881_5 (sequence is synthesized)
gagtcagacctcttagactctaagcacccccctctctcataataccttgtaactttggagacattctttaatctggttaaacctccattttcttggttatagcatgcaaataactaattc

SEQ ID NO: 859885 - DNA, 120 bp, Artificial Sequence
  ENSG00000230470_0 (sequence is synthesized)
atttgcaaatcaaacataaagcctgaaaggaaacattacttttcattaaatagacggccagccgaatgaacagagaagaagtccggacagcttttcaatgtgatggattctgtggcaagg

SEQ ID NO: 859886 - DNA, 120 bp, Artificial Sequence
  ENSG00000230470_1 (sequence is synthesized)
cccatttttaaatattcctgtcagctaaaacaaggattttcttaggaaatgatgaagccaggtttaatttctacttagtgagaagactgcattaccaccccactgttaaggtgcaggtat

SEQ ID NO: 859887 - DNA, 120 bp, Artificial Sequence
  ENSG00000230470_2 (sequence is synthesized)
tgtcagtagggcaaggatgggttttcttttgtaaggaatgcatttgaagggatagattacagactcagggtaatgtgaacctgtttccatgcttgggaatgtcctcccaggtgatggaca

SEQ ID NO: 859888 - DNA, 120 bp, Artificial Sequence
  ENSG00000264247_0 (sequence is synthesized)
aacggaagaaggcgcgagtagcagcggcgcagccagggcacctgggggtgacacgagagtgggcgggcggtccagggagcccctgctggaaaccagacgctaaagcttgcagctgtgcag

SEQ ID NO: 859889 - DNA, 120 bp, Artificial Sequence
  ENSG00000264247_1 (sequence is synthesized)
ctaggggagcatctgttttccacttgagagcaacccgggcacgcgagaacggcccgatttcggtgcaggggtgcgtcccgaaggaacgggggactgtttctgcgcggacaggcgaacccg

SEQ ID NO: 859890 - DNA, 120 bp, Artificial Sequence
  ENSG00000264247_2 (sequence is synthesized)
gcaggggaaaccgaggccacgctaggtccgcagccccgaggtgtccacaagagctccgctcgcgcaagggcgcggagcgaggctgcccgcgggaccggcctgcggagcgagcggccaacg

SEQ ID NO: 859891 - DNA, 120 bp, Artificial Sequence
  ENSG00000264247_3 (sequence is synthesized)
ggctgcccgcgggaccggcctgcggagcgagcggccaacgagtggataaagaaaatgtgatatatatgcactatggaatactaagccataagaaggaatgaaataatggcatttgcagca

SEQ ID NO: 859892 - DNA, 120 bp, Artificial Sequence
  ENSG00000264247_4 (sequence is synthesized)
ctcaagaatggaaaaccaaatattgtatgttctcactcgtaagtgggagctaagctgcgaagatgcaaaggcataagaatgatatagtggactttgaggactcaagggttgaaggatgag

SEQ ID NO: 859893 - DNA, 120 bp, Artificial Sequence
  ENSG00000264247_5 (sequence is synthesized)
actacacattgggtacagtgtgcactgcttgggtgatgagtgcaccaaaatctcagaactcaccactgaagaacttccccatgtaaccaaaaaccacctgttccacagaaactatcgaaa

SEQ ID NO: 859894 - DNA, 120 bp, Artificial Sequence
  ENSG00000264247_6 (sequence is synthesized)
taacatttttaaaactttactatttctgaataaaatttacatacatttctcagaaaaaaaaatatttggaattgaggtatctaatagagaactgagttaaattattgccacttaaaaaca

SEQ ID NO: 859895 - DNA, 120 bp, Artificial Sequence
  ENSG00000264247_7 (sequence is synthesized)
caaagtgatatagccactttatgaattaatcagtcagcagtggctaggttatgcttagtggtttataaccaaatcttagtttataacaacaaatgtgtattgttaattcccactacaagt

SEQ ID NO: 859896 - DNA, 120 bp, Artificial Sequence
  ENSG00000264247_8 (sequence is synthesized)
ttataacgacattgctggatgctacactccatgtctctttgtgggacccaggctcatgggacttctgttacctgcattagagagagagaagacaacaaaatatgcactggttcttgaagc

SEQ ID NO: 859897 - DNA, 120 bp, Artificial Sequence
  ENSG00000264247_9 (sequence is synthesized)
tttggcccagaagtaaaatatgtcttttacctgttcacattgcattgggccagggcaattatcatggctgcaagtaacttcaaaaggatggggaagtgcgatcttggcatgtgtcagaag

SEQ ID NO: 859898 - DNA, 120 bp, Artificial Sequence
  ENSG00000264247_10 (sequence is synthesized)
aaaacatttggtgaagagcattaatgactgtctttacaggaaaaaagcaatcaaatagacatgattgcttgtttcagtttcatcatttcctactgtgttacctaaactttctgagcccca

SEQ ID NO: 859899 - DNA, 120 bp, Artificial Sequence
  ENSG00000264247_11 (sequence is synthesized)
gtttcttattactaaaataaaataaagatgatattcacttcaaggactttgtgttaactagggtaaaaaaattgaaaactagtaagttatgcaaattagaaatgtataatattactgctt

SEQ ID NO: 859900 - DNA, 120 bp, Artificial Sequence
  ENSG00000264247_12 (sequence is synthesized)
tgaaagtgatggtgaaatgtagaataattggaaggataacacaaagcacttataccaggaggcttttagctgcagataatagaaatgaacctccactactttaatcaataaaaaagtgta

SEQ ID NO: 859901 - DNA, 120 bp, Artificial Sequence
  ENSG00000264247_13 (sequence is synthesized)
tcagctcacaaatttgtcatccagacataaaggaggcttcagaatttattgactcaggagttgaatgttggtatcaaggacctagatttttctcatcactctgcacttcaattctcaatg

SEQ ID NO: 859902 - DNA, 120 bp, Artificial Sequence
  ENSG00000264247_14 (sequence is synthesized)
ccctattgaacatcaggctgtagtaagatggctagagtgattccagggataacatctagagataaaaaagagaactccttttcttatgatttttttcttaagagaaaaggaatttcccaa

SEQ ID NO: 859903 - DNA, 120 bp, Artificial Sequence
  ENSG00000264247_15 (sequence is synthesized)
aagcccccagcaagcatgccttcacatcccatggccagaagtggctcacatgtgtaccctgagctaagcactgcagacaggaatggaatcgcctgtaggcctcagagaccacctggatct

SEQ ID NO: 859904 - DNA, 120 bp, Artificial Sequence
  ENSG00000264247_16 (sequence is synthesized)
tgggaaggtgtcagctctacctgtggcacttggctgagtgggaaagggatggaaacatgaataaagtaagaattaggaaggaaaaggagaaatggatccagggtatgaagccaatagttt

SEQ ID NO: 859905 - DNA, 120 bp, Artificial Sequence
  ENSG00000264247_17 (sequence is synthesized)
agttatctcaacaaatatgattgatttcatctttatgaatgtgatgacctaatttaatacattcaatcaatgaagtaaaaaaaagtgcaaggacaatatgacatctgtcattctctgttg

SEQ ID NO: 859906 - DNA, 120 bp, Artificial Sequence
  ENSG00000264247_18 (sequence is synthesized)
agatttgagaggtaataataccaagaacgtgtggtgacctgggtcctcactgctactgtcttcctgtacctggacacttctagcaagagacttcaacttcagaacaaagaggatcccaac

SEQ ID NO: 859907 - DNA, 120 bp, Artificial Sequence
  ENSG00000264247_19 (sequence is synthesized)
ttgtagctgcattatacacaccccagcagcacacataagttgatttctaattattcctctttaagaaattgtttgtggaatatttatctatttataaatggaaaaatagaaaattaaaat

SEQ ID NO: 859908 - DNA, 120 bp, Artificial Sequence
  ENSG00000264247_20 (sequence is synthesized)
aacaaaaataagtaacaccatgtattgagtgtctactgcgtgctaggcactgtgctaagtgttctgcatatattgtcattgtgctgccaacgactctgcaataaagatgttcccattcct

SEQ ID NO: 859909 - DNA, 120 bp, Artificial Sequence
  ENSG00000264247_21 (sequence is synthesized)
gaaataaatggctactcaaaacccagcgcaaccgacagaggtcagcggccactgcaccccgcctccaccagcttaaactccagaaggaggccaagcacccagggcgtgctagctggctgg

SEQ ID NO: 859910 - DNA, 120 bp, Artificial Sequence
  ENSG00000264247_22 (sequence is synthesized)
gaaggacttccggtggcttccaaggcgactccgtagtggatgcagcgccggacgccacagccgaaaaacagaatcttggaactggtttagtacaatccaggtcgagttccttgtttttta

SEQ ID NO: 859911 - DNA, 120 bp, Artificial Sequence
  ENSG00000264247_23 (sequence is synthesized)
tccgagtggccggcaggcccatgtgctgtcttgtttttaacacatcagctcttgccggaagccgctaagagataaaataggaagtcccacccttcccttagagaaggaaaacggagagcc

SEQ ID NO: 859912 - DNA, 120 bp, Artificial Sequence
  ENSG00000264247_24 (sequence is synthesized)
gaaggagtcaatctaaattcgatgagcgcgtcgggctccaaggcaggcgctgtcagcccgggagggctgtctgggatttctagagggtcccagaacgggttcttcccaggccgatcccgc

SEQ ID NO: 859913 - DNA, 120 bp, Artificial Sequence
  ENSG00000264247_25 (sequence is synthesized)
ctgcttcctgccccgtctctccacccgcctcccgccctctgtaagggaccccgagggcggcgccggaaacacggagaaggcccagaacggcgcgggacccgagaggcctacgttggcaaa

SEQ ID NO: 859914 - DNA, 120 bp, Artificial Sequence
  ENSG00000264247_26 (sequence is synthesized)
cgcagcccgctgcccctttgctcgcttcccccgggcctggagtggctcctgtcgcttctggcgctccgatttcgagaaatgactttcagctgtgcaaggcgagaatgctactttagatga

SEQ ID NO: 859915 - DNA, 120 bp, Artificial Sequence
  ENSG00000264247_27 (sequence is synthesized)
tgagaaaaaatctctcgaatggctcccaaaatgaggtccttgtttaagaggccacaggaagccgctagccgaactctgataccaaagaggaggccaagaagcggactgtggcttggtgac

SEQ ID NO: 859916 - DNA, 120 bp, Artificial Sequence
  ENSG00000264247_28 (sequence is synthesized)
ctgtttggtattgccaaattttcagcttttattaaagctgaaacaccttggctgtttaaaacgttcgacaaggacttttttatgaacgttaacggcacagcatacgggttttttggaaaa

SEQ ID NO: 859917 - DNA, 120 bp, Artificial Sequence
  ENSG00000264247_29 (sequence is synthesized)
aaaaaaaggcaggacttcagcccgtccgcccccttgtgcaggtccattcatgaacctcgagttagaggcctttcttctgaaactcagaatctagtagggaagacctgtgtagacgaataa

SEQ ID NO: 859918 - DNA, 120 bp, Artificial Sequence
  ENSG00000264247_30 (sequence is synthesized)
aaataaatacatcacagcttgttaagtgctgtgacaaagaggcagtgaaatcctgcttgaggtcatctgccttgctaaagaggtttgactatgttgtaggcacagggttagggttagact

SEQ ID NO: 859919 - DNA, 120 bp, Artificial Sequence
  ENSG00000264247_31 (sequence is synthesized)
gttgtaggcacagggttagggttagactctgtaatgggaagttatgtgatcagatttctgtttaggaagatcactggccaggcggggtggcttacgcctgtaatcccaatactttgggag

SEQ ID NO: 859920 - DNA, 120 bp, Artificial Sequence
  ENSG00000264247_32 (sequence is synthesized)
gattttgagaccagcctggggaaaccgcgtctctactaaaaatttgaaattagccaggcatggtggtgcgagcctgtaattccagctacttggaggctgaggcgggagaatagcttgaac

SEQ ID NO: 859921 - DNA, 120 bp, Artificial Sequence
  ENSG00000264247_33 (sequence is synthesized)
aataacgtattttgcccaagattatccaactggtaaaatctggagtccaaatttgaaccagagtccattcaacacactttcacctctacaccagtgctttctgagtttgctgaacattag

SEQ ID NO: 859922 - DNA, 120 bp, Artificial Sequence
  ENSG00000264247_34 (sequence is synthesized)
aatcacctcaggaacttaaaaaaaattcccaggtgataccccatagcaagtaaattagaaaatcgggcaggggaagaggaaccctggcatcagtactttttaaagtccccaggtacttac

SEQ ID NO: 859923 - DNA, 120 bp, Artificial Sequence
  ENSG00000264247_35 (sequence is synthesized)
aatgtggaggaaagtttgggaaccactgtgctatattatgttgcctcttcagccaagaatgtaaaccagaatcttttcttccaaggccaagagcagtgaatgatagcttatggtatatac

SEQ ID NO: 859924 - DNA, 120 bp, Artificial Sequence
  ENSG00000264247_36 (sequence is synthesized)
tctcattcccaagtgatcctcttcctcaggagttctgctttaggctaactaatttcaagtttccctttcactacatttctcacccatctgaagctaaaaatgttacaggagacatgctga

SEQ ID NO: 859925 - DNA, 120 bp, Artificial Sequence
  ENSG00000264247_37 (sequence is synthesized)
atttgttgctttttctctgttatctctccttttcagagccgcctccccttactttacttcacctgctaaagtatccctgaactctgccttctggggttgaaagtgggattttaaataaac

SEQ ID NO: 859926 - DNA, 120 bp, Artificial Sequence
  ENSG00000264247_38 (sequence is synthesized)
tatagatggcttcctttatttggttataattatttaaaatttgaaggaagcattggtcatttttggtgactagtcatttttgatgactaagtgtcatttaaagtttcatttcctttaaat

SEQ ID NO: 859927 - DNA, 120 bp, Artificial Sequence
  ENSG00000264247_39 (sequence is synthesized)
taacattttttgtcattccattcaaatgcctacttacaatggcaataagaatatgctatgaacacttaaccacccacactagaattttaaatctaagttcttctcgaatgctgttttggt

SEQ ID NO: 859928 - DNA, 120 bp, Artificial Sequence
  ENSG00000264247_40 (sequence is synthesized)
gaatttcagtgtgggaggtgagatgatttaaagcttcagattttctgttatagtcaaaggcataatttatctgacatcttttttcattctgcctaaggaattacactagaataatgtttt

SEQ ID NO: 859929 - DNA, 120 bp, Artificial Sequence
  ENSG00000264247_41 (sequence is synthesized)
taaataaaatttgtccacataatgacatttttttcaattctatccaaactaaaatagctccaaagcgtttacttatcataactgttaagaaattatacttgccaggcatggtagctcaag

SEQ ID NO: 859930 - DNA, 120 bp, Artificial Sequence
  ENSG00000234953_0 (sequence is synthesized)
taattggagttatcctgcgatgcatgcttaacttctccgtattctcttgtctttgtggtgatgtggagggacccactgaccagaagatacatcattgcctgaacactggcaggaaaggaa

SEQ ID NO: 859931 - DNA, 120 bp, Artificial Sequence
  ENSG00000234953_1 (sequence is synthesized)
gagctgccaagtaccaaccagaatctaaacggagattgttgaaggatggaagaagaaattagatataggctgtcagtgcacatattttttgcattaaattataaacaatatgctgttaat

SEQ ID NO: 859932 - DNA, 120 bp, Artificial Sequence
  ENSG00000234953_2 (sequence is synthesized)
tgtttttctatcatttcactttctcctcaccatgtcaatatcaaaagtatactgtgtctttgtactccatgtcatcaggcatatgcctatctgcaagtacacaacactgcagagatgtta

SEQ ID NO: 859933 - DNA, 120 bp, Artificial Sequence
  ENSG00000234953_3 (sequence is synthesized)
aaggcaaataagaagcattcagaaaacttcatgaacatcaaatgtcaattgcaacacaagattttgatacaactcttgatttgactggattacttcccaaccctcagtaatgctccattg

SEQ ID NO: 859934 - DNA, 120 bp, Artificial Sequence
  ENSG00000234953_4 (sequence is synthesized)
tgggagcctgtgtctcaacagttcacacctgccgtttactccactgggttgtgaagattcacagaagatgacaggaaggggggataaataagctaaaataaactttagaggatggcccca

SEQ ID NO: 859935 - DNA, 120 bp, Artificial Sequence
  ENSG00000234952_0 (sequence is synthesized)
gctggggtcagcgtctgtacgctaaagccagggcgcaaagtgcgtgggcactgcggacactagaggcttatggcgctggaaatacaaggccgagttgccggcgcaaagagttccccgggc

SEQ ID NO: 859936 - DNA, 120 bp, Artificial Sequence
  ENSG00000234952_1 (sequence is synthesized)
gggtgcccaacaccttgatcagtgcctgctttgtagtaggcattcaaatactgtggactggatgaatggagtcacttcccttccaacctgcacaccaacgtggttgaactgcctcctttc

SEQ ID NO: 859937 - DNA, 120 bp, Artificial Sequence
  ENSG00000234952_2 (sequence is synthesized)
taagtgccaaagtctgttttacaaggctgccctgctgtgcccatctgggcacccagtccagcctcccttcctgggcgccttgactcccaactgcagatgaagtgtctggaaatcatggta

SEQ ID NO: 859938 - DNA, 120 bp, Artificial Sequence
  ENSG00000234952_3 (sequence is synthesized)
gaccaagatctgcaagtcagaacgaaacaccagctgtccctgtctcctgcacccatccccatcccggatatcaaaggagcattacaaaatattgtctaacagaagtaccagggctggatc

SEQ ID NO: 859939 - DNA, 120 bp, Artificial Sequence
  ENSG00000234952_4 (sequence is synthesized)
ccaaagttttgtgtagatcttgataaagagtttggattttattctaacaagagtgaagagcatgacaatgtttgcagaagagtgatggcttctttcaggcaacagtgacaattacacctc

SEQ ID NO: 859940 - DNA, 120 bp, Artificial Sequence
  ENSG00000234952_5 (sequence is synthesized)
ctctttttctctttgatcctccaccctctccctccagcacctggtacaaagctgggtacccagcagacactctgtaaattaaagtgctgccagcctgaacaatctcagtggaagagctaa

SEQ ID NO: 859941 - DNA, 120 bp, Artificial Sequence
  ENSG00000234952_6 (sequence is synthesized)
agtcttgcctatccctgggccaccgtcaaacaaagctgctaattctaaagctttaagtttcaaattgagaaatattgttctaatatggcaacaatggggctgttgtcctttcaagagctc

SEQ ID NO: 859942 - DNA, 120 bp, Artificial Sequence
  ENSG00000258379_0 (sequence is synthesized)
atctttgtctatgctaccaagggctaggtgatctacatgccccctggcacatggaaggtactcattaaacatttattgagagaaggaatggatacatttgggctacacaagtagcctgtg

SEQ ID NO: 859943 - DNA, 120 bp, Artificial Sequence
  ENSG00000258379_1 (sequence is synthesized)
aatctagttttgtaaactccattatacagcaaaggtatctagtttacccaagatcacgttctagtgtaagaattaggagcacgaaccctgaagccagaggacaccctactccctgcctca

SEQ ID NO: 859944 - DNA, 120 bp, Artificial Sequence
  ENSG00000258379_2 (sequence is synthesized)
tgcatatccgtaagaagcaattcttcatccattcaagtcctaccgtgagattgcaacaatcaagtcacatcttcaggttccacttctaattccagttctcttgctattttcaccacatct

SEQ ID NO: 859945 - DNA, 120 bp, Artificial Sequence
  ENSG00000258379_3 (sequence is synthesized)
gcagttactttctccactaaagtctggaacccttcaaaaccacccatgaagtttgatatcagcttctttcaagctcctgttaatattgctttttgaccttctaggagatgtgaatgttct

SEQ ID NO: 859946 - DNA, 120 bp, Artificial Sequence
  ENSG00000258378_0 (sequence is synthesized)
tggttttattttttaaataagacaattctggttccagtgtggagaaaggaagttgaagacaagaaaatcagtcaatggcagttcatatgggaaataataaatgatttatattaatataaa

SEQ ID NO: 859947 - DNA, 120 bp, Artificial Sequence
  ENSG00000258378_1 (sequence is synthesized)
aaatcaataattattaataataaattgttaatattatttcccatatatgaaataataaattatttcaagtgaagaagcagcacaagcaggattttcaaatgtcctttcatataattgtca

SEQ ID NO: 859948 - DNA, 120 bp, Artificial Sequence
  ENSG00000258378_2 (sequence is synthesized)
gtcacaactctattctaatttttttttttttgacacagggtctcactctgttgcccaggctctcgcatccgacatcagtacaaggctgggggttgttgggggacggttgagccttgggag

SEQ ID NO: 859949 - DNA, 120 bp, Artificial Sequence
  ENSG00000258377_0 (sequence is synthesized)
gcattgtcataagctgggttttatttcaaactcaattatacaatgtagcaatagtaaatattaaaatgtaatgctaactcaaaacttgtagaatgccttcactgaattttggtataaaga

SEQ ID NO: 859950 - DNA, 120 bp, Artificial Sequence
  ENSG00000258377_1 (sequence is synthesized)
gtaaacaaaacttattctgcaaaaggattaggaacctttttatgcaaaaatgagtattttattttgtcagcactaaaagaaaaaaaaaaacaaaaccactgtatttctacattgaggtga

SEQ ID NO: 859951 - DNA, 120 bp, Artificial Sequence
  ENSG00000258377_2 (sequence is synthesized)
aaacaatgtttaaactttcttatcaatcaaatacattccaaaagaaagtgtgttctatgaaggttccaaaacacactcaaaacacaatagtacaggaatctaatactgaaaatgactgtt

SEQ ID NO: 859952 - DNA, 120 bp, Artificial Sequence
  ENSG00000258377_3 (sequence is synthesized)
ctgacagggtgtttaacaaacataacttttaaattattaaaccagtgaagcaatcccttcctaataagtgtgtcaagagagtgaaactgggtttgttccattaataccctaacaatttca

SEQ ID NO: 859953 - DNA, 120 bp, Artificial Sequence
  ENSG00000258377_4 (sequence is synthesized)
tcgtaatactttttactgctatgacagttttaaataaattttgctgtacttaaaataggttttgaaagtggaaaagtgtacaaagtttcagataaaaagattaataaatgcaatttaaat

SEQ ID NO: 859954 - DNA, 120 bp, Artificial Sequence
  ENSG00000258377_5 (sequence is synthesized)
aaaatttcccctcttctctcatatcaacaataatcaattttagcagataacagattgagctttaaaaccctactcccaaaatgaaaccttcagttttaaatcttaatcagacataactgg

SEQ ID NO: 859955 - DNA, 120 bp, Artificial Sequence
  ENSG00000258377_6 (sequence is synthesized)
aaaagattactatgtatttggacaccttttacaagattttgtttttgtattaaagcagaaaccagttcctaaactcttttattcaattgtatgtcctgtttggacaaatatcaaaaatag

SEQ ID NO: 859956 - DNA, 120 bp, Artificial Sequence
  ENSG00000258377_7 (sequence is synthesized)
aagactgtcgcttttgtaactgtgattttcactgcagtcttctataacttttacagagttcatggtccctaatatctccccaccctccattttttctaggtggggaaatggctaccacag

SEQ ID NO: 859957 - DNA, 120 bp, Artificial Sequence
  ENSG00000258377_8 (sequence is synthesized)
taaacttttcactgatagttagagtttctggaaacatgtattgtttgttattatttaagagtgactcaatttgggcactctgagtggatggtctacaggttttcttgtgatgcataccac

SEQ ID NO: 859958 - DNA, 120 bp, Artificial Sequence
  ENSG00000258377_9 (sequence is synthesized)
agtctccagcatgaaagatcctaggaatttgaggaaccagcactttccagaattttggaagacaagatacagtcaagtattgaagagtccagtcccagttataatcatcataagtacaga

SEQ ID NO: 859959 - DNA, 120 bp, Artificial Sequence
  ENSG00000258377_10 (sequence is synthesized)
tggatttccaagttttcacatctaccttgtcagccatgccatagaaactgcgactggcactataggtccccagggagagaacatcacattcagggcactcttgctgcttcagtttccaca

SEQ ID NO: 859960 - DNA, 120 bp, Artificial Sequence
  ENSG00000258377_11 (sequence is synthesized)
tctttttgaagacatggtaaaagtctggggctaagtagtgatcctcttctaggaaaagtataaggccagcataatctcgaagaattttcactctttcccacacaaaatgcagcttccacc

SEQ ID NO: 859961 - DNA, 120 bp, Artificial Sequence
  ENSG00000258377_12 (sequence is synthesized)
accagtgatgtttggtctgggagaatttggcctctctataatggccgaaggagtcgggatactcagcattgatgcaccccaatttcaaagcggcattcttcggcaggtctctgggacaat

SEQ ID NO: 859962 - DNA, 120 bp, Artificial Sequence
  ENSG00000258377_13 (sequence is synthesized)
ctctagggtcactacctggaaactcgttagggtacaactgaatgctgaaaggaaagaacacctgcagaaccggacagaaattcaccccggcgatcagctgattgatctcggtcgaccaga

SEQ ID NO: 859963 - DNA, 120 bp, Artificial Sequence
  ENSG00000258377_14 (sequence is synthesized)
agtcatggctaaagatgacgaggacgttgtcaattccctgggcttttcgaagtgagtccagcagcagtctgaggtattcgggccggttatgcacctggaccaccagcaccagctcccggg

SEQ ID NO: 859964 - DNA, 120 bp, Artificial Sequence
  ENSG00000258377_15 (sequence is synthesized)
gggcccaggtgccagccttatctacattcctcagggtctgatcaaagttcagctggtacaccagggaccggtaccgcagcgtcaggttgtccgcctcgggctgggggaccgccgggacca

SEQ ID NO: 859965 - DNA, 120 bp, Artificial Sequence
  ENSG00000258377_16 (sequence is synthesized)
gggaagccgccgacacgttggagaccctgcggatgcccacagccacagaggggtggtccccaccgcggccgccggcaccccgcgcgggttcggcgtccagcaacggtggggcgagggcct

SEQ ID NO: 859966 - DNA, 120 bp, Artificial Sequence
  ENSG00000258377_17 (sequence is synthesized)
cgttcttcctttgtcgcccattgctgctccagaggacgaagccgcaggcggccaccacgagcgtcaggattagcaccttccgtttgtagatgcggaacctcatggtctccagggccggga

SEQ ID NO: 859967 - DNA, 120 bp, Artificial Sequence
  ENSG00000258377_18 (sequence is synthesized)
gcgcagctacagctcgagcatcggcgccgccgctaggagccgcggctcggcttcgtctccgtcctctccattcagcaccacgggtcccggaaaaagctcagccgcggtcccaaccgcacc

SEQ ID NO: 859968 - DNA, 120 bp, Artificial Sequence
  ENSG00000258377_19 (sequence is synthesized)
ctagcttcgttacctgcgcctccagcggccctgcgtcctctgcgctctcatccttacaggggccctagacggccagaactgagcgacgcggcctcgcctcactccggcggggaccgttat

SEQ ID NO: 859969 - DNA, 120 bp, Artificial Sequence
  ENSG00000258376_0 (sequence is synthesized)
cccttgcctgccccatcggagccgccggaggtggagtccgccccccggacccccgaactcctgtgcgtgcccctccatggtgctctaggctgtggagggcaaggccagtccccgggagca

SEQ ID NO: 859970 - DNA, 120 bp, Artificial Sequence
  ENSG00000258376_1 (sequence is synthesized)
gggtgaggaaggggcccccacgcagccctgctgtggattggcgggaggaccccaggctgggccaacccagcagcccgcggccaggagcgggcatcccaatggggaaatcggccaggaggg

SEQ ID NO: 859971 - DNA, 120 bp, Artificial Sequence
  ENSG00000258376_2 (sequence is synthesized)
gctggggaagctggtgccttcgcccgcgccccgtgagctttacctccgtgcgacaagagcggtggctccgggcggggcccacgcagctggagcctccatctctcctgcgggaccagagca

SEQ ID NO: 859972 - DNA, 120 bp, Artificial Sequence
  ENSG00000258376_3 (sequence is synthesized)
ccgggaagacctgaccgagacccaacgtccctgcccccgttctggggctctctgcaggccccaacttctgcgggactctccagtgggagcagcaagggttctcaggaacaacccctatac

SEQ ID NO: 859973 - DNA, 120 bp, Artificial Sequence
  ENSG00000258376_4 (sequence is synthesized)
aaaccgggacagaggcacctcactactccttctgtgccccaccttctccactgaccctgccggagtgcagcacacacagcaagcatttaataaatcgcttgaagtggggaacatctgtac

SEQ ID NO: 859974 - DNA, 120 bp, Artificial Sequence
  ENSG00000258376_5 (sequence is synthesized)
tcggtaaagaaaccacaggaattgggaactgccggttgaagattatttaccagttccagcaaaattgactgcacctgccatactgcaggccggtgcagcatcaggagctggagaccaggg

SEQ ID NO: 859975 - DNA, 120 bp, Artificial Sequence
  ENSG00000258376_6 (sequence is synthesized)
gcaacaggcagcacgcgtgctccagctcagagtggaaggccctgggaaatggtttgatttcctgcgctgaactgatgctgcttccagaatgaatctgctccttggtgggttctgctgatg

SEQ ID NO: 859976 - DNA, 120 bp, Artificial Sequence
  ENSG00000258376_7 (sequence is synthesized)
tggccagtgctagcctaggccacgaccacctagcccaccacccagaaggcagcatcccctgctcctgctttaacaagctggcccattttcatctctcctacctctgggagtagcaggggc

SEQ ID NO: 859977 - DNA, 120 bp, Artificial Sequence
  ENSG00000258376_8 (sequence is synthesized)
gctcccggaagctgacaccccctccacaggtccggctgcaggggctccactggctccagggtccccaggtgtcactctgccgcctcaccttgggagcctgcagaagacaggaccatgcat

SEQ ID NO: 859978 - DNA, 120 bp, Artificial Sequence
  ENSG00000258376_9 (sequence is synthesized)
cagcattgcccactcacagcctgagcccagaggcccctccaaagatgctctgcctaaaaccctcccctacccatcaaggagtctgggattctcccttccagggcccacctttaggactca

SEQ ID NO: 859979 - DNA, 120 bp, Artificial Sequence
  ENSG00000258376_10 (sequence is synthesized)
gcaacactgccgggcaccccaaaacatattccttttcagaattagcctgctttcctcataaggagctgagagccaggcctggagggcgggagcaggagcagctgggaagagtttggagtt

SEQ ID NO: 859980 - DNA, 120 bp, Artificial Sequence
  ENSG00000258376_11 (sequence is synthesized)
tcaggggccactggaggggagggaccctacagccaggggcagtttgagggtccaggcatttgtaggttaaccgtgatgtaggggaggggggcctaaaagaaaataaagggaagcaacgtg

SEQ ID NO: 859981 - DNA, 120 bp, Artificial Sequence
  ENSG00000258376_12 (sequence is synthesized)
tcccctccttctcccattgtgagagaatgcttgaaaacttgactcagctgggtacctggctgcccaaaatttaaaaaaaaaatacatttcctggactgcctgcagctaactgtggctaca

SEQ ID NO: 859982 - DNA, 120 bp, Artificial Sequence
  ENSG00000258376_13 (sequence is synthesized)
tcacttagttctcatcagtgagatgtaaatacaagtgttgggcagctgccgcaaataatctcctcaagagagagcctgcgtgagcctttgtccttttctccttcctcctgtactctttca

SEQ ID NO: 859983 - DNA, 120 bp, Artificial Sequence
  ENSG00000258376_14 (sequence is synthesized)
ggctgtctgggaagcagatgtgatggctggagttggagcagccttttagactgtgaggtaacttggaaatagaggcttcaaacagtgaagcaaagatagagggactctagagcctggagg

SEQ ID NO: 859984 - DNA, 120 bp, Artificial Sequence
  ENSG00000258376_15 (sequence is synthesized)
attttgtgcaacagaatagccccagacttctgacccctgggtgtttatatgagagaggaatcatgtctgtcttattgaagaactgttatttgggactctacacaggattataatcctagc

SEQ ID NO: 859985 - DNA, 120 bp, Artificial Sequence
  ENSG00000258376_16 (sequence is synthesized)
aggtacactttcccaccagaaagattggaccccttgcagctggcatcaggaatccacatgccacacacacattatctcatttcatcctcacaacaacccgacagaccccattgcatgaat

SEQ ID NO: 859986 - DNA, 120 bp, Artificial Sequence
  ENSG00000258376_17 (sequence is synthesized)
aagaaaagtgaggcagagagaggaaaccacaggggaagaagtgggcacagtagccggccagcctcactgcagtcctctgctcccctgccgaggctgtgcccccacccacctgggggaatc

SEQ ID NO: 859987 - DNA, 120 bp, Artificial Sequence
  ENSG00000258376_18 (sequence is synthesized)
aaatgagacactagatgattccctacagggttggacagggattagatgtaacttcacaattttcccaggaggcatatggtgtacatgcaaacatttgctggaaggggactttcttttagg

SEQ ID NO: 859988 - DNA, 120 bp, Artificial Sequence
  ENSG00000258376_19 (sequence is synthesized)
gaaggggactttcttttagggtatcaccacttaagactcaaggaaaaataccattcccacttttcagagaaagagctcaatggtcacacagaaaagcagccgggcacggtggctcatgcc

SEQ ID NO: 859989 - DNA, 64 bp, Artificial Sequence
  ENSG00000258376_20 (sequence is synthesized)
aggtcaggagttcgagaccagcctacggcgggtgcccgtaatcccagctagtcgggaggctgag

SEQ ID NO: 859990 - DNA, 120 bp, Artificial Sequence
  ENSG00000258376_21 (sequence is synthesized)
aaaaaaagaaaagaaaagcaggctcttgctttcatggtgacccctgagcagcttcgctgaatctcaggtgaggaaggacgtttactcatctctaacatccctggtgccaaacatctagtt

SEQ ID NO: 859991 - DNA, 120 bp, Artificial Sequence
  ENSG00000258376_22 (sequence is synthesized)
atccttgtcttataacaaaacccagaacactgaagcagaacaaaccacgcacaaaccacgctaagcctgccgaaccacacacaaccaagaaggaagggcttgccagatgagaggtcttag

SEQ ID NO: 859992 - DNA, 120 bp, Artificial Sequence
  ENSG00000258376_23 (sequence is synthesized)
ctttcactttgtaaaatatctactccttcaagtctaacttggacaaaaatctctaagctttcgaaaccactgagccaaaatatcaaagttttctctgaatgaaagttaaactgaaattta

SEQ ID NO: 859993 - DNA, 120 bp, Artificial Sequence
  ENSG00000233639_0 (sequence is synthesized)
gaaccaaccagcccagctgcttgagacagcacaatggatctttggcaagtgcacttatattagtaaatctggcccaatatcaaatgatatctctccctccatggtctggccctctcacag

SEQ ID NO: 859994 - DNA, 120 bp, Artificial Sequence
  ENSG00000233639_1 (sequence is synthesized)
ttcatttccacacatttccccaagtttctgatcatctcagttagaaaaccttgcaaccctttaactcttttccatttatttggcatgtaagcttccatctccttggtgggatgatgctcc

SEQ ID NO: 859995 - DNA, 120 bp, Artificial Sequence
  ENSG00000233639_2 (sequence is synthesized)
ccgtctcatctccactcttctccattatctacgtacagctttggaaggaatacagagagtaggcagggacatgaggagaattggcatcttcttacaaaataacaaccccaggagaggtca

SEQ ID NO: 859996 - DNA, 120 bp, Artificial Sequence
  ENSG00000233639_3 (sequence is synthesized)
ttacagggtcctcaatcaaggcaggaaccacttccctccacagtgaaggaggacctacacctcttggcaagggttctcgggattgaggtaacttggagtcattcaagtccacccaaaatt

SEQ ID NO: 859997 - DNA, 120 bp, Artificial Sequence
  ENSG00000233639_4 (sequence is synthesized)
ccctatgctgattcttgggattcctccatttgcagtcaattctctaacatttatataagagacattgtgagactgtcaattactataatttaacaaccatcaggcccagattctgctcca

SEQ ID NO: 859998 - DNA, 120 bp, Artificial Sequence
  ENSG00000233639_5 (sequence is synthesized)
attttgggttattctaggcctgctacaagaaaagagattattttagggtcctctgaccatgccctgaatgcagcatgtctttctttaagctctctagctgattagaaggctctagtccat

SEQ ID NO: 859999 - DNA, 120 bp, Artificial Sequence
  ENSG00000233639_6 (sequence is synthesized)
catcccacagcccctgcattcctatttctgatggcactgggttgtgtaaataggcactcagttgtccagggcttcgccttcccaggtgaccacagatgacaatttatgtgaatgttttgt

SEQ ID NO: 860000 - DNA, 120 bp, Artificial Sequence
  ENSG00000233639_7 (sequence is synthesized)
cattgcatactgtgaactacagtgtcttgtcctttgatattaacaggatctaatcccagattcccactttcagagtgttactcagtacttggttgggaccagttactcaacagattagca

SEQ ID NO: 860001 - DNA, 120 bp, Artificial Sequence
  ENSG00000233639_8 (sequence is synthesized)
tttagttgcagacaaaagaggccatctcagtaaattaatcagaagggtattatatttatcactgtgttaagagtctttcaaaatcattataatggtggtggatgatgttctagctaagct

SEQ ID NO: 860002 - DNA, 120 bp, Artificial Sequence
  ENSG00000233639_9 (sequence is synthesized)
cccaggaataatttgtaaggtctaggatcaccattttcccactgtgattgagaaagtaattttttttgccgttgcaggaaatgtctatttcaacagccaggtcttggtgccacacaggtt

SEQ ID NO: 860003 - DNA, 120 bp, Artificial Sequence
  ENSG00000233639_10 (sequence is synthesized)
aatgtctttacctggtgagtgtatatgattggtggatcctaaatcacattcatatcttagctctaaggaataggggtgacacaactttgagcttcgcagcctctgcagtagaggaaggaa

SEQ ID NO: 860004 - DNA, 120 bp, Artificial Sequence
  ENSG00000233639_11 (sequence is synthesized)
cactaggagggagttgacacggatactgaatgagacaaacaacagtctttaccatgggtttggaagttagggtttcctcaaactttcaccttattagatattagcatccttttaattttg

SEQ ID NO: 860005 - DNA, 120 bp, Artificial Sequence
  ENSG00000233639_12 (sequence is synthesized)
gtcagtttagttaatgaagctattttcttgttattttgacttgcactttattagttgaatgctttatccaattctggtgtttcttattttttcttgaaaaaaatctctgttcattttctc

SEQ ID NO: 860006 - DNA, 120 bp, Artificial Sequence
  ENSG00000233639_13 (sequence is synthesized)
tagttaggtgtgtctatttctactatattgatttataaaagctttttacatattttatctttttgaaagatggtcgtggcaaagtttaactttttttacatattcaaacattttcctttt

SEQ ID NO: 860007 - DNA, 120 bp, Artificial Sequence
  ENSG00000233639_14 (sequence is synthesized)
tttctgtcatgtctactgcttttggagtttaattttaaaggttcttttctacttcatgattatggaaatattcaaccattttttgggtgcagtttttggctttatttttacattaagtaa

SEQ ID NO: 860008 - DNA, 120 bp, Artificial Sequence
  ENSG00000233639_15 (sequence is synthesized)
ttaattcatctgtaatgtgttttggaatataatatggattcagagtccaactttgtgttttccagatagtaatccagtcatcctcacactatttggatcatctattccttatcactgact

SEQ ID NO: 860009 - DNA, 120 bp, Artificial Sequence
  ENSG00000233639_16 (sequence is synthesized)
gaaggtgttactttatcatatactgaattcctatatgcacctgagtctaaattgcctattctcttccattgatctttctgtttctggatccgtatcacactttagcattcttatttttaa

SEQ ID NO: 860010 - DNA, 120 bp, Artificial Sequence
  ENSG00000233639_17 (sequence is synthesized)
aatgtgttgtggttatactaatacattaactcatgtcaataaaatttaggaaatttttgtcaagaattataaaattccataggtattttgatttggaaattaacaaagaatgtagatcaa

SEQ ID NO: 860011 - DNA, 120 bp, Artificial Sequence
  ENSG00000233639_18 (sequence is synthesized)
cccatacatatttgatgccttctttcctaggaatatgggaggtggtaatgcttgattattaagggtatgagctgtatgagaaactcatcagtttgggcccccgctctgccaggatttata

SEQ ID NO: 860012 - DNA, 120 bp, Artificial Sequence
  ENSG00000233639_19 (sequence is synthesized)
aaactcatcagtttgggcccccgctctgccaggatttatactgtgaggtctcctgcaagtactgcactttttttttatatatactttaagttctagggttcatgtgcacaacgtgcaggt

SEQ ID NO: 860013 - DNA, 120 bp, Artificial Sequence
  ENSG00000233639_20 (sequence is synthesized)
tgtccttgcgacagtttgctgagaacgatggtttccagcatctttttaattgttagttttttcatctgtaacatgggaagaaatattgcagctactaaaaagatgtggtgaggattaatg

SEQ ID NO: 860014 - DNA, 120 bp, Artificial Sequence
  ENSG00000233639_21 (sequence is synthesized)
aacgggcacttgtaaaactctcagaggagtacctgtagcaaagtttaggctgaaaatgtagtaccagcatgtcctgccaacattcttggtgaagacgatgatactactttttaaggctgt

SEQ ID NO: 860015 - DNA, 120 bp, Artificial Sequence
  ENSG00000233639_22 (sequence is synthesized)
gttctcatgctgctaataaagacatactccagttcccaaaaagtccctcatctccatctgaaacctccttagccttgacctcattgtccatatcactatcaggatgttggtcagagccat

SEQ ID NO: 860016 - DNA, 84 bp, Artificial Sequence
  ENSG00000233639_23 (sequence is synthesized)
aagttccaaactttcccacattttcctgctttcttctgagctctccaaactgttccatcctctgccctgtctttacagtagcac

SEQ ID NO: 860017 - DNA, 120 bp, Artificial Sequence
  ENSG00000233639_24 (sequence is synthesized)
ttttgggtgtctttacagtagcaccccattctacaggtaccaatttactgtattagttagttctcacactgctaataaattacctgagactcggtcatttataaaagaaagaggcttaat

SEQ ID NO: 860018 - DNA, 120 bp, Artificial Sequence
  ENSG00000233639_25 (sequence is synthesized)
taactgacagttccacatggttggggaggcctcacaatcatggctggaggtaaatgagaagcaaagtcatgccttacatggtggcaggcaagagagggatgtgcaggggaactcccctgt

SEQ ID NO: 860019 - DNA, 120 bp, Artificial Sequence
  ENSG00000233639_26 (sequence is synthesized)
ataaaaccatcagaactcatgagacttatttgctatcatgacaacagcatgagaaaaacctgcccccataattccatcacctcccaccaggtccctcccacaacaggtaaggattattac

SEQ ID NO: 860020 - DNA, 120 bp, Artificial Sequence
  ENSG00000233639_27 (sequence is synthesized)
gatttgggtggggacacagagccaaactatatcaaaggcgcacagtagaatgttgtatcttcattcattcaggtgatgaacattcttcattacatttacttcttggtattttgttattgt

SEQ ID NO: 860021 - DNA, 120 bp, Artificial Sequence
  ENSG00000233639_28 (sequence is synthesized)
ttttgttattgttgttgtgtgctaaatagcagagaaagcaccacactttgaaagatgtataagattaagttcgataaattatattatgtctctgtttttggtttagaaaatcctagtttt

SEQ ID NO: 860022 - DNA, 120 bp, Artificial Sequence
  ENSG00000233639_29 (sequence is synthesized)
aatctatcttacattatgaagcctgaaagtaatagaacataatactattcagaactccatattctggtcaatgcttagttgtctctttaaagccttacttcttcactggactgcaagttc

SEQ ID NO: 860023 - DNA, 120 bp, Artificial Sequence
  ENSG00000233639_30 (sequence is synthesized)
cctgggctggtgtgacctcttccactgccatgtatctcctatgggcctgggtctagtgtgtgttcgatacatatttgcatgaacaaataaatggcttcacctggatatctcttcaaaagc

SEQ ID NO: 860024 - DNA, 120 bp, Artificial Sequence
  ENSG00000233639_31 (sequence is synthesized)
atctaatttgcctcttttttccccacctttacagacttccagctacatcaagcttcttgctctttcctgaatactccaagatacttattcctctgtgccttttcacatgctatttcttct

SEQ ID NO: 860025 - DNA, 120 bp, Artificial Sequence
  ENSG00000233639_32 (sequence is synthesized)
tggtgtcagatctttgtacctctctgtcaactggaagactgtcctcaaacgacttcccacaagaaacctttccagaggggtcactagcagtgcactgcggagggagcaccaccaccactc

SEQ ID NO: 860026 - DNA, 120 bp, Artificial Sequence
  ENSG00000233639_33 (sequence is synthesized)
gccaaggtcttaatagactccgcgctccataaagtggacaccgagccagtgacggcggagatggcccggcgggcgcccaccggcattggctgcgctccgattacttcgttaagcagtgtc

SEQ ID NO: 860027 - DNA, 120 bp, Artificial Sequence
  ENSG00000233639_34 (sequence is synthesized)
cttttcttttttttttttaatttttccctcctactgtgagaactgttcacttggagactccctgtcttaattacaaagagcccttttaaccataggtcacaggacttggctctcttgaca

SEQ ID NO: 860028 - DNA, 120 bp, Artificial Sequence
  ENSG00000233639_35 (sequence is synthesized)
accataggtcacaggacttggctctcttgacaggaaataaggaaacaagctaccttcctggaaaaaaaaattcaaacttctacttctcaaattagttaaatgaagcttgtcgacggttgg

SEQ ID NO: 860029 - DNA, 120 bp, Artificial Sequence
  ENSG00000233639_36 (sequence is synthesized)
gagttgagccttatgacagttggctaattgcagttggtacattaactatgttttaaccagagcagtttgggatctaagtagattaaaaaaataaagcaagcctaggcatttccaacgaaa

SEQ ID NO: 860030 - DNA, 120 bp, Artificial Sequence
  ENSG00000233639_37 (sequence is synthesized)
aacacttaaaataaccacaaagttaatattggttttacttgctatatgtattacaatacaaaatggattcctgtatctttaacattgtaattaagtaaatttacaaatattaacattttt

SEQ ID NO: 860031 - DNA, 120 bp, Artificial Sequence
  ENSG00000233639_38 (sequence is synthesized)
aaaatgacactaaagctactttaaatcctaggaaggcctctctctctctctctctctctgccctttcttttttgattctgccttcaaaatgtcctctgtctgtattttttatattaaata

SEQ ID NO: 860032 - DNA, 120 bp, Artificial Sequence
  ENSG00000233639_39 (sequence is synthesized)
ttcgctgcaaagtctatctagtaaatatctggttccaagtctgtgtacaccattctcaaatataaaacttttcaaatgaagataaacctttagttgaattggtttattttctgatttgat

SEQ ID NO: 860033 - DNA, 120 bp, Artificial Sequence
  ENSG00000233639_40 (sequence is synthesized)
ggagagctgggcttcgaggcgtcagtgtgaagggaaggctaaggacgcatcggtgctggagagttgagaatatgccttcccctccacccccaacccagtcaccttatttgaaaaaaaatt

SEQ ID NO: 860034 - DNA, 120 bp, Artificial Sequence
  ENSG00000233639_41 (sequence is synthesized)
aaaaaacaccttttatttaaaaacctaaccctggaagtttgctcgggaaggcattctcttcctcttcctccagctgcctgaaaatcatatgcgtggtttttcctgtttcctgctctgtag

SEQ ID NO: 860035 - DNA, 120 bp, Artificial Sequence
  ENSG00000233639_42 (sequence is synthesized)
ctgacatcaggggagcaacgtgaacacaggaaaatggaaatcaacatttgaaacttttaaatggaagctttattggggttccacatatggaaaactgcaaatagcagaagtatgtgactc

SEQ ID NO: 860036 - DNA, 120 bp, Artificial Sequence
  ENSG00000233639_43 (sequence is synthesized)
taaattattctggagtgaccacatcctctaactgcctcccaggacaagacggagaatgtgaacaatgctcctgaaggcccctttccctcaaagaatcactgcaattgaaggaaaaatgct

SEQ ID NO: 860037 - DNA, 120 bp, Artificial Sequence
  ENSG00000233639_44 (sequence is synthesized)
ccatgtcccctctgccagttggtgtttatcaaaggacaacggaggaagagagacaaagtgcctggatgtgtgtgttaatcaagagttgtcaggaccctgcctctaaaagaaagcgctaaa

SEQ ID NO: 860038 - DNA, 120 bp, Artificial Sequence
  ENSG00000233639_45 (sequence is synthesized)
atgatgcttttgacaagacttttctcaaagtggatgcagtctaagggttggaaaacaaggcccaatcaggctaggtctgacttgtcgcctgcttttgtaaataaagttttattggctcac

SEQ ID NO: 860039 - DNA, 120 bp, Artificial Sequence
  ENSG00000233639_46 (sequence is synthesized)
gaaacaaggctctcgatccatccaccttcgtccctcaagtggtaggaaactttccgacgcctcccgcggctctgccaggagagaagagacaagctccccctcccaaccccttagtaatga

SEQ ID NO: 860040 - DNA, 120 bp, Artificial Sequence
  ENSG00000233639_47 (sequence is synthesized)
ctgagtctagcgaagctagccagccgggaggcaaactccccctgccgccccgaggcctcctccagccgctgagactggaaagcggacttgcgacgccacgccggccgtcgttggtgacaa

SEQ ID NO: 860041 - DNA, 120 bp, Artificial Sequence
  ENSG00000233639_48 (sequence is synthesized)
ggagggtgccggtcagcggagccgtgcgatgtatttgaaaagcaatcagtccgaccttcccccatagattcatcctgcctgaaaatcatatgcgtggtttttcctgtttcctgctctgta

SEQ ID NO: 860042 - DNA, 120 bp, Artificial Sequence
  ENSG00000233639_49 (sequence is synthesized)
ggttaagtaaattaaatcactcactgtcttttttttttttttccattggctttaaaagttaaaggtaatttgcaaagaaaatgctcagtttgaattggtttgtaatatctgttaatgatc

SEQ ID NO: 860043 - DNA, 120 bp, Artificial Sequence
  ENSG00000233639_50 (sequence is synthesized)
tttaaaaaaatccacttattcacaattctgtccctgggggaattccaatgtgctatcagaaaaaatttctaaagtctgaaatgtcattagctagtgatttctttgaagtaaaaagccccg

SEQ ID NO: 860044 - DNA, 120 bp, Artificial Sequence
  ENSG00000233639_51 (sequence is synthesized)
aaaaaaataaattatataaggtatacaagtgcacaggacaatcactttgatgaataatatctctttttttcataacgtttcatacctaaaaatgcaacaactgaaattcaagctggtaaa

SEQ ID NO: 860045 - DNA, 120 bp, Artificial Sequence
  ENSG00000233639_52 (sequence is synthesized)
ttatagagccatcttttgaattacctcaatgtaggcatgccttctgtttatttctcacatatattgagttcttccatatatttatagattgttgatataaaaacagtagtgttaggaaca

SEQ ID NO: 860046 - DNA, 120 bp, Artificial Sequence
  ENSG00000233639_53 (sequence is synthesized)
attttgatgatattcattgtgttttctttttggaaacacaaagtgttgcctaaatacaggcatacaggtgttgccatccggggattaaaacaatagcctatttcaatattccatcctgga

SEQ ID NO: 860047 - DNA, 120 bp, Artificial Sequence
  ENSG00000233639_54 (sequence is synthesized)
ccccagagccaggtgccgtgaatggaggtgcaaatgctactcagcccgggagagttgttcaatattagataacagagccatgaaatactacaccaaagggaaaattttcttcctgacccc

SEQ ID NO: 860048 - DNA, 120 bp, Artificial Sequence
  ENSG00000233639_55 (sequence is synthesized)
agctggtgatcagtttttgcctggaagcaggggagtctttgtaatacaatacttgtcaatgttgttggtttggctgctataaatagctattttttttggaggatgggaggagttggattt

SEQ ID NO: 860049 - DNA, 120 bp, Artificial Sequence
  ENSG00000233639_56 (sequence is synthesized)
catttcttgtagccagtctaaatttgttacgttttaatcccattttatataaggctagaaatatatgagcctccagcaggcccgttatttttgtcattattttatacattggaccttcag

SEQ ID NO: 860050 - DNA, 120 bp, Artificial Sequence
  ENSG00000233639_57 (sequence is synthesized)
ctctctatctctctttttttctttttcctctctatgcattactcacctcttagctaaattgcagagggtcccagtttcattcattctccctcacagggaaggcattctcttcctcttcct

SEQ ID NO: 860051 - DNA, 120 bp, Artificial Sequence
  ENSG00000233639_58 (sequence is synthesized)
ttttttgaacttcatgtaaatggaatcatatggtaggtattcttttttaaatttcatctttattgtgataagaacattaaacatggataggtgttcttttgtctgtcttcattctctcaa

SEQ ID NO: 860052 - DNA, 120 bp, Artificial Sequence
  ENSG00000233639_59 (sequence is synthesized)
cattatttttgtgtctatgtagttgggtatactaatagtatgttttctttgttatattttcttcccttgtatccttgtatcagtaatatagcacaatttatcatttttttttttttttga

SEQ ID NO: 860053 - DNA, 120 bp, Artificial Sequence
  ENSG00000233639_60 (sequence is synthesized)
cctcccaaagtgctaggattacaggagtgcaccaccatgcccggtagtttatccattttccccttgatgaacatttgaattgttttgagttttaggctactttcagagagtgcagctgga

SEQ ID NO: 860054 - DNA, 120 bp, Artificial Sequence
  ENSG00000233639_61 (sequence is synthesized)
cagctggaaactttcttgtgcatgtctttgatgcttgtgtatatgcattatgtttagtctatatatagactaaaggggaagttaccaaattgtagaacatgactatgctcaactttaata

SEQ ID NO: 860055 - DNA, 120 bp, Artificial Sequence
  ENSG00000233639_62 (sequence is synthesized)
aataatgccaaacagttttccaaagagattgtgtcagtctccactcttaccagcagtgggtgatgctctacatccctgctagcacttggcattctcagtcttcttgattttggtcattct

SEQ ID NO: 860056 - DNA, 120 bp, Artificial Sequence
  ENSG00000233639_63 (sequence is synthesized)
ggtggtatgtatagagtctcattgtggttttaattccattttcttggattattagtacactgagcatctttttcatgtatagtggctatttggatattcccttttgtaagtggtcttatt

SEQ ID NO: 860057 - DNA, 120 bp, Artificial Sequence
  ENSG00000233639_64 (sequence is synthesized)
aagtccatttttctattggacttttcatcttattgatttgtaggagatatatattctgcatatagctttttggttatatatgttaaaaatatgtaccaccctgagcttgacttttcattc

SEQ ID NO: 860058 - DNA, 120 bp, Artificial Sequence
  ENSG00000233639_65 (sequence is synthesized)
tctttgtggtgcctttggatgaatagaaaatattaactttttcttttgttttgttttgctttttgagataggagtcttgcactgttgctcaggctggagtgcagtggcttgatcatggct

SEQ ID NO: 860059 - DNA, 120 bp, Artificial Sequence
  ENSG00000233639_66 (sequence is synthesized)
actgttgctcaggctggagtgcagtggcttgatcatggctcattgcagcctcaacccccagggctcaagtgattctctcacctcagccttcttagtagctgggactacaggcatgtgcca

SEQ ID NO: 860060 - DNA, 120 bp, Artificial Sequence
  ENSG00000233639_67 (sequence is synthesized)
tttgtatttctgttgttgttgttgtagatacagggttttgccatcttgcccaggctggttttgagctcctggactcaagtgatcctcctaactcagcctcccaaagtgctaggattacaa

SEQ ID NO: 860061 - DNA, 120 bp, Artificial Sequence
  ENSG00000233639_68 (sequence is synthesized)
ttttaatgttactgttaatatagtctatttccctttgtggttaatgctttctgtgtcctatttaggagagctttgcttatttcaaggccataataatatcctttcatattatcttttgta

SEQ ID NO: 860062 - DNA, 120 bp, Artificial Sequence
  ENSG00000233639_69 (sequence is synthesized)
agttgtgttgtttcacctttcacaattggatctacaatccacatggcattgatttttgtatgtggtgtgaggttgggatcaagtttggttctttactccatgatatctacttacccttca

SEQ ID NO: 860063 - DNA, 120 bp, Artificial Sequence
  ENSG00000233639_70 (sequence is synthesized)
tgatgaatggaaaagacttcctttctccaatgctctgcagggacacttttgtcataaattaagcacccacttctttatagaattatcatattacttttttccattattctgttagcatgg

SEQ ID NO: 860064 - DNA, 120 bp, Artificial Sequence
  ENSG00000233639_71 (sequence is synthesized)
tgagttattcaatgggtttttgaatgttaaaccaatcttgcatttctggattaaactcaacttgggtgtgatggaatatttgtcttacatattgctgcatgtactttggtcatattttca

SEQ ID NO: 860065 - DNA, 120 bp, Artificial Sequence
  ENSG00000233639_72 (sequence is synthesized)
aaaataatttttatagaaatgtttatgagtgaaatttacctgtaactttcttttattgtaatgtctttctcaaatgtgttatcaacgttccactggctcataaaacaagttgagaagtat

SEQ ID NO: 860066 - DNA, 120 bp, Artificial Sequence
  ENSG00000233639_73 (sequence is synthesized)
atagtcttttagaaattaaaacataaatgagtctaatatcacatagtaattaaacatatatgtagtttatcctgagaaggactcactacagttttctgtctttctatgtttctgtgtatt

SEQ ID NO: 860067 - DNA, 120 bp, Artificial Sequence
  ENSG00000233639_74 (sequence is synthesized)
tagatttttagcaggaagctggttttgtgtgagttttgcatgggaaagtaaataggaattagactatcttctaggagtttccatatggcactcagcagtatgttcatgtgcccaaggctg

SEQ ID NO: 860068 - DNA, 120 bp, Artificial Sequence
  ENSG00000233639_75 (sequence is synthesized)
aaatttgttactgcatctcaatcctggaacccataatcaaggctcatcagttgagaaacctttttggacatatgacaagtgttcagataaaatatctgatccctgccaagaatcttctag

SEQ ID NO: 860069 - DNA, 120 bp, Artificial Sequence
  ENSG00000233639_76 (sequence is synthesized)
gccaatttaatctctgacttttgaccttatctgtcactgctccaaagactttttaatttttatttttaaaatatcctgtagtagcatgcatatcattcctcatcccagctctcttttcct

SEQ ID NO: 860070 - DNA, 120 bp, Artificial Sequence
  ENSG00000233639_77 (sequence is synthesized)
acttagtattgtcccagttcaaggccttgtcacctcttgcctgggcaatggcgtctatgggatactattctccatttatcttcttctcagccatgcagatgctgactctgaaatagaaag

SEQ ID NO: 860071 - DNA, 120 bp, Artificial Sequence
  ENSG00000233639_78 (sequence is synthesized)
ctaaccacattagtcctttgctgaaaaccaggtgatttctgtattgctctgcaagatgaagtccaggtttatcaatgtggtgcaggttcttgcatgatctgatgtcttagtccattcagg

SEQ ID NO: 860072 - DNA, 120 bp, Artificial Sequence
  ENSG00000233639_79 (sequence is synthesized)
ttgcttaacaaaatatcttagactgagtaatttataaacaatagaaatatatcgctggtagttctggaggatggggagtccaagatccaggcgtcagcagatttggtgtctggtagggct

SEQ ID NO: 860073 - DNA, 120 bp, Artificial Sequence
  ENSG00000233639_80 (sequence is synthesized)
tcatagatggcaccttgttgctgcattcttacatggtggaaggggcaaggaagccccctggatcttcttttataagggcaccagtcctactcattatggtggagcccccatgactgaatc

SEQ ID NO: 860074 - DNA, 120 bp, Artificial Sequence
  ENSG00000233639_81 (sequence is synthesized)
acttcccaaaggccctacctcttaatacgatcctgtcaggtatttggttccaacgtgagttttggaaggataccagcattcagaccatagcacctggctcttgctcacctcttcagtctg

SEQ ID NO: 860075 - DNA, 120 bp, Artificial Sequence
  ENSG00000233639_82 (sequence is synthesized)
ctctcctgtctcactctagtctttggctttacattcctgcagctctatcttctggttccaactatgtgtgctccctgtggttctctgtgcctgtgcatttgcctgtgctgacctttctcc

SEQ ID NO: 860076 - DNA, 120 bp, Artificial Sequence
  ENSG00000233639_83 (sequence is synthesized)
ctggaatagactatccatatccttctggataatccattctttaacagccagctcaggctaggtaaccttgccctccacccagctgggctgcttggctctcctttctgcccatgtgtctgt

SEQ ID NO: 860077 - DNA, 120 bp, Artificial Sequence
  ENSG00000233639_84 (sequence is synthesized)
ctgtcagactggaccgtaagctctttgcaggcaaggtctgggctttagttacctatgtacaaccataacttcctgtttgctggtagataacaggtgcacaataaacaatgatagatccaa

SEQ ID NO: 860078 - DNA, 120 bp, Artificial Sequence
  ENSG00000233639_85 (sequence is synthesized)
acagaaggaagaatggtgactagttgactattttgagtttcatttcatttctttatggaagcctgagatggaataaaatggtcaaaatgccatgaccagaagggaggcaggaaggaggca

SEQ ID NO: 860079 - DNA, 120 bp, Artificial Sequence
  ENSG00000233639_86 (sequence is synthesized)
ggaaggcaaaggctcaggaagatctgtagatacaatctcttcctgtacaactgagttcagtctagctgattaaaatcctcttatggtggaatccgctttttatagaatggattagcaaca

SEQ ID NO: 860080 - DNA, 120 bp, Artificial Sequence
  ENSG00000233639_87 (sequence is synthesized)
aggatttgctgtgaagatagatttttccagagaaacaaatttgagcaatttaagaatgtaaatgaaaaaaaatcctgccccaaaagcaaattgaccaatatccttcccctgtctcttatt

SEQ ID NO: 860081 - DNA, 120 bp, Artificial Sequence
  ENSG00000233639_88 (sequence is synthesized)
aataaaagagtttacacagactctctttaggaaatcatgtgagagattcacaaggatcattaaatctctgctagacattcactttcactttgtaaaattggctataccctcaaaatggta

SEQ ID NO: 860082 - DNA, 120 bp, Artificial Sequence
  ENSG00000233639_89 (sequence is synthesized)
tcacgtagaaacggactttctggggctcttatctatgaatgggttctagctgcacagtgatgccattcattttatttggcccatttattgcaagtacattctaaatttggccttaattat

SEQ ID NO: 860083 - DNA, 120 bp, Artificial Sequence
  ENSG00000233639_90 (sequence is synthesized)
ttttcctttcacaaaaatattttgtgggatctttttgaaccctgactacttccttcttgccccttaaaacagaagccaggagcattatttttgttctcttctaattaaaataattgcttg

SEQ ID NO: 860084 - DNA, 120 bp, Artificial Sequence
  ENSG00000233639_91 (sequence is synthesized)
gctccttttaactagattcatgcagttattagcctaatacatggatgggtgccatggagtgcttgagaaacaaaatgaaaagtgatcatgtagcttcacatgaaaaagattctgtggtgc

SEQ ID NO: 860085 - DNA, 120 bp, Artificial Sequence
  ENSG00000233639_92 (sequence is synthesized)
caaggagcattatttcctttcagccagtattttataagggctttcgtaaacctggcccccataccctcactaaaagactattaagtgaaagaatagctctattttctttattaaggtata

SEQ ID NO: 860086 - DNA, 120 bp, Artificial Sequence
  ENSG00000233639_93 (sequence is synthesized)
ccgctagctcagtacaatttgaagaggggcacttgatatgccgagcatggcacaaagacctcgggtctggttttaatctctgccccggctttgtctttcagaatcactgcaattgaagga

SEQ ID NO: 860087 - DNA, 120 bp, Artificial Sequence
  ENSG00000233639_94 (sequence is synthesized)
gagtacaacagtgagctcagcgtctcgatgcctctgtccctcctgatggcctgagggtaacacaattgccttctttttgggagggactcagcccactccaatattgagaatcagagcgcc

SEQ ID NO: 860088 - DNA, 120 bp, Artificial Sequence
  ENSG00000233639_95 (sequence is synthesized)
ccagtgttgggaatcagtcctccctaacggtgggaatcagccttgcccagtgttgggaatcagccctccctaatgttgggaattagctctccccaaatgttgcgtatcagtcctccccaa

SEQ ID NO: 860089 - DNA, 120 bp, Artificial Sequence
  ENSG00000233639_96 (sequence is synthesized)
tgttgagagtcagccctccctaatggtgggaatcagccctctccagagttgggaataagtcctctgcaatgatgggaatcggtcttccttaatagtgggacttagtcctccccagtgttg

SEQ ID NO: 860090 - DNA, 120 bp, Artificial Sequence
  ENSG00000233639_97 (sequence is synthesized)
ggaatcagctctcccttatggtaggaatcagttctccccagtactgggaatcagctctccctaatggtgggtatttaccctccccagtggtgggaatcagtcctccctaatggtgggaat

SEQ ID NO: 860091 - DNA, 120 bp, Artificial Sequence
  ENSG00000233639_98 (sequence is synthesized)
cagtcctccctaatggtgggaatcagctctccctaatggtgggaatcagctctccctaatggtgggaatcagctctccccagtggtgggaatcagccctcgccagtggagagaatcaggt

SEQ ID NO: 860092 - DNA, 120 bp, Artificial Sequence
  ENSG00000233639_99 (sequence is synthesized)
ctccccaatggagggaatgagtcttccacaatttagggaatcaaccctcctttgtggtcagagtcagttttccttaatggtgggaatcagcatttcctaatggtggaaatttgccctccc

SEQ ID NO: 860093 - DNA, 120 bp, Artificial Sequence
  ENSG00000233639_100 (sequence is synthesized)
caaaggtgggaatcagcccttccctgtggaggaagtcagccctctccaattgtggagaagtgccactgggaagggccagttcctttccatctccacaattgagggaattggcccttaaca

SEQ ID NO: 860094 - DNA, 120 bp, Artificial Sequence
  ENSG00000233639_101 (sequence is synthesized)
gtggtacttcaagcttaggagtcataactgctcaccatcgttttggtgttcttaaccctcactccacctctgtaaacagatccttcattagtgtcaccccagtttaccatatgaattagc

SEQ ID NO: 860095 - DNA, 120 bp, Artificial Sequence
  ENSG00000233639_102 (sequence is synthesized)
ccacagggatgctgactgccacagtagcttagaccatgataaatgcgacggaaagatgtcatttcgtcccccctcccccagttcagcagtaatattacttgttcttacctgccacgattg

SEQ ID NO: 860096 - DNA, 120 bp, Artificial Sequence
  ENSG00000233639_103 (sequence is synthesized)
gactaagtgtcatctagcatcaggttgcattgctgtcctgtggctcaattacttgctgataagccacacaattcaccatcattgtacgttctaaagcaagggaacctccattgcctgcgc

SEQ ID NO: 860097 - DNA, 120 bp, Artificial Sequence
  ENSG00000233639_104 (sequence is synthesized)
cctgaaggcagcaaccatgttctgtgatgcttggtgaatcctcagctcctcatgtagtgtgaggggagacaaagacctatttatccacagcctagttcaacaaactcacagcagtctata

SEQ ID NO: 860098 - DNA, 120 bp, Artificial Sequence
  ENSG00000233639_105 (sequence is synthesized)
caaggtggtgtcccagcacattcacatgtttcccgagacccttcccacccagctctctctcctgcccctgtcagcccagcacttgctctgtgctcacggggccacctgtacattcctagt

SEQ ID NO: 860099 - DNA, 120 bp, Artificial Sequence
  ENSG00000233639_106 (sequence is synthesized)
ccacctcgtgctcttatttggctgtgagtaaagacccagttcaagtgtcctcttctctgaagccttcactggtttcatcatttcaaagaagtggggggcctttccctttaactttgggag

SEQ ID NO: 860100 - DNA, 120 bp, Artificial Sequence
  ENSG00000233639_107 (sequence is synthesized)
acacatatctgtgtatcaccaggccacctcagttgactcgtgcctttttgttttctaagtaacttttagaaattcttgggctctttcccctgtccagttcacactggcctgaaccagcta

SEQ ID NO: 860101 - DNA, 120 bp, Artificial Sequence
  ENSG00000233639_108 (sequence is synthesized)
ggtaagccaaacccagtattttccttgtctgcatttaagcttattgcttagctttggggagtgaacctgggctcagagctctgcagttcatgcgtctcctccttttgaaaagaggattca

SEQ ID NO: 860102 - DNA, 120 bp, Artificial Sequence
  ENSG00000233639_109 (sequence is synthesized)
gatggtctagagcttgctccgtgttagcgggtggtatatagacttatcagtttccttctggaagccccagatggatgacatccggtcaaggagttttgctcctctgttcaagtttttcag

SEQ ID NO: 860103 - DNA, 120 bp, Artificial Sequence
  ENSG00000233639_110 (sequence is synthesized)
gttactccattacttcccccctagagacatcaatctgtgttaaggccaaactagaatttcctgagcaaaaagcccttgaaatgtgaaattcctcacttctcttgatgataaaagtgacgc

SEQ ID NO: 860104 - DNA, 120 bp, Artificial Sequence
  ENSG00000233639_111 (sequence is synthesized)
agaaagaaaaaataacagttttgttacctgatggtacttattagttagctcccctcggaagcagtactgagaaatttcacgtgcatttgagttatactctgggggaatttgtcaacacat

SEQ ID NO: 860105 - DNA, 120 bp, Artificial Sequence
  ENSG00000233639_112 (sequence is synthesized)
gtcactgagtggacaccacgaatgtgtatattgttttcatctgtaatcgaagaaataagaataatattcgtcatttaactatgcacttaagaatcattcagtatcagtttaagttgaaaa

SEQ ID NO: 860106 - DNA, 120 bp, Artificial Sequence
  ENSG00000233633_0 (sequence is synthesized)
ggaaacagcttctccccgtcccgcccctcagtctgctcttcacacggataccacgaatgccacggtggcctcctgaagacggagtctggtctcacattcctccagcttcctatttccggc

SEQ ID NO: 860107 - DNA, 120 bp, Artificial Sequence
  ENSG00000233633_1 (sequence is synthesized)
tttgccctttggagcctgaggagcaagggtagaatgaggatcgtgaggttcttcagaggcagttactcacgaggtcacagcgcagaaacggcaagaaatgtcaggacaactatggatgtg

SEQ ID NO: 860108 - DNA, 120 bp, Artificial Sequence
  ENSG00000233633_2 (sequence is synthesized)
aaggatgggagaggggcctccttccgcatgaggtccccagaggtatttgtctccatctagaaactgaggggcatttgtctccatccaggacttggggggcctccttctccatccaggact

SEQ ID NO: 860109 - DNA, 120 bp, Artificial Sequence
  ENSG00000233633_3 (sequence is synthesized)
ggggtgtgtccttctgcatccaggacagggggacatccttctccatccatgattcagagttcatccttctctatccaggagaggggttcatccttctccatctaggacttgagggacatc

SEQ ID NO: 860110 - DNA, 120 bp, Artificial Sequence
  ENSG00000233633_4 (sequence is synthesized)
cttctccatccaggactgagaggcatccttctccttgcagtacctgagggacatccttctccattcaggacctgaggatgtccttctctgtactcccttgggactgcaccctttcctgtg

SEQ ID NO: 860111 - DNA, 120 bp, Artificial Sequence
  ENSG00000233633_5 (sequence is synthesized)
ccatccttcagaatgctaggctgtcgctggttgtggattgaactctagcatcttatctctattctaggtgaatcccttcacatttatagtgatttaccatttaatcactgtgccattttc

SEQ ID NO: 860112 - DNA, 120 bp, Artificial Sequence
  ENSG00000233633_6 (sequence is synthesized)
cccaaaatatgtggggtttggggtttggtttttgttcttacttctattaattcttcggttcccacctccagttgttttgtaatttcttttacaacctaatatggtcccatttggtaagta

SEQ ID NO: 860113 - DNA, 120 bp, Artificial Sequence
  ENSG00000233633_7 (sequence is synthesized)
ttaccatgtactagaaaataatgtatattcagtatttgttgtgatttttaaacctttaataaactcataagatttttgtctattttccatttaaattgagaagtacgatcccaatgttcc

SEQ ID NO: 860114 - DNA, 120 bp, Artificial Sequence
  ENSG00000233633_8 (sequence is synthesized)
tctctcgatctgctcccgttagtctccatgtgtgtcctggaggtgaggtcagcattggacttaaccctgtgtcacctccttggttctactgctcacctgtggcatccatcctgctgttta

SEQ ID NO: 860115 - DNA, 120 bp, Artificial Sequence
  ENSG00000233633_9 (sequence is synthesized)
agtttcatttccattcttttttgcccttaatttgaaagtgctgctttgctattgataattttgtattttaatatgtgaggttaattcctctgtgtttggtaggaaaaagtgatacatttg

SEQ ID NO: 860116 - DNA, 120 bp, Artificial Sequence
  ENSG00000233633_10 (sequence is synthesized)
aacttatttctattatgtgattttggattttggatttgcaaaactttatccttgattctcttttcctttctccagacttattttcaactgacatttccttttccatttccttcttatgct

SEQ ID NO: 860117 - DNA, 120 bp, Artificial Sequence
  ENSG00000233633_11 (sequence is synthesized)
gatttgtaggttttccagcctatttaccgttctttagtgtcctacattttaaaataattcttaaattatcgactaataattttaagcatattggatttgcggttttctcccagtgctcta

SEQ ID NO: 860118 - DNA, 120 bp, Artificial Sequence
  ENSG00000233633_12 (sequence is synthesized)
gttataatctcttctatcttgtcattttattcttgttatttttctattaattcttgagatataggtattagaattgtcaaattgtgaatttaagcatttaccctttaaatttggttattt

SEQ ID NO: 860119 - DNA, 120 bp, Artificial Sequence
  ENSG00000233633_13 (sequence is synthesized)
ttgcttcatatattttgttattttgtatcaggtgcatgcatgcttatgatcattaggttttctaagcaagtggactcattaatataaaatgtccttctctgtccctggcgatgctggtcc

SEQ ID NO: 860120 - DNA, 120 bp, Artificial Sequence
  ENSG00000233633_14 (sequence is synthesized)
ttcctgtcgtctgtctcatctgccatccatacacctgtgcagcctcctgataacaagtatttctgtggtatacatttgtccatcttttcagcttgaatctatttgtatctttatcttgaa

SEQ ID NO: 860121 - DNA, 120 bp, Artificial Sequence
  ENSG00000233633_15 (sequence is synthesized)
agaatgtttctttgtaaaagcatatcgaggcttgctttttacctgcattgacagtctctttttcactggcagtgttcagtcagtgcagatctgctattcctgtggttgggtttaagtcag

SEQ ID NO: 860122 - DNA, 120 bp, Artificial Sequence
  ENSG00000233633_16 (sequence is synthesized)
cacctgaacctgttatttcctctgttccgctttcctggtcttctggattattgtagttttgctttgtctgtttgtttgtttaataagagtttttgggttgtctttttagtatggattttg

SEQ ID NO: 860123 - DNA, 120 bp, Artificial Sequence
  ENSG00000233633_17 (sequence is synthesized)
ttgggttgtctttttagtatggattttgtaccttgtttttttttaactatgacttcttgttttatttattttcagtgagtcatttagaaattaaaatataaatacttaaagtctcatatt

SEQ ID NO: 860124 - DNA, 120 bp, Artificial Sequence
  ENSG00000233633_18 (sequence is synthesized)
gccctcctcctggcggaaacagcttctccccgtcccgcccctcagtctgctcttcacacggataccacgaatgccacggtggcctcctgaagacggagtctggtctcacattcctccagc

SEQ ID NO: 860125 - DNA, 120 bp, Artificial Sequence
  ENSG00000233633_19 (sequence is synthesized)
ttcctatgcataaaccccagcgaagggtgagcgcacggcatggcacctgcagcatggggttcacgttctggaaggttctggctgactcccaccccgcccttcactggccaagtaaacttg

SEQ ID NO: 860126 - DNA, 120 bp, Artificial Sequence
  ENSG00000233633_20 (sequence is synthesized)
cagaagttacttaacccttgacctagaagagcctcctgtcacctgaaaagggaaagtcgggattgtaaggaaaggaatctcatagggcttctctgaggagacaaatcattggattgggct

SEQ ID NO: 860127 - DNA, 120 bp, Artificial Sequence
  ENSG00000233633_21 (sequence is synthesized)
ggcaagaaatgtcagttataaaatgtccatgtgcattttaaatgaatggttattaaaatccttctttttccgtaagggatctaaaaaattaaacaatttgtaactcaaacacacttgtca

SEQ ID NO: 860128 - DNA, 120 bp, Artificial Sequence
  ENSG00000233633_22 (sequence is synthesized)
ggtagcctgagtcaaaaccaggagaggctccatggtctggagtctccaggtgctctcctgggtgagggtcttgttgcctaaggggtttatgtaatgaactcattctaatacaagcaaaac

SEQ ID NO: 860129 - DNA, 120 bp, Artificial Sequence
  ENSG00000233633_23 (sequence is synthesized)
atgagtccctcagagttgttcaaaaaatcaggaaataggaaaaaataaataaatgagaacagaatattgacaggagaggaaaatgaagagttactgggagatttgaaggaggggaaatgg

SEQ ID NO: 860130 - DNA, 120 bp, Artificial Sequence
  ENSG00000233633_24 (sequence is synthesized)
gcaaagggtaaatttagcaattagacttaaagtcagtggagaattaagtggaataatctattcttacatccatgtattttggttttaaaattttgattaatattcactcaacactaattt

SEQ ID NO: 860131 - DNA, 120 bp, Artificial Sequence
  ENSG00000233633_25 (sequence is synthesized)
ctaacaaaatagaatattttcttattgtctgtttccaccactgagcttgtaatatatatccactagtaattttagtagatcataacccctccaaaggagcccatagaataaacttatttt

SEQ ID NO: 860132 - DNA, 120 bp, Artificial Sequence
  ENSG00000233633_26 (sequence is synthesized)
tgaacagtcacattttctccaatgaacttttttattttcaagtttgaaaagctttagacatacagaaaagtagagtgaataatggagaccgtagccaggactcagatttagaaaaatagg

SEQ ID NO: 860133 - DNA, 120 bp, Artificial Sequence
  ENSG00000233633_27 (sequence is synthesized)
agtctgctcttcacacggataccacgaatgccacggtggcctcctgaagacggagtctggtctcacattcctccagcttcctgtgaggcttccccaaaaatgcaaattcaatcacaaggc

SEQ ID NO: 860134 - DNA, 120 bp, Artificial Sequence
  ENSG00000233633_28 (sequence is synthesized)
aagccacaggatggtagatgctatttacaatccattcaaccaacaaaggatttacatgtggaccacagagagaactgcaggccagcaaggaaccacagggagaactgcaggccagtgaag

SEQ ID NO: 860135 - DNA, 120 bp, Artificial Sequence
  ENSG00000233635_0 (sequence is synthesized)
agtgtttttcccattgcccttaatgttctccagaaggatcctaagaaagctcccaatctggatctcttaaaggtcctacaaatacacaacataagaagctaaagaggaaattcataaggt

SEQ ID NO: 860136 - DNA, 120 bp, Artificial Sequence
  ENSG00000233635_1 (sequence is synthesized)
gagtgtgtttgctgcctcatctacagatggaggggggccaagctcctgttcagcatcacctgtaacaagaaggcattgaagaacatgaatctttcaaaataaaatggtctagttctgcaa

SEQ ID NO: 860137 - DNA, 120 bp, Artificial Sequence
  ENSG00000233635_2 (sequence is synthesized)
cggcaactgaaatctgtcctaggggcactcatagacatatgaactccagctcttcaggcctctcttcgagaacaccacctctaactcatcaggcatctgccagtcatctactaaagagct

SEQ ID NO: 860138 - DNA, 120 bp, Artificial Sequence
  ENSG00000233635_3 (sequence is synthesized)
ctgctttgaaaagactcctcatctactgagctaagaaatacaagtacgtataaaggcataccttggagatactgtgggttttgttccaggtcaccaaaataaaacaaacagagcaataag

SEQ ID NO: 860139 - DNA, 120 bp, Artificial Sequence
  ENSG00000233635_4 (sequence is synthesized)
aagatatgctccaccaaaatgaagaataaaatcgagaaagaatatgacatgagatgaaacacaaaagaggagggacaggaactcccaggagaacaaggtggaggaaacccagacgagtca

SEQ ID NO: 860140 - DNA, 120 bp, Artificial Sequence
  ENSG00000275418_0 (sequence is synthesized)
tacagtgtaccacaccaaggaactcccacactctgaatgaacagcccagtgatcaggagctttgaatcaattcttggcacctaacagtttgtgaagagtctgctaaactccctctatcag

SEQ ID NO: 860141 - DNA, 120 bp, Artificial Sequence
  ENSG00000275418_1 (sequence is synthesized)
aggactgagaacaggtcatccttggagctgtatctgaatggagtcaggatctggaagcccaagtctccttgtcaatgtctgcttggttcccaaggacacctgtaaatggaagaggggcat

SEQ ID NO: 860142 - DNA, 120 bp, Artificial Sequence
  ENSG00000275417_0 (sequence is synthesized)
ctaaattgtgacactaaaagtgttttagttatttacttaacactaaaagtgacaatgaaaagacaccagagccaatcccacagtgaggaagtcagtgccagtgcagtctgaacaggtggg

SEQ ID NO: 860143 - DNA, 120 bp, Artificial Sequence
  ENSG00000275417_1 (sequence is synthesized)
ttaaaaaataagtagtaaaatattgttctcattttcaagaagctcataatctaattggaacactacacatgtcagcccatacatatttttaaaagtgaaataaaaacacaaaaaacaaac

SEQ ID NO: 860144 - DNA, 120 bp, Artificial Sequence
  ENSG00000275413_0 (sequence is synthesized)
tctgtatcatcagactcgtctatttctgaaaaatcggattcatcaaatgaatcttcaaccaacaactattcgagaatgatgttaacatcacgcgtaggcatgctatgttttctaggattt

SEQ ID NO: 860145 - DNA, 120 bp, Artificial Sequence
  ENSG00000275413_1 (sequence is synthesized)
ccaaagttgatatactagagcaatgtgaaaatgataaaagcgagatattttgtggcaacgatttaaaaagatgttcagtagtaaaacaaaagtacaagaataaagtgacaagcaattcta

SEQ ID NO: 860146 - DNA, 120 bp, Artificial Sequence
  ENSG00000213057_0 (sequence is synthesized)
ccgccgggccccgcgcgctgcagccaccgcctcttctcggcttcctcttgctttacagtaactctcctcctggggaaaaggcttttcacggagcaggctcggagcctacggggctggcct

SEQ ID NO: 860147 - DNA, 120 bp, Artificial Sequence
  ENSG00000213057_1 (sequence is synthesized)
cggactggatggggcaaatacagcctatgctcagaatttctccgacttcccatctctgagatgccggatgcccagttccacagaatcatggcaagcgagaaactgtcgttcataagagtt

SEQ ID NO: 860148 - DNA, 120 bp, Artificial Sequence
  ENSG00000213057_2 (sequence is synthesized)
acaacagagaacttgctctgcagcagccccaggctctctggggaccccacaggctatgcagatcccccaccccagaaccacagaaggagacagagcagaagcacaccccgtcttccaggc

SEQ ID NO: 860149 - DNA, 120 bp, Artificial Sequence
  ENSG00000213057_3 (sequence is synthesized)
ccaggacagctgctgagctccaggacacggactcttgaaggttgattttgactacttactaagctccagctgaaccagttccacttctttaaccttcccatgatccctgtgaggggtctg

SEQ ID NO: 860150 - DNA, 120 bp, Artificial Sequence
  ENSG00000213057_4 (sequence is synthesized)
ctcttgctttacagtaactctcctcctggggaaaaggcttttcacggagcaggctcggagcctacggggctggcctcggactggatggggagggtgctcaacttgctggagtcatctctg

SEQ ID NO: 860151 - DNA, 120 bp, Artificial Sequence
  ENSG00000213057_5 (sequence is synthesized)
tcctgggtgcttcaacatcaacagctcttggcaagtgagtgggccacgaaggatggacgagggacatgggggagcaagcccagctgcacggttccagctctttccgccacatcacagctt

SEQ ID NO: 860152 - DNA, 120 bp, Artificial Sequence
  ENSG00000213057_6 (sequence is synthesized)
ctgcagttgggaagactgaacagtgatcttcagtttgttcgtcaaagggccaagaaatctgtgtcctcaccttctctgcttcaattctggtgctgcttaagccgattatcatttcatgcc

SEQ ID NO: 860153 - DNA, 120 bp, Artificial Sequence
  ENSG00000213057_7 (sequence is synthesized)
ctaaaccaaaaaataaactctacaaacatcaacattacataggacaggatctggcccacagattgggggcaggagctgctttttcaatgagaagaatgaacagacctagtgggcgttgcc

SEQ ID NO: 860154 - DNA, 120 bp, Artificial Sequence
  ENSG00000213057_8 (sequence is synthesized)
tttagacccaggtaagaggaatcccagccttgggacattactttcaagggccaagcccataggccatccttctagaacattctttgggtagctagggcttcataagtcacttactgggtt

SEQ ID NO: 860155 - DNA, 120 bp, Artificial Sequence
  ENSG00000213057_9 (sequence is synthesized)
tgtcctccttgagtggactgtgttgtcggtgtgcacacctgtatttccatggaatggtatcttagtcctgctgctataacaatacctgagactgaaaaatgtataaacaatagacattta

SEQ ID NO: 860156 - DNA, 120 bp, Artificial Sequence
  ENSG00000213057_10 (sequence is synthesized)
ctggaggctgggaaatccaagatcaaggcaccagctggtttggtgtctggcgagggctgctctctgcttccaaaatggtgccttggggctgggcgtgatggctcatacctataatcccag

SEQ ID NO: 860157 - DNA, 120 bp, Artificial Sequence
  ENSG00000213057_11 (sequence is synthesized)
gcaccactgcactccagcctgagtgatagagcgagactctgtctcaaaagacaaacaaaaaaccaaaatggtgcctcattgctggatcttccaaaagggatgaacgtatgttctcgaatg

SEQ ID NO: 860158 - DNA, 120 bp, Artificial Sequence
  ENSG00000213057_12 (sequence is synthesized)
gctggatcttccaaaagggatgaacgtatgttctcgaatgacagaaaagacagaagggcagaaagtgtccaaactcactccatcaatcccttttataaggtgctaatcactccctaaaca

SEQ ID NO: 860159 - DNA, 120 bp, Artificial Sequence
  ENSG00000213057_13 (sequence is synthesized)
ccccatctcttattactgttgcactggggattcagtttcagcatgagttttggagggatacagacattcaaaccacagcattgtgcacactcctttttctatggaatggccaaggtgcag

SEQ ID NO: 860160 - DNA, 120 bp, Artificial Sequence
  ENSG00000213057_14 (sequence is synthesized)
ctatttgcagaggctctgacagagctccgctgtggagctggggtgtccacatgcctgtatggaagaactttcatggcaccggagcctggtgggaagagaagtgggctgggctatagactg

SEQ ID NO: 860161 - DNA, 120 bp, Artificial Sequence
  ENSG00000213057_15 (sequence is synthesized)
ggcaccagggactatcacctcgtgccaccacatttagtgtagagttccagagaggccacaaattcttcatttgaactggactccccagcctcatgttcctctgcaggatgtaaaaggtaa

SEQ ID NO: 860162 - DNA, 120 bp, Artificial Sequence
  ENSG00000213057_16 (sequence is synthesized)
tgccagcagacgttggcagtgctggagacacctggtgggcagaggttacctggctggagtggcaggtgtgaggagatgcctcccagcataaggaatgtgggcttctgttggatctcttgt

SEQ ID NO: 860163 - DNA, 120 bp, Artificial Sequence
  ENSG00000213057_17 (sequence is synthesized)
tccaggcctcacacatgttcaaggcagcctgggtatgtcttggcccattcaatccctcaaagccctgtttaattctcatcttgctgtcacctatgtggtgccaagaaacaagtcaccaaa

SEQ ID NO: 860164 - DNA, 120 bp, Artificial Sequence
  ENSG00000213057_18 (sequence is synthesized)
ataatgaaatgcctacctaagcttaaaaacaaaaccatgaggtctttctaaataaattatgaaaaagtgcaaactgcaggtccctgtaatgatttcaaagactccgttccaacaatgcat

SEQ ID NO: 860165 - DNA, 120 bp, Artificial Sequence
  ENSG00000213057_19 (sequence is synthesized)
taatttaaaaagggagtataaggcaaaggggggtgattagaagaggaaggcagctgacatcaaactgaatataccaagtttcctcctcaaaaacgagtgtgcattatttgtggtgaccat

SEQ ID NO: 860166 - DNA, 120 bp, Artificial Sequence
  ENSG00000213057_20 (sequence is synthesized)
tcttggtattgttctattacgtaaaacacagcatagcatcattcttttagatgccattcatttaatatatgggcaaatgtacatggttaggctagactggagcacttgtctacactgctt

SEQ ID NO: 860167 - DNA, 120 bp, Artificial Sequence
  ENSG00000258994_0 (sequence is synthesized)
ctgtctttccacagagacaactcacaggctataaagtgcttaacatttccttggcttcagaaggcactagggaaggagagcttaaggtaccattaaaaaaaaaaagaagaagaagaagaa

SEQ ID NO: 860168 - DNA, 120 bp, Artificial Sequence
  ENSG00000235777_0 (sequence is synthesized)
ggcagcagcaagctgattacacagggaaaagcttctatctaaatacacatagcataacaatcacccctggaaaaactacatggcttaccaaaagaggtctctctgttcactgtccattat

SEQ ID NO: 860169 - DNA, 120 bp, Artificial Sequence
  ENSG00000235777_1 (sequence is synthesized)
ctgttgactgaactagttcaaatgaataacaagtaatgatcaaattgccagtttatattttacaacagagtcttatctttaaaaaaatgcaaggaggaaatacaaaaatgtaatacattt

SEQ ID NO: 860170 - DNA, 120 bp, Artificial Sequence
  ENSG00000235777_2 (sequence is synthesized)
atcttgctttcttttctatttcctcccctgaaattattactatgctattggaagccatacaaacacatatatacacaaatatacatatgcttcaatgaaaagcaggcatgcagctgacag

SEQ ID NO: 860171 - DNA, 120 bp, Artificial Sequence
  ENSG00000235777_3 (sequence is synthesized)
taactacatgacatcataagaagtcctgaattagaagcgtatatttgaaaggtcatgcatcctgagctgccaacagcttaacaaccagaggcagaggccagctttgccagctcactgctt

SEQ ID NO: 860172 - DNA, 120 bp, Artificial Sequence
  ENSG00000235777_4 (sequence is synthesized)
ctactcatctttcatgatagtagccaggctgaatatagttccaggatgataatgaattggctgggcatactgtttatattagtatgtatgttcctgtactaaaccaagcatcatgaggcc

SEQ ID NO: 860173 - DNA, 120 bp, Artificial Sequence
  ENSG00000235777_5 (sequence is synthesized)
agcactattttgccatttttcagaaaaaaaatatgaacccttcaaaacatagtaagccttttttaaagtatatatttgattttgaaataatcaaaatatatgtagggatatgactgcatc

SEQ ID NO: 860174 - DNA, 120 bp, Artificial Sequence
  ENSG00000235777_6 (sequence is synthesized)
acacatagcataacaatcacccctggaaaaactacatggcttaccaaaagaggtctctctgttcactgtccattatctgttgactgaactagttcaaatgaataacaaccatacaaacac

SEQ ID NO: 860175 - DNA, 120 bp, Artificial Sequence
  ENSG00000235777_7 (sequence is synthesized)
ttatttggcatatcatagatttctgtcaaccaaaacaactaactctggggaacataacgttctgacaacttcagaagagttaagtcacagacaaaagtttattggatcttagttggctcc

SEQ ID NO: 860176 - DNA, 63 bp, Artificial Sequence
  ENSG00000235774_0 (sequence is synthesized)
acttcggtatcatttgaggggaccacgctcttcactcccctgcactccgtatcaataattcct

SEQ ID NO: 860177 - DNA, 120 bp, Artificial Sequence
  ENSG00000235774_1 (sequence is synthesized)
gtgggcggatcacaaggcatggcccatgtccctgggaacagtagagactgaggcctgggtctcagtggcatcaattagagcctttccctgggactgatgtacgagtgtctctttctgttg

SEQ ID NO: 860178 - DNA, 120 bp, Artificial Sequence
  ENSG00000235774_2 (sequence is synthesized)
ctttaaatgagaagataaaaatccaggttatcattagccacattcactggtcaagaaaaaggcctctgcagaacacagctgagcagaaccacacagaagtggaagaagcaaagaggtttc

SEQ ID NO: 860179 - DNA, 120 bp, Artificial Sequence
  ENSG00000235774_3 (sequence is synthesized)
cagaagactcaaaacccaagtatcaagttctgcactcagtactgagataattgcactacacagagatgagtgcaatatggaagctaaacacaggatgctttgaagaaaagaagaatccct

SEQ ID NO: 860180 - DNA, 120 bp, Artificial Sequence
  ENSG00000235774_4 (sequence is synthesized)
tctattttgtcctgtaccttcctgtaccgcataaccatgctcagaactcaaagaacacacagcctttctcaagattatggctggatggaaaaatttctaataaagaagtgaaagcaattt

SEQ ID NO: 860181 - DNA, 120 bp, Artificial Sequence
  ENSG00000235774_5 (sequence is synthesized)
tagcttaatagggaagttatatcactgttgacagtcttgtcctttcttaataaatcttaggagttatcccataaggaatattcattttccttcagacatgaagtgaccattaagatgcgc

SEQ ID NO: 860182 - DNA, 120 bp, Artificial Sequence
  ENSG00000235774_6 (sequence is synthesized)
cagtaaagaatccatggctttcagtgtctggccctatttcttctagttcaagaattttaagaaaaaatattgcaataaaaggtatatttttattagctacaaagtggatacatttcttgt

SEQ ID NO: 860183 - DNA, 120 bp, Artificial Sequence
  ENSG00000235774_7 (sequence is synthesized)
ttctcaaaaaaaaaaatgtgttattctgaaaatgttcaaatagccaggatttatattttgctaaagttagattttaaataaaagattcctgcttaattataaagagagaatatttactga

SEQ ID NO: 860184 - DNA, 120 bp, Artificial Sequence
  ENSG00000235774_8 (sequence is synthesized)
tagaaaatgtctctataaatggaaacatgttttcatgctgcccctgacacccgtcgggggtggcaagagagtggagagtggagattgctcaacaccaaaggtgaagctgggtcatcaaag

SEQ ID NO: 860185 - DNA, 120 bp, Artificial Sequence
  ENSG00000235774_9 (sequence is synthesized)
ggcaggaagaattatgatggctgaaaataacaacagaggggacccacagcaaagtccaaccttagcctccaccaataaataaatgtaccaccaatagataaattaaaaaagtgaccttct

SEQ ID NO: 860186 - DNA, 120 bp, Artificial Sequence
  ENSG00000203644_0 (sequence is synthesized)
atggcaaataagcacatgaaaagatgcccaaagtcgtaagtcattagggaaatataaatttaaaccataatgagataccactgcatactccctagaatggctgtaatgaataggattagt

SEQ ID NO: 860187 - DNA, 120 bp, Artificial Sequence
  ENSG00000203644_1 (sequence is synthesized)
cacatggtgacaagaatggaggatcatctggaactctcatacactgacgataggaatgtgaaatggatcaactactttggaagacaattgggcagtttctttcaaagtaaatgtgaagat

SEQ ID NO: 860188 - DNA, 120 bp, Artificial Sequence
  ENSG00000203644_2 (sequence is synthesized)
gccatacgattcatccattccatttctaattattcaagagaaatgaaactgtatatccacaaaaaagacttgtacacaaacattcacagcagctattatttattggtaatagctaaaaac

SEQ ID NO: 860189 - DNA, 120 bp, Artificial Sequence
  ENSG00000203644_3 (sequence is synthesized)
ctcggcaataaaaagaacagttgatactctcaacaacctagatggacctcaaaataattcggtttaatgaatgaagccaaacttaagaagagtacattgtatgtacttggagaactaact

SEQ ID NO: 860190 - DNA, 120 bp, Artificial Sequence
  ENSG00000203644_4 (sequence is synthesized)
tcttgcaatagatttttaagcactattaggagcatatgacttaaacagtttttaaaagtcagggagtaagtatgcttaaataaaatacaatctgtgaaacaaatctctgaattattatca

SEQ ID NO: 860191 - DNA, 120 bp, Artificial Sequence
  ENSG00000203644_5 (sequence is synthesized)
cttcactggacactctaacttgaccatatttctgactttaatgtaactcactcttattccgtagtcacatgtttgcttgctcattggttcacattacatttattcagcatctgcttgagc

SEQ ID NO: 860192 - DNA, 120 bp, Artificial Sequence
  ENSG00000203644_6 (sequence is synthesized)
caaggcactgtaactacatgttttttttagttacctacttttgtaaggtcctgtttctttggctacatctgattacagtaaacataggaagtttaataaaacaattttcatgaccgagga

SEQ ID NO: 860193 - DNA, 120 bp, Artificial Sequence
  ENSG00000235772_0 (sequence is synthesized)
ggagggtgctgcaccgctgtgtggtgtagtgaggacgcgggaacagtggagcgctcaccccgagcaggggcaccagggaggggcggggcctctgagaagggtggggccccagctgcagct

SEQ ID NO: 860194 - DNA, 120 bp, Artificial Sequence
  ENSG00000235772_1 (sequence is synthesized)
cctcggccactgtcacatggggtgcaggcccagcgtggccagattttctacttttcaagtgaagacaggaagccctgtttatctacggcgtttctgaatttcgaaatggagttcaggatc

SEQ ID NO: 860195 - DNA, 120 bp, Artificial Sequence
  ENSG00000235772_2 (sequence is synthesized)
agttctcgtatagccgggtgcagtggactgagtatcgaatggctccttcttcttccctggaactgaaatcattgtacattatcaagccacctggaaacacacagatgaaacaattccgac

SEQ ID NO: 860196 - DNA, 120 bp, Artificial Sequence
  ENSG00000235772_3 (sequence is synthesized)
cattgtgtcagcacacaggcgtacaggctaccgcatcccgccttgttgtgtcaacaagcgagagctgtgtctgctccctggtgctgtggctgtcagtgctggagagcacggcctggacag

SEQ ID NO: 860197 - DNA, 120 bp, Artificial Sequence
  ENSG00000235770_0 (sequence is synthesized)
gaatccaggaattggaaggaaaagaaaacagttctctattcatgctagttaactaatcaattcaatatgtattaactgagcacgctacatgctaggcactcttctaagtgcaggggagac

SEQ ID NO: 860198 - DNA, 120 bp, Artificial Sequence
  ENSG00000235770_1 (sequence is synthesized)
agcagtgaagaaagcagacaaagtctctgaactcctgtgtcttctattcaaatggggaagatgaacaatgaacagataacacaaatagaagaatgcgtgacctatccaatccttcctctc

SEQ ID NO: 860199 - DNA, 120 bp, Artificial Sequence
  ENSG00000235770_2 (sequence is synthesized)
atggaaacaccaactcatccatgccctctgtgctgaaacttcgtctcagcctgctggaatcacctgcaccccatgggaactgtagccatatcttcagtcctgtgagcccccgtcatggcc

SEQ ID NO: 860200 - DNA, 120 bp, Artificial Sequence
  ENSG00000235770_3 (sequence is synthesized)
tgtcacaggagtaaatgaggagtaaggcccagaatactcagtacctctcaatgaccctcagacgctgtaggaagaggattggttcaccttttaacccagaatttctcacattgaatggac

SEQ ID NO: 860201 - DNA, 120 bp, Artificial Sequence
  ENSG00000235770_4 (sequence is synthesized)
aggatgcattccaagaggccagagtatgtgcatctcagctcctgatggtttccaccaccaccattactttctctatgtcaagatacctgggaagccggagacaggcagcccacgcactgc

SEQ ID NO: 860202 - DNA, 120 bp, Artificial Sequence
  ENSG00000235770_5 (sequence is synthesized)
agtgatgaaaggactctccaacgaggcagacaggaaccctgcagttgggaatacagagccttctcctatgggaagaccacaggaaaaagaaacacccaagggggaggcatgagtctttgt

SEQ ID NO: 860203 - DNA, 120 bp, Artificial Sequence
  ENSG00000235770_6 (sequence is synthesized)
gaaagttgttttaaggcagagtatcatatcgcatcaaaaccgctccataagtcctgccactccacgtgcaatgccatgaacttgaagaaactgctggtaagagaaagcaaatgctgtgac

SEQ ID NO: 860204 - DNA, 120 bp, Artificial Sequence
  ENSG00000235770_7 (sequence is synthesized)
caggcaactgctgcaaaccaatgggctttggggaactgtgcttcccttcagaaaggaaagagtatttaacgatgaaaaggaaggattgtgtcttacttatacttacgggcttgtggttca

SEQ ID NO: 860205 - DNA, 120 bp, Artificial Sequence
  ENSG00000235770_8 (sequence is synthesized)
gcggagaccacactggactggactgaacagacaactgaagggctctctctacctttcagcatctctgtctgcctttctgactacctaaaaattactgcaacctctgattctgtttctaag

SEQ ID NO: 860206 - DNA, 120 bp, Artificial Sequence
  ENSG00000235770_9 (sequence is synthesized)
gtggattttccctactcatgcttcctagagatttggtgaggatttgttgagtcatgggacatttcagcttgccaaggctcctttgctggctgactttctgctaattctgcagctggatgc

SEQ ID NO: 860207 - DNA, 120 bp, Artificial Sequence
  ENSG00000235770_10 (sequence is synthesized)
agcagaagaggatggaaggcagaaggaagggaaaagtggcttccttcccgattactgccagtcctgtcagtgttgcccaagactgccaatttgttccaccagcagcagtgccttcggact

SEQ ID NO: 860208 - DNA, 120 bp, Artificial Sequence
  ENSG00000235770_11 (sequence is synthesized)
tctgcctcagtgttttccagcagtcccagtgagaggtgacaacgcgctagcagccctcacttactcttggcgcctcctgggcctcggcgtccactctggctgcgcttgaggagcccttca

SEQ ID NO: 860209 - DNA, 120 bp, Artificial Sequence
  ENSG00000235770_12 (sequence is synthesized)
agcccctctctgggctggctgaggccggagccagctccctctgcttgtggggagaagaatcttggtcgtccagaaagcttgctatagctgcccagcatttgcctcctccacaaagaagga

SEQ ID NO: 860210 - DNA, 120 bp, Artificial Sequence
  ENSG00000235770_13 (sequence is synthesized)
gcctcctccacaaagaaggaccaaaagaacaagtagacaatcacatgccaaataaaatgtctaaaggagagcactgaagctcagcaaaaacgttacaaagaccctctgaggtgcagaaac

SEQ ID NO: 860211 - DNA, 120 bp, Artificial Sequence
  ENSG00000235770_14 (sequence is synthesized)
tcgggatggcagcacaaagaggaaagcaaagcagccggtcaggatcagctcacagtcaagggcgccccgccttgagtaggaaatgtaagcaggagatgccctgcaggcaacattcccacc

SEQ ID NO: 860212 - DNA, 120 bp, Artificial Sequence
  ENSG00000235770_15 (sequence is synthesized)
agagaggccactgggtccctccttagtccctgggacccaagccgctgcagcacagtatcattttgaggacagagccactgccagaatgcttcctgtcctggggcccggtaacccctgcat

SEQ ID NO: 860213 - DNA, 120 bp, Artificial Sequence
  ENSG00000235770_16 (sequence is synthesized)
gtcctcatcactggagccccaatatcattccacagttgtatgaggagtaaaaataactataaataaagataactcaagaattctataagcaagcatacacatgaaattcattttataaga

SEQ ID NO: 860214 - DNA, 120 bp, Artificial Sequence
  ENSG00000235770_17 (sequence is synthesized)
ggaaagctaactccatctctcttgaaatatggaataggttcttgaagcaattctaaatgctgatctgctggaatgatggcttcattgcacaagaattctgcttagttcattgaagtctcc

SEQ ID NO: 860215 - DNA, 120 bp, Artificial Sequence
  ENSG00000235770_18 (sequence is synthesized)
ttgaagaagtcagtctgagaatgggggaattccgttgttggtcagaagaattctttggtcactattggaagtgggttcagtttagggtgactattgatcaacagggttcatgggtttgct

SEQ ID NO: 860216 - DNA, 120 bp, Artificial Sequence
  ENSG00000235770_19 (sequence is synthesized)
aaaactcatttcaggcaagctttggaagtgcagttcgcttggtgcttatggggttaaaaacaggaggaagagaatttcacattattggagggcctgaaaggaaactgattcccgcaagat

SEQ ID NO: 860217 - DNA, 120 bp, Artificial Sequence
  ENSG00000235770_20 (sequence is synthesized)
gctcagacaagatcaaacccagccccttttctggtttggaatttctctgggctataaaggtagaagaaaaggccctgcatgggcccactctaagtgcttggaggttttagataattttat

SEQ ID NO: 860218 - DNA, 120 bp, Artificial Sequence
  ENSG00000235770_21 (sequence is synthesized)
taaattgtagaatcttaaacagaactacaaggttgcttttaaaaccagatctcagatttctttgagctaacaaatggtaaaatgtatctttagtattagagtgagataaaggtagttata

SEQ ID NO: 860219 - DNA, 120 bp, Artificial Sequence
  ENSG00000235770_22 (sequence is synthesized)
acttttttttttacttattttatgttaacgtatgcaacaaagggtacaaattgtaggtacgcagctcattgaacttttatgtctgcacatgcctatgaaaccaacacccagagtaagatg

SEQ ID NO: 860220 - DNA, 120 bp, Artificial Sequence
  ENSG00000235770_23 (sequence is synthesized)
cggataattttctgctcccctgaaaattcccttgtgccttttcctcatcagtacctccaaaggtaaccactattttgatttccattaccatagatgagttatacttgtttttgaaaagat

SEQ ID NO: 860221 - DNA, 120 bp, Artificial Sequence
  ENSG00000235770_24 (sequence is synthesized)
tatttgaaatgtgtaatataaataatagcggttgcttatcttacagaaatatcactgagaattcatttcttctctccttcatttattcatttgttcaaaacactgtctagtaccaacatt

SEQ ID NO: 860222 - DNA, 120 bp, Artificial Sequence
  ENSG00000235770_25 (sequence is synthesized)
gtccaccgggcgttgagaatacaatattgaagaagagtcactgcctgccctctggaaaaatcagagtatttgaaagaatacacacaagtaaacaggcagctatggcaaagtgggtaaaag

SEQ ID NO: 860223 - DNA, 120 bp, Artificial Sequence
  ENSG00000235770_26 (sequence is synthesized)
ctgcaaaacagggaagtttcgccaagtgtcagatgccaagaagtgtcagatgccaagaagaaagggtgcatgacatagacttgggggggtcagtagtggtttctggaacgagtgacattt

SEQ ID NO: 860224 - DNA, 120 bp, Artificial Sequence
  ENSG00000235770_27 (sequence is synthesized)
agactgaaactggaaggatatgagtaagggctaatcggaccaagatgaagagatacagaagcagaaggaacagtaggaacaaatgctcagaggcaaaagaaagctttgaatatttgagga

SEQ ID NO: 860225 - DNA, 120 bp, Artificial Sequence
  ENSG00000235770_28 (sequence is synthesized)
actgaaaagcaaaacaacaaaaaatagccatcccttgactagacaagtgacctggggtcagatcctgaagggctttgcagatcacttttccgcttgtagactttgtacttgactttaagg

SEQ ID NO: 860226 - DNA, 120 bp, Artificial Sequence
  ENSG00000235770_29 (sequence is synthesized)
gccatggagagccactgaagcattttcagcaagggactgtcatcagcagattggtatttgttttgaagtagcacatgtaagagaaaataacaatatggacaaataaagagtttgaaaaac

SEQ ID NO: 860227 - DNA, 120 bp, Artificial Sequence
  ENSG00000235770_30 (sequence is synthesized)
ggatgactatgtcactgaagaagtggaggggctgaaaatggactcagctcttggcccctgtagagactgcaagactccgtgcacaacgtgacagtcggggcttcctctgagcactgcgcc

SEQ ID NO: 860228 - DNA, 120 bp, Artificial Sequence
  ENSG00000235770_31 (sequence is synthesized)
gttcagccctattgcgcaacctgccacgccctgttactgtaaatggaacaccggctgtgagctggtcaaggccctgccatgacaaggccacttgcataggactccaaattaaaaaaaaaa

SEQ ID NO: 860229 - DNA, 120 bp, Artificial Sequence
  ENSG00000235770_32 (sequence is synthesized)
aaaaggcctttcttattgactgaaaaactggttgtgtttttcatatttttcactttctggagctgaattattaataggcaaaaattaggtggggcttcattgatattctcaccagctttt

SEQ ID NO: 860230 - DNA, 120 bp, Artificial Sequence
  ENSG00000235770_33 (sequence is synthesized)
acaaaccaagaatcggaaagtgtgcctcggtgagttgccttttgttagcagtgtggagatgcaggcaaaagtgatcagcgtggtttgtatttgcagccgcccctcccctctcttcagagt

SEQ ID NO: 860231 - DNA, 120 bp, Artificial Sequence
  ENSG00000235770_34 (sequence is synthesized)
ctctccttcccggctgcaaggtgcgtctttaatgtgcgacactgacaaggcgtttcagccatgcagctaattaatatcatgccgaggctcaatgtgacaggtccttcagactcataaatc

SEQ ID NO: 860232 - DNA, 120 bp, Artificial Sequence
  ENSG00000235770_35 (sequence is synthesized)
agaaaccactaacaaatgtcgttccttttctgatctctttctcttgctttttaatatgttgatttactttcagtatgcataaccaaaaaagaaacaaaccaataaaaatactgatgaaaa

SEQ ID NO: 860233 - DNA, 120 bp, Artificial Sequence
  ENSG00000235770_36 (sequence is synthesized)
aaatgtggagaacactcagggggaggtggaagagagaaagcagtgaacagattcatcttcccttctatatctgaaaggataagcaggctgtgctttccagaaatgcgtgacctatccaat

SEQ ID NO: 860234 - DNA, 120 bp, Artificial Sequence
  ENSG00000235770_37 (sequence is synthesized)
attcttggagcccaggaactgtcttctacaaacttttcttcctagtaccatgtaaacgtacacaggaaacgttcagaaaacatcagccaaatagaagaataaggaaattccttcactgac

SEQ ID NO: 860235 - DNA, 120 bp, Artificial Sequence
  ENSG00000235770_38 (sequence is synthesized)
tagatattggtgtttgattctgtcctgctttgtactcaatggctatttcggggtttccattgcggaaaactatttggaaaattgcaagccacgagacaagcctctaagctactccaggat

SEQ ID NO: 860236 - DNA, 120 bp, Artificial Sequence
  ENSG00000235770_39 (sequence is synthesized)
cattgaggactctccatgggttcttattgttaaagatcttaactcctcaagccactgcatttttactatatgccttgaactacaagatgtgttaagatttataggataaggttctcatct

SEQ ID NO: 860237 - DNA, 120 bp, Artificial Sequence
  ENSG00000235770_40 (sequence is synthesized)
cgatggagaagcagtatttacacacatggagaagttgagagtacttgaatgtggagtataaagtgtgcgatattgacaagaagctctacgaaagttcaggaagaggaggagcaagtgagg

SEQ ID NO: 860238 - DNA, 120 bp, Artificial Sequence
  ENSG00000235770_41 (sequence is synthesized)
cttttggatccagagtactttccttccttccccctccctcgtcctctcttttctttgagtataagtggccacagcaacacatttccaaagcttaaacttagaacttttatctgggaagtt

SEQ ID NO: 860239 - DNA, 83 bp, Artificial Sequence
  ENSG00000235770_42 (sequence is synthesized)
atttccaaagcttaaacttagaacttttatctgggaagtttgtttggacagtattcaaatataagtgataaaaatatacaaag

SEQ ID NO: 860240 - DNA, 77 bp, Artificial Sequence
  ENSG00000235770_43 (sequence is synthesized)
gattcatcttcccttctatatctgaaaggataagcaggctgtgctttccagagctggagggcagtggcgcgatctcc

SEQ ID NO: 860241 - DNA, 120 bp, Artificial Sequence
  ENSG00000235770_44 (sequence is synthesized)
atgctggggctgattcagggagaaacactgcctcttattgagtcacgagcccatcctggaacttcactgggctttgcttggatgacttgcccggcgtccatggtccagaccttccccagc

SEQ ID NO: 860242 - DNA, 120 bp, Artificial Sequence
  ENSG00000235770_45 (sequence is synthesized)
aggcagcagagtccaatgaggcagaacagcccagaacgttacttcccactgtctgcttcttcaactcatgagatggaaactatcaggatctcaggaatagctgaggacggcctgccttct

SEQ ID NO: 860243 - DNA, 120 bp, Artificial Sequence
  ENSG00000235770_46 (sequence is synthesized)
tttctctgaaagtgttcctcaaagaagccagtatttgaattgtttgctactcagccacgaagagataagaagcctgtgtcagaatgcatgtgaacacgctgcttgcttcctagaagcctt

SEQ ID NO: 860244 - DNA, 120 bp, Artificial Sequence
  ENSG00000235770_47 (sequence is synthesized)
aggatatccttaaatgctttagtccagtgtgtcatgttatcttggggtataaaacccagactgggctgcgtgctgaggcccttcaacaaagggggcacatgcagatgagactccgtccac

SEQ ID NO: 860245 - DNA, 120 bp, Artificial Sequence
  ENSG00000235770_48 (sequence is synthesized)
tgatcatttttgcataagagattactgaatcatcttgcaataacataagacttgtctgcctgccaaaataatttgctctgctaaggatggcagagcaaggaaaggaggaagcacccaggt

SEQ ID NO: 860246 - DNA, 120 bp, Artificial Sequence
  ENSG00000235770_49 (sequence is synthesized)
ccttgacaagtgtttcatttgcattcttggagcccaggaactgtcttctacaaacttttcttcctagtaccatgtaaacgtacacaggaaacgttcagaaaacatcagccaaatagaaga

SEQ ID NO: 860247 - DNA, 120 bp, Artificial Sequence
  ENSG00000235779_0 (sequence is synthesized)
agaggccgccactttcttcagggctatcagatgaaggcagcaacgaaaacaccaccacaagaccaacttcaggctggagctgatgatgccacacagcaaatcagcgagaaaaaagaaaat

SEQ ID NO: 860248 - DNA, 120 bp, Artificial Sequence
  ENSG00000235779_1 (sequence is synthesized)
agactctacttagaaatgaaactcaactaaaggtaaaagttgtcaggaacatctccaagaaagccagagtcagcctctaaactttgcatcaagaacgcaatggcttccctgagggcccag

SEQ ID NO: 860249 - DNA, 120 bp, Artificial Sequence
  ENSG00000235779_2 (sequence is synthesized)
ggacgcgtggcagctgtgaggcagccccttctctgctgtcgaggaactggacacttctcctgtcccttcccacaagatataaaagattcaggacgtagtgctcgtggttggggtcgggga

SEQ ID NO: 860250 - DNA, 120 bp, Artificial Sequence
  ENSG00000235779_3 (sequence is synthesized)
catggcaagacaggagcggaagagagagacggagaagacgcaggggaactgcatctgcctctgctgctcaggaacagcgttgagaccggcgcagggaccatgggtgggagagtcctgatg

SEQ ID NO: 860251 - DNA, 120 bp, Artificial Sequence
  ENSG00000235779_4 (sequence is synthesized)
attcctacacaaagactttcaagcacaaagaaatcctgctgcctgtaaagcggagctgcctcagcccttgatgaacgacagaaaatctcacattccaggaattcagatgaagtgaagtgc

SEQ ID NO: 860252 - DNA, 120 bp, Artificial Sequence
  ENSG00000235779_5 (sequence is synthesized)
tctcatggggaccaggcatggttatgccagtccactgccctgcaagcctcaagggaagccaactgcccttcagcaagtcacacctgccttggtggaggccttgattggaagtgccacacg

SEQ ID NO: 860253 - DNA, 120 bp, Artificial Sequence
  ENSG00000235779_6 (sequence is synthesized)
ctacatgtccagtcctgagcgggagaatcggtgtagggacgttctggggatgccagctgtggccagatcaggtccaactacagaagaataatgaagactccacctgagggctggaaaaac

SEQ ID NO: 860254 - DNA, 120 bp, Artificial Sequence
  ENSG00000235779_7 (sequence is synthesized)
aaaacctcaagtgtgaggcagccaacctgttacctcgagggactgttccgcagcacagcggggccatgggaacagcagcagacaccccgacctcctcgctacctatcaactatggcctga

SEQ ID NO: 860255 - DNA, 120 bp, Artificial Sequence
  ENSG00000235779_8 (sequence is synthesized)
gtatgatagacttatccatggtttaaacagaatatattgttttcaactttgaaaataagaatatggaaatccagatgcagaaatgtgagaagaaaagagagtaaacagagtggaaggtca

SEQ ID NO: 860256 - DNA, 120 bp, Artificial Sequence
  ENSG00000235779_9 (sequence is synthesized)
cctggttccaatgagccatctccctgttccgacaggggcttcctggagctcctgcaaccccaggcattagttccggtgcagttctaggatcagatcaattcactcgacaacaagagaaac

SEQ ID NO: 860257 - DNA, 120 bp, Artificial Sequence
  ENSG00000235779_10 (sequence is synthesized)
gaaggtcaaggtgtgtgaattgtgaaatttccaagagaacctcactgaagcaaagaatgaagaaagaattgcatttggccctgggagggtgcaggggtgaatggtgcaggagctaaatct

SEQ ID NO: 860258 - DNA, 120 bp, Artificial Sequence
  ENSG00000235779_11 (sequence is synthesized)
ttatcatacccagaaatcaacagccactatttgaaatcatctaaattcgtgctgctaaccttcagtgtacacacgaatcacctggggatcttactaaaagctagtttctgattcactaaa

SEQ ID NO: 860259 - DNA, 120 bp, Artificial Sequence
  ENSG00000235779_12 (sequence is synthesized)
ggccactgaggcctccccgttcgcctcccagaggccgccactttcttcagggctatcagatgaaggcagcaacgaaaacaccaccacaagaccaacttcaggctggagctgatgatgcca

SEQ ID NO: 860260 - DNA, 120 bp, Artificial Sequence
  ENSG00000235779_13 (sequence is synthesized)
gtggaagttgagggcagagaagctcccgagggtgtcaagctgactctgaacccgactttgagggttaaggtcccaaatggcatcgccagcaccagggacagacactaaaattgtagaaat

SEQ ID NO: 860261 - DNA, 120 bp, Artificial Sequence
  ENSG00000235779_14 (sequence is synthesized)
cgtctcaagaaatgaacagcctctaagtcagatgttgaatgtgaaagaaatcagggtgtgtacgtgtgtgtgcatttgtgtgtgcacgtgtgtgcctgtgtttgtctctgtgcatgtatg

SEQ ID NO: 860262 - DNA, 120 bp, Artificial Sequence
  ENSG00000235779_15 (sequence is synthesized)
tttctatgtgtgcacatgtgtgtatgtgtctgtacatgtgtgtttctgtgtgtgtgcctgtgtgtgtattggcttagatctgttcgagactttttatttgatgagatcgatatatgccac

SEQ ID NO: 860263 - DNA, 120 bp, Artificial Sequence
  ENSG00000235779_16 (sequence is synthesized)
cacttttggaaaggacaacgtatatacaaagacaatgattacttatgtaatgtgaacggagtctctcttcgaccctcaaatgttttgtagaaagtaatgatgatggtgaggattataaca

SEQ ID NO: 860264 - DNA, 120 bp, Artificial Sequence
  ENSG00000235779_17 (sequence is synthesized)
atgcgtgtttcctgaataacaaaaaggagttacagtacacttttacctatttttccaaagcgctaggtcaagtttagctaaagtctgcttggaattaatgaggcttggaaatgtaaaatc

SEQ ID NO: 860265 - DNA, 120 bp, Artificial Sequence
  ENSG00000235779_18 (sequence is synthesized)
tcagagcagtaaacatctctttgtcctaatgttcttatgtagccattaaaacttaaatattaatactaaaataactactgtaaaataaagtaaaaatgtacgagaataatcaaaataatt

SEQ ID NO: 860266 - DNA, 120 bp, Artificial Sequence
  ENSG00000235779_19 (sequence is synthesized)
actttcttcagggctatcagatgaaggcagcaacgaaaacaccaccacaagaccaacttcaggctggagctgatgatgccacacagcgagaaaaaaggtataatattaggcagaaaccca

SEQ ID NO: 860267 - DNA, 120 bp, Artificial Sequence
  ENSG00000235779_20 (sequence is synthesized)
acagaccttgctcaggtcacgttctgagcctgcttctcactcctgccccctcccaccctcctggttctgccatggacaagctgaagtctctctgagaccaggggacccgcatggcccagc

SEQ ID NO: 860268 - DNA, 120 bp, Artificial Sequence
  ENSG00000235779_21 (sequence is synthesized)
caccccaccccaccatctcccaggcatgtgagaaaatatcacattctctgtgttttggagatttcttctaaatgtattttccaactatcatttcatagcaaatcagcgagaaaaaagaaa

SEQ ID NO: 860269 - DNA, 120 bp, Artificial Sequence
  ENSG00000235779_22 (sequence is synthesized)
gaggcctccccgttcgcctcccagaggccgccactttcttcagggctatcagatgaaggcagcaacgaaaacaccaccacaagaccaacttcaggctggagctgatgatgccacacaggt

SEQ ID NO: 860270 - DNA, 120 bp, Artificial Sequence
  ENSG00000235779_23 (sequence is synthesized)
gctggagctgatgatgccacacaggtgctccagctcgccctgcccgcttcaccgctttccctgcgggaaagccccaggcattcctgcccagtagtcagggctttgctgcagccccggggg

SEQ ID NO: 860271 - DNA, 120 bp, Artificial Sequence
  ENSG00000235779_24 (sequence is synthesized)
actttcttcagggctatcagatgaaggcagcaacgaaaacaccaccacaagaccaacttcaggctggagctgatgatgccacacagcgagaaaaaaggggcttcctggagctcctgcaac

SEQ ID NO: 860272 - DNA, 120 bp, Artificial Sequence
  ENSG00000235779_25 (sequence is synthesized)
tataccaagggatgactgcacacctatttctgatgactggagaactccaaggggttcgtcttgacaataccattaacttaaaaattcaataaagattaacaaatcggtggtacactctaa

SEQ ID NO: 860273 - DNA, 120 bp, Artificial Sequence
  ENSG00000280336_0 (sequence is synthesized)
aaaacagatgaatgatttagtagacctgacaaatcaactaccagtcatgaagtgggaagagctgagaatcgatcctgttcagactgtgggactagaataaattctgtttagatggtggga

SEQ ID NO: 860274 - DNA, 120 bp, Artificial Sequence
  ENSG00000280336_1 (sequence is synthesized)
catatagaggcatctgaaatgtcaatcctagttcctcatgccaaataagaaggattgtgttaaagattcctgtaaagcagttaaatctctagcagttagatcacatttccccattccagt

SEQ ID NO: 860275 - DNA, 120 bp, Artificial Sequence
  ENSG00000280336_2 (sequence is synthesized)
cgcaaaaaggagggttattatatgagaggttctgccaacaaaatggaggtcatgggtaatatgggtagcaaaagtaagtaaccatctaaatattgaattctggttgattgttaaaatgct

SEQ ID NO: 860276 - DNA, 120 bp, Artificial Sequence
  ENSG00000280336_3 (sequence is synthesized)
gtgatagtcatttgaaccaatcacaaatattttggttctccccttcttggacatatggtagaatttcaattctatttctgtttaaaattatgtgtagccatgtaatttcctttggctaat

SEQ ID NO: 860277 - DNA, 120 bp, Artificial Sequence
  ENSG00000280336_4 (sequence is synthesized)
aaaatgtgagaagtgacatatatccattctgggctgaagtttttggaggcacggtttaacacattttcttttcccactacagtgatcacggaagtatatgtgaagatggaatctccacaa

SEQ ID NO: 860278 - DNA, 120 bp, Artificial Sequence
  ENSG00000261596_0 (sequence is synthesized)
attaagcctcagctccagctctctgtattgcactcactagtcatcaggttggaaggtcctgggttcctgtgtcctgttgggcaaccgcatgatagaactttaatgctacttcctggcata

SEQ ID NO: 860279 - DNA, 120 bp, Artificial Sequence
  ENSG00000261596_1 (sequence is synthesized)
gcaggagatgaaagagcagggggaagaaacatcaatctaaccacgaattttatttccttgtgtttctgatgctaaaaatggagaggaagtcaaactagacaagagggaagtctccatgaa

SEQ ID NO: 860280 - DNA, 120 bp, Artificial Sequence
  ENSG00000261596_2 (sequence is synthesized)
gtgtggaaaacaagctccttgattgtggatgtgcagagctgcctgttgagtctgaggagtctggcatgtgacacactgcagacctgagacaagaagccttgttgctatgggtgactttta

SEQ ID NO: 860281 - DNA, 120 bp, Artificial Sequence
  ENSG00000261596_3 (sequence is synthesized)
gatgcaaaatggttttgctgtgtagattcatgaatgctggactgttggaggatatctgagtgtgctttgcatacttggcttaatttgtttttttttaactaaaagtagttgtaggtgaaa

SEQ ID NO: 860282 - DNA, 120 bp, Artificial Sequence
  ENSG00000261596_4 (sequence is synthesized)
tgattacttaggtaattgttttggtaaatggcttgaagttgaaccacagcagttttgctatttggaaaaaaaatgaaaaaaataccattctaatttcagtttatttggtttactgaccca

SEQ ID NO: 860283 - DNA, 120 bp, Artificial Sequence
  ENSG00000261596_5 (sequence is synthesized)
gttttggctaggggttattgaatctagtgagaattattttaagcaccccccaaagaaggaaagatatgaagtcaagagaaggataattatattgtaaaaataaaaatttaatgatgttta

SEQ ID NO: 860284 - DNA, 120 bp, Artificial Sequence
  ENSG00000261595_0 (sequence is synthesized)
ggttcggtgtggccagccagcccagagagccatggagctaatgacctcagagcaaaacaggcgcttgggagccgctgggtatgaggcgccaggtgtgacaccacctctggatggggctgc

SEQ ID NO: 860285 - DNA, 120 bp, Artificial Sequence
  ENSG00000261595_1 (sequence is synthesized)
tggagcgagagcgggcaagctggtaccgggtggggttgcgggattaatgacgcaggctgcagccgaccaccccggaatcaggagccggggtagattcctgggctcctgatgcgctgttcc

SEQ ID NO: 860286 - DNA, 120 bp, Artificial Sequence
  ENSG00000261595_2 (sequence is synthesized)
ccgtgaagaccacctctagatctgggagagcggttgctactcccaccctcctttctctctcagaacccaggtctttcccacaatgcagaccttccctgaccacagcaggacaagctatta

SEQ ID NO: 860287 - DNA, 120 bp, Artificial Sequence
  ENSG00000261595_3 (sequence is synthesized)
ataggataataacaacataacaaatactatttattgaagaagtactgcatactagaccctttacaaagcacgttccatacagtattaggttatttatactgcacaccaatccttcaagat

SEQ ID NO: 860288 - DNA, 120 bp, Artificial Sequence
  ENSG00000261595_4 (sequence is synthesized)
ggttttttttctgtcagtttcacggatgaggcaggacgggacgcttcctgtcattttaccgtgacttgccccaggaggtcacacggtcaagtgaaagattcacacctatgtcggcctcct

SEQ ID NO: 860289 - DNA, 120 bp, Artificial Sequence
  ENSG00000261595_5 (sequence is synthesized)
gacattcaaacctgctctgtcttaagaaccaagcttacttctccggatcagggaggaagggctagaaaggagatcaatggcagagagaggagtgggggttcctcccctcccatccttctc

SEQ ID NO: 860290 - DNA, 120 bp, Artificial Sequence
  ENSG00000261595_6 (sequence is synthesized)
ttagggccagggctgagagcagtccgggaatgctgagcaagttctgtgtctaccgccagggggagacagaggccaggctaagcccttgcctaagaagagtaaaagcacactcactggaag

SEQ ID NO: 860291 - DNA, 120 bp, Artificial Sequence
  ENSG00000261595_7 (sequence is synthesized)
accaggacagagcccaatgcctggttggctgcccgttcttcctaacttctcccctctgggagagggtggtactgacctgatgccacaagagctctgtctctaaacctcctatcagaaagt

SEQ ID NO: 860292 - DNA, 120 bp, Artificial Sequence
  ENSG00000261595_8 (sequence is synthesized)
agccatcagggactacggcacccagttcacggctggaacttttctgggctctgtcggccaggtgcttcctgaccacataccactttgttccccaggctaaactgtgtccccagaagggat

SEQ ID NO: 860293 - DNA, 120 bp, Artificial Sequence
  ENSG00000261595_9 (sequence is synthesized)
gactttcttggcagcttccaaataaagatcccacagtggtccttcaggttggtagacttactatgcctgctttgttacacctgagctttaggcagagagagacagaggaaaagaagtcac

SEQ ID NO: 860294 - DNA, 120 bp, Artificial Sequence
  ENSG00000261595_10 (sequence is synthesized)
aggagagaaaaaaaacagaccccaaggcaaatagagcagcaaaagaagacggggacaaagaacaggctgcttctataggttttcccctgctatttgagaaaaactggaaccaactctcag

SEQ ID NO: 860295 - DNA, 120 bp, Artificial Sequence
  ENSG00000261595_11 (sequence is synthesized)
ataaataacagcagcagcaagccagcaactgaagaaacaaatataactcctggttgtttttattattcagtgtttctgggacagtttacttaccacttcttcgtgtcacccagctcccta

SEQ ID NO: 860296 - DNA, 120 bp, Artificial Sequence
  ENSG00000261595_12 (sequence is synthesized)
ttccctgccctttctagcacccaccatggtgtggctgcaagctgtccgcaaagctaagccaagagacccccccagccccagcaccagatgatcagcagggagaataacagctccctgggg

SEQ ID NO: 860297 - DNA, 120 bp, Artificial Sequence
  ENSG00000261595_13 (sequence is synthesized)
ctccagaacagcccccagccatggcctaatcctaaggctcctcctccctgaacctctcacctcctattcctggcaccattatgcctcctccatcctcagactgccccagaacctggtgag

SEQ ID NO: 860298 - DNA, 120 bp, Artificial Sequence
  ENSG00000261595_14 (sequence is synthesized)
gtcatcacctctactcatccctgaggcagcggaaagtgagagagaaaaggggatggggtatgaagaagcagacttgtgggatgtttttctctgtgaagagtgagactctgcttagtggct

SEQ ID NO: 860299 - DNA, 120 bp, Artificial Sequence
  ENSG00000261595_15 (sequence is synthesized)
ggccctgctgggggagtgtgaagcttgaaccaaggagggggactggacagcctcaagacaggcccctttatctcaggccacagtggtggctcagggcccagaactggtcatcttctgcct

SEQ ID NO: 860300 - DNA, 120 bp, Artificial Sequence
  ENSG00000261595_16 (sequence is synthesized)
tgtctctccccttcacatcaccctaaacccaaaggcctcttaaactaagaggaaagtcccttcaaattcacagaacaccacttcctctcatttgtctaatacattcgcatccaaaacaga

SEQ ID NO: 860301 - DNA, 86 bp, Artificial Sequence
  ENSG00000261592_0 (sequence is synthesized)
gaactacacagggaacacatatagtttcatattatgaatttaaataaagccatcaggccggcgtggtgactcacgcctgtaatccc

SEQ ID NO: 860302 - DNA, 120 bp, Artificial Sequence
  ENSG00000261592_1 (sequence is synthesized)
gtcagccgagatcacgccactgcactctagtctgggcgacagagcaagacttttgtctcaaaaaaatgaaaaataaaaataataatgacaaatttcgctattgttaacagtaaaattaac

SEQ ID NO: 860303 - DNA, 120 bp, Artificial Sequence
  ENSG00000261592_2 (sequence is synthesized)
aataatgacaaatttcgctattgttaacagtaaaattaacctagtggctcttatcctttgactccttctctacttcccagcgagattctcagtgacccctcatcatcacctctcctaagt

SEQ ID NO: 860304 - DNA, 85 bp, Artificial Sequence
  ENSG00000203392_0 (sequence is synthesized)
aagcggtccactggaggcactgcacctggccagaaaaaactattcttgacttcacattttccaccagcttcacccctgccccttt

SEQ ID NO: 860305 - DNA, 120 bp, Artificial Sequence
  ENSG00000203392_1 (sequence is synthesized)
ttgacttcacattttccaccagcttcacccctgcccctttgcttctctttgcagcaaaacttcaaaaagcatagtccacgctctcccccaggcattcttgggtctctctacccaggattt

SEQ ID NO: 860306 - DNA, 120 bp, Artificial Sequence
  ENSG00000203392_2 (sequence is synthesized)
tgctcccccatcgccacatctccttttgccaagggcaccagaggcctccgtgttgttggatccagcggtcggctctcagcctcctcttaactgctcagtggcactggtgccgccaagcaa

SEQ ID NO: 860307 - DNA, 120 bp, Artificial Sequence
  ENSG00000203392_3 (sequence is synthesized)
cccttcctccaagagagccacaggctctgggatacttcactctggggttcctcctacctcacagactctcctggctggtcctcctcttctccccaacatcttatggccaggtctccaggc

SEQ ID NO: 860308 - DNA, 120 bp, Artificial Sequence
  ENSG00000203392_4 (sequence is synthesized)
tcttttctgtctacaggcactctccatgagtccttattcagtctcctggcctcaaatgccagctgtgctgagacccccttatttgtagctccagcctagcctgctctcccctgaacccca

SEQ ID NO: 860309 - DNA, 120 bp, Artificial Sequence
  ENSG00000203392_5 (sequence is synthesized)
gactcatgtttccagctacctctgccgatatctaatagacacctcaaactcaacctgccccggctgcactcccgatcggcccccacctcctacagtcatcctgcttcagagactatagct

SEQ ID NO: 860310 - DNA, 120 bp, Artificial Sequence
  ENSG00000203392_6 (sequence is synthesized)
ccgttttcaagggctcaggccacacccttggaaccacccttgcatcctctctttccctcaaaccaccgcatctctcacctggattatcgtaacagcttcctgtgtcccagctgcagtccc

SEQ ID NO: 860311 - DNA, 120 bp, Artificial Sequence
  ENSG00000203392_7 (sequence is synthesized)
ccgcccattacattttgttcctaacacagcagccagagtgagccttttgaaagggaagattatggggctctttggctcacatagtgcagtgtctccccatctgaccactaaggcctggct

SEQ ID NO: 860312 - DNA, 120 bp, Artificial Sequence
  ENSG00000203392_8 (sequence is synthesized)
gtgaccatatcacccctgcgacctcaactcccctcacctccactccagacacacctgctgttctatggtgctgcctgcagttcaacaccaaagaatattcttcgctccaggaagaaaaac

SEQ ID NO: 860313 - DNA, 69 bp, Artificial Sequence
  ENSG00000203392_9 (sequence is synthesized)
tcagcctcctgagtagctgggactataaatgcgtgccaccacgcccagctcttcgatctcttgacctcg

SEQ ID NO: 860314 - DNA, 89 bp, Artificial Sequence
  ENSG00000203392_10 (sequence is synthesized)
ttattttccccttttaggaaacactgggaactattttcttctcagagaaaaacaggacttgcccaatagtaacatggaaacttaacagg

SEQ ID NO: 860315 - DNA, 120 bp, Artificial Sequence
  ENSG00000203392_11 (sequence is synthesized)
aaacaggacttgcccaatagtaacatggaaacttaacagggtcttaacctgtgaagactctaggagcagaacccggagtaagggggagcaggggccggagtaaggggagcagggccccgt

SEQ ID NO: 860316 - DNA, 120 bp, Artificial Sequence
  ENSG00000203392_12 (sequence is synthesized)
ctaagatggggcagggcctgggctaagggagagcagggccgggctaaggggaggcagggcccagtctgaggtgggggcagggcctggtctaaggggagcagagcctgggctaaagggcag

SEQ ID NO: 860317 - DNA, 120 bp, Artificial Sequence
  ENSG00000203392_13 (sequence is synthesized)
ctgagcccagtctgaaggagagccgagctatctgaataggggctagcacctgttctaaaggaagtggctgctcccctgctttcgctgtaagagggaacacaggccttttaagaaaatggg

SEQ ID NO: 860318 - DNA, 120 bp, Artificial Sequence
  ENSG00000203392_14 (sequence is synthesized)
aatcaagttttttgtttaatttcccaaaggttatatgttgacaattaacttcaaagtattagctgctttttgtaggccaaataaacacgtctgtgggccagatctggcccaggactagag

SEQ ID NO: 860319 - DNA, 120 bp, Artificial Sequence
  ENSG00000203392_15 (sequence is synthesized)
ttgccagtggcaacttctggcccaggctgaatggtgggcaggaaggaaatggagcccccaggagtgggagtgggagctgatgcctgggtacgggagctctgtgggtgggagtgagacaaa

SEQ ID NO: 860320 - DNA, 120 bp, Artificial Sequence
  ENSG00000203392_16 (sequence is synthesized)
aaacagggtcttgagctctggggagcaagcagtgtcctccagtgaaggaaatcctggactcgcaggcagaagttttgcctcttactcgccatgtgctctgaataaagttacctgccctcc

SEQ ID NO: 860321 - DNA, 120 bp, Artificial Sequence
  ENSG00000203395_0 (sequence is synthesized)
gccggggctggatgagtatccccactcccctaaccccactccaacattctatgtgctaccacgctcccctatttcaacccaactggttgaacaggaaacattcctaagatgagcaggtag

SEQ ID NO: 860322 - DNA, 120 bp, Artificial Sequence
  ENSG00000203395_1 (sequence is synthesized)
ccggtggagctgaacccaagtctccccagcccatgtccactgacaccctgcatgatcagaaggctttaaagaaccctcactcagaaacctcatattatttttggatgcctccggtgtaaa

SEQ ID NO: 860323 - DNA, 120 bp, Artificial Sequence
  ENSG00000203395_2 (sequence is synthesized)
agcaccccctgcgttccgaataattcatttcaagaaacatggtattaagtgtttagtatgtaccaggcgcctgaataggtgcaggggtaaaaatgtcttgacaccaaggaacctccggca

SEQ ID NO: 860324 - DNA, 120 bp, Artificial Sequence
  ENSG00000203395_3 (sequence is synthesized)
tttgtgaatctgctgaacatcgccattgatggactggatgctgccgcctttgcccctccccctcctgccacgtgtcatcgcgcctacttagcgacacctagtggtcagtaaagagaacta

SEQ ID NO: 860325 - DNA, 120 bp, Artificial Sequence
  ENSG00000203395_4 (sequence is synthesized)
tctgaatcaatgacgcctttcaggacttctctcaacagagtttgaccaagttttcttctgctgtgtcagatccctctcccagatcagatcattagaacctcctccagtatcttatgtata

SEQ ID NO: 860326 - DNA, 83 bp, Artificial Sequence
  ENSG00000203395_5 (sequence is synthesized)
cgcacccagcctagaatgactttttaacatctctttctgtacacatttgatcaataaccttggaaacattattcttgtagcac

SEQ ID NO: 860327 - DNA, 120 bp, Artificial Sequence
  ENSG00000203395_6 (sequence is synthesized)
catttgatcaataaccttggaaacattattcttgtagcacattttattgctgtaagggcaagttaagacttctgaataagcaaaaatgattactgagcatctccaatggaaaactatgca

SEQ ID NO: 860328 - DNA, 120 bp, Artificial Sequence
  ENSG00000203395_7 (sequence is synthesized)
ttctttacagcacacttttctaagttatttgtttctatggaatctgtgtttttttcttgtcttggagttattctagagctcggtagattgtggataaatacaaataattcttgtctataa

SEQ ID NO: 860329 - DNA, 120 bp, Artificial Sequence
  ENSG00000203395_8 (sequence is synthesized)
acatgcaaataaattctgcctgatggaagttcagtagactccaccttaccccacacccgcactccaccccgcctcccatggaaaaagtcaattttgtgtccattggtaaatgaatttcaa

SEQ ID NO: 860330 - DNA, 120 bp, Artificial Sequence
  ENSG00000203395_9 (sequence is synthesized)
cgttgctttactctatataaattggtctttgaccttgcctttgaactggtggtgacctctggctagtttcccctttaattcatgagttaaataaaattttgacatgttttcattctatta

SEQ ID NO: 860331 - DNA, 120 bp, Artificial Sequence
  ENSG00000269364_0 (sequence is synthesized)
tgggaagaggggcggggccgcccgctccagagggacggaagcggcggggccgccggatccagggacaatgggagttcctttacaggcggacctgagaggcaactcaccgactcctgccct

SEQ ID NO: 860332 - DNA, 120 bp, Artificial Sequence
  ENSG00000269364_1 (sequence is synthesized)
ggaccctcctgcgccactgaaccccctgacctgggagcctcggaacctagggctcaggagctggatccagtcccgggctctcctgcttcccagctcctcctcccgcacccaacagcaccc

SEQ ID NO: 860333 - DNA, 120 bp, Artificial Sequence
  ENSG00000269364_2 (sequence is synthesized)
cggccgtgggtcccatcaggctttcccctcggatcctctgcagatgaaccaggacttatccgaaggtaccaagtgaacttctaggaaaagtccaattctcagatgctggatgtcttccaa

SEQ ID NO: 860334 - DNA, 120 bp, Artificial Sequence
  ENSG00000269364_3 (sequence is synthesized)
aaatgaagcaaattagtaacttagtagctgagtcaactaatcctgttagatggtcaacactggtttttttattttaatatttttaagtggcaactctagtgtgtgagaaaattaatgtga

SEQ ID NO: 860335 - DNA, 120 bp, Artificial Sequence
  ENSG00000269364_4 (sequence is synthesized)
gcgtcacaaggaaagctgagcaggcaattgctgccccgcccactctgggaagaggggcggggccgcccgctccagagggacggaagcggcggggccgccggatccagggacaatggggtg

SEQ ID NO: 860336 - DNA, 120 bp, Artificial Sequence
  ENSG00000269364_5 (sequence is synthesized)
gggcgggctttccctgggtgggcgcagcggcttcctgggtccccctcacgctctgggtcagagttcctttacaggcggacctgagaggcaactcaccgactcctgccctggaccctcctg

SEQ ID NO: 860337 - DNA, 120 bp, Artificial Sequence
  ENSG00000269365_0 (sequence is synthesized)
atatgtgaggaatagctttattccaaggtctttgatgctcatgtaataagtacaattttaacaactaattctattacaaaagactgcagaaagctctgtacagctggatccctatacgtt

SEQ ID NO: 860338 - DNA, 120 bp, Artificial Sequence
  ENSG00000269365_1 (sequence is synthesized)
catctctacaaaataattaaaaaattagccaggcatggtaattttatctgtctatagaaatggggtcttgctttgttgaccaggctggtcttgaactcctaggcttaagcaatcctcctg

SEQ ID NO: 860339 - DNA, 120 bp, Artificial Sequence
  ENSG00000260978_0 (sequence is synthesized)
agtgatagtcaggcatcaagggtgtcctgattggtgaattctttggctaagaggaatcaagaggaaaggaatatggcaaaaggtccaggcaaataggctgaggtacttaataggagaacc

SEQ ID NO: 860340 - DNA, 120 bp, Artificial Sequence
  ENSG00000260978_1 (sequence is synthesized)
aggagtcatgtaagaagggagaggcaatgtaaaagtataggaggctgaggcacactctgaagcagtggactaaaatcactgagctggcagcctatagataaaagccccatggctcctaca

SEQ ID NO: 860341 - DNA, 120 bp, Artificial Sequence
  ENSG00000260978_2 (sequence is synthesized)
acattcagctggtcgacctgctcctagtgaacatgataatcaccataatcctagggggaaagatatgcagaatagacaagaaaacagaagcactgcctcaacagcccctgaaagcagtaa

SEQ ID NO: 860342 - DNA, 120 bp, Artificial Sequence
  ENSG00000260978_3 (sequence is synthesized)
gagtgtcaacacagggaaaacaggcaatagcagacgacagaacctcagcagactagaccacatgccacagcacgatgctacagaatcaaattgaaatattcttccagctcataatgaagc

SEQ ID NO: 860343 - DNA, 120 bp, Artificial Sequence
  ENSG00000260979_0 (sequence is synthesized)
gctaggcagtgctgttagaaagtgatttggaagagcgcttccgagccacggcgcgccctccgggggagcgcaccggagcaggtgcgggcgagccccgcgcccggggaggtcaggaattcc

SEQ ID NO: 860344 - DNA, 120 bp, Artificial Sequence
  ENSG00000260979_1 (sequence is synthesized)
ggaagcaccttgaggaagaaattgtcttgtctacagctctatcctcagtacagcaccaagcttacagtggatgctcagtgaagatttgccgatttgccgaatgaatgctttcacccctgc

SEQ ID NO: 860345 - DNA, 120 bp, Artificial Sequence
  ENSG00000260979_2 (sequence is synthesized)
aactgtttactgcctgctaggagctcagagcctctgggatacaggctgggaatgacagtgcctgctcgcttggaaggcctctcttctggagtcaataaaacagcacttctttgcttcttc

SEQ ID NO: 860346 - DNA, 120 bp, Artificial Sequence
  ENSG00000260972_0 (sequence is synthesized)
aagggctggtggaccttccccacattccagttcaggccagaatgggcctcgctccccacagccagtgctgctctgtttgagcagagaagccagctccagcccgctgaaaacagactggac

SEQ ID NO: 860347 - DNA, 120 bp, Artificial Sequence
  ENSG00000260972_1 (sequence is synthesized)
ccaaaggaagaggagacaaaccctactgtcggcctgccccaggccttttcccagatgggtgagcacctgccctgaaggcacaggaggaagtgagcgtggggctcagggaccaggcctgcc

SEQ ID NO: 860348 - DNA, 120 bp, Artificial Sequence
  ENSG00000260972_2 (sequence is synthesized)
ctcccagttagtgccaaggacacagaaacagaggggagtgcccatcaacctctgcccaacacagagccccttaatgacttttagattaaaaagccaagacacggccatatccttaagatg

SEQ ID NO: 860349 - DNA, 120 bp, Artificial Sequence
  ENSG00000260972_3 (sequence is synthesized)
cctaatgaagcaattggcccatcagccagtccaggcacccgcatgaagccccaaatgtagaaactcagccagtcttgccagacctgcttaatgcaaaattggtaatgtcatttacaagcc

SEQ ID NO: 860350 - DNA, 120 bp, Artificial Sequence
  ENSG00000260972_4 (sequence is synthesized)
tctcacacgcaggcctatgaataaaagaataatgctgaaaagcaaggctctccaatttctatacattgcaaacagctctgagcagttccttcttgtgcacttggcacagaccttccaccc

SEQ ID NO: 860351 - DNA, 120 bp, Artificial Sequence
  ENSG00000260972_5 (sequence is synthesized)
tgccagggctcgccttgaagatagagtgccccaatcctggaggcacagtggctggaattgctgcaaagtaccaggaggcaggaagatttacctccctggccctggagctccttccagcca

SEQ ID NO: 860352 - DNA, 120 bp, Artificial Sequence
  ENSG00000260972_6 (sequence is synthesized)
cacaactccagggaggctcagaggccagccctcggaccccaaggccagaagacatgtaaacagtgacataaatgcaccccaaccgcctctgtcaagcatcttgtaatgcttctccactcc

SEQ ID NO: 860353 - DNA, 120 bp, Artificial Sequence
  ENSG00000260972_7 (sequence is synthesized)
gaattttctgcctctactgcccccattaaatcagctgcccgcggaaaacatgtccatcctgtggaggccaggctcagagccacccctgcacccccggcacactctgcagagaacccttgc

SEQ ID NO: 860354 - DNA, 120 bp, Artificial Sequence
  ENSG00000260972_8 (sequence is synthesized)
tccagggctggccccgagcacagactctcccccaaggcatttctgcagcacattaaagaaagaacaaaggagagaaaggagggaaaagccagtctctccggattccaaatgagaagatga

SEQ ID NO: 860355 - DNA, 120 bp, Artificial Sequence
  ENSG00000260972_9 (sequence is synthesized)
tgaagtgttcagaagggagagagccttttcaaaggacttttcatccagcgccagcacggtgtgagagaatcaaaacagaggagttctgtgtcaataggacggatccctccaaggctgcca

SEQ ID NO: 860356 - DNA, 120 bp, Artificial Sequence
  ENSG00000260972_10 (sequence is synthesized)
gtatgttggagtcctggaagagagagatgagccagggcagtgcgctccacaaaccctgaaagaccaggttgaaagttctcccacaatgaaggctgcttttggagcacaggtggcagcctg

SEQ ID NO: 860357 - DNA, 120 bp, Artificial Sequence
  ENSG00000260972_11 (sequence is synthesized)
cacaggctcgggggcaggagcaattgctgtgccaggggtctctggatcacagcctctcttgggctgtactgtgttgggggaagatcctcaaattcccttatgattaagggtgctgtactg

SEQ ID NO: 860358 - DNA, 120 bp, Artificial Sequence
  ENSG00000260972_12 (sequence is synthesized)
gatgaattcccgggtcttttttagttccagctctctggggtggtaacctttcttatttgaaatgcaaaaatatgtactaacaaatatttatcaagcctctagcacagccatccacacaaa

SEQ ID NO: 860359 - DNA, 120 bp, Artificial Sequence
  ENSG00000260972_13 (sequence is synthesized)
ggaggttattcataaatattggacagtttattaattgattgttattactgccgccttacagctgctctaaggagccgtctgccacattttgtcctaataaagcaattggaactaaataaa

SEQ ID NO: 860360 - DNA, 120 bp, Artificial Sequence
  ENSG00000260973_0 (sequence is synthesized)
aaaagttttggtgatgagacattcaggaagatctatcaataaatagcaaacctggtcctttttaagacactgtgtataaaaaaattccaaaaagattaaaatcaatgcagaaaccaaaga

SEQ ID NO: 860361 - DNA, 120 bp, Artificial Sequence
  ENSG00000260973_1 (sequence is synthesized)
accatttttttctatatcatattgatcatttcaagtggaactgttagctatcttagaaaaattgtggttctcaattgcttttgcctctatctctgaaccaccaatcctaaagaaaaacat

SEQ ID NO: 860362 - DNA, 120 bp, Artificial Sequence
  ENSG00000260973_2 (sequence is synthesized)
tcaaccagaaaatttcagcacatcacaatctctctgaagattaagaagtctctgtgaaggactgaatgtataaattgaaaaatttttgctgtcacatttaggtaaaagagaaatcgttct

SEQ ID NO: 860363 - DNA, 120 bp, Artificial Sequence
  ENSG00000260973_3 (sequence is synthesized)
tcatatccccttcctttccatctgtagctcacctatgtcaactttcctctcagaagtgaaataaaattaaagctatgacactgagtgtcagtcatggagggacacgttccccacttagcc

SEQ ID NO: 860364 - DNA, 120 bp, Artificial Sequence
  ENSG00000260973_4 (sequence is synthesized)
tttgctgaagtgtttccagagacaactgtctaatgccaggtccccacttagtgggctgcacttttctactcatttgcacataatccagaagtcacattttgggttcacagtttccactgg

SEQ ID NO: 860365 - DNA, 120 bp, Artificial Sequence
  ENSG00000260973_5 (sequence is synthesized)
ggtaacctcattaggcctggccacctctgtgcttcttgtgaagtctctgatttgaaggattagtatcctttccagactgtgtgggttgactttcacccatctggagttgcttggaacaaa

SEQ ID NO: 860366 - DNA, 120 bp, Artificial Sequence
  ENSG00000260973_6 (sequence is synthesized)
atttgagtggctcctcaagcctccccaactccctctccgacctcgctacacagtcttcccaggtgtggtatttgacctccagactgccacccagaaagcaactcagagctcagcaacacc

SEQ ID NO: 860367 - DNA, 120 bp, Artificial Sequence
  ENSG00000260973_7 (sequence is synthesized)
atgatgatgaaacacaaatatctgggccaccaactttggagactccactggttgcttttgtgcagctctttctatatatgactttcaaaatggcagccaaccctctcaactgttggttga

SEQ ID NO: 860368 - DNA, 120 bp, Artificial Sequence
  ENSG00000260973_8 (sequence is synthesized)
tctgaatatgtaaagttcagccttcaaacccagcaaacagtcagctataggatagagttcaggtgctggggaatgaccacggttggctgctacgttgggaaccctggtgacatcatatat

SEQ ID NO: 860369 - DNA, 120 bp, Artificial Sequence
  ENSG00000260973_9 (sequence is synthesized)
ggacctgggaatgtaaagaaacgtaggaaatctgaatttatgacttttctaatctctctatcgggatccttttttggaatcaagatgattttccttctaaaaggtcattttattacagta

SEQ ID NO: 860370 - DNA, 120 bp, Artificial Sequence
  ENSG00000260973_10 (sequence is synthesized)
atgggcagggtagacatacctcactagcgtactctcaaaatttcttgcatgcatatgctttctccggcatgcatatgctttctactacaatgtgaacaagcctacgaaagctagcctaat

SEQ ID NO: 860371 - DNA, 120 bp, Artificial Sequence
  ENSG00000260973_11 (sequence is synthesized)
ggaggatgagagaccacgtggaggagagctgaagtgccccagccagcagctagcctacacccacagctattttgcttgtgttccactcgtcctatttgcataatattgttctttaagtta

SEQ ID NO: 860372 - DNA, 120 bp, Artificial Sequence
  ENSG00000260973_12 (sequence is synthesized)
gtcctatttgcataatattgttctttaagttaacccattcttaatttattgttttaatcttaagcaataatattcaagaactaatgagttttgtgtattcgttatatttttccataatat

SEQ ID NO: 860373 - DNA, 120 bp, Artificial Sequence
  ENSG00000260970_0 (sequence is synthesized)
cgacaaagagtggagctgaataagaaagcatatctaaagttcctcaggtcttatgaatgctgagcttctatcagaacatgtgtcagctgcagcctgccagggagcataccaggctgaggg

SEQ ID NO: 860374 - DNA, 120 bp, Artificial Sequence
  ENSG00000260970_1 (sequence is synthesized)
gcaaaaatgcaatggctactccctaaatgtaggatggaaaggaaaatgtacatacctttgctggttcaaagatttacaaatcatcgccaaatggctccagaattgctaccgcaggaaagg

SEQ ID NO: 860375 - DNA, 120 bp, Artificial Sequence
  ENSG00000260970_2 (sequence is synthesized)
aggttcaccatgagcaacacgtcatctctgaaaacacctggccttgaagttgaatcagaggattagattcaagatgtggcaaatcttatggatgactgtggaatgatgggggcacaagtc

SEQ ID NO: 860376 - DNA, 120 bp, Artificial Sequence
  ENSG00000260970_3 (sequence is synthesized)
taaatactgcatcctgctctgtcatatcctagatctgctattgtttttctcttcacttcttatgttattcatagagagttgtaagtaagtaaattgacataccagacccctactgtgtgc

SEQ ID NO: 860377 - DNA, 120 bp, Artificial Sequence
  ENSG00000260970_4 (sequence is synthesized)
caggagtacaagaatggcagtggtacagatgaggtctctgccctcatagaactttcaatgaaaaacatggtccactgaatagggaatcaagatacaggtgatggggaaagtacaaggagc

SEQ ID NO: 860378 - DNA, 120 bp, Artificial Sequence
  ENSG00000260970_5 (sequence is synthesized)
agaggagttcctagggtggtcaggagggaggataggtaacgttctctgtgtgctctcttctgtacacatacatcacattagtagcaataccccaaatctcaatactttcagacttcatat

SEQ ID NO: 860379 - DNA, 120 bp, Artificial Sequence
  ENSG00000260970_6 (sequence is synthesized)
gctttcttccccagtgattctatctaggaaatactgatggtgagagtggggaggtgggaaagttgccctcacatataagtgaagatatagcctgaacacttttttaattggttcactaat

SEQ ID NO: 860380 - DNA, 120 bp, Artificial Sequence
  ENSG00000260970_7 (sequence is synthesized)
tttccaccctctcttcctgttcctctgctattcattggttccttcttgttccagtggccaataccactgctaatttcttccaaactgctaacctccatgccacccattgataatatgacc

SEQ ID NO: 860381 - DNA, 120 bp, Artificial Sequence
  ENSG00000260970_8 (sequence is synthesized)
tctgaatgcaaggcatagcatgaaatgatctgagtcattaatatatttgtgtgaattaatgactcagctcttttctagctgagaggaaagacaatatgaggcaagggggacttaaagggg

SEQ ID NO: 860382 - DNA, 120 bp, Artificial Sequence
  ENSG00000260970_9 (sequence is synthesized)
ccaacgagtattttgtttccatgtaggacagaggaagacaggcagataaagtatccttggtatctgaaactaaccaggttgccctgagcctgaaagtatatttctcactgtctctatcat

SEQ ID NO: 860383 - DNA, 120 bp, Artificial Sequence
  ENSG00000260970_10 (sequence is synthesized)
aggacctacctcatgttcccctgatggaagatgacagacaatgtgaaccagagatgtgtccagtcatttgtctaggcaaggcctgaaatgtgttagaaagtccagccaatatcagcaaaa

SEQ ID NO: 860384 - DNA, 120 bp, Artificial Sequence
  ENSG00000260970_11 (sequence is synthesized)
acacagctggctcaagctgaccacagtcacatgatagaacccatctgagaccaaagaaaccactcagctaagcctagtttaagttgctaacctgcagaatcatgagctaaataaacagcc

SEQ ID NO: 860385 - DNA, 120 bp, Artificial Sequence
  ENSG00000260971_0 (sequence is synthesized)
ttctttctttctttttttttttttttgacaggatgggctggggttgggggaggaggaagcaagaattaagcagagaaggcaagctcctttctgttcatctaactcaaagctctaacgcag

SEQ ID NO: 860386 - DNA, 120 bp, Artificial Sequence
  ENSG00000260971_1 (sequence is synthesized)
ccgttcattcactgtctctgccagctgtttccaagtgtgaacccagtggagaccttttcaaactgtagccatgaagcaggttgcatgaggcagttccatctcctggcaactgtctccata

SEQ ID NO: 860387 - DNA, 120 bp, Artificial Sequence
  ENSG00000260971_2 (sequence is synthesized)
tttctttctttctttttttttttttttgacaggatgggctggggttgggggaggaggaagcaagaattaagcagagaaggcaagctcctttctgttcatctaactcaaacaaccctggtt

SEQ ID NO: 860388 - DNA, 120 bp, Artificial Sequence
  ENSG00000260971_3 (sequence is synthesized)
ctcctttctgttcatctaactcaaacaaccctggttaccatctggtcggctggaccatgaatgtttcaagggcaaggccatgtctgattcaattccacatccacagcacgtaaagcaacg

SEQ ID NO: 860389 - DNA, 120 bp, Artificial Sequence
  ENSG00000260971_4 (sequence is synthesized)
tctggcagagcaaagaactcacccatcaattgaatgacatcatggccaatctacgagttctggcttacttctcatgctattatcacatctgccaagacccaagtgaccacctggtaatta

SEQ ID NO: 860390 - DNA, 120 bp, Artificial Sequence
  ENSG00000260971_5 (sequence is synthesized)
cttcaacagcagagcgactcatacagccggcagtccactttgttcttctatagatcctgcctgtggtgttggatctaacagcttcttccctgacccaagattatgaaggatttctcctgt

SEQ ID NO: 860391 - DNA, 120 bp, Artificial Sequence
  ENSG00000260971_6 (sequence is synthesized)
gttctcttctaaaaattttacatttaggtacataatccattttgagctaattcttttaaatagtgcaaagtatggattgaagttcttttttttttttttttttgcagatacatatttaat

SEQ ID NO: 860392 - DNA, 120 bp, Artificial Sequence
  ENSG00000260971_7 (sequence is synthesized)
tttgttgaaaagactaatgttcttgcctgaatagcctttgcattgttgttgaaaatcatgttcacacatgtacacattccactgatctatttgcctctttgtgaaaatactactattttg

SEQ ID NO: 860393 - DNA, 120 bp, Artificial Sequence
  ENSG00000260971_8 (sequence is synthesized)
attaatatatatttatagggagtcttaaaatcatatcttaaaaagatagtggaagttatttaaccttactcttgcttttagaaattgttttggatattctagatcttttgtgtttccata

SEQ ID NO: 860394 - DNA, 120 bp, Artificial Sequence
  ENSG00000260971_9 (sequence is synthesized)
taaattttataatcagtttggcaatttatttaaaatattcttctgggattttgatggacattacactgaatcgatggatcgctttggggacaactgacatcttaacaatattgagtcatc

SEQ ID NO: 860395 - DNA, 120 bp, Artificial Sequence
  ENSG00000260971_10 (sequence is synthesized)
taacatatgatcatggaaattgctccatttatttagatcttctttcacatcttgaagcagtgttttgcgttttcagtgtataggtatttaatagatttaaaaatatgatccctaaatatt

SEQ ID NO: 860396 - DNA, 120 bp, Artificial Sequence
  ENSG00000260971_11 (sequence is synthesized)
taggtatttaatagatttaaaaatatgatccctaaatattcaatgtttttgatgctattggaattttaaaaaattaatttctgttctgaggaaggaaaataataaaagattaaacaagaa

SEQ ID NO: 860397 - DNA, 120 bp, Artificial Sequence
  ENSG00000260971_12 (sequence is synthesized)
accagactacatccatcagttccagctggtgcagtactcaaggatctccagggagcaagaaagggctagtaattaagaaagattcctttcctgagctgcactgggtcacagtgactgtca

SEQ ID NO: 860398 - DNA, 120 bp, Artificial Sequence
  ENSG00000260971_13 (sequence is synthesized)
gggttaaaagattgatggcttaataaagaccacctgaaaaggcaattgaccagccagggaaaaacaatcatcgccacccacccactaccggcagagtctccgttgagtcccaccatgaaa

SEQ ID NO: 860399 - DNA, 120 bp, Artificial Sequence
  ENSG00000260971_14 (sequence is synthesized)
gcagagctgcttggaactatctgcactcaatatcaggattgtttgaacaatcctcaaacaagcataagatgcattccttcattaactggtagtctactctctgcccatttcctcgactag

SEQ ID NO: 860400 - DNA, 120 bp, Artificial Sequence
  ENSG00000260971_15 (sequence is synthesized)
gtatgtcgagataaataagcagttcccctgctcttaggagttcagaatattgcagaggccatgattatattcaagattctgaacaagccaagccctccatttaaaaatgctgcagaccca

SEQ ID NO: 860401 - DNA, 120 bp, Artificial Sequence
  ENSG00000260971_16 (sequence is synthesized)
attttacatttaggtcctgggctttctctgctagaagaggctgaattcctggagtacctagagtacagagctggtgaatgacctcttatctccctgctctagcctgtcctatgtaacttg

SEQ ID NO: 860402 - DNA, 120 bp, Artificial Sequence
  ENSG00000260971_17 (sequence is synthesized)
gtcccagccacctctcctgtggacttttccttcttctgagcttttccagatgctgggctgagcacagattctggtttgatggcatctagtctgcaggaaaacatagtttggctttgacca

SEQ ID NO: 860403 - DNA, 120 bp, Artificial Sequence
  ENSG00000260971_18 (sequence is synthesized)
gcacctgatagactcttctgctcttttggactagtcttctagacactaatggcagtggaatttgaccttctggtcttccttttatgtttgctaaaataaatgaagccagtaatcccaaca

SEQ ID NO: 860404 - DNA, 120 bp, Artificial Sequence
  ENSG00000260971_19 (sequence is synthesized)
aaaatggaaaagatcctgaagttgaggcttgtagatttcaactatggctagccattcgtatagattggctgtgggagggccaaatctaccattgacccttccagatgctaggattctggg

SEQ ID NO: 860405 - DNA, 120 bp, Artificial Sequence
  ENSG00000260971_20 (sequence is synthesized)
aagagcttgggcctggattcagatggacctgattcaaattcccatgcggctacttattataaggattcttcctggctaaagaaacccataaaagtggaaaactcaaactccacagtgcaa

SEQ ID NO: 860406 - DNA, 120 bp, Artificial Sequence
  ENSG00000260971_21 (sequence is synthesized)
atatctcttgagtctgcctgcactaccctttcttgaatgtgtattgataagactgcagttgacattttaagaaatttaaatttcaacctgaagtcaataaggacacctcagaagttttca

SEQ ID NO: 860407 - DNA, 120 bp, Artificial Sequence
  ENSG00000260971_22 (sequence is synthesized)
acctagagtacagagctggagagaaatctagaagtggaattgctgagctgtagagtatgtgaatctctacaactttcaactttaccatgtattgtcaaattgctctccaaagtgatggta

SEQ ID NO: 860408 - DNA, 120 bp, Artificial Sequence
  ENSG00000260971_23 (sequence is synthesized)
ccaattaatgatactaccaataaggatctcaacaggacaaacacaaagaaaatatcaaggtgcatcatagacaaattattgaaaatcagcaataaggagaaaaccttaaaaacagcaaga

SEQ ID NO: 860409 - DNA, 120 bp, Artificial Sequence
  ENSG00000260971_24 (sequence is synthesized)
taaaaagatgcattatgtgtaaaattaaaaaagaaaacaatgattgctgaattcttatcataccaatgcacaaaagacaacagaacaatatctttaatgtgtgaaaagtaaaaaaaaaaa

SEQ ID NO: 860410 - DNA, 120 bp, Artificial Sequence
  ENSG00000260971_25 (sequence is synthesized)
tctttctttctttttttttttttttgacaggatgggctggggttgggggaggaggaagcaagaattaagcagagaaggcaagctcctttctgttcatctaactcaaaagttttgctcttg

SEQ ID NO: 860411 - DNA, 120 bp, Artificial Sequence
  ENSG00000260971_26 (sequence is synthesized)
aaatggaaggcaaaacaaagacattttcaaataagcaaaaggtgatagaatgtgtcatccacagacctgcactataaaaaatggtagaggaagttcttcagtatgaaagtgaatgatacc

SEQ ID NO: 860412 - DNA, 120 bp, Artificial Sequence
  ENSG00000260971_27 (sequence is synthesized)
agatggaaactgagatctacaaaatgaaacatcactggaaatagtaaatacatggatttatgctgccagagtggttcttctagtaagaagccccttgccatcagacactgcatttcactt

SEQ ID NO: 860413 - DNA, 120 bp, Artificial Sequence
  ENSG00000260971_28 (sequence is synthesized)
aaagagagtttcacctgccacctggatcatttcctatttttctgcagccacttcagggcggggacccagtatcacgaagctgcaaggtaaaaaggatcaaaccttaactgcctacatgtg

SEQ ID NO: 860414 - DNA, 120 bp, Artificial Sequence
  ENSG00000260971_29 (sequence is synthesized)
ctcacaggaacataagtgagtgaggctcaccagcaaccaggaagtgagctgagcctaacatatgggagagatcctgtctcatctgcagggaagagctgctatataggaaagtatctgctc

SEQ ID NO: 860415 - DNA, 120 bp, Artificial Sequence
  ENSG00000260971_30 (sequence is synthesized)
attgctgccatgtgggaatgctggtattgctggactttctgatgttttaggagaaactgctgatctgtgcatgaagtctgatatataaagatgatactatatttatgtgtctatggataa

SEQ ID NO: 860416 - DNA, 120 bp, Artificial Sequence
  ENSG00000260971_31 (sequence is synthesized)
agagcagcagggttccttcattgtcagtgctttttctttcccaacttcccccaacttttttttttttaaactaaaactttggctaacctggcaatctacgaaagaggggttccactaagt

SEQ ID NO: 860417 - DNA, 120 bp, Artificial Sequence
  ENSG00000260971_32 (sequence is synthesized)
gatttaaacatgatttgattctctttgtcctgttgctctttggcatcaatgggacatggatcaggaaattatttctaggtgtttatatgaggaaagaggaaaagctgctgagagttaatc

SEQ ID NO: 860418 - DNA, 120 bp, Artificial Sequence
  ENSG00000260971_33 (sequence is synthesized)
ttttagacaatccaacagaatctgaaatatcaaaaactatccttccaaaagaaaactatcaaccctttcaacattttttgaatctttctttgaagctttagccaaacagaagataaatgt

SEQ ID NO: 860419 - DNA, 120 bp, Artificial Sequence
  ENSG00000260971_34 (sequence is synthesized)
gggggaggaggaagcaagaattaagcagagaaggcaagctcctttctgttcatctaactcaaagccattcctgcttacccaaggaagatgagtgaacagtcagcactcagtttataatac

SEQ ID NO: 860420 - DNA, 120 bp, Artificial Sequence
  ENSG00000260971_35 (sequence is synthesized)
actgtagaacagctatggactaggactcacatggaaagggaggagagggaatgggttggctatactgctcccccactgggctcacctacatttcaggggtatcctgggactgaggcagag

SEQ ID NO: 860421 - DNA, 120 bp, Artificial Sequence
  ENSG00000260971_36 (sequence is synthesized)
gctttcacctggggcaatattaacactcagcaaaattaggaaggaggatgaaggaatcagcatggtggagtggaaatatggtgcacatttagtcaaaaagatttggatctgaattcatag

SEQ ID NO: 860422 - DNA, 120 bp, Artificial Sequence
  ENSG00000260971_37 (sequence is synthesized)
caataagctttgctgccagttttccatccatcccccggggctgagatgaggtgagagggtatatcctgtttgttcctccagatccacttttcacctttccccttacctgctttgtgcttc

SEQ ID NO: 860423 - DNA, 120 bp, Artificial Sequence
  ENSG00000260971_38 (sequence is synthesized)
aagaaactgacttcaacagacagcatcatctgggcttctttaccctgtagtgttcagctgagttcagccaatggaagacactagtagaagactggaaggatagaggagagaaagattgga

SEQ ID NO: 860424 - DNA, 120 bp, Artificial Sequence
  ENSG00000260971_39 (sequence is synthesized)
atatttattcccatctcatactacagtttttgtagtgatggttcttcctattggacagcttccacctataactacagttctctcctggttccagaaactgctttctccacttctgaccta

SEQ ID NO: 860425 - DNA, 120 bp, Artificial Sequence
  ENSG00000260971_40 (sequence is synthesized)
ggagtagccacagctcccagctgttgttagaccccaggtgtattttgtcatctcttgttacttcccttaaccctgccacagctctgaaaatagtccagtaattaaatactttttgagcta

SEQ ID NO: 860426 - DNA, 120 bp, Artificial Sequence
  ENSG00000260971_41 (sequence is synthesized)
aaccaactgaagacatgtagataaaagaaacataagacaaaaaataaacagagcctcaattaccttgagaaaatatgaaatagtataatatctatataattagagacccagaaaaaggag

SEQ ID NO: 860427 - DNA, 120 bp, Artificial Sequence
  ENSG00000260971_42 (sequence is synthesized)
aaaaatctgaaaaaactggaaatccacaactcttcttaaaattgaggtaacagggcaagccactaccttgaatattagagacaggaagatacaaagaattcagcttaaagaaagaaggaa

SEQ ID NO: 860428 - DNA, 120 bp, Artificial Sequence
  ENSG00000260971_43 (sequence is synthesized)
gccttggaggagaagcctggtgctggagcctgtaccactttccacaacatcaactgtgctactgtataataacagggcattatagccaaagaactgtaagcctcagaccctatttaagga

SEQ ID NO: 860429 - DNA, 120 bp, Artificial Sequence
  ENSG00000260971_44 (sequence is synthesized)
agagtctccagggaaatctaaaaataacagggaagactaaaacaaggacacccagagaaaatgctagcctttgatatgtacagctatagcaactggcaaacacaatgtaactcctagcca

SEQ ID NO: 860430 - DNA, 120 bp, Artificial Sequence
  ENSG00000260971_45 (sequence is synthesized)
cctctcaggctgtcagcaaaaaactagaagacgtgaaaatgcaaaaactctgtctgaagagagaaagcatgccttagactcagactggcagaaattttgagtgatcaaaccagatattta

SEQ ID NO: 860431 - DNA, 120 bp, Artificial Sequence
  ENSG00000260971_46 (sequence is synthesized)
gcaaatcctatctatgaagataggcacttccattcattctgaagtcctcacatagtagttattcagtgaatgtaccctgggatccacttttcacctttccccttacctgctttgtgcttc

SEQ ID NO: 860432 - DNA, 120 bp, Artificial Sequence
  ENSG00000260971_47 (sequence is synthesized)
gagatctacaaaatgaaacatcactggaaatagtaaatacatgggtaagtataaaacatttttttctcatttaaaaagagtatctttaagggcaaattaattatttaaataaaaataata

SEQ ID NO: 860433 - DNA, 120 bp, Artificial Sequence
  ENSG00000260971_48 (sequence is synthesized)
gtatgatgaggatcacaaagtaaggcgggcagaaatgatagtttactcttttaagtttcttacattatatattatttgatatttgatgaatattatttgatggtagtcagtgtttaaaag

SEQ ID NO: 860434 - DNA, 120 bp, Artificial Sequence
  ENSG00000260971_49 (sequence is synthesized)
aggcatactgtaaatcctaacaaaactacaaaataaataaaactaaacgttgttgttaataaatcactagaaaagataaaatgtaacacagatcctgcataattcatccaaacaaaatca

SEQ ID NO: 860435 - DNA, 120 bp, Artificial Sequence
  ENSG00000260971_50 (sequence is synthesized)
gacagagtgagactctgcctcaaaaacaaacaaacaaacaaaaagctgaccgaaagagaatggaagtagaaatccttcacgtgtcgttgggacagtaatgtgggttgttattagtgtcta

SEQ ID NO: 860436 - DNA, 120 bp, Artificial Sequence
  ENSG00000260971_51 (sequence is synthesized)
gtgtcgttgggacagtaatgtgggttgttattagtgtctaccattattgagggtagaagatgaggtgaagaaaccaaggcaacatatgactaagtgacacatttgagagagcccagggag

SEQ ID NO: 860437 - DNA, 120 bp, Artificial Sequence
  ENSG00000260971_52 (sequence is synthesized)
ttcaccagagaaaggaagggacagcaacttggagtctggagctgacgcagaggatgtttcttgatatcttcaacttgaacctgtctcacttgacagatttatgctgccagagtggttctt

SEQ ID NO: 860438 - DNA, 120 bp, Artificial Sequence
  ENSG00000260971_53 (sequence is synthesized)
aagaaccgatttgaagaggttgccattcactctgtcaggctgcgtgtgggattcatcaggacccagcctcgctttctttcaccccgcatcaatgtgccctaaaggatttttctttaaacc

SEQ ID NO: 860439 - DNA, 120 bp, Artificial Sequence
  ENSG00000260971_54 (sequence is synthesized)
tctttctttctttttttttttttttgacaggatgggctggggttgggggaggaggaagcaagaattaagcagagaaggcaagctcctttctgttcatctaactcaaactgacgagtcatt

SEQ ID NO: 860440 - DNA, 120 bp, Artificial Sequence
  ENSG00000260971_55 (sequence is synthesized)
cattgagctgactccaatcagcaggatcccctggtcgcctgactcaggcctccccagtcagaggtagagtctgcggtggacagacagacaggtctggagaggctgacccaagtgaccacc

SEQ ID NO: 860441 - DNA, 120 bp, Artificial Sequence
  ENSG00000260971_56 (sequence is synthesized)
ggctgccgggaggggctcattgttctgccggccgctttgacttcattttctgcttttcatcccaggccgggacggtttagaatgcaaatgcgggctgcttttgtagctgtgcgtttgtct

SEQ ID NO: 860442 - DNA, 120 bp, Artificial Sequence
  ENSG00000260971_57 (sequence is synthesized)
gggagccgtgcgtttgtctggggtgagatcacagcaaaagggttttgtttggctttttaaattcttctggggagagcaaaagaagctggaggagcgctgggcgcagaagacctcccgggc

SEQ ID NO: 860443 - DNA, 120 bp, Artificial Sequence
  ENSG00000260971_58 (sequence is synthesized)
gggaaggcggggcaggcatgggcccaatgggagcagccgtcggcttctgcaggcctggtttggaaaggaaccgggtcagaagggtgttgttgaacattaactccttgtggcctggcggat

SEQ ID NO: 860444 - DNA, 120 bp, Artificial Sequence
  ENSG00000260971_59 (sequence is synthesized)
ggggagttgggggtttccaagctgctcaccccagaacatgcagtccactaatactgtatttcgtgcttcctttgtgccacaccctggggacatttccaaagagaaaggtgacgtccagcc

SEQ ID NO: 860445 - DNA, 120 bp, Artificial Sequence
  ENSG00000260971_60 (sequence is synthesized)
ttctttctttctttttttttttttttgacaggatgggctggggttgggggaggaggaagcaagaattaagcagagaaggcaagctcctttctgttcatctaactcaaactgtttccaagt

SEQ ID NO: 860446 - DNA, 120 bp, Artificial Sequence
  ENSG00000260971_61 (sequence is synthesized)
ctttctttctttttttttttttttgacaggatgggctggggttgggggaggaggaagcaagaattaagcagagaaggcaagctcctttctgttcatctaactcaaagattcttcctggct

SEQ ID NO: 860447 - DNA, 79 bp, Artificial Sequence
  ENSG00000260974_0 (sequence is synthesized)
ctcctggggtgcagaggatttgtgacagcctagagaacagaggaaatggttttgaaaaggcaaatgcgtgagagtgcat

SEQ ID NO: 860448 - DNA, 120 bp, Artificial Sequence; identical to SEQ ID NO: 846606
  ENSG00000260974_1 (sequence is synthesized)

SEQ ID NO: 860449 - DNA, 120 bp, Artificial Sequence
  ENSG00000260975_0 (sequence is synthesized)
aagaatgcacaagctatagtctgctgtattcatggagcacacaagaaagaaatgtgaagagaggcgggattcccatgttaaagggcactctaccgtcagactctctttataaggagccaa

SEQ ID NO: 860450 - DNA, 120 bp, Artificial Sequence
  ENSG00000260975_1 (sequence is synthesized)
ccagtcctcaggaagatccacctatatgcagagaaagaaagtactcttttatctgtaaacttaccaaactagatctttgaacctaaaaaacataaattttaaaagcaattaaaaaatctg

SEQ ID NO: 860451 - DNA, 120 bp, Artificial Sequence
  ENSG00000260975_2 (sequence is synthesized)
atggatccaaatatctagtgttaaaaataaatccatttaataagaaccttctaatcctctcctaatagttggggatcaacaaaactgatagactgcaagcaagactaataaagaagaaaa

SEQ ID NO: 860452 - DNA, 120 bp, Artificial Sequence
  ENSG00000261629_0 (sequence is synthesized)
gaaaatatatgggctgaatgtctttctatttgctctttaaagaccttgcacaaataatgatgatgactgggatttttttttcatggaaaaaaaaaaaacagaaatggtgagggtacctgg

SEQ ID NO: 860453 - DNA, 120 bp, Artificial Sequence
  ENSG00000261629_1 (sequence is synthesized)
agaggccaaggtgaaggcattacttcttaatttattgatactgagttgcatccaccccagggagctggtgctgcctatcctccgaggaccaaaacagctggaggctaaagcagctaatag

SEQ ID NO: 860454 - DNA, 120 bp, Artificial Sequence
  ENSG00000261629_2 (sequence is synthesized)
atgatttagttaagaagaactaaaacagcgaattccataatgggaggttttgcctatgactttcttctagggtgtaagttggttccgcatcataatgtaattatatatttttcacttttt

SEQ ID NO: 860455 - DNA, 120 bp, Artificial Sequence
  ENSG00000261629_3 (sequence is synthesized)
taattgacagataacattttatgtttttatcatgtacaacatgatgttttgaagtacatatacaaaatgcaaaggttaaatctagctcatcaacaaatgaactcacacagttatcacttt

SEQ ID NO: 860456 - DNA, 90 bp, Artificial Sequence
  ENSG00000215841_0 (sequence is synthesized)
agtctccctggaaccaagcagccaaggcaggctaatggtgaaggcccaggcacagtaatggtcccctggagatggagtcctgctctgtca

SEQ ID NO: 860457 - DNA, 120 bp, Artificial Sequence
  ENSG00000261623_0 (sequence is synthesized)
aagaacaataacatctcttttgcaggatcatgcaatgccctccggccaaaggctaccaggaacacacctttcggttgaacaaagttggctttttgagtcactgcactggaggggaatgcg

SEQ ID NO: 860458 - DNA, 120 bp, Artificial Sequence
  ENSG00000261623_1 (sequence is synthesized)
cacccctggatgtctcggggaggggatgttagtaggactgatcatgggatttgggctcgcattaagtgattttgcaggctgtttctctaggctggatgctgtcaggaagcaagggtaatt

SEQ ID NO: 860459 - DNA, 120 bp, Artificial Sequence
  ENSG00000261623_2 (sequence is synthesized)
ctgtgattgggtatgtcaatgattctcttctagacggcaggaggaactgagcaaagctacaactgcaattagttaagaaacatttgagccaggaaggggaacatttgggcagttttgtca

SEQ ID NO: 860460 - DNA, 120 bp, Artificial Sequence
  ENSG00000261623_3 (sequence is synthesized)
tttggacgatgttcacgttttcgtctgcgttcaggcaggactacagaatggtctcgtctttgttttgatccttcatggttaccgagcggtcttgtctgatgtttctgggctgtagaactg

SEQ ID NO: 860461 - DNA, 120 bp, Artificial Sequence
  ENSG00000261623_4 (sequence is synthesized)
ttcatgtccaacagaacaccatggcctggctgtgaatgccaggccagcccaggctgtcagagggctttcccctttctcagttgttatgaggataacgtgcccacacttggcaaaccatag

SEQ ID NO: 860462 - DNA, 120 bp, Artificial Sequence
  ENSG00000261623_5 (sequence is synthesized)
gcaatatttcagctatgctggagcagtgatgatctggaggttgatacattatgtggcagaggctgcccgcaccacagaggctcagagaaggttgaagttgcacagggatgcttccagcag

SEQ ID NO: 860463 - DNA, 120 bp, Artificial Sequence
  ENSG00000261623_6 (sequence is synthesized)
cagtgtttaagctgggtttttaaggatgaatagaagttgcaagaggaggaaggatgactccaaataaatcagagcagaggcctgattagcccactttggtgggttgtcatggtgcctctc

SEQ ID NO: 860464 - DNA, 120 bp, Artificial Sequence
  ENSG00000261623_7 (sequence is synthesized)
tgccaagaggcagtagtcccccatagttgaccaggggtcccccatccccacttcaggcaacaggatctggactgcaccaggaggaacacatgactgtgccagtcagcacatcacatcccc

SEQ ID NO: 860465 - DNA, 120 bp, Artificial Sequence
  ENSG00000261623_8 (sequence is synthesized)
atggcccatggctgtttagggcaggcgtatgactgacttgtccaataagataagatctcaaaacaaatcaccctctccacctgagccaagcaaagagggttcacctgccccatttggtcc

SEQ ID NO: 860466 - DNA, 120 bp, Artificial Sequence
  ENSG00000261623_9 (sequence is synthesized)
acagggctgtttcaaggccctgttctcagcctcctgttcaggatcaagtttcacaaatggatccttctcctatgtcaggccttcctgacttctccccctcttggctactcatgctaattc

SEQ ID NO: 860467 - DNA, 120 bp, Artificial Sequence
  ENSG00000261623_10 (sequence is synthesized)
catgtctgtggtagaagaagccccacacaggcacttacggggcttctactggatgcatcctcatagccatctgcaggggaggaaggagcatccccattttatggataaagaattggctca

SEQ ID NO: 860468 - DNA, 120 bp, Artificial Sequence
  ENSG00000261623_11 (sequence is synthesized)
caggtccaaggtcccatcgccgttaagtggtgaggccacatgtagctgatttcagagatttgctcactatgccaggctcctctcgaatgctggcttctggtcaagtaaattagtccacaa

SEQ ID NO: 860469 - DNA, 120 bp, Artificial Sequence
  ENSG00000261623_12 (sequence is synthesized)
aagttatccacagacagttattgagcacatatgattgcacccagctttgggtcagcctctgacacaactccttggagaaggggcatcctaggattaagaaaccagctccccctacatagg

SEQ ID NO: 860470 - DNA, 120 bp, Artificial Sequence
  ENSG00000261623_13 (sequence is synthesized)
accacccgtcagcataacaaagacgccgggtctggggtgccaatagcaatggaatgggagcttcactaaggacaaacagcagcatctgctttacagcggtgggcccgaagatcaggcagg

SEQ ID NO: 860471 - DNA, 120 bp, Artificial Sequence
  ENSG00000261623_14 (sequence is synthesized)
aaaggagaaaggagaaagaaggtgaagtctcttgaataataggaaaccactcccttgagagtctggacctgactcctggctttggggtcaggcagacgtgggtccctacatatcctttcc

SEQ ID NO: 860472 - DNA, 120 bp, Artificial Sequence
  ENSG00000261623_15 (sequence is synthesized)
ctctggctattggatggctattctaagctgctcgactcattccccctcccagtcctagagcctagcatctgggctggcattaaccttccaggagctgatgatgcaccctgctgacaccag

SEQ ID NO: 860473 - DNA, 120 bp, Artificial Sequence
  ENSG00000261623_16 (sequence is synthesized)
ggtgcctgatggaccgggctgctgctcgaggagggagttgctggctgtttcctcctttgactcccactggacccatgaacttgggccttaggttgagctgatgggggaaggacacgaggc

SEQ ID NO: 860474 - DNA, 120 bp, Artificial Sequence
  ENSG00000261623_17 (sequence is synthesized)
aaggactgagcttgtagtcaggctcctgggagcccgctggccccaggaactgaccatgcaggccccaggccccatgctctttgtaacttcctctcactatccaggaccacatgaatggaa

SEQ ID NO: 860475 - DNA, 120 bp, Artificial Sequence
  ENSG00000261623_18 (sequence is synthesized)
gtgccaggaagacagggctttcgattgcttggttcattgatccatcccagcacctggaacagggtctgacaaagatgaggtgctctgtacacatttgttgaatgaatgaatgagcctcat

SEQ ID NO: 860476 - DNA, 120 bp, Artificial Sequence
  ENSG00000261623_19 (sequence is synthesized)
cctggcggaaagggggctgtttgaacttgaaattgctaaagccaggtgctcaaaaacaaatgccttcagaggccaggcaggtgatggaaatgtggatgggcaaaggtgttgaccaagagg

SEQ ID NO: 860477 - DNA, 120 bp, Artificial Sequence
  ENSG00000261623_20 (sequence is synthesized)
gatgtgtggggactatgggcaaacagagagggctttttgcacctaaagaccttcaaactgcaaaaactaagcaccacttctacagccaacaagaggccatctgagggccatgtccatctg

SEQ ID NO: 860478 - DNA, 120 bp, Artificial Sequence
  ENSG00000261623_21 (sequence is synthesized)
aaggcctatcccactcagggcctcccaggcatggttcctgaatcctgtctccctcctagcctagcgagaggcctgccagagtactgccttcatgtgcaggatggggacatccaggcccca

SEQ ID NO: 860479 - DNA, 120 bp, Artificial Sequence
  ENSG00000261623_22 (sequence is synthesized)
ggtcacagctccagctccatctgcatccttcatgctccctaagagcctggcagcccaactcttcagaggaagcagtccttccctactgctgttgctgccttcatggcctcagctgggtcc

SEQ ID NO: 860480 - DNA, 120 bp, Artificial Sequence
  ENSG00000261623_23 (sequence is synthesized)
ctggggctggcacctggcaaccttatacccccggggccaacacccaggcctgcacatgtgtgcacagacacaggacatgcctgcgtgcacccaagcacctgcccccaaaggcatactcag

SEQ ID NO: 860481 - DNA, 120 bp, Artificial Sequence
  ENSG00000261623_24 (sequence is synthesized)
gtgcttttgggcaccttctgctctattcatagatccccttctccaggaagtcctccctgactatactccctcacactgcatgctagatctgcccctcctctctccaggccttcatcatac

SEQ ID NO: 860482 - DNA, 120 bp, Artificial Sequence
  ENSG00000261623_25 (sequence is synthesized)
ctcacagtgacctgtggcatcccctcccctgggaacagtggctctggtggggaggaactgtatatgactcacttctgtgccccccagcacgggcttggcacagagcaggtgcctgcaagt

SEQ ID NO: 860483 - DNA, 120 bp, Artificial Sequence
  ENSG00000261623_26 (sequence is synthesized)
gttttctgagtgcacaggagaaagttaagaagcatcacagatattaggcttcctcagttcaaatccctatacggctacctacttgctgtatgacttgagcaggtagctcaaacctctctg

SEQ ID NO: 860484 - DNA, 120 bp, Artificial Sequence
  ENSG00000261623_27 (sequence is synthesized)
tatgacttgagcaggtagctcaaacctctctgtcctcagtttccccacgtgtgatatagggataataatagtgtcggctggacacggtggctgacacctataatctcagcactttgggag

SEQ ID NO: 860485 - DNA, 77 bp, Artificial Sequence
  ENSG00000261623_28 (sequence is synthesized)
acctagatcgtgccattgcactccagtctgggagacaagagcaagacgctgtctcaataaataaataaataaataaa

SEQ ID NO: 860486 - DNA, 120 bp, Artificial Sequence
  ENSG00000261625_0 (sequence is synthesized)
taagtcagctacagcaccgacctccaggagttggtgcagtggcctggggtggcagccggtgtgcctgattgccctggtcgggcgttcagggcagggagcagaatggccactgcagaaggg

SEQ ID NO: 860487 - DNA, 120 bp, Artificial Sequence
  ENSG00000261625_1 (sequence is synthesized)
atgtgcctgtgagtggtttgtccccagcaccaatctgctgtttgcggacatactatgggcagtgggtgctggccaagagctgcacgtaggttttctgttgactgtccatgcagggctaca

SEQ ID NO: 860488 - DNA, 120 bp, Artificial Sequence
  ENSG00000261625_2 (sequence is synthesized)
tggcccatactgtcagccccagctgtggaagtgggggctcatgaatggagtttctcatccaaggtcagtcgcgctggtggacggccctggctggaggcctacatcaccatccagggactc

SEQ ID NO: 860489 - DNA, 120 bp, Artificial Sequence
  ENSG00000261625_3 (sequence is synthesized)
cccacagtggccctcctgttgccctggaggctcaggtctctgaccttccatctcccatctgcaaagcactggacactggggttccgggcagatgcacggagtggcctggacatgcccatc

SEQ ID NO: 860490 - DNA, 120 bp, Artificial Sequence
  ENSG00000261625_4 (sequence is synthesized)
acagccctaggataacccagacgggccatcgagacctatccacactctgtggagaccaatggaggaaacagctcagtttcaggctgtgggcgtctgaatcaaagcggggactgggaacaa

SEQ ID NO: 860491 - DNA, 120 bp, Artificial Sequence
  ENSG00000261625_5 (sequence is synthesized)
atgcctttctggcatccacccagctttcccggatcccctgccagttgtcattttcagataacttgaattttatattttatgccaggatttttaagcccccaggatcttttcacatctgca

SEQ ID NO: 860492 - DNA, 120 bp, Artificial Sequence
  ENSG00000261625_6 (sequence is synthesized)
cagcttggcttggaatcctcagctaggaccatccttcctccccaagaaccagggcctcatctagaaggtagggcagggaaatgagggtccacatgtggtccggcccctcggcatacaggg

SEQ ID NO: 860493 - DNA, 120 bp, Artificial Sequence
  ENSG00000261625_7 (sequence is synthesized)
agatgaccaggcctgggaaatgtgcccttcgacgggctggtgacaaggccaaaaagctgggcaaacacattgcagagatcctcccaaactaaaaccactgagagtacaagtgcaaaacat

SEQ ID NO: 860494 - DNA, 120 bp, Artificial Sequence
  ENSG00000261625_8 (sequence is synthesized)
tcccttttaagccagtaggggcttgacagctggagaacttgaaaacaacagggcacagttcacaaaatcaaaactcatggaaaactctgcgcgggtgagtcagagtgccagcgccaagtt

SEQ ID NO: 860495 - DNA, 120 bp, Artificial Sequence
  ENSG00000261625_9 (sequence is synthesized)
tcctggcatgcaagaggaggctcccccgctcaggcagatttttttaaacatctttttaataaattgaattgagacctaatttacataaaataaaactgacccatttaatatccagtttaa

SEQ ID NO: 860496 - DNA, 120 bp, Artificial Sequence
  ENSG00000261627_0 (sequence is synthesized)
gttattggatgttccatcatacttgtgggccaggacttagttaaatggctacaccttgctacaaggaagtctgggaaatacagtctttcagctggatacatccccctggcctgaataaaa

SEQ ID NO: 860497 - DNA, 120 bp, Artificial Sequence
  ENSG00000261627_1 (sequence is synthesized)
gctgggttctcttacaaagcacaaaaaggggattgaatattggttaggcacctgtcaatctttcatatcagcccacgtgagatagccagggtttggtgaaataaaatgctgtttctcctc

SEQ ID NO: 860498 - DNA, 120 bp, Artificial Sequence
  ENSG00000261627_2 (sequence is synthesized)
gggaccctgttctctgcagagaaattctttctcatgacagggccaacatgtctgccaaaagacagcaataggacttcccaatcattctatatatttaagggagactttttaaaaactaca

SEQ ID NO: 860499 - DNA, 120 bp, Artificial Sequence
  ENSG00000261627_3 (sequence is synthesized)
atacggttgaactcatgtgatttttttttttgccatgaagtttcttgttaagcattgaacatttaaaagtaaattttgactaatgtgaaataaaagaatgttacttgaagcaacaaaaaa

SEQ ID NO: 860500 - DNA, 120 bp, Artificial Sequence
  ENSG00000266489_0 (sequence is synthesized)
gaacaactcagttttgggttcctctgaacatcaagaaaagcctgaatgttgtgtcttcaaattcaggataacactggcctctgcctctcagcttgtagcattcatgtctgcagacagtct

SEQ ID NO: 860501 - DNA, 120 bp, Artificial Sequence
  ENSG00000266489_1 (sequence is synthesized)
tcgctcaagcatagaaaaaagagctctctactgcctcatctataaaatggagcaggcaataaactacctgccaaattggagtcagcaatgagttgccacgggaagcacagtgtgtgagga

SEQ ID NO: 860502 - DNA, 120 bp, Artificial Sequence
  ENSG00000266489_2 (sequence is synthesized)
tggccataaatgtgtacagcgggaaaatgagagagacggtgttccataagtcaaaccaggaacaaagaacagaaagctgaaagaatgagcccagctgaaggctctcagacagagaactgt

SEQ ID NO: 860503 - DNA, 120 bp, Artificial Sequence
  ENSG00000266489_3 (sequence is synthesized)
attagggatcctaccagaagtgatttcatttcatctccctctcagtgctggaaagattggtgcccaccttttcctcatcatgccctctgcgtgggactgcgagtccagcagtataacagt

SEQ ID NO: 860504 - DNA, 120 bp, Artificial Sequence
  ENSG00000266489_4 (sequence is synthesized)
ttcaggagtcagtctactgggatacatatcccaattccatcattttcaacttcgtttctctgggcctccctggggatgcaggagatcctctgtggaatgtcattgcatggattaaatgag

SEQ ID NO: 860505 - DNA, 120 bp, Artificial Sequence
  ENSG00000266489_5 (sequence is synthesized)
atcctttgtgtcacatgcacagctcacagtctgggacatagtcaatccttaagaaatattaggtattttgcacaagagaatttgcttttcaattcaagactgtgacttcaaaacagggag

SEQ ID NO: 860506 - DNA, 120 bp, Artificial Sequence
  ENSG00000266489_6 (sequence is synthesized)
agaaactctcctaataacaccttctctagcagcttctctgcatccatttttgcccaacagtttgagattctgtcatatggcttgaggttttgtttgcattaattcctcctttactctgcc

SEQ ID NO: 860507 - DNA, 120 bp, Artificial Sequence
  ENSG00000266489_7 (sequence is synthesized)
actgggatatccttcaagcctttgaagcccacaccagcaggaagccttggggactttacagactttgtgctgatgccccaggaaggctgtctttcctagagaagagggaatgaattggcg

SEQ ID NO: 860508 - DNA, 120 bp, Artificial Sequence
  ENSG00000266489_8 (sequence is synthesized)
gcagcggaaggtcagagaaaccccatgaccaacaggcctccagaagatttatgcgtaactcctgaaagggcaggacaatggttggactcctttaagaagagaaagaattcaaacattcac

SEQ ID NO: 860509 - DNA, 120 bp, Artificial Sequence
  ENSG00000266489_9 (sequence is synthesized)
ctgaacagcattctccactacaaggaactagggctccttgaagaaaatctgattcccggactcagtcagagaaagtaaaagatgggcctggaatattttcttgtgccagaaagtaaggag

SEQ ID NO: 860510 - DNA, 120 bp, Artificial Sequence
  ENSG00000266489_10 (sequence is synthesized)
gtgctcaataatgaggacatgtcaaaagaacacagagacaaacttgaagggactcgccctggccaaatctgggacaatttgagcatcaaaataaataatgataataatggatgaaaaccc

SEQ ID NO: 860511 - DNA, 120 bp, Artificial Sequence
  ENSG00000266489_11 (sequence is synthesized)
tttaaataaaataaaactctaaaaatgtcatactgatgagagagaaaaggctcttcttttaaatagtagaaggccaactaataaatacggaaggaatgatggagttataaaagcatcaat

SEQ ID NO: 860512 - DNA, 120 bp, Artificial Sequence
  ENSG00000266489_12 (sequence is synthesized)
gatgcaaaaaaatagtggtcatagtttgaagaaaaatagcacatttataaggtctcaaaatatctaccaacaagtgtctaattaattataaagggaagagtcgggtgctgtggctcacac

SEQ ID NO: 860513 - DNA, 120 bp, Artificial Sequence
  ENSG00000266489_13 (sequence is synthesized)
gaggctgaggtgggaggatcacttgagttcagaagctcaaggctgcagtgagttacaatcaggccactgcactccagcctgggcaagacagcaagcaagaccccaaccctataaagaaaa

SEQ ID NO: 860514 - DNA, 120 bp, Artificial Sequence
  ENSG00000266489_14 (sequence is synthesized)
ccccaaccctataaagaaaaactaacaatttataatatatgtaaagggaaaaaaaataggtttagagtgggaaaaccttacccaagttatcaaagtcatcactactaatgagacatcatc

SEQ ID NO: 860515 - DNA, 120 bp, Artificial Sequence
  ENSG00000266489_15 (sequence is synthesized)
taccaaattatcggactcattatttgaaataagacagcctgatatgatgcgtagagaagcatattacttctctggtacttctgccaaaaatgtataacctggatataatcagacaaaacc

SEQ ID NO: 860516 - DNA, 120 bp, Artificial Sequence
  ENSG00000266489_16 (sequence is synthesized)
atactgaagaacattctacgaactaactggcctgtcaccttcaaaaatgtcaaggcaaaggaagacgaagaaaggatagggaatttttcctgattaaaggcaacctaagaaacacaacaa

SEQ ID NO: 860517 - DNA, 120 bp, Artificial Sequence
  ENSG00000266489_17 (sequence is synthesized)
ttatatgcaacgtttgatgctgcattaggtcttagaccaagaaaaaaaatagctataattttgagataccttactgactggaacaatggatgaaatttgaatacgaatagtggattagac

SEQ ID NO: 860518 - DNA, 120 bp, Artificial Sequence
  ENSG00000266489_18 (sequence is synthesized)
cctctccactgagaaccattttcatcactcaataaaattctccactttcaccacccttcaaccttccatgtgaccccattcttcatggacactggacaagagctcgagacccacccagtg

SEQ ID NO: 860519 - DNA, 120 bp, Artificial Sequence
  ENSG00000266489_19 (sequence is synthesized)
tccctccctgagggctgttctgccaacctcacgacaccatcatagaagacttcagagactgactgttgcaggttgaactgtgtcctccaaaaagatatgttgagtccctaatctccagta

SEQ ID NO: 860520 - DNA, 120 bp, Artificial Sequence
  ENSG00000266489_20 (sequence is synthesized)
cctgtgtatgtgaccctatccggaaatagagtttttgtggatgtaatcatactggatttggatgaaccctaatcgaagatgaccagggtccttctaagaagagaatagatgcatgtgcgc

SEQ ID NO: 860521 - DNA, 120 bp, Artificial Sequence
  ENSG00000266489_21 (sequence is synthesized)
acacacacacacacacacacagaggaccatgtgacagctgagagattggagtgacgtgtctgcaagcaaaaaatgccaaggattgccagcaaccacctatggtctcctcccctagatcat

SEQ ID NO: 860522 - DNA, 120 bp, Artificial Sequence
  ENSG00000266489_22 (sequence is synthesized)
gcaaccacctatggtctcctcccctagatcatctagagagaacacagccatgctgacatcatcatttcaggcctctatcctctggaactgcaatataataaacttctgtagttttaagcc

SEQ ID NO: 860523 - DNA, 120 bp, Artificial Sequence
  ENSG00000266489_23 (sequence is synthesized)
gcatctaaaacctctgccttggtttctcattgtcacatagattctacttcccttttatgtcatatagattctatttgccttatatggcacaggccatagtgctctgaccacaatatactt

SEQ ID NO: 860524 - DNA, 120 bp, Artificial Sequence
  ENSG00000266489_24 (sequence is synthesized)
ctctcctgccattccctcacacaccctatctaccccatacctccagcaaagaacactcagcatcccaaacaagtaaaaaataagataagggactcattcatctacatttcccagatatca

SEQ ID NO: 860525 - DNA, 120 bp, Artificial Sequence
  ENSG00000266489_25 (sequence is synthesized)
tcattcatttagcaaacatctatttcacatcttctatgtgattggttgtgagtataaaacaatgaagaaaacattgttcctatccaaaaaactcacaatctgataaacttctgtcacaca

SEQ ID NO: 860526 - DNA, 120 bp, Artificial Sequence
  ENSG00000266489_26 (sequence is synthesized)
gggctatgtcttcttgttttgaaggaaataggacacacactatctttccaatcaccaaggagaaagaggctgaggcccaacagaacagcataggtaatatggtagccaaagctctctact

SEQ ID NO: 860527 - DNA, 120 bp, Artificial Sequence
  ENSG00000266489_27 (sequence is synthesized)
tctctactagagaagcagctttctttgctggacaccatggctcatgcttgtaatcccagagttttgtgagaccaaggcagaagaacccaggagttgagcccagcagttcaagaccagcct

SEQ ID NO: 860528 - DNA, 120 bp, Artificial Sequence
  ENSG00000266489_28 (sequence is synthesized)
gcctgggcaacatagtgagaccctgtcactatgaaaaatttttaaaaattagccagacacagtggcagacacctgtgtacacacagcagcacataccagctacttgggaggctgaggcag

SEQ ID NO: 860529 - DNA, 120 bp, Artificial Sequence
  ENSG00000266489_29 (sequence is synthesized)
actgaaaccctgtctctaaaaagaaaaaagaggggaaaacaacagaagctgcttccaattatcaatcacatccaaatgtgggccaacccatgccatttaccgacaaaataatgaaggatt

SEQ ID NO: 860530 - DNA, 120 bp, Artificial Sequence
  ENSG00000266489_30 (sequence is synthesized)
ggatagagaactggccttcgaagtgcagagtgaaatgcaagagagaatccggtgtcaggcagatctttgaaggtcaccagattcttgataatgccagaaacaaggcctaccacgtgacca

SEQ ID NO: 860531 - DNA, 120 bp, Artificial Sequence
  ENSG00000266489_31 (sequence is synthesized)
gccggcagaagaaagtgatgatttaagctcaccaagagagcattcaggtcctggggtaactgaggtgtgaagaaataccagcactttggtagcaagaagggcctgtgatttctgcctttt

SEQ ID NO: 860532 - DNA, 120 bp, Artificial Sequence
  ENSG00000266489_32 (sequence is synthesized)
ggcaaaaagcagacacgagaatttgcagatcacacagattagtggaacaagactaagttgaccacttcctcaatggatatagggaagggatgaccaggctatgaaagacttggaacccag

SEQ ID NO: 860533 - DNA, 120 bp, Artificial Sequence
  ENSG00000266489_33 (sequence is synthesized)
attcactctacggactttcctttttaagcttccctccccaaacattgtctctcataggattctcatccatgtatttgtgcatgaacttccccgcatcttatgaaatatctgagtaaatgt

SEQ ID NO: 860534 - DNA, 120 bp, Artificial Sequence
  ENSG00000228142_0 (sequence is synthesized)
ggagttgtctcgctttctgctgagtcctctgcgtccccttcttgcagtcagagccccacagttgacgtgtgctcttaccggaagaagataatgttcttaaaccactcttggtgaaacaaa

SEQ ID NO: 860535 - DNA, 120 bp, Artificial Sequence
  ENSG00000228142_1 (sequence is synthesized)
tgcacttatcatctccccttcctacgccacttccaaacccaattctctccagtggctggtgatgctcacctggactgaatttcccagcttctgccgcaggtctgtgaggccatgtgacct

SEQ ID NO: 860536 - DNA, 120 bp, Artificial Sequence
  ENSG00000228142_2 (sequence is synthesized)
aagcagtgaaggtggcagaagtgggatccaccacatccaagctcaggccatgaaactgcctgtggcatcctccacactcttgctcttctctctcctgctggtcagacatggatgatccag

SEQ ID NO: 860537 - DNA, 120 bp, Artificial Sequence
  ENSG00000228142_3 (sequence is synthesized)
tggaggcctccaaggccctaggggatggcagaaccgctcgatagcagatgcttggggccctggaggactgcatggatcaaagccccctccaaccaaccttgattgtgaaatgatgatgaa

SEQ ID NO: 860538 - DNA, 120 bp, Artificial Sequence
  ENSG00000228142_4 (sequence is synthesized)
tgggagcaggagttgtctcgctttctgctgagtcctctgcgtccccttcttgcagtcagagccccacagttgacgtgtgctcttaccgctggactgaatttcccagcttctgccgcaggt

SEQ ID NO: 860539 - DNA, 120 bp, Artificial Sequence
  ENSG00000228140_0 (sequence is synthesized)
acaactgttaaactcaggcagagctcgggaaatgctgcccggatgggtgactgatggagaggggctaccactcttccagctaaactccgctctggttgggacccagcaattattttccat

SEQ ID NO: 860540 - DNA, 120 bp, Artificial Sequence
  ENSG00000228140_1 (sequence is synthesized)
agcgaagtgttaataaaatatctgttactcccaacacaacctcctgggggaagggacctgtctgtctgcttcaactttggatcctcagtgcccacatcaggatacctggcctgagagagg

SEQ ID NO: 860541 - DNA, 120 bp, Artificial Sequence
  ENSG00000228140_2 (sequence is synthesized)
gtcctgccggtattaccctggaggaaggaatgctgcacagaggccgagaggaatttgaacagactggccttgctgggtttttatctctttttgtccaatcccattttgacacagttgtcc

SEQ ID NO: 860542 - DNA, 120 bp, Artificial Sequence
  ENSG00000228140_3 (sequence is synthesized)
atgctccaatcatgcttatccaatgaagtttccataacaggcctgagaggacagggttcaggagcttccggacagctgagcaggtggaggttcctggagggtggtgtgccagggagggtg

SEQ ID NO: 860543 - DNA, 120 bp, Artificial Sequence
  ENSG00000228140_4 (sequence is synthesized)
cctggagggtggtgtgccagggagggtgtggaagctctgccccttcccccataccttgtcctatgcattcctttatctgcatccttcattttattttatttttttttgagacggagtctt

SEQ ID NO: 860544 - DNA, 74 bp, Artificial Sequence
  ENSG00000228140_5 (sequence is synthesized)
gcagtggtgcgcgatcttggcgcactgcaacctccgcctcccgagttcaagagattctctccctggctaatttt

SEQ ID NO: 860545 - DNA, 69 bp, Artificial Sequence
  ENSG00000228140_6 (sequence is synthesized)
tatcctttataatatcttttataaacaaccaatcagtaaatgtgttactctgacttctgtgagctgctc

SEQ ID NO: 860546 - DNA, 120 bp, Artificial Sequence
  ENSG00000228140_7 (sequence is synthesized)
caatcagtaaatgtgttactctgacttctgtgagctgctctagcaaattaatcaaatccacagaagggtcatgggaaccccaacttgaagcctgtccgtcagaagttccagagtcctgga

SEQ ID NO: 860547 - DNA, 120 bp, Artificial Sequence
  ENSG00000228140_8 (sequence is synthesized)
cttgtgactggtgtctgaagtgggcaagtcttggggactgagcccctagcctgtgggatctgatgctatctccacatagatagcaatggaattgaattggcgggcacctggctggtgtct

SEQ ID NO: 860548 - DNA, 120 bp, Artificial Sequence
  ENSG00000228140_9 (sequence is synthesized)
gctgcagagctcattgtttgcttagtggtggagagaagtctccctccacatgtggtcacagcatcttctgtctgtgttgattgcttttgatgttgatcgagagaacaggaaaaagcacat

SEQ ID NO: 860549 - DNA, 120 bp, Artificial Sequence
  ENSG00000228140_10 (sequence is synthesized)
tgaatgtctcaatgatgaagatgacaataatctggcttctaggttgttatgcggcaggcaacagctgtgcagatcctaataatctactctgggtgacagtttaacacaggggttggcaaa

SEQ ID NO: 860550 - DNA, 120 bp, Artificial Sequence
  ENSG00000228140_11 (sequence is synthesized)
gggttccgaggcggacctggggagcagaaacccctgtttagggtgaaccgtggcgggcgccgatggcctcttggaagaggacagactagcagctgcgagggagatgggactgggtttcac

SEQ ID NO: 860551 - DNA, 120 bp, Artificial Sequence
  ENSG00000228140_12 (sequence is synthesized)
ccctgaaagggcccctggagacagcggggaaactgacagggagatcatgatgtcgccattttgatggggtccccagaggagagatgtcctccccaacggctcctggacaggactggggaa

SEQ ID NO: 860552 - DNA, 120 bp, Artificial Sequence
  ENSG00000228140_13 (sequence is synthesized)
agagttcaggagggctgctgaacgccggagccttacaactgttaaactcaggcagagctcgggaaatgctgcccggatgggtgagtccttttaacacctcttgggttgatttttctcaca

SEQ ID NO: 860553 - DNA, 120 bp, Artificial Sequence
  ENSG00000228140_14 (sequence is synthesized)
ggttttcggggtttgcagagctctgagactgtgaccacagggtgagacctcaagctgcccagtactgtggccccatttcagaggccttgggcctgggccagagatggacgctggggctgc

SEQ ID NO: 860554 - DNA, 120 bp, Artificial Sequence
  ENSG00000228140_15 (sequence is synthesized)
cttttactccaagtttttttcttcattggtcattggtcattgggctccaagaaaagcactttttcaggaatcaaagaagcagtgatggaacgaaaagcagagaaagctgatgagccctga

SEQ ID NO: 860555 - DNA, 120 bp, Artificial Sequence
  ENSG00000228140_16 (sequence is synthesized)
atggaggtgaaacttccaggaaatatcacttgcctcttgattaggggaaatcacttttgaatgaccccgagttttgtgccccaagcatagattctggcagaaagaaacagtctggactga

SEQ ID NO: 860556 - DNA, 120 bp, Artificial Sequence
  ENSG00000228140_17 (sequence is synthesized)
tgacacactacaacatttggtcatgtggaaagaatgatcttcaggaaaaatcacacccttggcaaaggctttttacagaggcaagggcgagccggccaattctgacaatattccagtggc

SEQ ID NO: 860557 - DNA, 120 bp, Artificial Sequence
  ENSG00000228140_18 (sequence is synthesized)
aagggagccaggctgactcagtcatcattacttgtgtttcgtctcttcctcccacatctccttgtataactgtcttttggggaggggtgaagtgatagtaagaaaaacaacagcactttg

SEQ ID NO: 860558 - DNA, 120 bp, Artificial Sequence
  ENSG00000228140_19 (sequence is synthesized)
aaaaagggacagggggagaaacaagaaggggagaaagagttggggagagctcttgggtgatggggagatagcactggggatgttctggagcctgacagaactgtgtggtccctccagctg

SEQ ID NO: 860559 - DNA, 120 bp, Artificial Sequence
  ENSG00000228140_20 (sequence is synthesized)
gagatgctgggaaaacaggaagggattcgggagacggcagggatgaagttggctcatgaaatgcagggctcccttagcactttacaaataccagcttacaaacactccacagtcatcagg

SEQ ID NO: 860560 - DNA, 120 bp, Artificial Sequence
  ENSG00000228140_21 (sequence is synthesized)
aaacccttgatggatgctgcacagagatcgaagttcaggagcagcaccaatattcatccggggcaattggagtgagagcagcacaggatcacagcctgatttggcctcagaggctttctt

SEQ ID NO: 860561 - DNA, 120 bp, Artificial Sequence
  ENSG00000228140_22 (sequence is synthesized)
atctcttgcaagatctggaagccatgcaaaaggtgtcatggggagaggcgctgatgtcaggcatttatgggaccactgagtgggggcaaagaggcaggagaaaaagccagtgatgatggg

SEQ ID NO: 860562 - DNA, 120 bp, Artificial Sequence
  ENSG00000228140_23 (sequence is synthesized)
ggcaaagaggcaggagaaaaagccagtgatgatgggtcgacacctgcaggtagacccatttgcaggttattagaaactagcttatttatccagcttttttttttttttttttggagatgg

SEQ ID NO: 860563 - DNA, 120 bp, Artificial Sequence
  ENSG00000228140_24 (sequence is synthesized)
tccagctctctttttgtggttatcttagacgctatgaatctacttgaaaaccaagacgattgatcctttaagtgagctgcaggtgtccacctgggcgtgttttctgcttctaagccacag

SEQ ID NO: 860564 - DNA, 120 bp, Artificial Sequence
  ENSG00000228140_25 (sequence is synthesized)
gcaattcggtgtgcaagtttaacaccctgataggccctagccttagctctgttttaaactcccaaaaagtgtttttgtgtttgtgtgcatgtgggggagacaccttaaaatccagcaatg

SEQ ID NO: 860565 - DNA, 120 bp, Artificial Sequence
  ENSG00000228140_26 (sequence is synthesized)
ctgtgtccacagtgctctcctgggccccttccaaagatgggaataatatgggcagctggtttcgatttttataacttgcaacagctactctgtgaaagcggtgtgcagcaacagccaggc

SEQ ID NO: 860566 - DNA, 120 bp, Artificial Sequence
  ENSG00000228140_27 (sequence is synthesized)
aatccggacagacttattaaatgtgctgggcactgggcactgggcactgggcactggaattctcctggttgtaggcaagctgggggacagggaggtgagagctggaatagtcattctgaa

SEQ ID NO: 860567 - DNA, 120 bp, Artificial Sequence
  ENSG00000228140_28 (sequence is synthesized)
cctgctctgcctgagggctggggacagattgggtgttttctgtgtcccctccagagcatccggtgacccagttttaggtctcaaggtcactgccaagaaagagaagctgctaaagtgaca

SEQ ID NO: 860568 - DNA, 120 bp, Artificial Sequence
  ENSG00000228140_29 (sequence is synthesized)
cctctgtgcacccacatgacttaacacaaaagttaacaggagctcttcaaaaacaagcctctcgagtgtctgtctcctgttttccctgaggacagcatcagtggcatcagataggggttg

SEQ ID NO: 860569 - DNA, 120 bp, Artificial Sequence
  ENSG00000228140_30 (sequence is synthesized)
gggctgggtgacctgctggtcctcagccatcactgtggcccagaggtcatttaagcagctctctgcttagcagacaggcagagggaatagatggaaggtacaggtaaacactgcatgtgg

SEQ ID NO: 860570 - DNA, 120 bp, Artificial Sequence
  ENSG00000228140_31 (sequence is synthesized)
ccaccgcgaggataccccggagcctgggaaacagacagggacgtcgtaaaaccaacacataatggaccagtgcagagacaggcaaaaccagtcagaagaaataggatggtgcctagccca

SEQ ID NO: 860571 - DNA, 120 bp, Artificial Sequence
  ENSG00000228140_32 (sequence is synthesized)
ggcaaaaccagtcagaagaaataggatggtgcctagcccagggacacctgacttaaggtatttttgtttgtttgttttgttttttgagacaggggtctctctctgtcacccaggctggag

SEQ ID NO: 860572 - DNA, 120 bp, Artificial Sequence
  ENSG00000228140_33 (sequence is synthesized)
cttaagcgatcctcccacctcagcctccttagtagtagctgggactacaggtgtgcaccaacacatccagttcatttttgtatttttttgtagaggtggagtttcgccatgttgctcagg

SEQ ID NO: 860573 - DNA, 81 bp, Artificial Sequence
  ENSG00000228140_34 (sequence is synthesized)
acacctcgttgacctaaggtattaactaaagaaagcaggtgattctcaggggggctatgaaagcagcatgcctaagggaca

SEQ ID NO: 860574 - DNA, 120 bp, Artificial Sequence
  ENSG00000228140_35 (sequence is synthesized)
attctcaggggggctatgaaagcagcatgcctaagggacaggaacgtaccatgaaggtgttgtcttttgaggctcagtccaggagaagcaggtcttttagacccaatgacaacgctccct

SEQ ID NO: 860575 - DNA, 120 bp, Artificial Sequence
  ENSG00000228140_36 (sequence is synthesized)
agtgtgcaggtgcgtctctctgatgacaaaaggcagtgtgattgtgatattttatatatatatagtttttgttattgttgttttggggacaggtctcactctgtcacccagactggagtg

SEQ ID NO: 860576 - DNA, 83 bp, Artificial Sequence
  ENSG00000228140_37 (sequence is synthesized)
gtttaactacaggcatgcaccacctggctaatttttcaaatttttttatggagactgggtctcattatgttgcccaggctggt

SEQ ID NO: 860577 - DNA, 120 bp, Artificial Sequence
  ENSG00000228140_38 (sequence is synthesized)
gcccaggctggtctcaaattcctgggtttaggcaatcctcctgcctcggcctccctcaatactgaggttacaggcgtgagccactgcaccaagcctatattttgttttttgttcacggtt

SEQ ID NO: 860578 - DNA, 120 bp, Artificial Sequence
  ENSG00000228140_39 (sequence is synthesized)
gcctatattttgttttttgttcacggttcctggcttataactcccatggcccttgttacagtaaacacgatctccctccctgacattcttctaccctcctttcacctgcccacagcagga

SEQ ID NO: 860579 - DNA, 120 bp, Artificial Sequence
  ENSG00000287033_0 (sequence is synthesized)
gggagccttaggcaagagctgctggactggagggagggaggggaggggaggggaggggcgcggggactcaagccacggtttttgtgtccgcggctgcacccctctcgaagcgttttcacg

SEQ ID NO: 860580 - DNA, 120 bp, Artificial Sequence
  ENSG00000287033_1 (sequence is synthesized)
cacatgtgagaaacctcacaccctggggccgatttctttagtagattggcgcccaaatggcaaagatttccagggatttgtttgggattccatatttttgtagatttgccgagattggat

SEQ ID NO: 860581 - DNA, 120 bp, Artificial Sequence
  ENSG00000287033_2 (sequence is synthesized)
tagtacaatattgagaattcccgtccagcaatgtggctatttttttaaattaattcagttctccctttgtttttcagggataacatcactattataaaacctacgattggtgctcaaggt

SEQ ID NO: 860582 - DNA, 120 bp, Artificial Sequence
  ENSG00000287033_3 (sequence is synthesized)
aaacctacgattggtgctcaaggtattttcagacccctccctggatggatcagctgctcccacccagactgatggtcttgtggcttccactcaggaactgactcagcacaagaggacagc

SEQ ID NO: 860583 - DNA, 120 bp, Artificial Sequence
  ENSG00000287033_4 (sequence is synthesized)
cagtcagcactccccactacctgccccccatccatgagattatccttaaaaaccccagtctccgaattttcagggagactgatctgagcaataataaaacggcagtctcctgtacaacca

SEQ ID NO: 860584 - DNA, 120 bp, Artificial Sequence
  ENSG00000225127_0 (sequence is synthesized)
gggctgtcaaaacacgcggcggcgtgttcagtcccaataactcgcgtgatgattaatgagcagcttgataatttaatatcgcgtgtgattaaattataaggcgtgggggaggggagctct

SEQ ID NO: 860585 - DNA, 120 bp, Artificial Sequence
  ENSG00000225127_1 (sequence is synthesized)
gcgccacctcggcagccccgccgacgccgaccagctaaccggactgggctgcgcgcggagccccctcttcccgtgcacagtgcggggcgaggcttggcgagcggtgggtctgcgccttcc

SEQ ID NO: 860586 - DNA, 120 bp, Artificial Sequence
  ENSG00000225127_2 (sequence is synthesized)
caagaagagactggggcagcatgaatgtgctggaagattagaggctgctgatgctgaaggaaggagaaacgaggaggaagtgtccctgtggacaagtcatctcccttcatttaagccagg

SEQ ID NO: 860587 - DNA, 120 bp, Artificial Sequence
  ENSG00000225127_3 (sequence is synthesized)
ccagtagtccgggagacattctgaatgatgcattatcctaggcaccagaaagtatctaacattctcatggacagcagggaaaaatgagcacatgagacaggggaagattccagcacctgt

SEQ ID NO: 860588 - DNA, 120 bp, Artificial Sequence
  ENSG00000225127_4 (sequence is synthesized)
gaacatgtttgtgcaggtttccagtcagtacatggatatccctcaagcctttgaatccagtctcctgtgttgtgattggaccgtttgtcattaggtttccagtggcagagtaatgctgtg

SEQ ID NO: 860589 - DNA, 120 bp, Artificial Sequence
  ENSG00000225127_5 (sequence is synthesized)
ggatgagtataagagccaaagattgacaagacttcctcagatgctcctactgaccagtgggggcacttctacagctccccgaatatgttctccctgcaacccccaccactttttaattaa

SEQ ID NO: 860590 - DNA, 120 bp, Artificial Sequence
  ENSG00000225127_6 (sequence is synthesized)
atggccagaactgcctttttgtatcaaaacttattttagtctatcaatcaaaggcttctatagcccacctcatggcaaaggatatcagagaggtaaaagataattgttttgacatattta

SEQ ID NO: 860591 - DNA, 120 bp, Artificial Sequence
  ENSG00000225127_7 (sequence is synthesized)
ttatcacaactagcgactctttctgcattcacattggctggtatgcagaaaagggtgctttacaggattcttggaaatgtgtagtggatgctggctctaggggaggcagaatagagtgtg

SEQ ID NO: 860592 - DNA, 120 bp, Artificial Sequence
  ENSG00000225127_8 (sequence is synthesized)
ggttctgccatgggtcacatccgggttttaattctgcctctgccacatgaccttgagcacactggaaaaccctattagatgtgcaagaaggcttccccatctgtaaaggtgggtgactta

SEQ ID NO: 860593 - DNA, 120 bp, Artificial Sequence
  ENSG00000225127_9 (sequence is synthesized)
gcaactttagcaatgcttaagtcacccggttgttgtgagtaatacataagttaatgtatgctaactttctagaaagtttcctggcacaaagttgtatttaataaatgatttttaaaacaa

SEQ ID NO: 860594 - DNA, 120 bp, Artificial Sequence
  ENSG00000225127_10 (sequence is synthesized)
tgctgctccccttaaagtttggattattttactaaagaagaagagaacaggatcttgtgtcttctaccagtatccatgagattgtggcaggctaaaatcacagactcttcagagttttca

SEQ ID NO: 860595 - DNA, 120 bp, Artificial Sequence
  ENSG00000225127_11 (sequence is synthesized)
taatgataaagtaaatattgcaaagtacacatacaataagtgtacaattgatgaatcctacaaagtgaactcactcatgtaaccagcaccagatgaagaaaaaaacatcagcagcatcac

SEQ ID NO: 860596 - DNA, 120 bp, Artificial Sequence
  ENSG00000225127_12 (sequence is synthesized)
agaagccccccaaatgtccccttcagtcaatagcctcccaaagataaccacactcctatctagcagtgtgggttaatttttcctgtttttgaactttgcatatattaaatcatacaacat

SEQ ID NO: 860597 - DNA, 120 bp, Artificial Sequence
  ENSG00000225127_13 (sequence is synthesized)
actaaagaagaagagaacaggtactgtgtaattaattggcaggaggagtttgctgccataaacacttgatgtgtgaatccacgctagttccctagcttctaagcctcagtttactcatct

SEQ ID NO: 860598 - DNA, 120 bp, Artificial Sequence
  ENSG00000225127_14 (sequence is synthesized)
gtcacctgggaaaaaatatttgctcgttcctcactattatatcaggaatgaattgtgaagataaaatgaaatagttcacgtaaagtgcccattatagttctgggcacataaatgttaaga

SEQ ID NO: 860599 - DNA, 120 bp, Artificial Sequence
  ENSG00000225127_15 (sequence is synthesized)
aatggtaatttaagaattaaggcatgaaaatatgttcagctttactagagactgggggaatgcaaactaaaatgccaacaagatgtaatttttctttcctttccaaatgacaaaaattaa

SEQ ID NO: 860600 - DNA, 120 bp, Artificial Sequence
  ENSG00000225127_16 (sequence is synthesized)
ggagctggcggccgcggactgcgtccctggggacactggaggggactccagggacagcgtgggtgggcctttcccccgcacgcgcctctgtcactctctttccgggccagagccggggca

SEQ ID NO: 860601 - DNA, 120 bp, Artificial Sequence
  ENSG00000225128_0 (sequence is synthesized)
caggatgttctgctctgattggcagggagagtttgaaggtgggttggcagagactgtgaccgcaactgactgcgttctgcagaattatggtaatgaaattggaagccaactttcgtgaag

SEQ ID NO: 860602 - DNA, 120 bp, Artificial Sequence
  ENSG00000225128_1 (sequence is synthesized)
cagaaagcctcaagtttccaggtgctgtgctcagtccaggaatacaatgatgaatacgatcaaggccctttcagagctgacacacactatacataatgcatcaaaaattgcgttctcgct

SEQ ID NO: 860603 - DNA, 120 bp, Artificial Sequence
  ENSG00000225128_2 (sequence is synthesized)
tctgtttatttggttttatctgcaagaatatagatagcatctgctttgatataaaacttttatgtgtcttatgtagttgatttgtaaatgtcctatctataaatataaaacaataaatta

SEQ ID NO: 860604 - DNA, 120 bp, Artificial Sequence
  ENSG00000225128_3 (sequence is synthesized)
tgtcctatctataaatataaaacaataaattactagttacagttaacttaggaaaacttttaatcatgtcctacattttacaccttgtaatttctaccaaatgtttgtatttttatgtct

SEQ ID NO: 860605 - DNA, 120 bp, Artificial Sequence
  ENSG00000225128_4 (sequence is synthesized)
gtgaatcaggaccagtgcaataaatcaccctcaatacttcctgtgaatggcaactgctgaagggaagcttctgcctctcatcatacactgcctcaggggggaacaaaatagatcattaca

SEQ ID NO: 860606 - DNA, 120 bp, Artificial Sequence
  ENSG00000225128_5 (sequence is synthesized)
atggaggccaaagagtgcttgaatgtctctgccgaaggctttcaataaatatttgttgaaaaagaaaggaagaaagaaaatgaagaaggaacgaaggaggaaaggaaagaaggaaagaag

SEQ ID NO: 860607 - DNA, 120 bp, Artificial Sequence
  ENSG00000226471_0 (sequence is synthesized)
ggcgtggcagcggcaatccctggccaaaggtacttggggtcattttccgcggggggttacgtgcgggagcgtgtcctccacaaacggattttccccccttaagcggacttatttccatcc

SEQ ID NO: 860608 - DNA, 120 bp, Artificial Sequence
  ENSG00000226471_1 (sequence is synthesized)
ggagtgacagaatttaattccaaaccgagagctttccagactgacgaatttttaccgggactaacagagaattacctcagcctgacaacattttatctcgtgcgccacttcgggatccga

SEQ ID NO: 860609 - DNA, 81 bp, Artificial Sequence
  ENSG00000226471_2 (sequence is synthesized)
ccgagtggagccgaaagtcgagatagagcgcagttgggccttgggttcgaaaagactggaggcctgggcgacagagcgaga

SEQ ID NO: 860610 - DNA, 120 bp, Artificial Sequence
  ENSG00000226471_3 (sequence is synthesized)
aattctgcggaatagaagtctttaagaaatgagatcgtgccctttaaaactaagtttaacaatagtgagggcttaataaacgataggtgttatctctgggttggaggggaataccttcaa

SEQ ID NO: 860611 - DNA, 120 bp, Artificial Sequence
  ENSG00000226471_4 (sequence is synthesized)
gtttcaggaccgtggctatggagtccggcgtggcagcggcaatccctggccaaagtgtgccttcagccaaaagcagaactggaaacatcctaagtgggccggtaacgaggctagctctgt

SEQ ID NO: 860612 - DNA, 120 bp, Artificial Sequence
  ENSG00000226471_5 (sequence is synthesized)
cgactagttcaagacccctgagcgctttgggcctgaggttcctcagcttccaagtgaaaggcttcgacttggcattctaagagacaatctctgtgaccatcagtttcctcatctgtaaaa

SEQ ID NO: 860613 - DNA, 120 bp, Artificial Sequence
  ENSG00000226471_6 (sequence is synthesized)
aactttgaaggttttattctgggcatatatatgtttggaggtgtgtgtatgtttggggaacctttgaatttggaagtaccaagagacaagaacttgctgtgttgcccaggctggtcttga

SEQ ID NO: 860614 - DNA, 120 bp, Artificial Sequence
  ENSG00000226471_7 (sequence is synthesized)
aagaagatcctcccacctcgacctctcaaagtgttggtattacagacgtgagccactgggccccactgtgttctgttcttattgcccatgacaattaaagttagctctatctcatctcca

SEQ ID NO: 860615 - DNA, 120 bp, Artificial Sequence
  ENSG00000226471_8 (sequence is synthesized)
gaaagagcttcaggtctctgagcttgaccagtgtttcagctctcccttggagtcccgggaaacgtatctcttgggatcaggagctgggatggaacccagggctcctgagatgggacaaag

SEQ ID NO: 860616 - DNA, 120 bp, Artificial Sequence
  ENSG00000226471_9 (sequence is synthesized)
aagagcctgcttcccactccagaagccaaaaactccagataccagcttgcccctgcccccaggcagctaggctcagccacccaccacatcactatgaagtaagtcagacaatacctactt

SEQ ID NO: 860617 - DNA, 120 bp, Artificial Sequence
  ENSG00000226471_10 (sequence is synthesized)
agaagtccgagaaacccccgtaaatatgcctgtccactttttttaaagcaaattacaaaatgtgaaattccccagaaatgcacagcaataccttctctaacaatgtgccttcagccaaaa

SEQ ID NO: 860618 - DNA, 120 bp, Artificial Sequence
  ENSG00000286591_0 (sequence is synthesized)
tttagaatcacagtttacctcgcttcatactgatctgtgctctggaggacgtgcagtttctgttacatgtgatccagggggctgcgtgtgttggattaaccgggctcattacgtcttaca

SEQ ID NO: 860619 - DNA, 120 bp, Artificial Sequence
  ENSG00000286591_1 (sequence is synthesized)
aattgcttgtcaggagaaggcagctcggggcaggttgaaagactgttatcagcagcactcaacaaacatcagcgaacggacactctcttcttcatcataaccaatttgtatttatgaaag

SEQ ID NO: 860620 - DNA, 120 bp, Artificial Sequence
  ENSG00000286591_2 (sequence is synthesized)
atcccttggtgctctttagtgggctgcagtgagaagatgtgatttggaactttgagaagtttgtggtcaagaaggtgacctgcagatattcagtcaaaactaaacaaccacagccacact

SEQ ID NO: 860621 - DNA, 120 bp, Artificial Sequence
  ENSG00000286591_3 (sequence is synthesized)
tctctgcgttcctgcttcatccactcattgtgcccagggctccccagcaatctctccgctctttagtcttttgaatgcagtgaaggtgaccttctggatttctgagcctgggcctggcaa

SEQ ID NO: 860622 - DNA, 120 bp, Artificial Sequence
  ENSG00000286591_4 (sequence is synthesized)
cttctgcttcacttcttgggagccagctgctatgtaaagaagactgagcaagacagctgaaagatatgtagagagagaagccaagacagtgcccagctatcccagtcacacccacagact

SEQ ID NO: 860623 - DNA, 120 bp, Artificial Sequence
  ENSG00000286591_5 (sequence is synthesized)
accacatgtatgagtgaagccatcttggactttccagctgagctcccagctaaaggcagctgcaagggtgatcccagctgatgccatgtgaaacagaagaaccatccacctgagcccagc

SEQ ID NO: 860624 - DNA, 120 bp, Artificial Sequence
  ENSG00000286591_6 (sequence is synthesized)
caagtatctgaagctacatatgccagagtccccctgcttgggatggaggagagctgttttactcccaacacagtccagacaaggctaaccatatgatgctgatgctgctggtgtatggat

SEQ ID NO: 860625 - DNA, 120 bp, Artificial Sequence
  ENSG00000286591_7 (sequence is synthesized)
cttggatgaggctgcatctcctgggtggaggtgctgcagcccagtgagcatcagggaagactggagcactgattctctgacttcctgttgaaccactgataggatcaagcggacttgttg

SEQ ID NO: 860626 - DNA, 120 bp, Artificial Sequence
  ENSG00000286591_8 (sequence is synthesized)
gcttattggtgctcagagatattgaggatccccagtagatccttttcacagaattgtgtaaaacttcagaacatggggggagggcagccaagatggccaaataggaatagctccggtcta

SEQ ID NO: 860627 - DNA, 120 bp, Artificial Sequence
  ENSG00000286591_9 (sequence is synthesized)
gtccagacaaggctaaccatgacacagcaagaaggcagccgtctgcaagccagggagatggacctctccagatccagaacatgccggcatcctcatcacaaacttctaacctccagaacg

SEQ ID NO: 860628 - DNA, 120 bp, Artificial Sequence
  ENSG00000286591_10 (sequence is synthesized)
atcctcttcttcctatagaatacttctggtgacaaaagaacctatcactcttctctgggattgagatcttgtggtaatattctaattgtttttctaaacattttctaattatttttctaa

SEQ ID NO: 860629 - DNA, 120 bp, Artificial Sequence
  ENSG00000286591_11 (sequence is synthesized)
atatttttatttcattatcactgtaacttttaaaaactgtttttattgtgtctctggaggaaaataattacacagtatacagtactgtaaatatgctgtgaagctccaattataactaaa

SEQ ID NO: 860630 - DNA, 120 bp, Artificial Sequence
  ENSG00000286591_12 (sequence is synthesized)
aagactgtatatatgtgtgtctgtgtgtctgtgcgtgtgtgtgtgtgtgtgtgtgtctgtgattaaaaagaattatgcctttcatggattgtcttcaacaattactctgaagcttttttc

SEQ ID NO: 860631 - DNA, 120 bp, Artificial Sequence
  ENSG00000286591_13 (sequence is synthesized)
accagttagtttttacaattcagttttgtatcatgctacattttccagtataaaatcagtttataaaaaacttattttacaatgaacactcatatgcctactgcctagattctgcttcta

SEQ ID NO: 860632 - DNA, 120 bp, Artificial Sequence
  ENSG00000286591_14 (sequence is synthesized)
atgttttactctacttgtctttaacacatatctattcagtttcttttactgatctcatcctttaatccatcttaacttttgatgcattccaaaataaactgcagacatcagaacacttcc

SEQ ID NO: 860633 - DNA, 120 bp, Artificial Sequence
  ENSG00000286592_0 (sequence is synthesized)
gaagagataatctgaaacaacagtatatgactcaaactctcctcttctcctcctcccataagcacaattccctgaaaggcttcttctaagcctggtatcctgggagtggcagtgttttca

SEQ ID NO: 860634 - DNA, 120 bp, Artificial Sequence
  ENSG00000286592_1 (sequence is synthesized)
gcgtggcagacagagcagtcaggaagctgggagcccaaacagcgtgagacaaagccacaaaacagaggccgcgcatcagtcgaaagtgctcccggtgcctgtggtccatagagtggagtg

SEQ ID NO: 860635 - DNA, 120 bp, Artificial Sequence
  ENSG00000286592_2 (sequence is synthesized)
agtctctaagcaaatctggagggactctgggagctgaagattcagaatatctccacttattcttgccatagcctttgctgctcaactgttgggtgccatgatgcttatcaagacttccac

SEQ ID NO: 860636 - DNA, 120 bp, Artificial Sequence
  ENSG00000286592_3 (sequence is synthesized)
ctgggaccacccatcattctgccctttcgaattctgagctgacatcacctctgggtatatcaatgaaccacacagactcagccaacagaaaaccatggagaagagatcttgttatcatta

SEQ ID NO: 860637 - DNA, 120 bp, Artificial Sequence
  ENSG00000286592_4 (sequence is synthesized)
ctgaaattttgattttaaatggaaagtttgttttcagccaagaaaaagctggtgagaaagaagcaaatgaaccaagtatttgtttatgtacttcacattacaaggctggttaaatgattt

SEQ ID NO: 860638 - DNA, 120 bp, Artificial Sequence
  ENSG00000286592_5 (sequence is synthesized)
tattcattagtaattagtctattcaacagcactgtgaagtaggtattattgctctcattgtttatattaatcagagtgacactaggaatactgctaataatggtaacttgcatttcttgg

SEQ ID NO: 860639 - DNA, 120 bp, Artificial Sequence
  ENSG00000286592_6 (sequence is synthesized)
gcattttcccggtgctaggatctgtgaacaccaaggtaaatttcactcagatttgattttcaagtacagatgaggaaattaatgctcagtaagtccatgtgacttgctattgtcagacag

SEQ ID NO: 860640 - DNA, 120 bp, Artificial Sequence
  ENSG00000286592_7 (sequence is synthesized)
cctgggcttggccatctgattaaaaaatcagtgggctttgcataatactaagctgctataggtcatggggctcagattggagaagaaatatgaaatatttccaaatgtgaacctgaaaga

SEQ ID NO: 860641 - DNA, 120 bp, Artificial Sequence
  ENSG00000286592_8 (sequence is synthesized)
gccagttcttcaaaatgaatcccaagagcctaactgagcctaaatttaaaatagtcaagcagtcatttgctaattagaggtcacacatatcttttagttcccagaaaactcattcctcgg

SEQ ID NO: 860642 - DNA, 120 bp, Artificial Sequence
  ENSG00000286592_9 (sequence is synthesized)
gtttaaggttgggaccttcagaactcccaaatgtctaatttgggaactaaccaatcagagctcacctgccttggccaatcagggatcaactatatcaaccaattagaactaagcaagttt

SEQ ID NO: 860643 - DNA, 120 bp, Artificial Sequence
  ENSG00000286592_10 (sequence is synthesized)
gaatgcttcatttgcataaatgaacctgattgggaacctgggtgtgaattttctctataaaagcaaaactctccctttgttctctggatggcacctttcctttacattgaaggttgcatc

SEQ ID NO: 860644 - DNA, 120 bp, Artificial Sequence
  ENSG00000286592_11 (sequence is synthesized)
caaagctaggaagtggtaagcttgggagttaacctagactggtttactctcatattgcttatgtggtcagattcaccaaattggattttgtttcttcagatttttcttttgcttttacca

SEQ ID NO: 860645 - DNA, 120 bp, Artificial Sequence
  ENSG00000286592_12 (sequence is synthesized)
aagttacactgcagtaaagtaactgcttccctttttctcagactaaactttttacagccccaatatttatttattggtgcttccaacacaccctattatattctgcaaatttatattctg

SEQ ID NO: 860646 - DNA, 120 bp, Artificial Sequence
  ENSG00000286592_13 (sequence is synthesized)
caaatcactatttggtggatatttacaaattctctacaaatggcttgtatgtgaagacctcagtcatgacctcagcctggtgggcaccagttccactttctcagagcagtggatttgggg

SEQ ID NO: 860647 - DNA, 120 bp, Artificial Sequence
  ENSG00000286592_14 (sequence is synthesized)
gccagtgtggcctctgtttgcatctgagggagggtggcctcgagacagatacctggggtgagagttactgctgtggtttcagtccatttcttggaagatgtcctggcttctccaactggt

SEQ ID NO: 860648 - DNA, 120 bp, Artificial Sequence
  ENSG00000286592_15 (sequence is synthesized)
ggactccttgtccttccctaacaacgtgtctctaatgtttgtgtgactctgggtcatagttccttctgtttcatgtaccatgaatgctgtttcttgactctttgcatgtaaaaactcact

SEQ ID NO: 860649 - DNA, 120 bp, Artificial Sequence
  ENSG00000286592_16 (sequence is synthesized)
caaagcctagctcaaatgttacatttattttctgggtttttatagtcctttgactaactcttcacctttcttcatgtgggcacagtttttctgaagtatacagttagttgaggagtgttt

SEQ ID NO: 860650 - DNA, 120 bp, Artificial Sequence
  ENSG00000286592_17 (sequence is synthesized)
gtcagtctctcaacttcaaatctctgctactagctatgcaatactgagaaggccacttaatccttccatgcctatgtttctgtgttgataattttggagatgatatttacttcatggcta

SEQ ID NO: 860651 - DNA, 120 bp, Artificial Sequence
  ENSG00000286592_18 (sequence is synthesized)
agaatgttatgcagcaatgttggttgtgaaagtgcttggcagattagaaggtgtggtattcactgctgggtggctgatccaacctttattcccaattctttcctccctggcttcctttta

SEQ ID NO: 860652 - DNA, 120 bp, Artificial Sequence
  ENSG00000286592_19 (sequence is synthesized)
ctctataggctagaaatgctaaatgctcactctccagcttcccttgcagctaaggctggctatggaacctaggaagaaccaaaggagcacacacggaggtcctctgggaggctctgcaca

SEQ ID NO: 860653 - DNA, 120 bp, Artificial Sequence
  ENSG00000286592_20 (sequence is synthesized)
gtgcttgaagtgaaagcagttatatgatagcaatgcaacaagttaacacaaaaacaatgatctctagcctttttgtcatgtgatataactaatgtctttaagccactattatttgtgtat

SEQ ID NO: 860654 - DNA, 120 bp, Artificial Sequence
  ENSG00000286592_21 (sequence is synthesized)
tccattacttgtggttaaaaagcattcctgatagtgtagattcccaataagtgtttactgaatatgaatctgtattgcattgtgagtcttgggggcaaaattcaataaaattatcatctc

SEQ ID NO: 860655 - DNA, 120 bp, Artificial Sequence
  ENSG00000286592_22 (sequence is synthesized)
gggcaagacaatatgtctcctgctttcatggaatatatgttctccttcccagtattgcatcttccacagcatgtggacaggaatcagatgggcatagggcatctggtccatgatcatcct

SEQ ID NO: 860656 - DNA, 120 bp, Artificial Sequence
  ENSG00000286592_23 (sequence is synthesized)
ttgttcgtgctgatctctgatgaaatatctgaagaagaaggagaacaccatgtgaagctggaggcagagattggagtgacacgcctacaaactgaggggcaccaaagaccaccagcaacc

SEQ ID NO: 860657 - DNA, 120 bp, Artificial Sequence
  ENSG00000286592_24 (sequence is synthesized)
tgattttggacttccagcctctcaaattgtgagcaaataaatttttgttgttttaagctacccagttgtggtacactgttatggtagcctgatatagtttggctgtgtccccatgcaaat

SEQ ID NO: 860658 - DNA, 120 bp, Artificial Sequence
  ENSG00000286592_25 (sequence is synthesized)
tgtagctcccataattcccacatgttatgagagggatccggtgggaggtaattgaagcatggagaaaggtctttcccatgctgttctcatgatagcgaacacatctcatgagatctgatg

SEQ ID NO: 860659 - DNA, 85 bp, Artificial Sequence
  ENSG00000286592_26 (sequence is synthesized)
gaacacatccctgtacatgctccctttgcctgccaccatgtgagacgtgactttgttcctccttcaccttctgccatgattgtga

SEQ ID NO: 860660 - DNA, 120 bp, Artificial Sequence
  ENSG00000283518_0 (sequence is synthesized)
atatatgtaacgtttcccccccatcgattgctttgcatcgcttgtccctcaaactattttataagcatccgatgttttggctgcagggacgatttccagattagtctcgattacatttat

SEQ ID NO: 860661 - DNA, 120 bp, Artificial Sequence
  ENSG00000283518_1 (sequence is synthesized)
ttctaaaggatctcggtgtgttctgagcacacgcctgagagcggagccgggtagagctgagcagagcgcggcgagctaagttttctcacgggctcctgtccccctgaagcccccttggcg

SEQ ID NO: 860662 - DNA, 120 bp, Artificial Sequence
  ENSG00000283518_2 (sequence is synthesized)
cctgccctgagcgttcgcaggcaaccgaggcagcgttcttcgggatgtgccaagcgccgcccgcccgctcgctcctccagctcggccccttcccctgcaacagaccacacggttcaagac

SEQ ID NO: 860663 - DNA, 120 bp, Artificial Sequence
  ENSG00000283518_3 (sequence is synthesized)
gacgatgtgacagagagaaaacaagccgctctcttgtctgtgacccgcgaggcgaccgcggcgagcgggcaccagctccccactccgattaggcaattagctgattgctgcctgcccgca

SEQ ID NO: 860664 - DNA, 120 bp, Artificial Sequence
  ENSG00000283518_4 (sequence is synthesized)
gcccgagcgagcggtgcgcggggatctcgctgcctgcccacctctcctgcaaacagaggcacgttctccgactttgatagctccctgggttcctgtgaaaaacaaccacagcgtttccag

SEQ ID NO: 860665 - DNA, 120 bp, Artificial Sequence
  ENSG00000283518_5 (sequence is synthesized)
agtgtgtttctcaaataccagcgtcaggggatcgcagaattacagcagcaaatgttacgaggttgacactgctgttcaggtgaaggagagttcagagtctcagagagcagcagcagcttg

SEQ ID NO: 860666 - DNA, 120 bp, Artificial Sequence
  ENSG00000283518_6 (sequence is synthesized)
tgcttctgggaaaatggaaggatgactcccaggcagccgatcctgccactccgtaaaatggaagaaccttggctccccgtgtgaattctctttgtgatttggaagacaaatacctctgct

SEQ ID NO: 860667 - DNA, 120 bp, Artificial Sequence
  ENSG00000283518_7 (sequence is synthesized)
gagttgtctatgaacagatgctaagataagagtcgatggtgccgtgaaccaaggtactgacatagcagctggagagaagtgaatggatttcaatgatgtaagggagatgaactgacaaca

SEQ ID NO: 860668 - DNA, 120 bp, Artificial Sequence
  ENSG00000283518_8 (sequence is synthesized)
agaatgacagaatgactgtaggatcttgatttgcgccaagtgaatggatgctgctcacttagaagaagatttttgttttggaaaaattctttttagatgaagcagtagagacggagtttc

SEQ ID NO: 860669 - DNA, 60 bp, Artificial Sequence
  ENSG00000283518_9 (sequence is synthesized)
tggatggtatcccctcaagcattactggccttgttccactatgtcaaatgtatgcagcag

SEQ ID NO: 860670 - DNA, 120 bp, Artificial Sequence
  ENSG00000283518_10 (sequence is synthesized)
attactggccttgttccactatgtcaaatgtatgcagcagagaaaggggatacaccagcagctggagtggctgagcggaaggaaggacactagaacatattaatcccattttaagcaaca

SEQ ID NO: 860671 - DNA, 120 bp, Artificial Sequence
  ENSG00000283518_11 (sequence is synthesized)
ggcactgtgttaagtgatttcagatacaataccacatttaatcctcataacaagcttgcaaggagaacattgtcacgactgtattcatacatgaagaaactgaggctcggagacattaag

SEQ ID NO: 860672 - DNA, 120 bp, Artificial Sequence
  ENSG00000283518_12 (sequence is synthesized)
atttgagccaggatctgtgttcttccaaagcccatgggtcagaaatgccagctgattctggttccagctagaactaccagacatcttaggccaggtctcaggaatccttgaggcaaaaat

SEQ ID NO: 860673 - DNA, 120 bp, Artificial Sequence
  ENSG00000283518_13 (sequence is synthesized)
ctgcataacattgaggccaaagatgagcctaatggagttggacctacccatttagtggtagacttctttattggcaaaatattctgtcaagatctcccctgatggacaagtcaaaattct

SEQ ID NO: 860674 - DNA, 120 bp, Artificial Sequence
  ENSG00000283518_14 (sequence is synthesized)
ttccaacataacaaagacctattgtcatcatgggaatgctgcgatcttgctctttcagctcaaaaatctactttctggaaccaggtcatggacttgcaggactttccatctacaattttg

SEQ ID NO: 860675 - DNA, 120 bp, Artificial Sequence
  ENSG00000283518_15 (sequence is synthesized)
tttagggaattgagatcagatgaacagggccgaggaagctgtaggcagacagaattagtgataattctttcccacaatactgcactccattcttctaacatacctcaagtgcatgccctc

SEQ ID NO: 860676 - DNA, 120 bp, Artificial Sequence
  ENSG00000283518_16 (sequence is synthesized)
ggccaaaacagatctggcaagaggaagattaacaatgatgacaaaaatagttcctgacttgataaaacaaatatcaactgggacaagaacaagaactgcccataaaccaaccttgggatc

SEQ ID NO: 860677 - DNA, 120 bp, Artificial Sequence
  ENSG00000286594_0 (sequence is synthesized)
ggacttcaggataattctgccaaacgaaagatgtcagatgaaaaagtctacacagtataatcccgtgtatccagaatcctacagcaaactcaccaacagtggcaggaagcagacctgcgc

SEQ ID NO: 860678 - DNA, 120 bp, Artificial Sequence
  ENSG00000286594_1 (sequence is synthesized)
ttgctgtagatgcaggacagctggaggaaaaaacagaagacaatggaaaagtcagagtaaagagaattcacttacgaaatgccaaccgtttaaaaatactccacaccgaacatgatgagc

SEQ ID NO: 860679 - DNA, 120 bp, Artificial Sequence
  ENSG00000286594_2 (sequence is synthesized)
cttttccattattaatgcctcagggagaaatcaaagtccgagccgcagctatccctgctattctcaaattaggagaaatcaccgtgtcctacttgacttcagggtgggtggcgggcgttc

SEQ ID NO: 860680 - DNA, 120 bp, Artificial Sequence
  ENSG00000286594_3 (sequence is synthesized)
ccgcggcagctgcagcctcgcagtgcctgcgtgagccgtgctccgctgcgccccgggcagctccgctccgacccacgcaccgcaggttgcttatatacttgtgcatgttagtttggactt

SEQ ID NO: 860681 - DNA, 120 bp, Artificial Sequence
  ENSG00000286594_4 (sequence is synthesized)
tgaggggtgcttgctttattttatgttaaggtgcagtttacaggcagtaaaatgcatccattgtaactttacagcacagtagagctcacacatatatgcgctcatgtgactgaccccctg

SEQ ID NO: 860682 - DNA, 120 bp, Artificial Sequence
  ENSG00000286594_5 (sequence is synthesized)
agcaaaatatggagcatttccatctcccaggaagtcccctcctgccccttcccaggcaacggttccccaccctacccctaccagacactcacagcctgatttctagcttggcgattcgtt

SEQ ID NO: 860683 - DNA, 120 bp, Artificial Sequence
  ENSG00000286594_6 (sequence is synthesized)
taaactggagtccctcggtgtgtcctgtgctatagaatctgactgttccactccatctgagctttgagacttggacagtgtttgtgcctaccacagtactctttccctttcccccgggtt

SEQ ID NO: 860684 - DNA, 120 bp, Artificial Sequence
  ENSG00000286594_7 (sequence is synthesized)
gtaccccaccccgtgcgtggaccctgatttgcgtggaccctgatttgcgtatccattctcctcttgctaaatgctggcactgtttccagttcggggtgtaatgcaccaggatcctgtgaa

SEQ ID NO: 860685 - DNA, 120 bp, Artificial Sequence
  ENSG00000286594_8 (sequence is synthesized)
gactcaagacttgttgtggacagatgcctccatctcttgggcacacacctagaaggagcattgctgggccatagggtggacatacgtttagctttattagaaattgtcaaaatgattttc

SEQ ID NO: 860686 - DNA, 120 bp, Artificial Sequence
  ENSG00000286594_9 (sequence is synthesized)
aaagtgattgtaccgttcacactcccacagcaacatacagaacttcctactgctccccgtcctcgccggctgacgcttggtattgtcagtctttttaatgttcgtcatcctggtgggggt

SEQ ID NO: 860687 - DNA, 120 bp, Artificial Sequence
  ENSG00000286594_10 (sequence is synthesized)
gtggtggtatctcactgtggtgttaatttgcattcctctgatgaatgctgattctgtgcacgtgttcaatgcttagaactgcccggataccctctcctgtgaagcacctgctcaaggcac

SEQ ID NO: 860688 - DNA, 76 bp, Artificial Sequence
  ENSG00000286594_11 (sequence is synthesized)
gaagcacctgctcaaggcactgtcaatgtttagggctgccctttagggctgcccggataccccctcctgtgaagca

SEQ ID NO: 860689 - DNA, 120 bp, Artificial Sequence
  ENSG00000286595_0 (sequence is synthesized)
aggttaaaaggtcaaaactagtacttgtccttcaagtcgcccacttggccctcttccagatcatatgaagtgtgcgtatggtacctattggagctatcttgagcccatataaagagtaag

SEQ ID NO: 860690 - DNA, 120 bp, Artificial Sequence
  ENSG00000286595_1 (sequence is synthesized)
ctttagaatgacggcgactcacagagaaagctaagaatcatcagaaaatgaaaatcgatacggcactgtgtgctaatgggctgcccactccttcctgaaactacaaacttggaggtcatg

SEQ ID NO: 860691 - DNA, 120 bp, Artificial Sequence
  ENSG00000286595_2 (sequence is synthesized)
tgttgagatggcaagaacaagatggaggcaacttggatcctagaggaacaagattgaggagaatgtgcccctttcctcctaccagcccatgtttaattgggcataaggttttgatgttca

SEQ ID NO: 860692 - DNA, 120 bp, Artificial Sequence
  ENSG00000286595_3 (sequence is synthesized)
tcaaactgaagcatagccatccgtactttttaatggaatgaacaagctgtgctctctaaaaaccagaataactattaatatcatcatcagctatggaaatacagtggcagaatgtgttat

SEQ ID NO: 860693 - DNA, 120 bp, Artificial Sequence
  ENSG00000286595_4 (sequence is synthesized)
gtccctagcaacaatcctttttctcctcagaactcaccttgcttacatcatttctcaccttaagaaatcaattaattcgaagacttcctccacctatcccactctaagacttaagagtct

SEQ ID NO: 860694 - DNA, 120 bp, Artificial Sequence
  ENSG00000286595_5 (sequence is synthesized)
aagagataaacaatacaatttgttctctcattttctctacagagacctcctattcagaattgggtttgggctctgccttgcctcaggaagttaataaaattcacttttcatgtaatctga

SEQ ID NO: 860695 - DNA, 120 bp, Artificial Sequence
  ENSG00000286596_0 (sequence is synthesized)
agcagctcgtagcgctcgatgccgttgcggccgaagtcgcggtcggtggctgtgggcagcaggtaaagtgtgcccaccggccgattctcctccaccgtgagcgtgagcacgggcgacggg

SEQ ID NO: 860696 - DNA, 120 bp, Artificial Sequence
  ENSG00000286596_1 (sequence is synthesized)
aaggtgggcgtgttgtcgttgatgtcaagcacgatgacctgaccctcaaacaggtccacccagctctgcgagggcccgatcaccgacacctcgaagtccaggaagcactcgttctcgtcg

SEQ ID NO: 860697 - DNA, 120 bp, Artificial Sequence
  ENSG00000286596_2 (sequence is synthesized)
aagatcatctgacactggggcagcttctcgcggtcgatgcgccgctcgctcgtgctcagctcgccagtgaggttgtcgatcttcaggtactcggaaccggactccaggctgaaagtcacc

SEQ ID NO: 860698 - DNA, 120 bp, Artificial Sequence
  ENSG00000286596_3 (sequence is synthesized)
tcacccgatccggtcacgatgcccaggtctgaagccacgttgccgatgcggacgtcggcggggccctcctcggccagccggtaccggaggagctgcttggcggccgccaggctgagcgag

SEQ ID NO: 860699 - DNA, 120 bp, Artificial Sequence
  ENSG00000286596_4 (sequence is synthesized)
agcggcaggaggaggcagcagcccaagcaccagccgcgcgcccatcccgcggtccgcatcctcagcatcttctcctgctgctgctgctactgctccttctaaccacagccccctcggcgc

SEQ ID NO: 860700 - DNA, 120 bp, Artificial Sequence
  ENSG00000286596_5 (sequence is synthesized)
ccccctcctccggggccggccgcctgccctcccccgagtcctctcccctctcccggaaaggaaggagcgagagggaggggagggagggggcaaaagcggcgtggagagttggccgggaat

SEQ ID NO: 860701 - DNA, 120 bp, Artificial Sequence
  ENSG00000286596_6 (sequence is synthesized)
gggggtgggagggcagcgatagatgcttctttttttcctcctgcttcttccgaaagttattgtttcataattcatgcaatgggtgctaatcgcccgctcgcctgccgccgttcagtcgca

SEQ ID NO: 860702 - DNA, 120 bp, Artificial Sequence
  ENSG00000286596_7 (sequence is synthesized)
gtactcacagttcacgggacactgcgcgccgcgggttcggcgctcccccaacccagagtcatcccctcagcgggcggagaatccccggctctagtccccgctctgtcggaaggggccaga

SEQ ID NO: 860703 - DNA, 120 bp, Artificial Sequence
  ENSG00000286596_8 (sequence is synthesized)
accgctccggcagacgggcagtggggctgggaagaggtggggaatgagcctgcagcctcccccgcctgccagcccgctggtctttgctgctactcgagttgagtccaattcacgttccag

SEQ ID NO: 860704 - DNA, 120 bp, Artificial Sequence
  ENSG00000286596_9 (sequence is synthesized)
gcaccaggcgctggggccagcaacaagccagtctcaactccgactctgctcatgcagcgggggagccagtcaacagatcgagaatgaaaaatcccccggcacgtcgcttcgggcacggtg

SEQ ID NO: 860705 - DNA, 120 bp, Artificial Sequence
  ENSG00000286596_10 (sequence is synthesized)
caggggagactactcgcgtcacagagcggtcagtgtcagggtccccccggcgcgccaaagagaagcccgagccatcttcagagacgcccagagtcagtcccttctcaccccggagagcgc

SEQ ID NO: 860706 - DNA, 120 bp, Artificial Sequence
  ENSG00000286596_11 (sequence is synthesized)
gggtttctcttttttcttaacaactctgcgcaaggtcattagtcacgaagcagccgcctgaaaccgcagcagcctttcgcccacgggggcgaaggctgagcagtgcgcaccgtgcggtgc

SEQ ID NO: 860707 - DNA, 120 bp, Artificial Sequence
  ENSG00000286596_12 (sequence is synthesized)
ccaagtttgggttcgcagccgcagagtccgtgccttttctcacctgcattcggcccgcatgtcggagcagtgggatctgcagcgctgtgcgcgattcagggaggagattgcagcctctct

SEQ ID NO: 860708 - DNA, 120 bp, Artificial Sequence
  ENSG00000286596_13 (sequence is synthesized)
ctccccgctctctctcgatccctcccctccctccctccctttctctctcctccctcctctctctcctccctcctctcctttcccctttccccctctcccactcgctctcttgcacgctct

SEQ ID NO: 860709 - DNA, 120 bp, Artificial Sequence
  ENSG00000286596_14 (sequence is synthesized)
ctctccttcccaatgcagggaactcaagctgaacttgatccctttgcagttcaaagacgacgtcctcctccccccggaaagtgtctccggttcgcgatttaggatcttggttaggacatg

SEQ ID NO: 860710 - DNA, 120 bp, Artificial Sequence
  ENSG00000286596_15 (sequence is synthesized)
gttatcggggtcctggggaacctacgagcgcccagaaagccactctgttctgaaaaaccatgacgggctgcagtagtgaagagagaacatcaaactccagagagctggagaaagatcctt

SEQ ID NO: 860711 - DNA, 120 bp, Artificial Sequence
  ENSG00000286596_16 (sequence is synthesized)
ttttgggagctcagactttggatggttgcggggggcaggggcggcggtgggtggagggtgaaggatgtctgtctttgtttaaatgcttgacattcctgtcgtcgtgcttgcttgcggggg

SEQ ID NO: 860712 - DNA, 120 bp, Artificial Sequence
  ENSG00000286596_17 (sequence is synthesized)
tagaccgtgtgtgcgcgcctggggaataaacacatgttggaaacctcgatattattttctgagcagaaacctgcagcctttagtaactggcaaagtgtagcgtcacctatctggataaaa

SEQ ID NO: 860713 - DNA, 120 bp, Artificial Sequence
  ENSG00000286596_18 (sequence is synthesized)
gggaaataaactttaatggcaactttgtgtaccaaagtgtccccagctttcccatctctccttttgactttgtgtcccttgactgtccctatttcctgaagcaaggcttctccaattttc

SEQ ID NO: 860714 - DNA, 120 bp, Artificial Sequence
  ENSG00000226476_0 (sequence is synthesized)
ggcagtgcttgcaaaggcctgagtctgaggtacttctttatagcactgcaagaatggactaatacgctatgtgaagacaaaggggatgtctgcaagccaggacgagtgcgtctaccagaa

SEQ ID NO: 860715 - DNA, 120 bp, Artificial Sequence
  ENSG00000226476_1 (sequence is synthesized)
actgagttctgctggactttgatctaggacatccagcctccagaatggaatgtgccatatgtggagacctgcatggaaaggaactgaggatgctctctcactaaaagctagaaggaactg

SEQ ID NO: 860716 - DNA, 120 bp, Artificial Sequence
  ENSG00000226476_2 (sequence is synthesized)
aggccctcagtcaacagtctacaagacactgaatcttgccagcagccaagcagtgagcttgaaagcagatctatcatcagctgaaccttcagatgagaccgcagcctaagcagatacctt

SEQ ID NO: 860717 - DNA, 120 bp, Artificial Sequence
  ENSG00000226476_3 (sequence is synthesized)
ggttgcagccatgtgagacaacctgaaacagagggcacagctaagcctcagccaggttcatgaccctctgaggaaactgtgagaaagcaaatgtcattttaagctatttaattttggagg

SEQ ID NO: 860718 - DNA, 120 bp, Artificial Sequence
  ENSG00000226476_4 (sequence is synthesized)
tagtttattacacaacaataaataactattataattatcttgaggatttatttcctggggagaatacatggaattgcatatataggtcctcatatgcagaatactggtaccctagagatg

SEQ ID NO: 860719 - DNA, 120 bp, Artificial Sequence
  ENSG00000226476_5 (sequence is synthesized)
ttcaccccagagatgttttaggaacctgtgaatatgttacattaaatggcaaagttttcctggatggtttaagtttaagatggaaaagttttactggattatccagtgggtccaatctag

SEQ ID NO: 860720 - DNA, 120 bp, Artificial Sequence
  ENSG00000226476_6 (sequence is synthesized)
aaaactgctgttgctgactttaaagatggagagaggggaacccgagtcaaggaatgcaaatggcctctggaagctggaaaaagcaagaaatggattctcctttagagcctgtggaataaa

SEQ ID NO: 860721 - DNA, 120 bp, Artificial Sequence
  ENSG00000226476_7 (sequence is synthesized)
atgcagtcatgctgacaccttgattttacctcagtgagaccaatactggagtatgaccttcggagctgaataaaattatacgtacacatcttaatttcttgggatttgattacttcttct

SEQ ID NO: 860722 - DNA, 120 bp, Artificial Sequence
  ENSG00000226476_8 (sequence is synthesized)
gctttgaaattagaccaagtttagcctgcctttgctattttggcgtatctccaattcttcatgattttctcatagtgttgcctccatatgatgcaaaatatccaacctagccctgacatg

SEQ ID NO: 860723 - DNA, 120 bp, Artificial Sequence
  ENSG00000226476_9 (sequence is synthesized)
aaaacttaattgaaagtatccaacagtggcgcaaaggccacataaggacagtgagaaggcagccacctgcaagccaggaagaaaggtctcaccagataccaaccctgccagcatgttgat

SEQ ID NO: 860724 - DNA, 120 bp, Artificial Sequence
  ENSG00000226476_10 (sequence is synthesized)
cttggacttccagcctccaaaactggccttctgctcacatgggcttccgtgcacctgcttcaggagacagcaacacttgcgcccgcaccgcggcaggctcccatcacctggtggatatgc

SEQ ID NO: 860725 - DNA, 120 bp, Artificial Sequence
  ENSG00000226476_11 (sequence is synthesized)
cgcgccgagtctcatcacaccttagtgaaggaacacatggacccatatgttagcggatgtatttacatcgttttatacagaaaggggaagtatgtttcacaataaatgtttgcatacttt

SEQ ID NO: 860726 - DNA, 120 bp, Artificial Sequence
  ENSG00000226476_12 (sequence is synthesized)
tccgtgggcgtaggaccctcctagccaggtgcaagatataatctcgcggtgcgccgttttttaagccggtccgaaagcgcaatattcgggtgggagagacccgattttccagtgagatga

SEQ ID NO: 860727 - DNA, 81 bp, Artificial Sequence
  ENSG00000226476_13 (sequence is synthesized)
gctattcggccatcttggctcctctcctggaatgtgccatatgtggagacctgcatggaaaggaactgaggatgctctctc

SEQ ID NO: 860728 - DNA, 120 bp, Artificial Sequence
  ENSG00000226476_14 (sequence is synthesized)
atacagaaaggggaagaaaactgcatacctcagaaaggggttgctcctcactctgagtactagactaaagataaaaagactagataaaagtactagactaaagacagagctgacccatga

SEQ ID NO: 860729 - DNA, 88 bp, Artificial Sequence
  ENSG00000226476_15 (sequence is synthesized)
tagataaaagtactagactaaagacagagctgacccatgacagatggagtcttgctctgtcacacatgctagagtccagtggtatgac

SEQ ID NO: 860730 - DNA, 75 bp, Artificial Sequence
  ENSG00000226476_16 (sequence is synthesized)
caaatgattcttctgccttgacctccctggcagctgggactacaggcctgcaccaccacgcctggcaaatttttt

SEQ ID NO: 860731 - DNA, 120 bp, Artificial Sequence
  ENSG00000226476_17 (sequence is synthesized)
cttccaaagttctgggattataggagtgagccaccatgcccagcctgttcttaagtctcctagaacagggattctgaaacacaaaactcatctgtttacgcactgagagcatctaaagaa

SEQ ID NO: 860732 - DNA, 120 bp, Artificial Sequence
  ENSG00000226476_18 (sequence is synthesized)
tttgaatgaggagcaaagctttttcaaaggttggattaaactacaattgtcctctccaaagaatgttcagctatcctttatgtactctgttgcaagtatttcaagaaggaggtgagaata

SEQ ID NO: 860733 - DNA, 120 bp, Artificial Sequence
  ENSG00000226476_19 (sequence is synthesized)
tatgaggttcacgtagcagcaaaggaactacatggtagaagagggcaccttttttccaacatctctttatgctaatgttgtacatctgcaagatgcaagaagaggacaagagcctatttt

SEQ ID NO: 860734 - DNA, 120 bp, Artificial Sequence
  ENSG00000226476_20 (sequence is synthesized)
tgtagcattcttgagtcaagagcttccatgaaaagctttaagtagcaacaagcctgccattgaaaaagaaatatttggtttggaatttgagattgttaaaaatcattatagaatgcatgt

SEQ ID NO: 860735 - DNA, 120 bp, Artificial Sequence
  ENSG00000226476_21 (sequence is synthesized)
tctactgtgaaataaactgataaatgaatagtatgttggggcagcccctgaaaggtcatttacactacctagatgctttatagttaaggaaagtaggtccagagaggggaaatgatctga

SEQ ID NO: 860736 - DNA, 120 bp, Artificial Sequence
  ENSG00000226476_22 (sequence is synthesized)
ccatggtttcaaagttatttagtaagaaatagaatgaggagtagttctcctgacatttagataataggaccaccatagaaaggtggttttatgattccattaagatttggatcatttttt

SEQ ID NO: 860737 - DNA, 120 bp, Artificial Sequence
  ENSG00000226476_23 (sequence is synthesized)
tcaaggctttgaaagtgagtggtaaaatttctattttcattatctctggagcagtatactagagtataccagatatataaaaaagcctttcatctaaaaggtaaatgaacaaattccccc

SEQ ID NO: 860738 - DNA, 120 bp, Artificial Sequence
  ENSG00000226476_24 (sequence is synthesized)
caaaccaatgaataatatataaaatgaaacttcagaatacaccatcaaagtggcaagaaaataagaaatcttaagaggaataaaaaacttaaaaagttaaagcaagaatctaggaaatta

SEQ ID NO: 860739 - DNA, 120 bp, Artificial Sequence
  ENSG00000226476_25 (sequence is synthesized)
agctagtataattttaaggcaaaaatgaaagaaaattataaaggatggtatactatttatttatgctgatcactgaatagtctcaactctctgacttcttggcccatagtaagattgtac

SEQ ID NO: 860740 - DNA, 120 bp, Artificial Sequence
  ENSG00000226476_26 (sequence is synthesized)
tgcctggattcccatgtgaccaattctggccagtgtcttgtgagagaaactaatgtgtctctctggctttgggctaagcatttaattgtcagtgagatcctccagtgcttgttttctctc

SEQ ID NO: 860741 - DNA, 120 bp, Artificial Sequence
  ENSG00000226476_27 (sequence is synthesized)
tccacattttctggtatatcataccacgtgtgatatgatttggctgtgtcccaacccaaatatcatcttaaattcccacctgttgtgggagggatctgttggggggtaattgaatcatgg

SEQ ID NO: 860742 - DNA, 120 bp, Artificial Sequence
  ENSG00000226476_28 (sequence is synthesized)
gggcatgactttcctgtgctgttcttatgatagtgaataagtgtcataagatctgatggttttataagggggagtttctttgtacaagctctcttcccttgtctgccaccatgtgagatg

SEQ ID NO: 860743 - DNA, 120 bp, Artificial Sequence
  ENSG00000226476_29 (sequence is synthesized)
caagctctcttcccttgtctgccaccatgtgagatgtgccttttaccttctgccatgattgtaaggcctccccagccatgtgggacagtaagtcattaaatctctttcttttgtaaattg

SEQ ID NO: 860744 - DNA, 120 bp, Artificial Sequence
  ENSG00000226476_30 (sequence is synthesized)
gagctacaagatgagatttgggtgggtacacagagccaaaccatataaataatcttctcagtagatgtgaaataaatactattattatttccacttcatgaaaaaactgaagaagcgcaa

SEQ ID NO: 860745 - DNA, 120 bp, Artificial Sequence
  ENSG00000226476_31 (sequence is synthesized)
acttcatgaaaaaactgaagaagcgcaaaagctttaagtaatttgcttcaaggtcacaaagttactaaattacagaactagcattattgtcagtaagaaggaaaattacccctattgtaa

SEQ ID NO: 860746 - DNA, 120 bp, Artificial Sequence
  ENSG00000226476_32 (sequence is synthesized)
agtctaatatgcaatggcatgacatatgaagatactaatatatatgaggatatacctaaatttcagaatgacgacacaaaactaccaaataataatgattagagaagttatgaaaatgaa

SEQ ID NO: 860747 - DNA, 120 bp, Artificial Sequence
  ENSG00000226476_33 (sequence is synthesized)
atagaactaaaaccctcagcaaaaatagtatatagtttggaaaaggatggagattagatgttcaagtgttgtaagcttctcccagtgttcaaaagtagagcaaatatataaatttttatt

SEQ ID NO: 860748 - DNA, 120 bp, Artificial Sequence
  ENSG00000226476_34 (sequence is synthesized)
agagcaaatatataaatttttattttattttgttttatttcattttaagacagcatcacagtggtgcaatcatggattagtgcagcctcaacttcccaggctcaagcaatcctcctgcct

SEQ ID NO: 860749 - DNA, 120 bp, Artificial Sequence
  ENSG00000226476_35 (sequence is synthesized)
tttgtaaaatatttggcaaaatatttataagtggccactacaaagtcagctaaaaagtgtatactctccaactggagaagattagagaattaataatagagaaaagactgaatcaattta

SEQ ID NO: 860750 - DNA, 120 bp, Artificial Sequence
  ENSG00000226476_36 (sequence is synthesized)
aagggagacaagaacgtgggaaaaaatggaaaaagcaagacaaataaaaattaggtggtagaaagtagaattagtaatttccattgatgtaagtggacttactctttatttacaacacag

SEQ ID NO: 860751 - DNA, 120 bp, Artificial Sequence
  ENSG00000226476_37 (sequence is synthesized)
tgatgtaagtggacttactctttatttacaacacagaaattttgaatgagtaacttgatatcaaaattaaaaatagtggaagtaataagaaatacatattatttctattcatgttaaaat

SEQ ID NO: 860752 - DNA, 120 bp, Artificial Sequence
  ENSG00000226476_38 (sequence is synthesized)
taaaaatgtataatacattatgaatgtttagattctccaggactgcaaggtaggtttaatattaaaaaaccaattagtataaattaattttattagcatatgattacaaaagaaaaatgc

SEQ ID NO: 860753 - DNA, 120 bp, Artificial Sequence
  ENSG00000226476_39 (sequence is synthesized)
atgaccttctcaacgggtataaaagaagcattcactgacattcaatatccatgcttgataaaatttacggtaaactagaatcagaagtgatatttaataagtacatgttgaaatacatag

SEQ ID NO: 860754 - DNA, 120 bp, Artificial Sequence
  ENSG00000226476_40 (sequence is synthesized)
aagatgccatgtcctgaatgtttgtgtcttcccaaaattctatgttgaaaacatagtcacctgtatgattgtgtaagaaggtgggttcttttgagaggtgattaggtcatgagggtagaa

SEQ ID NO: 860755 - DNA, 120 bp, Artificial Sequence
  ENSG00000226476_41 (sequence is synthesized)
tcctcatggaaaagactagtgccattataaaagaggccccagagacctgcctttcccctttcaccatctgaagacacagttagaaggcatcttctatgacccagaaaattggtcttcatg

SEQ ID NO: 860756 - DNA, 120 bp, Artificial Sequence
  ENSG00000226476_42 (sequence is synthesized)
agacattgactctgctggcaccttgatcttggactctccagcctccagaactgggagaaataaatttctgttgtttacatgctacccagtatatagttttttgttatagtagcctgaatg

SEQ ID NO: 860757 - DNA, 120 bp, Artificial Sequence
  ENSG00000226476_43 (sequence is synthesized)
gactaagacaaaagacaaaaatgctcaccataactacttattttcaataattttctggaagtccaaagcaagaagaagatataaaagttagaaatacttttatagaagatagaaaagtta

SEQ ID NO: 860758 - DNA, 120 bp, Artificial Sequence
  ENSG00000226476_44 (sequence is synthesized)
gaaaaggacagcataatgttgctgttattattcacatatacattgtttccatataaaatgtaaagcatgtactgataaactactagacttgaacaggaaactttgcaatgttgatcaaaa

SEQ ID NO: 860759 - DNA, 120 bp, Artificial Sequence
  ENSG00000226476_45 (sequence is synthesized)
caatagctctatataaaattcaatttgcattcccatgcctaatcaatgagaattagaaaatttaatgcaaaaatgatattatttacaataacagcaaaaatacaatgtattcacctctcc

SEQ ID NO: 860760 - DNA, 120 bp, Artificial Sequence
  ENSG00000226476_46 (sequence is synthesized)
attcacatgtatacttataagaagaaataaaagaaagatttttatgacataaagaaaaattataaaacttaataacattaaaagagatttaaaccaatgggaaggtaaggtataccacgt

SEQ ID NO: 860761 - DNA, 120 bp, Artificial Sequence
  ENSG00000226476_47 (sequence is synthesized)
tcataaacagaaagagtccagtagtttaaagctaccaagttctctcttaaaacttaagtcaaaaacttaccaagacttttgtacaacttgacaaattaattctaaaattctaaattgatt

SEQ ID NO: 860762 - DNA, 120 bp, Artificial Sequence
  ENSG00000226476_48 (sequence is synthesized)
ctaaaatttttgtgaaggaggaagagctaacaacagccaaaacacccctgaaggaatgggaggagaaagcagaaaacatgtcctattggatgtcaagatctttgcataaagcactttagt

SEQ ID NO: 860763 - DNA, 120 bp, Artificial Sequence
  ENSG00000226476_49 (sequence is synthesized)
tagaaatgcaattttgacttaaagatagaaaaataaatcaattaaatcagaagagaattagcaaaaacagacccacaaatatatggaaatgatatataataaaacttacagtacaaataa

SEQ ID NO: 860764 - DNA, 120 bp, Artificial Sequence
  ENSG00000226476_50 (sequence is synthesized)
agtcattttagattttattttaattttagaagacaatataggagaatatctatatgacctttgggtggaagaaaattttataaccaagacacagaagtgctttcataacataaatttgta

SEQ ID NO: 860765 - DNA, 120 bp, Artificial Sequence
  ENSG00000226476_51 (sequence is synthesized)
gagctgaggatcagcaagacagattatgcagtgcgtctttgcaacagagaggaggtctgctcatcccacatttggagcacccgtgggtggagcagggaagatttctgggaaacagtgttt

SEQ ID NO: 860766 - DNA, 120 bp, Artificial Sequence
  ENSG00000226476_52 (sequence is synthesized)
acacaaaactcatctggcaaagagttctaagatgcatttcacagcactccacagaaggaaggttcagagccaatcatctgcaccagtgcccaacttaaaaacatccttgtatcagttttc

SEQ ID NO: 860767 - DNA, 120 bp, Artificial Sequence
  ENSG00000226476_53 (sequence is synthesized)
ccttatttcctgttctcctccctaaaccttcagtcctgttcctggcaatcacttccagaataaaccatatacatgcctcagattctgatctcagaggatcccagactaatacagagatac

SEQ ID NO: 860768 - DNA, 120 bp, Artificial Sequence
  ENSG00000226476_54 (sequence is synthesized)
actatgctgattgcttaacccgcattttctcatttaattgaaacatatacgtggtaaggtatttattcatacctgcatgattttgtagataaaccttagagaaattaatacttttcagaa

SEQ ID NO: 860769 - DNA, 120 bp, Artificial Sequence
  ENSG00000226476_55 (sequence is synthesized)
ggcaattaaagtaacacagcaagcaattgataaaacctggattcgccaagttaaactggtctggtttcaaaacctgtattgtttcctaacataccacctaaattctcaaatggtattgga

SEQ ID NO: 860770 - DNA, 120 bp, Artificial Sequence
  ENSG00000226476_56 (sequence is synthesized)
aggggttaaatgagattataaatgtaaaattcttggtatagttaattctcaaaaataggccttcaatctatagaatccatttgtagaactatcttcaggaaggaaaaatacatcaccctc

SEQ ID NO: 860771 - DNA, 120 bp, Artificial Sequence
  ENSG00000226476_57 (sequence is synthesized)
caccccaccctcaaagaaacatggaaaatttaaactaagacttcaaatcttgagctctgcacatcttagaatattttgtttctatgaaaaagaagctttggagaatgtgtatcagtctga

SEQ ID NO: 860772 - DNA, 120 bp, Artificial Sequence
  ENSG00000226476_58 (sequence is synthesized)
aacactgtagtgtgagcacagaaatcagcccatcacattatgccccaaatgctgaagtacggctgaatctgattgccctgcatttttaagtactgcaaaattctgggacttgggatcatc

SEQ ID NO: 860773 - DNA, 120 bp, Artificial Sequence
  ENSG00000226476_59 (sequence is synthesized)
tgttactacagacttgtcatattccactgaaataaaacatatagtctaatttgcaaagttctcgtgtggaaagagtcctaaaatgtatataacctctgtcccagcaattccattaggaat

SEQ ID NO: 860774 - DNA, 120 bp, Artificial Sequence
  ENSG00000226476_60 (sequence is synthesized)
ttatccaatccaaaatctaaaatgcagaagatctacatattgaatgcttatggcagcattctttaaaattatgaaaattgaaagcaaccaaaatcctcaaaaacagactaatggctaagt

SEQ ID NO: 860775 - DNA, 120 bp, Artificial Sequence
  ENSG00000226476_61 (sequence is synthesized)
agtataaccatactatgaaatgtggtaattgaatattcaaatttgtgttgtataaaaaattaataatggtataacatttggctataaaatagaatgaattcaattgtattttttaaacca

SEQ ID NO: 860776 - DNA, 120 bp, Artificial Sequence
  ENSG00000226476_62 (sequence is synthesized)
gtacatctgcatatttgtgaacctaaaagataagacggtaaatatttaactgtatttttctttaattgttggggctgtgaattattttaattttcttaatgctttttaatcttctctgaa

SEQ ID NO: 860777 - DNA, 120 bp, Artificial Sequence
  ENSG00000226476_63 (sequence is synthesized)
agtacaaattttctttgtttcacactctgactctaagaagtttgctgaaacacacagtggaattcaggaaattcaacaattttaaataaaacgctcccttgaggcatgtcagcaggaaag

SEQ ID NO: 860778 - DNA, 120 bp, Artificial Sequence
  ENSG00000226476_64 (sequence is synthesized)
agataaggattaaaaaaaaaaaagctttctactcagggagatattttgcctttgtgaaatgtatttattccaactactctctattctatattttaccttcattttggaagcctactgaca

SEQ ID NO: 860779 - DNA, 120 bp, Artificial Sequence
  ENSG00000226476_65 (sequence is synthesized)
ttaaataataggtttctttcaatatggatgaaaatgattctgagatgaaaaattattccttccttggaaaagaaaactatttttcttttcacatagtagacaaatgctattcttcaaatg

SEQ ID NO: 860780 - DNA, 120 bp, Artificial Sequence
  ENSG00000226476_66 (sequence is synthesized)
tccctgccagttaaatccctgctcatccttctagatccatttaaatgtcacctcctccatggagcctcttctgacaccacctctttcaaattagcattaattaaaccatcctctctctgt

SEQ ID NO: 860781 - DNA, 120 bp, Artificial Sequence
  ENSG00000226476_67 (sequence is synthesized)
gtctggcatgtgtcatgatctgatttagggtggacacatttgctagaatatgagatctccaaagtcaagagcagtacctttagtccattcccgcttctcccatagccaatggggtgccca

SEQ ID NO: 860782 - DNA, 120 bp, Artificial Sequence
  ENSG00000226476_68 (sequence is synthesized)
ccattcccgcttctcccatagccaatggggtgcccatgcttagaagaacttcaatcaatgaatcaatgagctgtaaggagtctcacctattcctattaacacacacacacacacacacac

SEQ ID NO: 860783 - DNA, 120 bp, Artificial Sequence
  ENSG00000226476_69 (sequence is synthesized)
tttggaagtcctatcttttcgtgttatctaagtttactatatgacaaaagagtaaagcagttaagagggtagcatttgaaagtaaacattgacagcactgctccagtctgatgggcctgg

SEQ ID NO: 860784 - DNA, 120 bp, Artificial Sequence
  ENSG00000226476_70 (sequence is synthesized)
tatccagttttcttccctgtccctcttcccaagcatgatgactttcttttcttttctggttttgattaatagtaccttttagagtgctgctgtctggtgtttctgactttagtttatcag

SEQ ID NO: 860785 - DNA, 120 bp, Artificial Sequence
  ENSG00000226476_71 (sequence is synthesized)
ggtttttgacctcagtcatgtgcattgtgtgttaaagaagtgtttttcaaagtgtggttcttggaccagcagcatcggtatcaactaggaacatgtttgaaatgcaaattgtacagcccc

SEQ ID NO: 860786 - DNA, 120 bp, Artificial Sequence
  ENSG00000226476_72 (sequence is synthesized)
actccagaactactgaattagaaactcggcgtgggttgggggagagccatgtcatacccaggagtttgtgtatttttaaaatttatttatttttatcaatatataatagtcatacttttt

SEQ ID NO: 860787 - DNA, 120 bp, Artificial Sequence
  ENSG00000226476_73 (sequence is synthesized)
ttgggtacatgtgatattttgatacctgtatacagtgtgtagtgatcaaataagggtaattggaatatccttcactccaaacatgtaacttttctttgtgttggaaacattacaaatgtt

SEQ ID NO: 860788 - DNA, 120 bp, Artificial Sequence
  ENSG00000226476_74 (sequence is synthesized)
atcagtagtcaggatttgagcctcttctcttctgctttctagctgaaaaatgtcgaacaaagaattcaacattacttttctgagcctctctttcctcttctatggaatggaagtaataaa

SEQ ID NO: 860789 - DNA, 120 bp, Artificial Sequence
  ENSG00000226476_75 (sequence is synthesized)
aattaaaaacatctgttgagttaaatactattgtctcttcaatcaaatggagaaattgaggctaatgaagataaagagccttgttccatttcatacatctagaagtagaagagctggtat

SEQ ID NO: 860790 - DNA, 120 bp, Artificial Sequence
  ENSG00000226476_76 (sequence is synthesized)
taaaaatcctacctgttggactttatatcaggtgctcttttcccaaactacagctgctttataaagaagcaaatgataatttttaaaacaacacaatagcaaagccatggaatcaactca

SEQ ID NO: 860791 - DNA, 88 bp, Artificial Sequence
  ENSG00000226476_77 (sequence is synthesized)
ggattggataaagaaaatgtggtacatgtatatcatggaatactatgcagacataaagaagaacaaaatcgtggctttctctgagtga

SEQ ID NO: 860792 - DNA, 120 bp, Artificial Sequence
  ENSG00000226476_78 (sequence is synthesized)
ccattactctgagtgaactaacgcagaaacagaaaaccaaataccctttgttctccctaataagtgggagcaaaacgatggtacacgtggacatacagatgggaacagcagacactgcgg

SEQ ID NO: 860793 - DNA, 120 bp, Artificial Sequence
  ENSG00000226476_79 (sequence is synthesized)
acaattagagaggggagagagggaggagggcaagggttgaaaaatgacacattttattacctgggtgatggattcatttgtactccaaacctcaacatcactcagtatacctttataaca

SEQ ID NO: 860794 - DNA, 120 bp, Artificial Sequence
  ENSG00000226476_80 (sequence is synthesized)
aatctacacatgcaccctccgattcgaaaatagaagttgaaaaaaactgtattttctctaaaaaattttgcttatgtactagttggtgcccttcaagtgggaaaaatccatgcctgctga

SEQ ID NO: 860795 - DNA, 120 bp, Artificial Sequence
  ENSG00000226476_81 (sequence is synthesized)
actgtcacctcttttttttttggagggcttctatttttcaagtgccctgtgtcttcttgggcttgttttttattctagacaaaatgcttccacacactgggggctttacctggcctgctc

SEQ ID NO: 860796 - DNA, 120 bp, Artificial Sequence
  ENSG00000226476_82 (sequence is synthesized)
atgaaggcatcatctgggtccaaactccttattggctacttatcaaaatggatctttctctgctcttcttttgcattagattcttgctaagaacctagaatttgcctgatagattgactt

SEQ ID NO: 860797 - DNA, 120 bp, Artificial Sequence
  ENSG00000226476_83 (sequence is synthesized)
accctaaagttaaaaaggcttttattagcttattttatggctctatattgtgtatttccttttaaacagaggttccttagagactcaattccttaatccagcatttcttaagtttgcttt

SEQ ID NO: 860798 - DNA, 120 bp, Artificial Sequence
  ENSG00000226476_84 (sequence is synthesized)
tgggaaggttagtacaagaagatggtctctttaaaaataattcttgagaatcactatactggttaacatattaaaagaaccaaggagtcctacagatttttaaaaagcctttgcttattg

SEQ ID NO: 860799 - DNA, 120 bp, Artificial Sequence
  ENSG00000226476_85 (sequence is synthesized)
atactctttggtttgactgccaattctctttttgtggatcatctgctaatatctaataaatttagcatgacacagaacaaatgttgagaaacagtcaataaaaaactgtctttgtgaaaa

SEQ ID NO: 860800 - DNA, 120 bp, Artificial Sequence
  ENSG00000226476_86 (sequence is synthesized)
aaagagcgggagaaactttggctggagccattgattctttattcccttacaatgtttttatcacccaaccttgaaaatagtctgtgtgtcagctgggcaggatctgtgctgaggcttgcg

SEQ ID NO: 860801 - DNA, 120 bp, Artificial Sequence
  ENSG00000226476_87 (sequence is synthesized)
tccctgggggcaaaaaaagggtagtgacttttagttgaaagagtcaggaagggaagagtcaatagttcagcggtaagtattctgaacccaggcagggaaaccaaaattcagggatacctg

SEQ ID NO: 860802 - DNA, 120 bp, Artificial Sequence
  ENSG00000226476_88 (sequence is synthesized)
aagccctcaagctaagggccaggagctaggagctgaaaggatacaggagctatgtcataaataatttaggaggtggctagatgattgccagagtgtccacagcatgctttacttggcttt

SEQ ID NO: 860803 - DNA, 120 bp, Artificial Sequence
  ENSG00000226476_89 (sequence is synthesized)
tatggatacaatgtgcataggttgcttttaggaacaataaagaaatgtttattaaactaattatgattcaataatattgacaataatgacaatgttgatagtatgcaatataataaactg

SEQ ID NO: 860804 - DNA, 120 bp, Artificial Sequence
  ENSG00000226476_90 (sequence is synthesized)
gtgtgcttttatttctcccttttcctgtgcacatctgttttactctgtgacatttttccatttagactcagaaataagaaaccagtattgctgcaaaggtaggctgtcactggaggaaat

SEQ ID NO: 860805 - DNA, 120 bp, Artificial Sequence
  ENSG00000226476_91 (sequence is synthesized)
gaagattaaaaattaaaaaatcaaattataatttttatattttaaaaaaacagcttaggtgtaacagagaaatacttggaagacgttagagtatgagacaaggaaaaatttgctccaaac

SEQ ID NO: 860806 - DNA, 120 bp, Artificial Sequence
  ENSG00000226476_92 (sequence is synthesized)
ctcctcccgcataatcacctctaataaacaaatatcctagacaaatataattttccaagctaggggaaaaaaagaacagttggagaatataatgtacaaaagttaatcaccaaataaggc

SEQ ID NO: 860807 - DNA, 120 bp, Artificial Sequence
  ENSG00000226476_93 (sequence is synthesized)
ctgccctattcctctttctcctccagccattataaggaacaggaaccatagaattctctggtaaatatggaatctaggagtagaagaaacccatgcttatatcttgcccataactcagaa

SEQ ID NO: 860808 - DNA, 120 bp, Artificial Sequence
  ENSG00000226476_94 (sequence is synthesized)
agaaagcagattcacagatggtgcccacaccccaaagtcatggggattgtagagtgcagaattattccccaagttctgtcctggttctttaaatatattttcaggaatcaatcctgtact

SEQ ID NO: 860809 - DNA, 120 bp, Artificial Sequence
  ENSG00000226476_95 (sequence is synthesized)
ggattctgaaaaacaccttacagaccatgtgagaggtaacgaggaggctctcctggactgaactgtgtcccctccaaattcatatgttgagacccaaacttccaatgtgactgtatttgg

SEQ ID NO: 860810 - DNA, 120 bp, Artificial Sequence
  ENSG00000226476_96 (sequence is synthesized)
agctagggcctttaaggagtaattgacattaaatgaggtcacagggttgggactctaatttaataggactggtgtccttatgagaagagaaagaggcaccaggcaccaggcatgtgagcc

SEQ ID NO: 860811 - DNA, 120 bp, Artificial Sequence
  ENSG00000226476_97 (sequence is synthesized)
cacagaggaaaggctatgatgtgaagacagagagaaggccatcacacacaagccatggagagaggcctccccagaaaccaaccccaccgacaccttgatctcggacttccaagcttcaga

SEQ ID NO: 860812 - DNA, 120 bp, Artificial Sequence
  ENSG00000226476_98 (sequence is synthesized)
actgtgagaaaataaattcctattgtttaagccactcagtcagtggaattctgttatagcagccctaacagactaatacggaagtcaagtagacaagtctggtctctgtatttctattgg

SEQ ID NO: 860813 - DNA, 120 bp, Artificial Sequence
  ENSG00000226476_99 (sequence is synthesized)
aactggatttactctgctcctatgagttatctctatgggagtttgatataaattgttaaaaaattgaagcagataaacatgaaattgtagagcaatttaaccaggtgttgtaatggaaac

SEQ ID NO: 860814 - DNA, 120 bp, Artificial Sequence
  ENSG00000226476_100 (sequence is synthesized)
atttcttcctgatgctggccccatgttgtgtttataagtggaaagtttcttcctctccaagtccacaggactcctttcctttctaagtactctacgtggctggccacatcattaaaatat

SEQ ID NO: 860815 - DNA, 120 bp, Artificial Sequence
  ENSG00000226476_101 (sequence is synthesized)
gagttattttgatggcagagagaagatatcacttatctttgtgacttctccttcccctgtctcttccacccctttcggccaatggcatacttagtcatgtgtacttagtaatgttaaata

SEQ ID NO: 860816 - DNA, 120 bp, Artificial Sequence
  ENSG00000226476_102 (sequence is synthesized)
tgtaagtaaatttgacctattgaagaatggcctctatagcctcctagacaacatataaacctatattgtaaatcttctagtaacagaaagcagaatagaatacaagttttttacaaatct

SEQ ID NO: 860817 - DNA, 120 bp, Artificial Sequence
  ENSG00000226476_103 (sequence is synthesized)
tccaattcttcatgattttctcataaaattgttgaacatctacatacgaagatgaagggaaaacttgaaagcagtcagaggaaaaaaaaggacacattaccttcaaatggacaataagat

SEQ ID NO: 860818 - DNA, 120 bp, Artificial Sequence
  ENSG00000226476_104 (sequence is synthesized)
ggatggctaattaaaatattattgcagtataattgatgtttgctacattgtacatatttaaagtgtacaatgtgatcattttccacgtatgtatatacatgtaaaagcatcaccggaata

SEQ ID NO: 860819 - DNA, 120 bp, Artificial Sequence
  ENSG00000226476_105 (sequence is synthesized)
aagattacaaacatttctgttactcctcagagttccttatgccactgtgtaatccaaccatcctctaccccatccccagaaaactgatttgctttctgttactgtaattagtttggatat

SEQ ID NO: 860820 - DNA, 120 bp, Artificial Sequence
  ENSG00000226476_106 (sequence is synthesized)
cctataatttttcatatggatggaaatgcagtatgtattttgcctggcttcttttactcagcatagcaattttgagatttattcattttgttgcatgtatcaatagttcattccttttta

SEQ ID NO: 860821 - DNA, 120 bp, Artificial Sequence
  ENSG00000226476_107 (sequence is synthesized)
ttaagtaatgtttccttgcatgattacaccacagtttatctattcctctgttgatggacatttggactatttcaacttttgcctatgaacatttgtgtaaaatgaacatttgtgtgaaaa

SEQ ID NO: 860822 - DNA, 120 bp, Artificial Sequence
  ENSG00000226476_108 (sequence is synthesized)
tatggctgaatagtattccatggtgtacatgtacaaaatttacttaatctaatccatcattgatgggcatctaggttgattccatatttttcttgttgtgaatagtgctgtgctgcggtg

SEQ ID NO: 860823 - DNA, 120 bp, Artificial Sequence
  ENSG00000226476_109 (sequence is synthesized)
gtgctgtgctgcggtgaacaacatatgagtgcatgtgtctttttggcagaatgatttattttctgtaggatatatacccaataatatgattgctgggttgaatgatagttttatttatag

SEQ ID NO: 860824 - DNA, 120 bp, Artificial Sequence
  ENSG00000226476_110 (sequence is synthesized)
ttctttgagaaatttccaaagtggctgaactaatttacatacccaccaacagtgtataagcattccctttactttgcatcctcaccaacagcttttatttttgactttttaataatagct

SEQ ID NO: 860825 - DNA, 120 bp, Artificial Sequence
  ENSG00000226476_111 (sequence is synthesized)
attcagactggtgagagatggtattccactgtggttttgatttggatttccctaatgattagtgatgctgagcattttttcatatgtttgttggctaaaaagctgatatttcatttcatt

SEQ ID NO: 860826 - DNA, 120 bp, Artificial Sequence
  ENSG00000226476_112 (sequence is synthesized)
tttttaaaggtttatgttaggttcgggggtacatgtgaaggtttgttacataggtgaacttgtgtcacaggggtttgttgtacagctgatttcatcacccatgcaaaaagcccagtaccc

SEQ ID NO: 860827 - DNA, 120 bp, Artificial Sequence
  ENSG00000226476_113 (sequence is synthesized)
cctccaccctcaagtagaccccagtgtctttcattccccaaaagctaacattttaaaccagcccaaaatataataattttaatctgaagtggcatgtgatttctgttaatgataaaaaag

SEQ ID NO: 860828 - DNA, 120 bp, Artificial Sequence
  ENSG00000226476_114 (sequence is synthesized)
tgaagtggcatgtgatttctgttaatgataaaaaagataacatttgaaaaggagtccttttgataacccatgtattaaggactaaatgtttgtaccttctcccacccccagaatcatatg

SEQ ID NO: 860829 - DNA, 120 bp, Artificial Sequence
  ENSG00000226476_115 (sequence is synthesized)
tgaaaccctaacaaccaatgtgaatgtatttggagatagggtcataagcagatggtagagtttaaatgaggtcataagggtggagccctaatctgatagagctgttgcacttttcagaag

SEQ ID NO: 860830 - DNA, 120 bp, Artificial Sequence
  ENSG00000226476_116 (sequence is synthesized)
aggaagagatactggaacgtgtctctgtctgtgtgcattcagaaagaaggccatgtgatacagtttggatgttgcctccaaccaaatgtcatgtcaaaatgtaatcttcagtattggagg

SEQ ID NO: 860831 - DNA, 120 bp, Artificial Sequence
  ENSG00000226476_117 (sequence is synthesized)
ggaggcatggtggggggagattgggtccccccacccagtggaggcaagtttctcatgaatggtttagcaccatcccccttggtactgtcttcacaatagtgagctctcatgatatttggt

SEQ ID NO: 860832 - DNA, 120 bp, Artificial Sequence
  ENSG00000226476_118 (sequence is synthesized)
catttaaaagtgtgtagcacttcccccttcacgttctcttgctcctgctctggccatgtgacatgcctattccctcttcaccttctggcatgactgttaagtttcctgtggcctccctgg

SEQ ID NO: 860833 - DNA, 120 bp, Artificial Sequence
  ENSG00000286598_0 (sequence is synthesized)
agcaaagggactgctttgccaggctgctgtcacatagcactcctgtctcccgtttgacttcacatagtgaaaattgtctaaaagataaggcaggagctctggttgacaccaccaccccca

SEQ ID NO: 860834 - DNA, 120 bp, Artificial Sequence
  ENSG00000286598_1 (sequence is synthesized)
tagatctctctctagaagcattggaagaggccgtctcaaaaaagaaaaaaaaatagaagcattgcaggaaagacgtggtttgtagtgaaacaaattggaagtcaagctcagcctcaacca

SEQ ID NO: 860835 - DNA, 120 bp, Artificial Sequence
  ENSG00000286598_2 (sequence is synthesized)
ccatccagttcaatcaggttgggaccaccaattcttcaatgggcctgcccaaatgcccaagaagtggacttttgatgtcagagggccaaagatcccaccctcagatcatgctaatgccac

SEQ ID NO: 860836 - DNA, 120 bp, Artificial Sequence
  ENSG00000286598_3 (sequence is synthesized)
cactttctgtacacatgtcctgtgaaatgccacaaaccctgactactacgcttgtgcagaacaaacctatcaattaatttttccctactgccaatcacctttccccatgccttacaccac

SEQ ID NO: 860837 - DNA, 120 bp, Artificial Sequence
  ENSG00000286598_4 (sequence is synthesized)
cgtgtttccctaacgcataaatatccctaagccttatcttcaggaagcaggatgtgagagctgttctaccaccttgtttggtggccttgcaaataaatcctttctcttttgcaaaaccca

SEQ ID NO: 860838 - DNA, 89 bp, Artificial Sequence
  ENSG00000286599_0 (sequence is synthesized)
agacacggcctcactctgttgcgtaggctggagtgcagtggtaggatcatagttcactggagcctcaatctcctgggctcaagtgatcc

SEQ ID NO: 860839 - DNA, 120 bp, Artificial Sequence
  ENSG00000286599_1 (sequence is synthesized)
tgtacaagagatgtatcgtttccacttatcaaataaggaaactaaggctcagagaggttaagtaacttcccaaagtcacacagcttaatctggagccagattatgaacccatctctaatt

SEQ ID NO: 860840 - DNA, 120 bp, Artificial Sequence
  ENSG00000286599_2 (sequence is synthesized)
ccaaccactcaaccaaccaaccaaccaaccaaccaaccaaccaaagaaaaacaaacttaatgcctcaccataatatagcagaaatacgaaataagcagaaatagccatatatgcttatat

SEQ ID NO: 860841 - DNA, 120 bp, Artificial Sequence
  ENSG00000286599_3 (sequence is synthesized)
aaacagtattcctttcttcctcacaattcattaatctggtctgtactctaatggaactctcctcctgctctagatctgtagcatttctagaaaattatttaaagaaaagcaatatatgta

SEQ ID NO: 860842 - DNA, 120 bp, Artificial Sequence
  ENSG00000286599_4 (sequence is synthesized)
aggatctttaagtcagatggtcaaaagaagtaagcatacctgaagtaagttctcttcttcacataaatgtttatcaactttcttgtagaggttatctagacctttttttacttcctttcc

SEQ ID NO: 860843 - DNA, 120 bp, Artificial Sequence
  ENSG00000286599_5 (sequence is synthesized)
agggtactccttaatgactttacgaagttcttgtttgttaaatgcaagttggtaacttacttcctcctcccttatgccctgtgccacgcgagcttcaacaccttcaaagaaatgcttcaa

SEQ ID NO: 860844 - DNA, 120 bp, Artificial Sequence
  ENSG00000286599_6 (sequence is synthesized)
ggaaatgaaaagaaacaatggctaagacctgcatttattattatttacattaaaaaaatctgattacaaagtagtgtataatcaccatgcaaaaatcagtgtgtgaaagtataaacaata

SEQ ID NO: 860845 - DNA, 120 bp, Artificial Sequence
  ENSG00000286599_7 (sequence is synthesized)
aaataacaatcacttattaacatacttctgagatgaacattgttaatattgtagagttccttgtaatcttttgatgtgtgaatacatacaggagattaaaatttcatgtcccactttaca

SEQ ID NO: 860846 - DNA, 120 bp, Artificial Sequence
  ENSG00000286599_8 (sequence is synthesized)
tttaatattgttttttcctaaatataaattttaatggctgcataatatttcacacaatgactgaaccacaattattattcattcctctagtactagatatttaacatcccactccccctt

SEQ ID NO: 860847 - DNA, 120 bp, Artificial Sequence
  ENSG00000286599_9 (sequence is synthesized)
ctttttttggacttggcaaatctagtgagactttagaaaatctactataaatatatttgtcataaattttttttgtatataagtatttacccatcttactgattaaatttccaggactat

SEQ ID NO: 860848 - DNA, 120 bp, Artificial Sequence
  ENSG00000286599_10 (sequence is synthesized)
aattactctgttgaagagcataactttaagtatttgaaagattcttcagtatatatacaaactgcttcctaggaaagctcaaccaatttatatttctgtcaacagtgtatgaggttgcta

SEQ ID NO: 860849 - DNA, 120 bp, Artificial Sequence
  ENSG00000286599_11 (sequence is synthesized)
ttataacaatagttgccagagtaaaaaaagtttgtcattttattttataattctttggctataaataaggttaacctgcttttatatgtttagtagtgattcagccccttgccccattta

SEQ ID NO: 860850 - DNA, 120 bp, Artificial Sequence
  ENSG00000286599_12 (sequence is synthesized)
cccatttataaattggggtcttagtgcttttcttattgattttagtaagattttttatattaaatatactgactctgttatattattgtaactattattcccaggtcttcttttatatat

SEQ ID NO: 860851 - DNA, 120 bp, Artificial Sequence
  ENSG00000286599_13 (sequence is synthesized)
attgactggcataactgtatttgagcacgatacaaagaattaatgctgacaaaccccattccctctcattacttttttctaaaattttcttagtgattattcattaaattatcattcttt

SEQ ID NO: 860852 - DNA, 120 bp, Artificial Sequence
  ENSG00000286599_14 (sequence is synthesized)
gagaagttattcttagtgctttaaaaattttgtttttacataagctcttaattggtagacaggaaatacattgtttttcagtatatttgctttaaattttgtcacttgaccaacaccagt

SEQ ID NO: 860853 - DNA, 120 bp, Artificial Sequence
  ENSG00000286599_15 (sequence is synthesized)
aatttcaacatatcatatacaggtggtgataatctcgtctctgttttccatatctcttatttatgtttcaggtcttgttgaactggctagtgcttcaacaacaatgctaaataataaagg

SEQ ID NO: 860854 - DNA, 120 bp, Artificial Sequence
  ENSG00000286599_16 (sequence is synthesized)
atctaacaatatttctgctttaaattgatttcagagggaatgtctctaacgttgcaattcgattcagttggaaagacatggttaatgcttaagagagccagaagaacccaaatctttgaa

SEQ ID NO: 860855 - DNA, 120 bp, Artificial Sequence
  ENSG00000286599_17 (sequence is synthesized)
cacacttagagcaaccacaaactgctgttagaaaactaatgttaatgtttaagaagtacttgttattttagtttaccttatcaaatttggtcctgtcagcaacatcgagatcagaggcag

SEQ ID NO: 860856 - DNA, 120 bp, Artificial Sequence
  ENSG00000286599_18 (sequence is synthesized)
acatgtttcccatatccaacagggaagatgactgagatctgcgattccctgaactctgaacactgagcttatttagactagaagtagatccagttaatttccccgaacttccatgaagac

SEQ ID NO: 860857 - DNA, 120 bp, Artificial Sequence
  ENSG00000286599_19 (sequence is synthesized)
ctaagaaataataaaactttgaaagttgtgatcttcacaaataaatgatccaaagtataaagcagggatagatcttctatcttctactggcttgatcttccagggctcatattagttagt

SEQ ID NO: 860858 - DNA, 120 bp, Artificial Sequence
  ENSG00000286599_20 (sequence is synthesized)
gcacaaatcttctataagggataggtggtatagtttccttatcttccattaacattggtgtcctaattctgagcatattgaaaaaagaagcgaaactacacagatccatagaacgggact

SEQ ID NO: 860859 - DNA, 120 bp, Artificial Sequence
  ENSG00000286599_21 (sequence is synthesized)
gaaagggaccttaaggagcatattgtctataacctgcccatttcataaagtcgcctggtgatatcgctagactaaagtagatgagggtttcttttccattcaaaaggacaggaatatgga

SEQ ID NO: 860860 - DNA, 120 bp, Artificial Sequence
  ENSG00000286599_22 (sequence is synthesized)
tgaaggtcaatgaggaccacgttagcatattagccagcatgactttgttatacttcagaagaaaactgctgcatctcaatgttacctccacaataaatcaatatattaggttgaaccaca

SEQ ID NO: 860861 - DNA, 120 bp, Artificial Sequence
  ENSG00000283517_0 (sequence is synthesized)
ccctctccaagccatgagatggaagagtgtccttatatgaagactgctggagttccattggctggaagtgcctcaggctgtggctggtgtttgaagggctgctccacacatatcaatcat

SEQ ID NO: 860862 - DNA, 120 bp, Artificial Sequence
  ENSG00000283517_1 (sequence is synthesized)
cctttgacaagatctggaagaaaaaaaaaaacaacaaaaaccaccccccaaaaaggtgaggttccgagatggtatctggatgatgaacacagagagagcttccattgttcctcttctcct

SEQ ID NO: 860863 - DNA, 120 bp, Artificial Sequence
  ENSG00000283517_2 (sequence is synthesized)
aggaagaattcgtcttcatgaattgaattgtcagttctgcagacaattatcaaaaattttacaggaacaccttgagagatgtcgaagtgtttatttcaacagcccaaagaagagaaccac

SEQ ID NO: 860864 - DNA, 120 bp, Artificial Sequence
  ENSG00000283517_3 (sequence is synthesized)
aatatggacactctctgtcttcacaaatcccccaacgcatgttttattcaaccttccaatttttagacaaagattcttgttagcctcatgaaagacctggatactgggggaaagatggta

SEQ ID NO: 860865 - DNA, 120 bp, Artificial Sequence
  ENSG00000283517_4 (sequence is synthesized)
tcatattttcaattatgatcaactcacctaatctgacggaagtggtaagaaggaagctggtgtgtatgctgattgtgattttgagaataaactcttacttctaaaccacttacaaaagta

SEQ ID NO: 860866 - DNA, 120 bp, Artificial Sequence
  ENSG00000287039_0 (sequence is synthesized)
atatctaaatgagttccacctttgtcaggagggagcagatatggtccattataaagcttcagcaacctggggaagcaaaagcctctcaccgtgttccagggagccacagtggagattgcc

SEQ ID NO: 860867 - DNA, 120 bp, Artificial Sequence
  ENSG00000287039_1 (sequence is synthesized)
atcctgtgaattaggaagtgcttaagtgtaatgccagcctaatcccctgcattgtaaagtgggctggcagtgcagttttgctccatcattcaaaactacatgtgagcctccaaaccctgg

SEQ ID NO: 860868 - DNA, 120 bp, Artificial Sequence
  ENSG00000287039_2 (sequence is synthesized)
aagtagatctagaaagcaacctacatccactgaagtgctgcccaagactgaggaatggtggtggtagaggaagatgatagagatcaattgtggctcctgagaccctctgcagatgcaaca

SEQ ID NO: 860869 - DNA, 120 bp, Artificial Sequence
  ENSG00000287039_3 (sequence is synthesized)
ggacctgtaacttgttctcctcatactcttgagttcagcccttgcagagctggtgcccggctgccaccttagtctagaagcaaacgcccactttagagccagctccttaatactgactgc

SEQ ID NO: 860870 - DNA, 120 bp, Artificial Sequence
  ENSG00000287039_4 (sequence is synthesized)
tttggaattaacatgagaggaagcatgtttgggagtgccctgtagattattacccatggattgaaccgagcagaggaaggactgaactgtaatgcagccccagctaagtcctcagcagat

SEQ ID NO: 860871 - DNA, 120 bp, Artificial Sequence
  ENSG00000287039_5 (sequence is synthesized)
tggacacaggaagaggaacatcacacaccaggatttttttttttaaaggagagatgtagctgagcaaatagtggacaaattaaactgcttcagatctacatgagaagtagtgacttataa

SEQ ID NO: 860872 - DNA, 120 bp, Artificial Sequence
  ENSG00000287039_6 (sequence is synthesized)
ctgcttcagatctacatgagaagtagtgacttataatgtacatacaattaaaacatcttttatcttaaatatacatgtaaatatccacaattatagctcatatatattaattataagtgc

SEQ ID NO: 860873 - DNA, 120 bp, Artificial Sequence
  ENSG00000287039_7 (sequence is synthesized)
cataattataatatatccataatataataagtatgataatataaacaaagaaagtttagggaaatatcctttttcccaagaagaaagaacattcatgttctagtatatgccaatagcaat

SEQ ID NO: 860874 - DNA, 120 bp, Artificial Sequence
  ENSG00000287039_8 (sequence is synthesized)
atagactgcaagacaagctagttataccttatgcaacaggattcatgccaaaagagaacacaagaatataaatttctaaaataaaaaaattaaatttaaatatttaaaacgcaaagttat

SEQ ID NO: 860875 - DNA, 120 bp, Artificial Sequence
  ENSG00000287039_9 (sequence is synthesized)
ttgaaaataattttaaaatgaaaacggctgcaaagatttttaaagacgcatttagaaagcctgctgtgtcttcaaacatttttcctatttggtagtggaataaagatttcaagcacaaat

SEQ ID NO: 860876 - DNA, 120 bp, Artificial Sequence
  ENSG00000287039_10 (sequence is synthesized)
ttacccatgactgttttgctgagcaaacttaatgccacatccttgttcattactttttcaggctcctacccattgcttctctccctttaatttcccaccatgcacactggcccatttggt

SEQ ID NO: 860877 - DNA, 120 bp, Artificial Sequence
  ENSG00000287039_11 (sequence is synthesized)
gagaagatctattctgtgctcacatgtacaaaggtgatgtattggcagcttcagcctccaaaggtttttctcattactgaattcccagtagctatttctctacattgtaattggatagta

SEQ ID NO: 860878 - DNA, 120 bp, Artificial Sequence
  ENSG00000287039_12 (sequence is synthesized)
ctttttaggagcaagtgtccagggcatagagtgccacaaacactaggtgcattctagagaaatgaggagatgatatccatgaatagcagaggatcatagacaaatgcattccccaaggtg

SEQ ID NO: 860879 - DNA, 120 bp, Artificial Sequence
  ENSG00000287039_13 (sequence is synthesized)
aggggaaacaatcaatagctgaaatgagaaaagctggcttcagtggtgtgctgattgagaagagagccttcccattaagccagagtgacctgtgacgctcaattagtgaatgcaatccat

SEQ ID NO: 860880 - DNA, 120 bp, Artificial Sequence
  ENSG00000287039_14 (sequence is synthesized)
cctgtgacgctcaattagtgaatgcaatccatgcacctttttcattgcataattaaagacctatacctgacctctccatgtcttcaaatctgcaatctttacacacacacacacacacac

SEQ ID NO: 860881 - DNA, 120 bp, Artificial Sequence
  ENSG00000287039_15 (sequence is synthesized)
ttcccaattattaatactcttaattattcaacaatgatgcctatttaaacacctaatggattatttgattttaatagttaataataccatgtcaaatgataaagatcaattatttttcag

SEQ ID NO: 860882 - DNA, 120 bp, Artificial Sequence
  ENSG00000287039_16 (sequence is synthesized)
atatatttttaattaggcattttgaaaagtattatgtttaggaaactgtacccatgataatgactgaattctgttaaaaatgacgtgctgaatcagtggctgattctcagtagaaggatt

SEQ ID NO: 860883 - DNA, 120 bp, Artificial Sequence
  ENSG00000287039_17 (sequence is synthesized)
aggtgcttgcgaggtatcaggcatgattatggtgaaaagcgggcaaaggtaaataggtctctgctctccaaaagaaagagcaacgctaagctgagcattacagtgcttggggaatgtcgc

SEQ ID NO: 860884 - DNA, 120 bp, Artificial Sequence
  ENSG00000287039_18 (sequence is synthesized)
acacagcagggaaagcccaccggagtctactcatgctatcatacgtgcatgcccaaatacacacattgtggtcttcaagattatcatatttacccataggatattcattgcagttatgcc

SEQ ID NO: 860885 - DNA, 120 bp, Artificial Sequence
  ENSG00000287039_19 (sequence is synthesized)
taaaatagaaaacagacagatgagaactgatgttaagcattaaaaaattcagccaagagtaattttcagtagaaaaccaaagagaatgttgtgttgtaaaagagcatactatgatataat

SEQ ID NO: 860886 - DNA, 120 bp, Artificial Sequence
  ENSG00000287039_20 (sequence is synthesized)
ttctgagaatagattcctgttctagttatcataattagcatatatcttatgctatgtgcctaaatgacacattattatcattaatataataaatgattatctttgttaatttgccataag

SEQ ID NO: 860887 - DNA, 120 bp, Artificial Sequence
  ENSG00000287039_21 (sequence is synthesized)
caaagtttggttataggaattaacaaaaatctcccatattccaaaagtgtgccccataatacttacctataaagaatatagaagtttttaggttctatcagattatatagaaataaaata

SEQ ID NO: 860888 - DNA, 120 bp, Artificial Sequence
  ENSG00000287039_22 (sequence is synthesized)
tttgtaagaaaatcacataaaatttttaattgtatcaaaaatcacatatacaatttatcactttaatcatttttaactctacagcgtaggagtttttgttttgttttgtttttgagaagg

SEQ ID NO: 860889 - DNA, 120 bp, Artificial Sequence
  ENSG00000287039_23 (sequence is synthesized)
gctgggtttacacacgtgagccacagtgcccagcagcataggagttttaggtatgtatacatcgttgtgaaacagatctccagaactttttcaactcacagaactgaaactccataatat

SEQ ID NO: 860890 - DNA, 120 bp, Artificial Sequence
  ENSG00000287039_24 (sequence is synthesized)
atccattaaacaacaattctcctttgcctacactccctatccactggtaactaccactctacttttcatatctatgagtttggctactttagatacctcttataattgggatcatatagt

SEQ ID NO: 860891 - DNA, 120 bp, Artificial Sequence
  ENSG00000287039_25 (sequence is synthesized)
atttgtgcttttgtgcctagcatatttcactgaacataatatcctcgaggttccttcgtgtcatagcaggtgtcagaatttccttcctttgtaaggctgcatcgtgttctattgtatata

SEQ ID NO: 860892 - DNA, 120 bp, Artificial Sequence
  ENSG00000287039_26 (sequence is synthesized)
cataccatattttgtttatccattagtcacatcacaaatagttttaattaattttaatatactttcatttttcccctagtttttcagagtaatacttgttcattttaggacattttaaaa

SEQ ID NO: 860893 - DNA, 120 bp, Artificial Sequence
  ENSG00000287039_27 (sequence is synthesized)
ttctagtatccaatgctaatcactaaaattttatatatttccttcataatagtatacatatattttctttgctgttgttttctgcttacttataataataattttcacatgtgaatgcat

SEQ ID NO: 860894 - DNA, 120 bp, Artificial Sequence
  ENSG00000287039_28 (sequence is synthesized)
tctgcttacttataataataattttcacatgtgaatgcatgatcttactaaaatttatttaaccattcttctaggacaccaaatagaaagcacttggtgtgacaggagagagagaatgga

SEQ ID NO: 860895 - DNA, 120 bp, Artificial Sequence
  ENSG00000287039_29 (sequence is synthesized)
agcttacattgaatgatccagtggggatataaagaagtgaataatatttgagaaatatagtctttttgtgagcctgagtttcgtcactttcttccaatagtttgcatacatttttaatgg

SEQ ID NO: 860896 - DNA, 120 bp, Artificial Sequence
  ENSG00000287039_30 (sequence is synthesized)
tttccagttttgaaatattttattaaatttttaataaggcttattttaaagtagaattaaaccagttattactagtgggaagaaagtttgcagactagttatatttatcttttctagggt

SEQ ID NO: 860897 - DNA, 120 bp, Artificial Sequence
  ENSG00000287039_31 (sequence is synthesized)
tttactgatggatattaaaattataaaacaaatatgtatctttgattgtctagaactacaatcaccttaataattaagtcatcatctgtatgttactgactttgctacatatttcaaagc

SEQ ID NO: 860898 - DNA, 120 bp, Artificial Sequence
  ENSG00000247903_0 (sequence is synthesized)
caaaatagggatttattataaaaactatacaaactttttatcactcacaaatgatgaaaaattttaaacaattagtatcctccctccaaaatagtgtgttctgtctttacagtcttcact

SEQ ID NO: 860899 - DNA, 120 bp, Artificial Sequence
  ENSG00000247903_1 (sequence is synthesized)
ggcagtgcattcagatagtatagaaaataacaaacattccatataactttgtccctacagtaaataattttttaaaacttttcatcaagtttcagtgttactgaagttaattatagacag

SEQ ID NO: 860900 - DNA, 120 bp, Artificial Sequence
  ENSG00000247903_2 (sequence is synthesized)
taaggattacagaataagcagtaaatggtcacctgcactgtatttttcaaagcaaaaattgttttatattttctatgttgttttatcctgccccaaacacttaaagcaaaagttaaatat

SEQ ID NO: 860901 - DNA, 120 bp, Artificial Sequence
  ENSG00000247903_3 (sequence is synthesized)
ttttccagttacctgaaacttcaaaaatctattgtactttgaaaaaactttaaaaagcagcatcatttaaatagtggttaactcataaacgtgtatgcaacaacattccacaaccctaat

SEQ ID NO: 860902 - DNA, 120 bp, Artificial Sequence
  ENSG00000247903_4 (sequence is synthesized)
accactcaggcctgcagagtcaccagctcacaataattcagtgctctgaaagctggggggaaagcccctgagtagtaagtatgcaacccagggtgtcgggtgctttcttgtggtgaaaca

SEQ ID NO: 860903 - DNA, 120 bp, Artificial Sequence
  ENSG00000247903_5 (sequence is synthesized)
agggtgtcaaaactgaggggactctccaaggtcctaatgaaaagcagctcctctaaacacctgaatcctttttgactccattctcatcactttaaggatgaagcctttctgtacaaaggc

SEQ ID NO: 860904 - DNA, 120 bp, Artificial Sequence
  ENSG00000247903_6 (sequence is synthesized)
tttgtacagaaattattaaaaactatattttacactaatgctaacagctaattgagcagaaagaactatgaagtacaaatttttctaaggttttcttattaatggcaatacagacttttt

SEQ ID NO: 860905 - DNA, 120 bp, Artificial Sequence
  ENSG00000247903_7 (sequence is synthesized)
gctgatgtaagaggatggcttgagccttagagtttgaggttgcagtgagctatgatagtgtcactgcagtccagcatgggtgacagaaagagatcctgtctctaaaaaataaaaatatgg

SEQ ID NO: 860906 - DNA, 120 bp, Artificial Sequence
  ENSG00000247903_8 (sequence is synthesized)
gtttgcacccactagcattgaggagatgatcactctaacggtccttgagctatgagatagttcataaacaaacatatataaagggtatatgctaaaattatttttaccaataggaatagt

SEQ ID NO: 860907 - DNA, 120 bp, Artificial Sequence
  ENSG00000247903_9 (sequence is synthesized)
tagactactttataaagttgaaaattaagagacctctttatttctgttttctcattcctcacatctatcctatgagatagtttcacagatgatggaacaaagtttcaatacatcgtccaa

SEQ ID NO: 860908 - DNA, 120 bp, Artificial Sequence
  ENSG00000247903_10 (sequence is synthesized)
ggttataagctagaaagggaactagtgacagagccagaatgcatatagaaggttttttcctgactttataatttatgctcattctcctcatgaaaagtacattaaattactagaaattat

SEQ ID NO: 860909 - DNA, 120 bp, Artificial Sequence
  ENSG00000247903_11 (sequence is synthesized)
aacctatcatccctccatcctctaagcattaacaaaagaggggaagcccattaagtagtagttggtttttgtggtctttttgttttgtttttgagacagggtcttgttcagtcgcccagg

SEQ ID NO: 860910 - DNA, 90 bp, Artificial Sequence
  ENSG00000247903_12 (sequence is synthesized)
cgggttcaagcaatcctctagcctcagcctcccagagtagctgagaccacaggtgtgcactacaacacctggctaatttttttttttttt

SEQ ID NO: 860911 - DNA, 89 bp, Artificial Sequence
  ENSG00000247903_13 (sequence is synthesized)
acctggctaattttttttttttttttttcagtagagatggggaagagctcaagcaatcctcccacttggtctcccaaagtgctgggatt

SEQ ID NO: 860912 - DNA, 120 bp, Artificial Sequence
  ENSG00000247903_14 (sequence is synthesized)
gagccaccatgctcagccattaggaagtattttatttagcacatgtagggtagagccttgaatctgtatttcaaaaacatccccatgtgaatctgtcatttcgccaagcctacacaacac

SEQ ID NO: 860913 - DNA, 120 bp, Artificial Sequence
  ENSG00000247903_15 (sequence is synthesized)
tgcttttcatcagactatccagtagtcttagaaaaaaaaagtcttcagagagacaagggacacatgacttgtactctattatatcctgcattctctatagagttgacagcctcatgaaat

SEQ ID NO: 860914 - DNA, 120 bp, Artificial Sequence
  ENSG00000247903_16 (sequence is synthesized)
ggctatttttatgtctaacagtcccatcaactttattctagtattttaagaacattgtcacagaaaggaaacaaccaaatagaatacttttgagtacagatgctgtttttgtttgttttt

SEQ ID NO: 860915 - DNA, 120 bp, Artificial Sequence
  ENSG00000247903_17 (sequence is synthesized)
gacaataatcaggaaatgtaagttattaaacaatggcaaagaaagttaacttataagttaaccagattttaaaaactgatagcaattgaattactttttaaaaacaccaaaaaaacccca

SEQ ID NO: 860916 - DNA, 120 bp, Artificial Sequence
  ENSG00000247903_18 (sequence is synthesized)
gaaccagccctgtgctactgccccagggtgattaagtacctgagggacacctggggtttggcagcggatgggagtggaggttgagggtacaacagaagaccagaaacaaagtaccaggtt

SEQ ID NO: 860917 - DNA, 120 bp, Artificial Sequence
  ENSG00000247903_19 (sequence is synthesized)
ccccgactcagctgccatcagagcctttacctccttatttcctttacctccattatttctaataaacacataccacttatcacaacaaatagatacaaagctacctctaaagacattcta

SEQ ID NO: 860918 - DNA, 120 bp, Artificial Sequence
  ENSG00000267289_0 (sequence is synthesized)
cttcttggcgcgcgtcgccgcagagcccacccaggcgggatagagcttatggattggctaatgccgcagcaactcccgcctgcctgagctgttcccggaggtccgcaagcccccagccct

SEQ ID NO: 860919 - DNA, 120 bp, Artificial Sequence
  ENSG00000267289_1 (sequence is synthesized)
cccatgcggaagagtctggctggtgcagagggctcaacttttccctaggctctggacccaaaggccttccacgtcctttggaacctgcttacttcctttattccctcgcagtctggctcc

SEQ ID NO: 860920 - DNA, 120 bp, Artificial Sequence
  ENSG00000267289_2 (sequence is synthesized)
ttcctccatcctgggtgaccagtgggtgccgacattgacattcatataagaacacggaggaggtgcaggtgggaggagatgggctcagttttagccaacttaaaatagagtctgcagagc

SEQ ID NO: 860921 - DNA, 120 bp, Artificial Sequence
  ENSG00000267289_3 (sequence is synthesized)
ccagagttggggaactgtgggtagatatgggagttgaagacactgacagcaaagggtgcaactacagttcacctagcatagaaccctatgtgaccgttaaaaagaatgaggctcagtgaa

SEQ ID NO: 860922 - DNA, 120 bp, Artificial Sequence
  ENSG00000267289_4 (sequence is synthesized)
gtgaactcatagggaaacctgcccacaacaaattagacgcaggatgcagtagaaggctaagagaagtctggagccagacttgggtttaaagcctgggactgacacttgctatgcgacctt

SEQ ID NO: 860923 - DNA, 120 bp, Artificial Sequence
  ENSG00000267289_5 (sequence is synthesized)
gaactgattacttaacgttactctgtacttcggtttcccaatctgcaaagcggggataagcaattacatccttctgtttgatgtgaacattaaataaattaatccacataaagcactcaa

SEQ ID NO: 860924 - DNA, 120 bp, Artificial Sequence
  ENSG00000267288_0 (sequence is synthesized)
aatcttctctcacctcctagacacacacacacagaggcacctccgggaggctctggccaggcctgggtgtggcaggatagaaatgaaagttgtcctggcaacacacaagatttcatcaac

SEQ ID NO: 860925 - DNA, 120 bp, Artificial Sequence
  ENSG00000267288_1 (sequence is synthesized)
atttccatccccagcagctcctgggccaagcctcatcttgcccagtgtggcctgtcaagatgacggcctggaagagaagccagactgggcagccaggcctctgcccctccccttgcctgg

SEQ ID NO: 860926 - DNA, 120 bp, Artificial Sequence
  ENSG00000267288_2 (sequence is synthesized)
tcattgctgcctgacacccaacaccagtctgcaagggcaccaggaggggatggaagagacagggtgtctggggaagggtgggtctgagtgcgagggggtgggtgagcttgtctcagagcc

SEQ ID NO: 860927 - DNA, 120 bp, Artificial Sequence
  ENSG00000267288_3 (sequence is synthesized)
tgacgctggctggtggtatctgcgttacccaggctgacccagctctctctgatgcagacaggcgagggcctcacacacttcagagaattcacacccacatgatgaggctgagaggagcag

SEQ ID NO: 860928 - DNA, 120 bp, Artificial Sequence
  ENSG00000267288_4 (sequence is synthesized)
atgctgaggaatgcagctgggaggctgccagcaaatgccaaggggcctctgggtcccaggctagcaccccacagcaccccacaggggcaggcaggcctccagaggctctcctggaatcca

SEQ ID NO: 860929 - DNA, 120 bp, Artificial Sequence
  ENSG00000267288_5 (sequence is synthesized)
aaaagccacttcctcgctaagcctccggtttcccgtctgcaaagtggcgatgatcattcctgctgcccttcctgactgagctgtctgaggacccagggttccaggggcaggtctcccagg

SEQ ID NO: 860930 - DNA, 120 bp, Artificial Sequence
  ENSG00000267288_6 (sequence is synthesized)
ctccctcccacctagaaaaccttctgtgcagtctgattgctccaacacccacagagcaggattcaggtatcccggagaccttgggaggtccccatccagaggtctgctgtcctgccaggc

SEQ ID NO: 860931 - DNA, 120 bp, Artificial Sequence
  ENSG00000267288_7 (sequence is synthesized)
ttggggcagcagggactgggaccccactcagacctctctggggcaaatgttttggttctcacaacagccctagtgaaatcaatcctagatactcccatttggtcccaccaaggccattta

SEQ ID NO: 860932 - DNA, 120 bp, Artificial Sequence
  ENSG00000267288_8 (sequence is synthesized)
atttctctgtaaagggtaagatgacacaaaagagccaactatggaaacggtgaggtgggagtctgaaccgatttagctgttctcagggcgcacagggtgttgacggtggttttcatctgc

SEQ ID NO: 860933 - DNA, 120 bp, Artificial Sequence
  ENSG00000267288_9 (sequence is synthesized)
gagacccagctggcctgagtgtgcacgaaatgggaccttctccttgggtccaccaggctgggaggcacccctaggtacccggctcctcatcacagcggcagccctctcggttccacatct

SEQ ID NO: 860934 - DNA, 120 bp, Artificial Sequence
  ENSG00000267288_10 (sequence is synthesized)
ggttctcctgacgaagccgctggttttcggtccggagcctctggacctcggcagccagctcctccacctggcggcaggactgctggccggtgcacgcctgcagctgctgcagcctcctag

SEQ ID NO: 860935 - DNA, 120 bp, Artificial Sequence
  ENSG00000267288_11 (sequence is synthesized)
tctcctcctccgcctgcgacagccgcttctccagctccaggtagtctcgcaccagctcctgcttgctgcggccctgcaggctctcggtgtggaagcgttcgtaagtctcagagaagtcct

SEQ ID NO: 860936 - DNA, 120 bp, Artificial Sequence
  ENSG00000267288_12 (sequence is synthesized)
tccgctggaactcaccgtgcgctcggccccgcccatcactgtccccggcctcactctccccactggaacctgggtgggagatcccatggggcacatccaagttgggctcctccgggtccc

SEQ ID NO: 860937 - DNA, 120 bp, Artificial Sequence
  ENSG00000267288_13 (sequence is synthesized)
tgtcattcatcaggaactgggtggtgttgtagggggccacgggctggcctttggcgaacatctcttcgcggacccgggaggccctctggctctgcctctcatcccgctgttgtttctcag

SEQ ID NO: 860938 - DNA, 120 bp, Artificial Sequence
  ENSG00000267288_14 (sequence is synthesized)
cccagctcagctccaggtagggtcgccagtgccttttgcgcttcgatggccgccgacggtgtttcttccgggccagcacagcctccgctgagcagccccctgggctctgggtccggggac

SEQ ID NO: 860939 - DNA, 120 bp, Artificial Sequence
  ENSG00000267288_15 (sequence is synthesized)
tcctactgttccagcccaggccaccgacagccccagcaagatcttcatcctctgagtggctctccatccgcggtgtcaggggcagggaaccaccagagtcatgacgctcagggggtgttt

SEQ ID NO: 860940 - DNA, 120 bp, Artificial Sequence
  ENSG00000267288_16 (sequence is synthesized)
gggggctccccggggcaccagaggtctaaagagagggaggaggaagaaggatggatcagacagcctgtccttggaggtggaacctttccctctctacctagcctgaagcctaccttccta

SEQ ID NO: 860941 - DNA, 120 bp, Artificial Sequence
  ENSG00000267288_17 (sequence is synthesized)
cactcagctaacttggtcactcttagcccctcaaccttttggaaccatttgtttacaaagagacctgtctactgtctgtcccccaaccttccccaagtaaactcatggtgagagcaggaa

SEQ ID NO: 860942 - DNA, 120 bp, Artificial Sequence
  ENSG00000250503_0 (sequence is synthesized)
aggtgaaagtctttcagaatatagatttaagaagaaaattaaaacatgataaaaataaagcagtaatgaagaaagggatgtaaacaaactatgggtatgaagacgcattactgaaaggtc

SEQ ID NO: 860943 - DNA, 80 bp, Artificial Sequence
  ENSG00000250503_1 (sequence is synthesized)
tgatgaagatggcaacagatgaaactaaatgttattaaaatatgaaaaggtattgtttgaatgatccaaaaatagtatta

SEQ ID NO: 860944 - DNA, 120 bp, Artificial Sequence
  ENSG00000228495_0 (sequence is synthesized)
gggaaatgccacagacatccatggtcttggatgctcaacagaagtgcttgccttggtgatccaaaaaaggcaggatccggccgggggcaaggtgattattctgtctgatgaggagaataa

SEQ ID NO: 860945 - DNA, 120 bp, Artificial Sequence
  ENSG00000228495_1 (sequence is synthesized)
gagccagtttgtggtattgacagaagaatgaaagtaaagttcaaccaatctacaaaggccaaaaatattttcacaggcccccaaaagatgaactccaatctgctgcccctaaacgcattc

SEQ ID NO: 860946 - DNA, 120 bp, Artificial Sequence
  ENSG00000228495_2 (sequence is synthesized)
tctccatctcaaatccttcaaagtgctgtcagaataaaagaatccccaccaaaagccccagggaaatctatctgtctgtatggtatggtaatgactgaggttattccagataggattctg

SEQ ID NO: 860947 - DNA, 120 bp, Artificial Sequence
  ENSG00000228495_3 (sequence is synthesized)
ggagaaactcagctattgaaatctaatgaatggaactgagaatttcttgttataatactgtttgtttgattgaatatatccttgcatataggaagacataaaaataaataataaaagcaa

SEQ ID NO: 860948 - DNA, 120 bp, Artificial Sequence
  ENSG00000228495_4 (sequence is synthesized)
gtctgaagatctttgtagtgcagctaatgtctaagggagaatatacctaccctagaagagacattaaacaaccagaaactcactttacaggaaaagaggtgcaacagtggctggatgatt

SEQ ID NO: 860949 - DNA, 120 bp, Artificial Sequence
  ENSG00000228495_5 (sequence is synthesized)
ataagatcgactgttcctattaaaaactacaccatccaaaagaggctgccattgaagagcaataaagtagttcatagaaggcataggaagcttactgcaggaaagaaatccctcagagtc

SEQ ID NO: 860950 - DNA, 120 bp, Artificial Sequence
  ENSG00000228495_6 (sequence is synthesized)
atggacagtacagaatgctctgctacactgctcagattcccccttcaggaaggaaggacaaattcactcaacttctgggagcattgatggttgagctctcagccatcagacctttttgga

SEQ ID NO: 860951 - DNA, 120 bp, Artificial Sequence
  ENSG00000228495_7 (sequence is synthesized)
agttgccctcttctgaaaagaggcacattgcccaagatctttcctcctccagagcgcaggctgcacctgaagtctgattgatgtggggttgttaatattctactttaaaattttaaagta

SEQ ID NO: 860952 - DNA, 120 bp, Artificial Sequence
  ENSG00000228495_8 (sequence is synthesized)
ggaaatacagctgagagcctctgttgacagatggatgccttcttaatcacagcctgtgacacccacatgactaggaggaggcagaaagtgaatagggagctcttattactttttgagtgt

SEQ ID NO: 860953 - DNA, 120 bp, Artificial Sequence
  ENSG00000228495_9 (sequence is synthesized)
tcaagtaataaagttaatgaatctgatttcaaataatatctttaaaatgaaaatgctcatagaaggagttaggaaagttcaatcaaaattgtcaataagagaagatttctacttctgaga

SEQ ID NO: 860954 - DNA, 120 bp, Artificial Sequence
  ENSG00000228495_10 (sequence is synthesized)
agatggagtagacatacatctacaaaacggatagaccttaaaagagaaatagacaagactacaattatacttcaaggtttcaacatccctttctcagcaactgacagaactgaacaaaaa

SEQ ID NO: 860955 - DNA, 120 bp, Artificial Sequence
  ENSG00000228495_11 (sequence is synthesized)
attgatgtggggtatgatggtctggtctcctttccccatctaaaggactgttctaacctcagggctctccttgagtttccttagttagttcttattactatgttgcagtccaacttcttc

SEQ ID NO: 860956 - DNA, 120 bp, Artificial Sequence
  ENSG00000228495_12 (sequence is synthesized)
tttggcctaattctactttcctcccattccccaattgttgatcctgacagcaatttccccccaaatttctgtaaactaagcatgatctcagagtcacctgacctgcaacattattacata

SEQ ID NO: 860957 - DNA, 120 bp, Artificial Sequence
  ENSG00000228495_13 (sequence is synthesized)
cactatagtccgtgcacttaaagatttagtgaaagtatgctgctgaagcttgccagaacttcccttcttccactgaaaatttgtctgttcatagatatacaccattcgttctcttctcta

SEQ ID NO: 860958 - DNA, 120 bp, Artificial Sequence
  ENSG00000228495_14 (sequence is synthesized)
aatcacagcctgtgtgggtaaagggaaagccttgcctggccaacccctcccactcccacccccacctcctgcattgattcacaaacctggactgctctggaggaggctgggaaagtccat

SEQ ID NO: 860959 - DNA, 120 bp, Artificial Sequence
  ENSG00000228495_15 (sequence is synthesized)
atcatctccagaaaactgtgctagttggcatccagcagtgcccaagtattatttaacccactagaacctgtgactgcatcagctttatatcctggacctcagcctggaacaaaggagagc

SEQ ID NO: 860960 - DNA, 120 bp, Artificial Sequence
  ENSG00000228495_16 (sequence is synthesized)
tacacttggatactaaacacaagtggtctggatagattatgctgggaaaagaagcctggagcaggcagtacagtgggagaacaagacagaagtgcttgccttggtgatccaaaaaaggca

SEQ ID NO: 860961 - DNA, 120 bp, Artificial Sequence
  ENSG00000228495_17 (sequence is synthesized)
tgtctcagctaagtgtgggagactgatactgatgagccattaacaatggtggagattctgaatcactgaagcacttgataaaagaaatgtcgtgggtgatgtgaaaatctacatatgccc

SEQ ID NO: 860962 - DNA, 120 bp, Artificial Sequence
  ENSG00000228495_18 (sequence is synthesized)
actattttggagtaagaaacaacacagaagaacacagtttcagcctgaaatggcttatttagccactgaccatcagaaacaattactttttaccttaacctagatttgtaatagcaggat

SEQ ID NO: 860963 - DNA, 120 bp, Artificial Sequence
  ENSG00000228495_19 (sequence is synthesized)
gcattgaattccttcattgaagtgaaaccttagcaaatctttaagtagtactctaaagtgacaaaaggtgtttacatttactaatgtaaatttcttgtggagataaagtttttattcttc

SEQ ID NO: 860964 - DNA, 120 bp, Artificial Sequence
  ENSG00000228495_20 (sequence is synthesized)
ttgggtctcaagactgctcaagaaggaaccatcgtttgttctacactgctctgttctaaatgtttgttcccccaatattcatatgttgaaattctaacccccaaggagatagtattagga

SEQ ID NO: 860965 - DNA, 120 bp, Artificial Sequence
  ENSG00000228495_21 (sequence is synthesized)
ggtggggccttcgggacatgataaggtcatgaggatgaagccctcaagaataagattcattgccttataaagaaaaaccagaaagatccctcatttcttcaatcataagaagacacatga

SEQ ID NO: 860966 - DNA, 120 bp, Artificial Sequence
  ENSG00000228495_22 (sequence is synthesized)
gcaagaagacggccagctatgaagcaggtcgtgggccctcgccagacactgaatctgccaacactttgatcttggatttcctagcctgcagaactgtgagaaataaatttcttttcttta

SEQ ID NO: 860967 - DNA, 120 bp, Artificial Sequence
  ENSG00000228495_23 (sequence is synthesized)
cagaatcagacttgcagcccatgataaaacagaagactgtctgtaacatcaaagaaatacagaagattttatggcttgctgtttgtttacctataagggaaatgcccgaatgcctaaagt

SEQ ID NO: 860968 - DNA, 120 bp, Artificial Sequence
  ENSG00000228495_24 (sequence is synthesized)
atatattacatgtagtttggctgcacttgaggaaaaacttggatttctaacttttatcaaacaaagaacgcattgtccctggtccatattgattggtgaaacacagaaattttccattta

SEQ ID NO: 860969 - DNA, 120 bp, Artificial Sequence
  ENSG00000228495_25 (sequence is synthesized)
tacagtgggagaacaaggtaagaatcaggtaaaagttgctatcactgaatcacagctttctctttacttgttttgggggactgtatttatattacttgtctctcaagcatccttaatata

SEQ ID NO: 860970 - DNA, 120 bp, Artificial Sequence
  ENSG00000228495_26 (sequence is synthesized)
tttatttactttctcaaaagtctttactgtcattaatctatttggattttcaaactgagtcagaagcatacattatgatatcattaacttgaggatatgctggaaccaaaatgtccttct

SEQ ID NO: 860971 - DNA, 120 bp, Artificial Sequence
  ENSG00000228495_27 (sequence is synthesized)
agaataaatgtgtattggagtaagtaaaaaacttaaggggaaaaacaggagagctactactcaacttttatggtggtttacatgtgttaggtgaggcaaaaaagaggtagaacataaaag

SEQ ID NO: 860972 - DNA, 120 bp, Artificial Sequence
  ENSG00000228495_28 (sequence is synthesized)
aaaaggaaatttaggtcattttttaggctaagaaaaatcaagttgggggaattcaaggactggaaacaccagtacaaagctaaagatacactttaattccagagatggtgtcttagaaaa

SEQ ID NO: 860973 - DNA, 81 bp, Artificial Sequence
  ENSG00000228495_29 (sequence is synthesized)
cactgcacccagccataatgatcttctttttaaagtactatataagcatcttagtacttaacatctttattgtctatatca

SEQ ID NO: 860974 - DNA, 120 bp, Artificial Sequence
  ENSG00000228495_30 (sequence is synthesized)
ataagcatcttagtacttaacatctttattgtctatatcaaactctaaaaccaagctccatgaaggcaaggatttgtcttcaaatcttttgctctctgttacttcccccagcatctaagt

SEQ ID NO: 860975 - DNA, 120 bp, Artificial Sequence
  ENSG00000228495_31 (sequence is synthesized)
actgcttagcacttacagcttttcaagaaataattgctgagtaaataaaagaactaatgagttttgctttctaaattttttattcttgattgaatattattaaatgatttgagactgaca

SEQ ID NO: 860976 - DNA, 90 bp, Artificial Sequence
  ENSG00000228495_32 (sequence is synthesized)
ggcagtacagtgggagaacaagatggagttttgctcttgtcgcccagtcgcaatctctgcccccaggttcaagggattctcctgcctcag

SEQ ID NO: 860977 - DNA, 120 bp, Artificial Sequence
  ENSG00000228495_33 (sequence is synthesized)
atttccttatgaatgacttcaggaagccagcatttttaataaataggaagtaaattatatttaatgactaaattctcacctaaagttgatactaatattacaataactctcttgtgccct

SEQ ID NO: 860978 - DNA, 120 bp, Artificial Sequence
  ENSG00000228495_34 (sequence is synthesized)
attttggtgttttaaacttctttgctgtacatttaagaaaatcagaatttcagtagactcctcgtgcagtctgaggaggcagtttcctatctggtttgacttaaggggctgcagaagaca

SEQ ID NO: 860979 - DNA, 120 bp, Artificial Sequence
  ENSG00000228495_35 (sequence is synthesized)
agtgggagaacaagtgatgactttagtcagaagtgtgctggagcagtttgcagagccttgcaaaattgatggtgcctatctatttccagctctatgttcatcaatgccagatcggcagac

SEQ ID NO: 860980 - DNA, 120 bp, Artificial Sequence
  ENSG00000228495_36 (sequence is synthesized)
tgaaatcagccgtgataaaaatgtttacactatggaaattggcaaatactaaaaatcatcagatactctctcaccccagacatgatcaatcattcaatagtacacaactgatttcagtgg

SEQ ID NO: 860981 - DNA, 120 bp, Artificial Sequence
  ENSG00000228495_37 (sequence is synthesized)
aagagagttatggtacataaatgatttttagttcttcatgttagatgtcttaaaattataagtctcaactttcaagtacctattaatctcaaaaaaattaaacctatattttacaagaaa

SEQ ID NO: 860982 - DNA, 120 bp, Artificial Sequence
  ENSG00000228495_38 (sequence is synthesized)
tttttccttttcttagcccaacatgagaggcttacacatgtaccccttttccccaaacttgtgaacttgtctgatatgtagtctcaagtttataagcttcccttagaaaaagttctattt

SEQ ID NO: 860983 - DNA, 120 bp, Artificial Sequence
  ENSG00000228495_39 (sequence is synthesized)
catttctacaaatcatacttctctcattttataatccttgaaatggatagtgctgcctcatcttagatgaggcattcaacagttttaatttctaagttataaattattatttcttcttct

SEQ ID NO: 860984 - DNA, 120 bp, Artificial Sequence
  ENSG00000228495_40 (sequence is synthesized)
tttttaaacgtcttagagacaaatctgtctatttcacataggaagccagttgagttgttcctcacgctttccccacgaagctgcatctgaaggacttcctcacccccccgctgtgatcac

SEQ ID NO: 860985 - DNA, 120 bp, Artificial Sequence
  ENSG00000228495_41 (sequence is synthesized)
ggaaaatgacaagaaacgacagccacggaatcttcctctggatatgagaacaaaaatagctgtcagaataaatagtggccacacccatgtcacttcttcatgaggtgacttggtgacttc

SEQ ID NO: 860986 - DNA, 120 bp, Artificial Sequence
  ENSG00000228495_42 (sequence is synthesized)
acaagataggccccaccccacccatatgaaatgagcaccatctgggctgacctcctctttcggggtctgtaattactgtacaaagatgcaggtgcgtctatgaaagcgaactttgtcgag

SEQ ID NO: 860987 - DNA, 120 bp, Artificial Sequence
  ENSG00000228495_43 (sequence is synthesized)
atctcagtgacacactctgcttttccaaattgcctcaattggcagtgaatattagaaagagtcatggaatgtctctggaaagatacataggagaactagtgacattggatccttgtgggt

SEQ ID NO: 860988 - DNA, 120 bp, Artificial Sequence
  ENSG00000228495_44 (sequence is synthesized)
agggagacactgtgtaagtgcatcaaagaggctgacttttcactgtgcacactccttcagaccactggaaattcggaattgtatacggtgtgcatgtattacctccttaaaactagctag

SEQ ID NO: 860989 - DNA, 120 bp, Artificial Sequence
  ENSG00000228495_45 (sequence is synthesized)
cctaccttcctacctggctaattcattagctaagtaaattaataaggtgttaaaaaaaaagaaaagccaaataactggaaacactgagatcttcctctgttgctatttagctaactgttc

SEQ ID NO: 860990 - DNA, 120 bp, Artificial Sequence
  ENSG00000228495_46 (sequence is synthesized)
aatttaactcttaaataagttatttcctccgagtttttttttcttttcttccacagaaactctgcacctaagcaacactggtttccttgttcttccccaaacatgccaggcacatcccag

SEQ ID NO: 860991 - DNA, 120 bp, Artificial Sequence
  ENSG00000228495_47 (sequence is synthesized)
cctcagcttctttgcaaaaacaatttccaatgcctggaaaaatcttgtttttgttatctccatggctcgcattttgcttagtttaagtcttgactcaaatatcactttctcaataaggcc

SEQ ID NO: 860992 - DNA, 120 bp, Artificial Sequence
  ENSG00000228495_48 (sequence is synthesized)
ataaggcctaccttgactgtcctatttaaaattgcaaacttaacaccccagaattcctcatatccattttatctttcatagtaatgatcttcttctttttttttttttttttgagatgga

SEQ ID NO: 860993 - DNA, 120 bp, Artificial Sequence
  ENSG00000228495_49 (sequence is synthesized)
gagactccctggggtgaagggaaatgccacagacatccatggtcttggatgctcatcttgaaagatgggaagatcaggagcagtctggagtcatggtatatgaatgaactagtgagagtg

SEQ ID NO: 860994 - DNA, 120 bp, Artificial Sequence
  ENSG00000228496_0 (sequence is synthesized)
gtgctggcttccccttcgccttctgccgtcatttgacaggaaattaggatgagcacgagcaaagtcggtggtcacaagggagcagccaggccagtcctgcttaaactcctgctgttacat

SEQ ID NO: 860995 - DNA, 120 bp, Artificial Sequence
  ENSG00000228496_1 (sequence is synthesized)
gtttgcgattgaactcgtagcaagctgccgatggaacacaacctgcctccggcacagacgccgatcttcaatcccttctccccagcaccggtgacagccctagtcatccttcaaggccca

SEQ ID NO: 860996 - DNA, 120 bp, Artificial Sequence
  ENSG00000228496_2 (sequence is synthesized)
gttcaaatgcctccatctccataccatttcagttcgtggttggggataggagctcccgtcgcgatcgtcatctttctgctgcagacagattttgtttccctctgtaaagttggagtgcag

SEQ ID NO: 860997 - DNA, 120 bp, Artificial Sequence
  ENSG00000228496_3 (sequence is synthesized)
gggacaaggctctgaacatagcatttaagtgacagagatggttgtggtcatgtcccagtatgtatttatctatctcctgctccagtaaatgtcacactccccggggcagcgagggtgtca

SEQ ID NO: 860998 - DNA, 120 bp, Artificial Sequence
  ENSG00000228496_4 (sequence is synthesized)
ggtttacgcctattgtcctgtaattatttatgcaccctcttttgctgtcataggtgttgggttggaacagtcaccctatttagcacacacctattaagccaaagcaccttagtgtgtagg

SEQ ID NO: 860999 - DNA, 120 bp, Artificial Sequence
  ENSG00000228496_5 (sequence is synthesized)
cttccctcacccaaacctgttcccaaaggtcctttctcaccggctactttgggggccccagtaatcttcccgacccctctggtcagggccagagtggggagcaagtgtctaaagcaaggc

SEQ ID NO: 861000 - DNA, 120 bp, Artificial Sequence
  ENSG00000228496_6 (sequence is synthesized)
cttcaacaaggtcccttccctgagagactcagtttgtgacgcttgtgattgtgaagctcaaatggattatgtgactccacataactctgcaaactgtggtgcgccctattattgccgttt

SEQ ID NO: 861001 - DNA, 120 bp, Artificial Sequence
  ENSG00000228496_7 (sequence is synthesized)
aacttgtcagtgtcggttctgcacccctgcaggctctgtaggggctggagaagaacacttgatttggaatttcggtaatagccagtgagctaagaaccacataaaataatgcagatcata

SEQ ID NO: 861002 - DNA, 120 bp, Artificial Sequence
  ENSG00000228496_8 (sequence is synthesized)
tgctggcttccccttcgccttctgccgtcattgtgagccgtggggaggccttgagcgccccctggaggtgacactctgccactacacataggaaaccacctggaaacccaaccacagtgt

SEQ ID NO: 861003 - DNA, 120 bp, Artificial Sequence
  ENSG00000250508_0 (sequence is synthesized)
attaggcacccaggggcccatggtcacattagaagttaaaggcagcaggattctgctgtatctggattccaatttctcactgatggctaagccactagatggagttacaaaaggggaaga

SEQ ID NO: 861004 - DNA, 120 bp, Artificial Sequence
  ENSG00000250508_1 (sequence is synthesized)
aaaagaacccctcctctgggaaacagcaggagaaggagccctgcctggtgaaaacttgcttatagacttcacagaacctccccgtgccggaggttattggttcatgctagtgcttgtttg

SEQ ID NO: 861005 - DNA, 120 bp, Artificial Sequence
  ENSG00000250508_2 (sequence is synthesized)
caccttttcagggtgttatgtcttggatccaccacagtcggctaacactggcagctcaggacaagtgaaccagccagcaggacccagatcatccaacctggctgatccttagatgagacc

SEQ ID NO: 861006 - DNA, 120 bp, Artificial Sequence
  ENSG00000250508_3 (sequence is synthesized)
gagttgctgctgaggacaacagccctgctctagtcactctggaggctgactagtctacgcacggctgaaacttgaggacttgtcaagcaagtaatgtagctaaaatcttaagactagtgg

SEQ ID NO: 861007 - DNA, 120 bp, Artificial Sequence
  ENSG00000250508_4 (sequence is synthesized)
ttttcgtgtacactaactgttttactattgttctgtcgctgtgctcaacctttttcccaggtaaggaccttttttgtccttgctggatatgaatatgctgtacattgttttgttgttacc

SEQ ID NO: 861008 - DNA, 120 bp, Artificial Sequence
  ENSG00000250508_5 (sequence is synthesized)
ccccttaaccatgtagaagaaacacctacagaaggtgtccccactgtacacatactacttggtcagggaacagtataactagaaccctattgcactatacttattatgagtgtacaggga

SEQ ID NO: 861009 - DNA, 120 bp, Artificial Sequence
  ENSG00000250508_6 (sequence is synthesized)
ctcgcttaggaacttgtacttataatcaaaccacctattcaacctgtgacccaggaaatggccagccttatatatgctatgaccctaagtgtttacctgggacttggtttgagattcata

SEQ ID NO: 861010 - DNA, 120 bp, Artificial Sequence
  ENSG00000250508_7 (sequence is synthesized)
ccgagtcaaagggaggaagttttgtaagttgaacccaagcctctcttcccgggggcggggggtggggtggctatatccatatactttgatatttgtcagttaacatccatgaaccagaga

SEQ ID NO: 861011 - DNA, 120 bp, Artificial Sequence
  ENSG00000250508_8 (sequence is synthesized)
ttgtgaactatctcacaatctctggtcctacagggtactatacaaactgccagtacaaaattgcatgtgcaccccgtttgcccctccgaggccctagcgatagcttgctggaaccgcaca

SEQ ID NO: 861012 - DNA, 120 bp, Artificial Sequence
  ENSG00000250508_9 (sequence is synthesized)
acgcagttcactgaccgatcatcaccgaggctaaagccaatcttgctcatcaaagtgccagcaaaaccggattgtaagacaagcacttgcaatcctgtaaatcttactatcttaaagcca

SEQ ID NO: 861013 - DNA, 120 bp, Artificial Sequence
  ENSG00000250508_10 (sequence is synthesized)
gatctacctatatagactgcaggttactccatggcattacaaagctacagtcaaaaaactaaaataactttgtatattctaaagaggactcaaaccaagcggtcagctcagcagcaattc

SEQ ID NO: 861014 - DNA, 120 bp, Artificial Sequence
  ENSG00000250508_11 (sequence is synthesized)
cgagtctttaagtcattctttgagcatataaaccaaaagttaccagagcctcctcctttagccaaaaacctatttgctcagctggctaaaaacattgcatgcagcctaggcatttcctca

SEQ ID NO: 861015 - DNA, 120 bp, Artificial Sequence
  ENSG00000250508_12 (sequence is synthesized)
tgttatgtttgtagaaggactaacatgggagactaatagcctcaggaagcaaaagagttaatgcctcaagataactttactctgactctctctttccccaaacagacacgcacaagttca

SEQ ID NO: 861016 - DNA, 120 bp, Artificial Sequence
  ENSG00000250508_13 (sequence is synthesized)
ttaaaaacttctattattagcagatactgtgttgctccctagggaaaagtttttacagacccagtaggagaactaacctgcttaagacagcaatattataatgaaacattaaggaaaact

SEQ ID NO: 861017 - DNA, 120 bp, Artificial Sequence
  ENSG00000250508_14 (sequence is synthesized)
ttgtggcagggcagagatgactacaaagcacctcatccaaatctgttctcctgtttctcttctctaaaccacacttggtatcaacttgaagctccaaatacttggcaagcaccccccgtc

SEQ ID NO: 861018 - DNA, 120 bp, Artificial Sequence
  ENSG00000250508_15 (sequence is synthesized)
tttattggatctgtaggctacaggcatattgacagttgccagttaaatggacagaggtgtgcttagaacgattagaccatctttcttcctactcccactgcaacagggaaaaacttcaag

SEQ ID NO: 861019 - DNA, 120 bp, Artificial Sequence
  ENSG00000250508_16 (sequence is synthesized)
gtaccctgtctatgatgaagttagaagaagaaacaaaagagatgcagacacaaagaggtataaaaataagagattgaaaaggcacaaattagccccctgaaaaaataattccatactata

SEQ ID NO: 861020 - DNA, 120 bp, Artificial Sequence
  ENSG00000250508_17 (sequence is synthesized)
ggccagctacctgggcacaagataggtcatagggagaccgcactcctatctacatgcttaaccgtatcataagattgcaggcagaacttgaaatcatcaccaatgaaacaacaaatgcat

SEQ ID NO: 861021 - DNA, 120 bp, Artificial Sequence
  ENSG00000250508_18 (sequence is synthesized)
tagatgtactggcccagcaaaccacaacattgagaaacgctacctatcagaacagattagctttagactacctcctagcccaggaaggaggagtatgtggaaagttcagtctaactaatt

SEQ ID NO: 861022 - DNA, 120 bp, Artificial Sequence
  ENSG00000250508_19 (sequence is synthesized)
gttgcctggacatcgatgacagcggaaaagcaattatagaaataactgcaagaatgagaaaattagccagtgttccagttcaaacttagaaaaggtgatccccagattctctctttggag

SEQ ID NO: 861023 - DNA, 120 bp, Artificial Sequence
  ENSG00000250508_20 (sequence is synthesized)
actggttttcattttttggagagttcaagactttaataggagtagtgctggccacactgggaagctgcataatactccattgtctcttacctttccttgttagaagtattcaatcaacta

SEQ ID NO: 861024 - DNA, 120 bp, Artificial Sequence
  ENSG00000250508_21 (sequence is synthesized)
tagaggcaatagtagccaggcaaactacaactcagctaatagctctgtgtaaatatcaacctttgtctaaagaagaaaacttgtctcttcaggcagaactaagtaatagtgatgcctttt

SEQ ID NO: 861025 - DNA, 120 bp, Artificial Sequence
  ENSG00000250508_22 (sequence is synthesized)
attaaacttatttcataaaaggcatcaaaggggagaaactgaggcagaaatttaaataataataataataaatactgcatttcttcactccaagaaaagtaaaagctaaggcccagaata

SEQ ID NO: 861026 - DNA, 120 bp, Artificial Sequence
  ENSG00000250508_23 (sequence is synthesized)
tggcaaggcaaaggctaaaaagaaaagaacaagttttcctcttgcctagcagctcactttaaggaaagttagaagataacgctgtccaaatagccaaggccaaaggaatgggctccagac

SEQ ID NO: 861027 - DNA, 120 bp, Artificial Sequence
  ENSG00000250508_24 (sequence is synthesized)
acccccctcccttccagagcaagcttgaaagaaaaaaaagaaagacaggttcttttactgttactcttttcccaggcttcttaagcatgattagcatgattatgttttacaaatgtctgt

SEQ ID NO: 861028 - DNA, 120 bp, Artificial Sequence
  ENSG00000250508_25 (sequence is synthesized)
atttagccagttcttatttttcttttaatgcagctacaaggccactggctaggtcacaaattatgttatgctatagattacgtgacctgttactgtatgattaactgcttttattttgct

SEQ ID NO: 861029 - DNA, 120 bp, Artificial Sequence
  ENSG00000250508_26 (sequence is synthesized)
actgtttttattttgcttctgtaagaccgcttataaaaaccctgctctttgttcagggctcagctttcggatgtgaatcctctgagccggtgcgtacctaaaataaacaaatcctcctgt

SEQ ID NO: 861030 - DNA, 120 bp, Artificial Sequence
  ENSG00000267280_0 (sequence is synthesized)
acacgcgagagcccgaggcgacaggctaggccgccagcaggtgccctggcaggagggactggcttatgccaccctgtgcaggatcgtcttctcagcttacagagcctagtgtgattcaac

SEQ ID NO: 861031 - DNA, 120 bp, Artificial Sequence
  ENSG00000267280_1 (sequence is synthesized)
gtgtgtgaagggggcagggtccccaggagctgccccaggtctggctggacagttgcacgggaagtcctgtttgtgaactcaacgtttccacggcttttccattaaactttaccccaaatc

SEQ ID NO: 861032 - DNA, 120 bp, Artificial Sequence
  ENSG00000267280_2 (sequence is synthesized)
tcgtggcgccgcctgggggtccctgcgccccggaaagagacagcaggcactggaaagcgaggccggtgggcgggcgagtcgggaggctcgggcggccgaggtccgggagcggatcccagg

SEQ ID NO: 861033 - DNA, 120 bp, Artificial Sequence
  ENSG00000267280_3 (sequence is synthesized)
tggcgggagctgttgccacgctggctcccaccggcctctttccagatcatgaaggtatttttccttcatcaaattgagaggaagtccgtagtaaagctgcccgttgaccaggtagtgccg

SEQ ID NO: 861034 - DNA, 120 bp, Artificial Sequence
  ENSG00000267280_4 (sequence is synthesized)
tggagagcgcggagggccgacctgacccgccgaaagggcctgaggcgaggggagcccgggtcccggggccttggggaaggacccgcagccgcacgccggccccaagtgcaaagcattgac

SEQ ID NO: 861035 - DNA, 120 bp, Artificial Sequence
  ENSG00000267280_5 (sequence is synthesized)
tggccgagccctgctggggccggcgcgggcgggagcgggacgcggccttgcgctggggaaacgcggggaccccctacccgcgcccgccttcaccggaagactcggaaggaacctggagtt

SEQ ID NO: 861036 - DNA, 120 bp, Artificial Sequence
  ENSG00000267280_6 (sequence is synthesized)
ccctggcagcaaggtctctgccacatccacgtgtcctggggtggtttcagaggggctcatgcttcctagggcagctgaacccatccccaggaagacaggccatgggcagcatgcacaggt

SEQ ID NO: 861037 - DNA, 120 bp, Artificial Sequence
  ENSG00000267283_0 (sequence is synthesized)
ggctttccgcagtgaactcgggggcactatcctcggtacccagatgcccacctgtgtgccactcccctcccaaaccagcccctgagcccgagctctgttacctgcagcgaactcctcgat

SEQ ID NO: 861038 - DNA, 120 bp, Artificial Sequence
  ENSG00000267283_1 (sequence is synthesized)
gacaacggcattgaacagccgcacctcacggatgcccagtgtgtcgcgctccaggacagccaccagcgtgtctgtggggtggaggaaggggctgcgtgaacacgacacccacatgcccac

SEQ ID NO: 861039 - DNA, 120 bp, Artificial Sequence
  ENSG00000267283_2 (sequence is synthesized)
cctgcaggaggcagtgagactaacgtgaggaccagcagttaaagccgggctggcaactatggcccgtggcccaaatctggccctgtgagtgtgtttataaataaagctttatcaacacaa

SEQ ID NO: 861040 - DNA, 120 bp, Artificial Sequence
  ENSG00000267283_3 (sequence is synthesized)
tcagctaagcaagagcgggggccgcgtggacctggggaaggccagacggcgagtgtgcaccagccccagggctctgtcccagccccttctggaaagttccaggcctgttttgctccagag

SEQ ID NO: 861041 - DNA, 120 bp, Artificial Sequence
  ENSG00000267283_4 (sequence is synthesized)
ctggatggcgtcaggcagtgagcagccacgagggcaggaggcatcgttagcgctgccccttcacgtcaccctggaacccaggccctgcagcaggggaccccaaggcccactcgggcgcat

SEQ ID NO: 861042 - DNA, 120 bp, Artificial Sequence
  ENSG00000267283_5 (sequence is synthesized)
cagcaggtagcacaagggcgcgagacggggactcccttccctcctgggaagatgccaccaaaacagctggacagacacgagaggcggggtctggcagtgtgcacggtggggacagagccg

SEQ ID NO: 861043 - DNA, 120 bp, Artificial Sequence
  ENSG00000267283_6 (sequence is synthesized)
ggccggggctaacagatggccctgtggacgcgtcctcacaagccagcgaactcctcgatggtcatgagcgggaagcgaatgaggcccagggccttgcccagaaccttccgcctgttctct

SEQ ID NO: 861044 - DNA, 120 bp, Artificial Sequence
  ENSG00000267282_0 (sequence is synthesized)
gctttgacccttgcagcattttgattggctccagcgtgtacggggtcgaccttggtggcgtatcagcttggtactctcattggctaacgttccagggtcgaaggacaggtaaagcgtctg

SEQ ID NO: 861045 - DNA, 120 bp, Artificial Sequence
  ENSG00000267282_1 (sequence is synthesized)
gatgatgcccccgatgatgccgcctgtggcccctgcgcctgctgtgttgggggtctctgcaaggagagggacagcgtgagggggtctccaggaggaagccacagctccttattccaagcg

SEQ ID NO: 861046 - DNA, 120 bp, Artificial Sequence
  ENSG00000267282_2 (sequence is synthesized)
accatcccaccccacatcatcgcctgcctgtctatgtcctctcccatgggcaggggacattctttcattcaactcaaactgctgagcatgaggaaggagcgaggatgtgtgccccgcatg

SEQ ID NO: 861047 - DNA, 120 bp, Artificial Sequence
  ENSG00000267285_0 (sequence is synthesized)
taacaatctcagatgagactaagtgggtctcttacttttgtgtcgtctagtaaggagccataactgaaatatcctcctttttattaccataatgatataactataggaaaagaaaaaaca

SEQ ID NO: 861048 - DNA, 88 bp, Artificial Sequence
  ENSG00000267285_1 (sequence is synthesized)
ttattaccataatgatataactataggaaaagaaaaaacatgagccatgattgacagaaattactctccttgtcagagatcatttcct

SEQ ID NO: 861049 - DNA, 120 bp, Artificial Sequence
  ENSG00000267285_2 (sequence is synthesized)
gatgattgccgacaccccagcaaccagttctcacactccgttttcaggtaccatcccctgcctattcctgcaggagtaactgctctactgaattctgacagtattgattaattgtatctt

SEQ ID NO: 861050 - DNA, 120 bp, Artificial Sequence
  ENSG00000267285_3 (sequence is synthesized)
aaaaaatcaaaacttaaagattttctgtcaacagagcaaccagggacccagaggcagaagccaggggagccaccacaggcagagggcacagccttgagtcagaggattgttctcagacct

SEQ ID NO: 861051 - DNA, 67 bp, Artificial Sequence
  ENSG00000267284_0 (sequence is synthesized)
gaagagtccaacagaaaattttaagtacctgtttaaagcaatttacaagatactgtggagattccca

SEQ ID NO: 861052 - DNA, 120 bp, Artificial Sequence
  ENSG00000267284_1 (sequence is synthesized)
attcccagcaataaagaatgtactatagttaagctggaatccaactcctgaatttctggagccctgaagaccacttagtcttactcacaagaattgaatggaatgtgaatctacactcag

SEQ ID NO: 861053 - DNA, 120 bp, Artificial Sequence
  ENSG00000267284_2 (sequence is synthesized)
gtgaagccagggtattttgaacgtccctacaagactgaagcaccactgggaaataagtaatagagatgccatcattgtggaggtcataatgcttgtcctgaacacgaggggtctctagtg

SEQ ID NO: 861054 - DNA, 120 bp, Artificial Sequence
  ENSG00000267284_3 (sequence is synthesized)
gagaggcggccaagatggcggtgctggtcgaccacgcctcctccgggagcggaggcgggtggctgttctcggatgtgcctgcttcccctttgtctgctgtgactataggtttcctgaggc

SEQ ID NO: 861055 - DNA, 120 bp, Artificial Sequence
  ENSG00000267284_4 (sequence is synthesized)
agagactacatgggtgctgaagaaacaaagacacaacgcagctcctctcaaaggagttcagagcttagcaggggagacagaaccatgaatgcatagttacgcatcaatgtgctgcacgag

SEQ ID NO: 861056 - DNA, 120 bp, Artificial Sequence
  ENSG00000267284_5 (sequence is synthesized)
cactgaagcccaagcacaagcggcctgagtcccaaaaacatttgctgactgctgttctatctaggatatcatcagtgtgtagatgatcagagttcatgtcagtgttcctacaagccaatg

SEQ ID NO: 861057 - DNA, 120 bp, Artificial Sequence
  ENSG00000267284_6 (sequence is synthesized)
aaggtaggattcaacaaaaaacagagatctgtgttctgaatggaaaaattcctactgatgccacccactagtctggaacaagtcagtctcaaacataacaacagacactggggagctctc

SEQ ID NO: 861058 - DNA, 120 bp, Artificial Sequence
  ENSG00000267284_7 (sequence is synthesized)
agactgaatgccagcctgaggaaacagaaatactacagaagcacgccagagcctgcagtgtctcctcgctgcctctcaatgaactgctaaaagaccaagaactctgctgagagataagaa

SEQ ID NO: 861059 - DNA, 120 bp, Artificial Sequence
  ENSG00000267284_8 (sequence is synthesized)
gaggggagggtgtgctgcaggtggtgctgggaggcccagaccttctcctgacatctggggctggctacaggaaacagaaacatcacccaggccttggcgcgagacaggacagaggcagat

SEQ ID NO: 861060 - DNA, 120 bp, Artificial Sequence
  ENSG00000267284_9 (sequence is synthesized)
tgtgactcagatctgcaggtggaaagtgggcctttcgttttctcctaggggtagagcaaagccagagggctcagtcagaggaaacctaaggcagttcatgatcccttcaactttatacca

SEQ ID NO: 861061 - DNA, 120 bp, Artificial Sequence
  ENSG00000267284_10 (sequence is synthesized)
tttcctcaaaactgcctccaaacagtgggcaactggaaaggtggtctgacctccagtgatcacacagtatgcattataacagaaggctgtcactgtcaattgcatggctccctcactatg

SEQ ID NO: 861062 - DNA, 120 bp, Artificial Sequence
  ENSG00000267284_11 (sequence is synthesized)
cattccttctatcaatttacgacaacacactgtagtgagtacctgcacattgctgggtattttggcagacattgatagtagatgaataacacctggtacttgaccttgagacgctcactg

SEQ ID NO: 861063 - DNA, 120 bp, Artificial Sequence
  ENSG00000267284_12 (sequence is synthesized)
cctagtgtggggaaccaatggttgcaatataaagtattaactagagggatagaggactgcctgaggatctctgcactcagaggaagggccatgagatcagccaggacagtagggaggcag

SEQ ID NO: 861064 - DNA, 120 bp, Artificial Sequence
  ENSG00000267284_13 (sequence is synthesized)
tgactcatgaaattagcaagtggtgagaagagggcagtagattcagcggctgctaaaaaaggttactgaactttttgtttcatcaatgccaagaaattaatctgttttagcctctttcat

SEQ ID NO: 861065 - DNA, 120 bp, Artificial Sequence
  ENSG00000267284_14 (sequence is synthesized)
ttggctcctccctctgaagaaagcaatgtagaagacagattggaagactagaagacagtccggaggccccagaggaagctaatggtctgaaataacagcttaagaacaaagaactgtgaa

SEQ ID NO: 861066 - DNA, 120 bp, Artificial Sequence
  ENSG00000267284_15 (sequence is synthesized)
taaacttaaaagttatgcctttcttatatggtaaaaggactttctcctgaaatgcaataaacttgagatgactaggggaatgaacacgcaatggaagctggagatagacatctgggaggc

SEQ ID NO: 861067 - DNA, 120 bp, Artificial Sequence
  ENSG00000267284_16 (sequence is synthesized)
ctctgtagggctctcattcttctttctgacaccatgtgaagaaggacatgttggcttccccttctgccatgattagtccaacagaaaattttaagtacctgtttaaagcaatttacaaga

SEQ ID NO: 861068 - DNA, 66 bp, Artificial Sequence
  ENSG00000267284_17 (sequence is synthesized)
caatcagcgagactccctgggcataggaccctacgagccaggtgcgggatataatctcgtgttgca

SEQ ID NO: 861069 - DNA, 120 bp, Artificial Sequence
  ENSG00000267286_0 (sequence is synthesized)
cctggtttcactgatgaggaaactgaggcctatgaggagatcagaagtgccctgtggccactccaggcttcaacatgggaccgtggcgccaaagctcagcccagccacgcacagggcttc

SEQ ID NO: 861070 - DNA, 120 bp, Artificial Sequence
  ENSG00000267286_1 (sequence is synthesized)
aaaattataattctgttctcttacactctcaaaatcatcacggtttgatgtgaaactggtaagctctgagcggggttgggagtgcatcaatgcgttatctggctgtggtagcagatgagt

SEQ ID NO: 861071 - DNA, 120 bp, Artificial Sequence
  ENSG00000267286_2 (sequence is synthesized)
tatgcaaaatatttccgctggggaaagtgggtgagggcatatggaattctgtttgtgttaattcttgcaacagtgtgcaaatctacaattatctcaaaattaaaagtttttaaaaaatta

SEQ ID NO: 861072 - DNA, 120 bp, Artificial Sequence
  ENSG00000230289_0 (sequence is synthesized)
cgtacctgcacaggtggtcgctgatgtgctgcaggaccacagggagcagaaggatttggaaggagacccgattccgtaaggggagcaggtggccctggtcgctggaaggaaaggtgacca

SEQ ID NO: 861073 - DNA, 120 bp, Artificial Sequence
  ENSG00000230289_1 (sequence is synthesized)
cgtgtcctgtgttcaggacctgctcctgaggctaaacaggttgggagaactttcacctggcagagcctcaagcgcacctggcacccaacatggagcaaacacaaagcatttagaatctca

SEQ ID NO: 861074 - DNA, 120 bp, Artificial Sequence
  ENSG00000230289_2 (sequence is synthesized)
gtgaacacaggcctctgatgcaggaaaccaccaggttccccagttccaccaaggaagacgcatcggttccctgtgaaaacatctgtgactttatgtacgaataaaacttatgtaacttta

SEQ ID NO: 861075 - DNA, 120 bp, Artificial Sequence
  ENSG00000169763_0 (sequence is synthesized)
agagacatgaataaaatgggcctcaacaatcccaagagaccactcaaggacaatgggagccactgggcttggctttctactttcctggagacaagacaatttgaatggcactgactgcca

SEQ ID NO: 861076 - DNA, 120 bp, Artificial Sequence
  ENSG00000169763_1 (sequence is synthesized)
gggatgcaatattttatacttctctgagactacggggagcatgtgttctgaactttccttgaacagaggtcttgaggccagaaggaagaaggatcttaaagactcatttctctggagata

SEQ ID NO: 861077 - DNA, 120 bp, Artificial Sequence
  ENSG00000169763_2 (sequence is synthesized)
tgggaaggttggctgtatctcacttccacttcgtgagatgaccgcctggattaacccaccccaaatttcagagattttccaaggctaccaccagagggtgcacggagctgatgcactgag

SEQ ID NO: 861078 - DNA, 120 bp, Artificial Sequence
  ENSG00000169763_3 (sequence is synthesized)
cctgcaaaccaactctctgagaagcaggttatcttcacagtgcctcggacagagcttccttctcaggacactcgagagaggccgtggtttcagggcacttggggacatctgtggccacgt

SEQ ID NO: 861079 - DNA, 120 bp, Artificial Sequence; identical to SEQ ID NO: 562611
  ENSG00000169763_4 (sequence is synthesized)

SEQ ID NO: 861080 - DNA, 120 bp, Artificial Sequence; identical to SEQ ID NO: 562612
  ENSG00000169763_5 (sequence is synthesized)

SEQ ID NO: 861081 - DNA, 120 bp, Artificial Sequence
  ENSG00000169763_6 (sequence is synthesized)
gaggcagtgaccacgcattgtcacagctaccaaagtgtggtttgcagatgatctgggcttgtttctggcggagattctggtacagagaaaggagaggcgctgagtggaaccacgatgggc

SEQ ID NO: 861082 - DNA, 120 bp, Artificial Sequence; identical to SEQ ID NO: 562640
  ENSG00000169763_7 (sequence is synthesized)

SEQ ID NO: 861083 - DNA, 79 bp, Artificial Sequence
  ENSG00000254302_0 (sequence is synthesized)
aaggaagtggactgctcctgcaggacctgggagacaccccaaatattatctataaactcaattttaggaagtcaagtat

SEQ ID NO: 861084 - DNA, 120 bp, Artificial Sequence
  ENSG00000254302_1 (sequence is synthesized)
caaatattatctataaactcaattttaggaagtcaagtatcttcccgaaagtcacacaagtaaagatggacttgggtctctaatccatttgtttgacttcaaaacatgttatctccattc

SEQ ID NO: 861085 - DNA, 120 bp, Artificial Sequence
  ENSG00000254302_2 (sequence is synthesized)
gagtgaatgaaaaatgaaaatgggaagataaaatacagattatagttttcaaggattggagctggaaggagttgcctgtttgagagctgtgttaaggtctgagaaacatgtgcatgttgt

SEQ ID NO: 861086 - DNA, 120 bp, Artificial Sequence
  ENSG00000254302_3 (sequence is synthesized)
gcactgcaagaaaggaatcaagaggaaggagaggatggagatatagaagatgaaaatcagccagagtaacaaggctccaggaaagccacatggctatgtgcatcccttagagaaacaaat

SEQ ID NO: 861087 - DNA, 120 bp, Artificial Sequence
  ENSG00000254302_4 (sequence is synthesized)
ttggtatttacccaaaggagttgaaaattatttctacacaataacatgaacatggatgtttaagcagctttacttgtaattgctgaaacttagaagcaaccaagatgctcctcagtatgt

SEQ ID NO: 861088 - DNA, 120 bp, Artificial Sequence
  ENSG00000254302_5 (sequence is synthesized)
catggaggaaccttaactgcatctcactaagtgaagagaaacaatcagaaacagctacatactgtgtgattccaagtataagacatctgaaaagggtaaaactatgtagacagtaaaaag

SEQ ID NO: 861089 - DNA, 120 bp, Artificial Sequence
  ENSG00000254302_6 (sequence is synthesized)
ataagtggttgtcaagggttggggggagtggaagagggagggatgaataggcagagtgcagaggatttttagggcagtgaaaatactccgtatagtactataataatggtagatacttgc

SEQ ID NO: 861090 - DNA, 120 bp, Artificial Sequence
  ENSG00000254302_7 (sequence is synthesized)
cattacacatttgtccaaattcatagaatgtacaataccgagagtgaaccttaatgtaaattataaactttgggtgattaagatgtgtcaatatagattgatcagttatatcaaatgtac

SEQ ID NO: 861091 - DNA, 120 bp, Artificial Sequence
  ENSG00000254302_8 (sequence is synthesized)
cactctagtaggaaatattgatggctagggaagctatgcatgtataaagacaggggtatatgggaaatctctgtatcttgatcaaaattttcttgtaaacctaaaactgctctaaaaagt

SEQ ID NO: 861092 - DNA, 120 bp, Artificial Sequence
  ENSG00000254302_9 (sequence is synthesized)
aaaactttttttttttaaagaaaattacacagctatctgttttggaaaataaattttggaaaaatgtataaaagcagtaaatagataaaagacaactttaataaagagcataaaaacata

SEQ ID NO: 861093 - DNA, 120 bp, Artificial Sequence
  ENSG00000251151_0 (sequence is synthesized)
ggcacccgatccccgacccgagagctgtggcctgggcctggcagggtgggcggctcctgggtcaccatctcaggggcccacaaggctttggccttggagccggttctgctgctttacttc

SEQ ID NO: 861094 - DNA, 120 bp, Artificial Sequence
  ENSG00000251151_1 (sequence is synthesized)
aggccctggcggtcctcgctttccgcttgaccttgcccccgctaaaacagggaatattccgggaaagaaagagggaacctgcggagcctcggtcagtttggaggagtcacgtatcacacg

SEQ ID NO: 861095 - DNA, 120 bp, Artificial Sequence
  ENSG00000251151_2 (sequence is synthesized)
ggaaaccagcacacaagacgcaacaaaacccgacccagagaagcgtcctttacagagcgcacgggctgggagcatgtttgaaagaagacagaccagtctatttttgtggttgtttttaaa

SEQ ID NO: 861096 - DNA, 120 bp, Artificial Sequence
  ENSG00000251151_3 (sequence is synthesized)
taaaaggaagaaataaggggaaccgtatgtttcaaacagttatttccgtttctccatcgccttcttccaaagcgaactaaactctccaccccttcctcaggaaacggaatctggagaaca

SEQ ID NO: 861097 - DNA, 120 bp, Artificial Sequence
  ENSG00000251151_4 (sequence is synthesized)
acttgtctttcctgtcgccccacatttttccttggacagagcctagggttcagactttccgaagggctggagtttggcggggaaaggactggagcccagcgccctggagtggaggagtga

SEQ ID NO: 861098 - DNA, 120 bp, Artificial Sequence
  ENSG00000251151_5 (sequence is synthesized)
ggaggctagaccgtttctaaggaggcccaagcccgctgcggctagaagaccgcagaaagaaatccgccgaatttccccatccaggggtggagagagaagacgcaggggttcctgaacctc

SEQ ID NO: 861099 - DNA, 120 bp, Artificial Sequence
  ENSG00000251151_6 (sequence is synthesized)
cggaaaactggaaggaaatgtggagtgtatgatttgcttgcaggaccggccaggggagatttgaaatggttttgtgttttcatatgcagggtcaccgtggcctcagcatgggggttatcc

SEQ ID NO: 861100 - DNA, 120 bp, Artificial Sequence
  ENSG00000251151_7 (sequence is synthesized)
agggcaaggttaggctgtttaggccccagacttgggacagtccgggcagcagtcaatccagggagccatttgtcccaccgcccatcccgcgggaaacgggcgagactttatggccactct

SEQ ID NO: 861101 - DNA, 120 bp, Artificial Sequence
  ENSG00000251151_8 (sequence is synthesized)
gtttgtattatctgcattagtctttccccaccagtttgatcgaaaccgttcccttttacgaggacccaacgaaaatttcccgtcatatttatcagccagggataaaaatttagtatggga

SEQ ID NO: 861102 - DNA, 120 bp, Artificial Sequence
  ENSG00000251151_9 (sequence is synthesized)
actgatatttcctcatttatgggacgatgaaattaaataccaaagcaattgagaattatatggctttgggggttccctcccccctctttcacgtctcctttattttcctgcctggtgtgc

SEQ ID NO: 861103 - DNA, 120 bp, Artificial Sequence
  ENSG00000251151_10 (sequence is synthesized)
ttttcccaggaatttagcgtcccagttccctacccttaccccccactttggagtctggtgggtccttttccccacggccaagtggcccttggccacctcagccttttctttttttttttc

SEQ ID NO: 861104 - DNA, 120 bp, Artificial Sequence
  ENSG00000251151_11 (sequence is synthesized)
agccaggacaggctgggatcagagaaaggtttccagggaagagccgcaaagggtttgagcccagcctgggagggggtgaaggagtcggcaggaaagggtgaaggagataaacttcagaca

SEQ ID NO: 861105 - DNA, 120 bp, Artificial Sequence
  ENSG00000251151_12 (sequence is synthesized)
agccccaaggcgtagcctggggaaccagcagacagggagcagacccatcggcctcaggggtcccaccacccaacctctttccaagcccacctctcaccttagccaagggagaggacagag

SEQ ID NO: 861106 - DNA, 120 bp, Artificial Sequence
  ENSG00000251151_13 (sequence is synthesized)
tcgcttcggaattatcgccatcattaatgaaaataatactccagggaggagcctcccgcctcgactcccacctcctcacaagacagaatagtgtttaaagttgaaataattagaagtatg

SEQ ID NO: 861107 - DNA, 120 bp, Artificial Sequence
  ENSG00000251151_14 (sequence is synthesized)
ataaacacggccgattaatgaaaaaagaaatcaaattcatcagcctaagtgggacccccggtgggacaaatgtttgcctctaattacgcaagataaacgaaaacccggtgctgctaaact

SEQ ID NO: 861108 - DNA, 120 bp, Artificial Sequence
  ENSG00000251151_15 (sequence is synthesized)
agagcccgctcggacgcagacctgaataacttgttgggttttcacagactttgagattctgcttcagtggaggtaaaaggaaggaaaaagtgagtgttttatcctggcgaagggagcatt

SEQ ID NO: 861109 - DNA, 120 bp, Artificial Sequence
  ENSG00000251151_16 (sequence is synthesized)
tgtgcgggcctgggtcccagccctgcccccttgggctcggtctttcccgaggccacgagcaaaggctgtttcggtcctattgtccgggcctggcgttcaaaggcatgcgggccgccacag

SEQ ID NO: 861110 - DNA, 120 bp, Artificial Sequence
  ENSG00000251151_17 (sequence is synthesized)
cgaccccgcctgccgccactgccaggcacccaccgccctgccccacagggccaagatccttcagcctgtgcccttggcaactggattaggatccaggggaggcctgtgttgctagaatca

SEQ ID NO: 861111 - DNA, 120 bp, Artificial Sequence
  ENSG00000251151_18 (sequence is synthesized)
cccacatatggacttttattaatccatttccccaactttccgagggcgctgagacacctatgcctatgcctacgtctggggctcccccctcttacctcaacttgggaacatgaaaatcca

SEQ ID NO: 861112 - DNA, 120 bp, Artificial Sequence
  ENSG00000251151_19 (sequence is synthesized)
ggggctgcaagccacagtggggctcaagctgtgcatacgacctgacaaatcccacccagggccaatgccctggcccctttctcccttcccgggtacccagatcctggaaaggcaacaagg

SEQ ID NO: 861113 - DNA, 120 bp, Artificial Sequence
  ENSG00000251151_20 (sequence is synthesized)
acggggctgggcctccttctgtctgtggggctgtgagcaatgcagaggaggagggttcaggagctctgtgaatactctgggaggatccagcgggttccacagggcagcccaagggctggg

SEQ ID NO: 861114 - DNA, 120 bp, Artificial Sequence
  ENSG00000251151_21 (sequence is synthesized)
gcgctaggggtccccacgtgaaagcagaagaaggaaaatatgctcaatgaacaaaaaaggacctttgttgctttcttggctgtagccctcaacacaccccagaagcaccctggtttctcc

SEQ ID NO: 861115 - DNA, 120 bp, Artificial Sequence
  ENSG00000251151_22 (sequence is synthesized)
agcaaaaaattggagtttccccaacaggttaagaaagtcaactgggaaattctgaagatgaagtgaaaaaggaagaatgtctttcccttttgggttaaataataaaataaaaataaagtg

SEQ ID NO: 861116 - DNA, 120 bp, Artificial Sequence
  ENSG00000251151_23 (sequence is synthesized)
agtaaccagcctgtaactcctggggagaagggggcggagaggggggaaatgcgggagagagggagagagcgaggcaacccggggctcaaaacagtcaaattcaaattaaaaggtcgagac

SEQ ID NO: 861117 - DNA, 120 bp, Artificial Sequence
  ENSG00000251151_24 (sequence is synthesized)
cgataggcggctttggggtcgccccaggagtccagctgcgagagaccaatgggatttgaaaatggccttgatgattcagacggccgtgacgtcagcggggtcaagttgtcggcaggcgga

SEQ ID NO: 861118 - DNA, 120 bp, Artificial Sequence
  ENSG00000267751_0 (sequence is synthesized)
tgtggctcacgtctgtactcccagagccttgggaggtcgaggcgggaagatcgcttgagcccgggagctcgagaccagacgcggcaacatggcgagacgcacatctctgcctttaaaaat

SEQ ID NO: 861119 - DNA, 120 bp, Artificial Sequence
  ENSG00000267751_1 (sequence is synthesized)
ctcagcaacgcgggtaggaaggacccttgaagttccgcggcgaccacgtcggctgaaaccagcagcccaggacaagtggaccagccagcaagacccagaccatccaaaccggctgatcct

SEQ ID NO: 861120 - DNA, 120 bp, Artificial Sequence
  ENSG00000267751_2 (sequence is synthesized)
acgacaggacccagatgccagtgaaagtgaccacagccctgctctagtcaccccggaagctgaccagtctacgcacggccgaagcttcgtcaaggaagtaaatgtagttagaaatcttaa

SEQ ID NO: 861121 - DNA, 120 bp, Artificial Sequence
  ENSG00000267751_3 (sequence is synthesized)
cgtgtgctctggagattgcatcccacgcaggcagcccccttccgtacaagtaaagtggtctcgctgagaaattttctaagtgctggtttctctttgcgggaccgactcgccgcccccaaa

SEQ ID NO: 861122 - DNA, 120 bp, Artificial Sequence
  ENSG00000267751_4 (sequence is synthesized)
tatcccatttggatcccattctgtttcaggagaggctggcggttacctttcttggggagacgcgtccgactgcttcattgtgggggcctcaggagcggaggatcgggtcccgcccgaggt

SEQ ID NO: 861123 - DNA, 120 bp, Artificial Sequence
  ENSG00000267751_5 (sequence is synthesized)
catgctactcttccctttgttcttgctgctctcgctagatctatgtcagaaggagggatatgcggagagtttaatttaactaattgttgcctaaaaatcgatgacaatgaggaggacgtc

SEQ ID NO: 861124 - DNA, 120 bp, Artificial Sequence
  ENSG00000267750_0 (sequence is synthesized)
gcgcgtagacgatgcggaacttctgctccatcttgtgccacttgctgtaccagctgtcctcatcggtgacgagcgggaggtacgggtgctcgggcgagttgtcctcgctcgtgctgctct

SEQ ID NO: 861125 - DNA, 120 bp, Artificial Sequence
  ENSG00000267750_1 (sequence is synthesized)
cggcgctgtgccgctcctcctcgtccgtcaggtagtaaagaaattgatggtccaagaggttgactgatctgttcggagtcacatggcttatgagtagtcaagcagttccaggcatttctg

SEQ ID NO: 861126 - DNA, 120 bp, Artificial Sequence
  ENSG00000267750_2 (sequence is synthesized)
cagaggtctgatgtgcacagcactgtgctgggcactagtgctgggagacagatgcagtgtggtggagtgcgtgcccaggaaccgggaaggagctatgggagccaggagccagggcatcag

SEQ ID NO: 861127 - DNA, 120 bp, Artificial Sequence
  ENSG00000267750_3 (sequence is synthesized)
gaacatccctcccaggactcactcacacctattctccaactctgcctacctgctcaattcacctgatgctctgccagtggattgctgatgtctctacattgattcagatttgcacccaca

SEQ ID NO: 861128 - DNA, 120 bp, Artificial Sequence
  ENSG00000267750_4 (sequence is synthesized)
tctgaaaatggtcagcaggcagggaccctctgtcaccacaggtggaggaagaggagatgaaagagccttgtctgacaccctggagactgggaaactacccagactgtgtcctctccctct

SEQ ID NO: 861129 - DNA, 120 bp, Artificial Sequence
  ENSG00000267750_5 (sequence is synthesized)
tactctcctaaaggaagacaaggaagacaatgacaaatggcgtttgcagcaaagcaacaccaacagccaacttgatgctcaagagagaacgctatgcctcttcctcatggtttccagtgc

SEQ ID NO: 861130 - DNA, 120 bp, Artificial Sequence
  ENSG00000267750_6 (sequence is synthesized)
tatgcctcttcctcatggtttccagtgctctacacattctgagaaacttttctggtaataaactatagaaacaatgagactgtgcccatgggagagaccccatctctacaaaaaatacaa

SEQ ID NO: 861131 - DNA, 120 bp, Artificial Sequence
  ENSG00000267750_7 (sequence is synthesized)
tggattccccagctacttggaaggctgagatgggaagatcacttgagccccggaggttgagactgcagtgcgccatgatcacgccactgtacttcagcctcagtgacaaagcgaaagcct

SEQ ID NO: 861132 - DNA, 120 bp, Artificial Sequence
  ENSG00000267750_8 (sequence is synthesized)
ttcagcctcagtgacaaagcgaaagcctgtttcaaaaaaaaaaaaaagacagagagaaacgggctggggacggtggttcacacctgtaatccccgcactttggaaggccgaggcaggtgg

SEQ ID NO: 861133 - DNA, 120 bp, Artificial Sequence
  ENSG00000267750_9 (sequence is synthesized)
gtctctactaaaaatacaaaaatgagcaaggcatggtggtggatgcctataatcccagctactcagaaggccgaggtgggagaatcacttgaatcccaggagacagaggttgcagtgagc

SEQ ID NO: 861134 - DNA, 120 bp, Artificial Sequence
  ENSG00000267750_10 (sequence is synthesized)
gagccgagatcgcgccactgcactccagtttgggcaacagaatgaggctccatctcaagaaacagaaaaagggaaatgatccctgaaagtacactcttttgttgtagtttttatttgcat

SEQ ID NO: 861135 - DNA, 120 bp, Artificial Sequence
  ENSG00000267750_11 (sequence is synthesized)
gaaatgatccctgaaagtacactcttttgttgtagtttttatttgcattttgctaacgattagtgatgttgagcaccttttcatgtgtttactggctatttgttttcttttttttttttt

SEQ ID NO: 861136 - DNA, 120 bp, Artificial Sequence
  ENSG00000267750_12 (sequence is synthesized)
tttgttcatttttgggttgcttggtttttgttgttggtgttgagttttttaggagctgcctctatatcctggatatcaattccttatcagatatataacttgcaaatattttctcccatt

SEQ ID NO: 861137 - DNA, 120 bp, Artificial Sequence
  ENSG00000267750_13 (sequence is synthesized)
ctgccaattaccttttgaatttgttgatattggttttttgatgcacaaagttcttaagttttcatcaaagctaatttgtctattttgttgttattgttgcccccatctttggtgtcagat

SEQ ID NO: 861138 - DNA, 120 bp, Artificial Sequence
  ENSG00000267750_14 (sequence is synthesized)
ccaaaaaaattattgccaaatccagtgttgggaagcttttgccatatgttttcttctaagagttttaaaagtttaggtcttacatttaggtatttgatccattttgagttaatttttgtc

SEQ ID NO: 861139 - DNA, 120 bp, Artificial Sequence
  ENSG00000267750_15 (sequence is synthesized)
gatagtgttaggtaagagtccaactttattctcttacatgtggatatccgttttttccagcactatttgtttaaaaaacaaaaatcaaacaaacaaaaacctgtcctttccccattaaat

SEQ ID NO: 861140 - DNA, 71 bp, Artificial Sequence
  ENSG00000267750_16 (sequence is synthesized)
aaaatcaaacaaacaaaaacctgtcctttccccattaaatggtcttggcattcttgtcaaaaatccagatt

SEQ ID NO: 861141 - DNA, 120 bp, Artificial Sequence
  ENSG00000267750_17 (sequence is synthesized)
attacaggcatgagccaccgcacctggtctgatcaagtttaagactgcattgcaccacagcactgcagcctagacaacagagcaagaccctatgtcaaaaaaaaaaaaaatcatttgatc

SEQ ID NO: 861142 - DNA, 120 bp, Artificial Sequence
  ENSG00000267750_18 (sequence is synthesized)
acagagcaagaccctatgtcaaaaaaaaaaaaaatcatttgatcataggccaggtgtgatggtacatacttataatccgagctactcaggagggtgaggtgggaagatcacttgagccca

SEQ ID NO: 861143 - DNA, 120 bp, Artificial Sequence
  ENSG00000267750_19 (sequence is synthesized)
ctctaaaaaaattagataaataaaaaaaataagaaatcacttgcagaccaggcacagtggttcacgcctgtaatccagcactttgagaggcctaagtgggcggatcacttgaactcagga

SEQ ID NO: 861144 - DNA, 60 bp, Artificial Sequence
  ENSG00000267750_20 (sequence is synthesized)
cagagattggagtgagctgaaattgtatcacttcactccagcctgggtgacagagcgaga

SEQ ID NO: 861145 - DNA, 120 bp, Artificial Sequence
  ENSG00000267750_21 (sequence is synthesized)
gagcgagaccccgtctcaaaaaaaaaaagaaaagaaatcacttgctcatgtgtgtaagagtttacatgagggcctctgttctatttcattggtctatacgtctgtctctatgccaatacc

SEQ ID NO: 861146 - DNA, 120 bp, Artificial Sequence
  ENSG00000267750_22 (sequence is synthesized)
tctatacgtctgtctctatgccaataccactctattttgatgaatgtagctttgcagtgagttttaaaatcaggaagtataagtcctccagctttattccttgttcatatttcaactttt

SEQ ID NO: 861147 - DNA, 120 bp, Artificial Sequence
  ENSG00000267750_23 (sequence is synthesized)
gtgataatcatttccttgcttttctttatatttttatcacccatgtgtgcaccgcctacaagcagaacctaacaggacagtaatggaggctagggaactggtttgcagagtcccagcccc

SEQ ID NO: 861148 - DNA, 120 bp, Artificial Sequence
  ENSG00000267750_24 (sequence is synthesized)
cttccaacatcagagagcagagaaaataagaatgaatttgaagctgaaagtcaataagcaaataactggcattatctaccccttttttctatgcagtagttacacatctatccatcatat

SEQ ID NO: 861149 - DNA, 120 bp, Artificial Sequence
  ENSG00000267750_25 (sequence is synthesized)
ttgaataataacagcttcatccctttgcctaatagatgcaactgtcctttgctcaaatgaagatgctctggggccctcccccaaaagcagagacgcaaagtctctacagcaatgggatcc

SEQ ID NO: 861150 - DNA, 120 bp, Artificial Sequence
  ENSG00000267750_26 (sequence is synthesized)
ctttccgtgtgatgtgaattctcctagttcagccacatgtcctctagagtattctgcaacctaaattatgaaggtcatcaccaacaacaatcctcataaaaaataagagaaaagaaggag

SEQ ID NO: 861151 - DNA, 120 bp, Artificial Sequence
  ENSG00000267750_27 (sequence is synthesized)
aggaaagttaaccaatatttaaagagtgtatataacaaaacaagcaagagaaaacatgcccatggcttctacaatccttgcttctatatctggtcagaagctgatattataactttcctc

SEQ ID NO: 861152 - DNA, 90 bp, Artificial Sequence
  ENSG00000267750_28 (sequence is synthesized)
cttctatatctggtcagaagctgatattataactttcctcttccattacccttgaagggttcaagggattctcggggtgcccaccaacca

SEQ ID NO: 861153 - DNA, 61 bp, Artificial Sequence
  ENSG00000267750_29 (sequence is synthesized)
tcgaactcctgacctcaagtgatccccaatctgtattctttatttttattattgttattat

SEQ ID NO: 861154 - DNA, 67 bp, Artificial Sequence
  ENSG00000267750_30 (sequence is synthesized)
ggcgtgagccaccgtgcctggccccaaatctgtattctttatttttattattgttattattattatt

SEQ ID NO: 861155 - DNA, 60 bp, Artificial Sequence
  ENSG00000267750_31 (sequence is synthesized)
ctggtgatccgaacctttattcttaaaataaaggtttcaagaataaacctttattcttga

SEQ ID NO: 861156 - DNA, 120 bp, Artificial Sequence
  ENSG00000267750_32 (sequence is synthesized)
tcttaaaataaaggtttcaagaataaacctttattcttgaaattagcattctacaaattggaatcctcagaactgtattgctcttttttttttaacttttactattggacacggaaatag

SEQ ID NO: 861157 - DNA, 120 bp, Artificial Sequence
  ENSG00000267750_33 (sequence is synthesized)
gacatggcacaccagggagtcccctgggttccagacatagtcctccctgcctttcttttggagttagaacccagcttacccttggcatttgggatcagtcatcccagaaggtaacccctt

SEQ ID NO: 861158 - DNA, 120 bp, Artificial Sequence
  ENSG00000267750_34 (sequence is synthesized)
ttttgccctgagctcaggtgagagccttatcttccaggtagtggaaccattgcagtatctcctcgtgaaaggattcctcccttagtgtggcagatgctggcagtgccctcccatgttcct

SEQ ID NO: 861159 - DNA, 120 bp, Artificial Sequence
  ENSG00000267750_35 (sequence is synthesized)
gaagctcttgggttcactggatgaacttccagctgccagaacctgcagctctttatctaaggactctctctggccactggagcctgctgagcaggctgaaagttctggggaattatactc

SEQ ID NO: 861160 - DNA, 120 bp, Artificial Sequence
  ENSG00000267750_36 (sequence is synthesized)
ccagccacagcaaccttcagccaatcaccgatggggatcggtgcgtaaatagccagcttcctcatccctcaggtcctgcagcaaacattatgactggctccctgagttccttcttaggat

SEQ ID NO: 861161 - DNA, 120 bp, Artificial Sequence
  ENSG00000267750_37 (sequence is synthesized)
acattatgactggctccctgagttccttcttaggattaagctctggttgtccacgtgttttgtttgtttgtttgtttgttttgttgttgttgttttgtttgtttttgagacagagtctca

SEQ ID NO: 861162 - DNA, 120 bp, Artificial Sequence
  ENSG00000267750_38 (sequence is synthesized)
atgtttttaacttgcttgataacacaccctttatgagcctcctttctttccaatgtcagtctcccactggcttgcttggtattcctagcatcgcttttcaaataaacacttgtgtttctc

SEQ ID NO: 861163 - DNA, 120 bp, Artificial Sequence
  ENSG00000267750_39 (sequence is synthesized)
acactctgggcccgagactcctcgctcctcctcgcctcgcctcgcctcgagtctctggctccgacctctctactcccttgtttctgacctgtgctccgtggtgtctctgatctccccctg

SEQ ID NO: 861164 - DNA, 120 bp, Artificial Sequence
  ENSG00000267757_0 (sequence is synthesized)
tttttggcgctacagttgctgctggaggatgtggtccggctgcgggggtcctcacggcgcaccgaggcgaggcgctctggtgacaagtagcggcggacactgctaaaagagagcacacag

SEQ ID NO: 861165 - DNA, 120 bp, Artificial Sequence
  ENSG00000267757_1 (sequence is synthesized)
gtcttggaagaggctgggggtcccggccttgtgccttacctgcgcccggaggtcgcctccttcttgggagaggatggggacgtggcatagccacccacgcgccgcgggggtcccgagcca

SEQ ID NO: 861166 - DNA, 120 bp, Artificial Sequence
  ENSG00000267757_2 (sequence is synthesized)
agtctaacggggatacccgaggcagtggtgcctaagcgcggaggcgcccggcccttgggggtgccccgcgcgcgtagcgccgctccctgttcttcgcatgcccgcaggcgacgcagagca

SEQ ID NO: 861167 - DNA, 120 bp, Artificial Sequence
  ENSG00000267757_3 (sequence is synthesized)
tccgccagcgccgcctttaggaccgccagctcgtcttcctgtaactgcagccgctgctccagcgccgacacgcggtcgtccacttccataccgctcgtgcccgacaaattgtcatctgga

SEQ ID NO: 861168 - DNA, 120 bp, Artificial Sequence
  ENSG00000267757_4 (sequence is synthesized)
ggtccctccaaggctctggcaccgtccccgcttttgaactagctggccccactctaggttacgacctcgtggcctggggcatgactacatttctcgaccatttcctccctatctctttct

SEQ ID NO: 861169 - DNA, 120 bp, Artificial Sequence
  ENSG00000267757_5 (sequence is synthesized)
tctaagcggggggccagccacgcccctttcctgtcccgctacctggggctgggacacttggacatgagccaaggaagaggactctgaagggggaaggaaatccccacagctctccaaccc

SEQ ID NO: 861170 - DNA, 120 bp, Artificial Sequence
  ENSG00000267757_6 (sequence is synthesized)
atccgcacactcctctctgccacagcgcgctggccgtgtgaccttggggaagtcccttccctcttattttctaagagtctgtgaacccaggagcctctcgctctggctttaagatgctat

SEQ ID NO: 861171 - DNA, 120 bp, Artificial Sequence
  ENSG00000225783_0 (sequence is synthesized)
gggtgggcaggctggagtagacaggaaccacgagaggcagggaggactgtacaggggttgctgaccaggtggaagatgatgggagcctcagaaggtgtcgtgggacagggtcagggagag

SEQ ID NO: 861172 - DNA, 120 bp, Artificial Sequence
  ENSG00000225783_1 (sequence is synthesized)
ggctctatgcggccaggatctggatgcagattgttgagactgaaatttggctcagatcccttctagttgtgtctgtttatcttcagtttccttgtctataaaatggggagagattgtgtg

SEQ ID NO: 861173 - DNA, 120 bp, Artificial Sequence
  ENSG00000225783_2 (sequence is synthesized)
tccccggcatcactggactgttaatagctattgcatttatagcatttatcccagaacctgaaacacagtaaatgctcagtaagtgttattatttgccccaaactgtcttagtgctttccc

SEQ ID NO: 861174 - DNA, 120 bp, Artificial Sequence
  ENSG00000225783_3 (sequence is synthesized)
caagagctttgtgttgtttgtactatgaggaataatgagggtggtgtgggagtcggcctctgtgtctgcagagaggaccacaggccacaggaatagagacaggtagataggatcaaggtg

SEQ ID NO: 861175 - DNA, 120 bp, Artificial Sequence
  ENSG00000225783_4 (sequence is synthesized)
acaggaacagatgttcagagcaagagatgaagacggcatcatcaacccagacaagccagttggaggcatctgtccacccatgtggttccagacacgttcatgtggccaccatgaccccgt

SEQ ID NO: 861176 - DNA, 120 bp, Artificial Sequence
  ENSG00000225783_5 (sequence is synthesized)
tatttaaacttaccagcccatagcctaccagcctgccctcttctggtctgtgcaggaaagtgtagtatcctagaatgccaaagtgggaggggaaatgggtgatgtagctcattctctttt

SEQ ID NO: 861177 - DNA, 120 bp, Artificial Sequence
  ENSG00000225783_6 (sequence is synthesized)
ctacctctatggaagaaagaaagagcctgtccccattttgtggggtcccagaaagggtgattttcacacttcacatttggcgttagggctagtatttcacaaacattaccgtctggaact

SEQ ID NO: 861178 - DNA, 120 bp, Artificial Sequence
  ENSG00000225783_7 (sequence is synthesized)
tttgaaggctgagttaaatgacttcatcttgtgtacttgtagaactgctattagaaggaggctggggactccctgatgatgtgaaccagcccttctcttctcagtttcagcactttgtga

SEQ ID NO: 861179 - DNA, 120 bp, Artificial Sequence
  ENSG00000225783_8 (sequence is synthesized)
tcatatttataaaccttggacagggctccttggccttagagttaagtgaagagttaacactgtgactttagatgcatttttctcagtgtaagtgtctgagctcatctccagttctggact

SEQ ID NO: 861180 - DNA, 120 bp, Artificial Sequence
  ENSG00000225783_9 (sequence is synthesized)
cgtgcccccactcccgggtgctgacagcaagctctgaagatatgctgagagagctccctgactctcctgactcaggtctgccagttgatgaagacagcacagttgttaccaaaaacaaaa

SEQ ID NO: 861181 - DNA, 120 bp, Artificial Sequence
  ENSG00000225783_10 (sequence is synthesized)
attaaaatttcatgggcgctgcagcagctacaaagacgacgccggctgcgctcgcgggaccagagggagggaggctgcggacgagtgcggggaggagtttgagatgggaggcgcttgcag

SEQ ID NO: 861182 - DNA, 120 bp, Artificial Sequence
  ENSG00000225783_11 (sequence is synthesized)
gggctcccccagttctgcgctgtgagccggggcacaaagagccctctgcactagcgccgcaggaccgcggacccgagttggaggcatctgtccacccatgtggttccagacacgttcatg

SEQ ID NO: 861183 - DNA, 120 bp, Artificial Sequence
  ENSG00000225783_12 (sequence is synthesized)
ccgtatgtcctgagacctcctgaatcttaagagagcagcaagttcctgggacagaggagacagaagggaatttccaggttcttcaggacgttcacaaccacactgagaagcatctttgca

SEQ ID NO: 861184 - DNA, 120 bp, Artificial Sequence
  ENSG00000225783_13 (sequence is synthesized)
agctagcccctttgtgcggcgggggctgcggagtgctccctccaagaccggttgcaccccgctttcctggccaggactctgggcgcggttggaggcatctgtccacccatgtggttccag

SEQ ID NO: 861185 - DNA, 120 bp, Artificial Sequence
  ENSG00000225783_14 (sequence is synthesized)
gtgcggcgggggctgcggagtgctccctccaagaccggttgcaccccgctttcctggccaggactctgggcgcgggtccacagaacgaggggaaagggtcactgtggatcaagccaggct

SEQ ID NO: 861186 - DNA, 120 bp, Artificial Sequence
  ENSG00000225783_15 (sequence is synthesized)
gaacagatgttcagagcaagagatgaagacggcatcatcaacccagacaagccagtgctttctgagaagccctccagaaccgcagcattggaagcttcaagatttagtcattcttctggc

SEQ ID NO: 861187 - DNA, 120 bp, Artificial Sequence
  ENSG00000225783_16 (sequence is synthesized)
aaacatatgtggaaggcctccggggtagcacacccttcaccgtgccctggagatgctgggatgcgacaaaaaaagaaaagaccacatgaggacacagtgagaagctgccatctgtgaatc

SEQ ID NO: 861188 - DNA, 120 bp, Artificial Sequence
  ENSG00000225783_17 (sequence is synthesized)
gaggagagaggcctcaggagaagttgaccctgcttctaccttggtcttggacttccagcctccttaagttgtttgttaagacaccccagtctatggtattttgttatgactgtccttgct

SEQ ID NO: 861189 - DNA, 120 bp, Artificial Sequence
  ENSG00000225783_18 (sequence is synthesized)
gacaagtatcctctttaatgtacctattccagatttctcctcttccctgtctccctaacctgctcccttaccaaggcttcctggtaccaatacctcctaaataaacaacttgcatttgaa

SEQ ID NO: 861190 - DNA, 120 bp, Artificial Sequence
  ENSG00000225783_19 (sequence is synthesized)
ctccagactggtgacacagggtggtcttaaaagagtcctagtccagcctctggctccccgaatttcctctggtgcatggggcatcaggaaagggcaggggagaaggagggggagcagaaa

SEQ ID NO: 861191 - DNA, 120 bp, Artificial Sequence
  ENSG00000225783_20 (sequence is synthesized)
aataactgaggctgggcagaagggtcccttccatttcccatccattgcttcaaacaatgggtgattaccgtgcaccttgagtgaatgtcaaggcaggaagggttccagggccacccagtg

SEQ ID NO: 861192 - DNA, 120 bp, Artificial Sequence
  ENSG00000225783_21 (sequence is synthesized)
tggcaggagcagagctgggatcagaattctggattcctgactctccgttcagctgctattcagctatcaccaagctgctgagtttgtcctactttctcctgggtcacattctgctgttgt

SEQ ID NO: 861193 - DNA, 120 bp, Artificial Sequence
  ENSG00000225783_22 (sequence is synthesized)
tgggaaacagggagtgagtgaagggaacctgggaacccttctcccctcaccttttaaggatgttctggggtggaataaagagaggtggagggtggggtgcctgggcccagcctccctggc

SEQ ID NO: 861194 - DNA, 120 bp, Artificial Sequence
  ENSG00000225783_23 (sequence is synthesized)
tcctggtccttctttcttcagcagggagttctggcaaggcctgggcctggggagggggcctgggtgcagttttctcctgcggtgtggttggctcttttgtcttccaggatgggcctgtgg

SEQ ID NO: 861195 - DNA, 120 bp, Artificial Sequence
  ENSG00000225783_24 (sequence is synthesized)
ggtctgtgtggggaaggaaggagctgggagcctgggctgcctgtgtgtcggctggatgctgccagcaccggcatggaccaagcaacttctctgagccagatgctggggacgcagaggtga

SEQ ID NO: 861196 - DNA, 120 bp, Artificial Sequence
  ENSG00000225783_25 (sequence is synthesized)
acccagagacatgatcccatctgctcagatcttcatgtcagaacacgctttattacagtctcggcaagggggtggctccatctgggccgcatctccaggactcctggcctggacttctct

SEQ ID NO: 861197 - DNA, 120 bp, Artificial Sequence
  ENSG00000225783_26 (sequence is synthesized)
ttggacctcgggtgaccttggattctggccacagtgacttagcggtcagactccggtggttttctagcccgctgggtgactccctgaagatctcatcctcttcacacctgttgggatgga

SEQ ID NO: 861198 - DNA, 120 bp, Artificial Sequence
  ENSG00000225783_27 (sequence is synthesized)
gcctcccatggataggaactcttcctggttgatgctcagcagatgactgatctggctctggaggacagctccaggggtatgagggaggcctggcagcccactactccctcctcacctgct

SEQ ID NO: 861199 - DNA, 120 bp, Artificial Sequence
  ENSG00000225783_28 (sequence is synthesized)
cgggccctgcctgctgggccctattgtctgggtctgggggccctttcctgccccatgtgaacttgattcctcctcgcgtttctgccggtgaccagacagagcctggcctgggccaagtcc

SEQ ID NO: 861200 - DNA, 120 bp, Artificial Sequence
  ENSG00000225783_29 (sequence is synthesized)
ccactgaccacactttccccaaggctgggtctcaaaggaccctacaggatggggacaggaacaaggatgggagtcggggaggggctgtcaggcagagggcagatgcagctcctcgggtgc

SEQ ID NO: 861201 - DNA, 120 bp, Artificial Sequence
  ENSG00000225783_30 (sequence is synthesized)
cgctggctggagtcctttgtctccatttgctcagtgcgtaattgtcattttgtgggggacttccttggtggggcttttccatgcttttcctctccctgatggttacaaagaggagacagt

SEQ ID NO: 861202 - DNA, 120 bp, Artificial Sequence
  ENSG00000225783_31 (sequence is synthesized)
caggatctgggaggagctggagccttccccctgtgctgttgaactctgggaggggcagccagaggggctgagagtgcaccatcctgaaaagagagggtctttaagagataagatttaggc

SEQ ID NO: 861203 - DNA, 120 bp, Artificial Sequence
  ENSG00000225783_32 (sequence is synthesized)
tagggaaattcactagaaagagacaggtggccctgggttttttttcctgccatccaaagggaaccagtcttacccaaaggcttaaggggtcaccttagcccagtctcaggacactcttct

SEQ ID NO: 861204 - DNA, 120 bp, Artificial Sequence
  ENSG00000225783_33 (sequence is synthesized)
ccaatcagatcgctgcttctagttgcactgctcctggattctgttcttggggaacagaaggtggcaggacaggccccacaatctgcaattccagctccctccagaggagacagtcccagc

SEQ ID NO: 861205 - DNA, 120 bp, Artificial Sequence
  ENSG00000225783_34 (sequence is synthesized)
gtttgcaagagagcagcttgtggcctcccttaggcaagtttaaaagccagatgtcctttttcccagaatgcggagtggtgtgtactattcatcagcttgggctgccacagcaccatgcca

SEQ ID NO: 861206 - DNA, 120 bp, Artificial Sequence
  ENSG00000225783_35 (sequence is synthesized)
gactggatggcttaaacatcaggaatttattttctgccagttctggaggctggaaagtccagatcaaggtgttaagacttggtttctggtgaggcctctctccttggcttgcaggtggca

SEQ ID NO: 861207 - DNA, 120 bp, Artificial Sequence
  ENSG00000225783_36 (sequence is synthesized)
ccttctcactatgtcctcacatggccttttctctgtggagagggacagagagcatgagcaggctctggtgtctcctcctcttcttataaagacactaatatcaccatattagggcttaaa

SEQ ID NO: 861208 - DNA, 120 bp, Artificial Sequence
  ENSG00000225783_37 (sequence is synthesized)
cctatgacctcatttaaccttaaccccttaaaggtcccatctccaaaaacagtcacatagcaggctactgcttcaacatatgcatttgggggaggggacaccattcagttcttaacaggg

SEQ ID NO: 861209 - DNA, 120 bp, Artificial Sequence
  ENSG00000225783_38 (sequence is synthesized)
tggtcaccgcaaacatggaaagtcagagccttctccccttcagaattcccgcccccacccagggatggggaggaggagcagagaggtatgggaagcagacacggagagtggcaggtacca

SEQ ID NO: 861210 - DNA, 120 bp, Artificial Sequence
  ENSG00000225783_39 (sequence is synthesized)
tgctggggtggctcaggagtgcttcggaggacatatggaactggcagggctcagtgcagggaggcggaggccctgggagagccgtgtcctgagaagggcctgggctacaaccctgggcaa

SEQ ID NO: 861211 - DNA, 120 bp, Artificial Sequence
  ENSG00000225783_40 (sequence is synthesized)
gttacttcacctctgagcctccgatgctctgtgaaatggaaggaatgtgcttgcctgtcaggtgcagggagaattcagtgagattgtgtgcctagcacagtgcctgactcccagtaggtg

SEQ ID NO: 861212 - DNA, 120 bp, Artificial Sequence
  ENSG00000225783_41 (sequence is synthesized)
ctcagcaaatgctcccatccatctgggagtatagacttagggtttatctatttttttttttttttggctctctggactttaaaactcagcatcttctgaaccagaggcatttctgattag

SEQ ID NO: 861213 - DNA, 120 bp, Artificial Sequence
  ENSG00000225783_42 (sequence is synthesized)
cccttccctacctattttcctagtatcactctttaatcagcttggggaggtggcagcatttcatggcctccgtagtaactcacaatgcttcctggggtatttaaattctactctctcatc

SEQ ID NO: 861214 - DNA, 120 bp, Artificial Sequence
  ENSG00000225783_43 (sequence is synthesized)
agcactgagcacctactttgggccctttcccgtgctagccatttgggggaaatataggtgaagagtggctggggtttgaacctttaggatttcacagccatgctggatgggataaaacca

SEQ ID NO: 861215 - DNA, 120 bp, Artificial Sequence
  ENSG00000225783_44 (sequence is synthesized)
gctcacatggagaatcagagaatgggacagtgccacaaaacagtctactgaggcacaagttctgagtgcctgggaagtggtagagagaccccagagagggctgctgcagtctggaacagc

SEQ ID NO: 861216 - DNA, 120 bp, Artificial Sequence
  ENSG00000225783_45 (sequence is synthesized)
ttcctagcaagctgtaccaaacagggccttgaaggatgagaaagatctggctgagatgatacccgaccctctagggaaattcttaaagtaacttctaggaaatgtcattgctccttaaaa

SEQ ID NO: 861217 - DNA, 120 bp, Artificial Sequence
  ENSG00000225783_46 (sequence is synthesized)
aaaaaaaaaaaaaaaaaaaagcaggttctaattcaaattccgctgcactactgaagtagtgcaggacttatcagaacctttaaaatgctaatggcaatttcaaatactcagggacagggc

SEQ ID NO: 861218 - DNA, 120 bp, Artificial Sequence
  ENSG00000225783_47 (sequence is synthesized)
ataggatgaagtgttccttgacttttatggccgtagaatctttttctcatggaacatcgtttagaactgtgggagatgctaggctggggtttctatgggaaaagtacagcagtgatagaa

SEQ ID NO: 861219 - DNA, 120 bp, Artificial Sequence
  ENSG00000225783_48 (sequence is synthesized)
gatggcataattagggtacacttaggtgctttgtagcattggctgaaaaggaagcagaccgggtgggcgtgggggagtctcaacttggttccaggagccaggccagcttgatgcgttttt

SEQ ID NO: 861220 - DNA, 120 bp, Artificial Sequence
  ENSG00000225783_49 (sequence is synthesized)
tttttttctaatggtgggagggcaggccaatagttggagaaactagaggcctgacagtcggtgatggaagagatgtctactaagcacggttgtcagatcttttgcggagagatgcgggtg

SEQ ID NO: 861221 - DNA, 120 bp, Artificial Sequence
  ENSG00000225783_50 (sequence is synthesized)
tgcgtgtgtctgtcagagtgtaacaggatccagccctctgggaaggggctgaccagaaccaggcagggggtttctgtctaggacaagtagggtccattttcaggggagctgaaatatttg

SEQ ID NO: 861222 - DNA, 120 bp, Artificial Sequence
  ENSG00000225783_51 (sequence is synthesized)
cagggggtgctctgagacccacagccaataaatagggaagcaacatgcttttgggcagggtccatgtggttagggttgattttgatggggctggggggcttagagttagaccccctgccc

SEQ ID NO: 861223 - DNA, 120 bp, Artificial Sequence
  ENSG00000225783_52 (sequence is synthesized)
gccgggacgctgtggcgtgtgacgaggtgcctggccttctgccaaccaactaacccactaaccaggcccgagcatgccctactaaccacccccccgcagccagatcctactaactgtgca

SEQ ID NO: 861224 - DNA, 120 bp, Artificial Sequence
  ENSG00000225783_53 (sequence is synthesized)
gctcatgggcctttcaaggggctgggatatgggggcagccaaggctccagaaggctctgcctatgggctgggatctttgtgcagacccacgttccaggacagagaatgcaaataagactc

SEQ ID NO: 861225 - DNA, 120 bp, Artificial Sequence
  ENSG00000225783_54 (sequence is synthesized)
accaactctgccacttcctgttgagtgagtttgagtaagtcacctcacttctctcaacctcagtttcctcagtggtagaatgcgagttctgataccttacaggttgcagtgaggattccc

SEQ ID NO: 861226 - DNA, 120 bp, Artificial Sequence
  ENSG00000225783_55 (sequence is synthesized)
gtcaatataagggtctcagcacatggcagacacctaaaaaaaaaaaaagtatgaggatggaggaaggcccctcaaacctggttgaacacgtctgctgcctaggccctggcctctctgggt

SEQ ID NO: 861227 - DNA, 120 bp, Artificial Sequence
  ENSG00000225783_56 (sequence is synthesized)
gttctgcacacagatccttctgcctggggcaagacacttggctttgaatccatgtcacttccccacattcttcctccgtctcagctttcttttctgtaggcagctcttttgttcgattac

SEQ ID NO: 861228 - DNA, 120 bp, Artificial Sequence
  ENSG00000225783_57 (sequence is synthesized)
taacccgtctaacccctggggtgcctcaactgcaccccgatcatcccttaacaaactaacggacctgcgtgcgttcttccttttctcttagcgactcctgtgtgtgtctgctgaggtgcc

SEQ ID NO: 861229 - DNA, 120 bp, Artificial Sequence
  ENSG00000225783_58 (sequence is synthesized)
ctgtccgctggtgctgtgctctgacttactaacccagcccctactaaccctgttttctcttcttactaaccccagccctgccgagctctgggctccccccgggggctggtccccctcctt

SEQ ID NO: 861230 - DNA, 120 bp, Artificial Sequence
  ENSG00000225783_59 (sequence is synthesized)
ttggcaagcagatgacctggggctactggccctgtagacagatgtcccactttgctgccccatattggctgtaagatcagagtccactgggccaggtctaaggcaggggatggccctatt

SEQ ID NO: 861231 - DNA, 120 bp, Artificial Sequence
  ENSG00000225783_60 (sequence is synthesized)
aacaagactcagaggaggaagaggtggtcctgtggatgtgggaggctggactctgagtatgacatctctcctatgtgcagaagtctggttgccactgggagtaggtgggaccagggaaat

SEQ ID NO: 861232 - DNA, 120 bp, Artificial Sequence
  ENSG00000225783_61 (sequence is synthesized)
ctctgggacgtgagtgtggaggcctgttggtctagactctagactgtggagctctgagcttttgtgtcctctggaaggaagctggggaagaatcctctccattgttaagtgacggggata

SEQ ID NO: 861233 - DNA, 120 bp, Artificial Sequence
  ENSG00000225783_62 (sequence is synthesized)
gaagctgtcctgcacaggaagtcacgaggggggcgtatcccacgaggaaggcaggagggggcgtgcccctcaccggaaattagcagaggggcgtgtcccacaccggaagtcagaaagcgg

SEQ ID NO: 861234 - DNA, 120 bp, Artificial Sequence
  ENSG00000225783_63 (sequence is synthesized)
agcctttcttacaccggaagtcaatgaagcgggtctttcctacgctaaaaaccactgagtggagtatttagtacacaggaagtcggccagagaaacatttctcatatttgaaggccggaa

SEQ ID NO: 861235 - DNA, 120 bp, Artificial Sequence
  ENSG00000225783_64 (sequence is synthesized)
agagggacatttctgacaccggaagtcagtgagaggactctttcccacacaggaagtcagctagagagccgtctcccctctctggagccgagagaggccggtttcccccaccgtaagtag

SEQ ID NO: 861236 - DNA, 120 bp, Artificial Sequence
  ENSG00000225783_65 (sequence is synthesized)
acgtggggccgtgaccggaagtccttgggaaagatccgtcccattcccggaagctagagggcgttagttgtcgggttgaaaaggggtgtggggaggggaagcagctttaccccgggctcg

SEQ ID NO: 861237 - DNA, 120 bp, Artificial Sequence
  ENSG00000225783_66 (sequence is synthesized)
gagtttgcaggagagagaagtggggagcaagaagtgaacctcaggggctcacagggttcccgcagatgctcaggccggccaggaatgcatctctggctctctgttcccacggacgtcact

SEQ ID NO: 861238 - DNA, 120 bp, Artificial Sequence
  ENSG00000225783_67 (sequence is synthesized)
gcctcagccagcctcccccagagcccgccagccgctaagccggggccacacctgggggtgatttcatgcctcacctccagtaggcaccttggtttctttgggctaatctctggctccctt

SEQ ID NO: 861239 - DNA, 120 bp, Artificial Sequence
  ENSG00000225783_68 (sequence is synthesized)
gcgctaactcttgctctcacccagctaatccctgcctcaccctgactgccccaggggctgaccactaacaaccaacctggccctgtctgggggttccaggctcctggcctggccctgacc

SEQ ID NO: 861240 - DNA, 120 bp, Artificial Sequence
  ENSG00000225783_69 (sequence is synthesized)
ggttcttaattaacctttccttcaccttgactaactcctgccttcctggtctgttcctttcagcagaaactaatggtttgtggatttttttctgactaacaacaggtctaacattcctcg

SEQ ID NO: 861241 - DNA, 120 bp, Artificial Sequence
  ENSG00000225783_70 (sequence is synthesized)
ttactgttaacagcttggatgtcggcatggctgggaaggggctaacacagctttgaacttggctaacacaggtttgaacttggctaacacaggtttgaacttgactaacacagggaaaag

SEQ ID NO: 861242 - DNA, 120 bp, Artificial Sequence
  ENSG00000225783_71 (sequence is synthesized)
catagctaacaattttgggcgtggtggctgctctgagtcagaacaatcagaagtcggtaaagatggtagttttctaaaggaggtgccagggctctggtgtggaccaggcctgatggagca

SEQ ID NO: 861243 - DNA, 120 bp, Artificial Sequence
  ENSG00000225783_72 (sequence is synthesized)
gtggtacccaccaaggtggggtcagaagtatagccagtcttgcaaggttttggccattgggcatatcttcactcctcatagtctgcatttggtttcagttcttaaaaaaatatagcctta

SEQ ID NO: 861244 - DNA, 120 bp, Artificial Sequence
  ENSG00000225783_73 (sequence is synthesized)
tagctacagtagtttgcacaagtagatgcagctcttataaaccttaaaatacctgtctggtgtctacagagcatatgccattttgtatagagtcacccttccccaggccagggcctagag

SEQ ID NO: 861245 - DNA, 120 bp, Artificial Sequence
  ENSG00000225783_74 (sequence is synthesized)
tcttcattttggggactttgtgttttggaagttctaggacataaagctttagatcagagtattcagaagggttataactccgtcagtcatttacatgttagtagtataaattatctgagc

SEQ ID NO: 861246 - DNA, 120 bp, Artificial Sequence
  ENSG00000225783_75 (sequence is synthesized)
ttcctgttctaacttttagctcttctagcataaactcttctgtgcaatttagctgcaccgaggaaacgggagtttttctggaagggacttttgatctctttagactgagggaacgtcctt

SEQ ID NO: 861247 - DNA, 120 bp, Artificial Sequence
  ENSG00000225783_76 (sequence is synthesized)
tgggagtagaggggcagggagcatacgcaagggattccaggtgcaggtaaaaggtggcactagttcaaggttttgctgactcagtctggtagtcagagtctgcaggagaagacagttcaa

SEQ ID NO: 861248 - DNA, 120 bp, Artificial Sequence
  ENSG00000225783_77 (sequence is synthesized)
ggcagggcctggaggattggatcagtttagggacaggtcaaaggctggcttacagaccttagaggcaggttgcttgggtcgttgaatgctagtctggtgctgagagcccttttctctggc

SEQ ID NO: 861249 - DNA, 120 bp, Artificial Sequence
  ENSG00000225783_78 (sequence is synthesized)
aactgtggactcagagctaaccaattgtagttggcagtgggggtgaagggtgatccagaggcctgagctgcagagggcacaagagagaaaagatgtcttagaaagagctttgagaacatg

SEQ ID NO: 861250 - DNA, 120 bp, Artificial Sequence
  ENSG00000225783_79 (sequence is synthesized)
ccttggctgctggcagggaccttggatggggtagtctacacccggaagtgcctgcctgccatcctctagtggctgccttgctccatttcactcaaagcaggaagctcacacctcctattc

SEQ ID NO: 861251 - DNA, 120 bp, Artificial Sequence
  ENSG00000225783_80 (sequence is synthesized)
ctgaaactcctctttgtttaactgcaaagacttgatgctgctaaggatctactatgtgccaggcactgctctgggcgctgggacctgcacctgggctttttcgtcatggtgcttttatag

SEQ ID NO: 861252 - DNA, 120 bp, Artificial Sequence
  ENSG00000225783_81 (sequence is synthesized)
cctagtgggagagttggtgaagtagatagtgattcagtgagatgggtgttatgattggtcaggggtctgtgggagcaccaaggagacagacaagattgatgtgcacctactctgtgccag

SEQ ID NO: 861253 - DNA, 120 bp, Artificial Sequence
  ENSG00000225783_82 (sequence is synthesized)
gcgtgtgccaggcattggggatgtagtggtagttaaacaccatttggtcttcaggagctttaattctagtgtgttgggtgcaggggggtggaatggggacagagagacacctaatccacc

SEQ ID NO: 861254 - DNA, 120 bp, Artificial Sequence
  ENSG00000225783_83 (sequence is synthesized)
ctgtggtggctttctggagagggaggcatctaagctgagctgtggctgggtggagtgtgggtggggatgagttccgggcagcgagagtggtggacaccagtttctggggatcagagagga

SEQ ID NO: 861255 - DNA, 120 bp, Artificial Sequence
  ENSG00000225783_84 (sequence is synthesized)
tccaaagaggttctggaaggttcatgtggaatgtagcaagagataggagacatggacatggtgccgggtctggttgccaagaagtttagattttatccttaggccttggggagcgacgga

SEQ ID NO: 861256 - DNA, 120 bp, Artificial Sequence
  ENSG00000225783_85 (sequence is synthesized)
tatgatctgagaaagggagttagtggatttgagttttaggctggccatttggcttttccagcccaggtggaactcagaggagtttgcaatggcctctggccacattttagacaactgagc

SEQ ID NO: 861257 - DNA, 120 bp, Artificial Sequence
  ENSG00000225783_86 (sequence is synthesized)
agaactttttgaaactaggaagaccctttggtccatcttttgataaacagaatccatacatgtctaccccagttggaagtatctctgcaatgactggaaagtaaagaggaccaaggtgaa

SEQ ID NO: 861258 - DNA, 120 bp, Artificial Sequence
  ENSG00000225783_87 (sequence is synthesized)
aataaaggctcggaaggggagcaatcttgaaaacatgtcatcccatggtggtgggaagtccctggagaagatcaggggaaacacagtcataggctgcaagtctataagataattccattg

SEQ ID NO: 861259 - DNA, 120 bp, Artificial Sequence
  ENSG00000225783_88 (sequence is synthesized)
gggagggagcccatttgtcatgcatggctgcaaggggcagatacaagtgtggagtaagcttgcaagagctgatcctggtcccagagagggaaaaatatgccttggtgggtaatgaacctt

SEQ ID NO: 861260 - DNA, 120 bp, Artificial Sequence
  ENSG00000225783_89 (sequence is synthesized)
ttgttcccagaggcagaaggattgggactaggccaacatagagattggcgatggttgtgagattctaagagtgtgtgtgcatcttgacaatattagaggaggctgagcccaagcaggcac

SEQ ID NO: 861261 - DNA, 120 bp, Artificial Sequence
  ENSG00000225783_90 (sequence is synthesized)
attctcttcgacccctccctcattcagtctgctttggagtctactgaacatcaagcttgctatgagcaggatcttagagctgaggaattggcctcccaatccgaacaggtgttataatcc

SEQ ID NO: 861262 - DNA, 120 bp, Artificial Sequence
  ENSG00000225783_91 (sequence is synthesized)
tttcttaataggttgtgctgtggacccaatgtgagggctgtgctggtgtaaatggtgacatgttgagctggggggatgctttcggggtggggggactggttccattccatcaaaggccct

SEQ ID NO: 861263 - DNA, 120 bp, Artificial Sequence
  ENSG00000225783_92 (sequence is synthesized)
cttgagagtctatccagggacccattgttttactttaacagaccagaaaagatgtttgttttccatgtcattacccccaggggataccgaatgtgtgggtagaaatttctctgtagatta

SEQ ID NO: 861264 - DNA, 120 bp, Artificial Sequence
  ENSG00000225783_93 (sequence is synthesized)
aaaatcagatttttacatggattcaacaaaggagcgtcacttggatttttgttttcatccatgaatgtagctgcttctgtgtaaaatgccattttgctattaaaaatcaattcacgctgg

SEQ ID NO: 861265 - DNA, 120 bp, Artificial Sequence
  ENSG00000225783_94 (sequence is synthesized)
caggctggagtgcaatggtatgatctcgactcaccgcaacctctgcctacccggttcaagcgattctcctgcatcaccctccagagtagctggtattacagttggaggcatctgtccacc

SEQ ID NO: 861266 - DNA, 120 bp, Artificial Sequence
  ENSG00000225783_95 (sequence is synthesized)
agccccaaagcccataccttcctttgtaccctctaagacggtgtcagctaaaggtcccttgaaacctccatcaccttattaatatcatgactctaggtccacagaacgaggggaaagggt

SEQ ID NO: 861267 - DNA, 120 bp, Artificial Sequence
  ENSG00000225783_96 (sequence is synthesized)
acaaagagccctctgcactagcgccgcaggaccgcggacccgagatgtccggcgtcaaatttggctccaaaaggatggagagggctggtaggtaacccaccctcgttgaaaacaacagtg

SEQ ID NO: 861268 - DNA, 120 bp, Artificial Sequence
  ENSG00000225783_97 (sequence is synthesized)
acatcagtttatggagaggttactctacgcagggacgtgcttggtgctttgcaagcgttatcacaacagtcccacgaggtgttggaggcatctgtccacccatgtggttccagacacgtt

SEQ ID NO: 861269 - DNA, 120 bp, Artificial Sequence
  ENSG00000225783_98 (sequence is synthesized)
gcgcaccggccagctagcccctttgtgcggcgggggctgcggagtgctccctccaagaccggttgcaccccgctttcctggccaggactctgggcgcggcagctacaaagacgacgccgg

SEQ ID NO: 861270 - DNA, 120 bp, Artificial Sequence
  ENSG00000225783_99 (sequence is synthesized)
agttctgcgctgtgagccggggcacaaagagccctctgcactagcgccgcaggaccgcggacccgaggtcctttctctggctgtgatccatgcttcttcccagggcaggattacactctt

SEQ ID NO: 861271 - DNA, 120 bp, Artificial Sequence
  ENSG00000225783_100 (sequence is synthesized)
aggaacagatgttcagagcaagagatgaagacggcatcatcaacccagacaagccaggtaagtccctgaaaggggactgcatttctgcagccctttcaaggtgggcacttgagacatttg

SEQ ID NO: 861272 - DNA, 120 bp, Artificial Sequence
  ENSG00000225783_101 (sequence is synthesized)
attggcttttaaaggaaagactgacctttagaaggcataagcagctggggtccctggagaccctgggatgacaccgtcagcatggctgtattgaaacggagacctcaggcaagccacctt

SEQ ID NO: 861273 - DNA, 120 bp, Artificial Sequence
  ENSG00000225783_102 (sequence is synthesized)
tggggatggtagagaccagcttaatgctttgagatcagatccatcacgaaatccgtatgtcctgagacctcctgaatcttaaggtgggagagacttctgatgaccctctgggttccagtt

SEQ ID NO: 861274 - DNA, 120 bp, Artificial Sequence
  ENSG00000225783_103 (sequence is synthesized)
gagatgatgaggccctggtgctcacaactggttctttgtgcggcctttgatctggcactttttagttccagtcctctttcatcacatacaaatgagttttacaaaaataactttattgag

SEQ ID NO: 861275 - DNA, 120 bp, Artificial Sequence
  ENSG00000225783_104 (sequence is synthesized)
gtataatttacatacaaggaaatgcacccgtttaaagcacacatttcaatgtgttttgacaaaggtatacacctgtgtaaccattgccacaatcaggatgtagaacattttcatcgttct

SEQ ID NO: 861276 - DNA, 120 bp, Artificial Sequence
  ENSG00000225783_105 (sequence is synthesized)
aaaatgttcccctgtattccctcccagccaatcccctctcagccccagtcccagccccagtcccaggaaaccactgacctgctttctcagaagtagattggattcttttttttttttaat

SEQ ID NO: 861277 - DNA, 79 bp, Artificial Sequence
  ENSG00000225783_106 (sequence is synthesized)
gctttctcagaagtagattggattcttttttttttttaatgttccatatatatggaagcttctgtctcgctctgctgtt

SEQ ID NO: 861278 - DNA, 120 bp, Artificial Sequence
  ENSG00000225783_107 (sequence is synthesized)
attcttctggcaaacatatgtggaaggcctccggggtagcacacccttcaccgtgccctggagatgctgggatgcgacaaaaaagtaggcttctcccatgatgaacctcacgggtccttt

SEQ ID NO: 861279 - DNA, 120 bp, Artificial Sequence
  ENSG00000225783_108 (sequence is synthesized)
agtcattcttctggcaaacatatgtggaaggcctccggggtagcacacccttcaccgtgccctggagatgctgggatgcgacaaaaaagtaggcttctcccatgatgaacctcacggttg

SEQ ID NO: 861280 - DNA, 120 bp, Artificial Sequence
  ENSG00000225783_109 (sequence is synthesized)
aaagtgctgggactataggtgtgagccactgcgcccagctgaggctcatacttcctgttgcatgtctcagtagttcaattcctgttctatccaattttattgaggcatagtttaaaagtc

SEQ ID NO: 861281 - DNA, 120 bp, Artificial Sequence
  ENSG00000225783_110 (sequence is synthesized)
ttctatccaattttattgaggcatagtttaaaagtcatataactcacccattcaatgatttttaataaatgtaccaagttgtacaaccttcaccataaatcagttttggaacagttcggt

SEQ ID NO: 861282 - DNA, 120 bp, Artificial Sequence
  ENSG00000225783_111 (sequence is synthesized)
taccccagtaagatctctcatacccatttactgttcatccacatcccatccataaccccaggaaccacaaatctatttctcatctcggtagattttccttttctggatattttgtataaa

SEQ ID NO: 861283 - DNA, 120 bp, Artificial Sequence
  ENSG00000225783_112 (sequence is synthesized)
tgagatcatacaatatgtgttctgttgagcctagcttctttccctcagcatgatgtttgtaaggttcatccatgttgtagtatgtactaatagtttgttcctttttattgatgagtagat

SEQ ID NO: 861284 - DNA, 120 bp, Artificial Sequence
  ENSG00000225783_113 (sequence is synthesized)
tcccttatgtggataagccagactttgcttttccattcatcaagataggggattttaatttgatcagtgctgcctaactgtggtatatacatataatgctacaggataaatatggcttat

SEQ ID NO: 861285 - DNA, 120 bp, Artificial Sequence
  ENSG00000225783_114 (sequence is synthesized)
atttctggaacataaatatcacacacagatttacttaaagtttaaatcattgagtggtgaaaataatttttggaacatgtactgtgtgccaggcactggctaagctttgaaaatcattaa

SEQ ID NO: 861286 - DNA, 67 bp, Artificial Sequence
  ENSG00000225783_115 (sequence is synthesized)
actgtgtgccaggcactggctaagctttgaaaatcattaactttcagcggactgcctgaggttagga

SEQ ID NO: 861287 - DNA, 120 bp, Artificial Sequence
  ENSG00000225783_116 (sequence is synthesized)
acatggtgaaaccccgtctctactactaaaaaaaaaataagttagccgggcgtggtggcacacatctgtaatctcagctacttaggaggcttaggcaggggaatcacttgaacccaggag

SEQ ID NO: 861288 - DNA, 120 bp, Artificial Sequence
  ENSG00000267755_0 (sequence is synthesized)
ccgcttctccagacgggagcgcggttgggcctccatacaaaggctgcgcttctgccatggcgggcacaggacaatgcgctgcagagcacactgagtgggagagcaaattctggaactgtc

SEQ ID NO: 861289 - DNA, 120 bp, Artificial Sequence
  ENSG00000267755_1 (sequence is synthesized)
aaaacagcaaacccggaagaaccattcccgcttccgaagctccatgatcacggcagacgcttcttaaaacctcccgtttaatatcagatgccacacatacgagatcgatgtgcacgtcgg

SEQ ID NO: 861290 - DNA, 120 bp, Artificial Sequence
  ENSG00000267755_2 (sequence is synthesized)
gagaaaccacagcacagccaggagtactggcgcacagtgaatacgcttccgtcctttcaaaagcctttcccgaacggtatcttgtaaaaaatgccaaaaataaaatgaaaaaaactgcca

SEQ ID NO: 861291 - DNA, 120 bp, Artificial Sequence
  ENSG00000267755_3 (sequence is synthesized)
ctgcgcgctgcggtccactcacacacagtgcgggacacagaggcccctggaaagagcacactgagtgggagagcaaattctggaactgtcgcaggcggaaaccacacaagggggaaacag

SEQ ID NO: 861292 - DNA, 120 bp, Artificial Sequence
  ENSG00000267758_0 (sequence is synthesized)
cggaataagaatctagtatccagttctcactatacatagctttccctcactttctatcagaaatgagataggagtcccaccttcctggcatcagaaacagatcaccaatcctgcaaacaa

SEQ ID NO: 861293 - DNA, 120 bp, Artificial Sequence
  ENSG00000267758_1 (sequence is synthesized)
attcacagggctggaaaaccccagtgaaggcttttaaaactcatcagacatagaaaaaaagaagcagctttaattgtaggatctcactgacacaaacataaggaaattctgagttataga

SEQ ID NO: 861294 - DNA, 120 bp, Artificial Sequence
  ENSG00000267758_2 (sequence is synthesized)
ttttccactgacattgtaacttctgtcaacattcaaagaaaattcaaccctggtcaaaggtgacagttgacaatcctggaagctaacatcctctgtttatttgaacaagtttatactctg

SEQ ID NO: 861295 - DNA, 120 bp, Artificial Sequence
  ENSG00000267758_3 (sequence is synthesized)
cacagggaattgaagttcttcttgtctgtgacttgatctcccaaagttaaagcactacgctttagggttgtgaattctgtttccaagacttaacttcacaatccactcccaaggaaaagt

SEQ ID NO: 861296 - DNA, 120 bp, Artificial Sequence
  ENSG00000263667_0 (sequence is synthesized)
tacatttaaacacaattcctttgttcccatatcctgaaatcagtaaatttaagcaattttatttttcattctgtgcttcagggatctatgagggtcaacacatatttatcacacgctgac

SEQ ID NO: 861297 - DNA, 120 bp, Artificial Sequence
  ENSG00000263667_1 (sequence is synthesized)
cttgtgctcaggcctataggaaaatgaacctccctgcccgcaatgaccttagaacctaactaaggatatggttaaaacaagcgcaggattgggtgagacctgctcaagggtcaggcgctg

SEQ ID NO: 861298 - DNA, 120 bp, Artificial Sequence
  ENSG00000263667_2 (sequence is synthesized)
gtttgtcggggagaaatgttgcccaggaaggacaggtgtgaaagaaagagaagatcctgcaagaccggagggcccaggaaagtctgggggactcaaaggagagtttcaggattgaccatg

SEQ ID NO: 861299 - DNA, 120 bp, Artificial Sequence
  ENSG00000263667_3 (sequence is synthesized)
ggtggacagggctctgcagaccaggatcttttctatgcacacttggggccagaaagttctttgtggtgggggctgtcctgtacaatgcaggaagctcagcagcatccctggcctccaccc

SEQ ID NO: 861300 - DNA, 120 bp, Artificial Sequence
  ENSG00000263667_4 (sequence is synthesized)
actcaatgccagtggcactccctccctagttgtaaatgtgtgcagacattagtacttgtcacctgcagggaagaatcaccccactgagaaccacatgctgagtcaaggcaacagcatagg

SEQ ID NO: 861301 - DNA, 120 bp, Artificial Sequence
  ENSG00000263667_5 (sequence is synthesized)
aattggagcacgcaagagagctggtcaacacagagagatgagcttcaggggctgctggatgtactccacctggaagcagaggccgaggacccctcctcctggactagggctcacctcgcc

SEQ ID NO: 861302 - DNA, 120 bp, Artificial Sequence
  ENSG00000263667_6 (sequence is synthesized)
tcctgactgtattctgcctgtgttctcctccagtcccacccttatttctctttgtctaaatggcaaactccctttaagcaagaattcatggcgtctccacattcggccctcaagaaactt

SEQ ID NO: 861303 - DNA, 120 bp, Artificial Sequence
  ENSG00000263667_7 (sequence is synthesized)
ttattgagttgaactaaaaccaggcatgtcttaagtgttcatggctgataatgcgggatccttcaacgctggaaacgcccagatggtaacgagagttctgatagtgccggatccttcgac

SEQ ID NO: 861304 - DNA, 120 bp, Artificial Sequence
  ENSG00000263667_8 (sequence is synthesized)
acatttgcttcattcagtctatggaccaggaagaattttctgtgacacattcaggttcttactcatttacagagtcacagatctgtcagcctgggaaccggcccccaaatggaagaccta

SEQ ID NO: 861305 - DNA, 120 bp, Artificial Sequence
  ENSG00000263667_9 (sequence is synthesized)
ggcagttctgatgggtccatctgcaaggggagtcacagaagtgtgtgatgaggagaggaagagatacaacagatgtcttatgagaagcagagggaggacctcaagagactgcctggccca

SEQ ID NO: 861306 - DNA, 120 bp, Artificial Sequence
  ENSG00000263667_10 (sequence is synthesized)
gtccctcactaggcgtaagaaacaaactcacccatccaaacccgaagaatggactcagagacccagagaacagcgaaattgaaaaatggagacgtcaagttccctagtcacagagcagct

SEQ ID NO: 861307 - DNA, 120 bp, Artificial Sequence
  ENSG00000263667_11 (sequence is synthesized)
gtgatgggacccacgtaaacagccctgatcagtagtgaagagcaacatgtggcacacagggcctcctgcacaagcaacagtcgctgcttgctgttactgtgggctccacgttgggatcag

SEQ ID NO: 861308 - DNA, 120 bp, Artificial Sequence
  ENSG00000263667_12 (sequence is synthesized)
acacacctgtcttcagtggcttgcagttgcagcaaggaccgaatggtctattctaaaagaaaacattacaggcaggcagtaccagaccactgtgcttgcagccctcatgagaaggctcag

SEQ ID NO: 861309 - DNA, 120 bp, Artificial Sequence
  ENSG00000263667_13 (sequence is synthesized)
aagacacaggagctgccctgggtgtgaatttcgtgtccatgctggcttctcgcagtggcccttggcataggttgggatcttgcagcaagattcttcatcggtttctccatctctgaagac

SEQ ID NO: 861310 - DNA, 120 bp, Artificial Sequence
  ENSG00000263667_14 (sequence is synthesized)
ttcttgccaacagctgtacacaggtttgttctaattccccaaccttgccacgactgacctgggtcatcaccatgtgcttattgaagagccttggaatactgtatagacccgtacagagtt

SEQ ID NO: 861311 - DNA, 120 bp, Artificial Sequence
  ENSG00000263667_15 (sequence is synthesized)
gttcaaatagacaattgaggacgactataatagtttctcattagaaatacatgctaataaacatcatgtctttggtattaagtggcaattagatgaaacaacctgaaattctgtctgata

SEQ ID NO: 861312 - DNA, 120 bp, Artificial Sequence
  ENSG00000263667_16 (sequence is synthesized)
ccaagattgaactttgctgagattactgtttcactcaccgaaaatatcagaatactcaagggagttattttttttcttaatgtaactttcataaaggaaatgaaagaaatgtggagactg

SEQ ID NO: 861313 - DNA, 120 bp, Artificial Sequence
  ENSG00000263667_17 (sequence is synthesized)
ggagctgcaaagagagatggaggccacagggaagaggccacgagatagtcagttgtctcatgaagtagaatacaggtgaagccagattatcacaagccatgaaaaccttctggagagaga

SEQ ID NO: 861314 - DNA, 90 bp, Artificial Sequence
  ENSG00000259103_0 (sequence is synthesized)
ctttatctccacaagttcaattattttgatttttggctcccacaagtaagtgagaacatgcaaaatttgtctttctgtgcctggcttatc

SEQ ID NO: 861315 - DNA, 120 bp, Artificial Sequence
  ENSG00000259103_1 (sequence is synthesized)
atgttgttgcaaatgacaggatctcattccttttgtgactgaacagtactctactatgtgtatgtatcacattttcttcatctactcatctgatgatgaatacttaggttgcttccaaat

SEQ ID NO: 861316 - DNA, 120 bp, Artificial Sequence
  ENSG00000259103_2 (sequence is synthesized)
cttagctattgtgaacagtgcagcaacaaacacaggagtgcacatatctcttcaatatactgctttcccttcttctgggcagatacctaggagtgggactgctgggttgtatggtagctc

SEQ ID NO: 861317 - DNA, 120 bp, Artificial Sequence
  ENSG00000259103_3 (sequence is synthesized)
atctccaaactgttctccatagtggtagtactaattacattccaactagcagtgtaggagccttcactatgctccacatcctcgccagcatcattacttgtcttttggatataagccatt

SEQ ID NO: 861318 - DNA, 120 bp, Artificial Sequence
  ENSG00000259103_4 (sequence is synthesized)
atataagccattttaactggggtgagatggtatctcactgaagttttgatttgcatttctctgatgatcaatgatgctgagtatttttcatatacttgtttgccatttatatgccttctt

SEQ ID NO: 861319 - DNA, 120 bp, Artificial Sequence
  ENSG00000259103_5 (sequence is synthesized)
tttgacaaatgtctgttcaggtcttctgcctatttttaattggattattagtttttttcctacagagttgtttgaattccttacatattctgattattaatctcttatcagatggttagt

SEQ ID NO: 861320 - DNA, 120 bp, Artificial Sequence
  ENSG00000259103_6 (sequence is synthesized)
ttgcaaatattttctcccttctgtgggtttaactacatattttaatacaacataatggttctctttgtcagatgaaatgttgagctggttggctcctgtcacatggtatagagcagagtc

SEQ ID NO: 861321 - DNA, 120 bp, Artificial Sequence
  ENSG00000259103_7 (sequence is synthesized)
catttgcaatacacaagaagagaagcataacatcaacctggtgacaaatagagattgtgtgtttactacagtctgaagaaactttgtcctgtgagtatattagagtctaatgagggcaat

SEQ ID NO: 861322 - DNA, 120 bp, Artificial Sequence
  ENSG00000259103_8 (sequence is synthesized)
aaataaatagcaatactcaaaacagccacatggtcctgaaggatgactgaatgaggagtataactatagacacctaatggacactgggagacaatgctctactttaatattgattccacc

SEQ ID NO: 861323 - DNA, 120 bp, Artificial Sequence
  ENSG00000259103_9 (sequence is synthesized)
aggtgaaatttactgggttgagtattgtcttgcatcttttgatcccttcaactgtgttgatcaaagttcttgtatgtggaatcctgacctaatccatctacagaataaaaaagttctttt

SEQ ID NO: 861324 - DNA, 120 bp, Artificial Sequence
  ENSG00000259103_10 (sequence is synthesized)
caaaaacgaatctaagcatcaattctggctttagaactgccttgtcctgcctagagaagacctaagggcagggaaaatctcccagtatcggatgagaccttaataaaccctacaagccaa

SEQ ID NO: 861325 - DNA, 120 bp, Artificial Sequence
  ENSG00000259103_11 (sequence is synthesized)
ctgcctttcatcaactgtgttatcttgggctaggtcataaaagacattgtggcttctaccctactctctgttgaattactcattctgagggaagtcagttgccatgtcatgaggtcatgt

SEQ ID NO: 861326 - DNA, 120 bp, Artificial Sequence
  ENSG00000259107_0 (sequence is synthesized)
cagggggaggtaagctcatataaccttgttccttacggaggtgtagaaaatctgtagcatgatgtaatggaattaagaatgggtcaatgaaatatacagctcctttctggaatgtacctg

SEQ ID NO: 861327 - DNA, 120 bp, Artificial Sequence
  ENSG00000259107_1 (sequence is synthesized)
ttctgctacaaccatggatatcctgacctttctgtgcctttcagggacaagggtaatagaggagtttcagactccctctaaaacaaaacaacaactgaacaataaacaacagaaaaagaa

SEQ ID NO: 861328 - DNA, 120 bp, Artificial Sequence
  ENSG00000259107_2 (sequence is synthesized)
cacaaaaaaagacggtggtactctttcccctttccttgctttctcctgctaccaaaacaaacaacaaaaactacattgtctcattggatgacgaagctaaaattttgtagcaaatctata

SEQ ID NO: 861329 - DNA, 120 bp, Artificial Sequence
  ENSG00000259107_3 (sequence is synthesized)
tgaattcataagctagatattaatccatctttagaagagaagaaagcaaagatcgtagatgacaagtcttgctttcttgtaagtatctttgaatctgtatgtttgccatcacaagttctc

SEQ ID NO: 861330 - DNA, 120 bp, Artificial Sequence
  ENSG00000259107_4 (sequence is synthesized)
agatcaattaactattgtttacttccaaaaaaaatctggcatggcttatgaagatgtatatatataacaacatcagtatgaatgggataatacaacaagaccaagggaaactaaacttgt

SEQ ID NO: 861331 - DNA, 120 bp, Artificial Sequence
  ENSG00000259107_5 (sequence is synthesized)
gtaattattgaaggtagtaagcatctaacagacattttgtctgttgtagtttagatttaaatttgccactgaaatcagcctcttcttggggatttcctgcttgtactgatgagccaatac

SEQ ID NO: 861332 - DNA, 120 bp, Artificial Sequence
  ENSG00000259107_6 (sequence is synthesized)
ccctccctttatactcattttcacagaaattctttgctaattcattgcctagctcgctctgtaacattcataaccatcttcaacaccacctccagactgactgcagtttgacataaaaaa

SEQ ID NO: 861333 - DNA, 120 bp, Artificial Sequence
  ENSG00000259107_7 (sequence is synthesized)
agaacctccaggaatgtccgttgtgcatgacatgagggcagtttcactgacagtttatgcaggcagggggagtgttttattaaatatgcaaatattaacctactcaatcctcataaaaac

SEQ ID NO: 861334 - DNA, 120 bp, Artificial Sequence
  ENSG00000259107_8 (sequence is synthesized)
tcagtggtgaactgactgttggcctggcagatgagaagttttactcccccactctccagtgaaactggtgaaaagtatttttaaaggaattaagaatgggtcaatgaaatatacagctcc

SEQ ID NO: 861335 - DNA, 120 bp, Artificial Sequence
  ENSG00000259107_9 (sequence is synthesized)
gcaattgctgaggaaatcgtgactgagacaggaagtgcatctgctcacttgggcctagtatttcagtgtgtgagtttactttataccttccacatcccatacctagtggccatctacacg

SEQ ID NO: 861336 - DNA, 120 bp, Artificial Sequence
  ENSG00000259107_10 (sequence is synthesized)
gtagtggaatcaaatatccccatgtgggaagatttatttgtttcctcaaaggatacaggaaccaaaagggatccagtggggaagaaaagagactagctgctatccttcacggagccaaca

SEQ ID NO: 861337 - DNA, 120 bp, Artificial Sequence
  ENSG00000259107_11 (sequence is synthesized)
ttctgctgggagaggcaagaaaaaatccacaaatgaatagaaaaataaataagtataataaaagttcagagagcgataagacctatgtagaaaaaatgttataagggcacaattactgag

SEQ ID NO: 861338 - DNA, 120 bp, Artificial Sequence
  ENSG00000259107_12 (sequence is synthesized)
gaatgaagtaagaaagtgagccatccaaaaacctggggaagagtgttccagacagagagaagagaaagtagaaaggcctgaggcaggagtgggcttggcttgctcacagaaagcatgaag

SEQ ID NO: 861339 - DNA, 120 bp, Artificial Sequence
  ENSG00000259107_13 (sequence is synthesized)
gtgcatgacatgagggcagtttcactgacagtttatgcaggcagggggaggtaagctcatataaccttgttccttacggaggtgtagaaaatctgtagcatgatgtaatgtgttttatta

SEQ ID NO: 861340 - DNA, 120 bp, Artificial Sequence
  ENSG00000259106_0 (sequence is synthesized)
ttgataggaaataaagataaatgggtgtgatgttgtcttctcccaaggaccttctccaaccacactactcgaagtgtgtccagaattggtgggctcttggtctcgctgacttcaagaatg

SEQ ID NO: 861341 - DNA, 120 bp, Artificial Sequence
  ENSG00000259106_1 (sequence is synthesized)
aagccgtggaccctcgcgattaaacaagtgcaactttcccaatctcacacaactacttgtggagccaggattccatacaggcaatgtgagtgcacatccaaaacttgaaaccactgaaca

SEQ ID NO: 861342 - DNA, 120 bp, Artificial Sequence
  ENSG00000259106_2 (sequence is synthesized)
catgatcattggtgctatctggcttgctcgtcctcctcaacttccagtactgttgaatcgttgtgtataatttgaccaacattaaatctttcatttttgacacggagtctcgctctgtcg

SEQ ID NO: 861343 - DNA, 120 bp, Artificial Sequence
  ENSG00000259104_0 (sequence is synthesized)
gaaagaggaaaaaagtgatctgggacctgttgtttttcttgcatcccatttctactctgcctgtgagtgaagactgttgtggaaaagtcaactggagagaccaggtcaaaggccaagcag

SEQ ID NO: 861344 - DNA, 120 bp, Artificial Sequence
  ENSG00000259104_1 (sequence is synthesized)
aagaggaattaggcttaagactgcactgagagggaacactagaccatggtggcaaaatggccgaataggagcagctccagtctacagctcccagggagattaatgcaaaagatggagtct

SEQ ID NO: 861345 - DNA, 90 bp, Artificial Sequence
  ENSG00000259104_2 (sequence is synthesized)
gagtcagtgggctgggaaaggtagacccagccgtaatctaagctagaagataaagtaggcagaaaaacatgaaaacattagactggccta

SEQ ID NO: 861346 - DNA, 75 bp, Artificial Sequence
  ENSG00000259108_0 (sequence is synthesized)
ccgtggcccggcccctggagcaccaccgtccctcccctaggcccaggatgtgattctgaatctacagtcagactg

SEQ ID NO: 861347 - DNA, 120 bp, Artificial Sequence
  ENSG00000259108_1 (sequence is synthesized)
cctaggcccaggatgtgattctgaatctacagtcagactggaccacctctcccccatgcccccagaatgtccacaggggctccctcgcctacaatagatggattagattcctccctactc

SEQ ID NO: 861348 - DNA, 120 bp, Artificial Sequence
  ENSG00000259108_2 (sequence is synthesized)
tgtttttgtgtgtattttactaccagggtcggctagataaggaggagctttcattacatcctggaagtctgtcccccgcacacacgcacagccgtcctcccttcccccaacatctgatct

SEQ ID NO: 861349 - DNA, 120 bp, Artificial Sequence
  ENSG00000259108_3 (sequence is synthesized)
aattctctctctgctttgctgaggctggcctggcctaagaggattagagcatttgctaaacgggaccaggacaggcagggtcagagaacccgctgtggggagacccagggccaggatggc

SEQ ID NO: 861350 - DNA, 120 bp, Artificial Sequence
  ENSG00000259108_4 (sequence is synthesized)
cactagggggcggcagaggaagcgagacgcggagaggggtgtggagtgctgaggagaggcactcgtcggcttagcagcaatcaatgtccacaaagtaaccatgaagttttattcattttt

SEQ ID NO: 861351 - DNA, 120 bp, Artificial Sequence
  ENSG00000259108_5 (sequence is synthesized)
acaggcaggaaaacaagagaaattcttgctcttgccaagacagacatggggaatttcgaaggcccgccttctgaacgtcacctcgtcccctcttccttggtccagtgagaagtccagatg

SEQ ID NO: 861352 - DNA, 120 bp, Artificial Sequence
  ENSG00000227782_0 (sequence is synthesized)
ctcagttcctggctgagcagctgctatatttaagcaaacattcaagttaattaagatgtgataatcatatataccaaactaaagtctcaaaaaattcctataataaaattaatcttttta

SEQ ID NO: 861353 - DNA, 120 bp, Artificial Sequence
  ENSG00000227782_1 (sequence is synthesized)
tctcaaaaaattcctataataaaattaatctttttatttttcatgatctcaacctttatttctcacccattaagtgaagataaaatggaagtattttttttttttgagacagggtctcac

SEQ ID NO: 861354 - DNA, 120 bp, Artificial Sequence
  ENSG00000227782_2 (sequence is synthesized)
aataggtaaggtaggaacatcaaaagaagagcaataagctgtgtgcagtggtgcactcctagtcccccagctactcagcaggctgaggcggtaggactgcttgagcataggaatttgagg

SEQ ID NO: 861355 - DNA, 120 bp, Artificial Sequence
  ENSG00000227782_3 (sequence is synthesized)
gaaaagggaaaggaactttgcactgctggagaaaaacaaataggaaaatgctgttctcagaacaggaaccaaggctttctgacgaagaagaaaccttggactctgggatgaccgccacaa

SEQ ID NO: 861356 - DNA, 120 bp, Artificial Sequence
  ENSG00000227782_4 (sequence is synthesized)
ataccaacaggtttgaggcagcctgggatgtgatccagaggaaagccaccacagtgaatactatgaaaatgactgtgtttccctgcatggctaactggaaactcaggatatttgctggaa

SEQ ID NO: 861357 - DNA, 120 bp, Artificial Sequence
  ENSG00000227782_5 (sequence is synthesized)
aaaacaaaagactctgttgatccttttcattcctgctgactgtgcaacttgtaatctgcagtttgaatgataacagcataagacctgggaaccgcctataataaagcagtgtgccagaaa

SEQ ID NO: 861358 - DNA, 120 bp, Artificial Sequence
  ENSG00000237290_0 (sequence is synthesized)
taagtcatgcgtgatcatcaaatcatttgattaattcccttactcttacagctgcctcaggatatggttcagtcatcacctccttcatccagccttctctacctctttgtcttaacattg

SEQ ID NO: 861359 - DNA, 120 bp, Artificial Sequence
  ENSG00000237290_1 (sequence is synthesized)
aaatggccagcgtgttcttctacctgcctgccagacatgcaggcccaaggtaccaggaggcagatgctgacagatgcatctcagtatgcccggcacctccaccacacaagggctgtgctg

SEQ ID NO: 861360 - DNA, 120 bp, Artificial Sequence
  ENSG00000237290_2 (sequence is synthesized)
gttgctgtgggaatgctgcagggcacaaaacggataatgctggagggagaagacagcaaacacaaggctcaagaaactccagtatgtaagaagaggacatgcacaatggaagagggaagc

SEQ ID NO: 861361 - DNA, 120 bp, Artificial Sequence
  ENSG00000237290_3 (sequence is synthesized)
caccatgcagaatgtcggggtgcacttttaaatgggacagtcaagggatcatcctggcagctatgtagagcattactataggggtcaagtaccgcagcagggacagcaattagtaggcta

SEQ ID NO: 861362 - DNA, 120 bp, Artificial Sequence
  ENSG00000237290_4 (sequence is synthesized)
ctgcaagagtccagatgaggaaactgaggcttggcgtctcattgagtgacctacccaaaagttacccaaggagaaatgggctcgcagagatttgaatcctggtctccggccttcctttag

SEQ ID NO: 861363 - DNA, 120 bp, Artificial Sequence
  ENSG00000237290_5 (sequence is synthesized)
acacttggggtgctcccaagtctgcatttggagaggggaacagcattaaagtatcagctggagcttctcagcttgaaatcctaggcctcttccagaggccagatgttcggatggtaccaa

SEQ ID NO: 861364 - DNA, 120 bp, Artificial Sequence
  ENSG00000237290_6 (sequence is synthesized)
ggggctctccgctgagtcctaggctgggagcagagagggaggggactctgttaccaaatcccaggctgggcactcccagggagtcccttcctccccacctgcatggcatctggcctccgc

SEQ ID NO: 861365 - DNA, 120 bp, Artificial Sequence
  ENSG00000237290_7 (sequence is synthesized)
cagctcctgcctggctgccagatataccagctgtggctcctctccacggagagtctcatttattaattaacgtggacgccaagggggcaacttctcaggcccagcctcagagcagatctt

SEQ ID NO: 861366 - DNA, 120 bp, Artificial Sequence
  ENSG00000237290_8 (sequence is synthesized)
ggcacatttttcagactttgtttaataatttatcatcttttaatcataaaaataattagcacaagagtgataatctatgctctgccgagagcagaccaacggaggaattttcagacagtg

SEQ ID NO: 861367 - DNA, 120 bp, Artificial Sequence
  ENSG00000237290_9 (sequence is synthesized)
gaacccagagagcagagctttggcagcgaggagaggaaggttggctccaggccaggtgtcctctccaggactggcccctgggagtcaggtgtcaaagatgccgtctggcttttgggggaa

SEQ ID NO: 861368 - DNA, 120 bp, Artificial Sequence
  ENSG00000237290_10 (sequence is synthesized)
ctcgaggaccgtgctgctttcctgggaatttgaggctcctgctcctaactctgacttggctcactggatagctctctgggaagttccttctctgggtcttaattttcccacctgtaaaat

SEQ ID NO: 861369 - DNA, 120 bp, Artificial Sequence
  ENSG00000237290_11 (sequence is synthesized)
gggagttcaattagataatgagtaaggacacttttgttcaaggcgccatgatccaatgagatagcaaatgtagaagcagtggctgtggcagtaaagacagtgagctggagtgcccatgag

SEQ ID NO: 861370 - DNA, 120 bp, Artificial Sequence
  ENSG00000237290_12 (sequence is synthesized)
agccacgaagccttccacagtccccgccacctcccaccccgccagcttctgcatccccaggtgctcaaagagccctgggacagactcagttctgccaggtataagccgtgtggcctgggg

SEQ ID NO: 861371 - DNA, 120 bp, Artificial Sequence
  ENSG00000237290_13 (sequence is synthesized)
caagtccatctcctctctgagcctcagtttacccatctgaaaagaaagagtgatcgctcatgtcctgcagctctcccagagaagatccaagggagaggatgacagggttaccccttggag

SEQ ID NO: 861372 - DNA, 120 bp, Artificial Sequence
  ENSG00000237290_14 (sequence is synthesized)
acattgatctcattctgccccacatttaactgccactccctgtccagactttcggttctagagggcagggcaggactgcctcatcctctgtgcctgatagccctggtagtgaccgaatga

SEQ ID NO: 861373 - DNA, 120 bp, Artificial Sequence
  ENSG00000237290_15 (sequence is synthesized)
gctcaatgttctgccaattccagcaaggtgtcttgagattgttcaacctgtgcaggcagacacatcctcccaccagggcggcagcacggtccggtgactgtgggtaaaaccacagcagtt

SEQ ID NO: 861374 - DNA, 120 bp, Artificial Sequence
  ENSG00000237290_16 (sequence is synthesized)
caagaaagcaactcctcctcttcttgtggggtcttgtacaagctgctttgcctccagctgcctcagtctcttcatgtgaaattggggatatctgtcttagattgggggtcccctgaagca

SEQ ID NO: 861375 - DNA, 120 bp, Artificial Sequence
  ENSG00000237290_17 (sequence is synthesized)
gacctagagacaagaattcaagatcaagtcatttatttaagaagagatcctggaagttccagtagggagtggagaagtgagactgggaaggggaggagagcaatgaaaggcgcgtgaatg

SEQ ID NO: 861376 - DNA, 120 bp, Artificial Sequence
  ENSG00000237290_18 (sequence is synthesized)
agctggtgaccacgctggacccaggcctactggggccatctcaagggttggcaaactacagcccacaggccaaatcaggcctgcctcctgaatttgtaaataaagttttattggaacaca

SEQ ID NO: 861377 - DNA, 120 bp, Artificial Sequence
  ENSG00000237290_19 (sequence is synthesized)
aggaagggtcctgagacacacctagcacttcacattcactaagtcatgcgtgatcatcaaatcatttgattaattcccttactcttacaggacctgcctcccaggggaatacggtagtgc

SEQ ID NO: 861378 - DNA, 120 bp, Artificial Sequence
  ENSG00000237290_20 (sequence is synthesized)
tgagaagagggtgtggacggactaagggctgaagaagtcctggagacggggtggcgatggtgagtgtgcttgctgagcccaggagacggaccgcagcaccgggcactcgggtggggtcca

SEQ ID NO: 861379 - DNA, 120 bp, Artificial Sequence
  ENSG00000237290_21 (sequence is synthesized)
gaggagaggagcctcctgcagggacagcaaagctgacgagaggacaacataaagccacttctgtctttacctcgcattgcctttgcaccacatccatttggctgcctcaggatatggttc

SEQ ID NO: 861380 - DNA, 120 bp, Artificial Sequence
  ENSG00000225870_0 (sequence is synthesized)
agtgatacgaatatttccaggctcctacatgaagtaattacactgctatgaacacatttttgcacagaatataggtaaagcatgaacgggcattttaacagaagaatcacagtaccgctc

SEQ ID NO: 861381 - DNA, 120 bp, Artificial Sequence
  ENSG00000225870_1 (sequence is synthesized)
acttctaaggcagtatttgtttcaggctttgcgaccaatcagcagttttcacacccagtcctggattcggtctctgctattttacacccaggcaagggcactgaggacagcacttgcaag

SEQ ID NO: 861382 - DNA, 120 bp, Artificial Sequence
  ENSG00000225870_2 (sequence is synthesized)
tacaggaagcataacattggcatctgcttctagggaggtctcaggaagcttttactcatggtgagtaaaatgatccacccccatgatccaaatacctcccaccagaccccacctccaaca

SEQ ID NO: 861383 - DNA, 120 bp, Artificial Sequence
  ENSG00000225870_3 (sequence is synthesized)
acaaatatctaaatgatatcaatgaccatccccaagacacatagtcatcagattccccagggtcaaaatgaaagaaaaaatattaaaggcagctagagagaagggtcaggtcacctacaa

SEQ ID NO: 861384 - DNA, 120 bp, Artificial Sequence
  ENSG00000225870_4 (sequence is synthesized)
agggaaccacatcaggctaacagcaaacctttcagtagaaaccttataagccagaagagattaggagcctatattcagcattcttaaaaaacgtaaattccagctgagaatttcatatcc

SEQ ID NO: 861385 - DNA, 120 bp, Artificial Sequence
  ENSG00000225877_0 (sequence is synthesized)
gaaataatcagactcaaaaagacaactactacatgattccacttaacagagcagctggagtgcatcccggggacttgggagctctggaaagaggagcaggaaagggccatggccggagga

SEQ ID NO: 861386 - DNA, 120 bp, Artificial Sequence
  ENSG00000225877_1 (sequence is synthesized)
ggcctgaaaaagatcatctctgccacagagaagaagctggctcggatgctgctggcccctatggagacagggagacccggggagacaactgtattcattcaaggaggaatgggtggtgat

SEQ ID NO: 861387 - DNA, 120 bp, Artificial Sequence
  ENSG00000225877_2 (sequence is synthesized)
gcaaacttgggtggaggccacagggtgcagaagacaggacacagcagagagagatgtaggacatggaagggacagaaaggagtgaccacaggacataaaggggcaaggaaagtggaagca

SEQ ID NO: 861388 - DNA, 120 bp, Artificial Sequence
  ENSG00000225877_3 (sequence is synthesized)
tgataacatctgctgggcatccggctgaggggttgggtgcctagggtgcccttccctaagggagaaccccaggagcagattcagagaaaaccgcccagctcactccagcaagaatcagaa

SEQ ID NO: 861389 - DNA, 120 bp, Artificial Sequence
  ENSG00000225877_4 (sequence is synthesized)
aaggaccggttaaaggagagggtaggaaggtcaccaagctccaagggccctcatgaatccggcttggaggccacagggcccagggcaaggacaaaccacaggcacaggacagctccggtc

SEQ ID NO: 861390 - DNA, 120 bp, Artificial Sequence
  ENSG00000225877_5 (sequence is synthesized)
aagatcttctggctactgcaggaggcagaaaccacaccctgcaccctgcactgctgaggctggcgctggagtccagaagcttctacaccagaagcttcggtcccccatccctgctcaaaa

SEQ ID NO: 861391 - DNA, 120 bp, Artificial Sequence
  ENSG00000225877_6 (sequence is synthesized)
aattaaaacaaaaacaataacaaatcggtgtcatgcaccctctgcttcctggtgctgttcgggaccctgagtctttcacgggagcacctgatggggaaagcctggacccgtgtcggtgtc

SEQ ID NO: 861392 - DNA, 120 bp, Artificial Sequence
  ENSG00000225877_7 (sequence is synthesized)
actggtggcatttaaaaactgcagggcagccagagaacatggactgtgttccaccgggagagttcctggcgggatgtcccggtgcagaagcccgtcccaagagattattccaggaaaaga

SEQ ID NO: 861393 - DNA, 120 bp, Artificial Sequence
  ENSG00000225877_8 (sequence is synthesized)
agtggccctcagtgtcaaaggatgcaaaactaacctctgagttcctggcaggtttagcaataaaggaggatgttgctgatctcagtacaagcaatgttagagaaaggggaagatggaagt

SEQ ID NO: 861394 - DNA, 120 bp, Artificial Sequence
  ENSG00000225877_9 (sequence is synthesized)
ggacaaggacgagtgagtggaaggtgacaaatggaagcaaagaaacgtatccagaccattgaagatgcttgagcgagaagaaagaggcggtggagggaatggaagcccgaggaagtcata

SEQ ID NO: 861395 - DNA, 120 bp, Artificial Sequence
  ENSG00000225877_10 (sequence is synthesized)
tgttgcaataaggggcctcagagcacgtgtagagtgtggagcagagcccttgcagaggggctgtggaaggctggcagggtgcaggtggccccactctccgtcaccctgaggagtgtgtgg

SEQ ID NO: 861396 - DNA, 120 bp, Artificial Sequence
  ENSG00000225877_11 (sequence is synthesized)
tcagagttaaagctcagtctgtttctgggatcaggctttcacaagctccaaaagattcaccgtgcagaactggacgttctagagaaagaccacgcctcctcctgcaggtaactcttcatt

SEQ ID NO: 861397 - DNA, 120 bp, Artificial Sequence
  ENSG00000225877_12 (sequence is synthesized)
caggaagcagctcttggcttatccctgggcttagtggaattggaatacctgaccataggacaccaagggctttaggacctgagtggcacatcgtgtcctggtgacatctgagttacctgg

SEQ ID NO: 861398 - DNA, 120 bp, Artificial Sequence
  ENSG00000225877_13 (sequence is synthesized)
ggcgtgcacagcagcctccagcatcccagggagagctgtgtatggggtcaggctcaagcaggtcccagggcaccagtgacccaatgggtgaatcagactcccgtggcacctgctccttct

SEQ ID NO: 861399 - DNA, 120 bp, Artificial Sequence
  ENSG00000225877_14 (sequence is synthesized)
gtatctccctctgccatatatatgagctcatgggaagcactgtaacctcttacagaggaggaaagttcatggacttctagcttctagaactgtgatacaataaactcctgttgcttatct

SEQ ID NO: 861400 - DNA, 120 bp, Artificial Sequence
  ENSG00000225879_0 (sequence is synthesized)
attctttgagagaacttctccaccgaccccgtcacctggattggatcaccgacctctcccaagaggggcctggcttcctcctcgctggggaaacggtagggagctcccctaggtaaagcc

SEQ ID NO: 861401 - DNA, 120 bp, Artificial Sequence
  ENSG00000225879_1 (sequence is synthesized)
tctagggagagtggccaggagccgggtcaggaaaggctctggtgcccaaagggctgcccgcagaggctgaggtccctgcaagtgcacagggaggagaggtgagatcagattccagccgag

SEQ ID NO: 861402 - DNA, 120 bp, Artificial Sequence
  ENSG00000225879_2 (sequence is synthesized)
tcaggcttccatgtcagactgcgtgtgtttatgcagaggtgcaactcaggaattactgaggagaaagtacagggccaatttaacctcctctgagagacctctaaccctgctcatcaccac

SEQ ID NO: 861403 - DNA, 120 bp, Artificial Sequence
  ENSG00000225879_3 (sequence is synthesized)
tcctcgctaaaaagggccctctccagggaagaacccagagggagagcgggaattctcctccccttggaggaagagtgcttcctctacccttaatgtatcaactgacaacaattcaaacag

SEQ ID NO: 861404 - DNA, 120 bp, Artificial Sequence
  ENSG00000225879_4 (sequence is synthesized)
aaggaaactaggatgtgacaaataaaggaagccttttcatgctctatgtccactggcgtcgggcaagccccggtggaagtccaaggaaaagagtctaagacccaaacagatggtttgcgc

SEQ ID NO: 861405 - DNA, 120 bp, Artificial Sequence
  ENSG00000225879_5 (sequence is synthesized)
caaagttctgaagtgtatcagacgtgaataaaggtcttcgattccctgccccctgcccgaggacctgcctcctccctgcccgaggaccaagcttcagaagaactgcacatgggaggaaat

SEQ ID NO: 861406 - DNA, 120 bp, Artificial Sequence
  ENSG00000225879_6 (sequence is synthesized)
accaaccgcttaacttcttcagagacaacctctaacccggctcaccaccacgctagctaaaaaagggccctctcccagggaagatcccggaggaagagtgggaattcaccctccccttgg

SEQ ID NO: 861407 - DNA, 80 bp, Artificial Sequence
  ENSG00000225879_7 (sequence is synthesized)
ttgggggaggagtgctttctctacccttaatttatgaactgagaaaaatcctaacaagcctactatgaaataaagatgcc

SEQ ID NO: 861408 - DNA, 120 bp, Artificial Sequence
  ENSG00000225879_8 (sequence is synthesized)
ttgccaaggtctgatttttcacacaaaaaaatttgcaaccttcggtataaatgggttaattccaaagcctaaagcaacctaagacatctcagtccacagtgagcccagcctccagctgca

SEQ ID NO: 861409 - DNA, 120 bp, Artificial Sequence
  ENSG00000225879_9 (sequence is synthesized)
ggtgttggcttccacacagcgcaggaccaagcagttttgtgctgagtccatctctgtggccaccggccacccggtgctggggctggtccccagctcatctgcacagggttggtggaaggg

SEQ ID NO: 861410 - DNA, 120 bp, Artificial Sequence
  ENSG00000225879_10 (sequence is synthesized)
gccagaggcagcctgggctctgaattccacccagacctggggaataggcctggtaggggagtgaatgccagggccgctggtggccttggctcttctgcacggcagcaactgtggtggcct

SEQ ID NO: 861411 - DNA, 120 bp, Artificial Sequence
  ENSG00000225879_11 (sequence is synthesized)
gagaataaggagttaccataaggacgtagaggtagatcaccagagccgcatccacacccagagatagactcacacatctgtggtgtgttcatttcaacaaaggtgcagagaaaattccat

SEQ ID NO: 861412 - DNA, 120 bp, Artificial Sequence
  ENSG00000225879_12 (sequence is synthesized)
ggaggaaaaacaatagcctatcaacaaatggtgttagaacgattggatatctcacgcaaaaaattaacttttatctgtatctcatgttatgtaaaaatggaaccaaaatagattataaac

SEQ ID NO: 861413 - DNA, 120 bp, Artificial Sequence
  ENSG00000225879_13 (sequence is synthesized)
ataatgtagaatataaaagaaattatggtaaaaatcataggaaaaaaatctgtgcgaccttagttaggcaaagatattttaaatttgacagcaaaagtacaatccataaaagaaaagaaa

SEQ ID NO: 861414 - DNA, 120 bp, Artificial Sequence
  ENSG00000225879_14 (sequence is synthesized)
taaaggtcttaggtctagtggaagctgcttcggagccatggagaaaaggcagcctgcgctgattgaccatgagcctaagtacactgcatgaacctttggaagtacctcttctatgtctgc

SEQ ID NO: 861415 - DNA, 120 bp, Artificial Sequence
  ENSG00000225879_15 (sequence is synthesized)
ctgaaagtctttgaaatcggtgtgtatgttacacctacaacacatcccacactggaggagccaccctcccagggcgagacagcaacacaggcctcctggccacccacacagagaatagat

SEQ ID NO: 861416 - DNA, 120 bp, Artificial Sequence
  ENSG00000225879_16 (sequence is synthesized)
acatgaacttcggtacattgatgcggcagaataagacggtgtacagcagtgacaccaaaggaaccatggctacaggtagcagcagctgaacctcacaagtaaaaccgagagactgcaaag

SEQ ID NO: 861417 - DNA, 120 bp, Artificial Sequence
  ENSG00000225879_17 (sequence is synthesized)
gactgtagactgcatgatgttacatgtctgtaacattcaaaaggaaggcaacaccgttgtacttagtgatgttgagctaagcctctgcagaaaggcgaagctgtgattgcactgcagccc

SEQ ID NO: 861418 - DNA, 120 bp, Artificial Sequence
  ENSG00000225879_18 (sequence is synthesized)
gtagcatagtgaactttgcaacgcagggaagggcatacaaagcgcaggcctttgggagttctggccgttctgtgtactgacctgggtgtggtcacatttcttgataaacaattgaggagc

SEQ ID NO: 861419 - DNA, 120 bp, Artificial Sequence
  ENSG00000225879_19 (sequence is synthesized)
ggtattaaaaaatgagccatctcagaagtggagaccaactgaatatcttcctgtataacttcttctataactcttccatgcctctatgtttggttgactttcaccagttttcccagtctc

SEQ ID NO: 861420 - DNA, 120 bp, Artificial Sequence
  ENSG00000225879_20 (sequence is synthesized)
caatgaacctgattctataggcagttactctgtgttctttttgatgggattctaagaagtgaagaacagcataggaaccaatttgctgtgtaaaatcagagagagctcgactcactgtgg

SEQ ID NO: 861421 - DNA, 120 bp, Artificial Sequence
  ENSG00000225879_21 (sequence is synthesized)
gtcagaaacaaagggagactctccattgaaaacaggctccctgaaagcagacatcagctataaactggttaggaatttattatgaatttcctttgcattctgaagcagaaggcttaaaat

SEQ ID NO: 861422 - DNA, 120 bp, Artificial Sequence
  ENSG00000225879_22 (sequence is synthesized)
taggctctaagtcggaacccacagtaccatttcccacagtatgacaagtttatatgggcaacacatatactttagagtaatttgatcgtcccaggcactatctggagtgctttacacatg

SEQ ID NO: 861423 - DNA, 120 bp, Artificial Sequence
  ENSG00000225879_23 (sequence is synthesized)
tagctgcttagtcgtggcccctcatggcctggccctctgggttggaatgatgagttgccagagggtgaagtcacttttggatcatcacgaacactgagagtcgaaagacaatgccagagg

SEQ ID NO: 861424 - DNA, 120 bp, Artificial Sequence
  ENSG00000225879_24 (sequence is synthesized)
gtgacgtcacttccggttcatcacgaacacatggagagtcggaagatgaccctgggcttgtcttcacattttccgtgttgtcacttgccggtcctttggaagccgaccctagatgtacac

SEQ ID NO: 861425 - DNA, 120 bp, Artificial Sequence
  ENSG00000225879_25 (sequence is synthesized)
tctggagaaaacatttgcaaaccatatatctgaaaaaaatggcttgtacttcacatctaaaaagactcaaaagtcaataataggaaagaagagacaatttaaaatgggcaaaatagttaa

SEQ ID NO: 861426 - DNA, 120 bp, Artificial Sequence
  ENSG00000225879_26 (sequence is synthesized)
aaagacagatcagccaagaagatatatggatgaaaattaaacacattaaatacatccgatgtcaataaccctgctccctaccggttagacagctgatgtcagaaaggccgaccccatcgc

SEQ ID NO: 861427 - DNA, 120 bp, Artificial Sequence
  ENSG00000225879_27 (sequence is synthesized)
gcgtgcgcgagcacaagtgggcaggaacaggaaatgccacgaggacgctgaatcaaacctgcctacgtgaagggctgaagacgcgacatttcctgacagaggttgctatgtctagcagca

SEQ ID NO: 861428 - DNA, 120 bp, Artificial Sequence
  ENSG00000225879_28 (sequence is synthesized)
tgagcctctccatgaaggcatgaggggagaagacctcttctctaccttgtcccaggtcttccaggattggtgtctcctttgagaagcaggactgcttttataagtaagaaaaatattggt

SEQ ID NO: 861429 - DNA, 120 bp, Artificial Sequence
  ENSG00000225879_29 (sequence is synthesized)
tcttcattttcaaaataacgtctcagctacgtgtccaagtgtgtcacattgcaacaactgcccagctgtggggctggtcttggggagcagaggggactgaggggcctgcctcattacgag

SEQ ID NO: 861430 - DNA, 120 bp, Artificial Sequence
  ENSG00000225879_30 (sequence is synthesized)
ctgcacaggagggctgagcttgcattagcagcttctccctccagtgcaggagaacgcattaagatttacggttcatctgaaagtagcttagaaagaaaccatatgctcttatcatctctt

SEQ ID NO: 861431 - DNA, 120 bp, Artificial Sequence
  ENSG00000225879_31 (sequence is synthesized)
gcagaagttgcagacaagttatttaaaaatctcgttttcttaaactgtctttattgcaaagaaaagagcctctgggatccacttcaagtagtcattgtggagggtacagcaagccagccc

SEQ ID NO: 861432 - DNA, 120 bp, Artificial Sequence
  ENSG00000225879_32 (sequence is synthesized)
tgggctaagcatttaccccactaattcaccaccacagcaaggtggagatccttgagtttttgcctgtgtttcacaaatgaggaatccgaggagcagagacctgaagtgacctgtccagga

SEQ ID NO: 861433 - DNA, 120 bp, Artificial Sequence
  ENSG00000225879_33 (sequence is synthesized)
cacaagagtgaacccggggacaaagccaacccgctctgctggggctagtgcctttccacactcctctgtttctatatttaaaccgagtgaaaggagacatggaaaatacattagcccatt

SEQ ID NO: 861434 - DNA, 120 bp, Artificial Sequence
  ENSG00000225879_34 (sequence is synthesized)
tggaggtgaatttgatacactctcatttgtcatagagggtagaaaaagatggaaaagagaaacgggctggtggggaggagggaagagcagagaccagggcctcagcccaacctccatccg

SEQ ID NO: 861435 - DNA, 120 bp, Artificial Sequence
  ENSG00000225879_35 (sequence is synthesized)
cttcccactttctctccctgtccctttcctggaggccttgcttgctcctcacaaagctgtcattcttatgccttgcatgaatttgggtattttaacttgtctattaaaaatataaatctg

SEQ ID NO: 861436 - DNA, 120 bp, Artificial Sequence
  ENSG00000286048_0 (sequence is synthesized)
atccaaggggatattttactttggattagaaacttattgtatctacatgcacgtaaaaattttccaagtctatagtatataaatataaatattgtttcttatattgtttagttccaggcc

SEQ ID NO: 861437 - DNA, 120 bp, Artificial Sequence
  ENSG00000286048_1 (sequence is synthesized)
acggacaacacaaggtgcttggtgagctctaaatggtacctgctttctgctggtaaacataaaatgaatttgtgatggaaagaattcacccgtgaaggctgcccgtctctgggaagaagg

SEQ ID NO: 861438 - DNA, 120 bp, Artificial Sequence
  ENSG00000286048_2 (sequence is synthesized)
aagacagattgtttgtgataagaattgcatcatccacattggaacatcctgtgtgtgaagtgagggctctgaagcgggatggccctccgcctacaccgaaaagagaacagaccacagcct

SEQ ID NO: 861439 - DNA, 120 bp, Artificial Sequence
  ENSG00000286048_3 (sequence is synthesized)
tacttacagccagagggctgcccagagaattttgaggttccaggggacaagtatatctcacagctggaaagaggaaaggatgaagacaaaatttgaacacaagacttaaaacaactaaat

SEQ ID NO: 861440 - DNA, 120 bp, Artificial Sequence
  ENSG00000286048_4 (sequence is synthesized)
tatctctaagtattcttaagtaatttgagttatatttgtccttcccaaaacaacaagactctaagccacccaagggcaagggctgaagggtatcatctatttattctgaatcaccttgaa

SEQ ID NO: 861441 - DNA, 120 bp, Artificial Sequence
  ENSG00000286048_5 (sequence is synthesized)
catcttgacatggactctatatgaaacatctgtcgaaaaggcattgatgactacatcaaaggagatagaaaatcacagctccttgaaaattgttatcattttctttcagaagtgatcatt

SEQ ID NO: 861442 - DNA, 120 bp, Artificial Sequence
  ENSG00000286048_6 (sequence is synthesized)
atcatttttgaggatgaaaatgtagggattggtgtcatatcttttttattccagtgggaactgtcaaaagtgttttgtttttgatgcttctttctgaatgattgagaaatgctaatcatt

SEQ ID NO: 861443 - DNA, 120 bp, Artificial Sequence
  ENSG00000286048_7 (sequence is synthesized)
tcaaaaaacagaacaaagaccaaggcatataaagccttgatagattttattttattttttttgaaaattcttatttctgatggaaagggaatgaaggaaaggaataaggcaaatcatgtt

SEQ ID NO: 861444 - DNA, 120 bp, Artificial Sequence
  ENSG00000286048_8 (sequence is synthesized)
ttaatgctgccagttcttcatcctacagaaagaaggttgtgtggatattaatgctctctctggagatgggaatatgcctcatgttgcttaagatcaatatttaccttcgcagacactgaa

SEQ ID NO: 861445 - DNA, 120 bp, Artificial Sequence
  ENSG00000286048_9 (sequence is synthesized)
gacagaatggactctttaaaattgacatcaaagttccattaacatgtgctttcacaaagaaatgtcctactttctaggcagcattgcaagtgcatggtatttcatatgtctattgtttta

SEQ ID NO: 861446 - DNA, 120 bp, Artificial Sequence
  ENSG00000286048_10 (sequence is synthesized)
ggcactgaaaggccggaagaaaaaggcttgctcttccattgcgcctctgcatttcagggagcagattctgtagagtgctccaaaatgataatgaagtcaatgatgaagcaacggggactt

SEQ ID NO: 861447 - DNA, 120 bp, Artificial Sequence
  ENSG00000286048_11 (sequence is synthesized)
taagtagttaacgtccctctgtaagtgccaaaatcactgtatcagggatttgtccacacaaggaattcagctttttatttcttacaaataatgtgctgccatgaagagaaacacaaatac

SEQ ID NO: 861448 - DNA, 120 bp, Artificial Sequence
  ENSG00000286048_12 (sequence is synthesized)
tcattctgaaatactctatagcaaaatctgcaaagcttaacatctgcaaattttctccttaacatctatttttcatatgctccattgctcctttttatttttgaataataaaaaaatgca

SEQ ID NO: 861449 - DNA, 120 bp, Artificial Sequence
  ENSG00000286048_13 (sequence is synthesized)
aaagaaaataacagcaaattaagcagagatccagaattggcatgcaaaatacctggtgttttcaaccaacatttatcttcaccccattgtggagagctcaataaatgctatttgaatatg

SEQ ID NO: 861450 - DNA, 120 bp, Artificial Sequence
  ENSG00000286048_14 (sequence is synthesized)
ttatcaatcatctaacatattagcgtggagagatgatgccaaactgctttcacctttaaaatacctaattctggaaaggacacgtgactgtacataaaacaacctcattttcccccatta

SEQ ID NO: 861451 - DNA, 120 bp, Artificial Sequence
  ENSG00000286048_15 (sequence is synthesized)
attagacctgggcagatcatttaatggcaggaaattatgatggagttcattttatcatttagcagttcaattatacagcaattcacatatataggcatatatgtgttactatatatgcat

SEQ ID NO: 861452 - DNA, 120 bp, Artificial Sequence
  ENSG00000229368_0 (sequence is synthesized)
gcgcactcattctcaagtcgctgacacctcctccaccagagagaaaacactcgcaggccccagtggccctcgtgggcctcccccggggcgggtcttagcttcactcggcaaccctctgca

SEQ ID NO: 861453 - DNA, 120 bp, Artificial Sequence
  ENSG00000229368_1 (sequence is synthesized)
aaagagcaggccctcccaggagcgccgagtcctgtctgcagtttgctgattttcccaccaggggccgctgcgcatgggcgacgaagcgcgcgggttcccaagccgcagagaggcggaagc

SEQ ID NO: 861454 - DNA, 120 bp, Artificial Sequence
  ENSG00000229368_2 (sequence is synthesized)
gggagttgggggctgggagctcgcccccgggccgagccgggtcaggctgttgtcgcctcaggcagctcctgggaggctaacgtcgtgtcctgggcctctgtttagacagctctagaactg

SEQ ID NO: 861455 - DNA, 120 bp, Artificial Sequence
  ENSG00000229368_3 (sequence is synthesized)
aggcgagtggagcagcaccaaggcccggagatcggggcagggcagctgctgtcgccgccgccgcaggcctgagttacctgagtaactgcgggtcagggacccgcccgacggcccgcggtt

SEQ ID NO: 861456 - DNA, 120 bp, Artificial Sequence
  ENSG00000286043_0 (sequence is synthesized)
gggagaaaggaggtcgaggaggaggtggtcggtcgccccgctgctgcctggcagcgcctggcacggctgaatctcagccacagcgctgtgtgtgccaagagctgccaggcgtaagtccgg

SEQ ID NO: 861457 - DNA, 120 bp, Artificial Sequence
  ENSG00000286043_1 (sequence is synthesized)
tcagctggagagacttctgagaccgggagaggaagaacagcctgatgcctatgggctcctttggctgtattcccacccagcagattgaatctccttggatagccatacctgctggaatca

SEQ ID NO: 861458 - DNA, 120 bp, Artificial Sequence
  ENSG00000286043_2 (sequence is synthesized)
gcccaacttcatcacgcatctttggactctgtatgctggactgcgagagagttccctcatgaaatcacccaacagctgggctttgtcttccagtagaggaaaaatttaaggaacagctga

SEQ ID NO: 861459 - DNA, 120 bp, Artificial Sequence
  ENSG00000286043_3 (sequence is synthesized)
aatctgttgcttatcatcatattttccagagaatggagcaaccccacttgtcatctgttcactcagtatccatctatgctgttggttctgtaagatttcccttgagattaaaatgttgaa

SEQ ID NO: 861460 - DNA, 120 bp, Artificial Sequence
  ENSG00000286043_4 (sequence is synthesized)
attgtattttgtgtaaatctggtttgataaactgtaaaaatggcaaaacatacatttaaagaagttggcattcatatatcatgctgggtacttctttaaaaaataattctaaactatggc

SEQ ID NO: 861461 - DNA, 120 bp, Artificial Sequence
  ENSG00000286043_5 (sequence is synthesized)
atatcattaagaggagaaggatagaactgccagagagaaaaggccttcagtccagatgaagttatgactttgtgcagtgagttccttcctctggaaagaagtattagctgcaataatctg

SEQ ID NO: 861462 - DNA, 120 bp, Artificial Sequence
  ENSG00000286043_6 (sequence is synthesized)
gccacattccaagttggtcaatggtatgctgcctccctaaattctgcagcttcgattacattcattgtcctagtgcacttcctgtcaggaatggtcgcattgatctgccagttaaaacag

SEQ ID NO: 861463 - DNA, 120 bp, Artificial Sequence
  ENSG00000286043_7 (sequence is synthesized)
ctgttgcttctgatgcatgagaaactactaaagtcagtctcttatccatcaccgatgtaggagttagaaattgaaagcccagtgaccaggagagacagaggtagagagagagagagagag

SEQ ID NO: 861464 - DNA, 120 bp, Artificial Sequence
  ENSG00000286041_0 (sequence is synthesized)
cagcggatgccatgcctggagctacctgcgcagtgaaaggcggttgggctttgggggagcacagaggtccggacctgctgttttccttcatgggctttgcagcccctgaccctcgcctcc

SEQ ID NO: 861465 - DNA, 120 bp, Artificial Sequence
  ENSG00000286041_1 (sequence is synthesized)
cctgtggtccttggaccttggaatcgcatgcctccatgcaacagctatgactccctgaggcgggattgcaaaaacagttcatgtttaggcgacagcatgcatcaacgtgggaagaattgt

SEQ ID NO: 861466 - DNA, 120 bp, Artificial Sequence
  ENSG00000286041_2 (sequence is synthesized)
tggccagccatgccaaagagagactcgagctcagctctggctgaatgactgcaaattgtgatttggaatagtctgcaatttcatccatgagtcactgatgtgcctctacttctccaaggg

SEQ ID NO: 861467 - DNA, 120 bp, Artificial Sequence
  ENSG00000286041_3 (sequence is synthesized)
gattgctggctctacaaaaaaaatttcccctttcatttccaccaagtcctcagaatcttctagaagttcaataacaattcctacctaaagcctgaatgctattcctgagtcaacagctgt

SEQ ID NO: 861468 - DNA, 120 bp, Artificial Sequence
  ENSG00000286041_4 (sequence is synthesized)
gtttgccttttccccccagttgtcctggctgctggcagccatgagatgaagtcttgttttgttgcccaggctgctctctaactcccggcctaaaacaatcctcctgcctcagcctcccaa

SEQ ID NO: 861469 - DNA, 63 bp, Artificial Sequence
  ENSG00000286046_0 (sequence is synthesized)
agctggcccgcaagcgccgcgcgcagccacgattccagctcgcgcctctccctccacacctgc

SEQ ID NO: 861470 - DNA, 82 bp, Artificial Sequence
  ENSG00000286046_1 (sequence is synthesized)
agagcgagggctgtgaggactgccagcaggctgtcacctctcacttctgggctacaaacatggacagcatgtactgaggact

SEQ ID NO: 861471 - DNA, 120 bp, Artificial Sequence
  ENSG00000286046_2 (sequence is synthesized)
acttctgggctacaaacatggacagcatgtactgaggactggaggcaactgtaatgcaacgatttttcatgccaaatgatgtgggatctggaaagatgggcgaataggaatagctctggt

SEQ ID NO: 861472 - DNA, 120 bp, Artificial Sequence
  ENSG00000286046_3 (sequence is synthesized)
ctacagctcccagcaaaaccaacacagaaggtgggttatttctgcatttccaactaagttactgctgaaagcatcctgagtgacacaaacttgaagcatgcaagaggactaaataacttc

SEQ ID NO: 861473 - DNA, 120 bp, Artificial Sequence
  ENSG00000286046_4 (sequence is synthesized)
caaagtcacacatattgcatgtcaagagccagcttcaaactcaagtccctgtgaccagaggtcgatgctctaaacacatttctgcatgacctgcttgtggcagcctggagaaattctaca

SEQ ID NO: 861474 - DNA, 120 bp, Artificial Sequence
  ENSG00000286046_5 (sequence is synthesized)
aatcttctcagattccagaggctgcgaggtctgagatcaaggatctgacacctggtgagggcctttttgctgcatcatttcacatagagacaaaaagattctcacctgtaagcttgaatt

SEQ ID NO: 861475 - DNA, 120 bp, Artificial Sequence
  ENSG00000286046_6 (sequence is synthesized)
atgtctacatcatgcttgggaaatgtccatatattctaagcttgaaactgcagtgatgaggacgtcaccacttccagagagaacactttactaccaggcaacttgagtacaataggcagc

SEQ ID NO: 861476 - DNA, 120 bp, Artificial Sequence
  ENSG00000286046_7 (sequence is synthesized)
cacaaatatcatccttgctagccaggaatgacaaggagcaagccacatgaggagtcagaaaagattattccaggcagggctgagatctgcattatggtctggaggctgccccagtctctc

SEQ ID NO: 861477 - DNA, 120 bp, Artificial Sequence
  ENSG00000286046_8 (sequence is synthesized)
ctttacctccatatttttctcacagttctggagactttaagaccaagatcaagatgctggcaaggttggtttctggacttttcttcatcatgtgaagaagccaacacagacatcaactct

SEQ ID NO: 861478 - DNA, 120 bp, Artificial Sequence
  ENSG00000286046_9 (sequence is synthesized)
tgcagaaatatttacattccaggatgggtggaatattcatcctctaagacactctccttactgctcatttcacttctgggtacagtaaatatcattattttttggttttttaatatatct

SEQ ID NO: 861479 - DNA, 120 bp, Artificial Sequence
  ENSG00000286046_10 (sequence is synthesized)
gtctcataatattgttcattcttaaaggataacaaccatatcttgtccatcttcataaccttgaagaatattatagtactttgttaatagataacattcaataaatatttgtggaagaaa

SEQ ID NO: 861480 - DNA, 120 bp, Artificial Sequence
  ENSG00000286047_0 (sequence is synthesized)
agccaacgcctgtgcatccattacccagcagaagtgccgtccattacccagctgatgtgctgtccattacccagtggaagtgccgtccattacccagcagaagtagaacgtcgccaacgc

SEQ ID NO: 861481 - DNA, 120 bp, Artificial Sequence
  ENSG00000286047_1 (sequence is synthesized)
ttttgaagtctctgtgcctccttctgaattgcattccccctgaccccacatagaagattgcaaagaaagaagaaagcagcagcagcagcagtggcaacagagatgcatgtggcctgcaaa

SEQ ID NO: 861482 - DNA, 120 bp, Artificial Sequence
  ENSG00000286047_2 (sequence is synthesized)
ttttgttgtcattgaaatgtttcatttcaatgtagtataatgtatcattttaaagattataatattatagattatatgactctgcttctagctctctgatttcattgttctattcatata

SEQ ID NO: 861483 - DNA, 120 bp, Artificial Sequence
  ENSG00000286047_3 (sequence is synthesized)
tcaaaatgccaataccacttttaaatttactagtgttccaaaataagtctgatatctggtagggcaaatctgtccccttccaacccattttctctcttaaacagttctgatccaacaacc

SEQ ID NO: 861484 - DNA, 120 bp, Artificial Sequence
  ENSG00000286047_4 (sequence is synthesized)
tccccacttggtcacaatgaccaaagttgattcaatgcatgcattaattttatatttatacctttcaactgccagtatataaaattcaaagttgtttccgcccctaccccccgccagctg

SEQ ID NO: 861485 - DNA, 120 bp, Artificial Sequence
  ENSG00000286044_0 (sequence is synthesized)
ctctgtttctgtgacctcatcctcccaaaggttttgctctattctgatgggtgccatctccatacttccagcctggatgtcccaaacttcaggacaccatgtggagtaatctggactttt

SEQ ID NO: 861486 - DNA, 120 bp, Artificial Sequence
  ENSG00000286044_1 (sequence is synthesized)
tcctatcagcatcctctaggttatttggatgaaatgcttatttcttttttaacataagcattgactggaaatattggttattctgtctgatattacatgaaggtcagatgccctccatgc

SEQ ID NO: 861487 - DNA, 120 bp, Artificial Sequence
  ENSG00000286044_2 (sequence is synthesized)
aaccatgaggtcggatggcagtttgatgctgaaccagcaaacaagcctactcagcatgaaactatgagtataaaaacctttatgatgacctacctccacttggatcaatgaagagaagaa

SEQ ID NO: 861488 - DNA, 120 bp, Artificial Sequence
  ENSG00000286044_3 (sequence is synthesized)
gagttgtggacatagacacatacagagagaagaccatgtgaagtcacagggagaagacagccacctacataccaaggagagaggctgtacaagaaaccaaccctgatgacaccttgatct

SEQ ID NO: 861489 - DNA, 120 bp, Artificial Sequence
  ENSG00000286044_4 (sequence is synthesized)
tggacttccagcttccagatttacaggaaaataaatttccgttgtttaagccacacagtctatggcattttgttatggcagttctagcaaactaatatacagcctatatcatatactact

SEQ ID NO: 861490 - DNA, 120 bp, Artificial Sequence
  ENSG00000286044_5 (sequence is synthesized)
cagtttgactacttttattttggaacatattatacttttgctacttttgcttatgcagtttcttttgcttagtgtcccttgctagtagatatttatatttaaagatattttaggcctggc

SEQ ID NO: 861491 - DNA, 77 bp, Artificial Sequence
  ENSG00000286044_6 (sequence is synthesized)
gctagtagatatttatatttaaagatattttcaggctgaggtgagtaaatcacttgaggccaggagtttgagatcag

SEQ ID NO: 861492 - DNA, 120 bp, Artificial Sequence
  ENSG00000286044_7 (sequence is synthesized)
aaaaaaaaaaaaaaaaaaagtaatttctccctcttctacatttcttttgtaattttcccttacttctaataaagcaaccatcacattatatttttatttctcctgtaaaattgcaccagt

SEQ ID NO: 861493 - DNA, 120 bp, Artificial Sequence
  ENSG00000286044_8 (sequence is synthesized)
tcacattatatttttatttctcctgtaaaattgcaccagtcctcaaagaaaagatcagagcagtgacaagagtcaagtcagacatggtggttgcttggaatggtatgatgacagtgttgg

SEQ ID NO: 861494 - DNA, 120 bp, Artificial Sequence
  ENSG00000286044_9 (sequence is synthesized)
tgaaaatacatgaaaagaggtagaattgatgactgtggtggtttataaaacgtagggagacaagttagaagtccatatgaaggatgcagtcctggaatgaggatgctgtcatctgggacc

SEQ ID NO: 861495 - DNA, 120 bp, Artificial Sequence
  ENSG00000286044_10 (sequence is synthesized)
ataagacatgaagacaagagtggcgttatgaactgaaaggagccaggagctttgttggaatagaaccaccctattaaccctggacttcctgcctgggctaatttgcatttgagagagaaa

SEQ ID NO: 861496 - DNA, 120 bp, Artificial Sequence
  ENSG00000286044_11 (sequence is synthesized)
taaactactgtacataagccactgcaatttgttttcccacttgccgtcaatataatcctaacggagagagcagacaacaaggtattattgagttaagatgagaaacaggggacattaaga

SEQ ID NO: 861497 - DNA, 120 bp, Artificial Sequence
  ENSG00000286044_12 (sequence is synthesized)
ggaggtaaaatcctttacttccaaatgttgctgttcgctgacgctggtgaatagccatgtgacaatgaaacccaaccaaaaattgaggagccaaaataatagaagatgggtgaagatgag

SEQ ID NO: 861498 - DNA, 120 bp, Artificial Sequence
  ENSG00000286044_13 (sequence is synthesized)
ccttcattggaagagcaagctgactcccccatgacgtaaagcataaaataggtgttcctgattgatggaaagctgtcttccacagggtgattcagggcccagatttctttcatcatcaac

SEQ ID NO: 861499 - DNA, 120 bp, Artificial Sequence
  ENSG00000286044_14 (sequence is synthesized)
acttggcttcccaaacagtcattattcatctacactgagctaacagaagaagaaagaacatgaagaatggtgccaggagaattaagtgaccaaaatcatctgaaagtccttaagtccatg

SEQ ID NO: 861500 - DNA, 120 bp, Artificial Sequence
  ENSG00000286044_15 (sequence is synthesized)
aaactacactcaggagaagattatcatgtaaaggagaggtgcattgtgtttggggaacaaatgcccatggaaatagtgagtgcagaaagttacagagctttgcatctaggccctctagta

SEQ ID NO: 861501 - DNA, 120 bp, Artificial Sequence
  ENSG00000286044_16 (sequence is synthesized)
gagtttgcaaatgagatcgccctacagatggagaatttgggagcatcatgctgcgacgccacctcttggctaatgcatgtggattgtcaggcgacagagggaactctgatcaaccaacac

SEQ ID NO: 861502 - DNA, 120 bp, Artificial Sequence
  ENSG00000286044_17 (sequence is synthesized)
tgacttttggtacagaatcccagtggaaatcacccaagggaaagcagacgactagtgtgccttatggggaagcattttctatatttagtgaccaaactttcattgcctttggagaatgaa

SEQ ID NO: 861503 - DNA, 120 bp, Artificial Sequence
  ENSG00000286044_18 (sequence is synthesized)
atccgtgcttcttttttagagtggttgttttgagtggtagtcaacatgggggagagatggtgttactttctaaatggagtaaaagatgagcaagataagcaacttccaccacatagcagc

SEQ ID NO: 861504 - DNA, 120 bp, Artificial Sequence
  ENSG00000286044_19 (sequence is synthesized)
aggtatgaagacaactggtgcctgtctccagcattcaactaaacagtctcttgccaagaacctcacctttggcctgtgtagagccgttttcactgggtcagagcagaggtcagtacatcg

SEQ ID NO: 861505 - DNA, 120 bp, Artificial Sequence
  ENSG00000286044_20 (sequence is synthesized)
acccaatcaccccatagcatcttggccaaccaaggggtgctaattagatccaattgtgatgaaggtagagggaagtttccctcactgcactgaccacccccccgcccccgcccgagtgat

SEQ ID NO: 861506 - DNA, 120 bp, Artificial Sequence
  ENSG00000286044_21 (sequence is synthesized)
ttccttgtcttagaggccacgggggtggggtagggggctattcttcacctcatctgtccatggctagctgggtatgtagcagctgattccgttcttagcctcaaattctcaaggcctcca

SEQ ID NO: 861507 - DNA, 120 bp, Artificial Sequence
  ENSG00000286044_22 (sequence is synthesized)
gatctaagggattgacactgacttcatgcctcctccaaatataggaaagttcccaatttgtaattcagaatgtagatgtttggggatggaagaagaaaaccaaaatataagtaccagcta

SEQ ID NO: 861508 - DNA, 120 bp, Artificial Sequence
  ENSG00000286044_23 (sequence is synthesized)
ttggtccaatgtccgctatgctttggaagtcatactgatattggtaaggtgtggcaaatgtcagcaccactgcccaccacccacctgccctttctcttatggatacaatgcattaattca

SEQ ID NO: 861509 - DNA, 120 bp, Artificial Sequence
  ENSG00000286044_24 (sequence is synthesized)
taagaggcatttcagacaaacgccggaaagtaatttatcagggttcttccagggcttccagctataattgttttaaatccaacaaatttgctataggcaaaggcccccaaactaccctaa

SEQ ID NO: 861510 - DNA, 120 bp, Artificial Sequence
  ENSG00000286044_25 (sequence is synthesized)
gacatattcctaaatttccagagcttaaaaatcaatgtgcttaaaaaaataaaaacagaaaatgccagctgcctttgcaaacaaggacactgggaaacaaatataattgtgttttttcct

SEQ ID NO: 861511 - DNA, 120 bp, Artificial Sequence
  ENSG00000286044_26 (sequence is synthesized)
tctacatccgtccgggaacttcgactgctactatgctacatcaggtatgcaatgaaagacaaacaacgaggactccaaacagaagaggggagcttcagtaactgtagtttttatgttagg

SEQ ID NO: 861512 - DNA, 120 bp, Artificial Sequence
  ENSG00000286044_27 (sequence is synthesized)
gagagactgagagagaaaggagcattgtatctcggattaacagaactgcaggatttcattaatgacagcccagctttttagcaaaaggaagatagttagggcagtaaaagagaacatgac

SEQ ID NO: 861513 - DNA, 120 bp, Artificial Sequence
  ENSG00000286044_28 (sequence is synthesized)
atgggtcgtggtggggaaagcactcaaatctaacttagaattctctgattacttcaccatctccttcagtaagtacactgtcaactccttcagggaagaatggtattctttatcttcata

SEQ ID NO: 861514 - DNA, 120 bp, Artificial Sequence
  ENSG00000286044_29 (sequence is synthesized)
gaggtcggatggcagtttgatgctgaaccagcaaacaaggccgtcaggggaccccactcctttctccctgcaggcttcctctgccacttgctactcctttgtactcgttccacctggcag

SEQ ID NO: 861515 - DNA, 120 bp, Artificial Sequence
  ENSG00000286044_30 (sequence is synthesized)
tctgaggaacacaaactaaaatgcagaactgcctcgatgcgtttgagaacattctgtccttattgtgaatgctgacttgctccaatcaacacatttctttaactcctttaaaaccagctt

SEQ ID NO: 861516 - DNA, 120 bp, Artificial Sequence
  ENSG00000286044_31 (sequence is synthesized)
gttagagctgtctacaatgccgtgaggttccaacttcctctgattaattaggaggctcagaaatgtcctactcagcatgaaactatgagtataaaaacctttatgatgacctacctccac

SEQ ID NO: 861517 - DNA, 120 bp, Artificial Sequence
  ENSG00000286044_32 (sequence is synthesized)
gtagctgggactacagactcctgaatgaccttaatacctccaggctctgcttggtcctggctatggacctcacacagtcctcttagacatgcatctgatcaatggcaacaaaagccaaaa

SEQ ID NO: 861518 - DNA, 120 bp, Artificial Sequence
  ENSG00000286044_33 (sequence is synthesized)
cttgctgaaaacccttctgttgtccattagtttaggaaaaagtccatactccttactccaaccttcaaggctctttacgatctgatttgtacctatctttctaacctatttcttccaaga

SEQ ID NO: 861519 - DNA, 120 bp, Artificial Sequence
  ENSG00000286044_34 (sequence is synthesized)
tcctgaaatataatggcctatttggggctgaattgtgtcttcccaaaatacacacgttgaaatcctaacctccgatacttcagaatgtcactgtatttggagacagggtcttcaaagagg

SEQ ID NO: 861520 - DNA, 120 bp, Artificial Sequence
  ENSG00000227438_0 (sequence is synthesized)
gcagagcctgggcatgcggcgagccacccctgccacccctttcccgctggaaaccacagatggcaatgacagcagtagtcccctggcagccacacacccctctccaagaaccccagcgtg

SEQ ID NO: 861521 - DNA, 120 bp, Artificial Sequence
  ENSG00000227438_1 (sequence is synthesized)
ccacctgccagagcctgcagctcccacacccctctcatgcctccagcacagccctgccaccacttgcagaggaagctgagaccagagcactgaagtaacctgcccaagactgcacagctt

SEQ ID NO: 861522 - DNA, 120 bp, Artificial Sequence
  ENSG00000227438_2 (sequence is synthesized)
ggagtccctttgggtctgcagagcaatgcctggcacagagcaggccctgactggggctgcagagtcactaagtccctgcatgggggaccaactgatgcaggctctgaggtcccaggattc

SEQ ID NO: 861523 - DNA, 120 bp, Artificial Sequence
  ENSG00000227438_3 (sequence is synthesized)
tgtggagattcacaggggacctaggaccctcggagctgccctctgaattcaagcagtggtgcctcctgtgcttgtcaggcaggatgatctgtggggcctgtgggctctgacctcactctg

SEQ ID NO: 861524 - DNA, 120 bp, Artificial Sequence
  ENSG00000227438_4 (sequence is synthesized)
cagcagcaaagcccagaggcctcactttttcatgaaccagcacaggctctcctgagagccctggagggaaggctccggctatactgcctcctggtgtgaggaggcttctctcttgtctgt

SEQ ID NO: 861525 - DNA, 120 bp, Artificial Sequence
  ENSG00000227439_0 (sequence is synthesized)
ttcctcattatggggtgtgttcaggctgctgaggtgcccattctcaagattttcactggacattctggggtcccagttcaagtattttccaatgtgagtcaaggtgaaccagagcctgaa

SEQ ID NO: 861526 - DNA, 120 bp, Artificial Sequence
  ENSG00000227432_0 (sequence is synthesized)
gtacagccggacaacaggccaatgcccccgactcttctccctgcacaatgctcctgctcctgtccctctatttctacctaactcccctgcccaatggcgggaggccccagacactgcagg

SEQ ID NO: 861527 - DNA, 120 bp, Artificial Sequence
  ENSG00000227432_1 (sequence is synthesized)
catggtgggggccaggaacctcgttggctggagcatgtttcctggtgatcctgaggcagcggggccaacaccccagacatctggagccttggtggtccagaccaagacggatgcttccct

SEQ ID NO: 861528 - DNA, 120 bp, Artificial Sequence
  ENSG00000227432_2 (sequence is synthesized)
cggtctgagaaagaaggctcttaattcaactcctgatacccgaatgacctcagccttcaagtgacctggcacaaccctccatgaacagtttattcaggcgctctttccagactcatttgc

SEQ ID NO: 861529 - DNA, 120 bp, Artificial Sequence
  ENSG00000227432_3 (sequence is synthesized)
tgaaccccccctcccaaatccccaagaccccatcaatgcctggcactgtgccctgaggcactggggtttgaagatgaatgagtgagaaccgagaacctgctcacatgaagctcataacca

SEQ ID NO: 861530 - DNA, 120 bp, Artificial Sequence
  ENSG00000227431_0 (sequence is synthesized)
ggctctgaccatgccagcaggcttcacggttctcgttttccaaagaggaacacagattcagcgagcggctgctggcttctgacccattttgatgtcagggcttggcacgtaggaggtgtt

SEQ ID NO: 861531 - DNA, 120 bp, Artificial Sequence
  ENSG00000227431_1 (sequence is synthesized)
caatgttgatcgatccaaggtcgtgcacatagggtctaagacggaagagaacttcctgcccctcttggagcttctattttagagggagacacggccagacaggtctcgaactcctggcct

SEQ ID NO: 861532 - DNA, 120 bp, Artificial Sequence
  ENSG00000227431_2 (sequence is synthesized)
gagaatgagcctgatgactttaccattttccacctctaagagccaatcgcaaaggaggctggctggcatcttgtgtctgtctagcatctctaccagtttctgtagaaaaccctcaagctg

SEQ ID NO: 861533 - DNA, 120 bp, Artificial Sequence
  ENSG00000227431_3 (sequence is synthesized)
tgccaagacgatcatgtctggacacagctcttggtgtcacggggtgtctcctcctactgcctatcgccctttgcagccaccagaataatcatgcagccagggccccatattatctaccgc

SEQ ID NO: 861534 - DNA, 120 bp, Artificial Sequence
  ENSG00000227431_4 (sequence is synthesized)
tgtccatctgctctccagcacatcagagcagcccttcccctgtgtgagattcctctccagggcaagacttgaagggagcatcaaggttgcagtggaagaaataaattggaagtggagctg

SEQ ID NO: 861535 - DNA, 120 bp, Artificial Sequence
  ENSG00000282740_0 (sequence is synthesized)
gctgctgctgctccagctctccggatctctccaacagctgctccagctccgagaacctcttcttgtactggagaatctggggattgggagctgatgagtcttactctgttgcccaggctg

SEQ ID NO: 861536 - DNA, 67 bp, Artificial Sequence
  ENSG00000282740_1 (sequence is synthesized)
ggattgggagctgatgagtcttactctgttgcccaggctgcggtgcaatggcgcgatctcggctcac

SEQ ID NO: 861537 - DNA, 120 bp, Artificial Sequence
  ENSG00000282740_2 (sequence is synthesized)
tgagatcttcgggctctgccccgacacagcctcatacgcctcactctttacacacacggtcacttgccccgcgcactcccgagccctttccagccctgacacacagctgggattctcact

SEQ ID NO: 861538 - DNA, 120 bp, Artificial Sequence
  ENSG00000282740_3 (sequence is synthesized)
tagaagtcgccctgtccgtgatgtcaccgacagtgccttgcccagtccccgtctgcctttctgccactcaaccgaccaatctgctgccagagccgccaaggggaagtgacgtctgcctct

SEQ ID NO: 861539 - DNA, 120 bp, Artificial Sequence
  ENSG00000282740_4 (sequence is synthesized)
ccctttttccctcccgcccctgcgtctgttctctcccaaagaagctggtccttagcctgtgttaaggagcaacctttcggtggccagatggagccggggcatccttcttcaaataatggc

SEQ ID NO: 861540 - DNA, 120 bp, Artificial Sequence
  ENSG00000282740_5 (sequence is synthesized)
ttttaattcgcagactagaatgtttcggattacaaaagaaaccggttctcttcacatccttatccttgtgatgcagcattccgcttgcaattggaagccgtttaatatcagagagaaacc

SEQ ID NO: 861541 - DNA, 120 bp, Artificial Sequence
  ENSG00000254501_0 (sequence is synthesized)
atgtttattaggccggtcctgacacctgcctgcggggaaggaccaccgagaccagatcctgggtgccatggggtgcagggacagaccggtgcatggcagcggctgcgcctagccgcgctc

SEQ ID NO: 861542 - DNA, 120 bp, Artificial Sequence
  ENSG00000254501_1 (sequence is synthesized)
gcagatgacctcaaccacactgggctccatgggcacagggtctgggcagcgcagggcagcagaggccaccacttcgtccagcagcaagtgcacgagttcttcgtcggccacaaaacgcca

SEQ ID NO: 861543 - DNA, 120 bp, Artificial Sequence
  ENSG00000254501_2 (sequence is synthesized)
cgcagccgcacacactccagcagcgtcttcaggctgatcttgatgatgccggtcagcaccgacacctgcaggcagggacacagggatgcagcttggggactgcaggtgtggggctgctcc

SEQ ID NO: 861544 - DNA, 120 bp, Artificial Sequence
  ENSG00000254501_3 (sequence is synthesized)
agccaaccctccccgggatccctggaagtctgagtcacgttggaagtcggaccttgttgaactccacagggctgaacacatcaatacgttcagagaatagcttctggatattgctcaaga

SEQ ID NO: 861545 - DNA, 120 bp, Artificial Sequence
  ENSG00000254508_0 (sequence is synthesized)
tcttcgcgctccgcgtcaaatctctccagctctgttctcgcatcccgggtttagatcccgcagagttaagtatcccgcgtgtgaagggatgaactgagactcccagagggcataactgat

SEQ ID NO: 861546 - DNA, 120 bp, Artificial Sequence
  ENSG00000254508_1 (sequence is synthesized)
ctgctcttcagctttgccaagtatggtgtaaggggctttggggaatccagacagacctggacttcacacgcccgtcatttatttcactactagtgaaatgctggcgtagttacgcctaag

SEQ ID NO: 861547 - DNA, 120 bp, Artificial Sequence
  ENSG00000254508_2 (sequence is synthesized)
ttctctgagactgtccctcatctctaaaaccacccctcctctggtgaactaaggatggcgataacgctttatgtaaagtgcctggccagatactcaataaatgttaattttccaagctta

SEQ ID NO: 861548 - DNA, 120 bp, Artificial Sequence
  ENSG00000256906_0 (sequence is synthesized)
cacaggctccccgagtcagaacgtgacctggattcccttagcccggaggactgagggctgagagcctggcaacagcgtctgattgctgcccgtcagcagcttcaccgcgagctaatctgg

SEQ ID NO: 861549 - DNA, 120 bp, Artificial Sequence
  ENSG00000256906_1 (sequence is synthesized)
actgcagtccgacctcccgggctccctcatgctccacgtgattgccatggtcaggaaggcaggaagcaaaaaatgcagctcaccatccagacgccctgcctcgtgctcccgcggactggc

SEQ ID NO: 861550 - DNA, 120 bp, Artificial Sequence
  ENSG00000256906_2 (sequence is synthesized)
tgcgccccagactcgggtttcagtagaatcaggatgagcctgctgggcagccgggtcacaggcccctaactcacctgcagacccacgcagatcagtcttcgcagtgagctcagggcagac

SEQ ID NO: 861551 - DNA, 120 bp, Artificial Sequence
  ENSG00000256906_3 (sequence is synthesized)
ctcagctttgctcaagcccggccctgccacaaacatgcctcacctcctgccacctaccctggccgttcctccagccaactgggcatgagaatgaaaactcccacaagttccatgggaatg

SEQ ID NO: 861552 - DNA, 120 bp, Artificial Sequence
  ENSG00000256906_4 (sequence is synthesized)
catatttgatgaactggaaaaatatcaggctaactaaataaaagttggatttccctgagcctcacttgctggtcactgccctgtcacttctgaaagtcatgtggactccattatttgttt

SEQ ID NO: 861553 - DNA, 60 bp, Artificial Sequence
  ENSG00000256906_5 (sequence is synthesized)
ctgtcacttctgaaagtcatgtggactccattatttgtttattccctgcaacctctgcct

SEQ ID NO: 861554 - DNA, 61 bp, Artificial Sequence
  ENSG00000256906_6 (sequence is synthesized)
gggccccattattacatcacacacagagagggttctgaaaggcagcaggggctgttgaggg

SEQ ID NO: 861555 - DNA, 120 bp, Artificial Sequence
  ENSG00000256906_7 (sequence is synthesized)
cacagagagggttctgaaaggcagcaggggctgttgagggtgaaagtcagttgtcttctgggtgcagctacagctattccacctgtcatgcaggtagccatccacagtaaaccgtcagct

SEQ ID NO: 861556 - DNA, 120 bp, Artificial Sequence
  ENSG00000256906_8 (sequence is synthesized)
tttctcccttacatttttctctttatacttgagaattatgttttcacttgggccataaagacatttgggctaagtcacaggaaataggacgctgataaatgaggactgcagtttcttctc

SEQ ID NO: 861557 - DNA, 120 bp, Artificial Sequence
  ENSG00000256906_9 (sequence is synthesized)
ttgaaccattgaataccccccgcaggaagtacacgggagaaaataggagggagattgtttgcggagggctgcagctgagcaaaagaacactgaccataagatctgccctcttaacacatt

SEQ ID NO: 861558 - DNA, 120 bp, Artificial Sequence
  ENSG00000256906_10 (sequence is synthesized)
tttaagagcgtgatacaggattgttaacaataaggaacatggttgtttgtttttctcttaattgcttttttattacgaagctaaatgatttttaagagcgaaatttgaatataaagaaaa

SEQ ID NO: 861559 - DNA, 120 bp, Artificial Sequence
  ENSG00000256906_11 (sequence is synthesized)
taatagggcttttgacttttctactacaagaaggtggcttcctcaaggcatatgattgcaatccaagcgatgctatttccagatggtaaacaaccctcttttttacaatcatgttgccta

SEQ ID NO: 861560 - DNA, 120 bp, Artificial Sequence
  ENSG00000256906_12 (sequence is synthesized)
caagtctaggcagacaacccttggtacttacatacaccaggtactagagaaaagctggaaaatgcagccagtggtctcaaggctttcaaaaatgagaccttaataaagagttaatatgaa

SEQ ID NO: 861561 - DNA, 120 bp, Artificial Sequence
  ENSG00000256904_0 (sequence is synthesized)
actgcactccagcctgggcaacagtgagaacttgtctcataaaataaaataataaaatagattagccaggatgctctctgggaccaatgatcatcctatatcaaaccagcctaaacaaaa

SEQ ID NO: 861562 - DNA, 120 bp, Artificial Sequence
  ENSG00000256904_1 (sequence is synthesized)
gatcatcctatatcaaaccagcctaaacaaaaaagtgtttttggtaactggaatggatccaacaggaagaatgagcttatggaaccagagcaccttgaaaaacttgacagcccaggagtg

SEQ ID NO: 861563 - DNA, 120 bp, Artificial Sequence
  ENSG00000266908_0 (sequence is synthesized)
gacatctctttattcccgagtgaacagcagaaaatgagatggagtgagagccgaaagaaggtcctgttctctacgagtgaatatcctaatgaccataataaagccagttccctttttggg

SEQ ID NO: 861564 - DNA, 120 bp, Artificial Sequence
  ENSG00000266908_1 (sequence is synthesized)
tgtcttgctgcaaaacttcacctctggataaagtggctgtgctccttctggatgtctgcatcagggctgctgaggcacagctgagaatgcaccacacagctgactacgctgctgagcaaa

SEQ ID NO: 861565 - DNA, 120 bp, Artificial Sequence
  ENSG00000266908_2 (sequence is synthesized)
tctcattactaaatgcacatccctttcaaggatgccaggcgttagggctgcattgcaactttgatggacactggggattaatgcctgtgtgtccttgttccattaaaaagtttgaagttt

SEQ ID NO: 861566 - DNA, 120 bp, Artificial Sequence
  ENSG00000266908_3 (sequence is synthesized)
cagagtgctacggggagttgtcttagtttaggtttcccccaaggagactcccagacaaagacctgagtgcaggtagtttattgggagcagatcccgggaagcacacacagggggagggga

SEQ ID NO: 861567 - DNA, 120 bp, Artificial Sequence
  ENSG00000266908_4 (sequence is synthesized)
agtgaggcagggaagggagaagggcccatacacgatatgctaacgagcagggtgccactgcggctcactccagttgacctgcagaccgtgtagaacatgcctcatggttgttcacagcag

SEQ ID NO: 861568 - DNA, 120 bp, Artificial Sequence
  ENSG00000266908_5 (sequence is synthesized)
cgcggggaggctggacattcagccatcgattcctaccccctactgatggacagattccctgagagccagaatttccctcacttttgagttgtgtcccggtgtggtgcagaaagcccaagg

SEQ ID NO: 861569 - DNA, 120 bp, Artificial Sequence
  ENSG00000266908_6 (sequence is synthesized)
ctgaaaagaagagagcttcaggccttggatgggaggtgtcatggtgcctggaactgcatctgcaggtgagcagaggagattctgggcaggccgtcactctcacatctgctacaggagggc

SEQ ID NO: 861570 - DNA, 120 bp, Artificial Sequence
  ENSG00000266908_7 (sequence is synthesized)
agcagaggggacattgcctttgatgaggcgggcaggagccatacttctgctggagttcatagactgaactgggtgtgaacccagagaaactgggtgggctgagtgggattttgagagggg

SEQ ID NO: 861571 - DNA, 120 bp, Artificial Sequence
  ENSG00000266908_8 (sequence is synthesized)
ctggagactttgcattatatacttggaggcaacttacatccccacttgggctcacaaagctggcaagaactggggaaatggagatgacttccccttctagtcaaagagatttctctaatt

SEQ ID NO: 861572 - DNA, 120 bp, Artificial Sequence
  ENSG00000266908_9 (sequence is synthesized)
gcaagtccaaagtctcttcttgtctctgaaagagttttctgtctgaagtctttctgggtgagggaggcttagctgaactacatgataaagtgctgagggaggggaaaagggaaaggggag

SEQ ID NO: 861573 - DNA, 120 bp, Artificial Sequence
  ENSG00000266908_10 (sequence is synthesized)
gaaagaaaatccatgcaggcaggagttgctgcagagcctcaggggaggcattatctacaaacaactggatgtgaggaaaatggatgagctggctttcatggggttctgcagagtgactct

SEQ ID NO: 861574 - DNA, 120 bp, Artificial Sequence
  ENSG00000266908_11 (sequence is synthesized)
ggatacacctgctgactcacctggcccaggtatttttccctcttcggcttccatctgcctctaggggaggaaggtgatagtcaagactgagacaaggtatcagggtcagtgcccgccagc

SEQ ID NO: 861575 - DNA, 120 bp, Artificial Sequence
  ENSG00000266908_12 (sequence is synthesized)
catgctccctgtctatggagaaagacccaagaaaaagattttggcatgggatgaatggggtgacttagattgttgtagaagagcaaattggagcagggaagagaggaggaagaggaagaa

SEQ ID NO: 861576 - DNA, 120 bp, Artificial Sequence
  ENSG00000266908_13 (sequence is synthesized)
gatgtgtttgaggaatgcacaggacatccatgtagagaaacctgtggacagttggctccatgcatcagaacttcagggtcctgttctctacgagtgaatatcctaatgaccataataaag

SEQ ID NO: 861577 - DNA, 120 bp, Artificial Sequence
  ENSG00000266908_14 (sequence is synthesized)
aggttacgaggtcaggagatcgagaccatcttgaccaacacggtaaaaccctgtttctactaaaatacaaagaagtagccaggcgtggtggtgggtggctgtagtcccagctactcggga

SEQ ID NO: 861578 - DNA, 120 bp, Artificial Sequence
  ENSG00000266908_15 (sequence is synthesized)
cctgaacagagggagaggggagtaaataaggggctgttgccagagcctgagcccaccagagaaagtctgtgtgcagagggagggcctcaggtcctgctgctccttcatcttgaccccttc

SEQ ID NO: 861579 - DNA, 120 bp, Artificial Sequence
  ENSG00000266908_16 (sequence is synthesized)
acaccctcctctaacagggacctcgacctcccttctccactctcctggatcctgctcagtgtggtgcaggccttctctggggccctggagttcccactgaccttcagccccgccagttgc

SEQ ID NO: 861580 - DNA, 120 bp, Artificial Sequence
  ENSG00000266908_17 (sequence is synthesized)
tctccagctgtcagctttcccacctccaccttctctcctcctttcggttctgcttctgaatttcttcaaaaattctcctgcatcaagactctcatgctagtcagttcctgcctggggtca

SEQ ID NO: 861581 - DNA, 120 bp, Artificial Sequence
  ENSG00000266908_18 (sequence is synthesized)
ccagactgcttcgaagtcaggaagaacatggtggggacggtgacttgagtttcctggaccacagtgcagctgcttccagaagataggggctgtggtgagaacagaacttcctttgctgcg

SEQ ID NO: 861582 - DNA, 120 bp, Artificial Sequence
  ENSG00000266908_19 (sequence is synthesized)
acatgaactgcttcctcagatgatggctggattcctgtgaatgtggataaagcattctgtcagtccacagatggtgttgctggcagaagcattacaggcaaggcaggcagctccatcata

SEQ ID NO: 861583 - DNA, 120 bp, Artificial Sequence
  ENSG00000266908_20 (sequence is synthesized)
gtattgccagcttactgcataggttcagctgtaaccaggtctaagtgttttcctcagtaaactggtcataaggagcagttcatgaggtcacaggcatggggtgaaggacaggacacaatg

SEQ ID NO: 861584 - DNA, 120 bp, Artificial Sequence
  ENSG00000266908_21 (sequence is synthesized)
caacaggagtttgtgtcaaaggaatctgaagtgcctgttatgaaatctactcatatattccagacctactcaaacttgatctcttatataccatgtccatttgatgatagactgtgcaca

SEQ ID NO: 861585 - DNA, 120 bp, Artificial Sequence
  ENSG00000266900_0 (sequence is synthesized)
ctgctttctagtagacaagcatctactagtaattgatgattagattatgcccaaaccctctagtggaagggggagggagtgaatgtattctagccaaatcatctgttgactagaaaacgg

SEQ ID NO: 861586 - DNA, 120 bp, Artificial Sequence
  ENSG00000266900_1 (sequence is synthesized)
ctcttctcctctgctctccaagtgcaacaagttccagataggtagcatagcagcaaattgtacatacctggtgaccccctcaggcattctaatgttctccaaatagaaacctaactaacc

SEQ ID NO: 861587 - DNA, 120 bp, Artificial Sequence
  ENSG00000266900_2 (sequence is synthesized)
ttcagtaaggcagatttttttaaaaaagcccaacttcatctgcctgtatatgttctcagtgatattttttatgaatcctaagacctataaaagctcaaaatgcagattttgcatcaaacc

SEQ ID NO: 861588 - DNA, 120 bp, Artificial Sequence
  ENSG00000266900_3 (sequence is synthesized)
atttatcgtaaaacattgaggtgcagtttttatacacaaaactttctatctttttaagaattctgtttgtatggcttattgcctaataatttttgatattcatgtaatctcagtaagcgt

SEQ ID NO: 861589 - DNA, 120 bp, Artificial Sequence
  ENSG00000266900_4 (sequence is synthesized)
cttttcttagaaatatgtgtatatatattctattctgttagattctgagctactttttaatgtttaccttacagtgagattctcccaactgaaagcaagtggagtttatttttttcaatc

SEQ ID NO: 861590 - DNA, 120 bp, Artificial Sequence
  ENSG00000266900_5 (sequence is synthesized)
ttgattgttgagagagagaacttctggtttaaggtagtgataggttgacatttcttgatatttccttcccaaattggaatttgctattgaagacatttaaaaagtataaaaaactaagat

SEQ ID NO: 861591 - DNA, 120 bp, Artificial Sequence
  ENSG00000266900_6 (sequence is synthesized)
atttgaagggcctgagaaaattttctgttactctaatatcatttaatgaagctctattaggaaggcccttgtagttttcactttgagaaaagtatgtttcagttggctaacaagtaagta

SEQ ID NO: 861592 - DNA, 120 bp, Artificial Sequence
  ENSG00000266900_7 (sequence is synthesized)
gaatgcactaagtcagacagccattatttttatctaaggcagtcagttatttctgtcctcattcagtctgctgtcagtgtttctctttcttcatccattcagagattattattcccagta

SEQ ID NO: 861593 - DNA, 120 bp, Artificial Sequence
  ENSG00000266900_8 (sequence is synthesized)
aacaagaaatagagggagatgggcaaatgatatcttttatccttaaatatgtggttttatcacaaacaaagccagataaagaccagaaatagccctagaagtacacagtaagggttagtt

SEQ ID NO: 861594 - DNA, 120 bp, Artificial Sequence
  ENSG00000266900_9 (sequence is synthesized)
tttttatatacgatatttgtctgaattaaactccagcctacttcaaatcctgtatagcataaattatcatcattgtcaagagaactgggcgttgagaaaaggagaaaagcacacctggat

SEQ ID NO: 861595 - DNA, 120 bp, Artificial Sequence
  ENSG00000266900_10 (sequence is synthesized)
tcagcagaacgacattaaattattatgtctttaatatatctgagatatctcagggagtgaagccattaactgtggctcctccctttctctcaaaatgaactggagctggatcaatttctt

SEQ ID NO: 861596 - DNA, 120 bp, Artificial Sequence
  ENSG00000266900_11 (sequence is synthesized)
cttatcaaagattagtctatagaaaccaaaatccacatgagccccataaaaattgcactttacagtgaaaataacagttactctaaattcagaataaaggcatatcttagaaaatgatgt

SEQ ID NO: 861597 - DNA, 120 bp, Artificial Sequence
  ENSG00000266900_12 (sequence is synthesized)
attacaagaaccaaagaaacattttgaaacatcatttagtggcctaaaaaagaggcaagaattcctggctattataaacaggagaatggagccaaaataaatgtaggcttagaggaaaaa

SEQ ID NO: 861598 - DNA, 120 bp, Artificial Sequence
  ENSG00000266903_0 (sequence is synthesized)
ccgactccctgccctccccagtgtggttatttgagaaaaggcagcttgggtgagggggaagggattggggctgagaggggtatagtctgcctccccacccacggctggtggaacctgagg

SEQ ID NO: 861599 - DNA, 120 bp, Artificial Sequence
  ENSG00000266903_1 (sequence is synthesized)
cttcgtggcttaatgggggaggcgaggagccactgcggacctgctcgggacagtgaagggcgccagtctcagccctcatctgaaacctgctccgtgaccctggactagttcctgctcctc

SEQ ID NO: 861600 - DNA, 120 bp, Artificial Sequence
  ENSG00000266903_2 (sequence is synthesized)
tctggaccaaatcctggccctgctcctttctggctgagtaactttgggaggcaggggcagtattatcatctccattttacgaggaggaaaagcaagcaatgtacccaagttcccacagct

SEQ ID NO: 861601 - DNA, 120 bp, Artificial Sequence
  ENSG00000266903_3 (sequence is synthesized)
ggcaggggcagaggagcgggcggagggggaggtggaggcatctgcagctggacagagaagtggtgctttgtttctctgtgcctcagtttccctcttggtaaaataggcatggttcctcct

SEQ ID NO: 861602 - DNA, 120 bp, Artificial Sequence
  ENSG00000266903_4 (sequence is synthesized)
atggatgtaagaaggacctaggaacctttgcaagggcagaggagtccgcccctctggtctgactgggagacaaggtgttccccaatctgatggtggggacaaggtggcccaacacagtgg

SEQ ID NO: 861603 - DNA, 120 bp, Artificial Sequence
  ENSG00000266903_5 (sequence is synthesized)
gaaaaataaggaaactaaggagctctcaccaaatcccatgagggagacaggactgtccaaatccaatgaagaagataagaagctccagtcctgtgcagcaagaacgagtgtccagtctat

SEQ ID NO: 861604 - DNA, 120 bp, Artificial Sequence
  ENSG00000266903_6 (sequence is synthesized)
atttccagtctgccaggggaggtgctgttctaggcgctgaggatgcagccgtgcacaagacggatgaaatccctgccctcagggggccgacatttgcggagtaaataaaggaaaggccaa

SEQ ID NO: 861605 - DNA, 120 bp, Artificial Sequence
  ENSG00000266903_7 (sequence is synthesized)
catgaacagctgatttggataccatcaagacacctgaaattttagcatgagccagatgccaaggaagagactccgggaggatcctgaggaccccccggttgcagccatgtcgaggctgat

SEQ ID NO: 861606 - DNA, 88 bp, Artificial Sequence
  ENSG00000266903_8 (sequence is synthesized)
gctgaggaggaccccaactgtcacgagaaacacccgtcgaacacagccacccagctggagacagatcaagaagctgtcacagatgact

SEQ ID NO: 861607 - DNA, 63 bp, Artificial Sequence
  ENSG00000266903_9 (sequence is synthesized)
gtgctttctgatctcagtatttaccataacaaatctcctcctataattgaggcatactgccct

SEQ ID NO: 861608 - DNA, 87 bp, Artificial Sequence
  ENSG00000266903_10 (sequence is synthesized)
tttaccataacaaatctcctatctgtaacaaaattgaacctggccagaaaaaatgaacatacttgtttaggaagattgcattgcaga

SEQ ID NO: 861609 - DNA, 120 bp, Artificial Sequence
  ENSG00000266903_11 (sequence is synthesized)
tatggaatcattattaattggtcccctaaagggatgtttagcttaaattgcaccaacaggcccccccgcaaaacctggccataaactggccccgaaactgaccatgaacaatatctctgt

SEQ ID NO: 861610 - DNA, 74 bp, Artificial Sequence
  ENSG00000266903_12 (sequence is synthesized)
gcccacccagggcggaaaaccacttaaaggcgtttttaaaccacaaacaaccgcatgagtgatctgtgccttaa

SEQ ID NO: 861611 - DNA, 120 bp, Artificial Sequence
  ENSG00000266903_13 (sequence is synthesized)
ttaaggacatgctcctgctgcagataagtagccatacccatgcctttatttcagcccatccctttgcttcccataagggatacttttagttaatctaaaatctatagaaacaatgctaat

SEQ ID NO: 861612 - DNA, 75 bp, Artificial Sequence
  ENSG00000266903_14 (sequence is synthesized)
tttatttcagcccatccctttgcttcccataagggatacttttagttaatctaaaatctatagaaacaatgctaa

SEQ ID NO: 861613 - DNA, 120 bp, Artificial Sequence
  ENSG00000266903_15 (sequence is synthesized)
tcccccaccagcacctccacctaggacacatgggaactgtgggacttggagcaaagttttcaagtctctgtgccttagtttcctcacctgtaagttgggggaatgatagtaactgctctt

SEQ ID NO: 861614 - DNA, 120 bp, Artificial Sequence
  ENSG00000266903_16 (sequence is synthesized)
aagagctgctgtaggaattgagatcttgcatgaaaaaggataaaaccaattgatatggtttagttcttagtccccacccaaatctcatgtccagttatgatcctcagtgtaggaggaggg

SEQ ID NO: 861615 - DNA, 120 bp, Artificial Sequence
  ENSG00000266903_17 (sequence is synthesized)
acctcgtgggaggtgattggatcgtgggggcagtttctaatgttttagcaccatcctcctagtgctgcttgtttaaaagtgtgtagcaccccaccttcctctcctgccggccatgtgaag

SEQ ID NO: 861616 - DNA, 84 bp, Artificial Sequence
  ENSG00000266903_18 (sequence is synthesized)
gtgtagcaccccaccttcctctcctgccggccatgtgaagacgtgcttgcttccctttcaccaaagcagaagcctgtatagccc

SEQ ID NO: 861617 - DNA, 120 bp, Artificial Sequence
  ENSG00000228968_0 (sequence is synthesized)
agatttgccaacatcaaaagcaacagtaacaaaatgagtcgtctctttaatttaaacttcacctactcacaagttcaaagttccttcgctctcccaatgtggcccctcattcaagacaca

SEQ ID NO: 861618 - DNA, 120 bp, Artificial Sequence
  ENSG00000228968_1 (sequence is synthesized)
ggcttctccttctccttttagaccagttccctgaaaacatcagactaatgactagtccatcctggatggttgcatgaatgaggaaatttgcaaaaacagttctggcaggatgtctagtga

SEQ ID NO: 861619 - DNA, 120 bp, Artificial Sequence
  ENSG00000228968_2 (sequence is synthesized)
agctgggatgctggaatagcctgcacgccacagatcgacaaagcaagacattttcatggaccctacagctcacagggcttaattttgtttctcaaccaaaatgccaagatcaagctgagc

SEQ ID NO: 861620 - DNA, 120 bp, Artificial Sequence
  ENSG00000228968_3 (sequence is synthesized)
tgaaatactgactgtttggagaatggtctttctccagaattcagacaactctgaaaacccaagtctgttgctagaagatatcttactctaagaacacactttatttcagacagtgggagg

SEQ ID NO: 861621 - DNA, 120 bp, Artificial Sequence
  ENSG00000228961_0 (sequence is synthesized)
taaatttctaccaggcaggaaacagctagaaacaaggttgagtgttcagtcttccttcctgcaggaaaggtgattccctggataatttcacattaggctttaagagctcctttcctgtgg

SEQ ID NO: 861622 - DNA, 120 bp, Artificial Sequence
  ENSG00000228961_1 (sequence is synthesized)
cattgtgggggtggaaaaagaaaagccagtcttttatctttatggaaatctcactgttcggatacaaaagtctgtaatagagaattgttccgcctcttaaaggagatccgtggggaaaga

SEQ ID NO: 861623 - DNA, 120 bp, Artificial Sequence
  ENSG00000228961_2 (sequence is synthesized)
tctgacaattgtccaaggccatgcagtcctgaggacacagaggacaccagccatccctcagccacgacccacgagccaacccaatcagaccacatcttgtctttcaggaaaatgcactga

SEQ ID NO: 861624 - DNA, 120 bp, Artificial Sequence
  ENSG00000228961_3 (sequence is synthesized)
attttgtaccatgcccccaaaagcctggatcaaattaagagttttaatactcaaagtcatttatattgtgtctctaaagcatatacaataaatgtacgcatcactcaggatatattaaaa

SEQ ID NO: 861625 - DNA, 120 bp, Artificial Sequence
  ENSG00000231440_0 (sequence is synthesized)
agcacaaaattctcaaacaaggcgtgagccaccatgctcggcctaatttaatgtcattttaaaattaaattaaagagatagggtcttgctctgtcgctcaggctggtgtgcagtggtgtg

SEQ ID NO: 861626 - DNA, 120 bp, Artificial Sequence
  ENSG00000231440_1 (sequence is synthesized)
atcacggttcaccatggcctcgccctccagggtgcaagcaatcctctcacctcagcctctcaagtagctggaaccacaggtgcttgccatacagcccagctaatttttaattttaatttt

SEQ ID NO: 861627 - DNA, 120 bp, Artificial Sequence
  ENSG00000231440_2 (sequence is synthesized)
ccttagccacccaaagttctggggttgtaggtttgagccatccagcccagccggaaacaaacttactaaataagtaactatgctttgaaaatgcttcaaagactgtattttaagctttag

SEQ ID NO: 861628 - DNA, 120 bp, Artificial Sequence
  ENSG00000231440_3 (sequence is synthesized)
gcttcctaaacttaattcaagcagcatattcatcccaagtcaacttcacttttgacatattagtgtcattttgtagaggtacagttgtctggtcaacaaacataggttccggttcaggct

SEQ ID NO: 861629 - DNA, 120 bp, Artificial Sequence
  ENSG00000231440_4 (sequence is synthesized)
ctacttataattagctgcgtgaccttgcacgaaaaagctcttagagactaaaaagctctacagtttttctatgtgaaaaataaagatgaccttagctggcctgctttcctgtgaatgtct

SEQ ID NO: 861630 - DNA, 120 bp, Artificial Sequence
  ENSG00000231441_0 (sequence is synthesized)
ggacactggctgcccggtcccggatccccaagggcgacgtttctatttgggatccacaacaggtgcctgagaaacaaagccgcagatcgctccaccgctgtgcgcagccccctgctgagg

SEQ ID NO: 861631 - DNA, 120 bp, Artificial Sequence
  ENSG00000231441_1 (sequence is synthesized)
ggccagcggctctccctgggaccccagaaccttaacacaattctgaggtggaagaaatggggaacaccaggcctggcctcatggagaccggggagtcagaacctgagctctggctcctgg

SEQ ID NO: 861632 - DNA, 120 bp, Artificial Sequence
  ENSG00000231441_2 (sequence is synthesized)
agctgctgcgagtgagtggtggaaacctgcccccttagagaagctgcagctgatcagcatcatgcaagggactgctgagatggtagcatgctggtaatgaagtgttatggagccactcca

SEQ ID NO: 861633 - DNA, 120 bp, Artificial Sequence
  ENSG00000231441_3 (sequence is synthesized)
caaaggtgtataaaccatcttgttcattgtcccctttcacacaggagttgttttggggaacataatagtcacgccatttacacatatttcttataacattttatgagccatgatattcta

SEQ ID NO: 861634 - DNA, 120 bp, Artificial Sequence
  ENSG00000231441_4 (sequence is synthesized)
cttaaaagcacaaaaataacaatatccctatttcttctgacttccaattgtctgtaagtaataattgttcccactgcatttatgaagtaaattcactcattctttcacagtgcccatcac

SEQ ID NO: 861635 - DNA, 120 bp, Artificial Sequence
  ENSG00000231441_5 (sequence is synthesized)
agggcagttagaatcctgtgctacagctgtgcagcccacacccctctcctccttagtcatcatgtacacttaggatctgtgtgaattccaatcccctgaccttcctccccttcacagctg

SEQ ID NO: 861636 - DNA, 120 bp, Artificial Sequence
  ENSG00000231441_6 (sequence is synthesized)
ccctcctgaccctgaaatattgcttgggtgttttttctcctccctttctcaaccggggatttccaagccagcctaatagcttcctccaacaataataaagcaaagaagaatttttaaaaa

SEQ ID NO: 861637 - DNA, 120 bp, Artificial Sequence
  ENSG00000231441_7 (sequence is synthesized)
cacacagagagcaaagcacaggaaccagctacagaatttgcaagtggagaatccaggtacctttaaaagtctatttagtgaaaatctctggctattgatgtgacggttaattttatgtgc

SEQ ID NO: 861638 - DNA, 120 bp, Artificial Sequence
  ENSG00000231441_8 (sequence is synthesized)
caacttggctaggccatggtacccagtttttcataaaagatcagtctagatgttgtgaaggtatatttttaaatgtgattaacattttattcagtggacttcaagtaaagcagattatcc

SEQ ID NO: 861639 - DNA, 120 bp, Artificial Sequence
  ENSG00000274379_0 (sequence is synthesized)
gcctttgatcagatgtcctctcttccttatcgcttgctctcatttgctgctgccctcctctcctctcttcagactatctaatggatctcaccaccctctcatcctctttgcagttcttcc

SEQ ID NO: 861640 - DNA, 120 bp, Artificial Sequence
  ENSG00000274379_1 (sequence is synthesized)
tgtttccaaaagagtctttcatttaagagatgtaacggggtgtggggtgaagaggtattagaaaattacgccagaggcttttatgtgtgtgatggaggcaaagctcacctcagagcagac

SEQ ID NO: 861641 - DNA, 120 bp, Artificial Sequence
  ENSG00000274379_2 (sequence is synthesized)
tccttcttctgcttctccgtctttttttttttggtaaatttttattgcttttgcagtcctcatgtaacttaatacattaatatattctcgatgtcaaaaagcaaataaagctaaagtcct

SEQ ID NO: 861642 - DNA, 120 bp, Artificial Sequence
  ENSG00000274379_3 (sequence is synthesized)
tcttgatcccctctctctatcctccccatctcatcagaacattagtttgaggattctagttttgctgacctttttctgtacattacatacttaaataagatccaatagaaatacacagca

SEQ ID NO: 861643 - DNA, 120 bp, Artificial Sequence
  ENSG00000179406_0 (sequence is synthesized)
tgtctgaaagaaaatacagtgtgtctaaactggaaaagtcctgtaatagtttgttcatgagcatttacacagtggagttactgttcatcatgggggtactgtggacaagcccagggctgc

SEQ ID NO: 861644 - DNA, 86 bp, Artificial Sequence
  ENSG00000179406_1 (sequence is synthesized)
caaagtgggattacagatacatgaagttatgaatttaagatgtgaagatttacagcttgataaaccagcttcaggagacatgatct

SEQ ID NO: 861645 - DNA, 120 bp, Artificial Sequence
  ENSG00000179406_2 (sequence is synthesized)
ccagcttcaggagacatgatcttatgaattcaacacatgaagatttacaacttgataaaccagcttcaggagatcagaacttcttataatacaactgacgttactcagcctagaacaaat

SEQ ID NO: 861646 - DNA, 120 bp, Artificial Sequence
  ENSG00000179406_3 (sequence is synthesized)
acaacagggattgtgctgcattctgacttggattctgccatcgaacacagaatgccctgatccttagatgcagaggcagctcttcagcctatgggggctgctgtaaaatattacaggcat

SEQ ID NO: 861647 - DNA, 120 bp, Artificial Sequence
  ENSG00000179406_4 (sequence is synthesized)
agcgggaggaagaagaggcctttgccagcagtcagagcagccaaggggcccaatccctcacattctccaagtttgaaggaaagaaaaccaacgagaagacccgcaagattaccacagtga

SEQ ID NO: 861648 - DNA, 120 bp, Artificial Sequence
  ENSG00000179406_5 (sequence is synthesized)
ttgagaagataaatggatcagattgaaaagtacatcatgactcatctctataaatatgtgttctgtccagaaactactgatgatgagatgaaagatcttgccattcaaaagaggatcaga

SEQ ID NO: 861649 - DNA, 120 bp, Artificial Sequence
  ENSG00000179406_6 (sequence is synthesized)
gtggaagctgctctgtggtgtcagaaagacaaggaatgtggtgacctcacctatccatctccctcaaggcagcttttgagcccttcactgggttacacctcagatgctgtgtgtccctgt

SEQ ID NO: 861650 - DNA, 120 bp, Artificial Sequence
  ENSG00000179406_7 (sequence is synthesized)
taatgaagacatcccagaagtgtctgatacggtgttgaaggcaatcacagggattgtgctgcattctgacttagattctgccatcaaaaacagaatgccctgatccttagaggcagaggc

SEQ ID NO: 861651 - DNA, 120 bp, Artificial Sequence
  ENSG00000179406_8 (sequence is synthesized)
agctcttcagcctatgggcttaagctcttggactcactgaggcagtaaaagaaccatatcctgtgtttgaatcaaaccccgagttcctgtatgtttagaaggtttgccagacaggattcc

SEQ ID NO: 861652 - DNA, 81 bp, Artificial Sequence
  ENSG00000179406_9 (sequence is synthesized)
gcaagtttcccagtgctggaatacagaaaatggatggacaactggatctaccatgaaagacttcagattacaaaaagactt

SEQ ID NO: 861653 - DNA, 120 bp, Artificial Sequence
  ENSG00000179406_10 (sequence is synthesized)
tgttattcagttacaaaaagacttggactatgactcaaaaatgatcaaataatagttcatgcatcaaatgcaataggaagtacttctggaggggtcttgctctgttgtccaggctggagt

SEQ ID NO: 861654 - DNA, 120 bp, Artificial Sequence
  ENSG00000179406_11 (sequence is synthesized)
aggtggctgagactgtacgtgcttgccacaatgcccaactaataatttggacttttcctatacatgggttccaaagggctgactgcgaaacgaagtgacctcacaatgactcaagctacc

SEQ ID NO: 861655 - DNA, 120 bp, Artificial Sequence
  ENSG00000179406_12 (sequence is synthesized)
gctgtggcatatgccttgggagctaagtggctgctgcacttgaccactatgaagactggtgtggaagggtccttctggatgtacttgggcagggtccccaacgccagagccatggaactg

SEQ ID NO: 861656 - DNA, 120 bp, Artificial Sequence
  ENSG00000179406_13 (sequence is synthesized)
ggcgctacagtgcctggagctgcgctggtttttcctcggagtggagcctggtaaccgcgacttccccgccatgttctgtgtgttgctggctggagaagggtggttgacaaactccgaccc

SEQ ID NO: 861657 - DNA, 120 bp, Artificial Sequence
  ENSG00000179406_14 (sequence is synthesized)
agcacagtgtttctgtgggtcaaaactagaaaactatgtccaggctcggccgaggcggaaggatccgttcaggccaggagttaaagagctgcctgggcaacatggcgcgaccccatctct

SEQ ID NO: 861658 - DNA, 120 bp, Artificial Sequence
  ENSG00000179406_15 (sequence is synthesized)
gcttcccagatacttgaaccccaaggttcaaggctgcaatgagctatgatcccatcacagcactccatcctgcgagacggaggtaaaccttgtctaaaaaaataaactatccaagtgtac

SEQ ID NO: 861659 - DNA, 120 bp, Artificial Sequence
  ENSG00000179406_16 (sequence is synthesized)
aacagggagggactgcttaaagaaaacatgataattgtatgttcaaatacttttaacaagtgcaaaatgtataggctgaaataaatagggctggccgggcacgttggctcacgcctgtaa

SEQ ID NO: 861660 - DNA, 120 bp, Artificial Sequence
  ENSG00000179406_17 (sequence is synthesized)
attccaacattttgtgtgctcgaggcattccgatcagtagacatgggtgaaaccccatgtctactaaaaatataaaaattaggccaggaactttgcatcgttttagggggctcgcatctc

SEQ ID NO: 861661 - DNA, 120 bp, Artificial Sequence
  ENSG00000179406_18 (sequence is synthesized)
agtggaggcacatgccttgggagctaagtggctgctgcacttgaccactatgaagactggtgtgggaagaatccttttggatgcacttcagcagggacccctgatccctgggtcacaggc

SEQ ID NO: 861662 - DNA, 120 bp, Artificial Sequence
  ENSG00000179406_19 (sequence is synthesized)
atgcacttcagcagggacccctgatccctgggtcacaggcctgtactgggccacacaacaggaggagaatctaatgcctgatgaactgtcattgtctcccatcacccccagatgggacca

SEQ ID NO: 861663 - DNA, 120 bp, Artificial Sequence
  ENSG00000179406_20 (sequence is synthesized)
tacattatgtcttcctgtgttgcccaggctggagcacagtggtttgatcttggctcactgcagtctcaacctctcaggctcaagctatccttctgcctcagactctggggtagctgggac

SEQ ID NO: 861664 - DNA, 120 bp, Artificial Sequence
  ENSG00000179406_21 (sequence is synthesized)
aacagcctcagccaagatgtctcaccctactctctatgatgcaacaagaagcccctggggaatgtttcagtcccagtctgtactattgtcatgtgctcatcacagtctggtggaatttaa

SEQ ID NO: 861665 - DNA, 120 bp, Artificial Sequence
  ENSG00000179406_22 (sequence is synthesized)
tcatcacagtctggtggaatttaaatgaccttttatcaagatggataaacgcaagtttcccagtgctggaatacagaaaatggatggacaaacagggtcttgctctgttgtccaggctgg

SEQ ID NO: 861666 - DNA, 120 bp, Artificial Sequence
  ENSG00000179406_23 (sequence is synthesized)
ggaggtgaatggtgttgaatgagggaagcttcatctgtgtttacagccactccccattgctcacattcctgcctgagctctgccttctctcagatcagcagcagcattagattctcatag

SEQ ID NO: 861667 - DNA, 120 bp, Artificial Sequence
  ENSG00000179406_24 (sequence is synthesized)
tgcatgtgagggatctacgttgcgctgtccctatgagaatctaatgcctgatgctctgtcactttctccaatattatcttcaagtgagccactcctggcccaattcctgtctcccgttgg

SEQ ID NO: 861668 - DNA, 120 bp, Artificial Sequence
  ENSG00000179406_25 (sequence is synthesized)
cctatagaggccaagcctctgcctcatgatggcctctgcaggtcaagctcctcctcctggttccgtctacaggcccaacacttccctcaaataaactcttctgcccagctcctgtccagc

SEQ ID NO: 861669 - DNA, 120 bp, Artificial Sequence
  ENSG00000179406_26 (sequence is synthesized)
tcacggcagccactgtcggcatgaaaattcctcaattcaagctctctaggcccaccttctgcctcccactggcctggacacgcccagctccaacctgacaatggtctctacaggcccagc

SEQ ID NO: 861670 - DNA, 120 bp, Artificial Sequence
  ENSG00000179406_27 (sequence is synthesized)
tcatcgggctctgagggacctctccaggccaagctcttacctcacggaggcttctccaggtcgtttctccctgtcttcaggcagtggtgacaggtcagctcctcctccacagtggcctcg

SEQ ID NO: 861671 - DNA, 120 bp, Artificial Sequence
  ENSG00000179406_28 (sequence is synthesized)
tttgggcaggtcctgcctcttgcagcctctcaaagcccagctcctgcctctgagtggcttctgcgcacccaaatgtcctccagtcagcctgtcctggctgagctcctgcgacctggctga

SEQ ID NO: 861672 - DNA, 120 bp, Artificial Sequence
  ENSG00000179406_29 (sequence is synthesized)
gctcctgcctcctgtcggcctctataaacccagcctctgctgtatggtggcttcttcaggcccagctcttcctcctggcggtgtatacaggtccaactcctgcttcccaatggactcttt

SEQ ID NO: 861673 - DNA, 120 bp, Artificial Sequence
  ENSG00000179406_30 (sequence is synthesized)
aggccaggctcatgccttacggcagcctttcctggcccagcttttgcctgttggcataccctccaggcccacaatgtactcagatcagccactccattcccagctcttcttcctggctgt

SEQ ID NO: 861674 - DNA, 120 bp, Artificial Sequence
  ENSG00000179406_31 (sequence is synthesized)
gtctacaggcccaactgctgcctcacaacaccctcttttggcccagctcctgcccagcacctggtggcctctatatgccccagacttcttaaagtcaactttgctaggcccacctttggc

SEQ ID NO: 861675 - DNA, 120 bp, Artificial Sequence
  ENSG00000179406_32 (sequence is synthesized)
ctcccagcggctttgacaggaccagctcttgcctcatggcagcttcccaacgccaggtttctgcctgcattgtggcatccttgatggacccaactcttgctttatgccggccttcccaca

SEQ ID NO: 861676 - DNA, 120 bp, Artificial Sequence
  ENSG00000179406_33 (sequence is synthesized)
ccaagtttctgcctgcctcatggcaggatccgataggcccagctcctgcctctaatggcctggttaggctcatctcatccctcaaggtggccaccccagatgaagctcctgccttttggc

SEQ ID NO: 861677 - DNA, 120 bp, Artificial Sequence
  ENSG00000179406_34 (sequence is synthesized)
gcatctcattgcctcttgaagcccagctcattcctcaaaacggcctatccacgcccagcttttccctttggtggcttctccaggcccagaaattcctcagttcggcttcgcaaggtgaag

SEQ ID NO: 861678 - DNA, 120 bp, Artificial Sequence
  ENSG00000179406_35 (sequence is synthesized)
ttgctgcctccctgtgccttctccaggcccagttcttcctcccagctgggtctacagtcccatctcctgactcaaaacaacctattttggctcggctcctgcccagcacctggcggcctt

SEQ ID NO: 861679 - DNA, 120 bp, Artificial Sequence
  ENSG00000179406_36 (sequence is synthesized)
tgtaggcctaaagcttcctcaagtcaagcgttccaggcccagatcatgctgcccaggggccttcacaggcccagctactgcctgacgatggcttccccaggcccaggtcttgccttcccc

SEQ ID NO: 861680 - DNA, 120 bp, Artificial Sequence
  ENSG00000179406_37 (sequence is synthesized)
cagcctcccgaggcccagcccttgcctcacagttgctttcccagtccacgttacagcctgttacccgacggccttgacagaccaaactcttccttcacactggacagtttaggacaagct

SEQ ID NO: 861681 - DNA, 120 bp, Artificial Sequence
  ENSG00000179406_38 (sequence is synthesized)
catacgtcttccagcctctccaggtcaagctcctgcctcacactggcctctataggcccaggtgctgaatcgcaatggtctgtttaggtccatctcatgcctttctcagactctccaagc

SEQ ID NO: 861682 - DNA, 120 bp, Artificial Sequence
  ENSG00000179406_39 (sequence is synthesized)
gacgatctggcctgacacttgcttctgtgggccatgtgatcactcacactggcctctttaggatcaggggatgcctctccacaggccgagatcctgcctgttgtaggccccttcaggatg

SEQ ID NO: 861683 - DNA, 120 bp, Artificial Sequence
  ENSG00000179406_40 (sequence is synthesized)
cgccgctgcctgacagtggaccctccaggcctagatgttacgtgatcatggcctctgcaggtcaagaatttaaattttcgcagcctctataggccaggctactgcctcctgataatggct

SEQ ID NO: 861684 - DNA, 120 bp, Artificial Sequence
  ENSG00000179406_41 (sequence is synthesized)
tctgcaggcccaaatcgtcctgaaataagcctcgccaggaacagcacgtgtgttggatgcccgaacaaccatagcttctcccgcacagtggcccatgggggccgggctcttgcctcagcc

SEQ ID NO: 861685 - DNA, 120 bp, Artificial Sequence
  ENSG00000179406_42 (sequence is synthesized)
tggccacctcaggcccagttcttgcctgttggcggccgctccaggcccggctcctgcccctcggcctcctctccaggcccagaactggttcccgtcggcctctccaggcccagctctccc

SEQ ID NO: 861686 - DNA, 120 bp, Artificial Sequence
  ENSG00000179406_43 (sequence is synthesized)
ggccacctccacgggcccagctcctgcctcacgacaaccacgttcggcccagctcctgcccagctcctggcagccgttgtaggccccaggcttccctgcgttcaggcctcccggacccac

SEQ ID NO: 861687 - DNA, 120 bp, Artificial Sequence
  ENSG00000179406_44 (sequence is synthesized)
cttcggctttccggcggccctgagagacccggctcctgcctgccagcggcctctcccggcccagctgcggcctcacgtcggcctccccaggccacgtttccgcctgcctcacggcagccc

SEQ ID NO: 861688 - DNA, 120 bp, Artificial Sequence
  ENSG00000179406_45 (sequence is synthesized)
ccggctcccgcctgccgggggcctcttgaggaggctcatctcgtgcccggccgcggcctccccaggccaggctcctgcctgccggcaggcgccacaagcccagctcctgcgtcccgaagg

SEQ ID NO: 861689 - DNA, 120 bp, Artificial Sequence
  ENSG00000179406_46 (sequence is synthesized)
cccgaaggcttctctaggcccggctcgtgcctcgctgcggcctcttgaggcccagcttttcccttgtggtggcctctccaggcccagaacttcctcaagtcggcctcccccggtccagtg

SEQ ID NO: 861690 - DNA, 120 bp, Artificial Sequence
  ENSG00000179406_47 (sequence is synthesized)
gctgcctcccggcctcctctccgggcccagctctttgctcgcgtctgcgcccgtgggcccagctcccgtctccaaacagcctccttcgactcggctcctgcccagctcccggcggccttc

SEQ ID NO: 861691 - DNA, 120 bp, Artificial Sequence
  ENSG00000179406_48 (sequence is synthesized)
gtaggcccgaagcctcctccagtccagctctccagggccgcgtcttgcctcgcctcgcctcccctcaccttgcctcacctcgcagcagcctttccaggcccagctcccgcctcccggcgg

SEQ ID NO: 861692 - DNA, 120 bp, Artificial Sequence
  ENSG00000179406_49 (sequence is synthesized)
ccttcccctgccacgctcgtgccggcctcccggcagcctccaccagcccggctcctgcctcacgctggcccctctgggcccagctcatgcctcgcggtggcctctccgggcccagctccc

SEQ ID NO: 861693 - DNA, 120 bp, Artificial Sequence
  ENSG00000179406_50 (sequence is synthesized)
acccagcctgacggcgcctcccggccccaagctgccttcctcgatgtggcccaaagtggcccaaagcgtcccaaagtaggcctcgccaggcccacctcctgcccggcgtaggccctgagg

SEQ ID NO: 861694 - DNA, 120 bp, Artificial Sequence
  ENSG00000179406_51 (sequence is synthesized)
ggcgcggcccctgccccatactggcctcttttgggccctctcttacaccagcccctgtctcaggattgtctcttcacgcccatcttctgcctcatagtggtcactcaaggcctcgctttt

SEQ ID NO: 861695 - DNA, 120 bp, Artificial Sequence
  ENSG00000179406_52 (sequence is synthesized)
gcctgatgattgcgttttctggttttgctcttgccttgtattcccttcttcgggatacagcttttacgtcttccatggtgaacctcatcaaggagactaaatcttccctggtctgtcatt

SEQ ID NO: 861696 - DNA, 120 bp, Artificial Sequence
  ENSG00000179406_53 (sequence is synthesized)
tttttcacttcacaccagagtgccttgggaaaaccccatctcttcttttaaccttgagagtggatttctgacgaattgataataaattttttctctgtggtttcagtgatttctgtttta

SEQ ID NO: 861697 - DNA, 120 bp, Artificial Sequence
  ENSG00000179406_54 (sequence is synthesized)
ggcatgatcttggctcacttcaaccttcaccccctcccccgccccctgccgggttcaagtgattcccatgtttcagcttcctgagtagctgagattgcaggcatgcgccaccacacctgt

SEQ ID NO: 861698 - DNA, 120 bp, Artificial Sequence
  ENSG00000179406_55 (sequence is synthesized)
gtgagccactgcgcctggccccttcaggtgggtattgaggcttcactacaatactagttccccgttgctgccgcaataaattaccacacacttagtggcttaaaacagcatagaggtatt

SEQ ID NO: 861699 - DNA, 120 bp, Artificial Sequence
  ENSG00000179406_56 (sequence is synthesized)
cctttacatttctgaaggccagaattctaaagtcagtcccactgagtcaaggtgggagcagggtcagtgcctttccaggctctgcgggagaatccgtttcctggccctggaggcggcctg

SEQ ID NO: 861700 - DNA, 120 bp, Artificial Sequence
  ENSG00000179406_57 (sequence is synthesized)
tactcctcagcttgtgctgcccttctcgaatgactcgcgtttcctgctttcatcactacacctcccaccgctctccatcacctgctctgctcttataaggatccagagaaatggaataat

SEQ ID NO: 861701 - DNA, 120 bp, Artificial Sequence
  ENSG00000179406_58 (sequence is synthesized)
tggatagagtgtctaaggagttcatagaatttctcaagaccttctgcaagacaggccaagaaatctataaactgaccaagctgtttttggaagggatgcattacaaaaggtgcctccaga

SEQ ID NO: 861702 - DNA, 120 bp, Artificial Sequence
  ENSG00000179406_59 (sequence is synthesized)
gagagtaatgaaaaggttcctgaaattgaggtcactgtggaagaaggaaacgtgtcatgtaccagctatccatccaatgactgcccatcagttccatattcacccttcactgcctgatct

SEQ ID NO: 861703 - DNA, 120 bp, Artificial Sequence
  ENSG00000179406_60 (sequence is synthesized)
aataggaagtacttctggagggtgagagaagcatccagttaaggtgacattgaagctgggtcctgaaagatgaggaagaattgtatgagagtgggcagagaagggggaggtggagggatg

SEQ ID NO: 861704 - DNA, 120 bp, Artificial Sequence
  ENSG00000179406_61 (sequence is synthesized)
ggtggagggatggggaatgggctgggatggagtgagctgctcaagtagggagaccagcactgtaaagacctggacgataaagacggcacattttattcagggaatggtgaattaagtgtg

SEQ ID NO: 861705 - DNA, 120 bp, Artificial Sequence
  ENSG00000179406_62 (sequence is synthesized)
tggagagatagtaatttgcttgtatggaattttgcccaagaggcctcattacagtttctaatcttttgatgttatcatctatcactgtccttgccaaatagtttggaataggtataatga

SEQ ID NO: 861706 - DNA, 120 bp, Artificial Sequence
  ENSG00000179406_63 (sequence is synthesized)
tcacaataacatcaagcataatatttcattaattctcacaaaatcacaggtaggtgccacagttatccccattttgtgaatgaagtgatgaagacttaggaataatgagtgatttgccca

SEQ ID NO: 861707 - DNA, 120 bp, Artificial Sequence
  ENSG00000179406_64 (sequence is synthesized)
tctctactcacacacttccgactgaatgtgtgtgtggaatttctacaccaagttctccaatgctctggatattaactgggtatcctacaattttattctgacacttcctggagttggcgt

SEQ ID NO: 861708 - DNA, 120 bp, Artificial Sequence
  ENSG00000179406_65 (sequence is synthesized)
ttcctggagttggcgtagaccccacaggttacgggctcagtcccacaagaccacccttgcttcacattgcaatggcaagtcctaggttgtcacctgcacttttgaccaacctgttacaaa

SEQ ID NO: 861709 - DNA, 120 bp, Artificial Sequence
  ENSG00000179406_66 (sequence is synthesized)
tcaggggttcccatgaccccctcttggggtttaatcatttgctagagcagcttacagaactcagaaaaacagtttgtttcctttttttctgagagacagggtctcattttgttgtccagg

SEQ ID NO: 861710 - DNA, 65 bp, Artificial Sequence
  ENSG00000179406_67 (sequence is synthesized)
actgttgcaccaccatttctggctaatttattttttgtagatatggcgtcttgttatgttgcaca

SEQ ID NO: 861711 - DNA, 120 bp, Artificial Sequence
  ENSG00000179406_68 (sequence is synthesized)
atttattttttgtagatatggcgtcttgttatgttgcacaggttggccacaaattcctgggcccaagcaatcctcccaccgcagcctctttgaagtgctgggattacagatgtgagccac

SEQ ID NO: 861712 - DNA, 120 bp, Artificial Sequence
  ENSG00000179406_69 (sequence is synthesized)
ccaccacatttcctattactggttccttgtaaaggatacatcgcagaaacagctaatgaaagagatgtatgtgccagatgcagtggctcacgctgtaatcccaacactttgggaggccga

SEQ ID NO: 861713 - DNA, 74 bp, Artificial Sequence
  ENSG00000179406_70 (sequence is synthesized)
gaggccgaggtaggaggattgcttaaactgtaaaaaatttttaaaaagctgggcacggtggctcaagcctgtaa

SEQ ID NO: 861714 - DNA, 89 bp, Artificial Sequence
  ENSG00000179406_71 (sequence is synthesized)
tcaggagttgaagaccagtctgacagcaaaagttagccaggtgtggtggcacgcacgtacaatcccagctacttaggaggctgaggcag

SEQ ID NO: 861715 - DNA, 71 bp, Artificial Sequence
  ENSG00000179406_72 (sequence is synthesized)
tagcctgggcaacagagctagactcttgtctcagtaaataaattaaccgagtgcggtggtgtgcagttact

SEQ ID NO: 861716 - DNA, 120 bp, Artificial Sequence
  ENSG00000179406_73 (sequence is synthesized)
agactcttgtctcagtaaataaattaaccgagtgcggtggtgtgcagttactaattccagttactacagaactagactccatctcaataaattaaataaataaataaataaataaatgaa

SEQ ID NO: 861717 - DNA, 120 bp, Artificial Sequence
  ENSG00000179406_74 (sequence is synthesized)
atatgccattcaagctaaggggtgctacacttgaccgctgcggtagtatagatgagtctgaagaatggtatgggatggatactttcgaatgcactggagtaggggtctccatccgcaggg

SEQ ID NO: 861718 - DNA, 120 bp, Artificial Sequence
  ENSG00000179406_75 (sequence is synthesized)
tggagggtgagagaagcatccagttaagcaagaagaacttttagtaaatacattccttacaaacaaacagaaggcaaataaacactgttgtacaggaacttcaacacacactgtacaata

SEQ ID NO: 861719 - DNA, 120 bp, Artificial Sequence
  ENSG00000179406_76 (sequence is synthesized)
ttgctgatgtcagttatggaaattcttcatggtttacttgactatcgctatcagtattttgcatctctcatcatttttgtcaacttcctcatctgctaacttctctccaagggtcttgct

SEQ ID NO: 861720 - DNA, 120 bp, Artificial Sequence
  ENSG00000179406_77 (sequence is synthesized)
cacgaaaactgtggatttagttactccactctgccatgtctttccaccactgcctgcacatttgagaccaaggatagagattgggaaaaattgatagttctcctgcctcagagtttggct

SEQ ID NO: 861721 - DNA, 120 bp, Artificial Sequence
  ENSG00000179406_78 (sequence is synthesized)
tgatggagagatatttgcagttgatgtggaaattgccaaacaatctgtgactatcaagaccacgttggaagatttgggaatggatgatgaaggagatgacccagttcctctaccaaatgt

SEQ ID NO: 861722 - DNA, 120 bp, Artificial Sequence
  ENSG00000179406_79 (sequence is synthesized)
gaatgcagcagtattaaaaaaggtcattcagtggtgcacccaccacaaggatgaccctcctccccctgaagatgatgagaacaaagaaaagcaaacagacgatatccctgtttgggacca

SEQ ID NO: 861723 - DNA, 120 bp, Artificial Sequence
  ENSG00000179406_80 (sequence is synthesized)
agaattcctgaaagttgctcaaggaacactttttgaactcattcgggctgcaaactacttagacatcaaaggtttgcttgatgttacatgcaagactgttgccaatatgatcaaggggaa

SEQ ID NO: 861724 - DNA, 120 bp, Artificial Sequence
  ENSG00000179406_81 (sequence is synthesized)
aactcctgaggagattcgcaagacattcaatatcaaaaatgactttactgaagaggaggaagcccaggtacgcaaagagaaccagtggtgtgaagagaagtgaaatgttgtgcctgacac

SEQ ID NO: 861725 - DNA, 120 bp, Artificial Sequence
  ENSG00000179406_82 (sequence is synthesized)
tgtaacactgtaaggattgttccaaatactagttgcactgctctgtttataattgttaatattagacaaacagtagacaaaagcagtggcaagtcaattgtattagcagaatattgtcct

SEQ ID NO: 861726 - DNA, 120 bp, Artificial Sequence
  ENSG00000179406_83 (sequence is synthesized)
cattgcatgtgcagtttgagtacagattccaaacctatggctgagtttcttctagtatgatcaaaagtttcttttttttttttttgctctgaataaaactgaactgtgggttctctataa

SEQ ID NO: 861727 - DNA, 120 bp, Artificial Sequence
  ENSG00000179406_84 (sequence is synthesized)
atcacagcactccatcctgcgagacggaggacctgcggagcagccaggcttcatgagttaaatgcagatctgaaccatacccagttgggattggggtacacactctactcctctgaaaac

SEQ ID NO: 861728 - DNA, 120 bp, Artificial Sequence
  ENSG00000179406_85 (sequence is synthesized)
tagctaggggttcgaacttggtgagagggagagtgggacagagccagaccagacaaggactgatcacctggaaaaacctgccatcaaagaccttgacgagtgctgggggcggtggctcat

SEQ ID NO: 861729 - DNA, 83 bp, Artificial Sequence
  ENSG00000246263_0 (sequence is synthesized)
aaattagccaggcgtggtggtgcaagaatcgcttgaacctgggaggcggaagttgtggtgagctgagattgtgccactgccct

SEQ ID NO: 861730 - DNA, 120 bp, Artificial Sequence
  ENSG00000246263_1 (sequence is synthesized)
gagcgaaactccgtctcaaaaaaaaaaatttacttggtccttctagcccttttaatctaaaagtggaactctcatgtgttccattatttttgtgtatgttcaatacatatatgttccatt

SEQ ID NO: 861731 - DNA, 120 bp, Artificial Sequence
  ENSG00000246263_2 (sequence is synthesized)
tgttcaatacatatatgttccattcatcctatttttaacatgcctcacagtgtaattatttattatttatacttaatacatcttacaaatttcattatgtctaacaagccatttgctccc

SEQ ID NO: 861732 - DNA, 120 bp, Artificial Sequence
  ENSG00000246263_3 (sequence is synthesized)
atacttagtttctctcaatttctgtggcagaattgaatattcttaaatgacacagcaaaaacatcacagtactcagaatagtgtaggcagtgtgagtttcccccaggatgttcaaagtta

SEQ ID NO: 861733 - DNA, 120 bp, Artificial Sequence
  ENSG00000246263_4 (sequence is synthesized)
ttggaagagcaaatggaaaaaaataacacgcgtaactgaaagatctcaaggagtaagaggattctgcatcttcatatggactttatggcatattgtattttccaaaaatggccacaacaa

SEQ ID NO: 861734 - DNA, 120 bp, Artificial Sequence
  ENSG00000246263_5 (sequence is synthesized)
tatttctggtaccatatgctgttccagaacttggatacacctccccttaaaaggtggtgtctaatgcacttccctttgcatataggccatcaatattaacttttgtttgtttgtttgttt

SEQ ID NO: 861735 - DNA, 72 bp, Artificial Sequence
  ENSG00000246263_6 (sequence is synthesized)
tggagtgcagtggcacggtctcggcttactacaacctccgccttccggtgtttcagaatcacctgggatgat

SEQ ID NO: 861736 - DNA, 120 bp, Artificial Sequence
  ENSG00000246263_7 (sequence is synthesized)
atagctgggattacagtgtttcagaatcacctgggatgatctgcatgaagattcctggcctccaccaaagacttactgaatcagaaaggaggcaagaggatgaggaatgcttaagaatct

SEQ ID NO: 861737 - DNA, 120 bp, Artificial Sequence
  ENSG00000246263_8 (sequence is synthesized)
gcattaacaaactttacaaatgaatcttacaacatacagaagcatggaaactactgcctcaagggattatctcaacttgagtttaaacataggaattgctgactacctttaaaatgtaaa

SEQ ID NO: 861738 - DNA, 120 bp, Artificial Sequence
  ENSG00000246263_9 (sequence is synthesized)
ctcaagtctgccccagttatccattttactggatagtcttggtatccagatgatttagggaaaaaaatagtagtagcaaactctgaaaacactcagtaaagttcattcttggtcttctct

SEQ ID NO: 861739 - DNA, 120 bp, Artificial Sequence
  ENSG00000246263_10 (sequence is synthesized)
tcctaaatttgttttcaattgttagatttaaacactaaacaagaccaaaagagaactttattttacatgtctttattttacatttagaaccgttttatgatttacttaaaaaaaaaatct

SEQ ID NO: 861740 - DNA, 120 bp, Artificial Sequence
  ENSG00000246263_11 (sequence is synthesized)
ctattattagaagtattttttaaccaaaatcttgatttaggaagacttaagacattgtgcattattttaaatattttcatttcagtaactattaaaaataaattcacaattagggtttca

SEQ ID NO: 861741 - DNA, 120 bp, Artificial Sequence
  ENSG00000246263_12 (sequence is synthesized)
ttcaaatgtcctaatcatatctagtttgttctcatttaatattttatcaatcccatcatgtgcatacagaggttaaggtgatgtataaattttatatctttcaaacacattgatgctaat

SEQ ID NO: 861742 - DNA, 120 bp, Artificial Sequence
  ENSG00000246263_13 (sequence is synthesized)
cagctcttgatctaattactatttcatttattcagaaatagcatttagacataaaaaccaatgtctcactttgtaaaataacctttggctaatttacacacatctaatacagcgtgttat

SEQ ID NO: 861743 - DNA, 120 bp, Artificial Sequence
  ENSG00000246263_14 (sequence is synthesized)
ataagttttaagtaatacaatgagtcactactatcattcagttttaaatatttttagtgttaacagggctgagaatatcatgtggttcagtcttctgaaggaagttatataataaaagca

SEQ ID NO: 861744 - DNA, 120 bp, Artificial Sequence
  ENSG00000246263_15 (sequence is synthesized)
tagtgcctttgaacatgaagactatcctcaaggccagaaatcctacaaaggaactgaaaggagagattccagagaattgctctcctcatttttaatatgtaaagtgactgttttaagtca

SEQ ID NO: 861745 - DNA, 120 bp, Artificial Sequence
  ENSG00000246263_16 (sequence is synthesized)
cttcattgaagacttaaggaagaaaacagtgttattatgccactgaataaagctacttaaaccagagtaattttgggatattaatcctaggctacataattaataggtcatcaaaacaaa

SEQ ID NO: 861746 - DNA, 120 bp, Artificial Sequence
  ENSG00000246263_17 (sequence is synthesized)
aacctgtcagttattaggtgtaagttaacttcctatgccaagtaaggggtcacacttcacttcccccatttgtaaaatgaaaaggtggccaggccagtgccatttaggattctctgctaa

SEQ ID NO: 861747 - DNA, 120 bp, Artificial Sequence
  ENSG00000246263_18 (sequence is synthesized)
ctgtaaaatgtggactgattttcttctgtttcttatagtccaggtgtatataaacttccagttctttaagtcaaaatttttatgcacataaccatgtcagtgtattgcccttagtttaaa

SEQ ID NO: 861748 - DNA, 120 bp, Artificial Sequence
  ENSG00000246263_19 (sequence is synthesized)
actctgttgcaccgcccagtcgcccggctttccactgagggacgccccctgctctggactgcttagcctactccagctggccccacctcacctcatcggccccgcctcctccgctcgccc

SEQ ID NO: 861749 - DNA, 120 bp, Artificial Sequence
  ENSG00000246263_20 (sequence is synthesized)
actccgggcgcccactcctgaggagctatcccagagtccgcgcggcctcgccttcccggcccgctcaccaccccgcctcgtcccacctcgcctcgccctccccgggctctagccacttgg

SEQ ID NO: 861750 - DNA, 120 bp, Artificial Sequence
  ENSG00000246263_21 (sequence is synthesized)
atacttaaaaaaggctagatacaaaagtagttaagctgctcacgaacatttaaaattttccaaaatgtatcttcaataatcatgatcttataaaacattttacagttatcagaaagtgcc

SEQ ID NO: 861751 - DNA, 120 bp, Artificial Sequence
  ENSG00000246263_22 (sequence is synthesized)
caggctgagtttacataactgaaataccttagtacaaatgtctagttagaactgaagtgcagtaacctcttgagactgactgctcattgaaatagggatacaaagaaaaagttgattgtg

SEQ ID NO: 861752 - DNA, 120 bp, Artificial Sequence
  ENSG00000246263_23 (sequence is synthesized)
ataaaagtattgtgcattggccccatcatatgtacaaaaaaagtgccctcactcaaatgagcaaattacatgcaaaatattagtgatatcatttaatatcctagagctcaatgcagtcaa

SEQ ID NO: 861753 - DNA, 120 bp, Artificial Sequence; identical to SEQ ID NO: 821210
  ENSG00000257366_0 (sequence is synthesized)

SEQ ID NO: 861754 - DNA, 120 bp, Artificial Sequence; identical to SEQ ID NO: 821211
  ENSG00000257366_1 (sequence is synthesized)

SEQ ID NO: 861755 - DNA, 120 bp, Artificial Sequence; identical to SEQ ID NO: 821212
  ENSG00000257366_2 (sequence is synthesized)

SEQ ID NO: 861756 - DNA, 120 bp, Artificial Sequence; identical to SEQ ID NO: 821213
  ENSG00000257366_3 (sequence is synthesized)

SEQ ID NO: 861757 - DNA, 120 bp, Artificial Sequence; identical to SEQ ID NO: 821214
  ENSG00000257366_4 (sequence is synthesized)

SEQ ID NO: 861758 - DNA, 120 bp, Artificial Sequence; identical to SEQ ID NO: 821215
  ENSG00000257366_5 (sequence is synthesized)

SEQ ID NO: 861759 - DNA, 120 bp, Artificial Sequence; identical to SEQ ID NO: 821216
  ENSG00000257366_6 (sequence is synthesized)

SEQ ID NO: 861760 - DNA, 62 bp, Artificial Sequence; identical to SEQ ID NO: 821217
  ENSG00000257366_7 (sequence is synthesized)

SEQ ID NO: 861761 - DNA, 120 bp, Artificial Sequence; identical to SEQ ID NO: 821218
  ENSG00000257366_8 (sequence is synthesized)

SEQ ID NO: 861762 - DNA, 120 bp, Artificial Sequence
  ENSG00000257366_9 (sequence is synthesized)
agagactctaggagcctgagcagaaatccagatgattatgaaaaatgcagacctacccatccttattcacctgggaccaccgtgaactatatcataagaaataaacccctattgtacata

SEQ ID NO: 861763 - DNA, 120 bp, Artificial Sequence
  ENSG00000256011_0 (sequence is synthesized)
gaaacgtttgaggggtatgtgtatgtatgtgtgtgtgtgtttgtcctgggttgaatgtaaaattatttctgactggggactagggtaaaagaaaattttgaagccaggcgtgagtcactg

SEQ ID NO: 861764 - DNA, 120 bp, Artificial Sequence
  ENSG00000256011_1 (sequence is synthesized)
aggattctaacaatttcaaaggatttttatatgtaattgtcaacatgcaaattattatgttaaattcaagtgttaagtctacatattaatgtagcccatttatttactcttagactctct

SEQ ID NO: 861765 - DNA, 120 bp, Artificial Sequence
  ENSG00000256011_2 (sequence is synthesized)
ccctagaaatgtatcgttagtgttcattcatctgcttgttctttcttttaatgactttttttgagcatctattttgtgctgagtgctgtgcttgtgcttgagatattacagtgaacaaca

SEQ ID NO: 861766 - DNA, 120 bp, Artificial Sequence
  ENSG00000255299_0 (sequence is synthesized)
aaacatgagaatagctttctctggcacatggttgccatcacctgaaaagatcaggagcttctgagcccaaggcctagacaacctatacctcccccattcagccccctccctcccctcttc

SEQ ID NO: 861767 - DNA, 120 bp, Artificial Sequence
  ENSG00000255299_1 (sequence is synthesized)
tttagcaatgaggcctattcagcaacacacaggaagaacagcctttacaggccaggatccactgcatataggaatctttctcattgaaatctacagagctcaagagtatctgcatttgga

SEQ ID NO: 861768 - DNA, 120 bp, Artificial Sequence
  ENSG00000255299_2 (sequence is synthesized)
ggtccctcgttggctgctcgtcagatttctctcttcaattccaagcgcatcttatgtaaacaatagtgtctatgatagtggatgtgattgtgtgctacctggatctcctagctgaaatcc

SEQ ID NO: 861769 - DNA, 120 bp, Artificial Sequence
  ENSG00000255299_3 (sequence is synthesized)
ttcgaagaatttccttcagtcaatgggagccacctcccctgaggttatggctccaggtgaagattaaacagctgtagaagtgtcatccaagattggccaatgctgttcctgagagtcctt

SEQ ID NO: 861770 - DNA, 120 bp, Artificial Sequence
  ENSG00000255299_4 (sequence is synthesized)
atctcagttttgcagtggaggaaaccaaagctttgagaagttaacttacctgtctactgttaaaaagaggaaccgaggtgtgaaactgagtttttgccttccctgaccaagactctgaaa

SEQ ID NO: 861771 - DNA, 120 bp, Artificial Sequence
  ENSG00000255299_5 (sequence is synthesized)
agtcaaaactctaccaattgccagtggtgaagctggtataagccacgtatctctgagccaattttcttatcatcaaagtgaagacaatagcaccagccataccttccttagggcgttttg

SEQ ID NO: 861772 - DNA, 120 bp, Artificial Sequence
  ENSG00000255299_6 (sequence is synthesized)
caggctaaatgagatagtgggtgagaaagcatcttcagaattgctaccctcttttgaactatagtgttgctgttggtaataacataagcagagctgaatggggagttcctaagcaaccat

SEQ ID NO: 861773 - DNA, 120 bp, Artificial Sequence
  ENSG00000253625_0 (sequence is synthesized)
taggatccggtgggaatattgtgatgacccagactccactctctctgcccgtcaccaatggagagccggcctccatctcctgcaggtctagtcagaaccttttacatggtaatggataca

SEQ ID NO: 861774 - DNA, 120 bp, Artificial Sequence
  ENSG00000253625_1 (sequence is synthesized)
ccacacagtggttgcaggtcagggacagattttatgcttaagatcagtagggtggaggctgaggatcttggctattacaactgccaccacactctacaatatcctcccacaatggttcag

SEQ ID NO: 861775 - DNA, 120 bp, Artificial Sequence
  ENSG00000253627_0 (sequence is synthesized)
cgcacttcaggcaggattaacatcatgggcaactccaggaggtgtgagagcacacaattttgccgctgttggatgtcacacacgatgggagaattgaagctcatgaataaacaagttgtc

SEQ ID NO: 861776 - DNA, 120 bp, Artificial Sequence
  ENSG00000253627_1 (sequence is synthesized)
ccaaaattccacccaggtcagagaaagcaaagtcaggatttgaacccaaatcttccttcaaattcagatctcttcctctaccactggttttctggaactctcaaatcagcctgtcctcaa

SEQ ID NO: 861777 - DNA, 120 bp, Artificial Sequence
  ENSG00000253627_2 (sequence is synthesized)
tccctatggctggcacaccaggagatcttctgagtgcgatcttcacacccctctggaattggcattcttcttctagtgtcccttccactgctccttggaaacagcaagttctgtttttag

SEQ ID NO: 861778 - DNA, 120 bp, Artificial Sequence
  ENSG00000253622_0 (sequence is synthesized)
gcacgcacgcgtctgtgtgtgtgctcataaacacacaaagaatttgataaagacattcagaatattcttttaaaaaataatatgctccctgtgttattattgcctaggctgactgcgaag

SEQ ID NO: 861779 - DNA, 120 bp, Artificial Sequence
  ENSG00000253622_1 (sequence is synthesized)
gaaatggaagctcctgtcatctgctcactgatcaatatctgggtgacttggtcgagagtttagggttgcaaaaggtgataaggtgcctcacttgtcttcattggatacagattaaaataa

SEQ ID NO: 861780 - DNA, 120 bp, Artificial Sequence
  ENSG00000253622_2 (sequence is synthesized)
gtggtgagatttgcgacaattggattagcagcattttaaactgtagacttactggaagcaaattcactaataccaaaagaagagatgaattagttgtaacgccttgtggttgtgcttcca

SEQ ID NO: 861781 - DNA, 120 bp, Artificial Sequence
  ENSG00000253622_3 (sequence is synthesized)
agcaggaaagacagctgctgtcccttgatgcattttggattcaacgtgaaaagcaacggttcagtctttcatgggaaagctctgaggaagctttgtcttgtctcctggactatctcctga

SEQ ID NO: 861782 - DNA, 120 bp, Artificial Sequence
  ENSG00000253628_0 (sequence is synthesized)
ggcaaagaggggttacggtgagttcttccaggcaaagaggattttgtctggaagtcctctttgagcaaagacatggagtccacatgagcaaagacatggaggagaaaaacggcatggcac

SEQ ID NO: 861783 - DNA, 120 bp, Artificial Sequence
  ENSG00000253628_1 (sequence is synthesized)
gaagggaactgcagacaggtcaaaaatcctctgtcacccatgctgaagtataatggcaccatcacagctcactgcagcctcgacctccagggctcaatcaatcctcccacctcagtctcc

SEQ ID NO: 861784 - DNA, 120 bp, Artificial Sequence
  ENSG00000253628_2 (sequence is synthesized)
aggccatgaaacccagagaagggatgtgacttgagatccagccagacccagatccagagttgggagggcaggggtgctgcaatatgatcacagaatcgacactcgacccctcccagcgac

SEQ ID NO: 861785 - DNA, 120 bp, Artificial Sequence
  ENSG00000253628_3 (sequence is synthesized)
ctggcaaagtgggcactaactccattctgcagaggtggaaactgaggccagtgtggggaatggaaattgactgggctaagcttagaagcctgaactctgaccccaaagctctctcttgta

SEQ ID NO: 861786 - DNA, 120 bp, Artificial Sequence
  ENSG00000253628_4 (sequence is synthesized)
cctttgacccccttgtcttgtcctgcagctcttaaggttacagtgagccagtttttcattttgcctttctccaatggaggcaccttggaaaatagagatctggctggagcaacctggaac

SEQ ID NO: 861787 - DNA, 120 bp, Artificial Sequence
  ENSG00000253628_5 (sequence is synthesized)
aggcaaagaggattttgtctggaagtcctctttgagcaaagacatggagtccacatgagcaaagacatggaggagaaaaacggcatggcacgaagggaactgcaggagggaaaagcaaag

SEQ ID NO: 861788 - DNA, 120 bp, Artificial Sequence
  ENSG00000253628_6 (sequence is synthesized)
ggattttgtctggaagtcctctttgagcaaagacatggagtccacatgagcaaagacatggaggagaaaaacggcatggcacgaagggaactgcaggaagccaagcccagagtctgctaa

SEQ ID NO: 861789 - DNA, 120 bp, Artificial Sequence
  ENSG00000253629_0 (sequence is synthesized)
ttaaaccaaaaacatgctttaatgccaggcaagagctacacagtcaactgatttacgggccactccataggctatgatttataaattatatattattaaatccaccgtgggcatacagat

SEQ ID NO: 861790 - DNA, 120 bp, Artificial Sequence
  ENSG00000253629_1 (sequence is synthesized)
ggatgggacagcacccccagctccctcccactctgaatgatgtatgaacagttgagcactctgtagaatccttcaggtcgtaagccactttattccagtcccttgaacatcacaggactg

SEQ ID NO: 861791 - DNA, 120 bp, Artificial Sequence
  ENSG00000253629_2 (sequence is synthesized)
gatgggtttcccttcttttgccccaacccccgagtcttacgttttagaacagagacattagaataaaaaaaaataatagtaacgattaaaaatcatcaaacaatgaacaccacgaagtct

SEQ ID NO: 861792 - DNA, 120 bp, Artificial Sequence
  ENSG00000230714_0 (sequence is synthesized)
gttagtccacagctgcctctctgtcgaggacggcatttggaactgtaatgaatgctgaaaccttattgtgtttaaatgaggtaagatatgttaactaacatcagcaataactatctttga

SEQ ID NO: 861793 - DNA, 120 bp, Artificial Sequence
  ENSG00000253998_0 (sequence is synthesized)
cagctcctggggctgctaatgctctggatccctggatccagtgcggatattgtgatgacccagactccactctctctgtccgtcacccctggacagccggcctccatctcctgcaagtct

SEQ ID NO: 861794 - DNA, 120 bp, Artificial Sequence
  ENSG00000253998_1 (sequence is synthesized)
gtctagtcagagcctcctgcatagtgatggaaagacctatttgtattggtacctgcagaagccaggccagtctccacagctcctgatctatgaagtttccagccggttctctggagtgcc

SEQ ID NO: 861795 - DNA, 120 bp, Artificial Sequence
  ENSG00000253998_2 (sequence is synthesized)
agataggttcagtggcagcgggtcagggacagatttcacactgaaaatcagccgggtggaggctgaggatgttggggtttattactgaatgcaaggtatacaccttcctcccacagtggt

SEQ ID NO: 861796 - DNA, 120 bp, Artificial Sequence
  ENSG00000230710_0 (sequence is synthesized)
caaggaaaatgcgatcccagcacggcctggcgtgttcctggcggcagaaaggattcttaaggagaaaacggcgaccggttcttttccatgtcccccggaacaaagcaaggagaaatgaac

SEQ ID NO: 861797 - DNA, 120 bp, Artificial Sequence
  ENSG00000230710_1 (sequence is synthesized)
ttcagctgcagcagaattccttcaattacacgtatgttttcagcagccgggccaatcctcctcctcacaggggtgaggtcagcaaacccaggaagctctcagagccaagaaagcctcaga

SEQ ID NO: 861798 - DNA, 120 bp, Artificial Sequence
  ENSG00000230710_2 (sequence is synthesized)
tccaggaggaagtagttatggatgcccatagctgaagtgctctgtgtccactggaagtaaaaggagcaggttcctgccgaagaatgtacagacgacgtgaaatcatgtgtggctacactg

SEQ ID NO: 861799 - DNA, 120 bp, Artificial Sequence
  ENSG00000230710_3 (sequence is synthesized)
aagctaaaggctgccagccaaccatagccagttggggatataaacctctaaaaaccaaaactggggaaaaatggctccccattttctgaggtactcttggagcacaagctgaatgaaaac

SEQ ID NO: 861800 - DNA, 120 bp, Artificial Sequence
  ENSG00000230710_4 (sequence is synthesized)
tagcatgaagcagaatgaaaagaaggcagataatatttcctcccctgaaccactcatccatatctgctctattcagatatttgtgcctaggcaactgcacccacccctctcagcatttac

SEQ ID NO: 861801 - DNA, 120 bp, Artificial Sequence
  ENSG00000230710_5 (sequence is synthesized)
ccacagatcctcaaaaccaagccctagcacaatcgactccagtgaaaattaaaaaagctatcccaaacatctccaagcttctttcctctgcaacttccctccttcttcttcatcaccagt

SEQ ID NO: 861802 - DNA, 120 bp, Artificial Sequence
  ENSG00000230710_6 (sequence is synthesized)
tataccaccaaagtatctacaactgctcagatgcaggcaaactaccctgaaagtgctcacatgtatttcttccttcccttgagggtgatattctacagtaattccattatgtttacaaat

SEQ ID NO: 861803 - DNA, 120 bp, Artificial Sequence
  ENSG00000230710_7 (sequence is synthesized)
agaaaagttatttcaatacatctgtatattatatatatgtatatatatacacacatagcttttatatcactgacacagtgttacatgcaataaagagaggaattatttatatcagtacaa

SEQ ID NO: 861804 - DNA, 120 bp, Artificial Sequence
  ENSG00000230710_8 (sequence is synthesized)
ggagggcggtcatagtccgtccgtgtagggagcgcagcccccggtctggagactggcggtccaagatcagggtgccagcatggttggattctagtgcagactccctcctgacttgaagac

SEQ ID NO: 861805 - DNA, 120 bp, Artificial Sequence
  ENSG00000230710_9 (sequence is synthesized)
tataccttctcattgtgtcttcacatggcagaaagagagaaagagagctctctctgcctcttcctgtaagaccatagtcttattggattagaggcccattcttatgacctcatttaagct

SEQ ID NO: 861806 - DNA, 120 bp, Artificial Sequence
  ENSG00000230710_10 (sequence is synthesized)
ttattatctcctgaaggccccatctccagatatagtcacactggggcttaagacttcaacataccaattttgggagatatgattcagtctatcacgtcgatcacattcagtctaacatca

SEQ ID NO: 861807 - DNA, 120 bp, Artificial Sequence
  ENSG00000230710_11 (sequence is synthesized)
caataaaaggccctgtgatgctttggcataccctggtgactcagggatggccaactagaaatataacaggtacccaaatgccattctcactgagaagtctggaaacatatttctgagaaa

SEQ ID NO: 861808 - DNA, 120 bp, Artificial Sequence
  ENSG00000230710_12 (sequence is synthesized)
agcagaagagagagagtttagccaaggtgggaagctactacatgtggtgaggccatgtgtggcaagcatgcgtctaactagccatggacacatgaagtccttcagtgcttaacaatgctg

SEQ ID NO: 861809 - DNA, 120 bp, Artificial Sequence
  ENSG00000230710_13 (sequence is synthesized)
agtcatatattagattatgttccagaatcctacacccacagcatgtgaggcagataagctgtacttacccaagaaatgtaaacaccacaatagtccttggttgtcaatctggtagggtca

SEQ ID NO: 861810 - DNA, 120 bp, Artificial Sequence
  ENSG00000230710_14 (sequence is synthesized)
aagtgacacctaactagtcaaagaacagagttacaagagacatgctgattcaacgaatggagatgagtaaactgaattgcagagagcttagatgacttgaaagagacttgacagctgagc

SEQ ID NO: 861811 - DNA, 120 bp, Artificial Sequence
  ENSG00000230710_15 (sequence is synthesized)
agggagaccatctgtagccacctccctgtcacaaggaagcctgcacatagagacctcccatagagacgaaatatatctacaaaagggtcactgcccttgcaaggaaaatgcgatcccagc

SEQ ID NO: 861812 - DNA, 120 bp, Artificial Sequence
  ENSG00000230710_16 (sequence is synthesized)
acggcctggcgtgttcctggcggcagaaaggactcctgccaggacaggaggagaagttgccgctgagacgaggagacggcgggaagccctgcagatgccccaagcccactgaagccacag

SEQ ID NO: 861813 - DNA, 120 bp, Artificial Sequence
  ENSG00000230710_17 (sequence is synthesized)
gaggggaagggaggaggctgctgtgctttctgtgtaccttgttctctgcccagaagggtcagcacagccaggcagccccgaaacccagtggaggctaaagaaaggagggccctctctcct

SEQ ID NO: 861814 - DNA, 120 bp, Artificial Sequence
  ENSG00000230710_18 (sequence is synthesized)
agagaaggctcagtaggctcccgaggaaagggaaggagcaactttttccgtttgacttcaaggaggagggggaaagggtacagaatcaaaatgtatggcacttgcgattcagttggctta

SEQ ID NO: 861815 - DNA, 120 bp, Artificial Sequence
  ENSG00000230710_19 (sequence is synthesized)
tttctgaaaaaattggggtagattgggcgcccaatgcaccataagcgttatgtgtgtttgtaaacacacacgggggtgtacacaggggtaggggtcttagagagaaaagtaaaaagggaa

SEQ ID NO: 861816 - DNA, 120 bp, Artificial Sequence
  ENSG00000230710_20 (sequence is synthesized)
aagaaggaaagtagcagaggctactttacacataaaagtacataaataagtttacttatgaagaccatggtttcccactaacagccccatcttggtagcagaatgggacaaactgtcaca

SEQ ID NO: 861817 - DNA, 120 bp, Artificial Sequence
  ENSG00000284977_0 (sequence is synthesized)
agggtcagatgttcccttccattacaaagaaaaatgtagcagtaagcttgtcagtccttctctcctgtccctagggcctgacttacttaacaaatattaagtgaccaacatatgcaacca

SEQ ID NO: 861818 - DNA, 120 bp, Artificial Sequence
  ENSG00000284977_1 (sequence is synthesized)
tgaccatgacatttagtgatgctgaggacacagaactaagtgactttctgtatgaaacttgcattctcacaggggtgatagttaataagcaagtaatgaaataaatataaaaatgtaata

SEQ ID NO: 861819 - DNA, 120 bp, Artificial Sequence
  ENSG00000284977_2 (sequence is synthesized)
ggttatggtgtaggtgtccatggatgtggaaatgtgttatgtaggtgatgagactgttgatagaggacattgaaaattgttgggatttttgtcctcatgtttttttttctgtattattgc

SEQ ID NO: 861820 - DNA, 120 bp, Artificial Sequence
  ENSG00000284977_3 (sequence is synthesized)
cattttcaaaaatatgtatactgaaatcacagcttttatatacactaataacaactagtttaaaatatgcaatggaaaaacctattctttgtagaatagtaccatgaaaagtagttccac

SEQ ID NO: 861821 - DNA, 120 bp, Artificial Sequence
  ENSG00000284977_4 (sequence is synthesized)
tgggtgctcataaaatcttcatgaaggcctcttctactataatttgggcttgagcctgccttttgcctgactccctttgtatggggtgcaccattgccaacaacatctaaaatgttcatt

SEQ ID NO: 861822 - DNA, 120 bp, Artificial Sequence
  ENSG00000284977_5 (sequence is synthesized)
tcaaatgctccttgagctaattatggttacccaggggcttgagggcaatgggttctagctgccatcacactctgcctcattatggaggatttcagcccacccttgttctcccaaagtgag

SEQ ID NO: 861823 - DNA, 120 bp, Artificial Sequence
  ENSG00000284977_6 (sequence is synthesized)
atttccttccttcctcttccattcagcccagtcctctctgtctgcctgtggctgggctgtgccacaagctcagttccctgtgtcatgggtaatagtcacccagggaaacttgccatctgg

SEQ ID NO: 861824 - DNA, 120 bp, Artificial Sequence
  ENSG00000284977_7 (sequence is synthesized)
caaaaatgccaccttttagtcacaagagctttcctatgcccagtacttctgttgactgttgggagaggataattttctatgtttctttattggaatagaaaatagcctgaagacagtgaa

SEQ ID NO: 861825 - DNA, 120 bp, Artificial Sequence
  ENSG00000284977_8 (sequence is synthesized)
ggaagatcatgatgctccctctgtgacttagtcacactttaccccatatgtagaatgcttccacatgcaaatctctcccctccttcaaagcccactccaaatggtacctcctccatggag

SEQ ID NO: 861826 - DNA, 120 bp, Artificial Sequence
  ENSG00000284977_9 (sequence is synthesized)
ccttcttgagtaacataatgctctacccatcttctgaagtttcatagaaaatctcttcgagccaaagtggcctggatacataacctgcttcaacacacaccagctgtacagcttaagcct

SEQ ID NO: 861827 - DNA, 120 bp, Artificial Sequence
  ENSG00000284977_10 (sequence is synthesized)
tcagtgtttgctgcagtgatatcacctgtaccacagcttcttctgcagtgtgaccttttcacttccccatgatgaactggagtctaatttctaagttaatccatgcttgccttataagta

SEQ ID NO: 861828 - DNA, 120 bp, Artificial Sequence
  ENSG00000284977_11 (sequence is synthesized)
ccttaaccaaatagactgtaatggaagtgggattgcatgacttcagatactgttagaagaacccagctgccaccagaaagctaaggcacatagagaggcctctacgtaggtaggtggctc

SEQ ID NO: 861829 - DNA, 120 bp, Artificial Sequence
  ENSG00000284977_12 (sequence is synthesized)
ttacaggcagtctcagctgagcccagacatcaactcacctcaggttccagacctgtacataaagaaatctctttttgatttcagcctctggacatttgagaccttcccactgccccaggt

SEQ ID NO: 861830 - DNA, 120 bp, Artificial Sequence
  ENSG00000284977_13 (sequence is synthesized)
atctttgagcataaacaagctacttctgtgataccttattctaattcctggcccacagactccatgaacacgatcaaatggttttataccactacgattgggtggtcttttatgcagcaa

SEQ ID NO: 861831 - DNA, 120 bp, Artificial Sequence
  ENSG00000284977_14 (sequence is synthesized)
tacaaaaaatctagagcagtgtttcagttcttaaatgaacaaaatggtatgatactgtcaaccctagtgtgtagttgaaaattaaatgaaataatatatgaagcacctggcagtgcttga

SEQ ID NO: 861832 - DNA, 120 bp, Artificial Sequence
  ENSG00000284977_15 (sequence is synthesized)
catttagaaagcatttaatgaatattttttttcatttccttccaactacagtagctacctgtccacacatcttacgttttactaaaatttttgctctcctgtggcaggagttgaatcata

SEQ ID NO: 861833 - DNA, 120 bp, Artificial Sequence
  ENSG00000284977_16 (sequence is synthesized)
ataatgggcactggattgggagccagaaactttagttactagctgtgcattcttggtaagtttttttctgtttaataattattttttcttatgttaaaattgaaaaggtttaggctgaaa

SEQ ID NO: 861834 - DNA, 120 bp, Artificial Sequence
  ENSG00000284977_17 (sequence is synthesized)
ggggagatatggtggcagattgaagaagacctagcaactgtttttaaattcttaaagaattgttatggggaagaagaatggatttctctgtttgactctcaagtagtacagtcaggaacc

SEQ ID NO: 861835 - DNA, 120 bp, Artificial Sequence
  ENSG00000284977_18 (sequence is synthesized)
tgtgtggaatacacaggcacaagacaaataattatctagagtcagattgttcaaagatggaagaaatgctttgtgagctagtgaatgccctgcccctagaggtgtttctctgggaaactt

SEQ ID NO: 861836 - DNA, 120 bp, Artificial Sequence
  ENSG00000284977_19 (sequence is synthesized)
gagtgtaaccctcctactctgctgtagaggatatgcaagcattggaggaggcaaattccatcccctatgttcctaattctaccactggacgccttctttcagctccaaaaatcttcaaat

SEQ ID NO: 861837 - DNA, 120 bp, Artificial Sequence
  ENSG00000284977_20 (sequence is synthesized)
ttgcaacagatcttctgactctagtctttcctgtcattgctacgtcagtgggtctggagtggaatggataggaagctggcaagtacagcaacctgggaatagcccagcttgtttatttca

SEQ ID NO: 861838 - DNA, 120 bp, Artificial Sequence
  ENSG00000284977_21 (sequence is synthesized)
gtgatgcaggggagggcaaaagaagtgaggcattgtggggaggagtattgatcaggaactaaaatttaagtgcacttccaaagatgattagagagccactattaatgctctgtaggggat

SEQ ID NO: 861839 - DNA, 120 bp, Artificial Sequence
  ENSG00000284977_22 (sequence is synthesized)
cgctaggagggcactacgtagcaagaactggaaaaacctctggaacgtgtggatgcagaaaccctaagtgatgggggcttcagagactgaaaagtaggtttgtaatttttcataggagca

SEQ ID NO: 861840 - DNA, 120 bp, Artificial Sequence
  ENSG00000284977_23 (sequence is synthesized)
tctacatttgtcaggtaagaatgggttacattgcaccctcaaataacttgcaaaggtcttcagattaacaccacaaaagtttaattctcattcatgccaaatctactcccctcttcaggg

SEQ ID NO: 861841 - DNA, 120 bp, Artificial Sequence
  ENSG00000284977_24 (sequence is synthesized)
tcatagctcagctatccaggtggctttggttttgtggctccactttctcaacatgaaactccaatagaggaagaaggaaacatgtgacctggagagttgaagtgggtattggagactgct

SEQ ID NO: 861842 - DNA, 120 bp, Artificial Sequence
  ENSG00000284977_25 (sequence is synthesized)
gcatcagcagggaaatgctttatatcctcaaatgacatgtgcttctcctgacagctcattgaccagaattagcaacatggcccttcctaactagaagggaccagaatggatagtccttct

SEQ ID NO: 861843 - DNA, 120 bp, Artificial Sequence
  ENSG00000284977_26 (sequence is synthesized)
atgtgtccagaaggagagaaggaccagatatgtgtgatcatgtctccattatgggagaaaagagaattgaaaaagaaagaagatccacatagtgtctgaggagctgagacaaaagaaaaa

SEQ ID NO: 861844 - DNA, 120 bp, Artificial Sequence
  ENSG00000284977_27 (sequence is synthesized)
tgccactgctactccttcacttgctcattctgcaaaagtttgtagatcttctgcaaggagaacggcattgttaactacctacaggaagtgtctcagattaacagacgtgtgtaggatttc

SEQ ID NO: 861845 - DNA, 120 bp, Artificial Sequence
  ENSG00000284977_28 (sequence is synthesized)
agtcccatttgaatacacccgatggatgtacgaccttgagaaatttacttaacacttccaggtcagcccggcgtggtggcttatgcctgtatttccagcacttggggaggccaagccggg

SEQ ID NO: 861846 - DNA, 62 bp, Artificial Sequence
  ENSG00000284977_29 (sequence is synthesized)
ttatgcctgtatttccagcacttggggaggccaagccgggtggatcagatacaaaaattatc

SEQ ID NO: 861847 - DNA, 120 bp, Artificial Sequence
  ENSG00000284977_30 (sequence is synthesized)
caaacaaacaaacaaaaacatttcggggtcaaatgtttgtcacctaaaaacaaagccattgagcataagaagaacataatggactttggggactcaggaggaaagtgtgggaaggggatg

SEQ ID NO: 861848 - DNA, 71 bp, Artificial Sequence
  ENSG00000284977_31 (sequence is synthesized)
ggactttggggactcaggaggaaagtgtgggaaggggatgagggataaaagacgacaaatatggtgctaaa

SEQ ID NO: 861849 - DNA, 120 bp, Artificial Sequence
  ENSG00000284977_32 (sequence is synthesized)
gggataagaaaccttcctcttaactttgagattagaaggaagagagagccgcgctattcctcggggtcctgcatttagtggtaagccaattcccccagacatcttcctgctgacagtgaa

SEQ ID NO: 861850 - DNA, 120 bp, Artificial Sequence
  ENSG00000284977_33 (sequence is synthesized)
gatgccactgctactccttcacttgctcattctgcaaaagtttgtagatcttctgcaaggagaacggcattgttaactacctacaggaagtggaggaaaagaaccaggattgggaggtca

SEQ ID NO: 861851 - DNA, 120 bp, Artificial Sequence
  ENSG00000284977_34 (sequence is synthesized)
ttcagttactcacacctgggctttttagaagtaatttgaatggatacagtcaaagctcagcctctagaagatcccaaatgaccccactgtaggagtatgagaagaacgttcaggaagaag

SEQ ID NO: 861852 - DNA, 120 bp, Artificial Sequence
  ENSG00000284977_35 (sequence is synthesized)
gggttcaggtggtagatgataagaatctacaggtggcacaatagacatattaccttctttggtggagtctgtaaagacattactaaagtttaataataaagcatgaatattcagaccctt

SEQ ID NO: 861853 - DNA, 120 bp, Artificial Sequence
  ENSG00000284977_36 (sequence is synthesized)
agggactttctgtaacttctgaagctgtctcataagaagccttgcagattctgctcatgtctctttcctctctgggaaacaagtcgcgactcagggataagcctgagacacatggagaga

SEQ ID NO: 861854 - DNA, 120 bp, Artificial Sequence
  ENSG00000284977_37 (sequence is synthesized)
acatcctgatcaatctggtctttgctgctaccctggtcaacagcctgagctggatacctggctgacaagtaccacctttttcctacacagatgacaacccagcccatgagcaccagtttt

SEQ ID NO: 861855 - DNA, 120 bp, Artificial Sequence
  ENSG00000284977_38 (sequence is synthesized)
gcagccacatcagtttctgattagacttacaatttaagtggggaagtgactttggaagagacatgcgtgctgtcagcagatgggagagaggatggagaaagatggagggaggctgctgta

SEQ ID NO: 861856 - DNA, 120 bp, Artificial Sequence
  ENSG00000284977_39 (sequence is synthesized)
acacctgttctggttgggattctgaatgaatatgaaaggtgttgatttccaagaaagatcttgttcttcaaactctgttacagcgtcttctctggagaagtcaacagtgagatgggctaa

SEQ ID NO: 861857 - DNA, 120 bp, Artificial Sequence
  ENSG00000284977_40 (sequence is synthesized)
atgaagaaggagcagcttattgtctttgttggttttctttattttccttcgaagcatctgggggaagaggaagacaatggatgagatggcgtatgttctttccgccctgtgaatgaatca

SEQ ID NO: 861858 - DNA, 120 bp, Artificial Sequence
  ENSG00000284977_41 (sequence is synthesized)
gatttgaactcctaagcaaaatagaaaatgcagaaatggtgctcaggcaaaacctgagagacaccgggctcaagcgactctcctctgaagtccatctgataaagtctgaattatggataa

SEQ ID NO: 861859 - DNA, 120 bp, Artificial Sequence
  ENSG00000284977_42 (sequence is synthesized)
gtcctttccccctcaatagtctactgcttactaaagtgtagctcaatgactctgtgggcttgggtaatcagcaggtaagcatagctatgcccaatgaagcaggggctgtgagaagaagcc

SEQ ID NO: 861860 - DNA, 120 bp, Artificial Sequence
  ENSG00000284977_43 (sequence is synthesized)
ttgaagagtacctaaagtagaaaataagtgaactttctcctaagcccataggaaacatcactatcctgctgaaggcagggcagagggaacacagcagagtaggctcagaataactgggat

SEQ ID NO: 861861 - DNA, 120 bp, Artificial Sequence
  ENSG00000284977_44 (sequence is synthesized)
ttgggcactgatattaatgtcaccatatctacacttattgattgttgagattatacatttggcttgaaaccacaggaactaatatactctaaatataagctgagaaaaattaaaaataac

SEQ ID NO: 861862 - DNA, 120 bp, Artificial Sequence
  ENSG00000284977_45 (sequence is synthesized)
cacaactacaacagtagaaagagaaaatatatgaatgccaagaatctaatgtgtaaattaactacaagggtttagaagttttgggcatctccctggggattagctgtgctcagtctcccc

SEQ ID NO: 861863 - DNA, 120 bp, Artificial Sequence
  ENSG00000284977_46 (sequence is synthesized)
tccaggaaatcatttacaactctatgtctgttaccccaaaatgacttaaatgaagtttaggataagacagagacaagttcagaacaagacatgggtgaggttcagaagaatgaaattgaa

SEQ ID NO: 861864 - DNA, 120 bp, Artificial Sequence
  ENSG00000284977_47 (sequence is synthesized)
attatatgaatttccaattgttagagatgcatgagtgagatacaggttttcaagtgttgtgatgtcataccataaaatgattataaacatttaggaaacaatctctcctgtggaatcagg

SEQ ID NO: 861865 - DNA, 120 bp, Artificial Sequence
  ENSG00000284977_48 (sequence is synthesized)
aatcattactaaatatcacaattatagtggagacgctgaagaagtcaatatatgtgttctgaaaaacttgattaaataaacttcaaggacacagagaaaggcgctgtgatctgttctctg

SEQ ID NO: 861866 - DNA, 120 bp, Artificial Sequence
  ENSG00000284977_49 (sequence is synthesized)
caaagggcctgatatatttagattttcattaagatgggctgaaacacaaaatgtcttcagttatccaggaaatgtaattaaccacttcttaagatttctacttaatcaatgctatttttc

SEQ ID NO: 861867 - DNA, 120 bp, Artificial Sequence
  ENSG00000284977_50 (sequence is synthesized)
cccatatttggttaattgaactgtctgcctccactatagtctgaggtatgtggctaattttggccagcaatatcaaggacatgaaactcaaggtaatttttttccctccaaaatagcctc

SEQ ID NO: 861868 - DNA, 120 bp, Artificial Sequence
  ENSG00000284977_51 (sequence is synthesized)
tatattttcgctgtaaatccttatcctattctctgtgaaataagccttcaattaacagccataattaaataatatatttaaaaattaagataaaatatgctgaagtagtgagcattactt

SEQ ID NO: 861869 - DNA, 120 bp, Artificial Sequence
  ENSG00000284977_52 (sequence is synthesized)
agaaatggtatgaaaataatttgcagtcagaacaacctaaatttgaattcttgctctttcaagttatagctaatcttgggcaagctatttctcagtttcttcctctgtcgaatggagcta

SEQ ID NO: 861870 - DNA, 120 bp, Artificial Sequence
  ENSG00000284977_53 (sequence is synthesized)
atattaatttctgcttaatagtgttcttgtgagactacaggtaatgtttggatagcatcagtcatagagtagacatataataaaatgttactatttttattattttcactattattatta

SEQ ID NO: 861871 - DNA, 120 bp, Artificial Sequence
  ENSG00000284977_54 (sequence is synthesized)
ccatttttattgttagtcttttaaactgcaggcaaatatcaagagtatctcttaattgtatgcgtataagatgatcttacatatctcaaggactattggtatgtccatgttttaaaagta

SEQ ID NO: 861872 - DNA, 120 bp, Artificial Sequence
  ENSG00000284977_55 (sequence is synthesized)
tgcaccattgcactccaccccgggtaacagagcgagacaccgtctcaaggaaaaaaaaaagtgtattattaaagtaagaatacctggcttgtatggccaagacaagcagaataatgtgga

SEQ ID NO: 861873 - DNA, 120 bp, Artificial Sequence
  ENSG00000284977_56 (sequence is synthesized)
aagctctttccatcaagctgctcagtatgtccttgataaattctgtgctgatcctactttgagcatttctgtggacttcgctgcaaggaccctggtcctttgagatatttgttttaggaa

SEQ ID NO: 861874 - DNA, 120 bp, Artificial Sequence
  ENSG00000284977_57 (sequence is synthesized)
gtactgccatttccatctctagctgggttatgacgactatatagccaacgtttctctcctagatgctagcactgctataattaagtaaagaaaggaaagttcctttgttcttcacccagc

SEQ ID NO: 861875 - DNA, 120 bp, Artificial Sequence
  ENSG00000284977_58 (sequence is synthesized)
aggttacttgacagccttctaagtgccaagcgctctgctggttgttggagacacaccaattgccctcaaagaatgcacagacgaatgtaggataggattcaacaacaacaacaaaaccct

SEQ ID NO: 861876 - DNA, 120 bp, Artificial Sequence
  ENSG00000284977_59 (sequence is synthesized)
tgcattttaaaagacagagtttggtcctccagtataacttagggtttgcttttattaggtgcttgatttggggcaagtaatttgactggtcccatactcacttttctcacgtttaaaatt

SEQ ID NO: 861877 - DNA, 120 bp, Artificial Sequence
  ENSG00000284977_60 (sequence is synthesized)
agcacctaccacagcagtcaggaggaccacataagctaatgtgaatatagtgcgtatagcagtgttttgtgcatactaagaatgtagtaaatactaatagcagtagtaataattaaaatg

SEQ ID NO: 861878 - DNA, 120 bp, Artificial Sequence
  ENSG00000284977_61 (sequence is synthesized)
attattataccaataattattagttttactatttgttcaaaatatttcaaacagaacaggaatggggaagggtatcaaatattgaggcaggagaagtaaacaaaggctggattatgaagg

SEQ ID NO: 861879 - DNA, 120 bp, Artificial Sequence
  ENSG00000284977_62 (sequence is synthesized)
gtttcatggagcccaaagggtagatggaggattatgatagagttttacaaagaggagttttgaacagtagaaaacaacttagccttctacttctgacagattatttgccccttgggtggg

SEQ ID NO: 861880 - DNA, 120 bp, Artificial Sequence
  ENSG00000284977_63 (sequence is synthesized)
atgtaagtgcctgcaagttcaggattggtccattctcatgacccacaggtgtcttcctccttgatgtgtcatgaaaaattaaaatgaggacagttcagtcaacagagtgtctgtgaaatt

SEQ ID NO: 861881 - DNA, 120 bp, Artificial Sequence
  ENSG00000284977_64 (sequence is synthesized)
aatgaacccctttgccttcaacacctggtaattatatctttcaattaaattaactctctagctgtctacaatcttataaattaactcacagtcttatatctttctaagcagccagatctt

SEQ ID NO: 861882 - DNA, 120 bp, Artificial Sequence
  ENSG00000284977_65 (sequence is synthesized)
ttcacaactcaaacctgaggggccagagatacaaagcagggtcagggaaggcaaatgaaaggacctcattcacttttctgcttgtcacagaaaaacttgagtctctactttctcagcttg

SEQ ID NO: 861883 - DNA, 120 bp, Artificial Sequence
  ENSG00000284977_66 (sequence is synthesized)
gctcactggaaagggagaattgaactagtaaagtctgctgttgagtattactcatataaattcattcattcactcactcatttattcaattcttgagaacaaggaaatctagagataaaa

SEQ ID NO: 861884 - DNA, 120 bp, Artificial Sequence
  ENSG00000284977_67 (sequence is synthesized)
aaaattgtcactctgttgactgaactgtcctcattttaattctttgaggcactgatgatctctgaagtgagcgaaaaatacaaactggttaaaaatcaggaagtgaacttgcatattcac

SEQ ID NO: 861885 - DNA, 120 bp, Artificial Sequence
  ENSG00000284977_68 (sequence is synthesized)
caattctttcagcggataatttttgagttctaaacatgtggaaagcacggaacattataataggggaagtacaggaagatataggacagtgtagcagagggttttccactggtctcgggc

SEQ ID NO: 861886 - DNA, 120 bp, Artificial Sequence
  ENSG00000284977_69 (sequence is synthesized)
ttagtgaaccactccataaagtgacatttgctccaggacctgaagagttgagagaacaaaagtgtctaacagcgtaggcagggggagcaggggaagttcatagaacagggagtttagtag

SEQ ID NO: 861887 - DNA, 120 bp, Artificial Sequence
  ENSG00000284977_70 (sequence is synthesized)
agctggagcagagagtaagttggagaggtaaaatgatgaaatgagcagggtcagactatggagggtcttgtaatgatgtttaggagttttaagttttctcttaaaagcaaagagaagctg

SEQ ID NO: 861888 - DNA, 120 bp, Artificial Sequence
  ENSG00000284977_71 (sequence is synthesized)
tgtaaggatattaagctaaggagttttcatgacccttgtggtcatagtatttttcatgtgctctttaagtgatcactttacttgcaatgtaaggaagtgtctcgaaggcaataaaactgg

SEQ ID NO: 861889 - DNA, 120 bp, Artificial Sequence
  ENSG00000284977_72 (sequence is synthesized)
aaatggaaagacaattttgaagatccttgtgcaagtgcaagagggctaggataggtaccgaggagatagagagaaatgtagagattcactgagcaggtgaatgactagaggtggcaggta

SEQ ID NO: 861890 - DNA, 120 bp, Artificial Sequence
  ENSG00000284977_73 (sequence is synthesized)
ggaagaggaaactataaagatgatgactgccttcctggtttatgtcacagagcagctgcaaaatattttaacttctactcctctttgaaaagcgtccccaaaatacaggcaacagagccc

SEQ ID NO: 861891 - DNA, 120 bp, Artificial Sequence
  ENSG00000284977_74 (sequence is synthesized)
cgaagaacgcaggtggcaattaaaatgtattgcagttctatcaaatggattgtcaggagagacttctttgataatctgcaaatagaacccaagcattgaaactactgggtatagatttag

SEQ ID NO: 861892 - DNA, 120 bp, Artificial Sequence
  ENSG00000284977_75 (sequence is synthesized)
tcttctttttaggaatatgtaacatagatgaacagaaaggaataaaccaaagaatttttatggaaaatatgaatagtaatttcataattcttacctccttttatcaccctaagcaatgct

SEQ ID NO: 861893 - DNA, 120 bp, Artificial Sequence
  ENSG00000284977_76 (sequence is synthesized)
ctaagcttgatatacagatgaggaaacatttgaaaagttaaagtgaattggtgtacacaagtttttaacttagctcttcctaattcgagtccctggctctttctagatgaacacactttt

SEQ ID NO: 861894 - DNA, 120 bp, Artificial Sequence
  ENSG00000284977_77 (sequence is synthesized)
ctatcatcagccacaagtatttaggtagaacttactatgtatgcagatctgttaagacatgtgaagtttaggtttgtcacagccatggcttcgtcgattgattagtcttgaagctgaaat

SEQ ID NO: 861895 - DNA, 120 bp, Artificial Sequence
  ENSG00000284977_78 (sequence is synthesized)
ggcaaaaatgcccccgagagaaaatacattgaagcaatcaattatttcttttgtacctcctacgacaatgtaaaacaggcaaggcttcttagagtaagaattccagagagcagcatgtat

SEQ ID NO: 861896 - DNA, 120 bp, Artificial Sequence
  ENSG00000284977_79 (sequence is synthesized)
ggccttccaatctcatcctctgtacattgtaatgtcatttgttcatagtgctgggacattctacttgctgtggcttttcctagcactcatgaactagcaccgagaaatgtgatctctagg

SEQ ID NO: 861897 - DNA, 120 bp, Artificial Sequence
  ENSG00000284977_80 (sequence is synthesized)
cttcagaccccaagatcattccccttgtctccagaacctccctgatatttttcattactacttaactctcagaattgtctgagctctggttttcctatctggtctgcgtctcaggagaaa

SEQ ID NO: 861898 - DNA, 120 bp, Artificial Sequence
  ENSG00000284977_81 (sequence is synthesized)
aaattgcaactcaagtttattgaccttgtcaatttatacaaggaactcaaaaaatgtttttattggacattatataactgaacacttattggagcaaaagtgtggaagtccagacccagg

SEQ ID NO: 861899 - DNA, 120 bp, Artificial Sequence
  ENSG00000284977_82 (sequence is synthesized)
gctgtgttctatctaggttaaacatgacagaatgacacagaaagtaatgtgggtaaataaaaacaaatgataaatctacaatcatctttaaaatcaaaggctaaatcccagctgtcctac

SEQ ID NO: 861900 - DNA, 120 bp, Artificial Sequence
  ENSG00000284977_83 (sequence is synthesized)
ttcttaaccctaagaccatagcctatttatctaacttctctgagtctcggttttcctatctgtgaaatgggattattaaagaggactcagtaaaaacaacgcatgtgaagcttctggcac

SEQ ID NO: 861901 - DNA, 120 bp, Artificial Sequence
  ENSG00000284977_84 (sequence is synthesized)
aaaacctagcacaatgataggaagctgttttactcacgttaatccatacattgattttgttgtctctgctatccagaatccacccctatttgctctcaacaattaatttgtgaattacag

SEQ ID NO: 861902 - DNA, 120 bp, Artificial Sequence
  ENSG00000284977_85 (sequence is synthesized)
caactatggttgtttaattatatcattttattgactttttcagtttaataatataatgatatacttggctaacattcgaatatctactttgtaccatgcactgaatttaatgtttcacat

SEQ ID NO: 861903 - DNA, 120 bp, Artificial Sequence
  ENSG00000284977_86 (sequence is synthesized)
gcatctatcgctagggatgattacaatattcagatgatgcataactgttgttattgcccacccacttctttttgaagatgaggaaactggagctcacacatgttgaattatctaagattg

SEQ ID NO: 861904 - DNA, 120 bp, Artificial Sequence
  ENSG00000284977_87 (sequence is synthesized)
caacattttaaaaatccagaaaatggaattaaaagccatggctgctttacttagtaaccttacactatacaaactattactagtttataatattatttaaaataatttcacaggtctttc

SEQ ID NO: 861905 - DNA, 120 bp, Artificial Sequence
  ENSG00000284977_88 (sequence is synthesized)
ccctaatttggacttttttcttttaattggagattcaatatcttcagtgcaaatcaataagcactctggagaatacatcaatgagactattgtgagggtacatcttgtgtacgcttgtga

SEQ ID NO: 861906 - DNA, 120 bp, Artificial Sequence
  ENSG00000284977_89 (sequence is synthesized)
gggtctttcctaagcaggaggagatggctgtataaaaggattactgttacttatttctatatttttcctaaagaaaagcaggaactacattaattctagattgagatcagaaactactta

SEQ ID NO: 861907 - DNA, 120 bp, Artificial Sequence
  ENSG00000284977_90 (sequence is synthesized)
ccttacaggacacgtgttgtgtgcagccacaggtttcagaagcagatggcatgtgctaaagagtgtatgtatgaattagctctgggaataacttctgctccaggtataaaagaaattagg

SEQ ID NO: 861908 - DNA, 120 bp, Artificial Sequence
  ENSG00000284977_91 (sequence is synthesized)
aggagagccaaattaaaattgggcaataggcctatgcagagtggtacttttatatctccttttcctattgtgtgtatgtgtgtgtgtagagtgcgtgtgtctgcatgtactgaaagcaca

SEQ ID NO: 861909 - DNA, 120 bp, Artificial Sequence
  ENSG00000284977_92 (sequence is synthesized)
caaacacaaatagacccctacctgtaggttttatacatttacattgtactccagaaaaataaaaatgatttttttttcttgacatttacagtctcagattaacagacgtgtgtaggattt

SEQ ID NO: 861910 - DNA, 87 bp, Artificial Sequence
  ENSG00000284977_93 (sequence is synthesized)
tatgcctgaatatgttttatttattatagtctatgtgtgattttgtatttgaaagtagatgcttgattctaccacaattaaaaaaag

SEQ ID NO: 861911 - DNA, 120 bp, Artificial Sequence
  ENSG00000284977_94 (sequence is synthesized)
tttgaaagtagatgcttgattctaccacaattaaaaaaaggatatgcttggatttgtctgtagtatgtgggtgtggaggagttcatttgaacacgggcatttttgtgtgtccaggacgta

SEQ ID NO: 861912 - DNA, 120 bp, Artificial Sequence
  ENSG00000284977_95 (sequence is synthesized)
tcaacagcctccttagaggtgtcatatgtgcagggaatactgaagagagtgcattagtctacatgtctctctatatattttttctttttgtgtgtgtctggttttcctagatttctctct

SEQ ID NO: 861913 - DNA, 120 bp, Artificial Sequence
  ENSG00000284977_96 (sequence is synthesized)
tgcatgtttgtgggtatgagagtctgttagtattaatatgtgaatgggtgtgtgctatttgtctggggaggatgatttaggcaaggatttgaaagtgtgcatttagaaattgagggcatc

SEQ ID NO: 861914 - DNA, 120 bp, Artificial Sequence
  ENSG00000284977_97 (sequence is synthesized)
tctgtgttattatgagtgtatgtgtgtttgtgtgtgcattttagagtggttggttatctgtgtgtatttgcaaggagaaggggaattcagtgtgtttctgtgtttgtgtgtttgtttgtg

SEQ ID NO: 861915 - DNA, 120 bp, Artificial Sequence
  ENSG00000284977_98 (sequence is synthesized)
aatggtatgttttgcagaggagtgtactttttatgttcgaaagttaggcaatcatgtaatttatcatccaaatggggatacatttgagaatgaaatatatatgtgtgtgaaaggatgtct

SEQ ID NO: 861916 - DNA, 120 bp, Artificial Sequence
  ENSG00000284977_99 (sequence is synthesized)
ttgaatgtacttttaaaaatgcatttaattttgtgtgtgttattggtgtcaggaattaagaaaaagaagagaagtacaggagatatcattaaattatatagttctctcttcgactgtagc

SEQ ID NO: 861917 - DNA, 120 bp, Artificial Sequence
  ENSG00000284977_100 (sequence is synthesized)
gggaagatttccataaagatgatcttctgagtgaaggctgggctttaagacgaaatgagagacagtgttggtggaagaagagaacttaaggaattaagaaaaagaagagaagtacaggag

SEQ ID NO: 861918 - DNA, 120 bp, Artificial Sequence
  ENSG00000284977_101 (sequence is synthesized)
gatatctttaaatctctttgccaatagcaagacatttttaaaaatgaaatactgttttatgattggtggttgttttactatgaaaccataaaatgctagatttcatgggggtatacaaga

SEQ ID NO: 861919 - DNA, 120 bp, Artificial Sequence
  ENSG00000284977_102 (sequence is synthesized)
ctttctctggtatagccttccctttggtacgaaattttttttcctatttttttaaagcaaccctattagctgaaggtacaagaattttcattacagaagatcctaaatgagagcaatgat

SEQ ID NO: 861920 - DNA, 120 bp, Artificial Sequence
  ENSG00000284977_103 (sequence is synthesized)
cagaattagctggaaagccacacacatgcacaacctgattcagaaggatcagagaaggttatttgcccccttgcagatctagggggcctggggcttttacatgagccccaaaggatgcac

SEQ ID NO: 861921 - DNA, 120 bp, Artificial Sequence
  ENSG00000284977_104 (sequence is synthesized)
cagatagaaaattggcaggatgactggaaattttcaaaatgcacaggtcagttgcaaataatctgatgctgtttttgggaaactgcaggctaaaaatagccatggttttcctggatgagg

SEQ ID NO: 861922 - DNA, 120 bp, Artificial Sequence
  ENSG00000284977_105 (sequence is synthesized)
cattagtttgatgttggcctttgtaacctgtatgtttttgccatctctgctcagttccaatcatttttacttcctttcactttgtgtacctataagattcagagttgtattagaaacatt

SEQ ID NO: 861923 - DNA, 120 bp, Artificial Sequence
  ENSG00000284977_106 (sequence is synthesized)
aacatttattgatcactttgttttctctgggcactgtattaggcaccagagattctaaaggtggggggaaacaaactaaacaacaacaacagcaacaacaacaacaaatcctcacaaaat

SEQ ID NO: 861924 - DNA, 120 bp, Artificial Sequence
  ENSG00000284977_107 (sequence is synthesized)
aacatgtgcaatgtcgtgggggtgcagacaagcactcataattacaacaaataatgcagagtgcagtaggagttcagaatttcaactagcttgagagtagagtggtacaagaaggtttct

SEQ ID NO: 861925 - DNA, 120 bp, Artificial Sequence
  ENSG00000284977_108 (sequence is synthesized)
tagaggaagtggcagttgaagtaattcctgaaggtattgttcaagtggggagggtgggaagggcatcctaggtaaaaggaacaacatttatgttgtaatgaagccaagttgaaaagaaag

SEQ ID NO: 861926 - DNA, 120 bp, Artificial Sequence
  ENSG00000284977_109 (sequence is synthesized)
ccacgtgcaggcaagcaaagcatgtttgccagatctgcagttattctaggaggctcttgtttaatgtgtgcctgatattgtggatttaatcactacctcacaaattattcttcaagattc

SEQ ID NO: 861927 - DNA, 120 bp, Artificial Sequence
  ENSG00000284977_110 (sequence is synthesized)
aacttgatcatttaaacacagactctaacagagtttctgactcacactaggcactagaaaaatcttatttctgaactctttgctgttgcgttttcccccttaccagtcccacagtgcctt

SEQ ID NO: 861928 - DNA, 120 bp, Artificial Sequence
  ENSG00000284977_111 (sequence is synthesized)
gcagaaagtagccattcaatgaagttacctccaatttaatcctatccctctccgcccagtcccagtttaacttccttttccacctacaaagaccctgagggccagaaagagggcagcctc

SEQ ID NO: 861929 - DNA, 120 bp, Artificial Sequence
  ENSG00000284977_112 (sequence is synthesized)
ttcccaaggcctccttgtctttttctgcttgaggaaatagcttgtggtgtctccttggctgtctgtttctccgcctctggggaatctcctctcatgtaaatcctgcaattagaggctctc

SEQ ID NO: 861930 - DNA, 120 bp, Artificial Sequence
  ENSG00000284977_113 (sequence is synthesized)
acccccaccaccagagctacatctgcctccctagataggcacccacttgattaggaagagataatcacaggggctgcttcagcctacagcttggtgaagacaggaagaaattctgattaa

SEQ ID NO: 861931 - DNA, 120 bp, Artificial Sequence
  ENSG00000284977_114 (sequence is synthesized)
atttgtggtttcaagagaagggctccccctctctcatcacataccagcttcctgtctgcctatacatttggactcaaggcgcaaaattttgattcgtcatttattttttcaaaaaccata

SEQ ID NO: 861932 - DNA, 120 bp, Artificial Sequence
  ENSG00000284977_115 (sequence is synthesized)
gaaattaggcaataaataggaatatacctctttggtagatgaagaatgtgagctgtgagagatgaagcatttgacttaggtcataatgttgattgcctagcagagactttggattcgatc

SEQ ID NO: 861933 - DNA, 120 bp, Artificial Sequence
  ENSG00000284977_116 (sequence is synthesized)
actgattagttttatatcctccataagagaaagcaagagaaagtaagcaaagcatttttttcccttgagatgatctaattttgacttctgtatgggtgtgtgtttgtacttatatatatt

SEQ ID NO: 861934 - DNA, 120 bp, Artificial Sequence
  ENSG00000284977_117 (sequence is synthesized)
attaattcaaattatatattcaacttaacttttagaaacattagaaatatgtgcagaatgtaagaaatgcataaagtagaggaaagcctaaggaagaagccaaagtcattcattatatcc

SEQ ID NO: 861935 - DNA, 120 bp, Artificial Sequence
  ENSG00000284977_118 (sequence is synthesized)
agagatacttcctggttgatatatgacgtgtgtatgtgtctatataaaatgtctacataatcagaattataatacacatgtgcacatatagttattttctaactacattttgtattgtaa

SEQ ID NO: 861936 - DNA, 120 bp, Artificial Sequence
  ENSG00000284977_119 (sequence is synthesized)
caggaaacttgtgtgctggttttacctgtgacataaaccagcagtatgaatttggtccaaacacgaaagtgaagcagcaagcagcccatgacaaatatgtgcactgccagctaatgaata

SEQ ID NO: 861937 - DNA, 120 bp, Artificial Sequence
  ENSG00000284977_120 (sequence is synthesized)
ttggagaacatgacacgttggagagcccagtgggtcttgaaagtctgagttccagcaaattctcatgtctgcatcgactgcagcaaggtcaaaagttggaaagcagggatattcgatgcc

SEQ ID NO: 861938 - DNA, 120 bp, Artificial Sequence
  ENSG00000284977_121 (sequence is synthesized)
ttgacatgctgtgacttccataacccactcaccaaaagatgttgtgtgtttccactctctctcctggaaaccagacaagtgccaggataatcagataagtctggtggactggagaagaag

SEQ ID NO: 861939 - DNA, 120 bp, Artificial Sequence
  ENSG00000284977_122 (sequence is synthesized)
agaccacatataacagaactgaaccattccagctgaaggcatcttagataaactagccctcaggcaatctagcagttgaccacaattgcatgagcgaactcagaggagatcagaagagct

SEQ ID NO: 861940 - DNA, 120 bp, Artificial Sequence
  ENSG00000284977_123 (sequence is synthesized)
tctcaacagagcccagagtaaatcattgactcagagaattgtgagataacttaaagatgctgcttaatgccccgaagttggagtgttttgttacacaccaaaagtcaactgatacatgga

SEQ ID NO: 861941 - DNA, 120 bp, Artificial Sequence
  ENSG00000284977_124 (sequence is synthesized)
gctgtctacttgacttttttaaaatgaaaatcttcacacatttcaagactcctatctgattcagttttttcaataatgtctgctctagtaatttcaatctacattgaacatattcattta

SEQ ID NO: 861942 - DNA, 120 bp, Artificial Sequence
  ENSG00000284977_125 (sequence is synthesized)
tttattggacaaacattttgtaactgttcattaggttttcttttttacttgcactatacttttgtcctttatcacattaaatactgcctacattagattatctgttagcatcttaccata

SEQ ID NO: 861943 - DNA, 120 bp, Artificial Sequence
  ENSG00000284977_126 (sequence is synthesized)
tattaggccattttctgtctcatagcaagtagaaggctaaaatccacatttcctagacttctttatcatcccattctagcttaacttttacaaggttaaaaggtactggcaaggtatttg

SEQ ID NO: 861944 - DNA, 120 bp, Artificial Sequence
  ENSG00000284977_127 (sequence is synthesized)
gaaggtcaaaaaaaaaaaaaaagaagaagccatgattactctagcagtaggtggtgctgggctttgtcagaagaagatatgatattttgtcagtagctcatgtttgttatcctataaatt

SEQ ID NO: 861945 - DNA, 120 bp, Artificial Sequence
  ENSG00000284977_128 (sequence is synthesized)
acttactttgatgctcttagtaactgatatgcttagcaaaaattgttggagatactagtactttctggtattagcatcttccctgaccttttctaatcctgttcttccaaaggttttata

SEQ ID NO: 861946 - DNA, 120 bp, Artificial Sequence
  ENSG00000284977_129 (sequence is synthesized)
tagttctctgtattaaatcattttatgttggaaatatttagattgatttctatttcccacattgaactttgagaggttttttaatatacacttatgtgtatattatgtgtgtaatataca

SEQ ID NO: 861947 - DNA, 120 bp, Artificial Sequence
  ENSG00000284977_130 (sequence is synthesized)
actatatataaaaattatttagcactaataatgttcaagaatttataagtagtaagattcatcactcttttttttaatatgggtaaattgagatccagagaaataaatgacttttccaag

SEQ ID NO: 861948 - DNA, 120 bp, Artificial Sequence
  ENSG00000284977_131 (sequence is synthesized)
aaataaatgacttttccaagtcaatcatgagctactgtcatcactgagattgctatggtaattgattggcataattggacctgcagatttctagaaaaaacatggagttagatgtctatt

SEQ ID NO: 861949 - DNA, 120 bp, Artificial Sequence
  ENSG00000284977_132 (sequence is synthesized)
ttataagagaccaggctctctagggggaaatgcaggtgtgctagggctggggtggaaagtaagggacagtaagactggaaatttcaggccacctagcctcattttaagaagagtagctcc

SEQ ID NO: 861950 - DNA, 120 bp, Artificial Sequence
  ENSG00000284977_133 (sequence is synthesized)
attttaatctactgcctatacagtcatcacttggtatcttctgcagactgtttccaggactctgcatagatacaaaaatctaaagagtctcaagtctttggtataaaatggcatcatatt

SEQ ID NO: 861951 - DNA, 120 bp, Artificial Sequence
  ENSG00000284977_134 (sequence is synthesized)
tccatataacctacaaacatcctcctatacactttaaattgttcctagatcagttaaaatacctaatacaagacctacacatcacttcattcatgtggattcaatggagtactcagtgct

SEQ ID NO: 861952 - DNA, 120 bp, Artificial Sequence
  ENSG00000284977_135 (sequence is synthesized)
tggcaaaatcaagttatgctttttggaacttcatgaatctttttctaaatatttttgatccgtgattggttgaactcacagatgcagaacttatggttatggaggactgacttgtatatg

SEQ ID NO: 861953 - DNA, 120 bp, Artificial Sequence
  ENSG00000284977_136 (sequence is synthesized)
cctttcttttaatatttcatttaaagatagaatggattaaaatacctttcaaactattgtaattattggcaatccgttgcttgagaaacaaattagatgtgattgacaatatagagtacg

SEQ ID NO: 861954 - DNA, 120 bp, Artificial Sequence
  ENSG00000284977_137 (sequence is synthesized)
tttttaaaaattcttatttcttaaaacaatttaaagtataattgatgtactataagttgtacaaacacagtttgttgtgcatatgtacttgtgatcccattgccacaataaagataatat

SEQ ID NO: 861955 - DNA, 120 bp, Artificial Sequence
  ENSG00000253992_0 (sequence is synthesized)
cttctcttctgaaagaataaaaatatgatgctacccagacaaggaaagaatcccaaattttgacgttaagacacccagaaccatgacctctgtgtccctcctgacagtccacctccctgt

SEQ ID NO: 861956 - DNA, 120 bp, Artificial Sequence
  ENSG00000253992_1 (sequence is synthesized)
ctcacatgggccagtcgatcaaatctggcaaagagctcgttgagcatcctgaccagctcctgagcagacaaggtcgtggagagccattttgccaccagggaaggaatatggaacaccacc

SEQ ID NO: 861957 - DNA, 120 bp, Artificial Sequence
  ENSG00000253992_2 (sequence is synthesized)
tatgattctctgcatggaccgtggctctgccttcacttctgctgacccctttgctcagaattcatgtatttgtgtttttcacttggctgacttcgtctcaaataaagccaagaagaatca

SEQ ID NO: 861958 - DNA, 120 bp, Artificial Sequence
  ENSG00000272791_0 (sequence is synthesized)
cgagctcctgtagtgccacctacttgggggtctgaagtgggaggatcacttgcacctgagaggtggagaccgcagtgagctaagattgcaccacttcactgcactccagtctgggcgaca

SEQ ID NO: 861959 - DNA, 120 bp, Artificial Sequence
  ENSG00000272791_1 (sequence is synthesized)
gagaccctatctcaaaaaaaaaaaaaaatgcttagagggggtatgaattctctggaatttgctcattagattataagtgaagatgaccagggtaaatgccatttgacccaaggtgcacta

SEQ ID NO: 861960 - DNA, 120 bp, Artificial Sequence
  ENSG00000272791_2 (sequence is synthesized)
actaaaatatgatccatctaatgcagattctggcaaacttaatctaaccattagcagctcatggagttgactgaattcagccagctctccttagaagttattttctcagatcttattgcc

SEQ ID NO: 861961 - DNA, 120 bp, Artificial Sequence
  ENSG00000272791_3 (sequence is synthesized)
aaaagaatattgttgcgcattcctatcgggctcttaagatttcttcccaaccatactgctttctaggtaccactgtagtgcccttgtaacccttagatcttttcttgctgtgttcaacac

SEQ ID NO: 861962 - DNA, 120 bp, Artificial Sequence
  ENSG00000272791_4 (sequence is synthesized)
agagcctggcatactataactgtagctggtttctcccatttccttctggattccacatggccccctattctatttcatccttttgggaatgtgtaatctttgacacttatattcctaaac

SEQ ID NO: 861963 - DNA, 120 bp, Artificial Sequence
  ENSG00000272791_5 (sequence is synthesized)
ccactttggtataatctggaaactttatggcatgctctagtctgtgacaatcaggataaccctgattataccagcttctaatcaactacataaagcgggtgaacaccagggtcaccaaca

SEQ ID NO: 861964 - DNA, 120 bp, Artificial Sequence
  ENSG00000272791_6 (sequence is synthesized)
cccatttcccaactgcggtgcacagcagctttttagctttgccaacatttgggccggcacatgtgtttgtgcgtgattatttgtctcatgtactattgaataaacgtctttgtaagtaac

SEQ ID NO: 861965 - DNA, 120 bp, Artificial Sequence
  ENSG00000277541_0 (sequence is synthesized)
gtttcaaaatatgaattttgggagtacacaaacgcatccactattgctaccccttcactttgagagtatctgccaaaccaagattactgaagctgcaattctcaagaacatggcctgctc

SEQ ID NO: 861966 - DNA, 120 bp, Artificial Sequence
  ENSG00000277541_1 (sequence is synthesized)
aaaattggaagagcagagaaggaactgccttgagttgggttgagaccccacaaactctgagatgacagcaaaggagccatggaaaacaaggaaactatcccactctccaagcccctgcca

SEQ ID NO: 861967 - DNA, 120 bp, Artificial Sequence
  ENSG00000277541_2 (sequence is synthesized)
gagaactttaactaaaaacagtctctttagaacaactactgacaataccaccctggactgaaaaccactgaccttcaggaaaactcagtaataaaattcctcaagttaaagtcccagaaa

SEQ ID NO: 861968 - DNA, 120 bp, Artificial Sequence
  ENSG00000237843_0 (sequence is synthesized)
gatcttcatataaggaatgacccagatgattatataaatctacatttaattttcattagaattatcctaggtagtgcttgaactttaaatcctgtagagtagaagcaaatctgtgtttgc

SEQ ID NO: 861969 - DNA, 120 bp, Artificial Sequence
  ENSG00000237843_1 (sequence is synthesized)
attatctggaagttgggagccacctgtttttcatgacggtctgacggttggaatgagaagctcactgacagcaccaggggcctcctagaactggcttccagtaattctatttctgcacca

SEQ ID NO: 861970 - DNA, 120 bp, Artificial Sequence
  ENSG00000237843_2 (sequence is synthesized)
cacaatactgtgtacttacgtcatataaaaatggcgtctcgggcctgaggtgagcttaggtgaccatgattttcattgggaggattgcctgaggacactaaggcaagccaatggaggcag

SEQ ID NO: 861971 - DNA, 120 bp, Artificial Sequence
  ENSG00000237843_3 (sequence is synthesized)
cagcagcagttagattattaatggactcctatattgaagtgttcacatttttgaaaggctaattacaatataattttaggtttaaaatattgctttgccaagggtagaagttgtgtcatg

SEQ ID NO: 861972 - DNA, 120 bp, Artificial Sequence
  ENSG00000237843_4 (sequence is synthesized)
tattattaagtggtactttactttttcagtcttgagggaaatatgggtttggttatggtaatctttaatatccagttatttccctcacttccccacttgacgcttctaactcctggaaaa

SEQ ID NO: 861973 - DNA, 120 bp, Artificial Sequence
  ENSG00000237843_5 (sequence is synthesized)
ggaaaatacgctccgtggctgtcaagtaccaaaaagttacactggagttatcttggattcttctgatttttttaaataaagaaagccaacctgcttataggttgagtaaactcagtttca

SEQ ID NO: 861974 - DNA, 120 bp, Artificial Sequence
  ENSG00000237845_0 (sequence is synthesized)
gacacaggagggtgagaaccgagtgtaagtgcatctgtgtgtgtgagtgcttctgtgtgtcagtgtttttgggtgagggtgtgtattagtacgtgtgtgaatatgtgagcttgtgtgagt

SEQ ID NO: 861975 - DNA, 120 bp, Artificial Sequence
  ENSG00000237845_1 (sequence is synthesized)
gtgtatgtcagtctgcttgggtatcatcacgatgcgtcacacacagcgtggcttaaaccacaggaatttattagtttacagtctggaggctggaaggccaagatcatggtattgaaatga

SEQ ID NO: 861976 - DNA, 120 bp, Artificial Sequence
  ENSG00000237845_2 (sequence is synthesized)
taagaaatctgactttcttctagcctcatcctgggtttgtgagtttatgaagaagctgaagagctccatcacttcccagctaaacatagctcttcagatctcagggtttaagatgatttc

SEQ ID NO: 861977 - DNA, 120 bp, Artificial Sequence
  ENSG00000237845_3 (sequence is synthesized)
tttgcctccattcaagcaaccccttgctccaagcatcgtgatgtgacagtgcagcgttcaccggcccaccccagctgatctgccctatggcacaagaataacaattggaaaaacttggct

SEQ ID NO: 861978 - DNA, 120 bp, Artificial Sequence
  ENSG00000237845_4 (sequence is synthesized)
tccctccgagagcaatgccagctttgcccaggccagccatctctggcataactctgttcatttgagctttcctcatgtgtgatcatccttgtatgaccccgaggccagaatccccactta

SEQ ID NO: 861979 - DNA, 120 bp, Artificial Sequence
  ENSG00000237845_5 (sequence is synthesized)
ttaaagctaggaaagacatttttgaggctctagttagtttgttctttcatagtgaaagaaccatttgtgggctcaaagggggatgtggcaataggttatttcgggctttcgaaaggcctg

SEQ ID NO: 861980 - DNA, 120 bp, Artificial Sequence
  ENSG00000272795_0 (sequence is synthesized)
tttctgtttggttgccgccctaacggccagaactaaagcaccttgcaaggaatgaagttggttcttgaagtccgtgctgactggctgggcgcatttgcgcatttgcttctctggctgcaa

SEQ ID NO: 861981 - DNA, 120 bp, Artificial Sequence
  ENSG00000272795_1 (sequence is synthesized)
gcccgcaacagcactcactaatttgttgctaacttcaggaactgtgcggacaggtctctgaggcttctgagccgcgctatgtccagtagatctgggcgcctcagaacctgtcacagccga

SEQ ID NO: 861982 - DNA, 120 bp, Artificial Sequence
  ENSG00000272795_2 (sequence is synthesized)
cggaagcgtttatctgagtttcttgtttcttcccaaccttttgattttcgcaccattacgcgctcaactatgcctcttcttttgtcctatggtctcaactaattaaaggaagaaaagcaa

SEQ ID NO: 861983 - DNA, 75 bp, Artificial Sequence
  ENSG00000277545_0 (sequence is synthesized)
aatgtatttatttattttttataacctcagctcactgcaacctccgcccccgggttcaagtgattctcctgtctc

SEQ ID NO: 861984 - DNA, 120 bp, Artificial Sequence
  ENSG00000277545_1 (sequence is synthesized)
ttattgatgtataatagttgtacgtagttgggggtccatgtgatattttgatgcctgcacaccaatgtgtgatgatgaagtcggggtaactgggatgtctgtcacctcaaacattgattc

SEQ ID NO: 861985 - DNA, 120 bp, Artificial Sequence
  ENSG00000277545_2 (sequence is synthesized)
tttgtgttgggaatattacagttcttcttgaaggctgcattttaaatctgtttcaaatgaattatctgtgtaactaatatctcaatatgtttcaaaatatgtgattaaattatttaaatg

SEQ ID NO: 861986 - DNA, 120 bp, Artificial Sequence
  ENSG00000272798_0 (sequence is synthesized)
gactctttttgactatgtgaactaaaacatgataagaagctgtcattttaacccccacagtgacagtttccccacaactgaattctaatcttaagtgatgcactccccagaatgttctgg

SEQ ID NO: 861987 - DNA, 120 bp, Artificial Sequence
  ENSG00000272798_1 (sequence is synthesized)
acaaggcctggtgccatccctgctgcagtccctggagggagagcagggggtctcctcggggccaccgtggagtctctggggcaagagggaggctgccggggggaggatgacaggtctgct

SEQ ID NO: 861988 - DNA, 120 bp, Artificial Sequence
  ENSG00000272798_2 (sequence is synthesized)
tgtggactggacacaattccttctaggctgccgggggaggatgacaggtctgctcacttgtggactggacacaattccttctaggctgccggggggaggatgacaggtctgctcacttgt

SEQ ID NO: 861989 - DNA, 120 bp, Artificial Sequence
  ENSG00000272798_3 (sequence is synthesized)
ggactggacacaattccttctaggctgccggggggaggatgacaggtctgctcacttgtggactggacacaattccttctaggctgccctctggatgtgaattccagatgcacaggtaat

SEQ ID NO: 861990 - DNA, 120 bp, Artificial Sequence
  ENSG00000272798_4 (sequence is synthesized)
gtagcagcagaaattcctctgagattatgtctgtgtatagttgtgttggtttgaaaagtgttttggtcatttgagtcttcatacttagtaaacaaacaaaaataaactggaaaaaaattc

SEQ ID NO: 861991 - DNA, 120 bp, Artificial Sequence
  ENSG00000243926_0 (sequence is synthesized)
gcgttcgttcgaggggaggcgcgcgagttctgtgcggtggacttatgctcccgcgagggggcgtgtcctttctcgcgtccgcagtgtccctgagggtccgcgtctacacgcggctgtgag

SEQ ID NO: 861992 - DNA, 120 bp, Artificial Sequence
  ENSG00000243926_1 (sequence is synthesized)
gaaggaaggcgcgtgccgcgtgggacgggctccacctgcctgcggacagatggagggtcactttgttccgagaagacccagacacccgagggaggatgtgaaacggaacgacccgtttcg

SEQ ID NO: 861993 - DNA, 120 bp, Artificial Sequence
  ENSG00000243926_2 (sequence is synthesized)
tgacaaaaatgaaggtgaatatgatgtggaaaatacaaagatggaagcaacaagctaaggatgctggggcagaaagatggaacctgggttactcatgacatcttgaaactgctgcagcca

SEQ ID NO: 861994 - DNA, 120 bp, Artificial Sequence
  ENSG00000243926_3 (sequence is synthesized)
tcctagactggctgcctctagacttaatatgtttagaaagtaaatcccaattttattaaactgttatctgttatgtatatatgaacacattcttagctaataaactatcatgtctcctaa

SEQ ID NO: 861995 - DNA, 120 bp, Artificial Sequence
  ENSG00000243926_4 (sequence is synthesized)
tattcattcagcaaatgtctgtcagagcgtctattacgtaccaggcatgtagcctgaacttcacgcctgtcctcatggagcttgcagagcacctctgaaatacacaccacatacggaatg

SEQ ID NO: 861996 - DNA, 120 bp, Artificial Sequence
  ENSG00000243926_5 (sequence is synthesized)
gccatattttctgggttgtaaaatactttgaattgtaactccatatattgaatagattttcagtagtgagggaagaaacaatacatttagttcatataatccatatgtacgaaaaagaag

SEQ ID NO: 861997 - DNA, 120 bp, Artificial Sequence
  ENSG00000243926_6 (sequence is synthesized)
gcttctccatatggctaatttaggcttcctcacagcatcataatcttaggattgcaagaggggacattccaaaaagacaagcctcaatgtgcaagcctttacttttatcatgcttactaa

SEQ ID NO: 861998 - DNA, 120 bp, Artificial Sequence
  ENSG00000243926_7 (sequence is synthesized)
tgtgtcactggccaaagcaagtctcatggccaagctcagcgtcagtgtggggaggaactacacaagattgtgaatattgggaggtgtgacatattggtagtcatttagactagggacaga

SEQ ID NO: 861999 - DNA, 120 bp, Artificial Sequence
  ENSG00000243926_8 (sequence is synthesized)
ccaccttaatccaatcaagagaataattaaaagttacttccagggtatagcccagttccaacttaaaatctttcctccttaggtcctgaactcaatatttttacccacccaatcccacac

SEQ ID NO: 862000 - DNA, 120 bp, Artificial Sequence
  ENSG00000243926_9 (sequence is synthesized)
cagttgaaaactctggctagtttctcagcctctctccattactgctttctgaatgttaattgcctcgaagggaaaagtggcaccaaattctggactcaaaatcttggatttaggcccctc

SEQ ID NO: 862001 - DNA, 120 bp, Artificial Sequence
  ENSG00000248049_0 (sequence is synthesized)
ttgcgactggcatccgcatccggcagatgtagatggaaccaaagtccagaagttacgcgtcacccttgctctacagccaaacatgcaggactctagtaacccgcgaaatgatgggatagc

SEQ ID NO: 862002 - DNA, 120 bp, Artificial Sequence
  ENSG00000248049_1 (sequence is synthesized)
gttgcaaatccttaaaagagtcttaacggagaagggaaaatgttacattgtcaaagtcccaaagcctttcagcctgaagccaggaacaattgttcaaagtttctttggaacatcaaggaa

SEQ ID NO: 862003 - DNA, 120 bp, Artificial Sequence
  ENSG00000248049_2 (sequence is synthesized)
ggaaatccagattttactttaagtgcaatggggagtcattaaggattttgtgtagatacagcaaaaagacaacaatcttcaagccacaatggccctcaccagaacccagccatgtggtca

SEQ ID NO: 862004 - DNA, 120 bp, Artificial Sequence
  ENSG00000248049_3 (sequence is synthesized)
aagccacaatggccctcaccagaacccagccatgtggtcagcctgatctcggacttcacagccagcagaactgtttgtcaaagatcagatggtttccttaagctgataagcaacttcaac

SEQ ID NO: 862005 - DNA, 65 bp, Artificial Sequence
  ENSG00000248049_4 (sequence is synthesized)
gttaaagttcatatggaaccagaaaagagcctgcactgccaagacaaccctaagcaaaaagaaca

SEQ ID NO: 862006 - DNA, 64 bp, Artificial Sequence
  ENSG00000248049_5 (sequence is synthesized)
gcatctacagtctatggtattttactatggaagcccaccctaagatttcaatttagcttccatg

SEQ ID NO: 862007 - DNA, 120 bp, Artificial Sequence
  ENSG00000248049_6 (sequence is synthesized)
ctatggaagcccaccctaagatttcaatttagcttccatgtagttccctggtgcttggcaatctcctgactcactaccttgtcacatggtctatcccaagtcagtccttctcctcttccc

SEQ ID NO: 862008 - DNA, 120 bp, Artificial Sequence
  ENSG00000248049_7 (sequence is synthesized)
atatccccctactccaatattcacccatatgtggccaagtcttcctccacctgagctccttgcagaggaatgaacaattgtttgaacattaatgaatattaaagtaagtaaagaagagac

SEQ ID NO: 862009 - DNA, 120 bp, Artificial Sequence
  ENSG00000248049_8 (sequence is synthesized)
aaatctccacttgttttgatagtagggtgatctttggtgagcttaggaaaagtttcaaccaagtagtcatagcatgatccaagttaacatgcattgagccaggcgtgatggttcatgcct

SEQ ID NO: 862010 - DNA, 72 bp, Artificial Sequence
  ENSG00000248049_9 (sequence is synthesized)
gtaatcccagcactttgggaggctcatgggggcagatcacttgatactaaaagtacaaaaattagccaggca

SEQ ID NO: 862011 - DNA, 120 bp, Artificial Sequence
  ENSG00000248049_10 (sequence is synthesized)
atccagctttggagaaacttctgaccagcaagtcagaagtttcaaagaaaacttctttggtttcaaagaaaaatcagctaggaaaagatactgaggagtctgtgaatagatggagtggag

SEQ ID NO: 862012 - DNA, 120 bp, Artificial Sequence
  ENSG00000248049_11 (sequence is synthesized)
tgagctagtagatggtgaaggcgctgctcacgaaagaaacagaggtggtgcccaggtcttcagaatctgagtgacgacactggacacaaactactcactgactggggagcagctgagaag

SEQ ID NO: 862013 - DNA, 120 bp, Artificial Sequence
  ENSG00000248049_12 (sequence is synthesized)
cctagcaaatcctggcttatcccccgagaatgttccagcaggaaagcttcctgctgactcaaaaggatttttcttcttctgaactcctattatgggaatggatgaaatcacttacagagc

SEQ ID NO: 862014 - DNA, 120 bp, Artificial Sequence
  ENSG00000248049_13 (sequence is synthesized)
cacagaaggaaacaaagcaaagccaggatcatgagttggattatctggaggcctaggccaatggggagttattgcttgcagtcactgatcaagcaaataaacttttccttctttcttatg

SEQ ID NO: 862015 - DNA, 120 bp, Artificial Sequence
  ENSG00000248049_14 (sequence is synthesized)
aaatttatttaagaagctgaaattacttaaatgataatgagttgtgagaaaagaattgtagtagatatttgttctctatccaaattgcactgagtggggaggtgtacccataccccagct

SEQ ID NO: 862016 - DNA, 120 bp, Artificial Sequence
  ENSG00000248049_15 (sequence is synthesized)
tcgagaattgactgataacagttcacacctgcacttctccagagaattgtccttgtctgacctgagcaccttgtttagtaatgtctggtaggctatgctccaccttccctgggcagatcc

SEQ ID NO: 862017 - DNA, 120 bp, Artificial Sequence
  ENSG00000248049_16 (sequence is synthesized)
actggtctaagacaaacaacccaaccctctaatttctgggaagaatcacctccgtgattaatctaagctccagatctcccagagaaatcatgctgaggctacatttgtgaaactacattt

SEQ ID NO: 862018 - DNA, 120 bp, Artificial Sequence
  ENSG00000248049_17 (sequence is synthesized)
ttatctagcttcttcctttgccctttcctgctgtcctcacttccttatgaatttttttctgaaagatcttgattaataaattatttaatcaagatcccccagtcataagttctgtgtttt

SEQ ID NO: 862019 - DNA, 120 bp, Artificial Sequence
  ENSG00000248049_18 (sequence is synthesized)
atattaaatttcaacaagaaagaagcattaaaggtcgcagagagcagaaaaaggaagaaagtaaccgtcactcggatctttccagacaaggttatctgatcatttcaaattgggaccact

SEQ ID NO: 862020 - DNA, 120 bp, Artificial Sequence
  ENSG00000248049_19 (sequence is synthesized)
taggaactttttctgtgttgtttctttaactttcatgcattgagttgtgtgagtacccaagagttcctacaaagaggcttgatggaagagacttaataatgtttacagaatgtaccaaga

SEQ ID NO: 862021 - DNA, 120 bp, Artificial Sequence
  ENSG00000248049_20 (sequence is synthesized)
ggtccatcagggtgggtcagtttggaaaatacagaagaaaactcacattaatagaaagttcaaatacctatgtagtaggaaggagactgagtgaaaaacacatgcaagagattagttttg

SEQ ID NO: 862022 - DNA, 120 bp, Artificial Sequence
  ENSG00000248049_21 (sequence is synthesized)
aatagtgaaagaaacttgtttatcccaagcccagagggtgagaatgagtacaaacataaatgtatcaaggagaaaggaaattaaaggacttctcatatgattgcttccattttttctctg

SEQ ID NO: 862023 - DNA, 120 bp, Artificial Sequence
  ENSG00000248049_22 (sequence is synthesized)
gtgttaaggacccacatgtgattatgtaactccagtttacaagaaggcatgatttcttctagctgttctcagcagcttgcatataacagcaaatacagttgatagatcgttctgtggttg

SEQ ID NO: 862024 - DNA, 120 bp, Artificial Sequence
  ENSG00000248049_23 (sequence is synthesized)
atgattatttgaatgggtgtcgggtaagtcaaggatgaagtcaccgagagtgctgtcaatagagtggctgaaataataaaacaagggtcctaggctgtttaaggttaggagagagtcatg

SEQ ID NO: 862025 - DNA, 120 bp, Artificial Sequence
  ENSG00000248049_24 (sequence is synthesized)
agggtggggggttgatggactgagaagaaattaagaggaacagagttttaagctcttcatgatactgaagaatgggtttagtgggacagttgcaaagctagaaatttgtaattagagatg

SEQ ID NO: 862026 - DNA, 120 bp, Artificial Sequence
  ENSG00000248049_25 (sequence is synthesized)
atgattatgtattgcaaatacttgtttgcatgtctgctagctcctagagtacaggaatatgctgtgttcattttaacttccctgaacatagcaccgtatctggcacataggtagtagtca

SEQ ID NO: 862027 - DNA, 120 bp, Artificial Sequence
  ENSG00000248049_26 (sequence is synthesized)
ataaataatcactacatgaaagattgcatgaataaaataaaggttttcttggatttatcactgattctacctgcttagaaacttttgttagctctgggactattgttcataaacagcaac

SEQ ID NO: 862028 - DNA, 120 bp, Artificial Sequence
  ENSG00000248049_27 (sequence is synthesized)
aattgttaaaagcacattaagcataaggaaaaacatcttagtgtagagttcagagcataggccctagagcccaatttcctgcgtttaaatctcagttcttttgccgcttaatagctctgt

SEQ ID NO: 862029 - DNA, 120 bp, Artificial Sequence
  ENSG00000248049_28 (sequence is synthesized)
gagtttagacaaattacttgatctttttgtctcaatttcctcatctagaaatagggcttacaatagcacaaatatactgcagaggactgaggtaactataataaattaatatttgtaaag

SEQ ID NO: 862030 - DNA, 120 bp, Artificial Sequence
  ENSG00000248049_29 (sequence is synthesized)
tgctgaaaacagtgcttggcacatgggaatactatataagagttgttaaatcaataaaatatttaggatgttggaatcacattgtgaaagctccatgattgttaattttgctattagaca

SEQ ID NO: 862031 - DNA, 120 bp, Artificial Sequence
  ENSG00000248049_30 (sequence is synthesized)
cagctgaatgtttctcagtgaaatgacaatcatactaaagtcaccagtaaaccatctcatctcttcattgcttattctaaattgagtttctttcccactcctgctcacagctttatacag

SEQ ID NO: 862032 - DNA, 120 bp, Artificial Sequence
  ENSG00000248049_31 (sequence is synthesized)
caaggtaatttagcactttaggactttaatgagacctatttgatatcattgtaattctaattagatactttggctaggaaacatacttaagcctttaaaaattgtcaatcccttgagaaa

SEQ ID NO: 862033 - DNA, 120 bp, Artificial Sequence
  ENSG00000248049_32 (sequence is synthesized)
actgaactgattatttggaaatttaaaactacaagaataaagttcttgaaattagaataaacagacttacctggcaggcatccacacgtggctccaggaacccggcacacaacattccag

SEQ ID NO: 862034 - DNA, 120 bp, Artificial Sequence
  ENSG00000248049_33 (sequence is synthesized)
atgtgatgactctgccatctgcctccccattgttgcaggtcctattatctataatcttcactaatcccttgtggagtacattagaagttgttcgtaaaggaagaaaattgtataattttt

SEQ ID NO: 862035 - DNA, 120 bp, Artificial Sequence
  ENSG00000248049_34 (sequence is synthesized)
attgatgtcactattaatctttctggctaggctattagtatctaactttaacactatgtacaatttctaaatcaaatcagtgtaaagtataattaagcttttagctgtagtaacaaaaaa

SEQ ID NO: 862036 - DNA, 120 bp, Artificial Sequence
  ENSG00000248049_35 (sequence is synthesized)
gcaagtaatgtttataaacataccaagctgttgctgaaaaatgaccatttttagaaatatttagtgtgtacatctatatgtaataagattttttcttttgaattgttttgaaattttata

SEQ ID NO: 862037 - DNA, 120 bp, Artificial Sequence
  ENSG00000248049_36 (sequence is synthesized)
atcgagttcattgtctcctaaaccttgccatggaggcctgtggcacctgagccagccattatcatcaccagcacttccatgagctacaagctggacccactgcagtcctcctgacacact

SEQ ID NO: 862038 - DNA, 120 bp, Artificial Sequence
  ENSG00000248049_37 (sequence is synthesized)
gaaatcagagcctgcacacagagcagcagatgcttcaatgtaaaggtcatttccagctatgtgttccaagattactgaagcaggattctggccttcctgataagaacatgaccagatcca

SEQ ID NO: 862039 - DNA, 120 bp, Artificial Sequence
  ENSG00000248049_38 (sequence is synthesized)
gctggtttgcaacaagatgaacttcagtgctgagctttcaccaagtttttctcactacaatctcattgtaatactaaaatctccacccaagatggaggttatctgccattttctgtacat

SEQ ID NO: 862040 - DNA, 120 bp, Artificial Sequence
  ENSG00000248049_39 (sequence is synthesized)
atctgccattttctgtacatgtgttaccagaaaggggtcctgatccagaccccaaaagagggttcttggatctcacgcaacaaagagttcggggcgagtccatagagtaaagtgaaagca

SEQ ID NO: 862041 - DNA, 120 bp, Artificial Sequence
  ENSG00000248049_40 (sequence is synthesized)
aagaatgcctactccataggcagagcagtggctttggctgctcagctgcttgtacttgttacttcttgagtatatgctaaacaagggattgattactccttgtttagcagttttctggga

SEQ ID NO: 862042 - DNA, 67 bp, Artificial Sequence
  ENSG00000248049_41 (sequence is synthesized)
acaagggattgattactccttgtttagcagttttctgggaaaggaacttcctgatgttgccatggca

SEQ ID NO: 862043 - DNA, 90 bp, Artificial Sequence
  ENSG00000248049_42 (sequence is synthesized)
ttgttttttggccggcttctttaccacttctttttatcagcaaggtctttgtgacctgtacttagtgccgacttcctgtctcatcctgtg

SEQ ID NO: 862044 - DNA, 120 bp, Artificial Sequence
  ENSG00000248049_43 (sequence is synthesized)
gtgacctgtacttagtgccgacttcctgtctcatcctgtgagtaagaatgcctaatctctcaggaatgcagcccagtaggtctcaaccttattttacccagcccccattcaagatggagt

SEQ ID NO: 862045 - DNA, 120 bp, Artificial Sequence
  ENSG00000248049_44 (sequence is synthesized)
gactctggttcaaatgcctctgacacatgtgcctcatgtttgggcatgagacctcactgtgtaggtgcagagaagaccctgcctaaacattgcctacacgttgctcctttttcctgcctc

SEQ ID NO: 862046 - DNA, 120 bp, Artificial Sequence
  ENSG00000248049_45 (sequence is synthesized)
aacttccttaaaatgacaagagcagagcccttttgggagctaacatcaggactccttttctgtactctgctccgttgtgctgctagagccacaagcctattaaactttgcctgaaataaa

SEQ ID NO: 862047 - DNA, 120 bp, Artificial Sequence
  ENSG00000248049_46 (sequence is synthesized)
gtcacccttgctctacagccaaacatgcaggactctagtaacccgcgaaatgatgggatagcgttgcaaatccttaaaagagtcttaacggcctatatgacaattgcctcaggttgcccg

SEQ ID NO: 862048 - DNA, 120 bp, Artificial Sequence
  ENSG00000248049_47 (sequence is synthesized)
agatccatggcaataaccttcaggttgaggctagagggcttcagatgggcagcttcgaatgacaggagcaaggcacaagaggccggaaagggagggtgacattttcagcatctataagat

SEQ ID NO: 862049 - DNA, 120 bp, Artificial Sequence
  ENSG00000248049_48 (sequence is synthesized)
caactttagaaacatttgggggttgacaaattcccatcaagctctgtggatcttgtacaactgctcaccaccggcttctcatcagcacatgattggtgcagggttctgaggatgattttg

SEQ ID NO: 862050 - DNA, 120 bp, Artificial Sequence
  ENSG00000248049_49 (sequence is synthesized)
agatgttccctgatgtggtcttgtgaggagatttcatgacagatggcaggaagcttcgtggagagatttctgaagacactcctgagctcccaacaccgggcaactctcttccagaggata

SEQ ID NO: 862051 - DNA, 120 bp, Artificial Sequence
  ENSG00000248049_50 (sequence is synthesized)
ctgagagacattttacaaaatgactggtctgcactctccaaaaatgtcaatatcatgaaacacaaagaaagactgagaaatggttccagctaaaagaatactaaagaggtatgcaactga

SEQ ID NO: 862052 - DNA, 120 bp, Artificial Sequence
  ENSG00000248049_51 (sequence is synthesized)
atccaccacataatcttggattttcttttgttaaaagggcaaaaattaaaccgggataacttatgagctctgaatagaacatataaattaaatagtggtattgtatcaatgttaaatttc

SEQ ID NO: 862053 - DNA, 120 bp, Artificial Sequence
  ENSG00000248049_52 (sequence is synthesized)
ttattttgacaatcattactgtggctgtgtgtgagaggccttaaacacacattgaagtattgaggggtaaagaaaaatcatgtctacagcttacttttaagcaattgggaaaaagtagat

SEQ ID NO: 862054 - DNA, 120 bp, Artificial Sequence
  ENSG00000248049_53 (sequence is synthesized)
aagataaaataaataagcaaatgtaaaatattaatatttgagaaaatctgggtgaaggtatccagaaatatgtatgattcttgtaaccattctctgagtgtcaaattatttttaaaaagc

SEQ ID NO: 862055 - DNA, 120 bp, Artificial Sequence
  ENSG00000248049_54 (sequence is synthesized)
ctttatcctacaacttttaaaaacacaaactgaatcaacaattaagaaaatgttgcaagtaattttcaaaaataaattctagtggacatttattcattattcctctattcattaaacact

SEQ ID NO: 862056 - DNA, 120 bp, Artificial Sequence
  ENSG00000248049_55 (sequence is synthesized)
tcttacctacttatttataagcttttcccctgagaagtttcattttactgtgaaacattattaaaatgaaatgatgagagtttaagcatttttaaattgatagcaagtaaattcaaacaa

SEQ ID NO: 862057 - DNA, 120 bp, Artificial Sequence
  ENSG00000248049_56 (sequence is synthesized)
aagtgttacaatattttttattttaagcaaatgagggattccatttttttaaagtttttgattgaattagaaaattttaattacaatattaagaaacatgattcttttctaccctaccaa

SEQ ID NO: 862058 - DNA, 120 bp, Artificial Sequence
  ENSG00000248049_57 (sequence is synthesized)
caaaaaacactattaaatattttaaaaatacttcatttttttttaaaaggcatactccactcccactcccatcacctcaaaagggaaagaaaccttggccctgttaaataagttaaaaag

SEQ ID NO: 862059 - DNA, 120 bp, Artificial Sequence
  ENSG00000248049_58 (sequence is synthesized)
ttgattttcagtttcagagcttttttcattttcaaggggaaaaaatgattttaaattcatccactagagggcgtctaataattttactatcactccagtcaagaaaccccaacaagtgca

SEQ ID NO: 862060 - DNA, 120 bp, Artificial Sequence
  ENSG00000248049_59 (sequence is synthesized)
ttcagctaattttatcttatgattcagacttttttcccacattacaaagtgagacttttagttttctgtaattctttgcaacctgaccttatttaaagttcagctttgaattagatccaa

SEQ ID NO: 862061 - DNA, 120 bp, Artificial Sequence
  ENSG00000248049_60 (sequence is synthesized)
cagaggctgtgagttaaagtctttggaaggcttacttcacgtagaacctgagaatcttatatttctttaaggttttagctacttccctctgcaccatcccagctggacttggaaccatat

SEQ ID NO: 862062 - DNA, 120 bp, Artificial Sequence
  ENSG00000248049_61 (sequence is synthesized)
gacctgagttttactttctgctctgccctgggccacattttcgtcttaatatttcatgttttaaaggcataatgatgtcactgactggctgatgaaatcccaagcgtaggtagtatgcta

SEQ ID NO: 862063 - DNA, 120 bp, Artificial Sequence
  ENSG00000248049_62 (sequence is synthesized)
catgaggggtgagttttttgctaacaccacaaaggtctctggcccaatgagtggagtttgataggagttcttgtgacaagtctaatgttattgcatgccagttttgaggagagatgaaaa

SEQ ID NO: 862064 - DNA, 120 bp, Artificial Sequence
  ENSG00000248049_63 (sequence is synthesized)
catttgaaaagcagtgtgttttttttctacgtttgtctgtatttcttactcaggcctctcaggcattacttggcctttctgttttcacaccaacttggtgagttctactataagattcta

SEQ ID NO: 862065 - DNA, 120 bp, Artificial Sequence
  ENSG00000248049_64 (sequence is synthesized)
gcgtggttcaaattggttcatttgtaactggaaaaaatttataattaaaaaaataaaatatgtttaaaaaagccataatgatgaaactttcaattagcaatgactttgaaacatagtact

SEQ ID NO: 862066 - DNA, 120 bp, Artificial Sequence
  ENSG00000248049_65 (sequence is synthesized)
atgattgagttaatggctatcttatttaacacatgcttattttttaagcaactctttggtaaaataaactatagctggcattctctgtcataaaagataaagcagttatatccttcaatc

SEQ ID NO: 862067 - DNA, 120 bp, Artificial Sequence
  ENSG00000248049_66 (sequence is synthesized)
agggaatttaatatttggtagtgcagatttaaaatgtatgtgacccaggtaatacaagatagaccaataaattttaagaaaggtataataaagtgtacacaaattcagaatcttacttgc

SEQ ID NO: 862068 - DNA, 120 bp, Artificial Sequence
  ENSG00000248049_67 (sequence is synthesized)
ccataaattaacttgctattgtcttagttccgtttattttgtgctccaaggccatgttcatttgaatgatttatgtagagatccactttgcttttagttgttcatttgtccttggattat

SEQ ID NO: 862069 - DNA, 120 bp, Artificial Sequence
  ENSG00000248049_68 (sequence is synthesized)
atttctttaattttggtatatttctcctctcttgcccctggccctggttcttatcagtgtttgctttattttgccataaacaagaacattctgtttttgtttttcacagtcaattgcagt

SEQ ID NO: 862070 - DNA, 120 bp, Artificial Sequence
  ENSG00000248049_69 (sequence is synthesized)
tgttcatttcttcttagaatattatctttaacactcaccttacccacactaattacacccttacctagtgttgtccacaggtaattatcttcagatgtgtgcttcagtttcctcatctac

SEQ ID NO: 862071 - DNA, 120 bp, Artificial Sequence
  ENSG00000248049_70 (sequence is synthesized)
atacatggagaaaatagtaatatctacctctaaggcctatcatgacaataaatgagttaatacatgcaaagcacctggaatagtgcctggaacacagcactttataaatctttaccatta

SEQ ID NO: 862072 - DNA, 120 bp, Artificial Sequence
  ENSG00000248049_71 (sequence is synthesized)
ttataattaaaacttgaggcacacaatttttatatgtatccatatgcgtttatatgtttataaatgtgtatcatatatatttttttcttgatgtgttttaagcatcagttttcacttcaa

SEQ ID NO: 862073 - DNA, 120 bp, Artificial Sequence
  ENSG00000248049_72 (sequence is synthesized)
gctttttctgcctttttcttccccagcctcctacaggtaaaaaggaaatagacaatattgcagtgttcactgggcagagttgggtagagtgtagtagttaaaagagctggctgcacccat

SEQ ID NO: 862074 - DNA, 120 bp, Artificial Sequence
  ENSG00000248049_73 (sequence is synthesized)
ctgactgttaaaaaaaaaagagctggctatggatatggccatatatagataactaaatatactgatatactgagatttccacttagtaaacagtaattttgggcatgttatataatattg

SEQ ID NO: 862075 - DNA, 120 bp, Artificial Sequence
  ENSG00000248049_74 (sequence is synthesized)
gaggtttagtttcttcatgtgtaaaataaagataatgattgtgcataatttatgtgattgttggaagcattatatgaaatattgcatgtaaaagcttatttatttaatatttattcactg

SEQ ID NO: 862076 - DNA, 120 bp, Artificial Sequence
  ENSG00000248049_75 (sequence is synthesized)
cctgttctgtgaacctagcatgtaaaagcttttagccaaattcctggcacatatttatgtcttcaagcattatttatcatcatcaacattattgctattgttatttctgctagtagcaca

SEQ ID NO: 862077 - DNA, 120 bp, Artificial Sequence
  ENSG00000248049_76 (sequence is synthesized)
gtactatgttgtagcacaatgttaggcatattgtacctgtgtgataatatttattgaatttaaaccgttggccaatgtcagtagtgcattctacaccagtaaattctctgtgtgttaagg

SEQ ID NO: 862078 - DNA, 120 bp, Artificial Sequence
  ENSG00000248049_77 (sequence is synthesized)
caagcctccacacatcttcagacaacatatctttacactaaggactaaggagtggcccacatttcttgccggcaggcctgggttaaccatagaatttaaaagctgtcaatatgtaatact

SEQ ID NO: 862079 - DNA, 120 bp, Artificial Sequence
  ENSG00000248049_78 (sequence is synthesized)
ctgtattagtacagataaactagtgataagcttaacacagataagctatgaactctttctgcaaataacctgctactctggaattcttgtggtattaaatgactcttattagaaaccatg

SEQ ID NO: 862080 - DNA, 120 bp, Artificial Sequence
  ENSG00000248049_79 (sequence is synthesized)
gggggcgggcctggggaagctaggagcccggcagcgccttcccgtcaaccctaggggcgtcctggtttccggtttgggtgtggccgcatggcgtgctgtggtgcaggtggccgaaggggg

SEQ ID NO: 862081 - DNA, 120 bp, Artificial Sequence
  ENSG00000248049_80 (sequence is synthesized)
cttacagttagacaccagttttcggcagatgaaatccctctgatttcaggcattttgtcaattaagctgctcagcaacaataggataaacttatgaaaagaaaggagtagcagtcccaca

SEQ ID NO: 862082 - DNA, 120 bp, Artificial Sequence
  ENSG00000248049_81 (sequence is synthesized)
gacaaagcatccagcccctgcactgagacagtatagggaagggacttggtcctggcagacaggacagataatcaacatcctagtgggccttacacatgtgggcatattcttttccatacc

SEQ ID NO: 862083 - DNA, 120 bp, Artificial Sequence
  ENSG00000248049_82 (sequence is synthesized)
ttcttgtctgttttaacaagctaaccccagtcacagtagcagagagagggtccatcctaacttagctgaccaggctggattcctaatcataaaaccaaaaaaggaagaacctaaccattt

SEQ ID NO: 862084 - DNA, 120 bp, Artificial Sequence
  ENSG00000248049_83 (sequence is synthesized)
cttgtcagacttgagggatatcatcaatgagcctctgagctaatggtgtaaaccaaaaataaaattctaagccccccgccagccaaaccatctgaatggacttcctcctcagccagggtg

SEQ ID NO: 862085 - DNA, 120 bp, Artificial Sequence
  ENSG00000248049_84 (sequence is synthesized)
ctcttaaaatttaacctgagagactggttcaggtcatgatgggaagtaggggttggacatgcctcattatacctctccagcattaacatcaacataaaccctaagtctaagaaattttta

SEQ ID NO: 862086 - DNA, 120 bp, Artificial Sequence
  ENSG00000248049_85 (sequence is synthesized)
caacctattctctctgaagctgactaccttggaggcttcatctgtttcataaaattttggtctccacaacctcttacttcaacccagatatttcctttctattgatcccaggtctttaga

SEQ ID NO: 862087 - DNA, 120 bp, Artificial Sequence
  ENSG00000248049_86 (sequence is synthesized)
taaacttaaccaattgtcaaccaaaaaatttttaaatctgcctataaactggaagctccgcactccgctcccctcccctccccgcccttcgagttgtcctgcctttctggacagaaccaa

SEQ ID NO: 862088 - DNA, 120 bp, Artificial Sequence
  ENSG00000248049_87 (sequence is synthesized)
tctcatgtctccctaaaatgtataaaacccagctgctccctgaccaccttgggtacatgttttcagggtctcctgagggctgtgtcatgggttatagtcactcaaatttggcttagaata

SEQ ID NO: 862089 - DNA, 120 bp, Artificial Sequence
  ENSG00000248049_88 (sequence is synthesized)
gtcactcaaatttggcttagaataaatctctccaaatattttacaaagtttgactcttttcttcgataacggaaacacatgatgcctagatagggagtgaactaagtgtctcctaaggtc

SEQ ID NO: 862090 - DNA, 120 bp, Artificial Sequence
  ENSG00000248049_89 (sequence is synthesized)
actgccaggtgggacagctgcagagtgtcctgcacagcaccttgcagacctcccatggctgcctgctctgtagggcctcaggagggctgcatggcatgctgcaggcctaggcccagcagg

SEQ ID NO: 862091 - DNA, 120 bp, Artificial Sequence
  ENSG00000248049_90 (sequence is synthesized)
tgtgcagccagagtgctgcactctctgctggtgacaaagaagaaattacttaggccaatagtaagggtatgggagtcctcagtaaggcttttcttttaacgaaaagcagccgcaaatcat

SEQ ID NO: 862092 - DNA, 120 bp, Artificial Sequence
  ENSG00000248049_91 (sequence is synthesized)
tttctaacaaagggcagcctgtaaagttgaactgcagacacagacaagcaagttgggagcttgcaggggtgaatgctggcaggaactagggactagatacgttcaagatggcggttccat

SEQ ID NO: 862093 - DNA, 120 bp, Artificial Sequence
  ENSG00000248049_92 (sequence is synthesized)
cttcccttctctgccagccagtgtacagtaaggaacagacaagatggcgctgggatcaactggaaagtccatttgcataataagattagggtggggaaaccagcctttctcactcgcaat

SEQ ID NO: 862094 - DNA, 80 bp, Artificial Sequence
  ENSG00000248049_93 (sequence is synthesized)
gtaaaagtcatacctgatcctcaaacctgactgaaaaatcaggtgcgttggccaaccagccagccctttcagctcagaga

SEQ ID NO: 862095 - DNA, 120 bp, Artificial Sequence
  ENSG00000248049_94 (sequence is synthesized)
caactgtttgaaaattaacctgagaagtaatggcaagccctcctgctatcaccccccttgagcccacctgtcctacagaggtgtccatgccagctgactccaccaagactgaccctctgc

SEQ ID NO: 862096 - DNA, 120 bp, Artificial Sequence
  ENSG00000248049_95 (sequence is synthesized)
gttccagcagaggaaaagaagtgcagaaaggaagaactgggaagtgatgttggcccaggcagattctaaccctctaagttccacagtctacaagcaagagtgcattaaggcccacataga

SEQ ID NO: 862097 - DNA, 120 bp, Artificial Sequence
  ENSG00000248049_96 (sequence is synthesized)
gttccttgtactgtattctgaaccaagatctggaagccctccaacattttcaaaacagaactgcttattaatatagagaaaaagaagcagcatcaggataataaacacccaaacagctga

SEQ ID NO: 862098 - DNA, 120 bp, Artificial Sequence
  ENSG00000248049_97 (sequence is synthesized)
agatacttttctaaaacagccagaacaggaatgctgctggaagagcaagaatgaaaatcatcacataaatttgggccatcctggtgatgtcaggatccacttaagagcaggaagatgctg

SEQ ID NO: 862099 - DNA, 120 bp, Artificial Sequence
  ENSG00000248049_98 (sequence is synthesized)
attgagttcttctccagagctgttgagacctaaataaatccagcctatcatctttcttctcatgctgcttttgttatacacagacagcatgagtgtcacatgagaaagctgaaatagggt

SEQ ID NO: 862100 - DNA, 120 bp, Artificial Sequence
  ENSG00000248049_99 (sequence is synthesized)
cactttgaaaacaaaagtttccttgtatactggatttggccgccctctgcggatggatatcttgcatttggacatctcttgatccgtggatttccgtagagttaacttaacatatgtatt

SEQ ID NO: 862101 - DNA, 120 bp, Artificial Sequence
  ENSG00000248049_100 (sequence is synthesized)
gggtggtctgtttgctgcccaattttttaagtggctgccttttatcacttctgctgatagtctcccatttgtggcattataaagcaggctaatgagaatttctggaactgacccgtcttc

SEQ ID NO: 862102 - DNA, 120 bp, Artificial Sequence
  ENSG00000248049_101 (sequence is synthesized)
tactagataatgctccgctatgcatctatttcaatgtctattctttggaagttctgtcatcacacatccccaagttttagataaggtttttagctaacagccaggaaaagattcaataaa

SEQ ID NO: 862103 - DNA, 120 bp, Artificial Sequence
  ENSG00000227676_0 (sequence is synthesized)
cagagagacacacctcttgcttgttcaggttccagattctgaattcgaccttctcttaactccgcagaatgcagttgagatgcatagaaaaagtctgggactacttacacctatttgcta

SEQ ID NO: 862104 - DNA, 120 bp, Artificial Sequence
  ENSG00000227676_1 (sequence is synthesized)
gcatgtctttgaagaatgttactagagagaagcaggtacaaccttgtgattattatgctttgaacttgatgctgtgctgaacacataaaaagagccctcatgatgagagattggaaggag

SEQ ID NO: 862105 - DNA, 120 bp, Artificial Sequence
  ENSG00000227676_2 (sequence is synthesized)
cattcatcagcattcacacatctgcagaaggggtatgagggagaaatgacttcattaattattgtgtcaccaagtttttcttctcttgattcctaagaagaagaaacagagattacatgt

SEQ ID NO: 862106 - DNA, 120 bp, Artificial Sequence
  ENSG00000227676_3 (sequence is synthesized)
gtttacttaagggtaagcactaactgaatgcttactgagtggctagatgaatatctaaaaaaaaaaatggtttctgtaggcgttggattctgctcaatgcttatgcccacccagaatgct

SEQ ID NO: 862107 - DNA, 120 bp, Artificial Sequence
  ENSG00000227676_4 (sequence is synthesized)
ctataaaaccttcactgttgttctcaggatcagccttcctgaattcatcctataaacttttaatgagtgacctgtttgtaaaactcccttccagattggcaaatacaagttgatagagaa

SEQ ID NO: 862108 - DNA, 120 bp, Artificial Sequence
  ENSG00000227676_5 (sequence is synthesized)
tttttctagaaatatctggaaaacaaagcaagagaagtagaagtatttgtagcttttactggagaagatttttgtatttttctaagtagatatgttagttgcccatgttagtaaaatttt

SEQ ID NO: 862109 - DNA, 120 bp, Artificial Sequence
  ENSG00000227676_6 (sequence is synthesized)
tttttacacagagttttgggtaaattttgaacattttttaaaatagaaaaagatgacattcttaagaaaaaaaagcactactaactccttattttacatccccccatcccctaggtctgg

SEQ ID NO: 862110 - DNA, 120 bp, Artificial Sequence
  ENSG00000271265_0 (sequence is synthesized)
ccacccacagggtgctccccacgccctcatgtttagccagaggattacccattattttgttaaacattcctttttggttacaaaagacttttttttttactgtatggaaatattaatatt

SEQ ID NO: 862111 - DNA, 120 bp, Artificial Sequence
  ENSG00000271265_1 (sequence is synthesized)
tagtttaagaattccacagttctgttctttttgcctcatcgtagcccatcatactctgtttgctttcagattagtccccttttactgttctacttatttattcgatgactgaaactatca

SEQ ID NO: 862112 - DNA, 120 bp, Artificial Sequence
  ENSG00000271265_2 (sequence is synthesized)
cgattcactgcccatcatatttctaactattctttatgtaatttggaagcaatttagaataaagccctgtcaaggttttacaaataagaactattaaagaataaagctttggatacttgc

SEQ ID NO: 862113 - DNA, 120 bp, Artificial Sequence
  ENSG00000272279_0 (sequence is synthesized)
gcaaagccaacaccactattggagagaaagtggagaatgtgtattagaagtactagtctttgaaggcaaaacagctgtatagagtgagcttaagtgctggatccctgtggttaggaaggg

SEQ ID NO: 862114 - DNA, 120 bp, Artificial Sequence
  ENSG00000272279_1 (sequence is synthesized)
acactaagcctccgggatgtgagagtcccatggaaggcagtaggcccaggataaagcaggtgtcagctcagaaagcccaccatcacccagaaaagggaagaaatacgctaccaccatcac

SEQ ID NO: 862115 - DNA, 120 bp, Artificial Sequence
  ENSG00000272279_2 (sequence is synthesized)
gctagggaggtctccattgtaatttgtatggggaggttaacctataggccattctgatgatcccagctccctttcactacaacccccgtctgcatcctttgctttgcagtaggatttgag

SEQ ID NO: 862116 - DNA, 120 bp, Artificial Sequence
  ENSG00000272279_3 (sequence is synthesized)
agaggaaggatgaagatgtagccacaggatacatttaaacaggcacagagtttgaggggtgggggggaacaaaagcaaaacaataaaaccttcaccagtcattaaagaaatgaaaatgaa

SEQ ID NO: 862117 - DNA, 120 bp, Artificial Sequence
  ENSG00000272277_0 (sequence is synthesized)
cggccgccccggcctccacgcaagcacccgagcgttactttcgtttccgcggcaaacgtctggaggcccgggtgagggaagaagcggcggcggagggttggggattactccgacgccgcg

SEQ ID NO: 862118 - DNA, 120 bp, Artificial Sequence
  ENSG00000272277_1 (sequence is synthesized)
ccttgcccgggcgtgctgggggagggcgcgcgaaccccgaccaggggggtcaccgggactgagcccggcggcctccggaatgttccccgcgcggtgccagtccgctcaccgcgcccttct

SEQ ID NO: 862119 - DNA, 120 bp, Artificial Sequence
  ENSG00000272277_2 (sequence is synthesized)
ctcaccgcgcccttctccgtggccgcgccgtccagccaagtcctgccgcgctccgtcggccccgcccggatggccgcgctctggcgccccagctgtgggtcccctggagtcgccgcgctc

SEQ ID NO: 862120 - DNA, 120 bp, Artificial Sequence
  ENSG00000272277_3 (sequence is synthesized)
cggctggagggcgtggactgttcgcgctgcctcctccccctgccccggcccttgccggggaggaggaccgcgagagcgccgccccgccgctcgtgggacctcgcgcccggggtctgagtc

SEQ ID NO: 862121 - DNA, 120 bp, Artificial Sequence
  ENSG00000272277_4 (sequence is synthesized)
ggggtctgagtcccggagctctcttgcgggctagaggatcgcggactttgttttcaagcgagtggggcggcctacgtaaaagaggaaaccgaaacctccgcgcgcacgagagggagaagg

SEQ ID NO: 862122 - DNA, 120 bp, Artificial Sequence
  ENSG00000272277_5 (sequence is synthesized)
gtctggagggaagcactgggtggattacagcgggggcgctatccggaggattcagagctctgcgggttagcataggcaagttagcattcctctaccttcatctgtaaagtggggctgttg

SEQ ID NO: 862123 - DNA, 120 bp, Artificial Sequence
  ENSG00000272277_6 (sequence is synthesized)
aggaggaaatgtgattattttgcagccctttaaaatggtaattgtgaagtctcgagcaaagttggaactgcatgctattcatgtatattaaaaatcaaataataaaattatatgcacatc

SEQ ID NO: 862124 - DNA, 120 bp, Artificial Sequence
  ENSG00000272274_0 (sequence is synthesized)
gagattgccatctaccagggtattctctcccacctctttcccaccccaggtcatcaccagtgaaagttctgacacttgcacttctccggcaagccagggccggggcttcactgccagcca

SEQ ID NO: 862125 - DNA, 120 bp, Artificial Sequence
  ENSG00000272274_1 (sequence is synthesized)
gcaggaggatgagccagctctgcagttccacttcagagtccatcttcttggatcactcttggcaccaactgtattgagttgagttctgggaaatagacttgcaggtcatacgaaaacaag

SEQ ID NO: 862126 - DNA, 120 bp, Artificial Sequence
  ENSG00000272274_2 (sequence is synthesized)
tataataatgtattttgcctataggtgccaagacctgcattgtttcctttcagatacttttctttattgtatttgggaacaaaccagctatagcatgaggaagggatgtcaggtggagat

SEQ ID NO: 862127 - DNA, 120 bp, Artificial Sequence
  ENSG00000272274_3 (sequence is synthesized)
agaagagaagaaaactggatgtgccaacactgtcatacacagggattttcagcagtttcatgaagctactggaagatcttttctttgcttgcctataaacccatgccatccagttctctc

SEQ ID NO: 862128 - DNA, 120 bp, Artificial Sequence
  ENSG00000272274_4 (sequence is synthesized)
agtcatagtgagctattcctggaaaagcccttgcatcaatcagtgtcccaacaggaaatggttggcatcccagatgaagatgataaagggactgtttacaaagttttggggaaactccaa

SEQ ID NO: 862129 - DNA, 120 bp, Artificial Sequence
  ENSG00000272274_5 (sequence is synthesized)
ggaatagtttaatagcccagtcctgttaccacccctgcacccaaagtgacaaggggagggggtggagactgggacatgggaaaatcatctagggaaggatacctttactggatcagcagc

SEQ ID NO: 862130 - DNA, 120 bp, Artificial Sequence
  ENSG00000272274_6 (sequence is synthesized)
gccaaacaaataactgaaattcagagggcaagagagctcattgttatctaaacaggtcagcatggcagacagcgaggcgaagagggaaggaaggtggatttggaagaacaaacgggagtg

SEQ ID NO: 862131 - DNA, 120 bp, Artificial Sequence
  ENSG00000272274_7 (sequence is synthesized)
acctagtgcagccctgataaacccgaaagcagtgttcctctcaagatattatggggtcccagggagatgcagtgtccagggaagcagaggcagcagcacagctgcaggaagaagtcaggg

SEQ ID NO: 862132 - DNA, 120 bp, Artificial Sequence
  ENSG00000272274_8 (sequence is synthesized)
tggaatccacacagagcgcattcccaggctgggagctaccagagtatttgaccttgggcacagctggggtggccccgatggcgctgctgtctgctgatggtctccacagcttccccagcg

SEQ ID NO: 862133 - DNA, 120 bp, Artificial Sequence
  ENSG00000272274_9 (sequence is synthesized)
aggccttcctggaaggagtgctgagcagcaaagctctgtggtcaccactcaggacaaaggggaaccagctgaacagagcctttcatgtgacaacaaaaaacgacctggctcaaacatcac

SEQ ID NO: 862134 - DNA, 120 bp, Artificial Sequence
  ENSG00000272274_10 (sequence is synthesized)
gacaggcatctgtggagcctgggaaatgacctttctcatggggagaacacagaacacacaaagctttctcttaaaagtctacaaaattataatctgataacaacagaacgttttggtatt

SEQ ID NO: 862135 - DNA, 120 bp, Artificial Sequence
  ENSG00000272274_11 (sequence is synthesized)
ttgagtaataggtgtcacatcggaattgatatttgccaaatttggcatgataattgaatgctttttgcttatttatatttcatattttagttgttttctaataaccaaaaacatttgtgt

SEQ ID NO: 862136 - DNA, 120 bp, Artificial Sequence
  ENSG00000272274_12 (sequence is synthesized)
aaacatttgtgtatttttaataatagtagaggtaaatgaaattttacatgtcagtaaaaaaactgaaagatgatgcttgtaatttcaagtcgattaaagaaaattattaataaaacaata

SEQ ID NO: 862137 - DNA, 120 bp, Artificial Sequence
  ENSG00000272274_13 (sequence is synthesized)
ggatgcataaaccagaccatattgtaaatatttcaaattcattggtaaacattgttttaagaaggtgattagcaaatattgtttcaagaaggtgattaagaaggtgatgcaaaatttgga

SEQ ID NO: 862138 - DNA, 120 bp, Artificial Sequence
  ENSG00000272274_14 (sequence is synthesized)
gtactttctgttttgtatttttcgtgactatttgtgagcacttggtgcttaagacacactcaaagaggtactgacaatttatcatattctaaagcaataaaacaggttgaaaatatctaa

SEQ ID NO: 862139 - DNA, 120 bp, Artificial Sequence
  ENSG00000272274_15 (sequence is synthesized)
gcactcatcacttgctgccttggacttagtttcctcattcgtagaatggagacaccacactttctgaagtgcttatgagacttgcaggaggtagacttttctggaagacccagacctcga

SEQ ID NO: 862140 - DNA, 120 bp, Artificial Sequence
  ENSG00000272274_16 (sequence is synthesized)
gttggaatggggagaacacttaaacacttgatgtgcagacatcctgagcttcagctgatcttacaagcacaaaggggaaaacttcctgccctccttcctgagatcagagagacgagtttt

SEQ ID NO: 862141 - DNA, 120 bp, Artificial Sequence
  ENSG00000272274_17 (sequence is synthesized)
caggaatccctccccagggtttgcctgtgtactctgtgcatggtggaagtggagaagagtgatccagcttccttcagtgggaccctcctcacccatcctgatgggtagatacaagatgcc

SEQ ID NO: 862142 - DNA, 120 bp, Artificial Sequence
  ENSG00000272274_18 (sequence is synthesized)
gccataggggctgccctcggacagagccaaggagaacattgactcattcgtcgtgtgcagacctttgcggaagatgccgatgtgctcaaggcatgctccctcatgtgaggggtgacatca

SEQ ID NO: 862143 - DNA, 120 bp, Artificial Sequence
  ENSG00000272274_19 (sequence is synthesized)
ctgcctaatttacactcatgccaggcctaaatgacctcatcacagaaaggcgattgtcttggctcctactacatggcacaattcttttcctgaacattcctgatcatactctgtgcactc

SEQ ID NO: 862144 - DNA, 120 bp, Artificial Sequence
  ENSG00000272274_20 (sequence is synthesized)
cctcatccctgcctttgttatttccccctacccctggaacacagtttgacaaacatcaattccattttcttgtgaaggcaagttaattttcagactctcagtgtcttcatctctaaaacg

SEQ ID NO: 862145 - DNA, 90 bp, Artificial Sequence
  ENSG00000272274_21 (sequence is synthesized)
ttcctcatgggtgtctggaggggagctgaaatgaaagggtggaggtatctggatcccagggctgcttccttttatctgccctacatattg

SEQ ID NO: 862146 - DNA, 120 bp, Artificial Sequence
  ENSG00000272274_22 (sequence is synthesized)
ggatcccagggctgcttccttttatctgccctacatattgctaaaatcgcttttgaaaaataggccccactgcttttaaattactgaactagatagtatcgcaggcttctttggctataa

SEQ ID NO: 862147 - DNA, 120 bp, Artificial Sequence
  ENSG00000272274_23 (sequence is synthesized)
aattctgtgattctagcattcccgggagtgaggattcaaactgacctgcaaggataatcctaaggcattcagccttcaaagccctcagcgctgcctccctaacccttatgggaacttcca

SEQ ID NO: 862148 - DNA, 120 bp, Artificial Sequence
  ENSG00000272274_24 (sequence is synthesized)
tgggacatccagggtcatctgacatctgatttcattctagcttgcagccttatcttttcaaatggcttgacaatgtagtcaaactagaccctctctaaatttcaaaccaactgatacttt

SEQ ID NO: 862149 - DNA, 120 bp, Artificial Sequence
  ENSG00000272274_25 (sequence is synthesized)
ctgctctaggtctttgttgatactatactctgctcaaaatcatatgcatcctacaagattcatctcaaaaactaaatattatatctaccacacttaccgtattttgctatgtggtattct

SEQ ID NO: 862150 - DNA, 120 bp, Artificial Sequence
  ENSG00000272274_26 (sequence is synthesized)
ttcaggagctgtgagtacattcacagccttatgcaaccatcaccactacctaattccggaacattttcatcaccccacaaagaaatcctgggcccattagtaatcacttcccattctccc

SEQ ID NO: 862151 - DNA, 120 bp, Artificial Sequence
  ENSG00000272274_27 (sequence is synthesized)
ctgtaccccgcctctggccaccactaatctactttctgtctctgtgaatttgtctattttggacatttcatataaatggaattatacaatgtgtgaccatgtgtaaggattttctcactt

SEQ ID NO: 862152 - DNA, 120 bp, Artificial Sequence
  ENSG00000272274_28 (sequence is synthesized)
atcatgatgtaaactttgaaaaagtttcatccatgttgttgcatggataaatgctttacttttaaaattgatactattttattgtatgaatagaccatattttatttgttcatttatcaa

SEQ ID NO: 862153 - DNA, 120 bp, Artificial Sequence
  ENSG00000272274_29 (sequence is synthesized)
atatttgggttatttttaatttctggctattgtgaataatgctgctatgaatatccattctgtgaacatatattttcgattctcttgggtacctaagagtggaattgctgggttatgtgg

SEQ ID NO: 862154 - DNA, 120 bp, Artificial Sequence
  ENSG00000272274_30 (sequence is synthesized)
tacccatgtttaagtttttgaggaactgtcaaactcttttccacagttgctgaaccattttacatccccactaggaatgtaagagagttctgattttcgtacatccctgacaacactttt

SEQ ID NO: 862155 - DNA, 120 bp, Artificial Sequence
  ENSG00000272274_31 (sequence is synthesized)
tattttccatcttttgaattatagtcatcatagtgggtgccaagtggtaacacattgtgatttggtttgcatttccctaatgactactgatgagcatctcttcacatacttataggctag

SEQ ID NO: 862156 - DNA, 120 bp, Artificial Sequence
  ENSG00000272274_32 (sequence is synthesized)
ttgcatatcttctttggagaaatgtctgttcatatcttttggccattttaaattgggttatttgtatttttattgttgagccataaggttctttacatattctctgtgaaagaaacttat

SEQ ID NO: 862157 - DNA, 120 bp, Artificial Sequence
  ENSG00000272274_33 (sequence is synthesized)
caggcttatcatgtacagatatgttctcccattgtctggttcatattttcacttgcttcataaagttatctgatacataaaagtgtttaatttttatgaagtctaactgatcctttcttt

SEQ ID NO: 862158 - DNA, 120 bp, Artificial Sequence
  ENSG00000272274_34 (sequence is synthesized)
tgttgcctgtgctttggtgttatatctaagaaaccattgcctaacctaagttcatgaagatttaagcttataagatttcttctaagagtttcataatttatgtcttacatttatgtgttt

SEQ ID NO: 862159 - DNA, 120 bp, Artificial Sequence
  ENSG00000272274_35 (sequence is synthesized)
gacttcagttaaattttttaatatcatacagagatccaactttattatccagaatgtggacatacggttgtcgcagcaccatttattgaaaagactgttccacattgaatattcttggca

SEQ ID NO: 862160 - DNA, 120 bp, Artificial Sequence
  ENSG00000272274_36 (sequence is synthesized)
cccttgttcataatcaattaattacaaatgtaagtgtttatctttgggctgaattcttttccattgatttatatgtctatccttatgccaatacctcaactgtcttatttactatacttc

SEQ ID NO: 862161 - DNA, 120 bp, Artificial Sequence
  ENSG00000272274_37 (sequence is synthesized)
tttcatataaaagtgaattagaagcagtttgagaatgcagtgctaattcatatatgcatacattcataacttgcataaatatgttaaaagttgtttggaaatgtgacccaatgacatgga

SEQ ID NO: 862162 - DNA, 120 bp, Artificial Sequence
  ENSG00000272274_38 (sequence is synthesized)
tcctacttctagacttttgaaaatatctgcatatggttcttatcctttagcactaacatgacacatataaacagatgtaaatagctaaaaggggcctgtaagctactttgtaagcacggc

SEQ ID NO: 862163 - DNA, 120 bp, Artificial Sequence
  ENSG00000272274_39 (sequence is synthesized)
ttatgagacttgcaggaggccaaaattttctacctgtttcgtttattgctatactcctggtgctgaagatggtgggatgagggaaaggtcatcaccagtgaaagttctgacacttgcact

SEQ ID NO: 862164 - DNA, 120 bp, Artificial Sequence
  ENSG00000272274_40 (sequence is synthesized)
ctcatactttgggtttaccatgatcatgtaggcaacactgattgatgatcagtgcaactaggtctgaaacaggatattcttgtactgaagcttagttttatgcagaattacatcttatcc

SEQ ID NO: 862165 - DNA, 120 bp, Artificial Sequence
  ENSG00000272274_41 (sequence is synthesized)
tcggtggcctcagtttctgtgggtttttacccggttgagatgagaatattccttgctcccctaatggatttccatttaattttcttaaaacaaaaacaatactgttttttaaaagaaagt

SEQ ID NO: 862166 - DNA, 120 bp, Artificial Sequence
  ENSG00000272274_42 (sequence is synthesized)
gttttcatgcagtttaagtgttaaaaaatcagtttaaaattttcacagcagcaagagcaggaagaactcaggttatatggtcttgaccacacttgccggcatacagcgtactttgtcctg

SEQ ID NO: 862167 - DNA, 120 bp, Artificial Sequence
  ENSG00000272274_43 (sequence is synthesized)
ggtgggtgctgaagaaaaatggagaacaaaaccaactccatgactgaaacacaaactcaaccttgcacatgcagcaaataggttgagttaaaagaacaatgaaagagagctcagactcat

SEQ ID NO: 862168 - DNA, 120 bp, Artificial Sequence
  ENSG00000272274_44 (sequence is synthesized)
tcttgttttagtgactttttaggtttatttttttccaactgtgattttatccagagtgttagtataaacttatgtggttagaactgttaccaaaggataggagatctaattccagatcaa

SEQ ID NO: 862169 - DNA, 120 bp, Artificial Sequence
  ENSG00000272274_45 (sequence is synthesized)
ccagtgaaagtcgggtagttttaaccaccaacatctgcaacagctaaataagatccatgttgcttctgttacacagtgtttcctactgtatttttgaaaatgtgctcaattgtcacatag

SEQ ID NO: 862170 - DNA, 120 bp, Artificial Sequence
  ENSG00000272274_46 (sequence is synthesized)
taaaagcaaatattgagtagcttctgagggacagtggtacttttaaaaaagtgatcccaactcctatgttctttagaaacaattcaagtaaacatattaaataagattccaaacctttca

SEQ ID NO: 862171 - DNA, 120 bp, Artificial Sequence
  ENSG00000272274_47 (sequence is synthesized)
agtcttggcggaagcctgagacgcaatagatggagactctccttttcgccttggcgtactctttttttttttttcctccctggagctggtcttgtggggcagccctaaaatgtatctcca

SEQ ID NO: 862172 - DNA, 120 bp, Artificial Sequence
  ENSG00000272275_0 (sequence is synthesized)
caggaagacagctggcccagtgaccctcagaagtggattgcagaagtgggggtacctcccaggttctccagcggggataatgccagtgctgagagccgactgtgccaggctccttcacat

SEQ ID NO: 862173 - DNA, 120 bp, Artificial Sequence
  ENSG00000272275_1 (sequence is synthesized)
ccagctttgacaaccagccacggcaggagcatttacaccacggtcatccacaaatgctacaggccagcacacggctgctgacgggagaatctcaagagtcaacagatgaagaaaatgggt

SEQ ID NO: 862174 - DNA, 120 bp, Artificial Sequence
  ENSG00000272275_2 (sequence is synthesized)
gctccatagaatgccaacagctttagtctaaatatacacatttttatacatggaagaatccattgtcaacttttaaacattggttaccttttgggagaataaagggaatgggggcgatga

SEQ ID NO: 862175 - DNA, 120 bp, Artificial Sequence
  ENSG00000272273_0 (sequence is synthesized)
ggacttgacctccgcctggcaccctggcgtaagggtgattgccacatctcggattcgccgcggggcaactacctgggaaaaccgcagactgggcaatgaaagactacatccggcaaccgg

SEQ ID NO: 862176 - DNA, 120 bp, Artificial Sequence
  ENSG00000272273_1 (sequence is synthesized)
atgctgggttctgtgactccaggaaaaggggctcctgggcccagggagaacatactaggcgatctcgacagtcgctccgtgacagcccaccaacccccaaccctctacctcgcagccacc

SEQ ID NO: 862177 - DNA, 120 bp, Artificial Sequence
  ENSG00000272273_2 (sequence is synthesized)
taatggtccgccgaagtctcacacagtagacagacggagttgagatgctggaggatgcagtcacctcctaaacttacgacccaccaccagacttcatcccagccgggacgtcctccccca

SEQ ID NO: 862178 - DNA, 120 bp, Artificial Sequence
  ENSG00000272273_3 (sequence is synthesized)
cccgagtcctccccatttcttctcctactttgccgcagttccaggtgtcctgcttccaccagtcccacaaagctcaataaataccaagagacctgcatttacagcagggggaacatctca

SEQ ID NO: 862179 - DNA, 120 bp, Artificial Sequence
  ENSG00000236452_0 (sequence is synthesized)
aagtggcctgactctggatgactcaagagggcttttccttctctcaggagctacaatagtcacaggaaggtatccttctgcagtttgggggatctgaagaaaagctgagcagatcagaaa

SEQ ID NO: 862180 - DNA, 120 bp, Artificial Sequence
  ENSG00000236452_1 (sequence is synthesized)
tgaactcagcagaattaacattagaaagagagaaacaaggacaccaagaagcaatttcacccaggaaagcattctgttatgaaatccaagctctctttacatgaagactcagcctgcaga

SEQ ID NO: 862181 - DNA, 120 bp, Artificial Sequence
  ENSG00000236452_2 (sequence is synthesized)
ctgcccccacgagaagcctgccttcagttgtcccaattacagggaagcctgctgaggaaacagaactgtctgaatgcaaaggaaatttagctcttatgaatatgaactctcaaccaagaa

SEQ ID NO: 862182 - DNA, 120 bp, Artificial Sequence
  ENSG00000236452_3 (sequence is synthesized)
agctcttatgaatatgaactctcaaccaagaatcaccagacgtttaaggaaaaccaagaacacaaaagagaaagatcaagattaaaaaaacagctgggcgtggtggctcttgcctgtaat

SEQ ID NO: 862183 - DNA, 120 bp, Artificial Sequence
  ENSG00000274307_0 (sequence is synthesized)
acttgcttatgctttggtggcgttgctacttggagtggtctttaaggtgtaaacctcaggccactctgccttctcccagagcaaggacagagagatggccgtagcccactgcctagcgtg

SEQ ID NO: 862184 - DNA, 120 bp, Artificial Sequence
  ENSG00000274307_1 (sequence is synthesized)
ggcctcacacattgataccatgcagtaatcagtatatgttttttgcatgatgagtacatgcatgtacaagcagggactgcacgttagtttgccattttaataagataactccttattggg

SEQ ID NO: 862185 - DNA, 120 bp, Artificial Sequence
  ENSG00000274307_2 (sequence is synthesized)
gaaatatcgcttgtaaagcttagaagaaatggaaatatcacttggagcaattttaaagcacgtggtaaaatcatgaagagaggctaccctcatccctctgagggcctctctgtgggtctg

SEQ ID NO: 862186 - DNA, 120 bp, Artificial Sequence
  ENSG00000274307_3 (sequence is synthesized)
caagcaccactcgccagctgtctcctggtgggaacatcaggtgcagcccactgtcaggtgcagctgtctcggccctgctgtgtctggggtcagtgggcactggagtcatcttcgcagact

SEQ ID NO: 862187 - DNA, 120 bp, Artificial Sequence
  ENSG00000274307_4 (sequence is synthesized)
gcacctggagctgtgccccttagcctcctgctcctgccccgacccagatgcagcctcagcgtcctgcagcacagagctctcgactgtccctgcccagcagggggcgccgggcagcactgg

SEQ ID NO: 862188 - DNA, 120 bp, Artificial Sequence
  ENSG00000274307_5 (sequence is synthesized)
tcccactccctcaggtggtgtcactcctcacccgaggagctgagttccaggcacagaattcctcctgtcaccatagggagacaagacacacaggacttgggtggctgtggaacatcagaa

SEQ ID NO: 862189 - DNA, 120 bp, Artificial Sequence
  ENSG00000274307_6 (sequence is synthesized)
agaaggggctaatattgcatgaccgttgcctaaaatgcagtgtgaaaattgccatgccttcagctcgaaatcagccacccccagcatcacttcagcaagtggagaagagcagggctgact

SEQ ID NO: 862190 - DNA, 120 bp, Artificial Sequence
  ENSG00000274307_7 (sequence is synthesized)
gaatgcctctagggatccacactctgttccccagtacattctccttcggaggttcccccagctcctcggtgatggtctccttggagcttgagttcttcccatcctctcctaccccccatc

SEQ ID NO: 862191 - DNA, 120 bp, Artificial Sequence
  ENSG00000274307_8 (sequence is synthesized)
agagtgtagaccgattccagcctccacaagggccccaccctccaaagcccagcctcggtattccgcagtgactgcccagtggtaggtgcggcaggacatgtaagggaaaagtcacccaag

SEQ ID NO: 862192 - DNA, 120 bp, Artificial Sequence
  ENSG00000274307_9 (sequence is synthesized)
aacgaggggcagatctcgccagaaggggcacaggtgtgtgtccatgtctgcaggagaggacaacgggctcagccacttctgcctggcagggccaggtgctccctgtcactaggctctgtg

SEQ ID NO: 862193 - DNA, 120 bp, Artificial Sequence
  ENSG00000274307_10 (sequence is synthesized)
cagatggccctgcaaagaaacaccccattgtccacctgagaagcagacacctgtggggccgtctcctcgtctggggcacccagggtcccgagtggcccatcctccctccctgggctcggt

SEQ ID NO: 862194 - DNA, 120 bp, Artificial Sequence
  ENSG00000274307_11 (sequence is synthesized)
tcattttgttttggagagtggttaatctcagtgtcacacccggtaccaccgcacgtcccagtgcacgccacatgtcacctctcaggacaatgggacagctttatcaagagtatttcaatt

SEQ ID NO: 862195 - DNA, 120 bp, Artificial Sequence
  ENSG00000274307_12 (sequence is synthesized)
ccaaaacccctcagttaggcacggctttgctcgaggaacaatctgattctgggaaaaggttatctgcatcttctaagagtgttaccacgataccaggaatacaaagatgagtttgagcat

SEQ ID NO: 862196 - DNA, 120 bp, Artificial Sequence
  ENSG00000274307_13 (sequence is synthesized)
catcctttcgggaaatgtaaatacctaaagcaaaggattctagggcaactgtttttcttccccattatcaactccataaagagtcttttctgacttctttttcaattgtcccctcctggc

SEQ ID NO: 862197 - DNA, 120 bp, Artificial Sequence
  ENSG00000274307_14 (sequence is synthesized)
cttttaataacatagatatgctgtgtatctgtttatgttctatatgtgtacttagactttgtttagaaaagagtaagatttttccacctccaagaaccagtgatcactcccttgagggct

SEQ ID NO: 862198 - DNA, 120 bp, Artificial Sequence
  ENSG00000274307_15 (sequence is synthesized)
ctgtcacccctgtggagaatgcagcacggtcaggcatgtaaaagggtctcttaccgggtcctctttcaggtggtggacttagattagtagataatccttcctgggccacgggcctcatga

SEQ ID NO: 862199 - DNA, 120 bp, Artificial Sequence
  ENSG00000274307_16 (sequence is synthesized)
ctggtcagtagtgttgccagatttcacaaactgtatatatagaatgtccagttaaacttgaatttcagacaaacaaatccttttttaagtaaaagtatgtcctatgccatatttagacat

SEQ ID NO: 862200 - DNA, 120 bp, Artificial Sequence
  ENSG00000274307_17 (sequence is synthesized)
cgtttgttgtatctggcaatgctacttgtaaggatcctactcttctgaggatagaaagtgcacttcccattaagtaagaattttcattaacaggaagaacgtgagcctccatttaatagg

SEQ ID NO: 862201 - DNA, 120 bp, Artificial Sequence
  ENSG00000274307_18 (sequence is synthesized)
ctgggcaaaaggatgccaaatgacttttgatgtagtttttattttcatgagcttatttcaacaaaggatgttaaaaacagccaaacatcagcagggcgcagtggctcacatctgtaatcc

SEQ ID NO: 862202 - DNA, 90 bp, Artificial Sequence
  ENSG00000274307_19 (sequence is synthesized)
ccaaacatcagcatactttcggaggccgaggcgggtggatgatttgagtccaggagttcgtgaccagcctgggcaacgtggcaaaaccct

SEQ ID NO: 862203 - DNA, 83 bp, Artificial Sequence
  ENSG00000279072_0 (sequence is synthesized)
ctctcacgctgagggagttcagcgtgggcccctgttgagcccctgcctcacactggtctctctcacgctgagagcaatcctcc

SEQ ID NO: 862204 - DNA, 120 bp, Artificial Sequence
  ENSG00000279072_1 (sequence is synthesized)
tgagcccctgcctcacactggtctctctcacgctgagagcaatcctccctcacgctggcctgttgagacccagctcatgcctctgttggcctttccaggcccagcccctgcctgttggcg

SEQ ID NO: 862205 - DNA, 78 bp, Artificial Sequence
  ENSG00000279072_2 (sequence is synthesized)
cactttagcaggggtctccaaccacagggccacagagccggagctggatctaccatgaaagacttcagattgctcagt

SEQ ID NO: 862206 - DNA, 79 bp, Artificial Sequence
  ENSG00000279072_3 (sequence is synthesized)
ctgactgggcaacatgttattcaggtcttgctcagttgtccaggctggagtgtggtggtgctatcacagctgtctgcag

SEQ ID NO: 862207 - DNA, 120 bp, Artificial Sequence
  ENSG00000279072_4 (sequence is synthesized)
cccaactcatatttggactttttctatatgtgggttccagagggatgactgcgaaacgtgagatgggaccatctagtcgcaggaaaacaggcttaacacggccactgattctacattatg

SEQ ID NO: 862208 - DNA, 90 bp, Artificial Sequence
  ENSG00000279072_5 (sequence is synthesized)
aggaaaacaggcttaacacggccactgattctacattatgctcctgcctcccagcagcctcttcaggcccagaactttctccactcagcc

SEQ ID NO: 862209 - DNA, 120 bp, Artificial Sequence
  ENSG00000279072_6 (sequence is synthesized)
ctcaccaggcccagctcctgccactcattggcctcccaagggccagcttttgcttcacggccaccttccaagacccagctcctgttttacagtggcctctggaggcccatcttctgactc

SEQ ID NO: 862210 - DNA, 120 bp, Artificial Sequence
  ENSG00000279072_7 (sequence is synthesized)
ctggcagcctgtacaggcccagctcctgccttacaatggcctctttagtcccagctcctgcctctttgcaggagggccaaatgtccgcaagtccaggccacaaaatccagggccaaaatg

SEQ ID NO: 862211 - DNA, 120 bp, Artificial Sequence
  ENSG00000279072_8 (sequence is synthesized)
tccgcaagtcagcctctcaaggcccagctcctgcctttcgttggcatctctaggcccagctgctgcccccaggtggcctctacaggctgtgctctttcttctgactgtgtctggaggtcc

SEQ ID NO: 862212 - DNA, 120 bp, Artificial Sequence
  ENSG00000279072_9 (sequence is synthesized)
aactcctgcctcagaacaacctcttttggctcagctcctgcccagctcctactggcctttgtaggccccaaactgcctcaagtcaagctttccaggcccaccttctgcctcccaatggcc

SEQ ID NO: 862213 - DNA, 120 bp, Artificial Sequence
  ENSG00000279072_10 (sequence is synthesized)
tggacaggcccagctcctgcgtgacaatggcctctccaggcccagcttttgcctcacagaggccttccccaaacaaggtcctgcctgcctcccagcagcttcaacaggcccagatcctgc

SEQ ID NO: 862214 - DNA, 120 bp, Artificial Sequence
  ENSG00000279072_11 (sequence is synthesized)
ctcacactaatctcattaggcccagctcacgcctcacggtggcctctccaggcccagctcctgccccccgacaggctctccgtgccggaaacttcctcaagtcggcctctccaggcacag

SEQ ID NO: 862215 - DNA, 120 bp, Artificial Sequence
  ENSG00000279072_12 (sequence is synthesized)
ctcctgcatcccagcagcttctctagaccgagaactttctcaagactgccattccaggcccaacttgtgccttccgtcagcctctacaggctcaacgtctgcctcacagcagattttccc

SEQ ID NO: 862216 - DNA, 120 bp, Artificial Sequence
  ENSG00000279072_13 (sequence is synthesized)
agcccagcatgtgcctcactgcagccccctaggccaagctcctgcctttcagcagcctctacaggccccactcctgcctcaatggcctctctagggcaagcttatgcctcacagtggcca

SEQ ID NO: 862217 - DNA, 120 bp, Artificial Sequence
  ENSG00000279072_14 (sequence is synthesized)
ttctggcccaggttttgccttttggcagcatctccagacccagaacttcctcaagtgggcctctccaggcccagctcttcctcccggctgcatctccaggcccacctcctacctcacaac

SEQ ID NO: 862218 - DNA, 120 bp, Artificial Sequence
  ENSG00000279072_15 (sequence is synthesized)
aacctctttcggctcagctcctacccagctcctggcagcctttataggcccaaaactttctcacatcaagttttccagcacaaccttctgcctcccggcagcttgaataggcccagctcc

SEQ ID NO: 862219 - DNA, 120 bp, Artificial Sequence
  ENSG00000279072_16 (sequence is synthesized)
tgaaagacagtggcctctctaggctcagctcttgcctcacagaggtcatccctggccaagttcctgcctgcctcccagcaggctcaacaggcccagctcctgcctctgacagtctctcca

SEQ ID NO: 862220 - DNA, 120 bp, Artificial Sequence
  ENSG00000279072_17 (sequence is synthesized)
tctctccaggccaaaatcttcctcaagtaggcctctctacaggctgatctcttgcctcacactggcctgtttaggcccagttcatgcttcttggcagcctctccaggcccagctcctgca

SEQ ID NO: 862221 - DNA, 120 bp, Artificial Sequence
  ENSG00000279072_18 (sequence is synthesized)
tgcatcttggcctctccaggcccagcctctgcctcccgtcggcctctacagtcacaacatctgcctcacagcagattcttcaggcccagtatctgcctcactgtggaccccccaagccaa

SEQ ID NO: 862222 - DNA, 120 bp, Artificial Sequence
  ENSG00000279072_19 (sequence is synthesized)
cctcacactggcctctctacatccaactcatgcctcacggtggcctctccaggcccagctcctgtcccaggacgtcatctccaggcccaaaacttcctcaagtcagcctctctagtccca

SEQ ID NO: 862223 - DNA, 67 bp, Artificial Sequence
  ENSG00000279072_20 (sequence is synthesized)
tccaggcccagctcctgcctcctatcagtgtctacaggcccaacctctgtctcatggtggcttctcc

SEQ ID NO: 862224 - DNA, 120 bp, Artificial Sequence
  ENSG00000279072_21 (sequence is synthesized)
gtgtctacaggcccaacctctgtctcatggtggcttctccaggcccaactcttcctcttggctgagtctacaggcacaactgctgcctcataacagctgcctcacaacagccttttttgg

SEQ ID NO: 862225 - DNA, 83 bp, Artificial Sequence
  ENSG00000279072_22 (sequence is synthesized)
ttttttggcccagttcctgtccagctcacggcagcaaatgtaggcccaaaacttcctcaagtagaacaggcccagctttgact

SEQ ID NO: 862226 - DNA, 86 bp, Artificial Sequence
  ENSG00000279072_23 (sequence is synthesized)
cctctcaggggcttctccaggcccagctcttgtctcatggcagctgccccaggccaagtttctgcctgcctgccagcagcctcaac

SEQ ID NO: 862227 - DNA, 120 bp, Artificial Sequence
  ENSG00000279072_24 (sequence is synthesized)
gcccatttaggcccaactcatgactgtcgggccatttccaggcctagtgcctgcctcctggctgactcttgaagcccaaaacttcctgaaattagccttttgctcaacttctgtctactg

SEQ ID NO: 862228 - DNA, 68 bp, Artificial Sequence
  ENSG00000279072_25 (sequence is synthesized)
agctcctgcctttcggcagcctctacgggcccagcccctgccttgcaatggcctctttaggccaagct

SEQ ID NO: 862229 - DNA, 120 bp, Artificial Sequence
  ENSG00000279072_26 (sequence is synthesized)
gcccagcccctgccttgcaatggcctctttaggccaagctcatgccccatggcgacttttccaggcacagcttttgccttttgcagcctgtccaggcccagaatgtgcttaactcggcat

SEQ ID NO: 862230 - DNA, 120 bp, Artificial Sequence
  ENSG00000279072_27 (sequence is synthesized)
cgccaggacaagctcatcctcccggtgcgtctacaggcccgtctcctgcctcacaacaacctcctttggcccaactcctgctgagctgctggcagcctctgtaggccacagacttcttaa

SEQ ID NO: 862231 - DNA, 120 bp, Artificial Sequence
  ENSG00000279072_28 (sequence is synthesized)
agtaaagctttccaggcccaccttcggcctcccagcagcctcagcaatcaaactattccctcactgcggccaccgaaagccaagtttctccctgcctcacggcatcctccgaaaactgag

SEQ ID NO: 862232 - DNA, 120 bp, Artificial Sequence
  ENSG00000279072_29 (sequence is synthesized)
catttgcctcacggtggcctccccaggccacgaatctgcctgcctcccaggcagctgctgcctcacaatggtctctttaggcccagctcatgctagaagacggactctccaggcacagct

SEQ ID NO: 862233 - DNA, 120 bp, Artificial Sequence
  ENSG00000279072_30 (sequence is synthesized)
cttgcctcctggcagcctctgcaggcccaaattctccaaaagttggcctctcctaactcagcttctgcctcatgtcggcctacacaggcccagactcttaccacacagtagaccctccag

SEQ ID NO: 862234 - DNA, 120 bp, Artificial Sequence
  ENSG00000279072_31 (sequence is synthesized)
ccccaccacttgcctgagcatagcctcctaaggccaagctcctgcctttcagcagcctctacaggcccagctcctgcctcgcaattgcctttgtaggccaagattgtgccgcgaagtggc

SEQ ID NO: 862235 - DNA, 120 bp, Artificial Sequence
  ENSG00000279072_32 (sequence is synthesized)
ctttcctagcctaacttttgctttttgacgcatactcccgtcccaaaacttcctccagtcagccagtccagggtaagctcttcctcccaaaggcttctgcaggccaaaatcgtcctgaag

SEQ ID NO: 862236 - DNA, 120 bp, Artificial Sequence
  ENSG00000279072_33 (sequence is synthesized)
tcaccctctgcaggcccagctcctgcctccaagtgctgtgtaggccaagctaatgcctcacagcacactttccaggctgagcatttccttttgtgcatactcttcaagccctgaacttac

SEQ ID NO: 862237 - DNA, 120 bp, Artificial Sequence
  ENSG00000279072_34 (sequence is synthesized)
tctagttggcctctccaggccaagctctcctttccagtggcctctacaggccaaaattgttctcaaatcagcctctccagggccaactcctagctaccggtggcttctgcacgccaaaat

SEQ ID NO: 862238 - DNA, 120 bp, Artificial Sequence
  ENSG00000279072_35 (sequence is synthesized)
cgacctcaagtcagcctctccacacccagctcttgcctctaagtggtctctgcaggagcaaaacttcaagtcggcctctccaggcccagcctcctgcttcccgagggcatgtacaggccc

SEQ ID NO: 862239 - DNA, 120 bp, Artificial Sequence
  ENSG00000279072_36 (sequence is synthesized)
agcctctgcctcacagcagactctccacgcccagctcttccctgtctgtggcctctccagtccaaagctgttactgcctttcggcagcttgtacaggcccagctcctccctcacggtggt

SEQ ID NO: 862240 - DNA, 120 bp, Artificial Sequence
  ENSG00000279072_37 (sequence is synthesized)
ctcttttggcccaactcatgcctcttgcaacctacccaactgtcacctcctgcctcacactggcctgttgaagcccagctcatgcctcttgtggcctcaacgggcgcagcccctgcctga

SEQ ID NO: 862241 - DNA, 120 bp, Artificial Sequence
  ENSG00000279072_38 (sequence is synthesized)
cggtggcctctacaggcccggactctacctcacagtgggctctccaggcccatctcttcctaactgtggcctcctggggcaatgctcctccctgtcgggagcctctgcgggcccagctcc

SEQ ID NO: 862242 - DNA, 120 bp, Artificial Sequence
  ENSG00000279072_39 (sequence is synthesized)
tgcctcccagtggcgtctgtaggcgaagcccgtgcctcagggcagcctttccaggcctagcgtttgctgctttgcatcctctccaggccctggacttcctccagtcggcctctccaggcc

SEQ ID NO: 862243 - DNA, 120 bp, Artificial Sequence
  ENSG00000279072_40 (sequence is synthesized)
gagctcttcctcccggcggcctctgcaggcccagactgtcaagtcggcctgtccagagccaattcctgcctcctggcagcctctgcaggcccaagtcatcctaaagtcggcctccctagg

SEQ ID NO: 862244 - DNA, 120 bp, Artificial Sequence
  ENSG00000279072_41 (sequence is synthesized)
aagtcatcctaaagtcggcctccctaggcctagctccggcccctcggcagcctctccagttgcaaaagttcctcgagtcagcctctacaggcccagctcctcctgtctcccagtggcctc

SEQ ID NO: 862245 - DNA, 120 bp, Artificial Sequence
  ENSG00000279072_42 (sequence is synthesized)
ggcggccttcccaggccccgcttttgactttcggcggcctctgcagaccccgaacttgacgtccagtcagcctctccaggctcggcctcctgcctcccaaaggcttgcacaggcccagtc

SEQ ID NO: 862246 - DNA, 81 bp, Artificial Sequence
  ENSG00000279072_43 (sequence is synthesized)
ctcggcctcctgcctcccaaaggcttgcacaggcccagtctctgcctcacagtggactctccacgaacagctaggtctcgc

SEQ ID NO: 862247 - DNA, 74 bp, Artificial Sequence
  ENSG00000279072_44 (sequence is synthesized)
tctgcaggaccagactgtctgtaggcccaattcgtcctccagtcagcctccccaggcccagctctggcctcttg

SEQ ID NO: 862248 - DNA, 120 bp, Artificial Sequence
  ENSG00000279072_45 (sequence is synthesized)
ccaattcgtcctccagtcagcctccccaggcccagctctggcctcttggcggccactccaagtgcaaaacttcctcgagaccgtctctccaggcccagctcctcctgtctcccagtggcc

SEQ ID NO: 862249 - DNA, 120 bp, Artificial Sequence
  ENSG00000279072_46 (sequence is synthesized)
cccaggccagctcatgcctcccggctgccttcccaggccccgcttttgactttccgcagcctctgcaggtcccgaacttgacctccagtcggcctctccaggcccggcctcctgcctccc

SEQ ID NO: 862250 - DNA, 66 bp, Artificial Sequence
  ENSG00000279072_47 (sequence is synthesized)
ctccacgcccagctcgctctcgctcaactgccgcctgccagtggcctcttcagccccatggggctc

SEQ ID NO: 862251 - DNA, 63 bp, Artificial Sequence
  ENSG00000279072_48 (sequence is synthesized)
ccacttgcagcctcccggcgtcctcttcgggcccagctcttcctcctggctacatcttggtgg

SEQ ID NO: 862252 - DNA, 81 bp, Artificial Sequence
  ENSG00000279072_49 (sequence is synthesized)
tttggactcagtgcctgcccagctcctggtggccttggtcggcccacagcttcctgaagccaagctcccccctcctgccct

SEQ ID NO: 862253 - DNA, 120 bp, Artificial Sequence
  ENSG00000279072_50 (sequence is synthesized)
cctctgcaggccccgctcttgcctcgcaggggcatctccaggcccagctctggcctcacggcggcctcccgggacgaagtccctgcctgcctcccagcggcctgtgtgcggcccagctcc

SEQ ID NO: 862254 - DNA, 76 bp, Artificial Sequence
  ENSG00000279072_51 (sequence is synthesized)
ccctgcctgcctcccagcgcccaactcatgcctctggcaccctttcgagaggcgtgagcccctgcctcacactggc

SEQ ID NO: 862255 - DNA, 73 bp, Artificial Sequence
  ENSG00000279072_52 (sequence is synthesized)
ccaggcccagcccctgcctgttggcgccctctagaggcccagcctctacctcaagccaggctcccgccttggg

SEQ ID NO: 862256 - DNA, 89 bp, Artificial Sequence
  ENSG00000279072_53 (sequence is synthesized)
gtcctgcacttcctccagtcggcctctccaggcccagctcttcctcccggcagcctctgcgggaccagactgtcgtcaagtaggcctgt

SEQ ID NO: 862257 - DNA, 86 bp, Artificial Sequence
  ENSG00000279072_54 (sequence is synthesized)
gcctctccaggctcagctcctgccctctgacggcgtctccaagccccaaatggcctccggtcggtgggcttctccaggcccagggt

SEQ ID NO: 862258 - DNA, 83 bp, Artificial Sequence
  ENSG00000279072_55 (sequence is synthesized)
cccctgcctgttggcggcctctagaggcccgttgccttgccgtggcgtcctcgggccaggctcccgccttggggcggcccccg

SEQ ID NO: 862259 - DNA, 74 bp, Artificial Sequence
  ENSG00000279072_56 (sequence is synthesized)
caggtcctgcacttcctccagtcggcctctccaggcccagcgcttcctcccggcagcctctgcaggaccagact

SEQ ID NO: 862260 - DNA, 90 bp, Artificial Sequence
  ENSG00000279072_57 (sequence is synthesized)
cccagcccagctcatgcctcccggcgaccttcccaggccccgcttttgactttccgcgacctctgcaggccccgaaatctcctgcctccc

SEQ ID NO: 862261 - DNA, 79 bp, Artificial Sequence
  ENSG00000279072_58 (sequence is synthesized)
gctgcgtctgcctgcccagctcctggtggccttggtcggcccacagcttcctgaagccaagctccccaggcccagctca

SEQ ID NO: 862262 - DNA, 73 bp, Artificial Sequence
  ENSG00000279072_59 (sequence is synthesized)
cagcccctgcctgttggcggcctctagaggcccagcctctacctcaacccaggctcccgccttggggcggccc

SEQ ID NO: 862263 - DNA, 88 bp, Artificial Sequence
  ENSG00000279072_60 (sequence is synthesized)
ggcgtttgctcctttgcatgggctccaggtcctgcacttcctgcagtcggcctctccaggcccagctcttcctcccggcagcctctgc

SEQ ID NO: 862264 - DNA, 120 bp, Artificial Sequence
  ENSG00000279072_61 (sequence is synthesized)
ctctttggactcagtgcctacccagctcctggtggccttggtcgtgccacagcttcctgaagccaagctccccgggcccagctcaggcctcacggcggcctctccaagctcagctcctgc

SEQ ID NO: 862265 - DNA, 73 bp, Artificial Sequence
  ENSG00000279072_62 (sequence is synthesized)
ccagcccctgcctgttggcggcctctagaggcccagcctctacctcaacccaggctcccgccttggggcggcc

SEQ ID NO: 862266 - DNA, 89 bp, Artificial Sequence
  ENSG00000279072_63 (sequence is synthesized)
tggcgtttgctcctttgcatgggctccaggtcctgcacttcctgcagtcggcctctccaggcccagctcttcctcccggcagcctctgc

SEQ ID NO: 862267 - DNA, 86 bp, Artificial Sequence
  ENSG00000279072_64 (sequence is synthesized)
tggtggccttggtcggcccacagcttcctgaagccaagctccccgggcccagctcaggcctcacggcggcctctccaggctcagct

SEQ ID NO: 862268 - DNA, 64 bp, Artificial Sequence
  ENSG00000279072_65 (sequence is synthesized)
ccttggtcggcccacagcttcctgaagccaagctccccgggcccagctcaggcctcaggcctcg

SEQ ID NO: 862269 - DNA, 73 bp, Artificial Sequence
  ENSG00000279072_66 (sequence is synthesized)
agcccctgcctgttggcggcctctagaggcccagcctctacctcaacccaggctcccgccttggggcggcccc

SEQ ID NO: 862270 - DNA, 68 bp, Artificial Sequence
  ENSG00000279072_67 (sequence is synthesized)
gctcatggtcctgcacttcctgcagtcggcctctccaggcccagctcttcctcccggcagcctctgcg

SEQ ID NO: 862271 - DNA, 88 bp, Artificial Sequence
  ENSG00000279072_68 (sequence is synthesized)
tcctttgcatgggctccaggtcctgcacttcctgcagtcggcctctccaggcccagctcttcctcccggcagcctctgcgggaccaga

SEQ ID NO: 862272 - DNA, 63 bp, Artificial Sequence
  ENSG00000279072_69 (sequence is synthesized)
ctcccggctgcgtcttggtggccttggtcggcccacagcttcctgaagccaagctccccgggc

SEQ ID NO: 862273 - DNA, 120 bp, Artificial Sequence
  ENSG00000279072_70 (sequence is synthesized)
tctttggactcagtgcctgcccagctcctggtggccttggtcggcccacagcttcctgaagccaagctccccgggcccagctcaggcctcacggcggcctctccaggctcagctcctgcc

SEQ ID NO: 862274 - DNA, 73 bp, Artificial Sequence; identical to SEQ ID NO: 862265
  ENSG00000279072_71 (sequence is synthesized)

SEQ ID NO: 862275 - DNA, 89 bp, Artificial Sequence; identical to SEQ ID NO: 862266
  ENSG00000279072_72 (sequence is synthesized)

SEQ ID NO: 862276 - DNA, 69 bp, Artificial Sequence
  ENSG00000279072_73 (sequence is synthesized)
cagtcggcctctccaggcccagctcttcctcccggcagcctctgcggcagactctgcaggcccaagtcg

SEQ ID NO: 862277 - DNA, 70 bp, Artificial Sequence
  ENSG00000279072_74 (sequence is synthesized)
tggtggccttggtcggcccacagcttcctgaagccaagctccccgggcccagctcaggcctcacggtggc

SEQ ID NO: 862278 - DNA, 82 bp, Artificial Sequence
  ENSG00000279072_75 (sequence is synthesized)
aggcccagcccctgcctgtttgcggcctctagaggcccagcctctacctcaaccgtgggccctccacgcccacctcttgcct

SEQ ID NO: 862279 - DNA, 120 bp, Artificial Sequence
  ENSG00000279072_76 (sequence is synthesized)
atgcgtcagggcggcctctcccggcctgtcgtttcctcctttgcatgggctccaggtcctgcacttcctgcagtcggcctctccaggcccagctcttcctcccggcagcctctgcgggac

SEQ ID NO: 862280 - DNA, 84 bp, Artificial Sequence
  ENSG00000279072_77 (sequence is synthesized)
tggtggccttggtcggcccacagcttcctgaagccaagctcaccgggcccacctcaggcctctcggcggcctctccaggctcag

SEQ ID NO: 862281 - DNA, 64 bp, Artificial Sequence
  ENSG00000279072_78 (sequence is synthesized)
tcggcccacagcttcctgaagccaagctcaccgggcccacctcacccaaatggcctcgggtcgg

SEQ ID NO: 862282 - DNA, 81 bp, Artificial Sequence
  ENSG00000279072_79 (sequence is synthesized)
cggccctccggaggccaagctcatgccatgggctccaggtcctgcacttcctgcagtcggcctctccaggcccagctcttc

SEQ ID NO: 862283 - DNA, 120 bp, Artificial Sequence
  ENSG00000279072_80 (sequence is synthesized)
ggcctggcgtttgctcctttccatgggctccaggtcctgcacttcctgcagtcggcctctccaggcccagctcttcctcccggcagcctctgcgggaccagactgtcgtcaagtaggcct

SEQ ID NO: 862284 - DNA, 120 bp, Artificial Sequence
  ENSG00000279072_81 (sequence is synthesized)
cagtgcctgcccagctcctggtggccttggtcggcccacagcttcctgaagccaagctccccaggcccagctcgggcctcatggtggcctctcctggctcagctcctgccctccgacggc

SEQ ID NO: 862285 - DNA, 64 bp, Artificial Sequence
  ENSG00000279072_82 (sequence is synthesized)
ggctggagaacagcctctgcaggccccactcttgcctcctaggggcatctccaggcccagctct

SEQ ID NO: 862286 - DNA, 66 bp, Artificial Sequence
  ENSG00000279072_83 (sequence is synthesized)
ggccctccacgcccacctcttgcctggccgtggcctcttcgggccaggctcccgccttggggcgtc

SEQ ID NO: 862287 - DNA, 88 bp, Artificial Sequence
  ENSG00000279072_84 (sequence is synthesized)
cagcctctcccagccctggacttcctccagtcggcctctccaggcccagctcttcctcccggcagcctctgcaggaccagactgtcgt

SEQ ID NO: 862288 - DNA, 120 bp, Artificial Sequence
  ENSG00000279072_85 (sequence is synthesized)
gcggcctctgtaggcccagactgtcatcaagtaggcctgtccaaggacagctcctgcctcccggtggcctctgttggcccaagtcgtcctcaagtctgcctccccaggcccagctctggc

SEQ ID NO: 862289 - DNA, 61 bp, Artificial Sequence
  ENSG00000279072_86 (sequence is synthesized)
gtctctccaggcggccttcccaggccctgcttttgactttccgcggcctctgcaggccccg

SEQ ID NO: 862290 - DNA, 120 bp, Artificial Sequence
  ENSG00000279072_87 (sequence is synthesized)
cgcggcctctgcaggccccgaacttgaccaccagtcggcctctccaggcctggcctcctgcctgttgacagccactagaggcccagcctctacctcaacagtgtgccctccaggcccacc

SEQ ID NO: 862291 - DNA, 120 bp, Artificial Sequence
  ENSG00000279072_88 (sequence is synthesized)
cacctcttgcctcgccgtggcctcctcgggccaggctcccacctcgggacggcctccgcaggcccagctcctgcctcacggaggccctctggaggccaagctcatgcgtcgtggcggcct

SEQ ID NO: 862292 - DNA, 74 bp, Artificial Sequence
  ENSG00000279072_89 (sequence is synthesized)
gtcctgcacttcctccagtcggcctctccaggcccagctcttcctcccggcagcctctgcaggaccagactgtc

SEQ ID NO: 862293 - DNA, 86 bp, Artificial Sequence
  ENSG00000279072_90 (sequence is synthesized)
agtaggcctgtccagggacagctcctgcttcccggcggcctctgtaggcccagactgtcatcggtggcctctgcaggcccaaatca

SEQ ID NO: 862294 - DNA, 120 bp, Artificial Sequence
  ENSG00000279072_91 (sequence is synthesized)
ggcggcctctccaggtgcaaaagtttgaatcagtatctccaggcccaggtcctcctgtctcccagtggcctcttttggcccagcccagttcatgcctcctggtggccttcccaggcccca

SEQ ID NO: 862295 - DNA, 120 bp, Artificial Sequence
  ENSG00000279072_92 (sequence is synthesized)
cagcccagttcatgcctcctggtggccttcccaggccccacttttgactttccgcggcctctgcagattccgaacttgacctccagtcggcctctcctggcccggcctcctgccttccga

SEQ ID NO: 862296 - DNA, 90 bp, Artificial Sequence
  ENSG00000279072_93 (sequence is synthesized)
gcctcccgagtccaaagctcctgcctcttggccgcttcggcaggcccagctcccacctgccagtggcctcttctggcccatggggttcat

SEQ ID NO: 862297 - DNA, 120 bp, Artificial Sequence
  ENSG00000279072_94 (sequence is synthesized)
tcctcacaacggcctttccaggcccattttttcccttccgactgcctctcaggacccagaacctctgggcccacttgaggagatgcagccaggaggaacagctgggcttgcagaggctgc

SEQ ID NO: 862298 - DNA, 120 bp, Artificial Sequence
  ENSG00000279072_95 (sequence is synthesized)
agatgcagccaggaggaacagctgggcttgcagaggctgccatgcgggaggcagaggctgggcctcctgaagtcggcctctccagacccacttgcagactcccggcatcctctctgggct

SEQ ID NO: 862299 - DNA, 120 bp, Artificial Sequence
  ENSG00000279072_96 (sequence is synthesized)
cctcccggctgcgtctccaggcccgactccggcctcccaacaacctctttggactcagctcccgcccagctcccggtggccctggttggcccacaacttcctgaagccaagctccccagc

SEQ ID NO: 862300 - DNA, 120 bp, Artificial Sequence
  ENSG00000279072_97 (sequence is synthesized)
ggcctctccaggctcagctcctgccctctgacagcgtctccaggccccgaacggcctccagtcggtggattcctctatgcccagcttgggcctcccggcagcctctgctggcccaaatcg

SEQ ID NO: 862301 - DNA, 120 bp, Artificial Sequence
  ENSG00000279072_98 (sequence is synthesized)
tcccggcagcctctgctggcccaaatcgtcctgaagtcgccctctccaggcccagctccggcctcccggcagcctctccaggcgcaacgcgtcgtcaacgagggcccctccggggtcagc

SEQ ID NO: 862302 - DNA, 120 bp, Artificial Sequence
  ENSG00000279072_99 (sequence is synthesized)
tcctgcctctcatcagcctctagaggccagtctggcggcctctgcaggcccagactgcccttgagtcaggctctccagggccagctccagcctcctggcagactctgcaggcccaagtcg

SEQ ID NO: 862303 - DNA, 120 bp, Artificial Sequence
  ENSG00000279072_100 (sequence is synthesized)
tggcctctttcagcccagcccagctcgtggctgtaggcagccttcccaggccctgcttttgacttttggcggcctcttcaggcccagaacttgatctccagtcagcttttgcaggcccgg

SEQ ID NO: 862304 - DNA, 120 bp, Artificial Sequence
  ENSG00000279072_101 (sequence is synthesized)
ttcaggcccagaacttgatctccagtcagcttttgcaggcccggcatcctgcctcccgaaggcctgcacgggcccggcctcggaatcacagcagactctccacgcccagctagctctcgc

SEQ ID NO: 862305 - DNA, 120 bp, Artificial Sequence
  ENSG00000237153_0 (sequence is synthesized)
aacaggagccataatgaccatgactggaggagaatcagattctggcctggcctggttctgtgagataccttaaatcatactttctgtagcatcccttaaaggtgggtagagagaaggaga

SEQ ID NO: 862306 - DNA, 120 bp, Artificial Sequence
  ENSG00000237153_1 (sequence is synthesized)
gagttaagtgtgggtgcagtcatcctcaggatggttgatctctaaatctattcttgggcaaaagtttagagaaaagctgaatcactcagcccagaggaagcctgaggaggcataaagaag

SEQ ID NO: 862307 - DNA, 120 bp, Artificial Sequence
  ENSG00000237153_2 (sequence is synthesized)
tcttggaaatcccctgaaaaaaagaatcagctgtaggctaacccaagaagaataaagcatcggcttccctgacatgctgctccccccaaaacagagtgccaatatgattccaaggttctt

SEQ ID NO: 862308 - DNA, 120 bp, Artificial Sequence
  ENSG00000237153_3 (sequence is synthesized)
agcacactgtatattacctcactcctcctacagtggtctggaactgaacttgcaatttctccaagatatgtcggtatctctctccatgctgtgctgcgtgggctttgggagcggtgatgt

SEQ ID NO: 862309 - DNA, 120 bp, Artificial Sequence
  ENSG00000237153_4 (sequence is synthesized)
ggaccatttgaaattgtccttgctacctctttaatgcatatttttatatttctatgctccacccaagtgctgtagtctctcaactgccttctttttgttcttcagcttttatgaagctat

SEQ ID NO: 862310 - DNA, 120 bp, Artificial Sequence
  ENSG00000237153_5 (sequence is synthesized)
tttcaagtgtgagtagttgtccaaattcatgtttcttgagggaacaagtgacttgtttgtaagttgacttgtatatctttttatagctgagattttatcctgtgatcttactaactcagg

SEQ ID NO: 862311 - DNA, 120 bp, Artificial Sequence
  ENSG00000237153_6 (sequence is synthesized)
aattttttggagattctttgcagttttctaagtagaataaccatattatatttattattattttccttcttactttggttttaatttgctctttttttacatgttttctgagttagaaac

SEQ ID NO: 862312 - DNA, 120 bp, Artificial Sequence
  ENSG00000237153_7 (sequence is synthesized)
ttaggttattgatttgatacccttattcctttataacatatgcatttgattgtgtaagtttttctctaagcactgctttagtgcatcccacaaattttgatctgttgtatattttttatt

SEQ ID NO: 862313 - DNA, 120 bp, Artificial Sequence
  ENSG00000237153_8 (sequence is synthesized)
ccaatgaaatattcagaaatgtgtaatttctaaatatttgggagattttctaaatatttctctgttactgctttctagttcaactccactatggttagagaacacactttgaatgtttta

SEQ ID NO: 862314 - DNA, 120 bp, Artificial Sequence
  ENSG00000237153_9 (sequence is synthesized)
aatctgttaagatttgttttatgacttaagacacagttggtatttgtgaatgtttcatgtgcacttgaaaacaatgtttattctgctttcattgggtcaggtggtctaaaaatggcattt

SEQ ID NO: 862315 - DNA, 120 bp, Artificial Sequence
  ENSG00000237153_10 (sequence is synthesized)
aagttaatttggttgatagtgattttcaggtattatatatccttcctgattcctgcctagttgttctaatgattactgacagaagactgttgaaatctccaattacactattatttttgt

SEQ ID NO: 862316 - DNA, 120 bp, Artificial Sequence
  ENSG00000237153_11 (sequence is synthesized)
atttctacctttacctctataatttttgctttagtattgtcacaatattttgttgggtgcataccaatttagtatagctatgtatttttggtagattggcacttttaaccattatacaat

SEQ ID NO: 862317 - DNA, 120 bp, Artificial Sequence
  ENSG00000237153_12 (sequence is synthesized)
gtccctcttggtccttggtaactttccttcattggaattctactttttttgatattaatatgacaattctagcattcttttggttagtatttgcatggtatgtccttttctattatttag

SEQ ID NO: 862318 - DNA, 120 bp, Artificial Sequence
  ENSG00000237153_13 (sequence is synthesized)
cttttagccaagctgagtgtttttatttaaaatgggtttcctgcgactaaaaatcattctaatcttattagattatctaataacctaattatctctctattggctgaacttagtcatggg

SEQ ID NO: 862319 - DNA, 120 bp, Artificial Sequence
  ENSG00000237153_14 (sequence is synthesized)
atagaacctactttcagggaaggttgcataatacagtcctttatctggccatattgcctgcacacttaaatgtaaccatgcacctgtatatacacacattcacatatatctgtgttttgt

SEQ ID NO: 862320 - DNA, 120 bp, Artificial Sequence
  ENSG00000237153_15 (sequence is synthesized)
ttctaaagaaaaggtgagagtgggtgtttgtataagcatctagctatttctgctttcatatgcttttggtatttgtaaactgtctttacctgtaaaataaggacatttctaaccattatt

SEQ ID NO: 862321 - DNA, 120 bp, Artificial Sequence
  ENSG00000237153_16 (sequence is synthesized)
tgtctttacctgtaaaataaggacatttctaaccattatttcacttctagaataattaatttatctgatcattttatataacattttaagtgtcttgttaatttttttgttgaagttatt

SEQ ID NO: 862322 - DNA, 120 bp, Artificial Sequence
  ENSG00000237153_17 (sequence is synthesized)
ggttactagccaagctaagcccttcttatgggtttcagcctgtccctcattcttccccagaagcttggaaggcccaaactttaaaacttcctatgcaagcagggagaggagaaaggagtc

SEQ ID NO: 862323 - DNA, 120 bp, Artificial Sequence
  ENSG00000237153_18 (sequence is synthesized)
attcctcccctaccagaatgagagtgccctgacccctaactgcacatgcagcttccttgaaaaatttgactgtaaatatttttctacacatatgcaaatatgtgcacatacaagtggata

SEQ ID NO: 862324 - DNA, 120 bp, Artificial Sequence
  ENSG00000237153_19 (sequence is synthesized)
ttgctttctcaaggggggcttaatatttcaaatttcatagcagccatttattgtcagcaacttaaagactgtttctgttttaagaatacatttttcttcgaaataaagtcagaaattgga

SEQ ID NO: 862325 - DNA, 120 bp, Artificial Sequence
  ENSG00000237153_20 (sequence is synthesized)
ctttcttgcctgccaccatgtaagacttccttttgttcttccttcatcttctgccctgattgtgaggcctccccagccatttggaactgtcaacagttctcagtttttggtccctgagga

SEQ ID NO: 862326 - DNA, 120 bp, Artificial Sequence
  ENSG00000237153_21 (sequence is synthesized)
gcagcatcatcatcacctaggaacttgttagaaagatgctccttgaaatttgagaactacaactccacctcttggacttgaggatgaggaaggcttggtcagcttgtttattccctaagg

SEQ ID NO: 862327 - DNA, 120 bp, Artificial Sequence
  ENSG00000237153_22 (sequence is synthesized)
atactacaaggatactctagtcatcttcatataaaatgatcaaggtgaagaaatataaaatgatcaaggtgaagaaaataaccaagtttcaggtgactccactgaaaaacaagcccctgt

SEQ ID NO: 862328 - DNA, 120 bp, Artificial Sequence
  ENSG00000237153_23 (sequence is synthesized)
ctccactgaaaaacaagcccctgtgactcactttatcattgagacctggctaagaaatgggtgtaaggaaaaagagctgggcatggtggctacgcctgtaattccagcattttgggaggc

SEQ ID NO: 862329 - DNA, 120 bp, Artificial Sequence
  ENSG00000237153_24 (sequence is synthesized)
agaattgcttgaacccaggaggccgaagttgcggcccactatgacaccgtgacaggctaaagagccttttgaatggaaactacataaagcatcaagcccctgaaaagaatgaccagacaa

SEQ ID NO: 862330 - DNA, 120 bp, Artificial Sequence
  ENSG00000237153_25 (sequence is synthesized)
aagtgccacaatcaattgaatgtctttaggagatacacttttcttttaaaaagcgtgacgctttgatgactcagtggcaggacaggtgacaaaggaatggctgcctggaggctgtgcatg

SEQ ID NO: 862331 - DNA, 120 bp, Artificial Sequence
  ENSG00000237153_26 (sequence is synthesized)
cacccgtccctgccgcctgactgtggaaggatgaaggacacttttagaaatttccctgcgcggagatgccaggaaaccaatcatcgcccagccactttgtggggccattagcagagcgtc

SEQ ID NO: 862332 - DNA, 120 bp, Artificial Sequence
  ENSG00000237153_27 (sequence is synthesized)
aaactccatctttgtttaaacgaaagcacaaagaaaataatttttcatctgaggaatcaccttaagatccccaaatggaaagtaaggggagcagtaaacctctcactccgggtgggcagc

SEQ ID NO: 862333 - DNA, 120 bp, Artificial Sequence
  ENSG00000237153_28 (sequence is synthesized)
tctaacacagggcattaaggtaagaaggttatttatgacagaagaaaggagacaggattccaaagtgggagacgaaggacagaggtgattggagcctagctttatcccctgccccattca

SEQ ID NO: 862334 - DNA, 120 bp, Artificial Sequence
  ENSG00000237153_29 (sequence is synthesized)
aatgcggagggcaatgacttccataagaaaccaggtgccacacgtgacccaaaggcaaaagcctcactttaactccttgatatggtctggctgtgttcccacccaaaatctcatctggaa

SEQ ID NO: 862335 - DNA, 120 bp, Artificial Sequence
  ENSG00000237153_30 (sequence is synthesized)
tcccacccaaaatctcatctggaattgtagtccccataatccctgtgtgtgtcaagggcagaaccaggtggaggtaatcggatcatgggggcgtttcccccatgctgttctcgtgatagt

SEQ ID NO: 862336 - DNA, 120 bp, Artificial Sequence
  ENSG00000237153_31 (sequence is synthesized)
gcatttcccctgctggcactcattctttctcctgctgtcctgcgaagaggtgccttctgccatgattgttagttcctgaggcctccccagccatgcgaactctgtaggctaacccaagaa

SEQ ID NO: 862337 - DNA, 120 bp, Artificial Sequence
  ENSG00000249317_0 (sequence is synthesized)
ggtgcacattaagttttgattaacactcgcttagaccatctgtataaactttagtttatacaagcaaaagacagggaactctgtgatgaagaaatctctaaggactctgagaagaatggt

SEQ ID NO: 862338 - DNA, 120 bp, Artificial Sequence
  ENSG00000249317_1 (sequence is synthesized)
ctgtgtaacaaacaaccaagatccaaaatagcaagactgggaggtacgactgcagaaaaaaattcatcccatgataagaaccaatgggttgaaactgtccaataaacgttgcttaatgaa

SEQ ID NO: 862339 - DNA, 120 bp, Artificial Sequence
  ENSG00000249317_2 (sequence is synthesized)
gagaccaacaagaaacagaagatcagtcagtgcatgggtagatgacatctgtgcatcccattgtgtgaaaaataatctgctgattttgccctttgttctaaaataaattcattacatagg

SEQ ID NO: 862340 - DNA, 78 bp, Artificial Sequence
  ENSG00000249310_0 (sequence is synthesized)
acttaagaaaatagaaaagaacctacatgattatcggaccagtaacccaagagcacccactcagggccacggctcagg

SEQ ID NO: 862341 - DNA, 120 bp, Artificial Sequence
  ENSG00000249310_1 (sequence is synthesized)
ccagtaacccaagagcacccactcagggccacggctcaggcaggaacctgggatgcaaggatggatggcacatggtcctccctccaggagatcacagtgtagggaaatcaacgaggaccc

SEQ ID NO: 862342 - DNA, 120 bp, Artificial Sequence
  ENSG00000249310_2 (sequence is synthesized)
tgttaccctgagatctgcagccaggacagggggctgtgcccaggaacaagggagactggctgctgactgtcctcttactgctgggcctgtcccttccaatcagcgcccggggctctgagc

SEQ ID NO: 862343 - DNA, 120 bp, Artificial Sequence
  ENSG00000249310_3 (sequence is synthesized)
acattgctttgctggtgtctgtgagcagctggagatggtggtgaacggtctgtttgcatttcttggaagaagatcttttattctgctgctcaacccaggtctctgccttccttagagact

SEQ ID NO: 862344 - DNA, 120 bp, Artificial Sequence
  ENSG00000249310_4 (sequence is synthesized)
gaggcccatccttcagtttccctgattctggaagagcaggggggttgaatggagcaggaggtcatgatggagacttgggccccagcatcccgcagcatttgcagcgcctccttatatagg

SEQ ID NO: 862345 - DNA, 120 bp, Artificial Sequence
  ENSG00000279085_0 (sequence is synthesized)
gaaaagggctttcgccatgttgcccagactatctatggcttccttcaagagcctttatccatgactctgccttagtgacagagttgagtagttgttacagaggccatatcgcccagaaaa

SEQ ID NO: 862346 - DNA, 120 bp, Artificial Sequence
  ENSG00000279085_1 (sequence is synthesized)
cctaaaatacatactatagctctttacagacaaaatttgctgacccctgctttagattgaggagatcttagcctcctgagagactggacttcccccaagggtgtgatgtcctctttcaaa

SEQ ID NO: 862347 - DNA, 120 bp, Artificial Sequence
  ENSG00000279085_2 (sequence is synthesized)
tacccaaagctcttacagtattctggctgagcctcacccctccactagacttctttaggcgttccacatgataacgacagaaaaattcaatacacacaaacaaaagtgtttttaataatc

SEQ ID NO: 862348 - DNA, 120 bp, Artificial Sequence
  ENSG00000279085_3 (sequence is synthesized)
gtaaatccagccaggtgtggtggctcacacctgtgatcccaatgctttgggaggctaaggcaggaggatagcttgaggccaggagttagaaaccagcctggtcaacatagcaagattcgt

SEQ ID NO: 862349 - DNA, 120 bp, Artificial Sequence
  ENSG00000279085_4 (sequence is synthesized)
tatgaaagaaagataaaataacttactgggtatggtggtgtatgcttgtagttccagcactttgggaggctgaggtgaattgcttgagcccatgaatttgaggctgcagtgagctatgac

SEQ ID NO: 862350 - DNA, 120 bp, Artificial Sequence
  ENSG00000279085_5 (sequence is synthesized)
agagtaagaccctgtctcaaaaaaaaacaaaaaaaaattcctaaatcccactattctgatgtacaacaacgttgacatttccaacaaaaacaggaactcatggtcaaaattaaaatggaa

SEQ ID NO: 862351 - DNA, 120 bp, Artificial Sequence
  ENSG00000279085_6 (sequence is synthesized)
ggaactcatggtcaaaattaaaatggaatcagatcatgcatcctatttagaaatttgttttttgttgttattgtttcatttcaaactatgtcatgaccatctttcaggacaatagctata

SEQ ID NO: 862352 - DNA, 120 bp, Artificial Sequence
  ENSG00000279085_7 (sequence is synthesized)
caccctatacagcagtttctacagctttcatcgtattccattatataaatattagataacccatcccccactactggatctttaatggtcaacctgtcaattagtgaaccttaaaaccaa

SEQ ID NO: 862353 - DNA, 120 bp, Artificial Sequence
  ENSG00000279085_8 (sequence is synthesized)
cattgcaatgaacatccacatacaattattttcccaagtgaaattttgcctagaagtgggctatttggttccaagggtgcacgtttcttctggagctttggatatatgcagaatcacacg

SEQ ID NO: 862354 - DNA, 120 bp, Artificial Sequence
  ENSG00000279085_9 (sequence is synthesized)
taaggaaaacacctcccatggtgactcaattcaaagctttggaggtcagggttcttactccctcccctggggcagacccagtaaagatgtctaatgagcaataaaccaggccttgccctc

SEQ ID NO: 862355 - DNA, 120 bp, Artificial Sequence
  ENSG00000279085_10 (sequence is synthesized)
acttggagttttactggccctgctttatggcaggatcatcataagcttgactagaaggtttccaagggcaactggaacagttgacagagacaagtgagtctggaaccagcccagaggctg

SEQ ID NO: 862356 - DNA, 120 bp, Artificial Sequence
  ENSG00000279085_11 (sequence is synthesized)
tgtgtgtccagcctggtgtaggaagagggggcaggaaggaagacccagccctggaactggtgttcactgcagaggaaactcaaccccaaagctcaattcaacataaaacacagcagcaca

SEQ ID NO: 862357 - DNA, 120 bp, Artificial Sequence
  ENSG00000279085_12 (sequence is synthesized)
atgcttgactcagaaaaatctaagcataacacgctctctccttagggagactgagatgtgcatattgcattgcaggaaatataaagaaataattccctccaagtacaaatagatttctga

SEQ ID NO: 862358 - DNA, 120 bp, Artificial Sequence
  ENSG00000279085_13 (sequence is synthesized)
aagaataagcttacactggctggcaaagctccaaatcctgggaaggtctgtctgatcactccccagcactaaaatcatcaatagctcccactgtcccttgccttgggcaaggtattcaag

SEQ ID NO: 862359 - DNA, 120 bp, Artificial Sequence
  ENSG00000279085_14 (sequence is synthesized)
ccttcccaaacaccccccaaaaaacaatcaacctagtcaatacagcagaccctgaccacagtctcacaatctcaaataaatacaatgacttgagtgtctttttcatgctattccttcttc

SEQ ID NO: 862360 - DNA, 120 bp, Artificial Sequence
  ENSG00000279085_15 (sequence is synthesized)
atagacagccctttacccccagcacaatgtccatttgcctgattcccacccatccttttagagccgtttaaataaggcctcttccaggaagcctatgctgatttcctgggccaaaatgac

SEQ ID NO: 862361 - DNA, 120 bp, Artificial Sequence
  ENSG00000279085_16 (sequence is synthesized)
ttccaaccctccagggcaattgacttgattcaatgccttgcataggagaaaagcctgagactctccccctaacacaatttacatcactcatccaaccccatcccactctacccagaggat

SEQ ID NO: 862362 - DNA, 120 bp, Artificial Sequence
  ENSG00000279085_17 (sequence is synthesized)
acacccctccactctcagttccccttcctagaacctagtcagtgcctggcacaggatagactgagtggggcagggctgagatcctgagaggtgggaggtagccacctgggacacaagacg

SEQ ID NO: 862363 - DNA, 120 bp, Artificial Sequence
  ENSG00000279085_18 (sequence is synthesized)
actttaggaggctctggtatccaggcacagcactaaagcgcatggtttcctttctaatcctcatgggagctttcagaagttgctagacagtctctgctgggtgccactatgactttaaca

SEQ ID NO: 862364 - DNA, 120 bp, Artificial Sequence
  ENSG00000279085_19 (sequence is synthesized)
cctacatctccatcatctgctcatctcccaatttaacagaggaatacagcctcatgctcagactattagctgttgtagtagcagctgattgtttttattgtatttaatttttactgttat

SEQ ID NO: 862365 - DNA, 120 bp, Artificial Sequence
  ENSG00000279085_20 (sequence is synthesized)
ttttctacttaaagcaagcaacactggttttgtttacaaaagagtttttgcaaggttcctttcaaaacaaacatatttaacttttgagaaggggaaaagtggccgggcatggtggcttac

SEQ ID NO: 862366 - DNA, 120 bp, Artificial Sequence
  ENSG00000279085_21 (sequence is synthesized)
aaaaaaaaaaagaagaagaaaagaaaagggaaaatttaaaaataaaacaacagtacaagggttacgtggatacagtaataactcttggggtttttatgtgtttaatctgaacagggaaaa

SEQ ID NO: 862367 - DNA, 120 bp, Artificial Sequence
  ENSG00000279085_22 (sequence is synthesized)
ttggggtttttatgtgtttaatctgaacagggaaaatcaccagtaaagtggaaagaacatgatattggcgtcaacagtgcagatgcaagctctctggcagcttccctccttaaaactagt

SEQ ID NO: 862368 - DNA, 120 bp, Artificial Sequence
  ENSG00000279085_23 (sequence is synthesized)
aagccagagacttgctttctcagcttcctttgcagctaaaagtggccatgtgacccaattctgatttaaaaaatatttaagaacttaaggggaaatgggaaagacttctagggaggcttt

SEQ ID NO: 862369 - DNA, 69 bp, Artificial Sequence
  ENSG00000279085_24 (sequence is synthesized)
gaacttaaggggaaatgggaaagacttctagggaggcttttactttgctaataaaacagttagacgtga

SEQ ID NO: 862370 - DNA, 70 bp, Artificial Sequence
  ENSG00000279085_25 (sequence is synthesized)
gcctgggcgacagagcaaaactccgaaataacaacaacaaaccaggcaggccaggctcagtggctcatgc

SEQ ID NO: 862371 - DNA, 67 bp, Artificial Sequence
  ENSG00000279085_26 (sequence is synthesized)
tgaaaccccatctctgctaaaaatacaaagattaggccaggcacggtggctggtcaggagttcgaaa

SEQ ID NO: 862372 - DNA, 62 bp, Artificial Sequence
  ENSG00000279085_27 (sequence is synthesized)
tggatggatcacctgacacaaaaatcaggtgggcgtggtggtgcttgcctgtaatcccagct

SEQ ID NO: 862373 - DNA, 80 bp, Artificial Sequence
  ENSG00000279085_28 (sequence is synthesized)
gccactgcactcccagtctgattagcaaggcatggtggcaggtgcctataatcctaactactcaggaggctgaggcatga

SEQ ID NO: 862374 - DNA, 66 bp, Artificial Sequence
  ENSG00000279085_29 (sequence is synthesized)
tctcaaaaaaaaaaaaaaagattagcaaggcatggtggcaggtgcctataatcctgcagtgggcca

SEQ ID NO: 862375 - DNA, 120 bp, Artificial Sequence
  ENSG00000279085_30 (sequence is synthesized)
acactgtctcaaaaaaaatccaggcagatgcagcttgtggtgctgcctctccttcctacctggatcaagaatatgatgtctgcagtcatggcaaccgtattgggaccaagaaaccacaag

SEQ ID NO: 862376 - DNA, 120 bp, Artificial Sequence
  ENSG00000279085_31 (sequence is synthesized)
ccaatttaaggatagtgacatggaaaataacttgatatatagttaagccactgccctaactctgaactactctcctcttgattttttatgtgaaaaataataaaatatacccatttaagc

SEQ ID NO: 862377 - DNA, 120 bp, Artificial Sequence
  ENSG00000279085_32 (sequence is synthesized)
cattgttggtttgggtttctattccatgcaggcaaaaatattcttaatgaacacggagcttggcacaaatggattcagtggacaaatgtcttctaagtgcacacagtggctgtggttcct

SEQ ID NO: 862378 - DNA, 120 bp, Artificial Sequence
  ENSG00000279085_33 (sequence is synthesized)
ttaacggagccacttcacctctcaaagatcagtttctttacgagtaaggtcaatgatacttacttcaaatctgaggattaaaagagatagtgcatgtaaaacacctaccagcagactccg

SEQ ID NO: 862379 - DNA, 120 bp, Artificial Sequence
  ENSG00000279085_34 (sequence is synthesized)
agtgcatgtaaaacacctaccagcagactccgcacatagtaggtctctacaaatgcacaataaatgtgcaaatagaggccaggcgcggtgggtgatgcctgtaatcccagcactttggga

SEQ ID NO: 862380 - DNA, 90 bp, Artificial Sequence
  ENSG00000279085_35 (sequence is synthesized)
cgcgccattgcactccagcctaagaaaaaaaaagtgcaaatataatataaagactcacagatgtatttgtgagttgatgggattgcaggc

SEQ ID NO: 862381 - DNA, 120 bp, Artificial Sequence
  ENSG00000279085_36 (sequence is synthesized)
agactcacagatgtatttgtgagttgatgggattgcaggcgggcagggagaggggaactgcctaaatgtttaagatccaaagcaatagctctctaacagaacaatctggggaggcagtaa

SEQ ID NO: 862382 - DNA, 120 bp, Artificial Sequence
  ENSG00000279085_37 (sequence is synthesized)
ttcaagggagtctacctttatccactgtcgaatcatgtcctgtttcacaggtggagagagtgggatgagggacaaatgggtaagcagatactgttcacaagtctggcctgtgttccacac

SEQ ID NO: 862383 - DNA, 77 bp, Artificial Sequence
  ENSG00000279085_38 (sequence is synthesized)
taagcagatactgttcacaagtctggcctgtgttccacaccagtctgtcacttgtcagttcttgattaaaagtaggg

SEQ ID NO: 862384 - DNA, 120 bp, Artificial Sequence
  ENSG00000279080_0 (sequence is synthesized)
atggggttttccaaacagttcttcacattctattaggacttctatggctacagatatgtgtgtgttttcagcattaactgtgattttttgttgttgttactgttttgttttgtttttttt

SEQ ID NO: 862385 - DNA, 120 bp, Artificial Sequence
  ENSG00000279080_1 (sequence is synthesized)
attacaggcgtgagccaccgcgccctgcattggttaccttttatggttggcactggatggatggatggccatttatggtagtgatgcaacatttctctcaaaataaatttaagtcagttt

SEQ ID NO: 862386 - DNA, 78 bp, Artificial Sequence
  ENSG00000279080_2 (sequence is synthesized)
agtaagccaatttgaagaggtgattaagtacataattgtaaaggtggttgatgaatatgccaaaaactgtgaagatgg

SEQ ID NO: 862387 - DNA, 120 bp, Artificial Sequence
  ENSG00000279080_3 (sequence is synthesized)
taaaggtggttgatgaatatgccaaaaactgtgaagatgggatgaagatgaccaaagtctatcagcagttcttaaagtaagacctggggacccctgtgaacacgtgataccctttcagag

SEQ ID NO: 862388 - DNA, 67 bp, Artificial Sequence
  ENSG00000279080_4 (sequence is synthesized)
accatcttggcctcccaaagtgctggtgtacacgagccactgcagctggccagttattttttaagtt

SEQ ID NO: 862389 - DNA, 120 bp, Artificial Sequence
  ENSG00000279080_5 (sequence is synthesized)
gtacacgagccactgcagctggccagttattttttaagttttttaaaaaatttttaattttaatttttgtgggtacatagtaggcatatatatttattattgttatttttaaatgaatta

SEQ ID NO: 862390 - DNA, 120 bp, Artificial Sequence
  ENSG00000279080_6 (sequence is synthesized)
atattttgaaattttcacactttaaatttctaaaatggtaaatatagataaagaaaatccagatgattaaaaaatctttgtgatcctcaataatttttcagagtataaagggatcaaata

SEQ ID NO: 862391 - DNA, 120 bp, Artificial Sequence
  ENSG00000279080_7 (sequence is synthesized)
ggccaaaaaacttgagaactgctgagttagatcattccaagggcccacccagtgctaaaaatgtccacagtttcaaaaatgaaactatttatagtttcagccttttgggcaacaacatct

SEQ ID NO: 862392 - DNA, 120 bp, Artificial Sequence
  ENSG00000279080_8 (sequence is synthesized)
cttccaagttttgacctttggtataaaacaggatgtctctgaatgtgtcctgaatcagcttttagagtcccgggggtctctcatgttctgtcactgagactcagtaaacagacttctgta

SEQ ID NO: 862393 - DNA, 74 bp, Artificial Sequence
  ENSG00000279080_9 (sequence is synthesized)
tcatgttctgtcactgagactcagtaaacagacttctgtacatacggtattgctatagaaaacgtgcacagcca

SEQ ID NO: 862394 - DNA, 61 bp, Artificial Sequence
  ENSG00000279080_10 (sequence is synthesized)
gaaaaaaaagaatacatgcacacacatatgtctgtaacacagtaacgtcctcctctgctag

SEQ ID NO: 862395 - DNA, 120 bp, Artificial Sequence
  ENSG00000279080_11 (sequence is synthesized)
acacatatgtctgtaacacagtaacgtcctcctctgctaggtttaatatgttcatactctagatgtgtaaccagacagtaagggctttgagggcaggaactgtgttctataataaaccaa

SEQ ID NO: 862396 - DNA, 120 bp, Artificial Sequence
  ENSG00000279080_12 (sequence is synthesized)
cgaatatgcctggcacctgccacaggctgctgggctgcacactcaggctttgcctgccaggatcttacagcctcccagggaagatgagagcaacacgcggaccagtgaagggaagcagga

SEQ ID NO: 862397 - DNA, 120 bp, Artificial Sequence
  ENSG00000279080_13 (sequence is synthesized)
tgctcactcgggccaggtactgcgtgtgtcacttagacattctgtagagggtgaccaagtgtccaccataacttttccacaactcttccagataagtattgacaccaccattttccagat

SEQ ID NO: 862398 - DNA, 120 bp, Artificial Sequence
  ENSG00000279080_14 (sequence is synthesized)
gaggaaatcgaggctgacaggtgacatggcttgctcagggccagtctatggccagagctgtcatttttccctctcgtgccatgcaagtgccaaatgggggcacaggtggaaaaggtacca

SEQ ID NO: 862399 - DNA, 120 bp, Artificial Sequence
  ENSG00000279080_15 (sequence is synthesized)
cagcacacaggaggtggtgttattttgggctgagagggggacttggaaggcttcctgagggaggagtcagggtctgaactgagctttgggtgggaagatgatttggagcagctgacgata

SEQ ID NO: 862400 - DNA, 120 bp, Artificial Sequence
  ENSG00000279080_16 (sequence is synthesized)
ggagggagacagtggggaggagggctccagtccggacagccctcctgcattcccaccggggccccacagggcaggacacgcggtcctgggctcaccgacatggccaggtgcagcggggtg

SEQ ID NO: 862401 - DNA, 120 bp, Artificial Sequence
  ENSG00000279080_17 (sequence is synthesized)
ttgccgtgctctccgcgggcatccgcgttggccccgtgggtcagcagcactatggcacagtcgaagcggttgcgcatcaccgccacgtgcagggccgtgttccccgcggagctggtgctg

SEQ ID NO: 862402 - DNA, 120 bp, Artificial Sequence
  ENSG00000279080_18 (sequence is synthesized)
ttcacgttgcagccccgtttcagcagcatgcgggccatctgcgggagacggtcaggctgagttagcacaggcactcggggagctgccgcaccccgggacacgtgggcactgccacttctg

SEQ ID NO: 862403 - DNA, 120 bp, Artificial Sequence
  ENSG00000279080_19 (sequence is synthesized)
ctctgagaggcctacaggtactgggatgttggaaagcgctagcaagaggattccaggggcaggccccagttctaggggggcctagactgcctcccatcccatcagcatcccaagactagg

SEQ ID NO: 862404 - DNA, 120 bp, Artificial Sequence
  ENSG00000279080_20 (sequence is synthesized)
gacaaaaagccaaagatgtgctgactgttttaagaggcttctggtcctttcctagtgccaacagaacccactctccttgcaaaggctcctctggggcctgtcctgaagcaccccgctccc

SEQ ID NO: 862405 - DNA, 120 bp, Artificial Sequence
  ENSG00000279080_21 (sequence is synthesized)
tgcatccctccctggaaccctgcaaaggtatcacctctcactgggccttggcaatgcacatccctggcagagccttgggaacagggaggggagcctggctttggagtcacagacctgagc

SEQ ID NO: 862406 - DNA, 120 bp, Artificial Sequence
  ENSG00000279080_22 (sequence is synthesized)
ccaaagcccagcttcactcatcccagctgcctgcgcttggatgggtcactgtagccatgtgcacttcagggcttctgtgaagatgggaatgcaagtccccacctcacagcatgtgatgac

SEQ ID NO: 862407 - DNA, 120 bp, Artificial Sequence
  ENSG00000279080_23 (sequence is synthesized)
aatgagtgaccaaacctacacggaagggcctgactcggtgtccggctcctggaatgcagaggtaccctgaggctggcagtgccctccctcctggcccatcacattgagaagtaggccatg

SEQ ID NO: 862408 - DNA, 120 bp, Artificial Sequence
  ENSG00000279080_24 (sequence is synthesized)
aactctggggcatcccattctctgtcaagctgtgcttcctggtgatgagaccagaggcctccatcctcccaggaggacagagcttagcttaggggaagaactcagaggagatgcccagcc

SEQ ID NO: 862409 - DNA, 120 bp, Artificial Sequence
  ENSG00000279080_25 (sequence is synthesized)
ctcagaggagatgcccagccaggctccctgtgtgtgcagctaggcccagcaccaccaccaccaccatcatcatccatcatcatcatcatcatcttgatggttaataatgagtgtcaactt

SEQ ID NO: 862410 - DNA, 120 bp, Artificial Sequence
  ENSG00000279080_26 (sequence is synthesized)
ggattgaaggatgtaaagtattgaccctgggtgtgtctgagagggtgctgctaacggagattaacatttgagtcagtaggggaaggcagacctacccttaatctgggtgggcaccatcta

SEQ ID NO: 862411 - DNA, 120 bp, Artificial Sequence
  ENSG00000279080_27 (sequence is synthesized)
cgagactccgtctcaaaaaaaataaaataaaaaaataaacccccctctctctctatatatatatctcctgttagttctggccctctagagaatcctgactaataatacaatcatcatcac

SEQ ID NO: 862412 - DNA, 120 bp, Artificial Sequence
  ENSG00000279080_28 (sequence is synthesized)
aatcatcatcacgccaccttctatttgggaagcactttacaatttgtgccgagttttgtcacacactgccttgctgacttcatcacatcgccaaagcagaattcatggatgaggaaactg

SEQ ID NO: 862413 - DNA, 120 bp, Artificial Sequence
  ENSG00000279080_29 (sequence is synthesized)
aggcacagggcggatccccccgcccagccagagagcagcagagccctgccaggatcccagctcttcatggacttctctgcctgcacacccactgcaaggtcagcccccaagtgctagcct

SEQ ID NO: 862414 - DNA, 120 bp, Artificial Sequence
  ENSG00000279080_30 (sequence is synthesized)
cagggtcctctcgggaacctgcttcctgagggccctgaggacctgcggggcccggccccctgccccacccacccacctcaggatccactcacctctgcgttcttggcccagtggaggggg

SEQ ID NO: 862415 - DNA, 120 bp, Artificial Sequence
  ENSG00000279080_31 (sequence is synthesized)
ctggctccgtaacgggggtctttgctgtggatctggctgctgtccatgctgatgatcatctccgcacacctggtgagagaggggccccggttggtgagcagaagctagggtctgcgtggc

SEQ ID NO: 862416 - DNA, 120 bp, Artificial Sequence
  ENSG00000279080_32 (sequence is synthesized)
gtgggatgaagccaggacttggagcttcatctactgcttacagagagcatcactgcaaacaaagttcagcaaacccaaccagcacactcaccatggttaaggctgtactgagcccctcaa

SEQ ID NO: 862417 - DNA, 120 bp, Artificial Sequence
  ENSG00000279080_33 (sequence is synthesized)
ggcacaactaaccccctcctccaggaagccttcctgatgctgccaccagcaatgatcaccctccctggtactggctttagagtcagatgggcttgaagtcaagccccagcttcctcactg

SEQ ID NO: 862418 - DNA, 120 bp, Artificial Sequence
  ENSG00000279080_34 (sequence is synthesized)
gtggcctccagaagctgagcaacatggagagagtgctgagaggagtggctggggtgtaaggaagaccaggcatttcagagcccagttctgtgcctggcacacagccaccctccacctcct

SEQ ID NO: 862419 - DNA, 120 bp, Artificial Sequence
  ENSG00000279080_35 (sequence is synthesized)
taccacactgtcagtgagtcacacagtgacctgcatgctataggaagcagtatgacagagtgggaaagagcacaattgctttctactcggtgcctgaggcaagcagtgtccaccagagat

SEQ ID NO: 862420 - DNA, 120 bp, Artificial Sequence
  ENSG00000279080_36 (sequence is synthesized)
cttagcatctccagcctcagagcagaggccccgggttcacaagcctcattaggccccgcctggcccaaagaaagtgctccatcattgtatcatgggtaggaatctcggttcacaagttca

SEQ ID NO: 862421 - DNA, 83 bp, Artificial Sequence
  ENSG00000279080_37 (sequence is synthesized)
atcattgtatcatgggtaggaatctcggttcacaagttcagctgtgcaaggagaagactttaaaatttttctggctgggcgcg

SEQ ID NO: 862422 - DNA, 120 bp, Artificial Sequence
  ENSG00000279080_38 (sequence is synthesized)
ggaatgcagggacttgaatggacatttgcagacccatgtacacagcagcattcttcacaacagacaaaaggtggaaacaacccaggcgtctatcagtgaaggactgaatggataaacaaa

SEQ ID NO: 862423 - DNA, 120 bp, Artificial Sequence
  ENSG00000279080_39 (sequence is synthesized)
atagtattctgccttaaaaagaaaggaaattctgatacgtgctgcaacatggatgagccttgaagacatcatgctaagtgaaataagccaggcacaaaaggacaaacgctgtatgatttc

SEQ ID NO: 862424 - DNA, 120 bp, Artificial Sequence
  ENSG00000279080_40 (sequence is synthesized)
actgatacgaggttctagaacaggcaagttctgagagacagagaggatatgggacttatcgggggctgtggggaggggagaatcgggagttattaatggttacagtttctgtttgaggtg

SEQ ID NO: 862425 - DNA, 120 bp, Artificial Sequence
  ENSG00000279080_41 (sequence is synthesized)
ggtgataagaaaagttttagaaaggggtaatggttggacaacattgtaaatgtgattaaaaccaccgaattgtacacttaaaagtggttaaaatgggccgggtgtggtggctcacgcctg

SEQ ID NO: 862426 - DNA, 120 bp, Artificial Sequence
  ENSG00000279080_42 (sequence is synthesized)
gagcgaaactctgtctcaaaaacaaaaaacaaaagtggttaaaatggcaaattttatgttatatataatctatcacagttggaaaaaataaacataatatatcagaatcattgtatactt

SEQ ID NO: 862427 - DNA, 120 bp, Artificial Sequence
  ENSG00000279080_43 (sequence is synthesized)
tcaataggtggattgtatggaataggaactatatctcaataaagcttttttttttttttttttttagtgcaattactaggacagcccacatgggtttaattcccaggtctggcacttact

SEQ ID NO: 862428 - DNA, 120 bp, Artificial Sequence
  ENSG00000279080_44 (sequence is synthesized)
gactgcctgactttgagcaaattacttaatctctctaagccctggtttcctcatctgttttttgtttgtttgtttgagacaggatttccctttgtcacccaggctggagggcaatggcat

SEQ ID NO: 862429 - DNA, 64 bp, Artificial Sequence
  ENSG00000279080_45 (sequence is synthesized)
ttggccctcagctttagagggggaataaaatacatcagctctctgggctatagtgaaatagccc

SEQ ID NO: 862430 - DNA, 120 bp, Artificial Sequence
  ENSG00000279080_46 (sequence is synthesized)
ataaaatacatcagctctctgggctatagtgaaatagcccacatgaaggctaagccggtggctgggacagcgttagtgttcagctgctgttctctattattaggggtgcccagcacaggc

SEQ ID NO: 862431 - DNA, 120 bp, Artificial Sequence
  ENSG00000279080_47 (sequence is synthesized)
ccaggatttatgctgcccagctccctacagcccttatgccagcgcttggtgctcagcactaggcacatggagtcaggcccagcttctttccctgggccctctggagccccccaagtcttc

SEQ ID NO: 862432 - DNA, 120 bp, Artificial Sequence
  ENSG00000279080_48 (sequence is synthesized)
acccgagtggccagctccggctagtgtccatggcttggctcgggctctgctgcccccaaaccttccctgaactccagctgcctgatgccgtctctgagctcctagtgcagcccccaggca

SEQ ID NO: 862433 - DNA, 120 bp, Artificial Sequence
  ENSG00000279080_49 (sequence is synthesized)
tcctcagtctcagcctccatctcactgtctgggattatctgtttcccttcctcagcaggggcttaaccatctgagaaccgcaggcacaaaccgagctttgtgggaaaggtcagctgcatt

SEQ ID NO: 862434 - DNA, 69 bp, Artificial Sequence
  ENSG00000279080_50 (sequence is synthesized)
caggcacaaaccgagctttgtgggaaaggtcagctgcattgaaaaacagcagcgaggcaagtagatcac

SEQ ID NO: 862435 - DNA, 66 bp, Artificial Sequence
  ENSG00000279080_51 (sequence is synthesized)
cagcgagggagctcctagtctgagctgtgagggaaccacttgtcagtaacactgaggccgtgggat

SEQ ID NO: 862436 - DNA, 120 bp, Artificial Sequence
  ENSG00000279080_52 (sequence is synthesized)
gtgagggaaccacttgtcagtaacactgaggccgtgggattcttggagtagggctgtgctggctgccaagtcgataagggatctccctgctccactcaaggtaggagcctcttcctttgt

SEQ ID NO: 862437 - DNA, 120 bp, Artificial Sequence
  ENSG00000279080_53 (sequence is synthesized)
cttctgtgcaaagatcctcttatgtgatgggacgctggacccacccaggatggcctgtgtggggacagagggaccggtgagggctgaggttgtttgaagagagagaaaactggtcaatta

SEQ ID NO: 862438 - DNA, 120 bp, Artificial Sequence
  ENSG00000279080_54 (sequence is synthesized)
cagctcctgcccagtacagctcagggtggctggagacaagcaagagtggggccatgtgccagccctctgggtagagaagagcatcacctggtgtccactcaggtcacaacctgcaaatgg

SEQ ID NO: 862439 - DNA, 120 bp, Artificial Sequence
  ENSG00000279080_55 (sequence is synthesized)
ggaacctgactgcggggctgggggtgttggtatcttctctgtttggtcaagtatttctgaaagctctagctcattctggctgtgcttgggagattcaaggaaaggagggtttgtccaggc

SEQ ID NO: 862440 - DNA, 120 bp, Artificial Sequence
  ENSG00000279080_56 (sequence is synthesized)
ttggtccagcccttagaagggctagcaatgccccatggggctagcaaggtggatgcagctcccagaggaaggaacaacctgaggacaggcacaagtgccagcctccctgcctgagtgctg

SEQ ID NO: 862441 - DNA, 120 bp, Artificial Sequence
  ENSG00000279080_57 (sequence is synthesized)
cccgtccatgccttctcactgcttgtctggcactgcgctatgagattctgggtggctggggtgtctcctgtcctggagtggcttattcatttcggtgaggctggtgctttagcacagtgc

SEQ ID NO: 862442 - DNA, 120 bp, Artificial Sequence
  ENSG00000279080_58 (sequence is synthesized)
caggatcgaaggactcattggctcattcattcattctagatgttgttcctgttagatagtattttttttcttgagatggagtcttgttctgtcgccctggctggagtgctgtggcacaat

SEQ ID NO: 862443 - DNA, 69 bp, Artificial Sequence
  ENSG00000279080_59 (sequence is synthesized)
gtcttgttctgtcgccctggctggagtgctgtggcacaatctcaaatcactgcaacctctgcctcccag

SEQ ID NO: 862444 - DNA, 120 bp, Artificial Sequence
  ENSG00000279080_60 (sequence is synthesized)
gtattttgagatttgagatattcatttatctttttatctcatcccctacccctttgaagacaattttcctgacaccaggggttcccaggctcccaaaacatgagcctgtacctgcctccc

SEQ ID NO: 862445 - DNA, 120 bp, Artificial Sequence
  ENSG00000279080_61 (sequence is synthesized)
aacgtgccaccagccagaaaggaaagaggcatctaggtggacgggcactcggccaccttaccaagcatttcccaggctttgagctgggcacacaagaaaccaaggagcactgaagccatc

SEQ ID NO: 862446 - DNA, 120 bp, Artificial Sequence
  ENSG00000279080_62 (sequence is synthesized)
ggggggctgttcagatcaggctgggctgggttagaggaggggccaggtgggccttggggttgcatcagactccagaactggagcaccacctggaggggagctggaaagaggagaccccaa

SEQ ID NO: 862447 - DNA, 120 bp, Artificial Sequence
  ENSG00000279080_63 (sequence is synthesized)
ctggaaagaggagaccccaaagagggctaagattggttgtctccagttttatagagggagattcactcctaggaattaaggtacattaaataaatttatttttatttatttatttattta

SEQ ID NO: 862448 - DNA, 120 bp, Artificial Sequence
  ENSG00000279080_64 (sequence is synthesized)
aagtgttgggattacaggcgtgagacaccgcgcccagccagaaaaattttaaagtctcctccttgcacagctgaacttgtgaaccgagattcctacccatgatacaatgatggagcacct

SEQ ID NO: 862449 - DNA, 120 bp, Artificial Sequence
  ENSG00000279080_65 (sequence is synthesized)
tctttgggccaggcggggcctaatgaggcttgtgaacccggggcctctgctctgaggctggagatgctaagatctatggtggatactgcttgcctcaggcacgggacaggtgacaggaga

SEQ ID NO: 862450 - DNA, 120 bp, Artificial Sequence
  ENSG00000279080_66 (sequence is synthesized)
gctggagcccagcaggccagcagatggggaggggaggaggtcttaccccttctgagagaacttcatggccgagtggatggggtagccgttggggcccatgatgttgcaccgagcattgca

SEQ ID NO: 862451 - DNA, 120 bp, Artificial Sequence
  ENSG00000279080_67 (sequence is synthesized)
cagcagcagcacgcggaccatctcctgcttccccagctggcaggccaggtgcagcggggtcagcccttggttattcacctggttcaggccagccactgcgttccttccaaggagctgatg

SEQ ID NO: 862452 - DNA, 86 bp, Artificial Sequence
  ENSG00000279080_68 (sequence is synthesized)
ggttcaggccagccactgcgttccttccaaggagctgatgaaagaggaagggaagtttgactccataggatgctgataagaacgta

SEQ ID NO: 862453 - DNA, 120 bp, Artificial Sequence
  ENSG00000279080_69 (sequence is synthesized)
agtgagctgagattgcatcattgcactctagcctgggcaatagagcaaaaactctgtctaaaaaaaaagaacgtaaagagaagcaccaggaaagccaagtgccagtgtggatgggaggga

SEQ ID NO: 862454 - DNA, 120 bp, Artificial Sequence
  ENSG00000279080_70 (sequence is synthesized)
accaggaaagccaagtgccagtgtggatgggagggaaggggtcgacctggcatgactgtggctcacatgaaacatttctgagtcaaggaacttaaaaggtagctgtatctcaggatgggc

SEQ ID NO: 862455 - DNA, 120 bp, Artificial Sequence
  ENSG00000279080_71 (sequence is synthesized)
actgggggtccaggtgggaatgattcttgcttttcattctgtcctgactgatttttttctacatgcaggtactatgttttcaatgaaagaacagcagtattaaaaagagagccaggggcc

SEQ ID NO: 862456 - DNA, 120 bp, Artificial Sequence
  ENSG00000279080_72 (sequence is synthesized)
aggcgcagtggctcatgcttgtaattccaacacactgggaggtgagaggatcacttgagaccaagagtgtgataccagcctcggcaacatagggagaccccatctttaccaaaaaaattt

SEQ ID NO: 862457 - DNA, 67 bp, Artificial Sequence
  ENSG00000279080_73 (sequence is synthesized)
ctgctgtctcaaaaaaaagaaagtgctaggagggttttactgtctcacttttggctcagtgctgtcc

SEQ ID NO: 862458 - DNA, 120 bp, Artificial Sequence
  ENSG00000279080_74 (sequence is synthesized)
aggagggttttactgtctcacttttggctcagtgctgtccccatgaggttcattacaaccacagtgtacccatgtgacaccagggtcacctcacagcagtcccactggacctgaaggcag

SEQ ID NO: 862459 - DNA, 120 bp, Artificial Sequence
  ENSG00000279080_75 (sequence is synthesized)
gccagagacacagcaggaagagcaaagggctggcatcgaggccaatgtaaggtcaagccccactctctcagctttgtggccctccctgggcacgcttcttaattaacaacactgaacctc

SEQ ID NO: 862460 - DNA, 120 bp, Artificial Sequence
  ENSG00000279080_76 (sequence is synthesized)
agtttcttcggagaggaaaggggaataatgacctccaccccatgagtgtattctaagaattaactggaacacatacaacactcagttcaaggtcaggcaccaatcagcaccggataaagg

SEQ ID NO: 862461 - DNA, 120 bp, Artificial Sequence
  ENSG00000279080_77 (sequence is synthesized)
acagctgcagtcgtgcatgactatcgagaagcgggtgtgcacacccccgcatggaggcagggtctgcgcggcaccatgctgggtgcgcagaggattctcggtgaaagtggagttcaacag

SEQ ID NO: 862462 - DNA, 120 bp, Artificial Sequence
  ENSG00000279080_78 (sequence is synthesized)
gcgcagaggattctcggtgaaagtggagttcaacagtgggtggagaattcccttccctgagagcaagaagcataagatatgaatccacattttctgggccgggcacagtggctcacacct

SEQ ID NO: 862463 - DNA, 61 bp, Artificial Sequence
  ENSG00000279080_79 (sequence is synthesized)
ggcaaaaccccatccctactaaaaatacggaaaccatcacttcaacccaggaggtggaggt

SEQ ID NO: 862464 - DNA, 120 bp, Artificial Sequence
  ENSG00000279080_80 (sequence is synthesized)
aaaaaaaaaggaatccacattttctggtataacgtagttgcattctgatgccaaggcagagagaacatgatctttagaagaattttctaattctagacaataaaacataatccaacatcc

SEQ ID NO: 862465 - DNA, 120 bp, Artificial Sequence
  ENSG00000279080_81 (sequence is synthesized)
tgccttttctgttcaatctaatatatgaaatagctatttaatagtatcaccccatctgcttgcccacaattaaaaaatcacatcttttgcccaggtaatcaaaaacgttaacaggagggc

SEQ ID NO: 862466 - DNA, 120 bp, Artificial Sequence
  ENSG00000279080_82 (sequence is synthesized)
ctctggcacaaatgcctacaggaactggagacagtttggtttgcttggtttgaattcctgtaaaatagggttgtccaatattttggcctccctgggccacatcagaagaattgtcttggg

SEQ ID NO: 862467 - DNA, 120 bp, Artificial Sequence
  ENSG00000279080_83 (sequence is synthesized)
tcacacataaaatacatgaacgctaacaacagctgatctaaaaaaaaggtccatgcatggatctcataatgttttaagaaagtttgtgaatttgtgttgggccacattcaaagccgtcct

SEQ ID NO: 862468 - DNA, 120 bp, Artificial Sequence
  ENSG00000279080_84 (sequence is synthesized)
gggctgcatgcagcctgcagggccacagattggacaagcttgcaaaaggttaagcccaggtcccgctggcccacgagcccctccaggcaggcatctggctcacagtttgtgctcaggaaa

SEQ ID NO: 862469 - DNA, 120 bp, Artificial Sequence
  ENSG00000279080_85 (sequence is synthesized)
agtggaactgaactaactgactggagctgggccttttttggggtttattttgctgggttggaggccgtccccaggtttatcaagcaaagagactgaggacgtggctcctggaaaagggct

SEQ ID NO: 862470 - DNA, 120 bp, Artificial Sequence
  ENSG00000279080_86 (sequence is synthesized)
gggagggaagagccagggaggggtctgcaccctccatgaaggagctcaggcctcaaggaccaatgggggacagtgagaggcctgagagtgacacctgagcctaggggcccaaagggaacc

SEQ ID NO: 862471 - DNA, 120 bp, Artificial Sequence
  ENSG00000279080_87 (sequence is synthesized)
gtggacaccgggaggtatcagtaccagtcaccctgcccctccccctgctcacctgcagcacctgagaattgtcaccctggacagcataatggaagacggtctctcccttgtagtcggtga

SEQ ID NO: 862472 - DNA, 120 bp, Artificial Sequence
  ENSG00000279080_88 (sequence is synthesized)
catccatctgagtgtggcagtactgcaccagctccaccaggatctccccatcacccttgcggcaggccaggtgcaggggtgtgcagccctcctcgttctccgcgcaattggcacagctgc

SEQ ID NO: 862473 - DNA, 120 bp, Artificial Sequence
  ENSG00000279080_89 (sequence is synthesized)
aggagagggccagggtgagcagaggtgagcaggtgtggtacaaggtggcagggggacctaagtgcacatgcagggaagtgcactcggaaactcggactttctggtttatttgagctcaag

SEQ ID NO: 862474 - DNA, 120 bp, Artificial Sequence
  ENSG00000279080_90 (sequence is synthesized)
agcattcccgccactcagctagttgggctgatttgaatgtaattatatctgatgtgacctgtatcaggtttctgttcagtttgctcactcgtacaagagatgggccccagggccacacca

SEQ ID NO: 862475 - DNA, 120 bp, Artificial Sequence
  ENSG00000279080_91 (sequence is synthesized)
gcaggaagtgggcagggtggtggcacaggaaagggtcacagaacacggatatctcactagcctcaggcaattcacttaacctttctgggcgtcaatatccttatcgacacaagctgctgt

SEQ ID NO: 862476 - DNA, 120 bp, Artificial Sequence
  ENSG00000279080_92 (sequence is synthesized)
gcctgccccaggaaatggacagagtgatggtgagatgagacagtgctgtccaaaagcacgcctggaaactaaagtgcagtgagggtttttgttttgttttgtttttttgaggtggagttt

SEQ ID NO: 862477 - DNA, 120 bp, Artificial Sequence
  ENSG00000279080_93 (sequence is synthesized)
ggtgtgagccaccacgcccggccagcagtgaggttttgagttctgggcctgggagcttaactgagctatctaggatagagactcagaggaggtgtggctacctctgcacaagatggccaa

SEQ ID NO: 862478 - DNA, 120 bp, Artificial Sequence
  ENSG00000279080_94 (sequence is synthesized)
atggccaactggtgccctgtgcaagggtggggacagtgccctcaccaggggcaacagctgctccatctgctggctgaatggattcacaaaaggaggccttcagcttccagaagagcagcc

SEQ ID NO: 862479 - DNA, 120 bp, Artificial Sequence
  ENSG00000279080_95 (sequence is synthesized)
tgggcagacaccaaggatccaagcccctctttcaccctctctggctgagtgacctgcacaagtcctgttagctctctctagaatgatgatacctgggccgggcatggtggctcacgcctg

SEQ ID NO: 862480 - DNA, 120 bp, Artificial Sequence
  ENSG00000279080_96 (sequence is synthesized)
ataaaataaaataaagtaaaataaaatgacgataccttgtgggggttgggaaaattcaatttcatggtgggtagaaatcagctcccacagacctggcacctggtgagcactccggactct

SEQ ID NO: 862481 - DNA, 120 bp, Artificial Sequence
  ENSG00000279080_97 (sequence is synthesized)
cggactctggaaacattacattgtccttcttacattttaatctggtagcaacgcagcacctttttttttttttttttttttttcctagagacaaggtctcattctgtcacccaggctgaa

SEQ ID NO: 862482 - DNA, 120 bp, Artificial Sequence
  ENSG00000279080_98 (sequence is synthesized)
ctgggctcaagcaatcctcctgcctcagcatcccaagtagctaggagtatagacacatgctaattttttaattttttcgtagagacaaggtcttgctattttgccaggctggtcttgaac

SEQ ID NO: 862483 - DNA, 86 bp, Artificial Sequence
  ENSG00000279080_99 (sequence is synthesized)
ctaggagtatagacacatgctaattttttaattttttcgtagagacaaggtcttgctattttgccaggctggtcttgaactcctag

SEQ ID NO: 862484 - DNA, 120 bp, Artificial Sequence
  ENSG00000279080_100 (sequence is synthesized)
tcctttttaagtcaaactatggaggggaaccgaggcctgcggcccccactgcccacacaagcaggtacacacacgttgtccaaatggtcttgttcccttgctcacctgatgatacggctg

SEQ ID NO: 862485 - DNA, 120 bp, Artificial Sequence
  ENSG00000279080_101 (sequence is synthesized)
tgatggaagcactcgcggatccctagctccacagccaggtgggccactgaccagctggggtggttacggatgaggtcggtcaggtgctgcaggacctcagtgtgcaggacctgaggggag

SEQ ID NO: 862486 - DNA, 120 bp, Artificial Sequence
  ENSG00000279080_102 (sequence is synthesized)
ctctcatagaagggtagcagctgggaagaatactgatggaaattcactagggcgtcagcctccaactccagctggaagagtctgtagagccaggacagaggagcaagacccgaaatgagt

SEQ ID NO: 862487 - DNA, 120 bp, Artificial Sequence
  ENSG00000279080_103 (sequence is synthesized)
aaatgagtaaggcgggaccctcggcccacatccctgctggaatcagaaggtccccaggctgcggcctggccagctccagcccgactcccctcccaagcaaacacacacacacacacacac

SEQ ID NO: 862488 - DNA, 120 bp, Artificial Sequence
  ENSG00000279080_104 (sequence is synthesized)
acacacacacacacacacacacccctatacacatgtaaatgacataatggcgtttaggttagactttctttgttttttagagacaaggtcttgctctgtaacccaggctggggtgcggtg

SEQ ID NO: 862489 - DNA, 120 bp, Artificial Sequence
  ENSG00000279080_105 (sequence is synthesized)
tcttgctctgtaacccaggctggggtgcggtggtgtgatcatgactcactgcatcttcgaattcctgggctgaagggatcctcctaccttagttcctgagtagctgggattacaggcatg

SEQ ID NO: 862490 - DNA, 81 bp, Artificial Sequence
  ENSG00000279080_106 (sequence is synthesized)
tgttgtaatctcacctcactgcgtctccagagtagctgggattaaaggcgtgtgctgccacacctggctaattttttgtgt

SEQ ID NO: 862491 - DNA, 75 bp, Artificial Sequence
  ENSG00000279080_107 (sequence is synthesized)
tcaagcaattctcctacctcagtctccagagtagctgggattaaaggcgtgtgctggccatgttgcccaggctgg

SEQ ID NO: 862492 - DNA, 120 bp, Artificial Sequence
  ENSG00000279080_108 (sequence is synthesized)
cccccctcagcctctcaaagtgctaggatttcaggcactagccaccgtgagccactgtgcctggcctaatttttttttatttttgttgacagggggtcttgctatgttgcccaggctggt

SEQ ID NO: 862493 - DNA, 120 bp, Artificial Sequence
  ENSG00000279080_109 (sequence is synthesized)
aagtactgggattacaggtgtgagccactatgcttgtctagattttcctttattttgaaaaactttccttttctttggtaatatcatttattatttttatattttattttaccacagccc

SEQ ID NO: 862494 - DNA, 120 bp, Artificial Sequence
  ENSG00000279080_110 (sequence is synthesized)
tattatttttatattttattttaccacagccctgccatatccactttctaatttcattgccacatgtgagagctccagcctcgagtacttggcccctcttcatagtaggaactaagtaag

SEQ ID NO: 862495 - DNA, 120 bp, Artificial Sequence
  ENSG00000279080_111 (sequence is synthesized)
cccctcttcatagtaggaactaagtaagtattgtttaacctaaatgtacagcaacaaaatattatataaattatggtataactatgtaataaactattatgcagtcattaaaatgagata

SEQ ID NO: 862496 - DNA, 81 bp, Artificial Sequence
  ENSG00000279080_112 (sequence is synthesized)
agttttgtcatgttggccaggctgatcttaaactcctggcctcaggtgacctgcctgcctgggcctcccaaagtgctagga

SEQ ID NO: 862497 - DNA, 90 bp, Artificial Sequence
  ENSG00000279080_113 (sequence is synthesized)
ctttgttcatttttaagtgttgaggttgagtccaagttttgctactaaggtgctgtgtgatcttgggaaatccttttccctctctgagcc

SEQ ID NO: 862498 - DNA, 120 bp, Artificial Sequence
  ENSG00000279080_114 (sequence is synthesized)
tgctgtgtgatcttgggaaatccttttccctctctgagccccatttgaaacatgagactaactgtacctgtcctacctacctcccagaggtgctgtgaggacagatgaaaaaccactata

SEQ ID NO: 862499 - DNA, 120 bp, Artificial Sequence
  ENSG00000279080_115 (sequence is synthesized)
aaagcactttcaaaaccataaccattatatgtcagtgatggttacttaaagttctgaccagggcttttaacataccaaaaggttttgtcttgcatacctctacaagcgcagcagccagcc

SEQ ID NO: 862500 - DNA, 120 bp, Artificial Sequence
  ENSG00000279080_116 (sequence is synthesized)
agagtctagtgaaggcagtgcccagagagtgttggctcaacgggaccagcctgttgttccacagagagtgcgttgattaacagttaactactgggcatgtgatctgtgccaaatggaggg

SEQ ID NO: 862501 - DNA, 82 bp, Artificial Sequence
  ENSG00000279080_117 (sequence is synthesized)
cagttaactactgggcatgtgatctgtgccaaatggaggggtcaattaatgaacaattgcataaaatgctctgccctcctga

SEQ ID NO: 862502 - DNA, 120 bp, Artificial Sequence
  ENSG00000279080_118 (sequence is synthesized)
gagcctatgttattatggaggagatcaacaaaatgactaaagtaaaaacatagaataaggaagtacattaaataaactataacgtaatcagtgttacagaaacaacaaaaaccacaacaa

SEQ ID NO: 862503 - DNA, 120 bp, Artificial Sequence
  ENSG00000279080_119 (sequence is synthesized)
agatagggaaggaggaggcggaaggaagccattcctcattgcccttggctgggtttttccttcatctcaccagcctctcaacatcagggtactccacatcaagtgttgccgatatgtcag

SEQ ID NO: 862504 - DNA, 120 bp, Artificial Sequence
  ENSG00000279080_120 (sequence is synthesized)
agaatgacaactgaaaactcatcactggaattagcatcacggaggcatgcacgaccttgacaacattacttttagtggaatggagggaaccaaggcctgattaaagtgggtttaaggaca

SEQ ID NO: 862505 - DNA, 120 bp, Artificial Sequence
  ENSG00000279080_121 (sequence is synthesized)
caatgtgagaatctgaagattgcaaagatagatatttttgaggagttttgctgtggtgaggagcaaataaaggaaaggatagcgaatggggaaagtgtaatcaggcatttgaatgctgac

SEQ ID NO: 862506 - DNA, 120 bp, Artificial Sequence
  ENSG00000279080_122 (sequence is synthesized)
gggaacgatgattctctctcagaacttccactttccattaacagcagactagggaatgtgaaacagaccacctactgaggacagccagaaatgctggacaaattattaaaaaacatctgc

SEQ ID NO: 862507 - DNA, 120 bp, Artificial Sequence
  ENSG00000279080_123 (sequence is synthesized)
tggcaggcactggatacctcaaaagacactgatgactcaccaggctggaaggaatgatggaaacccaggaattgcagtgttcaggtggctgttactggagaggatgggcagacgagcagc

SEQ ID NO: 862508 - DNA, 120 bp, Artificial Sequence
  ENSG00000279080_124 (sequence is synthesized)
accagtaacagcctcatggggctcaggacacagggactggagcccaggcgtctgccaagaggagagccctgatgaacatctcttactttgggttagggtcctaaagaactacgtagccta

SEQ ID NO: 862509 - DNA, 120 bp, Artificial Sequence
  ENSG00000279080_125 (sequence is synthesized)
ggaataagggtgagccatacacagacacgctctcacagagaccacagttcagcctcaagtgatttcagttccagaaactagactgaggttatcctagttgcaatgggagaagcaaaaata

SEQ ID NO: 862510 - DNA, 76 bp, Artificial Sequence
  ENSG00000279080_126 (sequence is synthesized)
gactgaggttatcctagttgcaatgggagaagcaaaaataaattcattctttgtaaggaaacatcaaactaggctc

SEQ ID NO: 862511 - DNA, 120 bp, Artificial Sequence
  ENSG00000279080_127 (sequence is synthesized)
ttatttctacgagcatacttgcaaatacaatgaccaacacataatcaaaactcaccaggcatatgtggagataagacatgaaagaaaaccaacagaaacaatatacaaaagaaacatatc

SEQ ID NO: 862512 - DNA, 120 bp, Artificial Sequence
  ENSG00000279080_128 (sequence is synthesized)
tgtgaggggactgtaaatatttaagttatccaaaatagactttaaagtaactgtgataacattcgagaggttaaaaaaggaaatttagaattttggtgaagagttttgaatgatcaaaaa

SEQ ID NO: 862513 - DNA, 120 bp, Artificial Sequence
  ENSG00000279080_129 (sequence is synthesized)
agcatcaaatggaaattacaaaattaaaaaatataatcaggaaagagtaaacagaataaagcatggagagacagaagaatacaaaatatagtagagtacataagagacacagactatcta

SEQ ID NO: 862514 - DNA, 120 bp, Artificial Sequence
  ENSG00000279080_130 (sequence is synthesized)
ataaaagatctagcatacatacataagtggaggatcagaggcagagtagaaaaagaatcaaatggaagctacatttgaaaagttaatgtctgcaaactttccaaaactgatttttaaaaa

SEQ ID NO: 862515 - DNA, 67 bp, Artificial Sequence
  ENSG00000279080_131 (sequence is synthesized)
agttaatgtctgcaaactttccaaaactgatttttaaaaaacattataggtcaggcacagtggctca

SEQ ID NO: 862516 - DNA, 120 bp, Artificial Sequence
  ENSG00000279080_132 (sequence is synthesized)
ctacttcactccagcttaggcaaaagagtgaaactccatctctgatcacgctacttcactccagcttaggcaaaagagtgaaactccatctccaaataaataaataaaattattctgctg

SEQ ID NO: 862517 - DNA, 83 bp, Artificial Sequence
  ENSG00000279080_133 (sequence is synthesized)
caagaaagccccagaaatccacgcttagcaccttgtaggggttttaaaacagggccccctaaaatcactgatattccttgcac

SEQ ID NO: 862518 - DNA, 120 bp, Artificial Sequence
  ENSG00000279080_134 (sequence is synthesized)
ttaaaacagggccccctaaaatcactgatattccttgcactgagcagtgggaatttgtatctctttaccctttaatctggcgatgtaactgcgttaccaacagaatatggcaaaagtgat

SEQ ID NO: 862519 - DNA, 120 bp, Artificial Sequence
  ENSG00000279080_135 (sequence is synthesized)
gccgtcccagcttccagaccaatgccttaagagactggaagtttctatttctcttctcttgggacccagccatcatgcctcaaggaggctgaagcaagccatggtgacgactcttggtcc

SEQ ID NO: 862520 - DNA, 120 bp, Artificial Sequence
  ENSG00000279080_136 (sequence is synthesized)
tgggccctgagccctgaatgaactaccagccaacagccagcaccaacttgccagttgcgagttaccttatatggtgccatataaagtaaagctgaggctttcccactgagctctgctcaa

SEQ ID NO: 862521 - DNA, 120 bp, Artificial Sequence
  ENSG00000279080_137 (sequence is synthesized)
attgcagatttaaggactaaataaatgattccttttataagccactgtgttctggagtagtttgttacacagcaataactgataatgatacatatgttgcacaatatgtattgtatgtaa

SEQ ID NO: 862522 - DNA, 120 bp, Artificial Sequence
  ENSG00000233431_0 (sequence is synthesized)
gcctgtgtggcttcctctgagcctcgcagggactctgccttgatcacagcgccagggccttttctggcttctcagcagtctgtgtgaaccttcagatggggtgggcacacgtggcacccc

SEQ ID NO: 862523 - DNA, 120 bp, Artificial Sequence
  ENSG00000233431_1 (sequence is synthesized)
cagccaagcaggggacgggccggactcggtcctccagtgtcacctctccctcctgccactggaaccgaggcttagaatcactgaggcggtgggaacatagctgtgggcacaagagtggac

SEQ ID NO: 862524 - DNA, 120 bp, Artificial Sequence
  ENSG00000233431_2 (sequence is synthesized)
atttctacggcgttccctgctgaccaggcgctgttctcacgtgcctcacagcacacattaactcatcttccccgcaaccagccctggagggcagggactgtgattttccccattttacag

SEQ ID NO: 862525 - DNA, 120 bp, Artificial Sequence
  ENSG00000233431_3 (sequence is synthesized)
ggattttaatcacccgttgcatcctctggcgtcgggcagggctggacttcaggctgggttttccccgttcccagctgcacccacgtcgtgtctcctcctggagtctaagtttcctgtgct

SEQ ID NO: 862526 - DNA, 120 bp, Artificial Sequence
  ENSG00000233431_4 (sequence is synthesized)
gtgactgcaggcggagaggagggcccaacgtctaggggatttcatgctgcatctagaagccaaaacgctgacaccccttgaaaaggagggctgggaactgagatgattgacgccccaagg

SEQ ID NO: 862527 - DNA, 120 bp, Artificial Sequence
  ENSG00000233431_5 (sequence is synthesized)
ggaagcgggcgcttcccagaacagcctcggcatgacctggacatggagccaggcggctgctccttgcccaacccatgggggccttgcaatgattaataataataatgatgatgataatgg

SEQ ID NO: 862528 - DNA, 120 bp, Artificial Sequence
  ENSG00000236408_0 (sequence is synthesized)
actcgactctgggactatgaggcagttcatccacacgctccaaactccagcttattgtaggagaccagtgcctcgatctcatgaggtcatctcgacgcctcagctgtaacccttggagaa

SEQ ID NO: 862529 - DNA, 120 bp, Artificial Sequence
  ENSG00000236408_1 (sequence is synthesized)
cctgtggtctctgctcctctgcctgctgacatgatcatcccaggtgcaaaacaggtatgagccactggcattcctgcgcgccagtcttccatcctcttttcctcgagggacccaccggcc

SEQ ID NO: 862530 - DNA, 120 bp, Artificial Sequence
  ENSG00000236408_2 (sequence is synthesized)
ggtcacttataaggaggcacctctgttctccaggtgcacacacaaagcctcccgttatccggtcttgcacgtgcgtccttaggggccagcaccctggctgccttccagagtctgcccggc

SEQ ID NO: 862531 - DNA, 120 bp, Artificial Sequence
  ENSG00000236408_3 (sequence is synthesized)
ttttccatcccatctctgctcccgaaggcatcccgctgcggtcctgggcatcttgcacagaagcccctgcaaatacctacttacataagccacgtacacgttctgtgctattccacggtg

SEQ ID NO: 862532 - DNA, 120 bp, Artificial Sequence
  ENSG00000236408_4 (sequence is synthesized)
gctcttggtgcaatttgtttttatttcctgcaagcagacttttcttattacttaacctttttggccccacatttctttaatctgcaaaatgtggcaatggaacccgatcagagatcttca

SEQ ID NO: 862533 - DNA, 120 bp, Artificial Sequence
  ENSG00000226819_0 (sequence is synthesized)
aaataatcgatcagcagggagcttcgatctgcggggaatgcgaactgccagtccctattcccgccctgaaggtggccaaaaggctgactccctccaagcagcccgcccgcgcctccatcg

SEQ ID NO: 862534 - DNA, 120 bp, Artificial Sequence
  ENSG00000226819_1 (sequence is synthesized)
cccccacccacgtcccactcgccagctgcggactgaaccctcaccctcaagggggtgtagcctcaggggttcttcggcaaagaggtaacggggcttggatttaccacaactctgcggcca

SEQ ID NO: 862535 - DNA, 120 bp, Artificial Sequence
  ENSG00000226819_2 (sequence is synthesized)
aaacacatcggttcgcaaccgagcccacagccccgcgaggcgccccttcttcccagctcccggaggataacttcattgactggcaggtcggcggccacttctgggagggccactgtttac

SEQ ID NO: 862536 - DNA, 120 bp, Artificial Sequence
  ENSG00000226819_3 (sequence is synthesized)
cgaatgagaacctctcatggcacagtccttacagcagggctgccctgtcgcccttgcgcgtccgggtgccgggtcccggcggtgttctgcagcgcgatccggtccccgtgccctgagcca

SEQ ID NO: 862537 - DNA, 120 bp, Artificial Sequence
  ENSG00000226819_4 (sequence is synthesized)
cccagagccctgggcctgcctgcaccctggggcgcgctgactccctgggtcgggtgggggtcccggcaggatgcacttccagctgcggggtccgcggagtttgctcgcacctggtttggc

SEQ ID NO: 862538 - DNA, 120 bp, Artificial Sequence
  ENSG00000232520_0 (sequence is synthesized)
agaggagggagagatcagagtgactagtgcaggcttcctggggaaccatttgagctttgaaggtggggaagaggaatgtcagagagtgggcaaaatacaacaggaaaggtccaaattcac

SEQ ID NO: 862539 - DNA, 120 bp, Artificial Sequence
  ENSG00000232520_1 (sequence is synthesized)
cctctgagggcccggggcacgggggcagcctgctctcctcctggggccctgttccctgtggggactggaagagaggctttgagtctagggcctggggcagccaggactgacgggggtgca

SEQ ID NO: 862540 - DNA, 120 bp, Artificial Sequence
  ENSG00000232520_2 (sequence is synthesized)
gtcctagaagggtcggcagtcacggtggcccaccatggcatctccgtatccttgctgcatgctgcacccactccagctgccagagcacggaggcagagacgtgggagccgatgaaggtcg

SEQ ID NO: 862541 - DNA, 120 bp, Artificial Sequence
  ENSG00000232520_3 (sequence is synthesized)
cacgccagcctcccacctgtgagacaaagggccctgtcactggaagccacgtccagcctggccccgcaggagccagggctctgcgcctaacggaggactgatgggaaagggaaggctggc

SEQ ID NO: 862542 - DNA, 120 bp, Artificial Sequence
  ENSG00000232520_4 (sequence is synthesized)
agcagtgaggtagatgatgaccggccccataaacagccaccaagggtcaccctctccctccccagccctgaaggccaagaaatgggactgggctccttggatttatgaccttctggctcc

SEQ ID NO: 862543 - DNA, 120 bp, Artificial Sequence
  ENSG00000232520_5 (sequence is synthesized)
tgcagagagaggaggactggggcttgacaaggacacgcaggggctaaggactgtccttggatctcagtaggacagctgaccttccctccacccaatgactgctccagtctgatcgttcct

SEQ ID NO: 862544 - DNA, 120 bp, Artificial Sequence
  ENSG00000232520_6 (sequence is synthesized)
ggccacctgataatctctttgtgcaaacaccaggaagccctggttagaggtgtggacaccaggtgttcttgaggaggacagtggtgactcagttttatctgaccccatgctctcaagttc

SEQ ID NO: 862545 - DNA, 120 bp, Artificial Sequence
  ENSG00000232520_7 (sequence is synthesized)
cttttctgtgagacacttcttatgtgctactttggaccctctcacttatctgtgggccattggccactggccccagccacagctgagaccaccaactctgcatggactcagacaggcttc

SEQ ID NO: 862546 - DNA, 120 bp, Artificial Sequence
  ENSG00000232520_8 (sequence is synthesized)
acccaggcacacccagcagcccctgcctcaggtcccagctatgcaccccttaggcttgcctggatactaggatgggagacactgcatccatccatccacgaccagcaagtagaggcaatt

SEQ ID NO: 862547 - DNA, 120 bp, Artificial Sequence
  ENSG00000232520_9 (sequence is synthesized)
aatacccttcaggcgacccaacgcgagctgggagcctgtgcacaaattattctccttttctcccaaaaggattgtgccgagaaacatttgtgcagcttcccggaggatggcccttggggt

SEQ ID NO: 862548 - DNA, 120 bp, Artificial Sequence
  ENSG00000232520_10 (sequence is synthesized)
cgagcaagcagttatgtttgttaccaagcctcggccagctccataacacaccctggagttggcaccacttccttcccagctacactcccctttctctcacacctgctccctggggtcacc

SEQ ID NO: 862549 - DNA, 120 bp, Artificial Sequence
  ENSG00000232520_11 (sequence is synthesized)
tccctaccaaaggaggggcacaggagcctttgtttcccgctctgctttccaagaaacccaaaccaagccatgctgagttccttccagagctccacttccacttcacgggatcctcttagt

SEQ ID NO: 862550 - DNA, 120 bp, Artificial Sequence
  ENSG00000232520_12 (sequence is synthesized)
accacagtcagcacccaacatgcctctgagatgggcgtgtgatcctgactggccagtcggcgccttatttctctggccacagaacttggctcaggagatgacatgtgaccaatccgaatt

SEQ ID NO: 862551 - DNA, 120 bp, Artificial Sequence
  ENSG00000232520_13 (sequence is synthesized)
gatgattctgtctcatccaatcaagacttgagtggactccagcttcccagaaagcctttctccatcatcccagccccacgagatcttacccgcttcactggtaacacccagaatcctcag

SEQ ID NO: 862552 - DNA, 120 bp, Artificial Sequence
  ENSG00000232520_14 (sequence is synthesized)
cacaactgctaccaccaggtactgccttgctcctttacactgttatgttgtttgaatctgttatgcagctgattatgtgtattcctatttctactaggcacacatggttctacctggcta

SEQ ID NO: 862553 - DNA, 120 bp, Artificial Sequence
  ENSG00000232520_15 (sequence is synthesized)
actacagtggattcattgcccaaatgaggtaggcagctgcttcaacatatagagaggccaggtatccaatataaggaaccacattatcccagtttgcctggaactttccaagctttaaca

SEQ ID NO: 862554 - DNA, 120 bp, Artificial Sequence
  ENSG00000232520_16 (sequence is synthesized)
ctgagtagccttggtctccctcagtcctggacagactgggacatttggtcaccttgttcaatgagcaggagcaggaggagagtgttgtctaggagaagcccccttttatttatttccctt

SEQ ID NO: 862555 - DNA, 120 bp, Artificial Sequence
  ENSG00000232520_17 (sequence is synthesized)
gggtctcgctctgtcacccaggttggggtccagtggcaggatcacagctcattgcagcctcaacctcccgagctcatgcaatcctcccacctcagccccccaagtagctgggatgacaag

SEQ ID NO: 862556 - DNA, 120 bp, Artificial Sequence
  ENSG00000232520_18 (sequence is synthesized)
atcctcccacctcagccccccaagtagctgggatgacaagcacaccaccacacccagttattattattattattattatttttaatagagacaaggtctcactacattgcccaggctggt

SEQ ID NO: 862557 - DNA, 120 bp, Artificial Sequence
  ENSG00000232520_19 (sequence is synthesized)
cttggcctcccaaagtgcttacaggtgtgagtcactgcacccggccgggaagcctctttttaaagtaaaggacatagactgcacagattcagcccagactccatctatttatctatttaa

SEQ ID NO: 862558 - DNA, 120 bp, Artificial Sequence
  ENSG00000232520_20 (sequence is synthesized)
ttgagctcctacaatttattgagcttctactatgtgtctgacactctgctaagttctgaagatccagagatgaacaagacctagtcccttccctgaagagtttatagttcagagcaggca

SEQ ID NO: 862559 - DNA, 120 bp, Artificial Sequence
  ENSG00000232520_21 (sequence is synthesized)
ttagggaaattttttgcaaagggctagattacaagtgttttcagttttacaaaccatacagtctctgtcataactaccgtggtctgctgtagctccaaagcagccactgcagacagtgtg

SEQ ID NO: 862560 - DNA, 120 bp, Artificial Sequence
  ENSG00000232520_22 (sequence is synthesized)
aatggacatgactgtgtccccacaagacttgaagggcagcagcctcctggcacagaggtggagaaaaacacacaaagcctcagagcacctgccaggcccctgctgaaggtagcagctcca

SEQ ID NO: 862561 - DNA, 120 bp, Artificial Sequence
  ENSG00000232520_23 (sequence is synthesized)
ggcggccccataggcggcatctcacatggccccatctcctccgccgtggttgactggaccagggaggagcacgtgattcacaggtagcccatcctcaggctgccagtgatggacacgggt

SEQ ID NO: 862562 - DNA, 120 bp, Artificial Sequence
  ENSG00000232520_24 (sequence is synthesized)
ggagaggccagcagagatagtggccgccagctgggacaacggtggtaggagacagagaccgaaaggcaggaaggatagagcagagccaatagacttccctggaccctcaagcccttccaa

SEQ ID NO: 862563 - DNA, 120 bp, Artificial Sequence
  ENSG00000232520_25 (sequence is synthesized)
acctgagccgtgttccaggccccatggggacctcccgggaggtcttgctgtgagcctgtcctgggacccgggcaggcttgcacggagctgagagtcctgtcttctttatttccatgtaca

SEQ ID NO: 862564 - DNA, 120 bp, Artificial Sequence
  ENSG00000232520_26 (sequence is synthesized)
tccttcaacaaaacagcttttgcttccttctttcttgtttaacaattcagtaatttttagaaaatttataaagttgtgcaaccatgcaaccatcactgtcacccagcttccataataaac

SEQ ID NO: 862565 - DNA, 120 bp, Artificial Sequence
  ENSG00000232520_27 (sequence is synthesized)
cacctactattatgcagccatgcaccacataacgacgtttcaggcaacaatgactgcacataccacagtggtcccgtaaaattacaatggagctgaaaaattcctattgcctagtgacgt

SEQ ID NO: 862566 - DNA, 120 bp, Artificial Sequence
  ENSG00000232520_28 (sequence is synthesized)
cacagccattgtaaggtcagagtgcaacacatcactcatgtgtttgtgttgatgctgctgtaaacaaacctaccgcactgccagtcatataaaagtatagcccatacaattatgtgtagt

SEQ ID NO: 862567 - DNA, 120 bp, Artificial Sequence
  ENSG00000232520_29 (sequence is synthesized)
acttaatacttaataataataaacaactatgttgctggtttacgtatttactacactgtgtttttaattgctaataagagtgtactctttttagttattaaaaaaaaagttaactgtaaa

SEQ ID NO: 862568 - DNA, 120 bp, Artificial Sequence
  ENSG00000232520_30 (sequence is synthesized)
ccaggcacacatggttctacctggctaactacagtggattcattgcccaaatgaggacacagtgaggaggtggtcatcagcaacccaggaagagtggcctcaccagaaactgaccctgcc

SEQ ID NO: 862569 - DNA, 120 bp, Artificial Sequence
  ENSG00000232520_31 (sequence is synthesized)
agacctcgatctgagacttccagcctccagaactgtgggacataaattcctgttgtttaaggtactcagtctgcagtgttttattatggcagctcaggtagactgacaacatacttgcca

SEQ ID NO: 862570 - DNA, 120 bp, Artificial Sequence
  ENSG00000232520_32 (sequence is synthesized)
tatatgggtgttttttgcagtgtaaagtcccagggaagaaatatcaatagctgacagatctcttaaccatcaatttcatcccactttgttcatataattgaaatagtcctgtctttgggg

SEQ ID NO: 862571 - DNA, 120 bp, Artificial Sequence
  ENSG00000232527_0 (sequence is synthesized)
cccagaggcgcacaggagacctcaggcccagactccactccccagctgtgaaaggactgctggccagacccccaagctagcccgccaggcctccatagagctgcccagcatggctgcatc

SEQ ID NO: 862572 - DNA, 120 bp, Artificial Sequence
  ENSG00000232527_1 (sequence is synthesized)
gaggtataggctcagtctgcggccaagactccgtcctgcaaggatattgtggctggagacatgagcaagaaaagcctctgggagcagaagggaggctccaagacctcatcaacaattaag

SEQ ID NO: 862573 - DNA, 120 bp, Artificial Sequence
  ENSG00000232527_2 (sequence is synthesized)
cctctctccttctgcaatgacctcgtgtcaagatggcagacccgcagagatgaatgtgcctggatacctgagtcaccaggtggaggaaactcccattgacatgcatcacactccacatat

SEQ ID NO: 862574 - DNA, 120 bp, Artificial Sequence
  ENSG00000232527_3 (sequence is synthesized)
gaaacccttctttttctgcactgtcactggggttagggattattactcactgcaacttagcctagcattaagttgcttgactaatacaagtttcaataaatgtcgcttcatttcccatgg

SEQ ID NO: 862575 - DNA, 120 bp, Artificial Sequence
  ENSG00000232524_0 (sequence is synthesized)
caccttgtgtggaattaaagaatgcagagaatcagtattaactctcgggatcctggacctagtgtaaatggagctctctacgaactcttcaggagtccctcaacttacccatcaaaatgt

SEQ ID NO: 862576 - DNA, 120 bp, Artificial Sequence
  ENSG00000232524_1 (sequence is synthesized)
atctgaccatgaccagatcactgagattgtcgcaagcactgaggactgactgggacgcccagatgttctctgtcaggagaaatctgactaatacaacatggaatattgagccagcacttc

SEQ ID NO: 862577 - DNA, 120 bp, Artificial Sequence
  ENSG00000232524_2 (sequence is synthesized)
ttggtgacttacattaaagccctagtacatctaagattctctacaaggaaatatacatctgtcatgtcaataattcctgaataaaagtagcaaataagaatttaagctgaaataaacatc

SEQ ID NO: 862578 - DNA, 120 bp, Artificial Sequence
  ENSG00000232529_0 (sequence is synthesized)
ctgtcagtgctgctgctgatgcctgctgacgttaccatgaaggctgctgccacccaaagcttttcatcactctaaatgtagtctgttccacagaaactggacagaatgatagcactgggc

SEQ ID NO: 862579 - DNA, 120 bp, Artificial Sequence
  ENSG00000232529_1 (sequence is synthesized)
tccactcaggaacacatctcctaagatattgacgagcaagctgtgccgcagtggggtgagggttggaagagggaaggctccagagcccgggcttcattctctcacgcgaagaaacaacag

SEQ ID NO: 862580 - DNA, 120 bp, Artificial Sequence
  ENSG00000232529_2 (sequence is synthesized)
aaatttggaagcaaatactgggcatgagcagctcagctcctgcccatacaggactcaagctctggtgtattctccacatgccaaagctcaatggcacactctgtccctgcagcgggagcc

SEQ ID NO: 862581 - DNA, 120 bp, Artificial Sequence
  ENSG00000232529_3 (sequence is synthesized)
tatggcattgcctgtgattgggggtgaggttatctattctgagattcaagatggaagcctccattgcccctcctaagccatgctttccagcactgtaataaaactggatttttttccctc

SEQ ID NO: 862582 - DNA, 120 bp, Artificial Sequence
  ENSG00000273650_0 (sequence is synthesized)
catataattatgacaattatatttccaagatattctgggatctttacagtttcataattttgctctttttactatacaacactccttttattgaaacaaatacagattttggagtcagac

SEQ ID NO: 862583 - DNA, 120 bp, Artificial Sequence
  ENSG00000273650_1 (sequence is synthesized)
ttccctgagcctcagtgttcttctctgtaaaatgtggatgatacctgactcccaggcattttgccaggattacatgggattcctacacagtgcaatgtctagtgataatataaatactaa

SEQ ID NO: 862584 - DNA, 120 bp, Artificial Sequence
  ENSG00000273650_2 (sequence is synthesized)
aagcaacttgttaaatgtataaataaatgtgatttatttttgctcctttacatacagtatcatggatataatttgtagatgtgtgtactgtgaatacaatggccacttctcttgctccca

SEQ ID NO: 862585 - DNA, 120 bp, Artificial Sequence
  ENSG00000273659_0 (sequence is synthesized)
gggtgatagagtgacactctgtctcaaaaaacaagaaaaaatatatatgcatcttagttcaaatcattttttggaagtttcactcctccattgctcattgtaaatatatctgttacactg

SEQ ID NO: 862586 - DNA, 120 bp, Artificial Sequence
  ENSG00000273659_1 (sequence is synthesized)
gaatgggagttatctgtctactgtgttgagttttaatctcctttgctggtttgtcattatatcttcaatgtttgaccccatgggaaaacttaataaatacttctcatgaacatttccacc

SEQ ID NO: 862587 - DNA, 120 bp, Artificial Sequence
  ENSG00000276223_0 (sequence is synthesized)
ggctgtggtgagagttattattcaggagacagactatgcacagacaaggcctgtgctaaaacatgacacatacagagcactacaaagaaaagatcatttttttattattgcaattgttat

SEQ ID NO: 862588 - DNA, 120 bp, Artificial Sequence
  ENSG00000276223_1 (sequence is synthesized)
tgttaccccatgagaatggggacccagtctgtcttagggactgctgtatgacccgtgcctagcatgcagtagatgatcaataaatacttgttaaaggaatgactgataaccacaggctct

SEQ ID NO: 862589 - DNA, 120 bp, Artificial Sequence
  ENSG00000276223_2 (sequence is synthesized)
gtacctgctgagcctaaacctgggggaacaggaaggagagaagtgggctctgcagggctccaggcttggtgccagccactccccaggctccagctgtgaacgtcccggcaccccccctgg

SEQ ID NO: 862590 - DNA, 120 bp, Artificial Sequence
  ENSG00000276223_3 (sequence is synthesized)
ggcttggatcaccagtccgaaagccagtgccttggagaaagtttccccataatgctcttgcaagtgaatatgagctgtggtttttgcagtggagttaaaagtatgagttctggaatcaca

SEQ ID NO: 862591 - DNA, 120 bp, Artificial Sequence
  ENSG00000270104_0 (sequence is synthesized)
gtaaaaatttgcatggtatgattttaaaaacttgaatttttaacttaatgttctatgttctgtagtaatctcattttcatgttaccaaaggaaacctgttatgaccagaataaattattt

SEQ ID NO: 862592 - DNA, 120 bp, Artificial Sequence
  ENSG00000270104_1 (sequence is synthesized)
tcccaacattgaactaagaattcctagagctggggaaataaaggaatgtcctttgctgccagcctccttccttcctccttaggatacctctttaaaattaattattagtttggttttccc

SEQ ID NO: 862593 - DNA, 120 bp, Artificial Sequence
  ENSG00000270104_2 (sequence is synthesized)
atttcacagtggccaggaaatgtgggctgtatgatctccactttgagaggattttgacccaatgcctgggtcatttatgtggctggcctctggatatctgaaagtaatatgaatccttca

SEQ ID NO: 862594 - DNA, 120 bp, Artificial Sequence
  ENSG00000270104_3 (sequence is synthesized)
tttgctggtttcaaagtactatctacctatcttcctgtctatcacataaatgtttccagtgatgccatcaatagttacagaaattgattgatttttatatatctgacctattgatttcta

SEQ ID NO: 862595 - DNA, 67 bp, Artificial Sequence
  ENSG00000270105_0 (sequence is synthesized)
tagattctgaaggtcatgagacgcctgagcaggcctgaacgccagctgcctgggcaccatagtgaag

SEQ ID NO: 862596 - DNA, 120 bp, Artificial Sequence
  ENSG00000270105_1 (sequence is synthesized)
atgggataatccagctgcctgggcaccacagtgagggttatgggataatccagctgcctgggcaccacactgaaggtaatgggataatccggctgcctgggcaccacactgaaggtaatg

SEQ ID NO: 862597 - DNA, 120 bp, Artificial Sequence
  ENSG00000270105_2 (sequence is synthesized)
ccacactgaaggtaatgggataatccggctgcctgggcaccacactgaaggtaatgggataatccggctgcctgggcaccacagtgagggttatgggataatccagctgcctgggcacca

SEQ ID NO: 862598 - DNA, 120 bp, Artificial Sequence
  ENSG00000270103_0 (sequence is synthesized)
ctgtcgtgagtggcacacgtagggcaactcgattgctctgcgtgcggaatcgacatcaagagatttcggaagcataattttttggtatttgggcagctggtgatcgttggtcccggcgcc

SEQ ID NO: 862599 - DNA, 120 bp, Artificial Sequence
  ENSG00000270100_0 (sequence is synthesized)
ctgcaagcctcggagttctgctgtggctacaccagcaggaagactgctgatgaaggagatttcagtttgccttaaatgagtttctaatgtccccccacactccaatctccttactcccaa

SEQ ID NO: 862600 - DNA, 120 bp, Artificial Sequence
  ENSG00000270100_1 (sequence is synthesized)
gccaagctaagaaaaagtgggtgtcactgcaaagcgaaaggatttctatcccctcaccaaaataattctttttgtctttagctgctgaggaaatggcatgttactgagccttgatggcat

SEQ ID NO: 862601 - DNA, 120 bp, Artificial Sequence
  ENSG00000270100_2 (sequence is synthesized)
actcgtcatgtgcagaattctgctgcccacccaagtcctgcttaaacagccgcattttataagctggtacgggagctctgcaacaaccttcacagagaaaggatctgctgctttatttgt

SEQ ID NO: 862602 - DNA, 120 bp, Artificial Sequence
  ENSG00000270100_3 (sequence is synthesized)
atacaaaaagaaaaagacagtccaaacttttcagaatcccttattgtcatctgctgaaagggcaagttgtagttagcatgttaatccttgtaaaaaatgcattaacttttcatttagggt

SEQ ID NO: 862603 - DNA, 120 bp, Artificial Sequence
  ENSG00000270100_4 (sequence is synthesized)
gaaatgcttccagctaaaagacctaaagtgactcaattatgattcttcgtcaaagaaaacataaaagctgtttgcattacagtgtaaagtgaaatacaaaaataaaattattctaaggat

SEQ ID NO: 862604 - DNA, 120 bp, Artificial Sequence
  ENSG00000224251_0 (sequence is synthesized)
tggaaaagcatcagataatccaaaagttacattaatattaaaatcaccaaaaaaatagaaatgctatttctgagcacaagcaactccatgaaccctatcctggtttctcaataactccga

SEQ ID NO: 862605 - DNA, 120 bp, Artificial Sequence
  ENSG00000224251_1 (sequence is synthesized)
aagttaactgatatcaaatacaacaatataaaaacaattgaattctggttaaaaaaagaagagctacaaaagatattttgattaagcaatgaaaaattaaaatatggaccggataccaaa

SEQ ID NO: 862606 - DNA, 120 bp, Artificial Sequence
  ENSG00000224251_2 (sequence is synthesized)
gaaggaaaggcagaaaggctgaggccctgaggctggcgatagtttgttaggcggctccctaaacagactaaggcgtccactctgcaccggagcttctcaagcgaggcccccgaacagcag

SEQ ID NO: 862607 - DNA, 120 bp, Artificial Sequence
  ENSG00000224250_0 (sequence is synthesized)
aacgtcacacacttcatagcgctcctaggacttgaacttagtctggtttgccttccaagtccagattctccaaaacattttttctttttcttttaacttactaaatggtgaagtggccag

SEQ ID NO: 862608 - DNA, 120 bp, Artificial Sequence
  ENSG00000224250_1 (sequence is synthesized)
ataacagtttccgtatctttacaaaggcaataaatggatgaagagatgtgatgaggaaaccacgctctctatatgcatgcaagctatttggaagctctaataaaaacttgggaaacaaaa

SEQ ID NO: 862609 - DNA, 120 bp, Artificial Sequence
  ENSG00000224257_0 (sequence is synthesized)
ctaattcatgggatccagatgaaaaatccccatctggaatttttaaccaccttgagggtcagagatttttttgagaatcagaggaaagcaatgaacctcaggcctggcaggtgaggggac

SEQ ID NO: 862610 - DNA, 120 bp, Artificial Sequence
  ENSG00000224257_1 (sequence is synthesized)
gatattggtggctggaatcaagggccaggccccagaaaagtttcacagaagggacatacatagggccaaattggaccctccgattcacaccgggtatctctgagatgtgtgtcaagattc

SEQ ID NO: 862611 - DNA, 120 bp, Artificial Sequence
  ENSG00000224257_2 (sequence is synthesized)
ctagcgtgatttaccaaaggcttgatgatctcacttcatctttattctgcaaactcatgccctagcattcttcccaatagcaactatcactatccctaaataaatgtttaatacttgaaa

SEQ ID NO: 862612 - DNA, 120 bp, Artificial Sequence
  ENSG00000270108_0 (sequence is synthesized)
tctttaaaaattttaatcttttaaataaatcagatgttagctatgactatattaaatctcatacagtattataatagggagaaaaatggtttcaaataggatcagaacttttaagacttt

SEQ ID NO: 862613 - DNA, 120 bp, Artificial Sequence
  ENSG00000270108_1 (sequence is synthesized)
aagactttattataaggagattttcaaaacctcaggcttttcatatgtttaaaaaaaggtttgagtcatgggtcttagaggcttttgaaaaataacatttaagttgtcaaaggaatttgg

SEQ ID NO: 862614 - DNA, 120 bp, Artificial Sequence
  ENSG00000270108_2 (sequence is synthesized)
cacctctgggcagctgctcctggcttggacgtatttctcatgaggcagacttttgccagccactctgtgtaactctgacttcctaaatggtgaccgactttttagagactgattcctagt

SEQ ID NO: 862615 - DNA, 120 bp, Artificial Sequence
  ENSG00000270108_3 (sequence is synthesized)
aaaactattttacaagtgatcccactttaagttctgtgagtaagaagtctgatcacctcaggatggtgaaaccgagttcttctggagaacatattggaaataataaagttatgtgcctga

SEQ ID NO: 862616 - DNA, 120 bp, Artificial Sequence
  ENSG00000232386_0 (sequence is synthesized)
acgcagcccacctctcccgacgatccgggtcctcccgcccttcgcggtgattctgtcgcgaaccctctcacggcagctatgagactgctgcgctccccagacgaggaaacctggtctccc

SEQ ID NO: 862617 - DNA, 120 bp, Artificial Sequence
  ENSG00000232386_1 (sequence is synthesized)
aaaagtggggcaacagaaattatttcctgtccagcgtcctatttcaaggaacctggtgcgtttctactcatcgaagctggtctctctagcaggatgcaatctggctgcttcgtcctgctt

SEQ ID NO: 862618 - DNA, 120 bp, Artificial Sequence
  ENSG00000232386_2 (sequence is synthesized)
taaagcaactttaatttacttgattaaaagtatgcctatgctcagcacgtctcacaaagtcagggagagacattcatgaagagtttccctttgaaataaaatattcagattttgtttccc

SEQ ID NO: 862619 - DNA, 120 bp, Artificial Sequence
  ENSG00000232386_3 (sequence is synthesized)
gtgtttgccgttgtgatgcgggcgtgtgtgtgtggagtctgtgtgcgctggagagagcagtgtgtccccccgaggacctcggggtcccagagctgtgcacacgctgcccccctggacgta

SEQ ID NO: 862620 - DNA, 120 bp, Artificial Sequence
  ENSG00000232386_4 (sequence is synthesized)
agctctgggacaaaccagcttctatgtcatgagcacactcaggcagctcattggagagatctgcatggtaaagcaatgaggcctcctgccagcagccatgtgagtggcatcttggagcca

SEQ ID NO: 862621 - DNA, 120 bp, Artificial Sequence
  ENSG00000232386_5 (sequence is synthesized)
gaccctccagccccagtcaagccttcggatgcctgcagccctggctgacattttaaccacaacttcatgagagattctgagccagaatcacccagctaagctgctcccgggttgccaggt

SEQ ID NO: 862622 - DNA, 89 bp, Artificial Sequence
  ENSG00000232386_6 (sequence is synthesized)
gtcacagaaagggatggctgtaagaacccaacgcaggccaggctagaggcaggagtcaaggccggctgccgtagggctcaggatgtcca

SEQ ID NO: 862623 - DNA, 120 bp, Artificial Sequence
  ENSG00000232386_7 (sequence is synthesized)
gaggcaggagtcaaggccggctgccgtagggctcaggatgtccatccgaccgtgacctcagcactcattgataaaaggagagtaggaccattcccagagtcttgctctgtcgcccaggct

SEQ ID NO: 862624 - DNA, 120 bp, Artificial Sequence
  ENSG00000278351_0 (sequence is synthesized)
ctcatatatagatcaggacaagcaaatttgatttctagctttctaatgtggtaaaaaaaatcatagaggaaacttcatatgcaaatttaagtaactgacagagaatatatatggacacaa

SEQ ID NO: 862625 - DNA, 120 bp, Artificial Sequence
  ENSG00000278351_1 (sequence is synthesized)
aatcatattgtgacctcagccaccctttgtatagcccaagtaatgactgtttgatatttattataaagcatattaaattccttgattaactgaacctttcattcctcttttttgtttcat

SEQ ID NO: 862626 - DNA, 120 bp, Artificial Sequence
  ENSG00000278356_0 (sequence is synthesized)
gggattataggcgtgaaccaccgcgcccggcctactttgacttttactctgttaggttttccagaatgctgactcttctgccccttgaaccagggactccaaagaataagattcatgggg

SEQ ID NO: 862627 - DNA, 120 bp, Artificial Sequence
  ENSG00000278356_1 (sequence is synthesized)
aaactgaggaacgggttagttggaactggagtctttctcttcccctattttcctctgaaagagttcattgtaaaagtttttttacccattagctgggtgagaatgccagataaatggcag

SEQ ID NO: 862628 - DNA, 120 bp, Artificial Sequence
  ENSG00000278356_2 (sequence is synthesized)
aacaagttaaaaatgagattgttccctcaacttcatgtgaaaggtggagtacttggctagatactctgtttattgtgtaatggattgaaccttgaaaaataaaaccccataagaatagca

SEQ ID NO: 862629 - DNA, 120 bp, Artificial Sequence
  ENSG00000235172_0 (sequence is synthesized)
aggagttgctgagaaggagctgtggttctgaccttcaggggaattcccacgtctgtatggtggctcgtgaagagcatggttccttttctcagccctcttgaggggcgaggatgctgagga

SEQ ID NO: 862630 - DNA, 120 bp, Artificial Sequence
  ENSG00000235172_1 (sequence is synthesized)
ctgaagtcggtggggcttgatgcatgtggtcactgagaggctgccagagggccattttcatgaccagagggatctgttcaacaccctgtgggtcccagcacctatctcaggaagcagggt

SEQ ID NO: 862631 - DNA, 120 bp, Artificial Sequence
  ENSG00000235172_2 (sequence is synthesized)
gcatctgtccaccaccaagtctcagggtggctgggtgagcgctcatcagtcccagacagcaggttggcacaaaacgacactgcccacaaaaccacaggaagaagagaaactccgactgtc

SEQ ID NO: 862632 - DNA, 120 bp, Artificial Sequence
  ENSG00000235172_3 (sequence is synthesized)
gcacacagaagacactgtactggacccggacattaggcagacacccacgcctgactttcaggagaaaagagaacatgactaacggatattcttagtagatggtttattagaaaagagaac

SEQ ID NO: 862633 - DNA, 120 bp, Artificial Sequence
  ENSG00000235172_4 (sequence is synthesized)
atcttccagcatgtgtcctggggtgatgggtgtgggaagcactcagtccatagtcctggtccctggcttccccaagcccagcaccatgaatgtacagtggaaagcagagggtgcagcgtc

SEQ ID NO: 862634 - DNA, 120 bp, Artificial Sequence
  ENSG00000235172_5 (sequence is synthesized)
tcagaaagatgcttccactcacaaggattggagctcacaagtgagctccataacctgcaaaccagagaaacctgagacactgccccttggccattttatcaacggagactttattgtgat

SEQ ID NO: 862635 - DNA, 120 bp, Artificial Sequence
  ENSG00000235172_6 (sequence is synthesized)
aggaaatgctctttagtgaaaatgcagcatttctccaagggtaacaaagctgaacgcctgcttagcttatgaaccctcagttggcctaggtggtgcaaagaccctgctgttactgctttg

SEQ ID NO: 862636 - DNA, 120 bp, Artificial Sequence
  ENSG00000235172_7 (sequence is synthesized)
atcatcagtactgtggactgtaccaggagatccctgggaatgtgctctgggcggaagcagcttttatctttggccctcacccatgctttatatggtgaggttgggaaaatggcacaaggc

SEQ ID NO: 862637 - DNA, 120 bp, Artificial Sequence
  ENSG00000235172_8 (sequence is synthesized)
ttctcctgaacctcaaatcaacacccttgccccatttagatcctatctggctgtttcttgctaatattactgcatcactgcaccatctttcctatttcagcaaagtggagtcatgtgtgg

SEQ ID NO: 862638 - DNA, 120 bp, Artificial Sequence
  ENSG00000235172_9 (sequence is synthesized)
tttatggggtagatggaccccaaaactgataatatgaatcaagctatggtgtttactccctaggaaatgcacaatttttctggaaacctacagaagcttcaaatgcattcgccatgcaaa

SEQ ID NO: 862639 - DNA, 120 bp, Artificial Sequence
  ENSG00000235172_10 (sequence is synthesized)
gctaagtcagcagaacaacccgtttggctttggaggctagttcagttccgcggacagggagaaagatgaggcagactgtggtttttcagttcctggagcttacggagctccaaagctccc

SEQ ID NO: 862640 - DNA, 120 bp, Artificial Sequence
  ENSG00000235172_11 (sequence is synthesized)
aattttagataataccctgccttctcgtattgctgctgagctcctagcatcctcagtttatctgtctgtgaaatgaaaaatctaatgttaaattttttacctatggcatgagagagatgg

SEQ ID NO: 862641 - DNA, 120 bp, Artificial Sequence
  ENSG00000235172_12 (sequence is synthesized)
ctatggctcttgtgagcctctctgcagcccctcttttccttcaatcaccctctgtctctcctgccttctgcttattctctctctcccctcatccccactttcccagtgggtcctctgttc

SEQ ID NO: 862642 - DNA, 120 bp, Artificial Sequence
  ENSG00000235172_13 (sequence is synthesized)
tctttttttttttctttttaaatctctctatgcctccagccgagaagataaagagtgtacatctttctggttaaaaagttttgctttgcagaaacacagccaatttatgattctggcctt

SEQ ID NO: 862643 - DNA, 120 bp, Artificial Sequence
  ENSG00000235172_14 (sequence is synthesized)
cccagctagggacagtgttcatttacatttaggaccatgaggagagaggcttagctgtgtgtttctgaggccggagaaaattacagtgatatataacagtgctgcactcatagaggtgct

SEQ ID NO: 862644 - DNA, 120 bp, Artificial Sequence
  ENSG00000235172_15 (sequence is synthesized)
gagccggggttgggctcaggcggccgctaagctcagagtggaaagtttcagaggggaggcagaaaggagaggtctatagctcctccagattctaggtattaatttactaagatattccta

SEQ ID NO: 862645 - DNA, 120 bp, Artificial Sequence
  ENSG00000235172_16 (sequence is synthesized)
agccagaaaacagagacagaagacaaagagaaagagggaagaagagcaagacagagagttagagagagacaaagagagagagttagagacaaagagagagtggagaggagagagagcaaa

SEQ ID NO: 862646 - DNA, 120 bp, Artificial Sequence
  ENSG00000235172_17 (sequence is synthesized)
tattgaaaggaaaaggaaaaagaaagaaacctgacagctcatgaactttttaaaaagttacaaattagatttgaagagatgggcagaggtttaagatttcttcattaggctgggtgtggt

SEQ ID NO: 862647 - DNA, 88 bp, Artificial Sequence
  ENSG00000235172_18 (sequence is synthesized)
tgcagcactctgggaggctgagggtggcagatcatctgaggtcaggagttcgacaccagacaggccaacatggtgaaaccctgtctct

SEQ ID NO: 862648 - DNA, 120 bp, Artificial Sequence
  ENSG00000235172_19 (sequence is synthesized)
ggcaattccgttttgtttgggaccatgagacctcccactcctggggccagaaggagttgctgagaaggagctgtggttctgaccttcaggggaattcccacgtctggcctgctctctgtc

SEQ ID NO: 862649 - DNA, 120 bp, Artificial Sequence
  ENSG00000235172_20 (sequence is synthesized)
atactggacaggccgagtcctagaacagcacacacacggctctccagccattgagggaaggcaaatggaggtgaagtaatagtggtctggcccaactgcaatatccagagacttttcggt

SEQ ID NO: 862650 - DNA, 120 bp, Artificial Sequence
  ENSG00000235172_21 (sequence is synthesized)
gtcatatgaaagaaaaggagcaggaagccaagatgccccacctggcttctacatcagggtgatctgcataggcctgctctctgtcatgtgatgctatactacagccaggctggaatttgg

SEQ ID NO: 862651 - DNA, 120 bp, Artificial Sequence
  ENSG00000235172_22 (sequence is synthesized)
catggggttttgaaagcaggcacagcagcaggggtgctgcctccaggggtctgctctgccaagagttcctgtcccagggcctgctctctgtcatgtgatgctatactacagccaggctgg

SEQ ID NO: 862652 - DNA, 120 bp, Artificial Sequence
  ENSG00000275557_0 (sequence is synthesized)
agctaccagctttgagggcagaacccgcgtggcccgagcgggggtctaggcgaaggggcagtgcgtggtatttccagccccgcgtagtgcccgaagcctgcaagcacgcctcctgggttc

SEQ ID NO: 862653 - DNA, 120 bp, Artificial Sequence
  ENSG00000275557_1 (sequence is synthesized)
ccagaagtcagacatggagttagtggtagaagaaacagaaggggtaacctgcatggtgacagctactgaggggatggataggaaagcaggctgagtccctggggccagtggttaccaaag

SEQ ID NO: 862654 - DNA, 120 bp, Artificial Sequence
  ENSG00000275557_2 (sequence is synthesized)
ccaaggagagagcaaggggagcccagtgggcctggccatggactgctctggaattccgagtgtgaactttcagccaagaaggagcttctgtctagatgaatagcaagtgtgacactgata

SEQ ID NO: 862655 - DNA, 120 bp, Artificial Sequence
  ENSG00000275552_0 (sequence is synthesized)
atcccaatagctctaaatctgaaaccattgcattaaagatgttgttacgattattaaaagcattatcaactaggatcacatgcggctacgtgtctcggtgggcgacagctaaagaaactt

SEQ ID NO: 862656 - DNA, 120 bp, Artificial Sequence
  ENSG00000275552_1 (sequence is synthesized)
gcaagcccgttgttccacaccaatttcagcgcgatggagacctctccagtctctccacatcttctctttgccgggcggagggaggaggctctctccatccccacgactgccgttctgggg

SEQ ID NO: 862657 - DNA, 120 bp, Artificial Sequence
  ENSG00000275552_2 (sequence is synthesized)
ggcaagtcgagacgagcacgcctggctgctacctccgcacccgcgtcccacaagcttgctttcggggatctcacacatcaacatggaatctctccagaggccagaggagaatgaggggca

SEQ ID NO: 862658 - DNA, 120 bp, Artificial Sequence
  ENSG00000275552_3 (sequence is synthesized)
ctcgcgaggactaaggtagaaagccaggatccccgggctgcgggcgagcgcgtctcccatggctccccaggctcagccgctgcctcttctgggcaaatgcaaagcaagcaacgcacccac

SEQ ID NO: 862659 - DNA, 120 bp, Artificial Sequence
  ENSG00000275552_4 (sequence is synthesized)
cccccgccctccccggaggccgacctggaaaaggaagagcgggaaggtgtctacaactgttcctcagccacagacagtcccaggatcatggcccagagagagagagagaaagagagaaag

SEQ ID NO: 862660 - DNA, 120 bp, Artificial Sequence
  ENSG00000275552_5 (sequence is synthesized)
ggacaggattaactcactgctgctccagatcatcggccatagtaaacaagccttgccaggtcctggcgagcccgcccagcgcctgacgccagcaccagctgacccgggaggccgcgggga

SEQ ID NO: 862661 - DNA, 120 bp, Artificial Sequence
  ENSG00000275552_6 (sequence is synthesized)
gcaagggggcgtggccgcgcagggggcagggctcgcggcgggccggcggtcggcggtgggaccctcaaaactctgcaacttggtttcagctagtggggcccttgctgtgttttcaatcac

SEQ ID NO: 862662 - DNA, 120 bp, Artificial Sequence
  ENSG00000275552_7 (sequence is synthesized)
tggcatgtgtcccggcagagatgtctctgacggtctcagaatgggacagtaatcctggtcacacatttgggggagtccttgcaggagctccgacagccctcccttctctcataactaaaa

SEQ ID NO: 862663 - DNA, 120 bp, Artificial Sequence
  ENSG00000275552_8 (sequence is synthesized)
agtggtagaactacgcctgcacgctcgcacccactctttgggcttcccattgtaactgtgtcctcctgaaatcgacccttgttaatgttccttctagtaagaggcttaaatgtttgtgga

SEQ ID NO: 862664 - DNA, 120 bp, Artificial Sequence
  ENSG00000275552_9 (sequence is synthesized)
gacaacgccattggttgaatgctcctacaaagggcctggatgccagatttcgaaactaaaatacaggacacctagttaaatgtaaattccagatttaaataaagcaaatacttttttaga

SEQ ID NO: 862665 - DNA, 120 bp, Artificial Sequence
  ENSG00000275552_10 (sequence is synthesized)
ataagtatgggccatgcagtatttgggacataagtaggcatcctgtattttctctggcaaacctaaacctatatgacatctgccaaaatgggcatatctctgctctgatgttgactctga

SEQ ID NO: 862666 - DNA, 120 bp, Artificial Sequence
  ENSG00000275552_11 (sequence is synthesized)
caactccaggtcaccctcagtttggaggataacagttgaaggactcaccaataaggctaggtctcctttcggtatgtaaatgcggggacagggagataaggctggcttggcccagaggtc

SEQ ID NO: 862667 - DNA, 120 bp, Artificial Sequence
  ENSG00000275552_12 (sequence is synthesized)
ctgagtgcacttcagtttgctcagcagaggagctaaatcttgaggctggctgctgaatttgcttgtaccggtaaacagggcctgacctccctggaactgtcagatttcagatcatcccct

SEQ ID NO: 862668 - DNA, 83 bp, Artificial Sequence
  ENSG00000275552_13 (sequence is synthesized)
cctgacctccctggaactgtcagatttcagatcatccccttagttaaaaccagactaggcttgggaggccaaagtgggtggat

SEQ ID NO: 862669 - DNA, 76 bp, Artificial Sequence
  ENSG00000275552_14 (sequence is synthesized)
ccaacatggtgaaaccccatctctgtaatcctagctactggggaggctgcggcagggagaattgcttgaacccagg

SEQ ID NO: 862670 - DNA, 120 bp, Artificial Sequence
  ENSG00000275552_15 (sequence is synthesized)
cctgagagacagagtgagactccatctcaaaaaccaaaaacaaacaagcaaacaaacaaaaaaaaccagactggggagtggtggaggatgggtgagagaatgctggtgcacaggggttta

SEQ ID NO: 862671 - DNA, 120 bp, Artificial Sequence
  ENSG00000275552_16 (sequence is synthesized)
aggatgggtgagagaatgctggtgcacaggggtttatcaaagcatttttctttagccttcctgcaggacccagatgattctgagatttcttctttgtagcaacacagtgttaagctgatc

SEQ ID NO: 862672 - DNA, 120 bp, Artificial Sequence
  ENSG00000275552_17 (sequence is synthesized)
attataaagacttaacgtttaggagaaccagcatttatagagtttaggggcttaggaatttgccagatgtggtacaaagtagttcaactagcagaggacttgtctctttcatgcaacctt

SEQ ID NO: 862673 - DNA, 89 bp, Artificial Sequence
  ENSG00000275552_18 (sequence is synthesized)
agttcaactagcagaggacttgtctctttcatgcaacctttttttttttgagactgattctcactgtcacctaagctggaattgaactc

SEQ ID NO: 862674 - DNA, 120 bp, Artificial Sequence
  ENSG00000275552_19 (sequence is synthesized)
tgccattgcactccagcctgggggacaaagcaagactccatcttggaaaaaaaaattcagatttctagcacctaccctctgagattcagattcagctggtttggcttgatgctagaaagc

SEQ ID NO: 862675 - DNA, 120 bp, Artificial Sequence
  ENSG00000275552_20 (sequence is synthesized)
cttgatgctagaaagccgcatttttaggaagcaccgcagatactggtgctccacgagactcactggttggttagaagtatagattctggagtcatgaagcctggttaagttcagtatttg

SEQ ID NO: 862676 - DNA, 120 bp, Artificial Sequence
  ENSG00000275552_21 (sequence is synthesized)
ctttgccacttatccactgtaaatccttggccaagttatttagcatctcttaatttcttcctctggcttgtatcttgtgagaactaaccaagataattcaaataaacatgtggtacactt

SEQ ID NO: 862677 - DNA, 120 bp, Artificial Sequence
  ENSG00000175967_0 (sequence is synthesized)
ctttcggagtggagtttcctagctggtgcctgtcctctcttgagcctttgtttcttgagtgagcactcactggggctgtggctccatgaactggatttcaggaaaccagccaaggcattc

SEQ ID NO: 862678 - DNA, 120 bp, Artificial Sequence
  ENSG00000175967_1 (sequence is synthesized)
tctctctctctccattcctagaaaggcagaaagcctgggaatgggttcggcaggaagatctctgtacctcaatctccattgctttcagcaccactggctttctccccagctcaagtgcaa

SEQ ID NO: 862679 - DNA, 120 bp, Artificial Sequence
  ENSG00000175967_2 (sequence is synthesized)
aacctgccatcgttgctacctggggtgcctcagactcacccaagtcccccaggccagaggacatgctctcaagccttgtttcagaaagagggacccaaaggctgttagggaagagaacca

SEQ ID NO: 862680 - DNA, 120 bp, Artificial Sequence
  ENSG00000175967_3 (sequence is synthesized)
gggtcctcaaacccagggttttctcacccactgcctctgctctggctgtggcctgccagacctctcctctgattttcgctttccttcctgccagtgcctttgtttatccgaggcgccaag

SEQ ID NO: 862681 - DNA, 120 bp, Artificial Sequence
  ENSG00000175967_4 (sequence is synthesized)
atcccactgtgaagtctgaaaggaagaccagtggttctcgcttttcctctagatgctgtgtctcccaatgtcatcttctttcctctcaaagacaattggacgttgttacagattttcttg

SEQ ID NO: 862682 - DNA, 120 bp, Artificial Sequence
  ENSG00000175967_5 (sequence is synthesized)
acctagcagtgggattgctggatcatatgaaaatgccagactatatttcatcagcaacatcggagagttccagttgctctacaccctcactagcacttaatattgttgatcgctgcctgg

SEQ ID NO: 862683 - DNA, 120 bp, Artificial Sequence
  ENSG00000175967_6 (sequence is synthesized)
atcgctgcctggattcacagaaggacaaattacaatgcattttgaaagactcgtctacagtcaactaaaataccagttatcacagacttcactggccttaatgaggaggctgagagggat

SEQ ID NO: 862684 - DNA, 120 bp, Artificial Sequence
  ENSG00000175967_7 (sequence is synthesized)
ttaattactgggacatgcaacgcttacaccaaactctgttcgattcacgacttggaaaagcaaatgtggatacagatgagtgtggacatggcttcagtaggaaatgtcgagtttgttcat

SEQ ID NO: 862685 - DNA, 120 bp, Artificial Sequence
  ENSG00000175967_8 (sequence is synthesized)
cactctgaagtttcttcagctgcaacggaaactgcaccctccctcccgacttgttggttatcttgctgtgctcccaagaaggtattttctgctgacctgatagatcagacctttgtcatt

SEQ ID NO: 862686 - DNA, 120 bp, Artificial Sequence
  ENSG00000175967_9 (sequence is synthesized)
atgcttgtcatttacattatctgtcagcatgagtattggtttcctagaaacctaatattgaaaacacttagcattgctaaaagcattaaatgaaataaagactcaatatagctgcactaa

SEQ ID NO: 862687 - DNA, 120 bp, Artificial Sequence
  ENSG00000175967_10 (sequence is synthesized)
tctgtgctttctaaatttactgatggacgtgaagaaagtaggttggcatggagtttatacaatttatggatcacactgatctgaattcagacagtgtgtgctcagataaaaatattgttt

SEQ ID NO: 862688 - DNA, 120 bp, Artificial Sequence
  ENSG00000175967_11 (sequence is synthesized)
cctcccatgaggtttccaattttgcagagaagaatacctctgtttagctcattacttaacacaatgggtagctgggtggccttgcattctggaagtgaaatgacacaagaatgtctccac

SEQ ID NO: 862689 - DNA, 120 bp, Artificial Sequence
  ENSG00000175967_12 (sequence is synthesized)
tgcattctccagaggtaaagattctctggcacaaaatcacaaccaaggtggggttccaaaactatagaacaaatggcagcagccatgcagccagccttggttcgggtgggctgtaaaagc

SEQ ID NO: 862690 - DNA, 120 bp, Artificial Sequence
  ENSG00000175967_13 (sequence is synthesized)
agaggttgtcctcgtgttatcagcactgacttcctgttgtggccacactgacagagatgagatggcagaaagcaggaaagagaccagagctgcaattgacagatggctggccaaagttga

SEQ ID NO: 862691 - DNA, 120 bp, Artificial Sequence
  ENSG00000175967_14 (sequence is synthesized)
agggtcagagactacaccaaagacttctcagaaaatacttgcctaggaggctctcacttggaaagatattcagggttgttaaacatatcctgttattaggaaaacgagagttttatcttt

SEQ ID NO: 862692 - DNA, 120 bp, Artificial Sequence
  ENSG00000175967_15 (sequence is synthesized)
ctcttactcagaaagaaaaaacaaaaagaaaattagtgctcttaagaaaagctattttaatgttatccattataaaattagaaaaccttgaaaggcaaatgtttcttctgaccatttaca

SEQ ID NO: 862693 - DNA, 120 bp, Artificial Sequence
  ENSG00000175967_16 (sequence is synthesized)
ctgagcttctttcattatctcatatgcaaccttgtggattgaaggtggagagtccttaggattacccaggaacatccctgtctgctccccctgctaggcaggaggagatttgaaaccaca

SEQ ID NO: 862694 - DNA, 120 bp, Artificial Sequence
  ENSG00000175967_17 (sequence is synthesized)
tgtgtctacttcatttctgtcacgggtaggacagtgtcatatactttgtaggtaactcaaagatattataggtaactcatagatattgattgaattaatgtttaataaaatgagaacacc

SEQ ID NO: 862695 - DNA, 120 bp, Artificial Sequence
  ENSG00000250681_0 (sequence is synthesized)
ctcaactgtgccctgtcacctctcaccctgctgctggagaggctcggtttgctcctggaagtcgtgactgtgaaacgtggatgttttgctgtgacgtccattgctactctcatgctgggg

SEQ ID NO: 862696 - DNA, 120 bp, Artificial Sequence
  ENSG00000250681_1 (sequence is synthesized)
cttgagcactgccaagaggttttgccccaggggcttccaggaggccttgccatcgtcagtgcatgataccacctccctgggtctgaggctgcgtcctggagtgcatgggtccctccgagg

SEQ ID NO: 862697 - DNA, 120 bp, Artificial Sequence
  ENSG00000250681_2 (sequence is synthesized)
gactaggaccggcagatactcagcgtccacaactatgaacacctgagcagaggcgggctgggatccaggcccagcttgctggaagcttctccatgggatctctcaggatccccattttct

SEQ ID NO: 862698 - DNA, 120 bp, Artificial Sequence
  ENSG00000231871_0 (sequence is synthesized)
ccagccccgcggccgggacccgccaccgaatgacggcccccgcgcgcggccaatccgcgaagccgcgcctgcgcaccagaggcgggcgggagcgggcggagggcggggaatgaatctaag

SEQ ID NO: 862699 - DNA, 120 bp, Artificial Sequence
  ENSG00000231871_1 (sequence is synthesized)
gtgtgaaaactgagccccagacaggttaaggggctttcctaaagttgcacaaatggcttctactcaccagaggatctgagtccagagaacttggggtgctgtctttgactgtcctatcct

SEQ ID NO: 862700 - DNA, 85 bp, Artificial Sequence
  ENSG00000231871_2 (sequence is synthesized)
gagaacttggggtgctgtctttgactgtcctatcctcgggagggaggccaagacaggaagatcacttgaggtcagaagttcaaga

SEQ ID NO: 862701 - DNA, 120 bp, Artificial Sequence
  ENSG00000231871_3 (sequence is synthesized)
ttcaggcgcgcctctcctctctcggactttcacaaccaccagcgacatcaatctctcgcttcctgctccacttctcggcgcccacatctccaactggctcaggctccccatgtccccagc

SEQ ID NO: 862702 - DNA, 120 bp, Artificial Sequence
  ENSG00000231871_4 (sequence is synthesized)
cggtacggagctgcggtcagcggattgtgcggctgagccatcctcgtgacggtcccgcctcactcaccctccgtcacctccagcaccttaatctgttcttcagcagccgcccgcacctcc

SEQ ID NO: 862703 - DNA, 120 bp, Artificial Sequence
  ENSG00000231871_5 (sequence is synthesized)
tccttgattccatgggagtagggagaccacaagctgtgcagattcacgtccctcctgggaagaggtttacctggtccataagcactaacctgccatggtctactctgctccagtgccacc

SEQ ID NO: 862704 - DNA, 120 bp, Artificial Sequence
  ENSG00000231871_6 (sequence is synthesized)
ataccgatatgaagattcagatgcatctactcctcggttgggtggaagagtgatccaggttggcagccgtcttgttgatgtcccctatgtcatccagagggcaggagcgggcagctctct

SEQ ID NO: 862705 - DNA, 120 bp, Artificial Sequence
  ENSG00000231871_7 (sequence is synthesized)
accttggcaactggttcctctctctccagcttcatcttttccattgttttttgtttgtttgcttgtttttgtttttcatttttaccttttacagattgatttaaacattttttaaaccac

SEQ ID NO: 862706 - DNA, 120 bp, Artificial Sequence
  ENSG00000287097_0 (sequence is synthesized)
gtatccgacaaaatggcgcataatcatctgtgaaaattggaggtctgcatgcttctcaaattgagctgtaacactcactgctgcggtccaagccttcattctttgaagcccgtggaacca

SEQ ID NO: 862707 - DNA, 120 bp, Artificial Sequence
  ENSG00000287097_1 (sequence is synthesized)
caaactcttcaattgataaaaaccttcgatcggaagagacttctcatctcatttctgggggcctgtccgggatttctctgaagtgaatagaatccatgaaactgcaagtggttctacaaa

SEQ ID NO: 862708 - DNA, 120 bp, Artificial Sequence
  ENSG00000287097_2 (sequence is synthesized)
tggagccccaaatgaccaccactagcacctactatcgaggacccctagactgacctaccaacctgttctaacaccacgacactgaagaagactcccctcctgaggaaccctcaactgcag

SEQ ID NO: 862709 - DNA, 120 bp, Artificial Sequence
  ENSG00000287097_3 (sequence is synthesized)
tctcaacagcacttgggctttcctgttgagagggggtactgaggcactaagtggctaagttagctagacttcctgggtcaacagggacttccctaaggggacattcctctaagccaaaat

SEQ ID NO: 862710 - DNA, 120 bp, Artificial Sequence
  ENSG00000287097_4 (sequence is synthesized)
ctaagggattgaaacttcaaccaatcaaaggggactttctcctaagcaaaaatgagtcactgctgcaaactaagtgattgaaacttcacccaatcatatagggagtttaagctttagctg

SEQ ID NO: 862711 - DNA, 120 bp, Artificial Sequence
  ENSG00000287097_5 (sequence is synthesized)
gtttaagctttagctgcagcctgatgtttttaaccaatcaggcctgccaacccacaagcagatagaaaataagctaatcctatgggacagaaaaaggaaaaggggaggagtcataagagg

SEQ ID NO: 862712 - DNA, 120 bp, Artificial Sequence
  ENSG00000287097_6 (sequence is synthesized)
atataagcataagacacccaagccagaaacggaaacccttccgggtctccttccaccacgtggaagctttacttttgcttttactttactttcactttaataaaccttggcgctgcacac

SEQ ID NO: 862713 - DNA, 120 bp, Artificial Sequence
  ENSG00000231873_0 (sequence is synthesized)
gaggcaaaatggcggagtttaactggtgtatgaccttcttctggaaacgctaagctgttctcggcctctgtgttttcattgtccaactgaagattagacaagaggcagcatggggtggtg

SEQ ID NO: 862714 - DNA, 120 bp, Artificial Sequence
  ENSG00000231873_1 (sequence is synthesized)
gataaatcgtggaccaggattgaagcgaagatctgctcatctgggacactcaccaggtagaaggaacttaccttgattctcagatgagactttggaccttagacatcggactttgatttg

SEQ ID NO: 862715 - DNA, 120 bp, Artificial Sequence
  ENSG00000231873_2 (sequence is synthesized)
atgctgaaacaagatttggcctaggaagggcaaaatgtaatgtttgcccagtcattgaaagcagaagttgttgcctgaaatagactgttcaaactatctctgaagtctctgtttgagagc

SEQ ID NO: 862716 - DNA, 120 bp, Artificial Sequence
  ENSG00000231873_3 (sequence is synthesized)
caactcagaaagcacagagagctgcttatgctcattgctcaagtgacagcctttttgacagacccacataggtgcctctctagtcaaagacggaaaagacagtcactataatacttcatc

SEQ ID NO: 862717 - DNA, 120 bp, Artificial Sequence
  ENSG00000231873_4 (sequence is synthesized)
aaacaccttctagacatgaggcaaattttttcttcatgaaatctcggaggaagcattggaatatctcccagaacaacttataaaatatccagtgaaattataataactggaggctgcaaa

SEQ ID NO: 862718 - DNA, 120 bp, Artificial Sequence
  ENSG00000231873_5 (sequence is synthesized)
aactaatcacttattttgatgattacataatgtttttatttttaaacgtagattacaaaagccaaaacttaattttttctgcacacttatttgagctattaaaacttcttataaatgcct

SEQ ID NO: 862719 - DNA, 120 bp, Artificial Sequence
  ENSG00000231873_6 (sequence is synthesized)
gacacaaacgcccagctgcccccagttcagtgccacagagaaaagccttgcagaacaggttgagtttgtggatgggcatggggtagaaggtatcatctcttctctatcaatgacttgggt

SEQ ID NO: 862720 - DNA, 80 bp, Artificial Sequence
  ENSG00000231873_7 (sequence is synthesized)
ctcatctgggacactcaaagtacagtggcgcgatctgcaacctccgtttcctgggttcaagcaattcccctgtctcagcc

SEQ ID NO: 862721 - DNA, 120 bp, Artificial Sequence
  ENSG00000287095_0 (sequence is synthesized)
aggtctcctctgactccagagctgaagtatcatgctatactgcgatgctactcttcgaaggacacagcaagagaggaaacaaggaagattaggaaggcggaaggctctagaatgtgtttc

SEQ ID NO: 862722 - DNA, 120 bp, Artificial Sequence
  ENSG00000287095_1 (sequence is synthesized)
ttgaccttttcttttactgaaaaagagaaaagaaaatgagaataaaatggaactgccggcagtgaatttcagctgtctcccccacagcagatcccttgcagcctgaagatgagcttcacc

SEQ ID NO: 862723 - DNA, 120 bp, Artificial Sequence
  ENSG00000287095_2 (sequence is synthesized)
cacacaaagactgggatgtggaagaccacagaggtaaagtgccattctcaccacgtcgtatcaaggggacatgcaatcagtgtaacttatctctgttgatgctgacttgttcacttgcag

SEQ ID NO: 862724 - DNA, 120 bp, Artificial Sequence
  ENSG00000287095_3 (sequence is synthesized)
cagtgtttgtcctgtttctccactgaagagttacctttcttacccccttccttactctactccctggaagaagtttctaaatgcagccctcccttaaaggattaagagttaagctccgcc

SEQ ID NO: 862725 - DNA, 120 bp, Artificial Sequence
  ENSG00000287095_4 (sequence is synthesized)
tcttaagggaggagtatccacaaacattaacctaagaaacataccatttacagtcctgtgaaagaaaagaaagggctctgcgatcaacttggaggtgcggaaaacacgaagtgaaataaa

SEQ ID NO: 862726 - DNA, 120 bp, Artificial Sequence
  ENSG00000287095_5 (sequence is synthesized)
gctagacgtgttccttcaccacattatttcactgattattatactaatgcacatcatggtcttccagtttgggatatagaatgcagaattttgcaaatttatttttaaccacagaagcac

SEQ ID NO: 862727 - DNA, 120 bp, Artificial Sequence
  ENSG00000287095_6 (sequence is synthesized)
cccctccgacacacacacactccacttttgttcttgtggtcccattgtgatctaaaaatgttttgcaaacctcataattatctgggaagcttattttaaattaccaattctcagtaaatc

SEQ ID NO: 862728 - DNA, 120 bp, Artificial Sequence
  ENSG00000287095_7 (sequence is synthesized)
ttaattagaatctcaagagatgggatctaggactttgtatttaaaaaagcacctcctccaagtgatgctgctgtatttgaccctcaaaatgtgggactcgagagcaggcagcccttgctg

SEQ ID NO: 862729 - DNA, 120 bp, Artificial Sequence
  ENSG00000287095_8 (sequence is synthesized)
gccagagttcaagaaccataaagacccctggactgttgtattcacctttgtttcattgattcaataaatattgaagaacccctggcactgaggatactgaagtgagggagacgcacaatg

SEQ ID NO: 862730 - DNA, 120 bp, Artificial Sequence
  ENSG00000287095_9 (sequence is synthesized)
tgtctgctgtcaggcagctcacattcttctagggagaggcagatcccattaaaacttcaacagctaatcatgtcacaggtcagggggtaataagtgctcaaaagaaaagtaaagcaaggt

SEQ ID NO: 862731 - DNA, 120 bp, Artificial Sequence
  ENSG00000287095_10 (sequence is synthesized)
catttgaacggattttgtaaagaagtaaggtcacaggtaatgaggctatctggaggattctaagaggcagagtgaaaagcaagtgcaaaggccctgagacaggagtgggcctagcaccaa

SEQ ID NO: 862732 - DNA, 120 bp, Artificial Sequence
  ENSG00000287095_11 (sequence is synthesized)
ggaacctgatcactgccctggagacttgaatagggaaaggaaaacaaggcagaggaagaacatacaggtcagagggtagagaacaaacatacctataagaaggcatgaagagacaattta

SEQ ID NO: 862733 - DNA, 120 bp, Artificial Sequence
  ENSG00000287095_12 (sequence is synthesized)
tgtggggatatacaaatacaatgggaagggtggagtctctgcagggaccctaaatcgcacagtgggaacttcaagtggctttaaactccagctatacttagagtatatctgttaacagga

SEQ ID NO: 862734 - DNA, 120 bp, Artificial Sequence
  ENSG00000287095_13 (sequence is synthesized)
taacaggagccacttctctttggagaaaaagcaatccactgtaaaatacaattttaagcaacgtacactgggttttgtatgctttctaggtggttttctttttcttttttttttgtcttt

SEQ ID NO: 862735 - DNA, 68 bp, Artificial Sequence
  ENSG00000287095_14 (sequence is synthesized)
aatttcatacttttaatccaccttggcctcccaaagttctcggattacaggcatgagccaccgtgcct

SEQ ID NO: 862736 - DNA, 120 bp, Artificial Sequence
  ENSG00000287095_15 (sequence is synthesized)
aggcatgagccaccgtgcctggcccactttctaggttttgtatgctttgtgagaggatagaggtgggcaatgagagataaagggaaacttatcatggacagacacatgaacgaatctcaa

SEQ ID NO: 862737 - DNA, 120 bp, Artificial Sequence
  ENSG00000287095_16 (sequence is synthesized)
aatctcaaccacagagctacctaaaatgttttgtggaataaggcaaggaaatcatcaatcagctatagtttcactaattatgaaataccgctgcatgaaaataaaacgtgaattaccttg

SEQ ID NO: 862738 - DNA, 120 bp, Artificial Sequence
  ENSG00000287095_17 (sequence is synthesized)
cacatgcagaaatgattaagcacacagcaagcaggattgcctgaaagaagacctcttgcaacaacctggtttctaataggaagaacaaaaacaaataaattagaaatcattgctgattca

SEQ ID NO: 862739 - DNA, 120 bp, Artificial Sequence
  ENSG00000287095_18 (sequence is synthesized)
atcatcttggaagaaaaaatcatctcaaacttcccttgtacccaccaaaaaaaaaaaaaagttttggaatgtatgtcagttcaagcaatgtgtcataaataacaagataaaattacctac

SEQ ID NO: 862740 - DNA, 120 bp, Artificial Sequence
  ENSG00000287092_0 (sequence is synthesized)
tccctggttggaacccaatcccccaacctcaagctctgcagacatcttccctgatcaatgtcctgtcctcttttctctgtcaagttgttcctccttcccgagctctattgtgatttgggg

SEQ ID NO: 862741 - DNA, 120 bp, Artificial Sequence
  ENSG00000287092_1 (sequence is synthesized)
cacctgaggaattaactatttctctcgtgtctttgcctaaccacaggtgaatgtctcgacccgcttttaagctggctccgccctctggacgcgttcttttaaagaatggctattgctgac

SEQ ID NO: 862742 - DNA, 120 bp, Artificial Sequence
  ENSG00000287092_2 (sequence is synthesized)
tcctggaatgctgtttggaaaagactacggagagagtgattcttcatcagtgattaagcatcttttcatgattaatgcagagctgtgagaagacagaagcagtggaatgacaccacaaca

SEQ ID NO: 862743 - DNA, 120 bp, Artificial Sequence
  ENSG00000287092_3 (sequence is synthesized)
tctgtgcattgagaagggcactctgctgcggcatggcattctgtgccttgttcttcattcccggacccaagctgacttatcagtctcacagcagtggggaaagagctatggaagaaccag

SEQ ID NO: 862744 - DNA, 120 bp, Artificial Sequence
  ENSG00000287092_4 (sequence is synthesized)
gaacaggaaccatacaacgtgtcttacatcttctgtcctatatcacttatgctcgcatctcgttgggcaagaaaagttgtggggtcaaatatgatgtccagggataagaatagtagagac

SEQ ID NO: 862745 - DNA, 120 bp, Artificial Sequence
  ENSG00000287092_5 (sequence is synthesized)
agccagctaaaattgagagcaaataagataacctatcctactcccacatttttaagcagtgagcttgagacagaatcactaccttagggaacctacactttagtatgaaaatgtggaggt

SEQ ID NO: 862746 - DNA, 120 bp, Artificial Sequence
  ENSG00000287092_6 (sequence is synthesized)
tgaataacctggtaagacgagagaatgtaagggaagattacactggaaagaacatatgtggtcagatcagaaagaccttaaataccctttctaaagattagacttagttttagaatcaat

SEQ ID NO: 862747 - DNA, 120 bp, Artificial Sequence
  ENSG00000287092_7 (sequence is synthesized)
gggcagtaactaagttgtctgaagtagaggtgtagtggttagttctttgtgtcaaattgatagtctatgtagtacataattacttcattaaacactgatttaggtgttactgtgaagcta

SEQ ID NO: 862748 - DNA, 120 bp, Artificial Sequence
  ENSG00000287092_8 (sequence is synthesized)
tttttcagatggggctaatatctacagtcagttgactttaagtaaagaatgtaggtgggcctcacccaatcagttaaaggcttaagagcaaaaacatatttcctggaggagaagaaattc

SEQ ID NO: 862749 - DNA, 120 bp, Artificial Sequence
  ENSG00000287092_9 (sequence is synthesized)
tgtctcaagatggcagtgtagaaatcccacctgagtttccagcctgctggcctgccctgtaagtgctggatttgctagcccccacaatcgcatgagccgatttttaaatatctttataaa

SEQ ID NO: 862750 - DNA, 120 bp, Artificial Sequence
  ENSG00000287092_10 (sequence is synthesized)
tatagatatagagatagatagatagataacctattggttctgtttctctggaaaaccctagttcataagagaatatcatgattcaattttgtatagatggaagagattttgcaaattaga

SEQ ID NO: 862751 - DNA, 120 bp, Artificial Sequence
  ENSG00000287092_11 (sequence is synthesized)
aaggaaagaatttgctaactgctcagaggtcagcatgagaggaaagaattaaagatgaacccaggacactattattttgtaagctaagtaattctactttttatattatttcttgaaact

SEQ ID NO: 862752 - DNA, 120 bp, Artificial Sequence
  ENSG00000287093_0 (sequence is synthesized)
gcagacccccttagttgtaaagggacaggaattgttcactcggggagctcggttttgtaagtctgccgatgctcctggcagaataaagccctttccttcctcaactcggtgtctgagggg

SEQ ID NO: 862753 - DNA, 120 bp, Artificial Sequence
  ENSG00000287093_1 (sequence is synthesized)
ttttgtctgcagctagtcctgctacatttcttggttccctgacctggaagcgaggtgattaccgggcggtggaggcaactgcttaggaggcttaggcctgccttgtggaacatccctgcg

SEQ ID NO: 862754 - DNA, 120 bp, Artificial Sequence
  ENSG00000287093_2 (sequence is synthesized)
ggggactcctgccggctttagtgaatcctgagagtgctttcagctgggtaattgccctggtggaacgcctcgccagagcagcgcacggtaggcccccgcggaggattaacgcagcggctg

SEQ ID NO: 862755 - DNA, 120 bp, Artificial Sequence
  ENSG00000287093_3 (sequence is synthesized)
aacagcgggaaggaatcggcgcttggagtccagacatctggaacacgctcttgaacatcagattccaggttctgcagcctttggactcttggacttagaccagtggtttgccgggggatc

SEQ ID NO: 862756 - DNA, 120 bp, Artificial Sequence
  ENSG00000287093_4 (sequence is synthesized)
tcagatcttcagccacatactgaagtctgcactgttggcttccctacttttgaggctttggaactctgactgagcaactactggcttcgttgctcctcagcttgcaggtggcctatcgtg

SEQ ID NO: 862757 - DNA, 120 bp, Artificial Sequence
  ENSG00000287093_5 (sequence is synthesized)
ttcaccttgtgatcacttattttaggaaagagtcatagcctcgtatgttaaggctgttgcatcaggctgtctcatcggctgctggaagttggctgcacttgggtcatgggatgagctcca

SEQ ID NO: 862758 - DNA, 120 bp, Artificial Sequence
  ENSG00000287093_6 (sequence is synthesized)
gtccactcagctgaggcttaggtggaggtcacatgggaccagcatgacaattatccaggaagaccacttaggagggagttgtggggtatggcaggtgtttgaggtttatctgttcagtac

SEQ ID NO: 862759 - DNA, 120 bp, Artificial Sequence
  ENSG00000287093_7 (sequence is synthesized)
tatggcagcttgcaagatgccctccaaatttattttctccttaatccaaaccaacagagaagctttgactgggtgcatggttatccagctaatgacagcatttcccagattcctgctagg

SEQ ID NO: 862760 - DNA, 120 bp, Artificial Sequence
  ENSG00000287093_8 (sequence is synthesized)
agtggccacgtaactggattctgactagaaagtcatgagccacagtggtacgtgcagcttctgtgttggccctttaaaatgaaagaggccacccctccgtgcttgcccccctttcctgct

SEQ ID NO: 862761 - DNA, 120 bp, Artificial Sequence
  ENSG00000287093_9 (sequence is synthesized)
ggctgcccatgggcataaggatggaagctggagcagctgtctcatgccccaagatggaacctgcatgtcggccagccaacaaggtcgatgggccctggaacccaacacctggggcaacca

SEQ ID NO: 862762 - DNA, 120 bp, Artificial Sequence
  ENSG00000287093_10 (sequence is synthesized)
atttgtcccggactttcccaattctagtattgggaagtcctgtgaaccagggacctcctcagccttggacaaactgggacaagggtgcaacaaaacaaaataaaaagtcttccatttgtg

SEQ ID NO: 862763 - DNA, 83 bp, Artificial Sequence
  ENSG00000231876_0 (sequence is synthesized)
ctgcctcccaggttctagtgagccgctttcacaggagcgataaattggaaatgttatctggcttgatatgccagtttttctga

SEQ ID NO: 862764 - DNA, 120 bp, Artificial Sequence
  ENSG00000231876_1 (sequence is synthesized)
attggaaatgttatctggcttgatatgccagtttttctgagaaaatcactctgccagtggtgacagaatggaagagctgaaaacatcttcttttttcaaagtcatatgtcacgaaccaag

SEQ ID NO: 862765 - DNA, 120 bp, Artificial Sequence
  ENSG00000231876_2 (sequence is synthesized)
agtttgtggcatctggttttaactccaatatgtaaagagcttggaagccatctttccttccaccacaacaagaaaacagctgaactgaaaatcaatgacttttcttagatccattaaaga

SEQ ID NO: 862766 - DNA, 120 bp, Artificial Sequence
  ENSG00000231876_3 (sequence is synthesized)
attgagattgcaggacacactaccaccctgaaaactggagagaggaaaaatacagagaggaagcagatcagcttacctgaagcagaggccgctggaatctgtgacaggctgcatttgtaa

SEQ ID NO: 862767 - DNA, 120 bp, Artificial Sequence
  ENSG00000231876_4 (sequence is synthesized)
ccaagccgtggtccttttcattgcatcttgccagaatgaagaagagctgatctctccagttcctgttattccccttacattgcccacatttattgctcaataaaccacagaaatccttct

SEQ ID NO: 862768 - DNA, 120 bp, Artificial Sequence
  ENSG00000231876_5 (sequence is synthesized)
tatccaggtgtcccacatatgagagccaattccaaagaaataactacaacttggaaaaaactatatgcataaagatgttcattatggtgttagctatagcagcaaaacaaaaaaaaaaaa

SEQ ID NO: 862769 - DNA, 120 bp, Artificial Sequence
  ENSG00000231876_6 (sequence is synthesized)
cacagaaaatgtttgcaagaattcccaaatagaaaattattaagtcagctatgacattttcccagtaggatattctgcagcacttaatatgaaagtcactaagtttacatggaaaaatac

SEQ ID NO: 862770 - DNA, 120 bp, Artificial Sequence
  ENSG00000231876_7 (sequence is synthesized)
cagacagcatgaaatatccagaataggcaaattcatagagaccaaaagacaggcatagtggttgccacaggctggaggaagaaaagaatgtggagtgactgctaatgcataaaatgggtt

SEQ ID NO: 862771 - DNA, 120 bp, Artificial Sequence
  ENSG00000231876_8 (sequence is synthesized)
tccttttggggtgataaaaatgttccagaacaagatatgggtgatggttgcacaacattgtaataatataataatgtaataatgccactacgttgtacacattaaagtggttaaaatggt

SEQ ID NO: 862772 - DNA, 120 bp, Artificial Sequence
  ENSG00000231876_9 (sequence is synthesized)
agagtcaagacatcaacacatgaatcagacaggatgagaggaggataaggctaaagacagaggctccagctaccttggtgacaaggaatggaggagaaaaggaacaggaaattttaataa

SEQ ID NO: 862773 - DNA, 120 bp, Artificial Sequence
  ENSG00000231876_10 (sequence is synthesized)
agaaaaggaacaggaaattttaataagattaggagggcttgcttttctgccaagtgagatggagtcttgctctgttccccagcctggagtacggtggtgccatctcggctcactgcaacc

SEQ ID NO: 862774 - DNA, 120 bp, Artificial Sequence
  ENSG00000231876_11 (sequence is synthesized)
cttgaacctggcatataatagatgctgaatacatgagttataattgaaaacaatgttgattattcttttacaactaaactctagccatttacagattttaaataaagtgatccataacat

SEQ ID NO: 862775 - DNA, 120 bp, Artificial Sequence
  ENSG00000231876_12 (sequence is synthesized)
tgcgcagggaacaatggtttttcagctcagggcttgagaagggcaaagagggaatccaaaagcagaaatatgggcaacccttcagaatgggccattgttcagctgggagcagaaagggat

SEQ ID NO: 862776 - DNA, 120 bp, Artificial Sequence
  ENSG00000231876_13 (sequence is synthesized)
gattaggagggcttgcttttctgccaagtgagtcacagatttagcgtgatgttgagccccacagcctgataacagagagtataatgatgattattgcgtcaataaattttttttttgaga

SEQ ID NO: 862777 - DNA, 120 bp, Artificial Sequence
  ENSG00000287098_0 (sequence is synthesized)
acttggttaagaagttatccgcggagaagctgcgaggatggtggagtgaggcgtgcggctgtaaattggcctctgggccgggggcgggctagctcccgggaggccgagcgcatctgttgg

SEQ ID NO: 862778 - DNA, 120 bp, Artificial Sequence
  ENSG00000287098_1 (sequence is synthesized)
actgtgcgaagagaagaaaaaaagagatcggccagaggaaaggaactaaccgaacattcttcctccctaccttgcagaggggagtggtcatctacactaaagcaaaggttccttatcaca

SEQ ID NO: 862779 - DNA, 120 bp, Artificial Sequence
  ENSG00000287098_2 (sequence is synthesized)
tccagttatcctgccaacttctccaggaagaaagaaacaacttgcatgggtcttctgctgtttgcttaattataaagacatcattttgcaagctgaaggctgagtttcattttaaacagg

SEQ ID NO: 862780 - DNA, 120 bp, Artificial Sequence
  ENSG00000287098_3 (sequence is synthesized)
ctgaaggctgagtttcattttaaacaggtggaatctcactgtgttgcccaggctggagtgactggtgcgatctctgctcactgcaatctctgccacctgggttcaggcgattctcctgcc

SEQ ID NO: 862781 - DNA, 120 bp, Artificial Sequence
  ENSG00000257654_0 (sequence is synthesized)
ctcaagcaacacaatatcacatttccagggcctcctcttctcatcagcaggcagggacagtgcatcgacccagaggcctgggagaggcaggaataatgatgcgccagagagaattctggc

SEQ ID NO: 862782 - DNA, 120 bp, Artificial Sequence
  ENSG00000257654_1 (sequence is synthesized)
agaatcagagacttaacaaatataatgctgacaatatgaccattatgacacaagaaactatttgtatccattgtcctttcctcgcctgaaataacctattgcttcctactcggtgatgac

SEQ ID NO: 862783 - DNA, 120 bp, Artificial Sequence
  ENSG00000257654_2 (sequence is synthesized)
atttttcaggcaccaagagttgcccgtggaacaagaagtacataaacttccttgctttgtagaaaacagattccgttttataagtggtttagtatttagacactacctccaaaggttggg

SEQ ID NO: 862784 - DNA, 120 bp, Artificial Sequence
  ENSG00000288245_0 (sequence is synthesized)
gggatcctgcatctgatgtggcccttctgctgtgcctgtggctccccagttgcctctgggccatcccagcctcagtttccccatctctgtcatgaatgacaccatggaggttccgtgagg

SEQ ID NO: 862785 - DNA, 120 bp, Artificial Sequence
  ENSG00000288245_1 (sequence is synthesized)
ttaaatgtgatctcacagtttacatttgatggagctgggctttgaacctggggaccgcatcctctcacccctctccttttctgccaccttggctgggaagtggaggagttctgactcaca

SEQ ID NO: 862786 - DNA, 120 bp, Artificial Sequence
  ENSG00000288245_2 (sequence is synthesized)
gcccaaagtcctgtctacaccggatgccaagagaagaacccggcatacagcagacggtgaagatgcagggtcctgagagtcagcttggggaggtggctccagcatggagacagtgtcggc

SEQ ID NO: 862787 - DNA, 120 bp, Artificial Sequence
  ENSG00000288245_3 (sequence is synthesized)
tccactttagggagaaggaaactgaggtccaggaaagtcgggtggctttccaagggcatcccccatggagggatgtggtgagggctggcccaggccttccagcttcatccccactgctcc

SEQ ID NO: 862788 - DNA, 120 bp, Artificial Sequence
  ENSG00000288245_4 (sequence is synthesized)
cactatacgggaagtcttgtgggacgtatcctgtggctgaacctcttcccatccagcagcatgggaacctctttccatcttctttctcatgaagaaaaccaaaaacaaggatttccactt

SEQ ID NO: 862789 - DNA, 120 bp, Artificial Sequence
  ENSG00000288245_5 (sequence is synthesized)
cttcctctctcacaattcacaattttctggattttttcctcatgtcgtttccactgactcctcaccaaagctcatctctctcatgcttcccagcccttgatctggacatcataaggctgt

SEQ ID NO: 862790 - DNA, 120 bp, Artificial Sequence
  ENSG00000288245_6 (sequence is synthesized)
agaaagatcctaggatagagaccgagaaagctgagttctagaactttccatcaaccaaaagcattatttttaacaataaaaagatttgcaggtttgaggatggcttcagagaaagctgca

SEQ ID NO: 862791 - DNA, 120 bp, Artificial Sequence
  ENSG00000288245_7 (sequence is synthesized)
ggattccaaagcagaatgtaatctttggaagcccaggtcgtcccctcagccaccgggaattaggcaggaggcgtccgagctggctttacaccatacagggtgtcatctgtttcggtgttg

SEQ ID NO: 862792 - DNA, 120 bp, Artificial Sequence
  ENSG00000288245_8 (sequence is synthesized)
tgtgtgcctgtcagacatccaagcctgtcctggacacccctccagtgacacctcattaacagagtgtatcctgtctcaaggcatgagtttgcttgtcattgtcatcatggatttcagatg

SEQ ID NO: 862793 - DNA, 120 bp, Artificial Sequence
  ENSG00000288245_9 (sequence is synthesized)
gtggtatagtctcctgggaaagagagggaggaaccaagaaagaagccaggaagagagggagggaaagaagagggtggctaaatgtttgaaggcctactatgtgcaaacccttgtggtcac

SEQ ID NO: 862794 - DNA, 120 bp, Artificial Sequence
  ENSG00000257657_0 (sequence is synthesized)
aggtgtgagccacggttctcggccgtttaacattcttttaaacggctcccccacttccaatcttagtttccgtcccaatttgggaattgttcctgcctggaggtgagggaaccatcaatg

SEQ ID NO: 862795 - DNA, 120 bp, Artificial Sequence
  ENSG00000257657_1 (sequence is synthesized)
gccttgtctgagatgcacgccttggtgcacaacaaactcctctgccatcgcttagtccttcaaagctgacagtgcttttagaggtaaaagctaaatggaaatctctttttctcctcttcc

SEQ ID NO: 862796 - DNA, 120 bp, Artificial Sequence
  ENSG00000257657_2 (sequence is synthesized)
tttctcttcttaatgtgcattttgggaggcagtaggcaggcacacctactgtattgctgattcacaaacttgagagcaagggttcctactgctggttgtatagaccttgccagcagcttg

SEQ ID NO: 862797 - DNA, 120 bp, Artificial Sequence
  ENSG00000257657_3 (sequence is synthesized)
atcaagggacactttaacaatcatcattaataacggagctaatattttttcactgagctattacacagtgatggagagccactggtaaactcagccccatgccctgacctaaccaatcac

SEQ ID NO: 862798 - DNA, 120 bp, Artificial Sequence
  ENSG00000257657_4 (sequence is synthesized)
cttgctttctagatactagatcaattaggatgtttaagatttaaggtgagatgtcagataattttgatggctaggagatacatacctaccaactctacttaaatctgttcatgataagtg

SEQ ID NO: 862799 - DNA, 120 bp, Artificial Sequence
  ENSG00000257657_5 (sequence is synthesized)
atatcatagatatattcgatttctcagctttaaagaactttagagatcatgcagttttacattattccattcaaataaaatagaaggaaacagcttggtacccagatggaggggttcacc

SEQ ID NO: 862800 - DNA, 120 bp, Artificial Sequence
  ENSG00000257657_6 (sequence is synthesized)
acttggccggcatgaggaagagcaatgtggaaggatacagatagttgggaacatatagtgcctgtgaatgaccagtatgctcactccaataacatcaggcaagcaattccacataatact

SEQ ID NO: 862801 - DNA, 120 bp, Artificial Sequence
  ENSG00000257657_7 (sequence is synthesized)
gaagaaggctgttgaagtgactgaatctggccaaatattctgagcgtttcggagggatttttaacattctaaatgctatctggaacatcgatgcagcatgggaagaagtcacacagccat

SEQ ID NO: 862802 - DNA, 120 bp, Artificial Sequence
  ENSG00000257657_8 (sequence is synthesized)
gcatgaacagcatttggaagaaagttttgaagacatatgtgaacacattcaaaatgttaacagagattctgccgtattcataagcttgttggcatcgaggctgaagagctttccaatgag

SEQ ID NO: 862803 - DNA, 120 bp, Artificial Sequence
  ENSG00000257657_9 (sequence is synthesized)
aagctggaaaaagaaagaagtaaagaagttggggcaaagatagaagaaattgttcctgaggcaccaagaaagttcatagcaaataaactggcagcggtgttttctactatcagcagtggt

SEQ ID NO: 862804 - DNA, 120 bp, Artificial Sequence
  ENSG00000257657_10 (sequence is synthesized)
gtgtgaatgttaggacaaatgggtgacaattacaattgctatcacacacatattgttccatagtctctcctgttctttgccagccttattaccttttcttttttccctattaatccaaga

SEQ ID NO: 862805 - DNA, 120 bp, Artificial Sequence
  ENSG00000257657_11 (sequence is synthesized)
gctctatgggagtaaaaaggatgctcttccttgcaatgaagaaatatgtaatgaaaagaaaaaacatattgtcaaaacttggtatctacctgaagaacactttgccttctaaaccataaa

SEQ ID NO: 862806 - DNA, 120 bp, Artificial Sequence
  ENSG00000257657_12 (sequence is synthesized)
caagtgtcagtgtcccagtgccttctgccagctattctcaagactcatcagaagagagtgaaattgatgactctgtagctgtagcatccccattatcagcacttaattttagcttaatgc

SEQ ID NO: 862807 - DNA, 120 bp, Artificial Sequence
  ENSG00000257657_13 (sequence is synthesized)
tttgaacattcttcaggctcagtgtgctttcatctgtacacattaatggaaatctggagatagaaagatttgggtattggttcagcagctcaatgatgccagggccagtgtgttggcatt

SEQ ID NO: 862808 - DNA, 120 bp, Artificial Sequence
  ENSG00000257657_14 (sequence is synthesized)
gctgtccccagtcaaaggaggaagaagagggaattggcagcagttatcagagcctttatcagaaaagcacagatttcccaggaatccccaggagacttctggttacagtccattggccat

SEQ ID NO: 862809 - DNA, 120 bp, Artificial Sequence
  ENSG00000257657_15 (sequence is synthesized)
aatgtggtcaaatgggcttccctatcaacaagggagacagagaaagtgagtttttatatttttcagcttgttctgtggaaggtggcaagagaaaagtggggtggggattgcttcggctaa

SEQ ID NO: 862810 - DNA, 120 bp, Artificial Sequence
  ENSG00000257657_16 (sequence is synthesized)
gcagatcctgtagtgtttgccacaggggtatttaatgactaaaatcccacttggttgtcaggtaagtaagcaagaaattctatgcttttaccttatcacagacttccttagtctccagat

SEQ ID NO: 862811 - DNA, 120 bp, Artificial Sequence
  ENSG00000257657_17 (sequence is synthesized)
tattctgagagataggcacatacacaaagtgtgctccttggtgtgtattttaagataatgttttgtattttgcacagaagcaaatattgcctcttccatattatagttttaataagttta

SEQ ID NO: 862812 - DNA, 120 bp, Artificial Sequence
  ENSG00000257657_18 (sequence is synthesized)
tggccttgtcattaactcattcaaccaatatttattcggatttatctatatgatagtaattgtagttgatactgagatttcagagatgaataagataagatccctagcttcaagtagttc

SEQ ID NO: 862813 - DNA, 120 bp, Artificial Sequence
  ENSG00000257657_19 (sequence is synthesized)
atagcccaagagtgaaatactttgatataagtagttatatacatataattataatttatcaaaagagcactgaagagcatatatagtgatatgtatcttcggctctctatacatatcctt

SEQ ID NO: 862814 - DNA, 120 bp, Artificial Sequence
  ENSG00000257657_20 (sequence is synthesized)
agtctggggacaatcatttgagtttgtggatcttgataggagatccaggaagatcagtttagagataattcaaagcttcttaagcaaatgtcactttgtaatgacactacctttctttga

SEQ ID NO: 862815 - DNA, 120 bp, Artificial Sequence
  ENSG00000257657_21 (sequence is synthesized)
tctctatattgtccctcaagtagttgaagcctgtagttctttaatatatggttagcttacttagcttgaagataatacagcagtttgagtttagttatgagtattatacttgaaagctaa

SEQ ID NO: 862816 - DNA, 120 bp, Artificial Sequence
  ENSG00000257657_22 (sequence is synthesized)
gaacatgatcagcatttagctttatatcttaaaggggttggtgagtttctgcacctggttcacttgacatgcctgagctctgagtaagaataagaatcagaatgcacctggcttccacaa

SEQ ID NO: 862817 - DNA, 120 bp, Artificial Sequence
  ENSG00000257657_23 (sequence is synthesized)
taaagaaagcagccagaggtaccccattttagggccactgagatgagctgttcccaaccagatgacatggggtgatttcctcttcacttttctgctttcagcaggttcaaaactgcctgg

SEQ ID NO: 862818 - DNA, 120 bp, Artificial Sequence
  ENSG00000257657_24 (sequence is synthesized)
aatcatgagaatctttaattcctcttcttggctaggaatcttctcctgttttctccattggattacataagaccaggatatggcactaaagcttgcttttctttacctatatgttgtgac

SEQ ID NO: 862819 - DNA, 120 bp, Artificial Sequence
  ENSG00000275888_0 (sequence is synthesized)
aaggagagttctcatcggtgcacgacagactgaagaccactggaagccacccgaccaggaatctgtcggagccaaagcacaggagaaggtcagcatggggctgggggagccggccaggca

SEQ ID NO: 862820 - DNA, 120 bp, Artificial Sequence
  ENSG00000275888_1 (sequence is synthesized)
gataccacagtgacggtgctgggcagggaggggacgcaccgccaccgcctagccccagtctagacgcctgcgtcccccgccacgcacagggaagacatgaaaagcagttcctgtcaacac

SEQ ID NO: 862821 - DNA, 120 bp, Artificial Sequence
  ENSG00000275888_2 (sequence is synthesized)
gcagcgggtctcccagcggcacagacccgacagaagcgcaagcccctgctggaaggagccgccgagcgcgcgtggccgccgaggagggagcacagcgtggacgccggccatgcaccgacg

SEQ ID NO: 862822 - DNA, 120 bp, Artificial Sequence
  ENSG00000275888_3 (sequence is synthesized)
gcggggagtgagtgggctgcggctggaggagttaatacagacgaagctgcgtggacaagacggctgggcagagaccaagtgtgaaaagaaacacaaaacaaggacagagataaatgagac

SEQ ID NO: 862823 - DNA, 120 bp, Artificial Sequence
  ENSG00000275888_4 (sequence is synthesized)
aggaagagagaggcgactagaaaagctggcatggcagagactgcccagagtgtggcgcagcaagagcttaggagcccccaacaccaagcgtggagccacccagctgagcaggacacagac

SEQ ID NO: 862824 - DNA, 120 bp, Artificial Sequence
  ENSG00000248869_0 (sequence is synthesized)
ggatgaagaacacagcagcctgcctccacagctttggaatcgatgtgcaaataatttccttgggaggaactctttatatacaagaggattcactccaaattgtacaccacactcaggcat

SEQ ID NO: 862825 - DNA, 120 bp, Artificial Sequence
  ENSG00000248869_1 (sequence is synthesized)
gggactaagaacgatctacaatcagaaagtgattcaaaagactctcagctaagtgctacataatgagcaactcgtactcctcaaccaaacgataatgaaagagaggcacctgactcaagc

SEQ ID NO: 862826 - DNA, 120 bp, Artificial Sequence
  ENSG00000248869_2 (sequence is synthesized)
aatggatgtcggagcagaagactagaaggcaaagcaagtacatgctacctgtctgggcaagacctttcagtgcctttccatatttcaatgggtagtcatctgcacaccttccagtctttt

SEQ ID NO: 862827 - DNA, 120 bp, Artificial Sequence
  ENSG00000248869_3 (sequence is synthesized)
cttctgtattgcaaaggctagaagccttggtactatatttatcaaacttactttttttttttttaacaaatcttcaatgtgattctcattttgctaagatacatttgtatgaaattttga

SEQ ID NO: 862828 - DNA, 120 bp, Artificial Sequence
  ENSG00000248869_4 (sequence is synthesized)
gatagaaaagtatgaataagaaagcattgccttctttctcagtggcagcacacaaacatatggacttcacagacacgacattttgcagcaacttctagatcttccccctgtgagtgccct

SEQ ID NO: 862829 - DNA, 120 bp, Artificial Sequence
  ENSG00000248869_5 (sequence is synthesized)
gggacatcattacaataaataaaccattcaggaagtcaaaggatggtagttttcacagaagcattgcaagcattgagaagaaaaataatccatatctagtaggtttatttttatgaggat

SEQ ID NO: 862830 - DNA, 120 bp, Artificial Sequence
  ENSG00000248869_6 (sequence is synthesized)
aaatctctggcctctccatatggaaaaggatctcctgtaagttaatcctgccatcaggttgctggctggtttgcctgggatataaagccctattagtgagccagtggtgacctttgctgc

SEQ ID NO: 862831 - DNA, 120 bp, Artificial Sequence
  ENSG00000248869_7 (sequence is synthesized)
tgtctggttagatgcgcagcagcactgcagtcaccctttctgagggaaagttcacgttttgaagcctaggtagaaattctctctgtaccaccatggtttcactgaatgtgagtcaattga

SEQ ID NO: 862832 - DNA, 120 bp, Artificial Sequence
  ENSG00000248869_8 (sequence is synthesized)
ggcatcaccagggtggcaaaaagttatcaagtcaagcccagtcaactcagaaaattcatctcagaattccattttacgtcaatttcctggcataatgttgaaacactctgccctttagta

SEQ ID NO: 862833 - DNA, 120 bp, Artificial Sequence
  ENSG00000248869_9 (sequence is synthesized)
tctggaacaatgtctaacacaataatgcttaacgccggggaaatgagggcataggtctgaatctccggagattccttttatggggaatatcttttaacaccccttaggaaacaacatcaa

SEQ ID NO: 862834 - DNA, 120 bp, Artificial Sequence
  ENSG00000248869_10 (sequence is synthesized)
aagacagtaccaataaggtctcctgccttccccaggaataaagatttaaatcacaccagctcaatgctggttgagggcaagggaacaatgaatggcttgtggaaggggaaagttaaaaat

SEQ ID NO: 862835 - DNA, 120 bp, Artificial Sequence
  ENSG00000248869_11 (sequence is synthesized)
gcaaattacaactttgtgccccatttaaggaaagagaacttgaatagctatgcatatttgtgttttcttccttgctttgttatgtacatatttgtatatatcagccactaacttcttatc

SEQ ID NO: 862836 - DNA, 120 bp, Artificial Sequence
  ENSG00000248869_12 (sequence is synthesized)
tttccttcattcttcacttactaatttacataaggtactggtagttcatataaattcatttttagagactaaatataaaagcagaattgcaactgaacttaagcaagaatcattatcacc

SEQ ID NO: 862837 - DNA, 120 bp, Artificial Sequence
  ENSG00000248869_13 (sequence is synthesized)
cagggctagatttggtgactaatagaagtttggatctctatttttagaggagggattgagaaaatttttgtatggggaataattctattctattagcaagaatcgtgttgttttttgcca

SEQ ID NO: 862838 - DNA, 120 bp, Artificial Sequence
  ENSG00000248869_14 (sequence is synthesized)
ttgctgctaattaaaattttaaatattgtcaaaagtggtatatattatgctcgattttttccttttggcacccagtatatgttcccaaactctcctgtgctctttttgctatcatgtgag

SEQ ID NO: 862839 - DNA, 120 bp, Artificial Sequence
  ENSG00000248869_15 (sequence is synthesized)
ctaaaagcctggtaagtagatttttcagactcctttgtattcagtgttcagtgtatgatgcatgttttgactaatgggtaactgcatctttaatccatattgttatttaacatacattgt

SEQ ID NO: 862840 - DNA, 120 bp, Artificial Sequence
  ENSG00000248869_16 (sequence is synthesized)
atattgttatttaacatacattgtaatttccatacttgttttcaatctcccacactagaatggcaattgtgaaagcacggaggttttttttctttttattttttgagatggagtcttgct

SEQ ID NO: 862841 - DNA, 120 bp, Artificial Sequence
  ENSG00000248869_17 (sequence is synthesized)
acagaggttctttctatctggtgctcaataatatttcctgcatgaatgattaataagtgaattaatattaaaacaaaaaaataagaaaagtcaatgactttataggatttgcacattgaa

SEQ ID NO: 862842 - DNA, 120 bp, Artificial Sequence
  ENSG00000248869_18 (sequence is synthesized)
atattttaaattgaactagggtaacttcaacatgctaacacatgttgagacatggacatggtaaatttttcagatccataattttataataattttcaaattacatgaaagctttgcagc

SEQ ID NO: 862843 - DNA, 120 bp, Artificial Sequence
  ENSG00000248869_19 (sequence is synthesized)
tgaaacaggaagaagaccttcatcagaacccaatctttgtggcaccctaatcttggacttcccaacctccagagttatgagaaataaatttatgttgtttaagccattctagtctataat

SEQ ID NO: 862844 - DNA, 120 bp, Artificial Sequence
  ENSG00000248869_20 (sequence is synthesized)
gagagtggatgaagaacacagcagcctgcctccacagctttgggtcttcccttagatgttgcaagccttcaatggactctagagttccaaaacagttatatcagatggttctcccagtgc

SEQ ID NO: 862845 - DNA, 120 bp, Artificial Sequence
  ENSG00000248869_21 (sequence is synthesized)
aattgttatctagtttctaatgtcactgcagctgtgccgttcaatagtgaatagtcttactgtcaatgaatcgatgtgcaaataatttccttgggaggaactctttataaatgacacaaa

SEQ ID NO: 862846 - DNA, 120 bp, Artificial Sequence
  ENSG00000248869_22 (sequence is synthesized)
gttaaatggccatacagttcaaagaaatttacagatgcaatgctatttctaaaaactaccaatgacattctttacagaattagaaaaactattttaaaattcatatgggctaggagcagt

SEQ ID NO: 862847 - DNA, 89 bp, Artificial Sequence
  ENSG00000248869_23 (sequence is synthesized)
ggctcatgcctgtaatcccaacattttggaaggctgaggtgggaggatcactcgagagtgagagcctgtctctatgaaaaaacaaaaaa

SEQ ID NO: 862848 - DNA, 84 bp, Artificial Sequence
  ENSG00000248869_24 (sequence is synthesized)
gatgaggcagaaggatcactttgagcctgggaggttgaggctgcagtgggccatgactgtgccactgctctccagcccaaccac

SEQ ID NO: 862849 - DNA, 120 bp, Artificial Sequence
  ENSG00000275880_0 (sequence is synthesized)
aatatccagtccctctcgtccaaggacgtgcagggtctgtacttgcccagtcgcactgggacttcaaattggggatgcagacacggccctgctcctggtgtgcgcgaagcccgctcagcc

SEQ ID NO: 862850 - DNA, 120 bp, Artificial Sequence
  ENSG00000275880_1 (sequence is synthesized)
ggccagctcgcctgcacgcccgccgcgtccctgggccccaggagggcccccgtatccagctccgaccaaacagcaagcccgcagttggcgagcatctttcccagaccgggagcggggaca

SEQ ID NO: 862851 - DNA, 120 bp, Artificial Sequence
  ENSG00000275880_2 (sequence is synthesized)
gacagagcagagcagacggatccgaccagcgcaccacggcgccccagggccctcctaccgtcctcggccctcggccccccgttccccggccaccgcgcgggctccgccgctcctgggacg

SEQ ID NO: 862852 - DNA, 120 bp, Artificial Sequence
  ENSG00000275880_3 (sequence is synthesized)
ctggctccggcccggcgccaccctctgcccctctgtcaccccgcacggaggctcccatcacccaagccgcgcccagccgtcgccgcgccgttccaggaggcctccgtcctctccctactc

SEQ ID NO: 862853 - DNA, 120 bp, Artificial Sequence
  ENSG00000275880_4 (sequence is synthesized)
cccgcgcgcgggctgcccctcggcggcgcttcccccccgcgagccagcagaggcggtcagcggtcgggtacctgcgtccagtggcggcccgtacagcgcgagtgcggccgagagcaatgc

SEQ ID NO: 862854 - DNA, 120 bp, Artificial Sequence
  ENSG00000275880_5 (sequence is synthesized)
acagcgcgagtgcggccgagagcaatgcgacaacgaccgcgccggcgacggcagttccggcccccgcgcgtgtgaccatccccgggccaaatggaatcgaccttacctcgtctgcaagcc

SEQ ID NO: 862855 - DNA, 120 bp, Artificial Sequence
  ENSG00000275880_6 (sequence is synthesized)
cggattgccccacagcgaggacccagggccatcgggcagcattccggattcccagctgcccccgcgccgtcgccggaaacacagccattggaagcgttttccggtttcccgaccgcctcc

SEQ ID NO: 862856 - DNA, 120 bp, Artificial Sequence
  ENSG00000275880_7 (sequence is synthesized)
gcgcggctgtcggcagtgggatcccaactcgctcaatcacacccggttctagatgattgacaagcgcgacgcccaacccggcctggtcccagctctggcctaagaggttcggctggaagg

SEQ ID NO: 862857 - DNA, 120 bp, Artificial Sequence
  ENSG00000275880_8 (sequence is synthesized)
caggttgaagagttaacaacgatctggttcagggtctggtttgtgtttatcggcccatttttaggcttgcggcgttatagaaaatgattttgctggcaggtggagtgccgaggcccacta

SEQ ID NO: 862858 - DNA, 120 bp, Artificial Sequence
  ENSG00000275880_9 (sequence is synthesized)
tgtgcccccagtatagcagtcaggtgcctttctgctccaggcgcaacctctgccctgaaccccaaaccagctcgctgcgaggccccttcgctttccaccgtctcaggtcagggcagctcc

SEQ ID NO: 862859 - DNA, 120 bp, Artificial Sequence
  ENSG00000275880_10 (sequence is synthesized)
atcactccaacgctgaggcccaaacccctggaaggcattctgacctctcctgccctcccacccacgctcctcctgtggctgatggcctcttacctccactgccgccctatttgaagccac

SEQ ID NO: 862860 - DNA, 120 bp, Artificial Sequence
  ENSG00000275880_11 (sequence is synthesized)
gaagccaccgtcatggtgctaaaagaaacttgtggggccaggtgcggtggctcgcgcgtgtgatcccaatgctttgggaggccaagatggaaggatcgtttgagcccaggagtttgagac

SEQ ID NO: 862861 - DNA, 120 bp, Artificial Sequence
  ENSG00000275880_12 (sequence is synthesized)
acaacataaggagacccccttctctaccaaaatttttttggaaaattagcaggggatggtgtggcacacctgtagtccagctacttgagaggctgaggtgaaaggatggctcaacatgtc

SEQ ID NO: 862862 - DNA, 120 bp, Artificial Sequence
  ENSG00000275880_13 (sequence is synthesized)
aatagggactgggtaaaatgagggtgagacctactgggctgcattcccagggggttagacattcttggccacaggatgaggtggtgggcacaagatacaggtcacaaagaccgcactgat

SEQ ID NO: 862863 - DNA, 120 bp, Artificial Sequence
  ENSG00000275880_14 (sequence is synthesized)
aagatgacacagtaaagaaactggcccaaagcctaccaaaaccaagatggccacaaaagtgacctctgtgtcctcattgctcattatttgctgattataacgtattagcatgctaaagga

SEQ ID NO: 862864 - DNA, 120 bp, Artificial Sequence
  ENSG00000275880_15 (sequence is synthesized)
tatttgctgattataacgtattagcatgctaaaggacactcctaccagcgccatgagagtttacaaatgctatggcaacatcaggaaattactctatatggtctaaaaaggggaggaacc

SEQ ID NO: 862865 - DNA, 120 bp, Artificial Sequence
  ENSG00000275880_16 (sequence is synthesized)
cccagaaaactcatgaataatcccctccttatttagcctataatcaagagataactataactatgtgtggagttagttcctgccggtgggttcatggtctcactgacttcaagaatgaag

SEQ ID NO: 862866 - DNA, 79 bp, Artificial Sequence
  ENSG00000275880_17 (sequence is synthesized)
cactgacttcaagaatgaagctgcggaccttcacagtgttacagctcttaaaggtggcatgccgggcgtggtggctcat

SEQ ID NO: 862867 - DNA, 120 bp, Artificial Sequence
  ENSG00000275880_18 (sequence is synthesized)
ttccacagcatggaaggggacccaagtggattgctgctgctggctggcgggggtgggggggtggggcagcttttattcccttatttctcccctcccatgttctgtttctgccctatcgga

SEQ ID NO: 862868 - DNA, 120 bp, Artificial Sequence
  ENSG00000275880_19 (sequence is synthesized)
tcccttatttctcccctcccatgttctgtttctgccctatcggaatgcccttttttcaatctttcctgcaattggctacttttaggatcctgctgattggtgcgttttacagagcactga

SEQ ID NO: 862869 - DNA, 85 bp, Artificial Sequence
  ENSG00000275880_20 (sequence is synthesized)
cgacccaggaagtccagctggcttcaagtctcataagtatattcagtcaagcagccagtgccactttcttaataagtttgctttc

SEQ ID NO: 862870 - DNA, 120 bp, Artificial Sequence
  ENSG00000275880_21 (sequence is synthesized)
ttgctttcaatttatggactcgcccagaattctttcttgcacaaggtccaagaaccctcttgaggtctggattggaacccctttctgataacagagtgaaaccctgaactacacctacca

SEQ ID NO: 862871 - DNA, 120 bp, Artificial Sequence
  ENSG00000275880_22 (sequence is synthesized)
gaccaaaccagtaaggagtttaactacagtaactgagctttacttcatggcaggaaactctgtaaccagttaagcaatgaagttataatcaaattagctgtctccatcacacacttctgt

SEQ ID NO: 862872 - DNA, 120 bp, Artificial Sequence
  ENSG00000275880_23 (sequence is synthesized)
ttcctataggtgctgtcagatcaggttcctgattggagttctcttatctgctctggtttggagggctgccccattcgggaatctgttttgttttgctcaaatacactcagttaaaacata

SEQ ID NO: 862873 - DNA, 120 bp, Artificial Sequence
  ENSG00000248866_0 (sequence is synthesized)
cgggcgcgccgcgtgagtccgagccggccgctcagagcgctccaggctgggttcccgggccccgccgcgccgcctccttcccagctcgcccgcccaggcctggcctcctgcttttccatt

SEQ ID NO: 862874 - DNA, 120 bp, Artificial Sequence
  ENSG00000248866_1 (sequence is synthesized)
tgattccctgcctctttctattcggactggaatgccgggccaggctccggggcgcgccgctgcggcagccgcacctcgcaggtcccccggccgaccccgacgcggaagcggcggccctcc

SEQ ID NO: 862875 - DNA, 120 bp, Artificial Sequence
  ENSG00000248866_2 (sequence is synthesized)
tcgccgtcggggagccagggagccggggacgatcagtcacataaggcttagaggatcaaggatcctgcccagatgacttaccgaaatgttacagattaagttggtgtggtaacctgggct

SEQ ID NO: 862876 - DNA, 120 bp, Artificial Sequence
  ENSG00000248866_3 (sequence is synthesized)
gagcactctgggagaggaagagaagagagaagacaggaaacaactgaactatgaccaatcccagcacggaggcccagaaaactttaagatttgagtattaatgtctcaaggtcaggagca

SEQ ID NO: 862877 - DNA, 120 bp, Artificial Sequence
  ENSG00000248866_4 (sequence is synthesized)
aattttgtaataagagttcagtatttctgccaacattggcgcatggattgcaaagttcacaggattgaaaacaccatcgacataatggaaattgaacagcatctgattactgagtgctat

SEQ ID NO: 862878 - DNA, 120 bp, Artificial Sequence
  ENSG00000248866_5 (sequence is synthesized)
atcagcaagttaaaaggatcttttgcataccttttaatggtatatatcctaaaactgaagtgttcaatatagacatccagattgaaactcaggcagtgaattacatacacaacaaatcag

SEQ ID NO: 862879 - DNA, 120 bp, Artificial Sequence
  ENSG00000248866_6 (sequence is synthesized)
ttgaacatggcagagcttgtcagacttatgaaagattaaatacattttacatttccacaagtgtggtattcacaggtctaaattggaaaattcttgggttgaagaagaataatcataatc

SEQ ID NO: 862880 - DNA, 120 bp, Artificial Sequence
  ENSG00000248866_7 (sequence is synthesized)
ttagcttcactcattgaggaaacattattcagggatgataagaggtaaaatcttaaaaatattgacaagctaatgagagaactttgaggtaagctgatatgcaggtatagttaggactgg

SEQ ID NO: 862881 - DNA, 120 bp, Artificial Sequence
  ENSG00000287540_0 (sequence is synthesized)
aggaccggctcagatgtctttacttgctgtgtaagtgttgttctttggctgttagcaataaatcttgttgctgctcactcttgggtctgcgccgactttgtgagctgtaacactcactgc

SEQ ID NO: 862882 - DNA, 88 bp, Artificial Sequence
  ENSG00000287540_1 (sequence is synthesized)
ttgggtctgcgccgactttgtgagctgtaacactcactgccaaggtctgcagcttcactcctgaagccggctagaccacgagaaacat

SEQ ID NO: 862883 - DNA, 120 bp, Artificial Sequence
  ENSG00000287540_2 (sequence is synthesized)
actcaccgtgagggtctgcggcttcattgttgaagtcagcaagttggagaacccaccaattccggtcacactaccagtgtggtagcctaagtttgattcgttgtcaatggacaatcctcc

SEQ ID NO: 862884 - DNA, 120 bp, Artificial Sequence
  ENSG00000287540_3 (sequence is synthesized)
ttacttcagatgaaggactcagcaagaactaggcactctgcaacccagaagagagttctcgccagaaaccaatcatgctggcacttggatctaggacttcaagcttccagaaatttgtgg

SEQ ID NO: 862885 - DNA, 120 bp, Artificial Sequence
  ENSG00000287540_4 (sequence is synthesized)
aataagtttctgctgtttataagccaccaagtctatgataatgtgtcagaggactgagctaagacataaagtgagctagagttaagatttaagatctatttgttacaataaaattcaaaa

SEQ ID NO: 862886 - DNA, 120 bp, Artificial Sequence
  ENSG00000287540_5 (sequence is synthesized)
tagtcgtataaatgtttaaatgcaacatctcaaaaatcgtaacatgttcttacatttagagaattagtacagaaatattaagtcaacaaaatttctaacattaaattgatgtctacttgt

SEQ ID NO: 862887 - DNA, 120 bp, Artificial Sequence
  ENSG00000287543_0 (sequence is synthesized)
ggacatctttattcaagccagcaaatgacacgccaggagcccaggtgagccggagtgctctgcccagcctggctgcagttgttggccagagctcagagctctcctgggcctggcagatgg

SEQ ID NO: 862888 - DNA, 120 bp, Artificial Sequence
  ENSG00000287543_1 (sequence is synthesized)
ctctgcctgcacttctttttgggactcagagactaaattagaaaggggtgggggtagccccaggagaacccactttcattgtcaatcttgaggtcaaagaaaaccagaggtctgtcttct

SEQ ID NO: 862889 - DNA, 120 bp, Artificial Sequence
  ENSG00000287543_2 (sequence is synthesized)
gcttgggggtcagcaaggttctcgtccaggaccctgagggtgctggggccttccagctggaggtcactggactcactgctgctgtcatccagctctcgggaggactgcaacacagaaaaa

SEQ ID NO: 862890 - DNA, 120 bp, Artificial Sequence
  ENSG00000287543_3 (sequence is synthesized)
ccaagcgtcagggattcagagggccaaggcaagcacctgtgcagaacactagcaagctggtatagctgggagcatctgcgtgcacatgaaggagggtgtaccactgggaaaggggacgtg

SEQ ID NO: 862891 - DNA, 120 bp, Artificial Sequence
  ENSG00000287543_4 (sequence is synthesized)
tgcacaagagaagactcagaagaaacaccaaaacttgggacgggagaaagaagcctcatcttgaaccccagatgattctttggaaggggtcgggagcctgccttttcttgtccccgaagt

SEQ ID NO: 862892 - DNA, 120 bp, Artificial Sequence
  ENSG00000287543_5 (sequence is synthesized)
cagccgaggtgccagtgtcctacacaaaggcgaggggaaggactgcttggcctcctgaaggccacatctaggtggacacccaggtccttggcagtgagagagcagtggaggctcttggca

SEQ ID NO: 862893 - DNA, 120 bp, Artificial Sequence
  ENSG00000287543_6 (sequence is synthesized)
tctgccccagcagcttagagaaacctgagttttgggagtccttcaggtgaggcgttctctcctgtcccaaggtcctggtgggaacactgttcgagaagccatggggtggggagccagagg

SEQ ID NO: 862894 - DNA, 120 bp, Artificial Sequence
  ENSG00000287543_7 (sequence is synthesized)
atgagggaagggctccagctctgagattttcccaagggactgggactacagagggaggtggagcctctgatggtaatacagagttaattgcttatcatctgctcagctgccaagcccaga

SEQ ID NO: 862895 - DNA, 120 bp, Artificial Sequence
  ENSG00000287543_8 (sequence is synthesized)
tgtttagtctttgatgaccaacttggaacctcccatgaatgccacctgtggacgttagccagagaccagcaaggaagagacatggacaggatcacagggccaattgggagcatggctggg

SEQ ID NO: 862896 - DNA, 120 bp, Artificial Sequence
  ENSG00000287543_9 (sequence is synthesized)
acagagtccagggcaggccttgggtttttcctctttatggactgccgctggcttctcaatgaagttggtgtcacctggtgctaaagcctcagttaattctggcctctggctaatgtccct

SEQ ID NO: 862897 - DNA, 120 bp, Artificial Sequence
  ENSG00000287543_10 (sequence is synthesized)
ggcctaggaggcagcacatttccccagacccttccaatgcccaagtgaaacatctgcttccaaccaagcttcaactgagagaaaaagcgtttccacccacaagtaacctaagatgtggtg

SEQ ID NO: 862898 - DNA, 120 bp, Artificial Sequence
  ENSG00000287543_11 (sequence is synthesized)
acagccctgctccaggctcatcagctttctgccagttattgtcagaagcagacactcactatgaatccatctagagctggctttgcctcttcatatccagggatctagtcagagagtctg

SEQ ID NO: 862899 - DNA, 120 bp, Artificial Sequence
  ENSG00000287543_12 (sequence is synthesized)
cccagcgcctcgcatctccagatcctcattcagccacgctgtcaaaagctgatttcacacgtcttgctccgggtgagcccacactgctgtctcgcctttccaactcggtttcctccctgt

SEQ ID NO: 862900 - DNA, 120 bp, Artificial Sequence
  ENSG00000287543_13 (sequence is synthesized)
aaggagccttctacaaggcgtcttcctagcttgtagctgggtggctggagactccaccttctcccgctttgggagaatccagttgtttcctctctccaggcttcactgggcagcagcgct

SEQ ID NO: 862901 - DNA, 120 bp, Artificial Sequence
  ENSG00000287543_14 (sequence is synthesized)
ctcccacaagctggtggaggggctgggctccccttctgggtcctccctggttcagatccttggtgccaatagctgaggctgagtccatgctgccacccactgacatggcacacaggactt

SEQ ID NO: 862902 - DNA, 120 bp, Artificial Sequence
  ENSG00000287543_15 (sequence is synthesized)
tctctttttcgttcttcttcctgctccaaacccaactggaaatgcccctttgtgttcctgagtgcctccacaaagctcggggcaatgtcctcggccttagaaccagtcttcccgccttca

SEQ ID NO: 862903 - DNA, 120 bp, Artificial Sequence
  ENSG00000287543_16 (sequence is synthesized)
gatctgctcttccaagaggagagctccctggagagccacagtactgtctctttaggccacccctcccatcgttacagcagggtcatttatggcagccactagaacctcgtttttagagcc

SEQ ID NO: 862904 - DNA, 120 bp, Artificial Sequence
  ENSG00000287543_17 (sequence is synthesized)
ttccattgtcccggggccagggaaatgtcctttgtcctaaacttactcgagctgccttctctaagaaacctctactgtctcctttaataaaaggacaccccctttccaccaagcttgtta

SEQ ID NO: 862905 - DNA, 120 bp, Artificial Sequence
  ENSG00000287543_18 (sequence is synthesized)
atggaggagaggctggacctttcagccctgactcacttcctccaaaattcctcttgcccttggggacttccataaagtatggccacccatggagctggtctcactggaactccagccagc

SEQ ID NO: 862906 - DNA, 120 bp, Artificial Sequence
  ENSG00000287543_19 (sequence is synthesized)
tgtaaacccagaattctcccctgctccgccttaaactccagcatcacagctggggagtgctgacgcatttaaacaagactttctgaaagactcaggtttgccagcagggccatcagacat

SEQ ID NO: 862907 - DNA, 120 bp, Artificial Sequence
  ENSG00000287543_20 (sequence is synthesized)
agtggcctggtgcagaacatactcccctccctgctcactaggggagactctcccattctgcccccaggccccacaccttggccttattccgcaaattaggataactgggtgtcgggggag

SEQ ID NO: 862908 - DNA, 120 bp, Artificial Sequence
  ENSG00000287543_21 (sequence is synthesized)
catagagagggacagtcactggaaaagacttagatttgcttggaagagaaaaggaagggggacagaagaaagaagatgggaaacagagccttgagcctgcgtgtgaggaccgggaatcaa

SEQ ID NO: 862909 - DNA, 120 bp, Artificial Sequence
  ENSG00000287543_22 (sequence is synthesized)
gggggaaagctttgctatgcagtgagagatgccaggcgccaaagaaaaggggaagaaggactgaagaagtgctgctggggttatgagctggattccctttaatgttctttcaaaagatgc

SEQ ID NO: 862910 - DNA, 120 bp, Artificial Sequence
  ENSG00000287544_0 (sequence is synthesized)
agtaagtaaaagttcatcagatgaagaatagaaggtgttttctaggtggatggaggaagagatatttacaaagccaggaggtgtgagggaacctcacattcaggggaaatgcaagaatat

SEQ ID NO: 862911 - DNA, 120 bp, Artificial Sequence
  ENSG00000287544_1 (sequence is synthesized)
atggaggacaagaagatggaaagagagggcagtcagaaaaatcagcaagacagagaaataaccaagagaaatgagcaaagcccgactgttgttcctactttggccattggagctctttcc

SEQ ID NO: 862912 - DNA, 120 bp, Artificial Sequence
  ENSG00000287544_2 (sequence is synthesized)
tacgtttttgagcacttccttatttctgacaccagaagatgactcaggcttgacttgtattctccccgtccaacaatggaatctgccatttctccaaggagccctgattccttttatttg

SEQ ID NO: 862913 - DNA, 120 bp, Artificial Sequence
  ENSG00000287544_3 (sequence is synthesized)
agcgtgcaatcaacacagaagacctctgtgaccaaatgtgtgaggacttctccccaccaataagcaggcaagccatcatctctacagcagccaccagctgggtgtcctccaactcaattc

SEQ ID NO: 862914 - DNA, 120 bp, Artificial Sequence
  ENSG00000287544_4 (sequence is synthesized)
tgacactgtctacctggagagagagtcagatcccacaggcatcctgggaattcaatattttctccaaactttctgaagatactgaatatgcttcttgtctcagtgtcttcttctcagttc

SEQ ID NO: 862915 - DNA, 120 bp, Artificial Sequence
  ENSG00000287544_5 (sequence is synthesized)
tcagcattcaacggaaccatttgcgtgagaagaaatatcagaagcagtcgagaaaccaggaagtgggtgagtcctctagagatgaagagacattctgctggatgactttttaaaatgttt

SEQ ID NO: 862916 - DNA, 120 bp, Artificial Sequence
  ENSG00000287544_6 (sequence is synthesized)
tcttcaaagtcgtctgcttcactaacaatggtttttgtcttagaagtctccctttgattttataaactgacacatctgcttcttccagcttacagaactctgaaggtatattttttgcat

SEQ ID NO: 862917 - DNA, 120 bp, Artificial Sequence
  ENSG00000287544_7 (sequence is synthesized)
atgtaatgaggtcagacatcatttttttgtgcacttgacaaatggaatccttcaaagccatgaccttgttcatcattagtgaacatagtctcaggcccgaggctgtaccaggaataaacc

SEQ ID NO: 862918 - DNA, 120 bp, Artificial Sequence
  ENSG00000287544_8 (sequence is synthesized)
ggaataagtgtctttagtcactgagttctaagcattggtaacagcatatattgcatccttcatgctaaacaccttttgaaaaccttctgcatccatgcctttgttcactgctgttagcct

SEQ ID NO: 862919 - DNA, 120 bp, Artificial Sequence
  ENSG00000287544_9 (sequence is synthesized)
gctgttcaagaaagtacttgtatatttactcttcattgatataaggataccaggttgcatggctgaattcatgaagtcaaatttgggggaaatttcatggcatcaatattatttttatga

SEQ ID NO: 862920 - DNA, 120 bp, Artificial Sequence
  ENSG00000287544_10 (sequence is synthesized)
gactttcagctggaagatgagaagaatagttgtgaaagaatagcacaaccttgcagttgtcatccagttctgcttccctacattgagcatgagccactagtacaaagcatttgtgaaaac

SEQ ID NO: 862921 - DNA, 120 bp, Artificial Sequence
  ENSG00000287544_11 (sequence is synthesized)
aatcagtaaagatagctctggggatccattcctttttgttagcataataaactagtaagcaatttatttcttgaaaacagtgagagtgcaagcttttgcctatcataacaagtttatggt

SEQ ID NO: 862922 - DNA, 120 bp, Artificial Sequence
  ENSG00000287544_12 (sequence is synthesized)
acaccaaattagtgatgtttcatcagtattacagacttcttctggcatcagattttcatcagcagtgaccccggcaaactcttcaaggaatttctccactgcttcattatcagcagtgct

SEQ ID NO: 862923 - DNA, 120 bp, Artificial Sequence
  ENSG00000287544_13 (sequence is synthesized)
ttattaccaaaaatctttaaaaatttgatgctgtgtcttcacttaaatttctgcaatgaaactgttgaatcacagttccatccaatgtatagatctttgcttgtttcatcatcagcatac

SEQ ID NO: 862924 - DNA, 120 bp, Artificial Sequence
  ENSG00000287544_14 (sequence is synthesized)
cattaagtggcatgtattactgtgatgctgatggatctcctctttcaatgcacaatcaggatcttcactttcagctttatgcagtatttttctatttttctggcattgctttcagcatag

SEQ ID NO: 862925 - DNA, 120 bp, Artificial Sequence
  ENSG00000287544_15 (sequence is synthesized)
aatttcaacagtctatccttctgtttcttcaggtcaatatagggtggtcattctaacaccatactcttccgtaagatgtttcatacctacattactttccagtttctccaataggttgac

SEQ ID NO: 862926 - DNA, 120 bp, Artificial Sequence
  ENSG00000287544_16 (sequence is synthesized)
caataggttgacttcctgtgctatagataaacataaatgttccctgtttttcttatcagtgttacctgtagggtatctgtaagtgtttttagctttttttttttttggagatggagtctt

SEQ ID NO: 862927 - DNA, 120 bp, Artificial Sequence
  ENSG00000287544_17 (sequence is synthesized)
gagccactgccctcggccatttttggtgttttcaacagtgcctttacactgcagaacgaatacgcaaaaaacacaatgagaaatgcacatagagcttagcgctacttggggcattacaga

SEQ ID NO: 862928 - DNA, 120 bp, Artificial Sequence
  ENSG00000287544_18 (sequence is synthesized)
gaacctgccattgacatgtatggtctgcacgtgtgccattctattaccctttgtaggcgtgcttgcatcggggaatctgggtgtgtgaagacaagatatattgcagctgaaaaaggctgg

SEQ ID NO: 862929 - DNA, 120 bp, Artificial Sequence
  ENSG00000287544_19 (sequence is synthesized)
gagggtctttattcacttagggatgctgaataaactgtgttgtgtgcctgtgttttgactgtgactcatcacataaggtcaggtgtggaattttccacttgtgtgtggcatcatgttggt

SEQ ID NO: 862930 - DNA, 120 bp, Artificial Sequence
  ENSG00000287544_20 (sequence is synthesized)
gctcaaaaagctttatattttgaagcttttggggttagaaatactcgacctatactatttcttcataatcacttgtgggatgtttacttgacatagattgagtggaggaaggttaatgag

SEQ ID NO: 862931 - DNA, 120 bp, Artificial Sequence
  ENSG00000287544_21 (sequence is synthesized)
gggcagtcagaaaaatcagcaagacagagaaataaccaagagaaatgagcaaagcccgactgactgcttagtgtgcctctttagtcaacatgaaaaagaagaaaagaacaagcaactgaa

SEQ ID NO: 862932 - DNA, 120 bp, Artificial Sequence
  ENSG00000287544_22 (sequence is synthesized)
tgatcctctgatggcctcaaggcagtggattgagaatatctcttaagtacaaggaggtattctaggttgttcctactttggccattggagctctttccagttagcttctcttccttggac

SEQ ID NO: 862933 - DNA, 120 bp, Artificial Sequence
  ENSG00000287544_23 (sequence is synthesized)
ctgggaagtgcaagagcatggtgccagcatctggtgagggccttactgctgcatcatcacatggtaagagagccagaaataactccgttttttaacaaagacactcccacaatagcaaca

SEQ ID NO: 862934 - DNA, 120 bp, Artificial Sequence
  ENSG00000287544_24 (sequence is synthesized)
ttaatccactcatgaaagcagaggaatttagtttccaacacgtaaacttttgggggacacattccaactataaggaatactaagtcagtcaaagatgaagttcagtatgggaatttatat

SEQ ID NO: 862935 - DNA, 120 bp, Artificial Sequence
  ENSG00000287544_25 (sequence is synthesized)
atacatgtttaaactcagtgacttgaggaacactgctgtcatttaggaaacagaaagatattgtggacaagtagtatatgagggaaagtgatatgaaaagtaatcagggaggcagagttt

SEQ ID NO: 862936 - DNA, 120 bp, Artificial Sequence
  ENSG00000287544_26 (sequence is synthesized)
aggcttgggcaacaggaagttctaaattctaattctgtcactttctgtctgaatgactgagtaattaaccttgtaagccccatctttcacaattctgtgacgtgtaatggtatcttcaca

SEQ ID NO: 862937 - DNA, 120 bp, Artificial Sequence
  ENSG00000287544_27 (sequence is synthesized)
taggattgttgttgaattagagggaacaatatttttatgtgcttaacacaatgcctagaatacactaagctctcaataattgtttgcagaatccagaaaagaccaaaataaactgggaaa

SEQ ID NO: 862938 - DNA, 120 bp, Artificial Sequence
  ENSG00000287544_28 (sequence is synthesized)
caatttattaaaaataaaataaaaagagaaaagaagaacattgaagcactggagagatagttgattaaagaaattcttgtgcaagattatttttgactgcagtttaataaaaaatatgaa

SEQ ID NO: 862939 - DNA, 120 bp, Artificial Sequence
  ENSG00000287544_29 (sequence is synthesized)
tatgaaaaagtctcgatgaaaaatttgctaccagcaacatgttggtgatggtcctattattttaagaaaatcaacactattatcaaagacctagtgattttatttaaaacatctatatga

SEQ ID NO: 862940 - DNA, 120 bp, Artificial Sequence
  ENSG00000287544_30 (sequence is synthesized)
attcttcttttaagggtagtcatccaaatctccataataaaacctttttatttgctgcctaaaaataattatggaacacagacagtgcttatgggaattgcattccctgatgttcttttt

SEQ ID NO: 862941 - DNA, 120 bp, Artificial Sequence
  ENSG00000287544_31 (sequence is synthesized)
acaactacagtagatttttaggcttgtctttcttttattgtggtgttttctatcagctattccttagggttacacatattagtgagctacaatgctctttgtggttcattataaagatgt

SEQ ID NO: 862942 - DNA, 120 bp, Artificial Sequence
  ENSG00000287544_32 (sequence is synthesized)
aggttcaatgtaagcaaagcttgcctagttggggaattaattttctctcctgattatagtcaacccatcatgataccataactgagtgttagcattggaaattttattcataaggtttgc

SEQ ID NO: 862943 - DNA, 120 bp, Artificial Sequence
  ENSG00000287544_33 (sequence is synthesized)
ttcagatttcatatgttgaaaccataaatttatttaaggtgtagtatagctaatatgctatttttaagtccttttaagaaatgtttttagttaaacctaaaaaagtagtccctggaagca

SEQ ID NO: 862944 - DNA, 120 bp, Artificial Sequence
  ENSG00000287544_34 (sequence is synthesized)
ccttctatgctttgtagaaggaggccacagcagtaatgagttagaggcgtgattaaaattagaacagtaagggcaagctagagctatcagcacgttttactaaacctccatacactagaa

SEQ ID NO: 862945 - DNA, 120 bp, Artificial Sequence
  ENSG00000287544_35 (sequence is synthesized)
tgagataggatttaaaactgtttgtaactgagtttgccaaaagctaattaatgggattaagctgcagagtttctcttttcccactgggcaaattaaaacaacatttagaaagatacctca

SEQ ID NO: 862946 - DNA, 120 bp, Artificial Sequence
  ENSG00000287544_36 (sequence is synthesized)
tatctaatcttaaattagtcttgtgctactatgtttatgtctaagctttaaagtggatttaaaatacatcaagagggtgaaagctatggcattcctctaactgactattccaaattgata

SEQ ID NO: 862947 - DNA, 120 bp, Artificial Sequence
  ENSG00000287544_37 (sequence is synthesized)
acaaaataatgaaaaggcatataacttatacttggaaagtaatagaatgaaatagaggatatttctgaagatgcagattgtcttaagaataaagttttaaaacatttgctatgaaaaata

SEQ ID NO: 862948 - DNA, 120 bp, Artificial Sequence
  ENSG00000287544_38 (sequence is synthesized)
tgtccaaatttaaccagtgtaactgaattcactattttcataaaagacatttattaagttgatcttgtgaaatgccatttttcatgttaacaatagagttttaaaaataatagaaagtat

SEQ ID NO: 862949 - DNA, 120 bp, Artificial Sequence
  ENSG00000287544_39 (sequence is synthesized)
cactacattccataggctatagtacattcttgttctgtttattatgctgtaattttccttacacctgttctcttcgtgaaaagatttcctggaaaactaatagtgaaatcaatagggttt

SEQ ID NO: 862950 - DNA, 120 bp, Artificial Sequence
  ENSG00000287544_40 (sequence is synthesized)
cagtgatatgtgtggcaagatgggttgggaaaggaagaaagagtatttaatactcagatttcaattgttttagatagttaggacattatcattgtcttaaattactgtaaaatataatga

SEQ ID NO: 862951 - DNA, 120 bp, Artificial Sequence
  ENSG00000287544_41 (sequence is synthesized)
agtctcatatttttatgcaaatataactgctaattggaaacatttctaatagttattctgagtctctctaggagttattataagtctctttttcggaatgaaaaggccatttttaaaatt

SEQ ID NO: 862952 - DNA, 120 bp, Artificial Sequence
  ENSG00000287544_42 (sequence is synthesized)
ttaacaagatgccagaatgttgcattatactaaatgtgtagattttccaaagtaatttaaattataaactgtctaatctgttactaatcaacaaaattactttgaattaattttttttta

SEQ ID NO: 862953 - DNA, 120 bp, Artificial Sequence
  ENSG00000287544_43 (sequence is synthesized)
tgcacttaaaattgatatttttctttgttggttcatttttattttttattttaaaacacaactgaataaataatttacatcagaatttatcagtcttagtactattgacatttgggctga

SEQ ID NO: 862954 - DNA, 120 bp, Artificial Sequence
  ENSG00000287544_44 (sequence is synthesized)
ataattctttatttgagtggcctgtgctgtgcactgcagtatatttatcagtatctttggcctctgcctcttagttaccagtagcacctttccagatgtgccaatcaaaaatatctcatg

SEQ ID NO: 862955 - DNA, 120 bp, Artificial Sequence
  ENSG00000287544_45 (sequence is synthesized)
taccctggagaggaaaggggcaaaattaccctctactcttcattgagaaccactcgttgatatgtatatctaaagatataaaatgattgaaaaatctcagtgtacccaaataataagcaa

SEQ ID NO: 862956 - DNA, 120 bp, Artificial Sequence
  ENSG00000287544_46 (sequence is synthesized)
aatatgccaacatttatgtaaaattaaataaattaaagccaaaagtagaacgtacgaaatagtaaatatagaaaaaatgttaaatgtttatattttcattgtgaaatttaatacagcatg

SEQ ID NO: 862957 - DNA, 120 bp, Artificial Sequence
  ENSG00000287544_47 (sequence is synthesized)
atgtcaaatatatgtgtgtgtgtatatatatatgtacatacttatacaatcatcaccacaattagcatagtgaacatgttcattataataaaaagttttcttgttcctctttgttatcaa

SEQ ID NO: 862958 - DNA, 120 bp, Artificial Sequence
  ENSG00000287544_48 (sequence is synthesized)
tccagatgcaattcttgttcccctttgttatcaatccagccacaatctcaggcaatcactgatctgctttctgtcactatagattggtttgaattttctagaattttctctacatggaat

SEQ ID NO: 862959 - DNA, 120 bp, Artificial Sequence
  ENSG00000287545_0 (sequence is synthesized)
ggccctggctattggggaattaatttctccatgattccccccatccttttccaggattcccaaccctcatagaacagccaaggagcgggtcaccggctgcctcgttaaagttgaatttca

SEQ ID NO: 862960 - DNA, 120 bp, Artificial Sequence
  ENSG00000287545_1 (sequence is synthesized)
gcaacatctatcaaggtaccttgctgcaaatgccaaacacttggatgaaagcctggatgaagtctcctccagctaccctgggaagtgctctctggcctatggtaacctacaggtggaact

SEQ ID NO: 862961 - DNA, 120 bp, Artificial Sequence
  ENSG00000287545_2 (sequence is synthesized)
tgaggtgtgatgtgccacctgggcttggtaaacagcccctccttatgtgtatataccacattttctatatccacacatgcaggtggacatttagactgcttcctcatcttggctattgtg

SEQ ID NO: 862962 - DNA, 120 bp, Artificial Sequence
  ENSG00000287545_3 (sequence is synthesized)
aataaatgaaccttgagatcattatgctgagtgaaacaaaccaataacagaaagacaaatacttcatgatctcacttatatgaggcatctaaagcagttaaacccacagaagcagaatgt

SEQ ID NO: 862963 - DNA, 120 bp, Artificial Sequence
  ENSG00000287545_4 (sequence is synthesized)
ggagtggtggttaccaggacctgggaggagggggaaatggagagttactattcaaggagaattgatgttcatagagtcagtcatgcaagatgagagagttccagagacgtagatcattgt

SEQ ID NO: 862964 - DNA, 120 bp, Artificial Sequence
  ENSG00000287545_5 (sequence is synthesized)
gcttagtgttaatgataatgtattgtacacataaaattttggtgaagagggcagatttcatgttatgtgtgtttttcataataaaatagtttctaaaggaattaaaactatcccacacta

SEQ ID NO: 862965 - DNA, 120 bp, Artificial Sequence
  ENSG00000287546_0 (sequence is synthesized)
aggaaaggaaattcaacactctggtgcattcaccctgtgaacaagctttattttattccaggggaaacaaactgaaatttcagtgtaggcaagatggctgtttctgtcgcagaaacattg

SEQ ID NO: 862966 - DNA, 120 bp, Artificial Sequence
  ENSG00000287546_1 (sequence is synthesized)
agaatatcccttagcagaatgtaactcttaatcagggttgtttattcacgccgggagcacggcaggtcacgctgctcacttggtgccatttggtctgccctgagccttcctggacaggaa

SEQ ID NO: 862967 - DNA, 120 bp, Artificial Sequence
  ENSG00000287546_2 (sequence is synthesized)
gtccttaagattaaagattatatttttatggtctcatgcctgcctactccaagctattaactgaagagaaatgtaactagaagtcaatttgtagaaaggatattaacggtctttggtgtg

SEQ ID NO: 862968 - DNA, 120 bp, Artificial Sequence
  ENSG00000287546_3 (sequence is synthesized)
tgtcacaatgaaaaataggaaggaatcaaggtggagtagtggagagaagaaaccagcttggttattgtttggagtattggaaataagagtatttctgtgtggaagcggaattgtcattgc

SEQ ID NO: 862969 - DNA, 120 bp, Artificial Sequence
  ENSG00000287546_4 (sequence is synthesized)
atatgtaattaaaacaaaattgataaaaaacgtagatattaggatattaacaggtaggccatataaaggatttcatcttacttactccggctgcctttttcaaagcactctttttccaaa

SEQ ID NO: 862970 - DNA, 120 bp, Artificial Sequence
  ENSG00000287546_5 (sequence is synthesized)
ggaatgtgcaggagagagaggctgttttctttgtttgtttttcagttgtacttgatgctgtgacgtatcctacaattgtctaaatgcaacgcgttttgaaaatgtcatttcttcacacca

SEQ ID NO: 862971 - DNA, 120 bp, Artificial Sequence
  ENSG00000287546_6 (sequence is synthesized)
gcctggtgggtgacctgtggttctgcatttgataaacatgccccttgggtttatatttttgcatttactgtttgtcaagaaggtggctgtttcatgccagggtctgagaagccgcgctgg

SEQ ID NO: 862972 - DNA, 120 bp, Artificial Sequence
  ENSG00000287546_7 (sequence is synthesized)
ttgaggactgggactattttcctgtgaacatgcgaggaaggtttgctccgtgtcctcctggaatgtgctctccagggaaactttccggtggtgagatcactcctgcatgtatgaatcttt

SEQ ID NO: 862973 - DNA, 120 bp, Artificial Sequence
  ENSG00000287546_8 (sequence is synthesized)
gttctgatacttccgaccgcagttcatgcacataaccagtgaaacgtgaaacaggttccatggtgagcaagaaattctggaggttattctgttgtcccctgcatcacaacttaggccaac

SEQ ID NO: 862974 - DNA, 120 bp, Artificial Sequence
  ENSG00000287546_9 (sequence is synthesized)
ccatgtttcttttgcttcagagccaaactcgttaatgaacaagttacagaacacggggaaaaaacaaagtacctggcttggtttaggctctgacaagtattccttatgggaaatctgtga

SEQ ID NO: 862975 - DNA, 120 bp, Artificial Sequence
  ENSG00000287546_10 (sequence is synthesized)
atgcactgggtggattctcacaggtatcggtctgggccagcgcatccttgccagaagacagtgaatctacacccaagatctgagattgctgccagtgcacaagaaaatagaaaaaaagaa

SEQ ID NO: 862976 - DNA, 120 bp, Artificial Sequence
  ENSG00000287546_11 (sequence is synthesized)
gcccagtgataaaagacatgtggaatattgttcacctgaatgcagtaaattaaagaaagtcaaccacagtgatcacagagtgaaaaaacaacaaacaaaaagctacccaaactaattaaa

SEQ ID NO: 862977 - DNA, 120 bp, Artificial Sequence
  ENSG00000287546_12 (sequence is synthesized)
attttaacactctccccacccccacccttaaccctagcagctttgattgacatttcatagttaagctagtccatttgtttttaaagccaaagttcccacagcataaaaatagcacaatag

SEQ ID NO: 862978 - DNA, 120 bp, Artificial Sequence
  ENSG00000287546_13 (sequence is synthesized)
cccctgcttggcagcttgtggacaagtgcaaggagcttggagaagcgctgatggttctattgaagaagcagctgtttgtgtcttcacttctgacccgtggccgcactctgggctggctgt

SEQ ID NO: 862979 - DNA, 120 bp, Artificial Sequence
  ENSG00000287546_14 (sequence is synthesized)
gctcaaaggtctttcactctcccccctccaagcggcttgctattcacaaaacagaagccaggcgtgtgttggtttcagctacttccagaagcagatgcggcaattaccttcagaggcaag

SEQ ID NO: 862980 - DNA, 120 bp, Artificial Sequence
  ENSG00000287546_15 (sequence is synthesized)
catgagatgaactttgagtggtggccggcttttaggatggtggtccatccaaggagacttttattgctggtaatccttttagatcttcagcaccaattgatggtctttacttcaagctat

SEQ ID NO: 862981 - DNA, 120 bp, Artificial Sequence
  ENSG00000287546_16 (sequence is synthesized)
tgtcaacacagatggcgctgggtttggaatgccagaggcagacaaatcctgcctgtgtttatccagttttaacttttgtgctaagcgattgaactatgaatgctagcaacaaagaaacaa

SEQ ID NO: 862982 - DNA, 120 bp, Artificial Sequence
  ENSG00000287546_17 (sequence is synthesized)
aaagaaagaatatttccatcagatgttatctgttcattgtgaaaactaattaggacacctacacagactcacagataggctaatgttaaatgattatatatatctatacatccatatata

SEQ ID NO: 862983 - DNA, 120 bp, Artificial Sequence
  ENSG00000287547_0 (sequence is synthesized)
cttctcctcttgcggcccgccggagacttcggctcgaccctcccggcttgcgacccgggagcccacgcccgcagcagcaggaatgtggttttatttgggtggcgacttctgcggacccct

SEQ ID NO: 862984 - DNA, 120 bp, Artificial Sequence
  ENSG00000287547_1 (sequence is synthesized)
cagtctcaagagagcgaggcgggaggactgaggggtctgtgttcacccgatgaccgtggcctttttgataatccactgcggggccctcccgttgcggaaggcgctctccccgggcgcggt

SEQ ID NO: 862985 - DNA, 120 bp, Artificial Sequence
  ENSG00000287547_2 (sequence is synthesized)
ggcctttcactcgctgacttcttggaagctacgacaaagcacaggcaccctggtgaatgtggcttttcagaagtactcgaaggatacttaatgtgagatgtaaaggagacgcacttggag

SEQ ID NO: 862986 - DNA, 120 bp, Artificial Sequence
  ENSG00000287547_3 (sequence is synthesized)
ggaccagaggctggtctttagagggtagattttggaccgtgtaataccattcccaacctattttataatttttggattccttcatttcatcaaaacccagtggaaaattcattgccagtt

SEQ ID NO: 862987 - DNA, 120 bp, Artificial Sequence
  ENSG00000287548_0 (sequence is synthesized)
ggcgcggcggccacgggtgggatctcaggcgcgtggagaggaaggcgccgcgcgacctctcctcacagacatcagctcgggtcaaccgcgggcctcgagcccgagtggctgagggctgtt

SEQ ID NO: 862988 - DNA, 120 bp, Artificial Sequence
  ENSG00000287548_1 (sequence is synthesized)
accttcaaacctttgaatcccacgttttccccttgacttcctgtcaccgttagagaaaagtggacagcgtctcggtcacagagttggagaaatagtgcagggactcttcagggagagcgt

SEQ ID NO: 862989 - DNA, 120 bp, Artificial Sequence
  ENSG00000287548_2 (sequence is synthesized)
tttcctcatcaaagcaaactgcaaaatcgcttctgccggcgtggacctgatgagagtcggtcgtcgtgagggacaccctctgttccctaacgtcccccgctgcttatttttaaacgctcg

SEQ ID NO: 862990 - DNA, 120 bp, Artificial Sequence
  ENSG00000287548_3 (sequence is synthesized)
gttggcgggaacccctgtgccagctgaaactccttcagtttggccgcctaggaaacaccgagagtcacctacatgggctggctgggcaataaaaacgggaaaaaatgtaaaagacacagt

SEQ ID NO: 862991 - DNA, 120 bp, Artificial Sequence
  ENSG00000287548_4 (sequence is synthesized)
ctccgccttcgaagcttacacccccggggcaagacctacaggaaaatagataatcccattattctctgataaaagccgagctgcttgccatgagctctgggagcagacggggaggccttg

SEQ ID NO: 862992 - DNA, 120 bp, Artificial Sequence
  ENSG00000287548_5 (sequence is synthesized)
agtgacaattgcgctgaatcttaagcataagtaagttctccagtttagggaagagagggaagggcattgcaaggagaggaagcaaagaggaagaggacctggtttgagtaattgggtatg

SEQ ID NO: 862993 - DNA, 120 bp, Artificial Sequence
  ENSG00000287548_6 (sequence is synthesized)
aaaacagatattgcagcaagaactttgttgaaaaacctttaaccactgtttagttcggatgagaacattcccaggctcctacgtgtgatacgcaaagtattttccaaatcagtgtttatg

SEQ ID NO: 862994 - DNA, 120 bp, Artificial Sequence
  ENSG00000287548_7 (sequence is synthesized)
ctaagaagatgagcagttgagctggacaattataagataacttcatctttctcctgtaaggacacttaaatatcagaaacctaagagaaacgggttattgtcgtaattcactaagttatt

SEQ ID NO: 862995 - DNA, 120 bp, Artificial Sequence
  ENSG00000287548_8 (sequence is synthesized)
atagccaacattttgctaaattggaaattgccaataatttcaagttgtctacataagagcaatctaataggaattttgtgatacagtttctcagagaaactctgagaaaattctcaggca

SEQ ID NO: 862996 - DNA, 120 bp, Artificial Sequence
  ENSG00000287548_9 (sequence is synthesized)
aaaaacaaaaacgtcatcagtcctgatttattatcaaaattttctcctataagctctgctcagaagaagtcattctgtagtccaagttagggctaatgaggagccatactcttacatcaa

SEQ ID NO: 862997 - DNA, 120 bp, Artificial Sequence
  ENSG00000287548_10 (sequence is synthesized)
aatagaagctgtccttttctaaagaaagactctggtattttgctgtagtttccactcaccttcctttggacacattattttcatattacatataaaaatatgtatactatatgaaaaata

SEQ ID NO: 862998 - DNA, 120 bp, Artificial Sequence
  ENSG00000287549_0 (sequence is synthesized)
caatttatattctactggcaatgtataagaacagctagcaactgagtattttcactgtgtattttgtctgtgtaaaaaggctgatgctatgactacagaaaaacatttcatgggaatggt

SEQ ID NO: 862999 - DNA, 120 bp, Artificial Sequence
  ENSG00000287549_1 (sequence is synthesized)
tcctgcaagcatagaataccagttaacaaagagtgaagaggacactatcatcatcatcatcaacatcatcatcatcatcattattatttgcctgaaggcccagagtacaccgtaatggag

SEQ ID NO: 863000 - DNA, 120 bp, Artificial Sequence
  ENSG00000287549_2 (sequence is synthesized)
tactgctgatgggaaaggaattagcattgacctctcaggaggttaatttgggagtttagctcatgatctagtaattctgcttctggaagtttatgagaaggaagtgctctaatatgtgcg

SEQ ID NO: 863001 - DNA, 120 bp, Artificial Sequence
  ENSG00000287549_3 (sequence is synthesized)
cctgtgtgatcgctgggctttagcattttaggggtgagccaactgtatctcagaggtggccatgtcttgcattgaggagagagagcacctgcgagaacttccatgctatattctatttgg

SEQ ID NO: 863002 - DNA, 120 bp, Artificial Sequence
  ENSG00000287549_4 (sequence is synthesized)
aagaacttgaaccttgcataacgtaaacgaagagaattaacaagaatttgtggcaccccttctgtgtcagttcttcttccagataataggaatatagcaataaacaaaacagaccaggtt

SEQ ID NO: 863003 - DNA, 82 bp, Artificial Sequence
  ENSG00000287549_5 (sequence is synthesized)
agataataggaatatagcaataaacaaaacagaccaggttcctgccctcatgggggaaagaggcaatctaaaaatgaaaaat

SEQ ID NO: 863004 - DNA, 120 bp, Artificial Sequence
  ENSG00000228598_0 (sequence is synthesized)
caaattgtagaatacacacacacacgcacacacacacacacgtcacacacacagcaccttaaaatgaattttctctagggaaacaacaaaatgaaccctgcacttgaacaacacttcatt

SEQ ID NO: 863005 - DNA, 120 bp, Artificial Sequence
  ENSG00000228598_1 (sequence is synthesized)
ttcagtaccattagctgaagaagtattaaggcaaggttgccttcttaatgattatttcatgtgttctatcctcagtacatcatttacaatattcagacttggaacaaagtactttgaact

SEQ ID NO: 863006 - DNA, 120 bp, Artificial Sequence
  ENSG00000228598_2 (sequence is synthesized)
tagaagatacaaaggagtattagatctgcattgattaaatggtgactacaaatagacttaaaatacatcttcccaattatgaatctctacaggtggttttgtcctgttcacccaactgga

SEQ ID NO: 863007 - DNA, 120 bp, Artificial Sequence
  ENSG00000228598_3 (sequence is synthesized)
atggttgcatcgaagcaagaaaattttctccaaaaattaatacccagatctacgccaaaaacaaagtgaagaatacagcttctgctctcaccaagtcatctctaatagagagaagatttc

SEQ ID NO: 863008 - DNA, 120 bp, Artificial Sequence
  ENSG00000228598_4 (sequence is synthesized)
cttaaacataaatatcttcaaaatgcttgttcatttgagagaaagatacagaatattttacatgtgcccttcactggaatatttttatttatttaattcaataaaaattgactcccagtt

SEQ ID NO: 863009 - DNA, 120 bp, Artificial Sequence
  ENSG00000262732_0 (sequence is synthesized)
cttgtcagagcataggggtcgctgcaacccagaagcggatggatgatagtgaggggttctttcaggattccgaaagcagcatccgatgacaaatttacatcaaattcttcatgcttaatt

SEQ ID NO: 863010 - DNA, 120 bp, Artificial Sequence
  ENSG00000262732_1 (sequence is synthesized)
cgacgatatccttcctcgacatctccttcctcttccagttcttcaggttttcctaccatttgaagattccagaagattaagaaatgtgacacaatcatactgagagagatactgcagcaa

SEQ ID NO: 863011 - DNA, 120 bp, Artificial Sequence
  ENSG00000262732_2 (sequence is synthesized)
agttcgtaatatcttcaaatcctgaactaaggatttagtcttggctccaagctggtgccacaaaggatccagataatggcggattgtctaaaacaagaataaaatttggtattgctaaaa

SEQ ID NO: 863012 - DNA, 120 bp, Artificial Sequence
  ENSG00000262732_3 (sequence is synthesized)
tagaagcccgttctttgttttgggggtctttaggtcttttgtgagatttcctaattctctttgaactgtcttccttcctaaatttcatccagacttcttcagctttgctatccttctcaa

SEQ ID NO: 863013 - DNA, 120 bp, Artificial Sequence
  ENSG00000262732_4 (sequence is synthesized)
aggttttcctgtagagcctcaataagaaggcctccgctccaagagtgatatagtctctcagctgggaacatgttcggtcatcacttgcacaaatcagtacttgacctgaaaatagaaaac

SEQ ID NO: 863014 - DNA, 120 bp, Artificial Sequence
  ENSG00000262732_5 (sequence is synthesized)
aacattatgttactattacctcacttgtcctcctagtttccctgtgcccccttattccttcacccgaagggaagacatcttaccctttggtattaaagatccacaatttacaaactattt

SEQ ID NO: 863015 - DNA, 120 bp, Artificial Sequence
  ENSG00000262732_6 (sequence is synthesized)
aaaaagggtcttaggtattgatcaaatgctttctcctctctggcaagattacttaaatcttttcagtaaagttgaagccagactatttaatcttatgaaagtacaactgtggtgtaattg

SEQ ID NO: 863016 - DNA, 120 bp, Artificial Sequence
  ENSG00000262732_7 (sequence is synthesized)
gggctttaaagaagttctttttaattaatatttttttccagaggatctcatatatgcctaaattaattccaaatggatttttcctcttttgtgaattgtgttagtctcctctgccaattt

SEQ ID NO: 863017 - DNA, 120 bp, Artificial Sequence
  ENSG00000262732_8 (sequence is synthesized)
agacaatgtcttcagtttgtaccggctcattacatattgaagtaatagaagagttgaggcttttttggaaagatacttggctgaggatataaaacaggagacccattagtttattccttg

SEQ ID NO: 863018 - DNA, 120 bp, Artificial Sequence
  ENSG00000262732_9 (sequence is synthesized)
gggattccagatttaaagcttggtgaatatgtgtagagattagctcaatctttaaatagaagttctaagaacccaactagtttaaaaacctgctttcatgaatatacaatgattcaacct

SEQ ID NO: 863019 - DNA, 120 bp, Artificial Sequence
  ENSG00000262732_10 (sequence is synthesized)
ggagaaaacaacatcaaacgaacagaaatgaggttgccactaggatctcagtgttcatttgccatttatttgtctacattttatagataaaatagcagtgttttaaaatagagacagggt

SEQ ID NO: 863020 - DNA, 120 bp, Artificial Sequence
  ENSG00000262732_11 (sequence is synthesized)
ccatgttggtcaggctagtcttgaactacttttaaagagctaattaaatcaggactcatttgatagattttggaagcaaatgttttcatctccttttttcctacctggaccaccaagagc

SEQ ID NO: 863021 - DNA, 120 bp, Artificial Sequence
  ENSG00000262732_12 (sequence is synthesized)
gagcttcactctccttattttctgcctcaatttcttttaatacttcagtcagtgcctcccactttgggttgctttctaggaccagttccttttttgtttctgtagagaaataaaaatatc

SEQ ID NO: 863022 - DNA, 120 bp, Artificial Sequence
  ENSG00000262732_13 (sequence is synthesized)
tcattctatgtgataatatttacccataaagtcttccaaaggcttttaaaacaacagataacacgagcatcagtacatatgcccatttatttaagctttctttataatgttagatggaat

SEQ ID NO: 863023 - DNA, 120 bp, Artificial Sequence
  ENSG00000262732_14 (sequence is synthesized)
ctgctttcctgaaaaagatctacttaaggtgtaaatgaaagatacttcaaaccattaatatggctttcaaaatgccttggtagaaagttatatgcatggtcactaatgagagaccattct

SEQ ID NO: 863024 - DNA, 120 bp, Artificial Sequence
  ENSG00000262732_15 (sequence is synthesized)
gtgttagttgtttctgtgacactatatataagcagctatacaaaacaaaggcatcggtacacaatgacagtatttactatttctaaaatccccatgactttcataatcctgaacatggat

SEQ ID NO: 863025 - DNA, 120 bp, Artificial Sequence
  ENSG00000262732_16 (sequence is synthesized)
aaaagtagacaacaattaaattttttgttcctatacgcattcaaacacaaacacatcaataatatattcaattaagttttctttaaaaagattttttttttttaagacgaagtttcactc

SEQ ID NO: 863026 - DNA, 80 bp, Artificial Sequence
  ENSG00000262732_17 (sequence is synthesized)
ctttaaaaagattttttttttttaagacgaagtttcactcttactgcccaggctggaggcaatggcatgatctcggctcg

SEQ ID NO: 863027 - DNA, 120 bp, Artificial Sequence
  ENSG00000262732_18 (sequence is synthesized)
aggcatgagccaccgcgcccggcctcagttaagttttgaaacagacctttaaactaggcagaaagcaggcattaaccctatcccatgccttaaaaaactagtgatatttacggtatcact

SEQ ID NO: 863028 - DNA, 120 bp, Artificial Sequence
  ENSG00000262732_19 (sequence is synthesized)
agataagatgctggaataaaacccatatttgcctcattctagtatatttatgttgcttaaaaattaaaaaggatattcaaatattccatcctgactttatttattagttttgagacacag

SEQ ID NO: 863029 - DNA, 120 bp, Artificial Sequence
  ENSG00000262732_20 (sequence is synthesized)
ccaggctggagtatagtggtgtgatcatatcttggtgtcaccttcaactcctgggctcaccttagcctctcaagtagctgagacgataagtgcacatcacctcgccaggctactttaaaa

SEQ ID NO: 863030 - DNA, 90 bp, Artificial Sequence
  ENSG00000262732_21 (sequence is synthesized)
agccttaaaattttttttgtagagatggagtcttgctttgttgcccaggatggtcttgaactcccgggctcaagcaatcctcctgcctcg

SEQ ID NO: 863031 - DNA, 90 bp, Artificial Sequence
  ENSG00000262732_22 (sequence is synthesized)
gcctcccaaaggccaacctcattctgactcaaaaataataattactttgaagttctaaaaaaatcaatatatagctcctcatgtagcata

SEQ ID NO: 863032 - DNA, 120 bp, Artificial Sequence
  ENSG00000262732_23 (sequence is synthesized)
agttctaaaaaaatcaatatatagctcctcatgtagcatacttttgatcaatatttgacatctgttatttggaagccctgggcaatagactgcaagacttgccatgctgtatacttcgac

SEQ ID NO: 863033 - DNA, 120 bp, Artificial Sequence
  ENSG00000262732_24 (sequence is synthesized)
atacattacacatatactttacatatatactttcaacatacattacatgttacatataacaaacatacatacatttatcttcaaggaacacacttttcacatggccaaagaagactttaa

SEQ ID NO: 863034 - DNA, 120 bp, Artificial Sequence
  ENSG00000262732_25 (sequence is synthesized)
attgcactttaaatttccataccaaataccgaaataaaaaacacatttaaagacttaaccccacaagataccttccccttctttaatttccattttttcagatattttttcttttttact

SEQ ID NO: 863035 - DNA, 120 bp, Artificial Sequence
  ENSG00000262732_26 (sequence is synthesized)
cattttggcatctggaagatgataaacccttgctcgagcatttataaacatcgaggtgctggagtcaagaaacagccaacctaatacgaaaagttaaaagaaaaagtgccatcaatttat

SEQ ID NO: 863036 - DNA, 120 bp, Artificial Sequence
  ENSG00000262732_27 (sequence is synthesized)
ggttaatttaaaacagtctctgatggtcacatgacctacatacgtaactggctgtcatcctgtcttcctaccaaccacaccgcctcccactactgtgatctgtcgctgttcagctggacc

SEQ ID NO: 863037 - DNA, 120 bp, Artificial Sequence
  ENSG00000262732_28 (sequence is synthesized)
agtggttttctgggtgtggtccgtgaactcccaggggcccccaagatattttcagggctatgtgatgtcagaacttttctcgtaacaataccatgacattatttgacttttttcactgcg

SEQ ID NO: 863038 - DNA, 120 bp, Artificial Sequence
  ENSG00000262732_29 (sequence is synthesized)
ttgacatttccagtgatggcgtaaaagcaagttattttaatatttgcaatgttgttaataggaatttgctgttatttaagaataaaattggaggtcatttaaaacacagcttctttggtt

SEQ ID NO: 863039 - DNA, 120 bp, Artificial Sequence
  ENSG00000262732_30 (sequence is synthesized)
tactggaaagtaataatttataggaaaatatgtggattggcatataagcatcactctgacttttgcagttatatagtaagtggttatctcttattttaactataatcaagaggaaaataa

SEQ ID NO: 863040 - DNA, 120 bp, Artificial Sequence
  ENSG00000262732_31 (sequence is synthesized)
ataacattttttactttgaaatgacaacatttggatatctacaggtagaagagttttacataagaatgctccataattgtacatgctggtgccgtagcatgaaccaaggcagtgccatga

SEQ ID NO: 863041 - DNA, 120 bp, Artificial Sequence
  ENSG00000262732_32 (sequence is synthesized)
aagtgtactggcattcagtgcattctttactgtcatgcttctgcagttcatcacttaagaatgtccctaaagaaccatcagaattattaactgtattaaatcttgaccccaggggttcac

SEQ ID NO: 863042 - DNA, 120 bp, Artificial Sequence
  ENSG00000262732_33 (sequence is synthesized)
ggaccacactttgaaaaccgctggtctggtcaaacagtgacagaggccaaaacagtggtagccaaacgagatggtggccagctgtatatgtatatttccctaaaatctcttctgctcttc

SEQ ID NO: 863043 - DNA, 120 bp, Artificial Sequence
  ENSG00000262732_34 (sequence is synthesized)
agtctttggcactctagctgatggaagccccatactcccttgcttttgctttgaggaaaatgaattttaagttcttaacaactaaacttccagaacacaacctatttctaagttgaggac

SEQ ID NO: 863044 - DNA, 120 bp, Artificial Sequence
  ENSG00000262732_35 (sequence is synthesized)
tgcctgtactacacacagtcttttctagaaataaaattgcccggaacggatatgaatatttattattatacagaacagacgttaagtaggcggaaacattagctatcaataaaacctaca

SEQ ID NO: 863045 - DNA, 120 bp, Artificial Sequence
  ENSG00000262732_36 (sequence is synthesized)
tctttgtgctatgaacataaaacataatttgaaatctcagtataacatatagttgaatatagcacttttcacacctgattccccctaaaacctaacactttattcaaatcagctcttaga

SEQ ID NO: 863046 - DNA, 120 bp, Artificial Sequence
  ENSG00000262732_37 (sequence is synthesized)
atattattagtattttaatctcccacctgaattctgaccaaaagctttttccgttgctctcagagattccagaagattaagaaatgtgacacaatcatactgagagagatactgcagcaa

SEQ ID NO: 863047 - DNA, 120 bp, Artificial Sequence
  ENSG00000265100_0 (sequence is synthesized)
acgcccctgagcgtgcggccgcctgggcaggcgcagagctggagttcagcggccgcgacccgcctcttccagaatagagggtagcgaggggactacaagccccagctgtccacccccgca

SEQ ID NO: 863048 - DNA, 120 bp, Artificial Sequence
  ENSG00000265100_1 (sequence is synthesized)
gtcgccgattcctcgcttgcgctcgcggcggctccgcggcccggttctcgagagccacagatgcgcccgcgtcgctggggtctcccgtgtgggaacgtcctcggcaggccgcgggtttga

SEQ ID NO: 863049 - DNA, 120 bp, Artificial Sequence
  ENSG00000265100_2 (sequence is synthesized)
gaggcatcgccggcgtgacgaatgcaaccagcgtggccccaaatgagtcggcggccgccgcaggttgacgtagagccgcagcgctccccggggccgtcaccctcagcactttcccttctt

SEQ ID NO: 863050 - DNA, 120 bp, Artificial Sequence
  ENSG00000265100_3 (sequence is synthesized)
tatttgttgggggccgcgggggctggaacccagaagcgcaagtgtggggcgcgtcctcgtggcgtccctggcgctccgaggccgaaacccggatgctgaggggaggccgtgagctcggaa

SEQ ID NO: 863051 - DNA, 120 bp, Artificial Sequence
  ENSG00000265100_4 (sequence is synthesized)
gtgagctcggaaaggcaccgcggggccggcattagggctgagctagctctgtaccctctggtgggactttcggtctctctgggcctcgccattctctttctttttcttgctttttttttt

SEQ ID NO: 863052 - DNA, 120 bp, Artificial Sequence
  ENSG00000265100_5 (sequence is synthesized)
ttacaggcgtgggccaccgcgcccggcttttttttttttaatacgggttttcaccctgttacccaggctggtctcgaactcctgcgctcaggtgatccacccccccgcaccccggtctcc

SEQ ID NO: 863053 - DNA, 89 bp, Artificial Sequence
  ENSG00000265100_6 (sequence is synthesized)
ttattttgaagtcaagctattttaccatcctctggattttcgtcatcctaattctccttcccagtctcaaggaaagacaggcacatttt

SEQ ID NO: 863054 - DNA, 120 bp, Artificial Sequence
  ENSG00000265100_7 (sequence is synthesized)
aattctccttcccagtctcaaggaaagacaggcacattttcttgatgacttcagcatttgtaaccccttgttggctctccttagaggacattaactctgaacctttcaacttcgaggatc

SEQ ID NO: 863055 - DNA, 120 bp, Artificial Sequence
  ENSG00000265100_8 (sequence is synthesized)
tctttagcccttccttatttgttcactctcctggatcatgaattctccaaatttgtcctttgaacccagtgcccatatccaccctcacctgaacccattcttgaataaaatgcattccta

SEQ ID NO: 863056 - DNA, 120 bp, Artificial Sequence
  ENSG00000265101_0 (sequence is synthesized)
ggcccagtgtggcgtatcattggtttccagggccaacgtccccccccaggggccgacaggctctgagcatttgctgtgcaatctccgcctgtcttggaaaccagtggcctcagagcccct

SEQ ID NO: 863057 - DNA, 120 bp, Artificial Sequence
  ENSG00000265101_1 (sequence is synthesized)
gctcacccggcttcatacctgagcatggaactcactggaaaatgtggcaatgcctaacaaagccgtggctcttgagtgtgacttgggcaagagctgcttccaggttctcagaatgacacc

SEQ ID NO: 863058 - DNA, 120 bp, Artificial Sequence
  ENSG00000265101_2 (sequence is synthesized)
tgaagtgtcccagatcacacagcagcggcggatttgagtcaccccaggcctctgcagacaggcgcaagaaataaggaaacctgctcctcctcccggatttcctgggccgacgcccgtgtc

SEQ ID NO: 863059 - DNA, 120 bp, Artificial Sequence
  ENSG00000265101_3 (sequence is synthesized)
cctgtgggttcctgtccttcctcagaacatgagcatcgagccaggagcaaagccccgcgctgtggctcaggtgcagctgtggggatcagtttccaccagtgaggggcatgaaaaggccac

SEQ ID NO: 863060 - DNA, 120 bp, Artificial Sequence
  ENSG00000274685_0 (sequence is synthesized)
actagtatagagcatcgtttactaaaggtttgttgaggtttgttgttgatttgtttctacttacacgagatgtcttcatttttaccctcggtcttgaaataaaattttggtgcatgttca

SEQ ID NO: 863061 - DNA, 120 bp, Artificial Sequence
  ENSG00000274682_0 (sequence is synthesized)
gacacctcaagaacatcagagaataacagcagggaaatgatttacattttaatggttaatgactaacctatgataattttgtcttaaattccctttaacgttttctgaatgccatacccc

SEQ ID NO: 863062 - DNA, 120 bp, Artificial Sequence
  ENSG00000274682_1 (sequence is synthesized)
tatgctcagaaaaagtaactgaatgcatgcattacagggctttttcttcatttgagaaattcttttattattcacctctaattttttattttaacactctgaaatattctacttagtaat

SEQ ID NO: 863063 - DNA, 120 bp, Artificial Sequence
  ENSG00000274682_2 (sequence is synthesized)
gtgaagtaatgaacttcttggttctgatcaagaatgtacactgtatttcaatgtgttttcttacatatgaaaaatgcaatatgttctctctgaatatcaaatgtgttctgttatgtgtct

SEQ ID NO: 863064 - DNA, 120 bp, Artificial Sequence
  ENSG00000274682_3 (sequence is synthesized)
atgtgttctgttatgtgtctattttcaattatttaacattaagaagtctaagtatactattataggttacaaatttataaaagttcgcttgcttttcttatatgtgatatatttccaaat

SEQ ID NO: 863065 - DNA, 120 bp, Artificial Sequence
  ENSG00000231128_0 (sequence is synthesized)
aatgttaatggctttcagagtctggcggcgcgttcccattatcatcttcctgtgacccttcctcattttacacggaggaggtggtctccacagtgattttaaatttaatatttctctcat

SEQ ID NO: 863066 - DNA, 120 bp, Artificial Sequence
  ENSG00000231128_1 (sequence is synthesized)
ggatgaaatgaagttttccacaacatttgggaagatttacaaggtatactccatttaggcaaaaataactgtcagggaatagtcattgtcaagagcagtttgtattgcaacccacaaagt

SEQ ID NO: 863067 - DNA, 120 bp, Artificial Sequence
  ENSG00000231128_2 (sequence is synthesized)
aagttttttttttaactttttatagtatattctggcaatgtagaaattagttgagatccaaatcttacaaaccttttgaagtttatgtttatgtagaaaagtaaaagaaaataaaaataa

SEQ ID NO: 863068 - DNA, 120 bp, Artificial Sequence
  ENSG00000231128_3 (sequence is synthesized)
cacacagattatcacttagtggttccacaccagtaatcttgttaccaaatgagcctgtcaaggtaactctaccagaggggctcagactgatcagccagtggcagtgagagcacatttttc

SEQ ID NO: 863069 - DNA, 120 bp, Artificial Sequence
  ENSG00000231128_4 (sequence is synthesized)
atagtaccacaagattatccatgttgagctgacatcggagttcctatcataatatctaatcactcaataatatctaattactcaagactttcagagtgttttcacatctgctatccggta

SEQ ID NO: 863070 - DNA, 120 bp, Artificial Sequence
  ENSG00000231128_5 (sequence is synthesized)
ccagagtgttagctccaggaggcaaaggttttggttctttttgttcaccgctgtatttttagtgcttagaactgaacttggtacatactaagtgctcaataaatggtactcaataaatga

SEQ ID NO: 863071 - DNA, 120 bp, Artificial Sequence
  ENSG00000231128_6 (sequence is synthesized)
tcttcatttaacggcaaaagaccagaggatcaaggtttctgactagtcctgcttccccctactcccatgtgaactttgaattcagtttatctagttccagaaataaacaagttggtagtt

SEQ ID NO: 863072 - DNA, 120 bp, Artificial Sequence
  ENSG00000231128_7 (sequence is synthesized)
acttgtcggccgttcttcgtccagagatgaacatgccggaagcggccgttcccagcttttctccgcaggcctctccaaccgagcttctattgtaaagcaccctatgccgcgcaaagcgtc

SEQ ID NO: 863073 - DNA, 120 bp, Artificial Sequence
  ENSG00000231128_8 (sequence is synthesized)
atgggagctgtagttccgccgcgcccccgccgcgtccccggctctgagtggaggagtggaaagggagcgtgcgcgaagtcacgcttctggctgcgacgcaaccgccgctgggcgttttcc

SEQ ID NO: 863074 - DNA, 120 bp, Artificial Sequence
  ENSG00000231128_9 (sequence is synthesized)
caatcctgaaaaactaagtaggcagagcccatatctgttctgttcaccatcatataccaagtgccttacagaatgcctggaacatagtagacactcaacaaatattcattgaatgaatga

SEQ ID NO: 863075 - DNA, 120 bp, Artificial Sequence
  ENSG00000231128_10 (sequence is synthesized)
atgaatgacactaggcttagatactagcttaaaataacagaagaagaatcctaatttcattaaaagtaggaccagctttacagaccagtgggagatccaggctacagggagaacacatgg

SEQ ID NO: 863076 - DNA, 120 bp, Artificial Sequence
  ENSG00000231128_11 (sequence is synthesized)
aattccagaatcatgaaccatctggaaggggctgaggacacatatgaagtacagtctaaagcttcaggatcaattttgggagccagatgttcttcatttaacggcaaaagaccagaggat

SEQ ID NO: 863077 - DNA, 120 bp, Artificial Sequence
  ENSG00000231125_0 (sequence is synthesized)
ttttttttttgaagaattgtggtagactgttctatatatagaagtaaacctgaaatcataattatttttccaaaaggtattttctggcaaacttaattaaatacatttccccacaaaatt

SEQ ID NO: 863078 - DNA, 120 bp, Artificial Sequence
  ENSG00000231125_1 (sequence is synthesized)
ctagaagtaattaataagcaatgactatttataagtacttaatagaaaattttaatttgctagagggacagtatacatccattaggtaaaagtcatatgtcatattaaaggtggagtaag

SEQ ID NO: 863079 - DNA, 120 bp, Artificial Sequence
  ENSG00000231125_2 (sequence is synthesized)
tcctaagtagaaatcagtggaaagacatttcagcttttaagtacagtaaggaccagttggtggtaattataacaaatttattggaagaactatgatagcaagagatgaccaaaaatggaa

SEQ ID NO: 863080 - DNA, 120 bp, Artificial Sequence
  ENSG00000231125_3 (sequence is synthesized)
gtcagcttattaggtgattttcaatggaagaatatgtttgagttcttaaatagaaacctaagaaaatacttattctagaaattagaatgtggctaagaataaaaggggaaaccaaaaata

SEQ ID NO: 863081 - DNA, 120 bp, Artificial Sequence
  ENSG00000231125_4 (sequence is synthesized)
gcagggacggaagaagctaagtagactgcagcataaggaacgcagaaattccaactgtgttaggaactttgaatgtcaattattcaagcaagacaataaccaccacccttggtcacaaag

SEQ ID NO: 863082 - DNA, 82 bp, Artificial Sequence
  ENSG00000231125_5 (sequence is synthesized)
tagttactttttaaaatcaatgtgcacttaggttctaaaattatgcttaatgcctttaattcagtctgaaattactctcaat

SEQ ID NO: 863083 - DNA, 120 bp, Artificial Sequence
  ENSG00000230838_0 (sequence is synthesized)
gggaaaagggctgagggggtagaggtataaaaatcagatagctcagcacttcgctccaaaggagctgaaggagagaggattccactgcgtgtatgttttctctttcacgtctcacttttg

SEQ ID NO: 863084 - DNA, 120 bp, Artificial Sequence
  ENSG00000230838_1 (sequence is synthesized)
ttctctgccatcaggaaatgcagtagacatttgtcaccagcagctctttggagacttcaatgttccttcctcccaggatccgaaaggggacttcagacacggagaatctaagacaccagg

SEQ ID NO: 863085 - DNA, 120 bp, Artificial Sequence
  ENSG00000230838_2 (sequence is synthesized)
cagagccaagttctaaagggcagccatttcccaaatgtcaaccaagagcgaagccaagagaattatgatttcctggctatacaatgacaggaaaagcttgatcaaagctggagtgcaagt

SEQ ID NO: 863086 - DNA, 120 bp, Artificial Sequence
  ENSG00000230838_3 (sequence is synthesized)
taaaaagtgtaaggtactcaagtgctagggtctgtgtccaagcccaatcaattgatcattagttgtttttaacttcaacgtttcttttgcaacagcacctcttccttaaagtagcaatct

SEQ ID NO: 863087 - DNA, 120 bp, Artificial Sequence
  ENSG00000230838_4 (sequence is synthesized)
tagcagactgccaccttacatgatgcatcttattctccaaggacaatgaagactgaactatcgcacattacctaagaaagatgggaattgacatgcacatcacaattgtatacacaacag

SEQ ID NO: 863088 - DNA, 120 bp, Artificial Sequence
  ENSG00000230830_0 (sequence is synthesized)
ctctcctcacagaaccattgatgtggaagcattcatcatatagagtatagctgtgttgaaaacggattccaattatgcctgaacaaaatatccaagataactgccacatcatgaaaacat

SEQ ID NO: 863089 - DNA, 120 bp, Artificial Sequence
  ENSG00000230830_1 (sequence is synthesized)
tctcaacactgggaggggttttatggggatgctttaattatgtgaggcctatgcaatcaagaaaaaatagtgataaggacataagaaactccaaaactatgatcaccagaaaaaaatgag

SEQ ID NO: 863090 - DNA, 120 bp, Artificial Sequence
  ENSG00000230830_2 (sequence is synthesized)
aattcattgttcagaaaagttaaaatgcattcatctcatccaagtgcctataaaatcctacacatcaagttttcccaagtatttagcctgagacacaatacatagaaaacttcaataaat

SEQ ID NO: 863091 - DNA, 120 bp, Artificial Sequence
  ENSG00000230830_3 (sequence is synthesized)
acttgaaaaataagaatgaataaatgagtgatggtaatgatatctgatgcaaagacaagccttgttagccgtcacccaagaactcagctggctacttaacttggcttccatggaagttcc

SEQ ID NO: 863092 - DNA, 120 bp, Artificial Sequence
  ENSG00000230831_0 (sequence is synthesized)
gcttaacatgctgtgaacagacagtgtctggagaggatgacaggagtgggagaggaagatgccgctgcagagacttctagcaacgaactccgacactgacatccctgggcaaatcactgc

SEQ ID NO: 863093 - DNA, 120 bp, Artificial Sequence
  ENSG00000230831_1 (sequence is synthesized)
cacttgtttgaaaaacagcctcaagtggatgtcatgctgacgatgctgagatgacttgagccaaatgaaattgcatgtatgactgttcatttctcctcactccactcacggtaggtgcca

SEQ ID NO: 863094 - DNA, 120 bp, Artificial Sequence
  ENSG00000230831_2 (sequence is synthesized)
gggcacttgctcctagagagctgcatgcagctggcaactgcaccagcacagcaatatcgcccacagcaggctccgctgaggccaagccccaccccgcccaggttcctactctcccttctg

SEQ ID NO: 863095 - DNA, 120 bp, Artificial Sequence
  ENSG00000230831_3 (sequence is synthesized)
ctttgcattttgtgatgatggcaaatcactcttttccaaacgaaaaaagaaaaatgcaagatccagtcttgagaaggaatgttctcacttctcaaagagctactggtctataatgcgaga

SEQ ID NO: 863096 - DNA, 120 bp, Artificial Sequence
  ENSG00000230836_0 (sequence is synthesized)
gacctagtctggtctggaagaagaagagatatgtcatctctatgggctttgatcttggtaggcatatttattcaccaggtacacaaatgcaactttaaaccctcagccacatttagtaaa

SEQ ID NO: 863097 - DNA, 120 bp, Artificial Sequence
  ENSG00000230836_1 (sequence is synthesized)
ctatttcttcatctgttgcagtcttattctgatgggaaaaatttcctctgtttttcaagtttaatttattattttttcaaattacaagagcaatgcatattattgtaaccagagagataa

SEQ ID NO: 863098 - DNA, 120 bp, Artificial Sequence
  ENSG00000230836_2 (sequence is synthesized)
tgccaagatcggtagagaaaaacttaataatctcgacctcctataaccatctctcttcccatccccctgaggtaatagcaaatgttaacagcctgctacctctgcacatcttccttcctt

SEQ ID NO: 863099 - DNA, 120 bp, Artificial Sequence
  ENSG00000230836_3 (sequence is synthesized)
catgatttccctacacacacacccatacacacacgtgcgcatgcacacacacacccactcaaacacacggtgtacgtccaggagtcagaagtggctacagagatggagtcttcattatta

SEQ ID NO: 863100 - DNA, 120 bp, Artificial Sequence
  ENSG00000230836_4 (sequence is synthesized)
aggggacagcaaagtggagccacaaatgggaagattgtgaagagggcccttgaccaaataaagaggaaaccttttccctgaagaggacttttcagcaacccaactaattcactcattttt

SEQ ID NO: 863101 - DNA, 120 bp, Artificial Sequence
  ENSG00000230836_5 (sequence is synthesized)
gaaaataatgtctacatcgaccaaggagatatctgaactaccagtacttcctgcagcatctttgttttggttggcctgggcaggtggtggggcacgggggtgaagggaggggtctgaggt

SEQ ID NO: 863102 - DNA, 120 bp, Artificial Sequence
  ENSG00000230836_6 (sequence is synthesized)
gggtagaaaacaagggtatccccagggctatgggaggaaggtctagtggactggaaccattgtatctgtcgattagtggaggcaatcatatttgtgatccttgagctaatggtctagtaa

SEQ ID NO: 863103 - DNA, 120 bp, Artificial Sequence
  ENSG00000230836_7 (sequence is synthesized)
gactataaacttgttcataattaaagctggcaagagggttcttaccccaggtaatgagacaagagtgaaccacaggaggaagccagcacagagaccgtatgtaatgagtcccttcatggg

SEQ ID NO: 863104 - DNA, 120 bp, Artificial Sequence
  ENSG00000230836_8 (sequence is synthesized)
aaagggatggaaaacagtcctcaggctagcagcagagggagtgctgtctgttgtgggtcttgacctgcttaagaggtctgacttgaggtgaggctgaaagacagccccgctgggggcttc

SEQ ID NO: 863105 - DNA, 120 bp, Artificial Sequence
  ENSG00000230836_9 (sequence is synthesized)
aagataacgatggacggatagagttctctcaccgctgaatatctcctaaggcattagtaaaacactatttaaatatttcctctgtaactcagttgtgctattaaagctctgtttctcaaa

SEQ ID NO: 863106 - DNA, 120 bp, Artificial Sequence
  ENSG00000281264_0 (sequence is synthesized)
ctggatggatagcaaaggactgaaaggaagaaaaggaacacctgttatcatgcaaacgtagtaactgcaggaaacagccaccactcctaggactagaggaacagagggaaagggctgggg

SEQ ID NO: 863107 - DNA, 120 bp, Artificial Sequence
  ENSG00000281264_1 (sequence is synthesized)
ctatgagaacccagaatcctggaggacgccctcacaaaactaggacaaagacttctcagaaaagggtaacggcctgctggtatcggtacctcaagaaactcgaggagggggttcacagag

SEQ ID NO: 863108 - DNA, 120 bp, Artificial Sequence
  ENSG00000281264_2 (sequence is synthesized)
ctgggacctagatctctcaggagggggcatgagctaaatgcggctgcaacacaagagctcagagggaaggtctaagttaggacttggtcttcttaggagagggtgctacctggatgctgc

SEQ ID NO: 863109 - DNA, 120 bp, Artificial Sequence
  ENSG00000281264_3 (sequence is synthesized)
tggtaactgatggggtgagatgggctgatcgtgggaacttagcaaaacgaaggaaactggaaccaactccactgctgggataacggtgacaggaacagcaagcatggggaaggaacatct

SEQ ID NO: 863110 - DNA, 120 bp, Artificial Sequence
  ENSG00000281264_4 (sequence is synthesized)
gcagcagctggcaacaaggaaattgggttgcaaagtcacagcctcaccattgcagagctgagcacagaagagttattaggagctggagacagtagctttataacaccatgcctccctact

SEQ ID NO: 863111 - DNA, 120 bp, Artificial Sequence
  ENSG00000281264_5 (sequence is synthesized)
tccctactctctccatctaaccacagcccagggagggaacattctaatctggagggttggatgacaacctatcttgctctttactcatcttgttagtccattctcacactgctatgaaga

SEQ ID NO: 863112 - DNA, 120 bp, Artificial Sequence
  ENSG00000281264_6 (sequence is synthesized)
gaggtttaattgactcacagttctgcataactgggaaggcctcaggaaacttacaattacagcagaaggggaagcaaacatatccttcacatggcagcaggagagagaagtgctgagcaa

SEQ ID NO: 863113 - DNA, 86 bp, Artificial Sequence
  ENSG00000281264_7 (sequence is synthesized)
ttacagcagaaggggaagcaaacatatccttcacatggcagcaggagagagaagtgctgagcaaaaggggaaaagcccctcggtta

SEQ ID NO: 863114 - DNA, 120 bp, Artificial Sequence
  ENSG00000230834_0 (sequence is synthesized)
ttctcccagaagagaagggagagcacatgcccaggctccatggacttccggttctcccctcccttcgcacccccacaatgaggtcacgacgggatgccaccaccagctggtcccttccag

SEQ ID NO: 863115 - DNA, 120 bp, Artificial Sequence
  ENSG00000230834_1 (sequence is synthesized)
tctcggccccaagttgaaccccttttcctcacccaacatcctccatttcaacaaatggcagcgttgtgggtaaaataacacctccttcagagacattgacatcctcatccctgacttcgg

SEQ ID NO: 863116 - DNA, 120 bp, Artificial Sequence
  ENSG00000263466_0 (sequence is synthesized)
ccaggattcctaacatgtaacctttatcccatagcatggacccatcaaaaggcaactcttcaaatgcctttaatgatgacacaactactcaccatagatgtgtaatatactggccccttt

SEQ ID NO: 863117 - DNA, 120 bp, Artificial Sequence
  ENSG00000263466_1 (sequence is synthesized)
cctcacttccacacattctcagtactagacaatggccaaacttttctgccaaacttcactttatgacccttctccggcaacagtgtagaaagcagacaagtgtgcctttaaagtattgat

SEQ ID NO: 863118 - DNA, 120 bp, Artificial Sequence
  ENSG00000259740_0 (sequence is synthesized)
ctggatcaatgagactagatattcaaagagatagagaagatgaaaagtgatcacctcaagggtagcaagaataagagatttataattgtctgaagatggcctaaaatcaccatgggcctt

SEQ ID NO: 863119 - DNA, 120 bp, Artificial Sequence
  ENSG00000259740_1 (sequence is synthesized)
aacaactgcttcatcatgagacaccttagaaggtgccccaaagctttcaggtcaagccacagtgaaatctctgctgcatagttggtcacatggaggacatcttcagggcttcctcttgga

SEQ ID NO: 863120 - DNA, 120 bp, Artificial Sequence
  ENSG00000259740_2 (sequence is synthesized)
ctcttcaaattcttctaccacctggggcattttgagcagtggggaaaaaggaaactaaatttatattcctccttagacgcttcctgaagaaaaggaaaaataaataaatactggaaaatg

SEQ ID NO: 863121 - DNA, 120 bp, Artificial Sequence
  ENSG00000259744_0 (sequence is synthesized)
tcttcctctctctccaattcatagatttgtatttattcactttttaataattcatcacagtcatttttggtgctcaaaatgtctatattgcagccagcagacccccttgaagctggcctc

SEQ ID NO: 863122 - DNA, 120 bp, Artificial Sequence
  ENSG00000259744_1 (sequence is synthesized)
cttgtgtctttttgtaacatgcccattagtctttaagcacttctttgctttctggtactagtattccaggcataatttgtacttttcctactccagtcatggaattcagccatttccaca

SEQ ID NO: 863123 - DNA, 120 bp, Artificial Sequence
  ENSG00000259744_2 (sequence is synthesized)
gtaatctctgcttttttcaaataccagtaagaaagtatttagaaactaagacctggaattaggaaagctaacttctgccagggtattgttgctttcagagcctttcagtggacagaacta

SEQ ID NO: 863124 - DNA, 120 bp, Artificial Sequence
  ENSG00000259744_3 (sequence is synthesized)
cctcctgagtagctgggattacaggcgtcagccaccatgcccggccaagaaatatgttttttaaaaaacacttatatcaataattccaattcaaatttacattacaggatttttgctgtt

SEQ ID NO: 863125 - DNA, 120 bp, Artificial Sequence
  ENSG00000259744_4 (sequence is synthesized)
caggatttttgctgtttacttcttttatttattatactgaaaatcttggttcctaataacattaacataattacttattttctttgtattacaatgtgtaaaaatgattcaaagttataa

SEQ ID NO: 863126 - DNA, 120 bp, Artificial Sequence
  ENSG00000261916_0 (sequence is synthesized)
atctcaccctggagctgcttaaatctgcaaagcaagacacaagaaaatcatgacgttacatgtctatacaagatttagaaagctccagacgagactagtagagctgtcactgtccttcgg

SEQ ID NO: 863127 - DNA, 120 bp, Artificial Sequence
  ENSG00000261916_1 (sequence is synthesized)
caggtgtgtagcctgtctgtgcttctttccttatcagtaaaacggggacaaaattgtactcacctcatgaactcttactgaggtctgatgagatagtgcatataaagtgctcatgccaac

SEQ ID NO: 863128 - DNA, 120 bp, Artificial Sequence
  ENSG00000261916_2 (sequence is synthesized)
cacagccattactgttgtcatcattgtggccatgagtactgtgcccgttgccataggaagcgcattggttgaagttcctgtaggagtttagaagtgagcacttctggagttgggcgtggt

SEQ ID NO: 863129 - DNA, 120 bp, Artificial Sequence
  ENSG00000261916_3 (sequence is synthesized)
agctcatgtctgtaatcccagcatattgggagactgaggtgggggatcacgtgaactcaggagtttgagaccagtctggcaagatggcgagactctgttgctaccaaaaaaaaaaaaaaa

SEQ ID NO: 863130 - DNA, 120 bp, Artificial Sequence
  ENSG00000259915_0 (sequence is synthesized)
aaaaatttaagagattgaggtcattttaactacatttttttaaatacggttacagatttttaactatgaataaggacgttagcatacttagactattcctcgttctccccacctccctta

SEQ ID NO: 863131 - DNA, 120 bp, Artificial Sequence
  ENSG00000259915_1 (sequence is synthesized)
tacttagttccttcatgttttcctgaactaattttatttttgccttatttttcttaaaaacttttaatttctgctattttgctatattttatgatatgttaagccatccttagtttataa

SEQ ID NO: 863132 - DNA, 120 bp, Artificial Sequence
  ENSG00000259915_2 (sequence is synthesized)
aatcatagataaacatactagaagttattataatttaaaattttgataattctgatttatgatttaccagtaattttttggtatgcaatagtatgtgtaatggttacttctagttctgta

SEQ ID NO: 863133 - DNA, 120 bp, Artificial Sequence
  ENSG00000259915_3 (sequence is synthesized)
gtaatggttacttctagttctgtattcactattgaaagcacgctttaaagcagcccagaagtctctttaaatccgtatttacctctacactaataaatctctataaattgttgtgtcttc

SEQ ID NO: 863134 - DNA, 120 bp, Artificial Sequence
  ENSG00000259915_4 (sequence is synthesized)
aatttaccattaataagcagtagaaaaaattgttttgctttgctttggtactactgaaattgtgtgttctaatatagtgaggccatgaggtgagtgactcctagtttgctattttttaaa

SEQ ID NO: 863135 - DNA, 120 bp, Artificial Sequence
  ENSG00000259915_5 (sequence is synthesized)
ttacaggctgttaagtcagatctgccaggatcaggtcctaaaagtgctatttttcacacatcaaaatccaagttgaaatactggcttgtttgttaagattaattaactataggtaatact

SEQ ID NO: 863136 - DNA, 120 bp, Artificial Sequence
  ENSG00000259915_6 (sequence is synthesized)
tgcaccttgcctcattaaaagaagaaaaaatgccccactatattcactcacagaattttagtagaaaaattaatgatgaatgtaaacaaacttcatgcaaatacaacatttttaccattt

SEQ ID NO: 863137 - DNA, 120 bp, Artificial Sequence
  ENSG00000259915_7 (sequence is synthesized)
aggaaaaagaaaaacatgatttttccccctccaaaatagagataattactgataacgcaatttgcagctgttttcttcatgtgacctctgttttttttttgttttcaagtatcagaaaat

SEQ ID NO: 863138 - DNA, 120 bp, Artificial Sequence
  ENSG00000259915_8 (sequence is synthesized)
tgcaaacttgaccatctgatctcaggtagttgagcagtattgggtgttaaaaaaatactggaattagacacatagtagctctgtcataattggatttgaactttgacaagtttcttagcc

SEQ ID NO: 863139 - DNA, 120 bp, Artificial Sequence
  ENSG00000259915_9 (sequence is synthesized)
caggtcactaagtgccttctatttgtaaaacctttgttcctaactgagctatattgaaaatatcagtgccctcttgagtgttcctatatcaagttgcattgcagcaattttaaaacattg

SEQ ID NO: 863140 - DNA, 120 bp, Artificial Sequence
  ENSG00000259915_10 (sequence is synthesized)
ttcaaacaaaatacattgactttgaaaaataaaaatatctttgaaaagaagtatgaaatgaaaataagtaaataaaaaatatgttgacttcctttaacttaagctttaagtggttttgtg

SEQ ID NO: 863141 - DNA, 120 bp, Artificial Sequence
  ENSG00000259915_11 (sequence is synthesized)
aaataaaacaagtgtaactgagtgtccaacctcaacacatcagtgatcatatttctgtgacaagaaccacattgcatctctgaagccctgtagtacttccccgggtttgtcctgcagacc

SEQ ID NO: 863142 - DNA, 120 bp, Artificial Sequence
  ENSG00000259915_12 (sequence is synthesized)
aaggcacattgtagttttaaacacagactggaaatgttcagaagattcagtggaagtcatggaccaggaaagatggagttggtggtaattcagacaattagtttatttgctctgatgatt

SEQ ID NO: 863143 - DNA, 120 bp, Artificial Sequence
  ENSG00000259915_13 (sequence is synthesized)
tctctaggttccagaagtacatgttttaaattatagtggctatttgtcccatgaattacctgaaattaaacagtttaattttaaaaaagcagtatttatttagaaattaaagatttttga

SEQ ID NO: 863144 - DNA, 120 bp, Artificial Sequence
  ENSG00000259915_14 (sequence is synthesized)
aaaatttgcatatggtaatgaataactttatcttctattagatgatcatcatgaaaaagtaaatgaatgtatttaaattaatgggtttcaaagattagacacaagccctggactttcaaa

SEQ ID NO: 863145 - DNA, 120 bp, Artificial Sequence
  ENSG00000259915_15 (sequence is synthesized)
atatatcttttagattataaaaataattcatgctaatcatagaaattttataatttacaggaaagtataaagaaaaataaatttatcagtttcatcatctggagataactgctgctccca

SEQ ID NO: 863146 - DNA, 120 bp, Artificial Sequence
  ENSG00000259915_16 (sequence is synthesized)
tttttctgtacttttttctttttccattcacaccaacaaaaatattttcactttaagtgtcagtgggattatattgtatatacagtttttgattcctccccttcccactcatatccttat

SEQ ID NO: 863147 - DNA, 120 bp, Artificial Sequence
  ENSG00000259915_17 (sequence is synthesized)
atgattatagaaaaatgtctctaattgctacataatattcccttgttttgaccattcaaatatcttgccagcttttaatgattataaatactgctacaataaagatccttgcatataaaa

SEQ ID NO: 863148 - DNA, 120 bp, Artificial Sequence
  ENSG00000248338_0 (sequence is synthesized)
agagatggacatctgtgaaccagaaagttggatctgcataaatagagaaaaattcatgtttatggagaagacaattgaatattgtgaagatgtctttcactaaaatgatctacaaattca

SEQ ID NO: 863149 - DNA, 120 bp, Artificial Sequence
  ENSG00000248338_1 (sequence is synthesized)
aagccatatctgtcaaaatcccagctgtcatttttatagctgtacacactgatacttaaaggcaacaagttgacaaatggacatgaatttcacctctgagagtttcataagctggtattg

SEQ ID NO: 863150 - DNA, 120 bp, Artificial Sequence
  ENSG00000248338_2 (sequence is synthesized)
aaatctacagctctctttttatagctcacagatgtcttccttaaggacccgagagccatctttgaaacataagtatcaagtcagatagcacacctatctttcagtttacgtgacaagtgc

SEQ ID NO: 863151 - DNA, 120 bp, Artificial Sequence
  ENSG00000248338_3 (sequence is synthesized)
cttggaaatacgacctattgaatgtctactttcatgaggattattgaatacgttggaaagaactgaatattattgcaaatcttagatttgagttgtttgcaataaatgcaaagacttgga

SEQ ID NO: 863152 - DNA, 120 bp, Artificial Sequence
  ENSG00000248338_4 (sequence is synthesized)
catatctgtcaaaatcccagctgtcatttttatagctgtacacactgatacttaaaggaatgtgaaataacagtgacactttgggaagtattttggcagtttttttaaaaataaaatgta

SEQ ID NO: 863153 - DNA, 120 bp, Artificial Sequence
  ENSG00000248338_5 (sequence is synthesized)
atactgcacgttctcacttataagtgggaactaaatgatgagaactcacgaatacaaagatgggaacaacgcatatggggcctatcagaggctggaacgtgggagaagggagagaatcag

SEQ ID NO: 863154 - DNA, 120 bp, Artificial Sequence
  ENSG00000248338_6 (sequence is synthesized)
taccacaaagatcctgtacatccatcatccagggccagcgtttgcctgattctaattccactgacattgaaatctacagctctctgtgagtcatttatcacacttattaaaatgttccat

SEQ ID NO: 863155 - DNA, 120 bp, Artificial Sequence
  ENSG00000248338_7 (sequence is synthesized)
tgtgaattggaatagcaattcactattatttcagagtgctgcccaaggggcattctatgcagcaaatcttaatgctttattgaaatagtagtttggttttaataaatgattctttgcaaa

SEQ ID NO: 863156 - DNA, 120 bp, Artificial Sequence
  ENSG00000227230_0 (sequence is synthesized)
aggaatcagaaataagcaatagcagcatggatttctgaagtactgttgaataaaatctgttctccgccttgtaattgttaagtgatcgggaggctctgctgcttgaggtcttggatcacc

SEQ ID NO: 863157 - DNA, 120 bp, Artificial Sequence
  ENSG00000227230_1 (sequence is synthesized)
agatcgaccgttgtttccttctggtgttttggaatgaactaatggaggaatctttcggaagttgaggctttcatcaaaaacacgatcaaccaactaatgggacgaaagcaaacctttatg

SEQ ID NO: 863158 - DNA, 120 bp, Artificial Sequence
  ENSG00000227230_2 (sequence is synthesized)
acatcttcaataaaccaattactctttctttttataagcacttcaaatgtatttcctttataaaatcgagattcatctacacaggttttattttcaaaatccaaaatatataactatgtt

SEQ ID NO: 863159 - DNA, 120 bp, Artificial Sequence
  ENSG00000227230_3 (sequence is synthesized)
aaatttaattcttccatggataagattttctccaaatggaaaacagatggtaaatagaaaaaaagctgagccatgtagatggacaatgagttcattttactcacattgccttaccagtgt

SEQ ID NO: 863160 - DNA, 120 bp, Artificial Sequence
  ENSG00000227230_4 (sequence is synthesized)
aaaataatgtttctttttcttttagtttcctatcttgttttttcctccccaaatccaggtgtcaaatttcttcacaagatacataaattgcaaattccaattaagtttacaaaaggaaaa

SEQ ID NO: 863161 - DNA, 120 bp, Artificial Sequence
  ENSG00000227237_0 (sequence is synthesized)
cgccgggaatcgtggttgcccgactcaagtcgcccgcgcgtgtcgcggagccccgcggcagttgtggttgggtggcttctgtgatccaaggaggaatgagccaaattgctacagaagttg

SEQ ID NO: 863162 - DNA, 120 bp, Artificial Sequence
  ENSG00000227237_1 (sequence is synthesized)
tcagcccagcccagctccaggacagaccataatgaaagatgctttaccttgaaaactaaatggacaggacttgatcacaaagcatcacctctcccctggactccagaggatcgttcctaa

SEQ ID NO: 863163 - DNA, 120 bp, Artificial Sequence
  ENSG00000227237_2 (sequence is synthesized)
ctgcttacttgacacatctattaggtatctcaaactggaaggtctaaaactgaactctccctcctccataatctgcctccccttagccttccctttgtcagtaaatgatgagttttttcc

SEQ ID NO: 863164 - DNA, 120 bp, Artificial Sequence
  ENSG00000267612_0 (sequence is synthesized)
ggcagaaattgggcataagacaatatgagaggtggtctcctcccttactttgaccaacatctccccaacccatacccctaagcccctggtaactaccattctgtctctccttctatgaat

SEQ ID NO: 863165 - DNA, 120 bp, Artificial Sequence
  ENSG00000267612_1 (sequence is synthesized)
ccaactttttaaattatacatacaagggagatcatctggtatttgttttcccatacctggcttatttcacttaacatattgtcctccacatccatccatgatgttgcaaatgacaatgtt

SEQ ID NO: 863166 - DNA, 120 bp, Artificial Sequence
  ENSG00000267612_2 (sequence is synthesized)
tccttttaaaacatacaccacttttgaatgtgttttattcagtctacaaagtcacctatgagacattcagtggggtcacagaaggaaagtgctttgcaagccaggcgaggtgcctcatat

SEQ ID NO: 863167 - DNA, 65 bp, Artificial Sequence
  ENSG00000267612_3 (sequence is synthesized)
acaaatagctgggattacaggcgcacgcccccacgcctgactaattttttttttttttgtatttt

SEQ ID NO: 863168 - DNA, 120 bp, Artificial Sequence
  ENSG00000267610_0 (sequence is synthesized)
gtgaactttcttgatactacctcactctttcaccttggcccattgctgggtttctgggtctgatttgagccccagccagtccgggagtgacagccaagaggtctacggagcaggcagccc

SEQ ID NO: 863169 - DNA, 120 bp, Artificial Sequence
  ENSG00000267610_1 (sequence is synthesized)
accccagggcctcctcagaccccagtcctgtggttgctctaaatcatggctcaggaagggcacaacctcaggacccatgtgcagagctcagcgagggtcacgtggtccccactctgctgc

SEQ ID NO: 863170 - DNA, 120 bp, Artificial Sequence
  ENSG00000267610_2 (sequence is synthesized)
ccaggggtctctctgctatgaaccccactcatcctagggacaacttggtccccaccaagccctccagagctggatcagtggaatcaggggaagaaggaggaagcttcacagtccacccca

SEQ ID NO: 863171 - DNA, 120 bp, Artificial Sequence
  ENSG00000267610_3 (sequence is synthesized)
tgggagcggcccctacccactgcgaaagaccaagtggagatggcaagtcatgtgcccgtgcacacgcgtgtggatgcgcatgcgcgtacccagcccagggacagccgagagggaacccga

SEQ ID NO: 863172 - DNA, 120 bp, Artificial Sequence
  ENSG00000267610_4 (sequence is synthesized)
caaagagatggaggtgggccagcgactgaggcagagacaaatagggctccaggagagcgcgacagacaggaaatccttctaaatcaggacacagccccaaaacgttattgctgttattac

SEQ ID NO: 863173 - DNA, 120 bp, Artificial Sequence
  ENSG00000267610_5 (sequence is synthesized)
tattagctctgtgtaaaggagcaagtgggagcaaggatccggtgcgagtgcagcccctgccacgcgcctccgggcgctgctccgggcgctgctggcagccattttagaccttggcagcca
